United States Patent Application Publication US 2025/0084491 A1 - sequence listing, part 29

SEQ ID NO: 549259 - DNA, 75 bp, synthetic construct
  source 1..75: mol_type = other DNA
atgcgccaggcgatatgcagccgtcagactccgcaacctggggcgtggcagagctgcaacatgaaggtggcgata

SEQ ID NO: 549260 - DNA, 75 bp, synthetic construct
  source 1..75: mol_type = other DNA
agagcgattgagtcaattaagcaggctgatgcagctgtaaagttgacacacgagaagttttcggcgcttgcggcg

SEQ ID NO: 549261 - DNA, 75 bp, synthetic construct
  source 1..75: mol_type = other DNA
gcgtggagatggctatggagcatatgcagtcgagcggttcgttaacatttggagattgctacatatcacttaacg

SEQ ID NO: 549262 - DNA, 75 bp, synthetic construct
  source 1..75: mol_type = other DNA
atccggtttttacaagctgatcgccagaagtcgcaaagctgttactcctggcacgttcgcccatcgtttcagtaa

SEQ ID NO: 549263 - DNA, 75 bp, synthetic construct
  source 1..75: mol_type = other DNA
ggtgttcatggcgatgaccgggttctgtgttctgtgctttattctggtctccacggtcattgaaccgttgtcgaa

SEQ ID NO: 549264 - DNA, 75 bp, synthetic construct
  source 1..75: mol_type = other DNA
ctttctgtggggaggaaaaaacagaggtaatgtatcagtgttttatgaatatgatcagaagccaatcgactgagt

SEQ ID NO: 549265 - DNA, 75 bp, synthetic construct
  source 1..75: mol_type = other DNA
ggaaccggcggcgacgaagcggcgctgttcgcgggcgatctgttccgtatgtacagccgttatgccgaagcccgc

SEQ ID NO: 549266 - DNA, 75 bp, synthetic construct
  source 1..75: mol_type = other DNA
agtaaagaagggcgatttattggtatcaacgcgccgcgttctggcgcttatgacaacggcttccaggtcgtgcat

SEQ ID NO: 549267 - DNA, 75 bp, synthetic construct
  source 1..75: mol_type = other DNA
atgccgaacgtttgcaggtcgttgaccgtaaccttgcccggcttgttgaggcgatgcagccagatgattgcctgg

SEQ ID NO: 549268 - DNA, 75 bp, synthetic construct
  source 1..75: mol_type = other DNA
gagctgcaacatgaaggtggcgatacctttatggggcatcaggagattttaggtacgcgcccgttaccgccgctg

SEQ ID NO: 549269 - DNA, 75 bp, synthetic construct
  source 1..75: mol_type = other DNA
ggtattcaggaatgtgataccaggtatcagaaagacaggggcttatggtatcccgtggggcgcattgcaggattt

SEQ ID NO: 549270 - DNA, 75 bp, synthetic construct
  source 1..75: mol_type = other DNA
gtattagttgcagataagcatatcgaagcagggaaagtctttaaaagatttataagtggtataaacgataatccg

SEQ ID NO: 549271 - DNA, 75 bp, synthetic construct
  source 1..75: mol_type = other DNA
cttgcaaaccttgaagaaagcaatcatggttgggttaacgaccctacctcggctatcaatctgcagcttaatgaa

SEQ ID NO: 549272 - DNA, 75 bp, synthetic construct
  source 1..75: mol_type = other DNA
atggatgaatactcacccaaaagacatgatatcgcacagcttaagtttctctgtgaaaccctgtatcatgactgt

SEQ ID NO: 549273 - DNA, 75 bp, synthetic construct
  source 1..75: mol_type = other DNA
ctacaggaatgcgcacgctatgcaggtgatcacgccgcatacatggccattaacgatgcaattgagcgcattgaa

SEQ ID NO: 549274 - DNA, 75 bp, synthetic construct
  source 1..75: mol_type = other DNA
ggcgaaaaacttactacgctccgtgacggcctagaaaaggcattacagcaatcttggaaagatgaacctattaca

SEQ ID NO: 549275 - DNA, 75 bp, synthetic construct
  source 1..75: mol_type = other DNA
attatagaaaaacagataaatcaagaagatggtaaagatatcttagttgtaaatttcgatgcttggctgtatcaa

SEQ ID NO: 549276 - DNA, 75 bp, synthetic construct
  source 1..75: mol_type = other DNA
ggcgaagaacgggagaaagcgagccgggaggcaacggccagacagcgcgagtgggagcagaaacagcaacaggcc

SEQ ID NO: 549277 - DNA, 75 bp, synthetic construct
  source 1..75: mol_type = other DNA
cggcaccaccggtattgccgtcggcatggcgaccgatattccaccgcataacctgcgtgaagtggctcaggcggc

SEQ ID NO: 549278 - DNA, 75 bp, synthetic construct
  source 1..75: mol_type = other DNA
gcaaggggtacgctcgtccagtgaaaaaattctgcgatattcgtgatctcgtcgttctgcgctttgatagtgtga

SEQ ID NO: 549279 - DNA, 75 bp, synthetic construct
  source 1..75: mol_type = other DNA
tggtgcgactacagcacaagcaccaacggcgggaaattatagtggggtcgtttctatcttaatgaccttagcatc

SEQ ID NO: 549280 - DNA, 75 bp, synthetic construct
  source 1..75: mol_type = other DNA
gtactggtgattcaggaggtgacgccacgcctagtactgcgttccggtaatgccgttgtgggtctggaaaatagc

SEQ ID NO: 549281 - DNA, 75 bp, synthetic construct
  source 1..75: mol_type = other DNA
acaacacaggttgttatcccgccgaacagccgcgactggcataccaatatgctgattgtgacaaataagcgcctg

SEQ ID NO: 549282 - DNA, 75 bp, synthetic construct
  source 1..75: mol_type = other DNA
atgggggattctgtgacaccggagataattggaaatacccctgtgacacatctgagtgacggttctttatgggat

SEQ ID NO: 549283 - DNA, 75 bp, synthetic construct
  source 1..75: mol_type = other DNA
atgaataaaatcagactttatatttatccgctatatctcggctttgttattgtgccgttgttggtgtggccgacg

SEQ ID NO: 549284 - DNA, 75 bp, synthetic construct
  source 1..75: mol_type = other DNA
atcaggcgtatttcacttctgcaattacaactttggttatcggctgaatatgcgcttttcttctgtgtaatgtgt

SEQ ID NO: 549285 - DNA, 75 bp, synthetic construct
  source 1..75: mol_type = other DNA
ggtttgcgttaggatattactgccattggcgcagcaaaaatagaagccagaggctgaagtggggggagtggggaa

SEQ ID NO: 549286 - DNA, 75 bp, synthetic construct
  source 1..75: mol_type = other DNA
accaccgtcgatggcttaagcgccgttgagcagctggtgtgtgaaattgccgcagaacgttggcgcagcggtaag

SEQ ID NO: 549287 - DNA, 75 bp, synthetic construct
  source 1..75: mol_type = other DNA
agccctgtgggcgcgtccggcagaaagctttgttccgcataatttagcgggagaaggaccgcgcggcggtgcgcc

SEQ ID NO: 549288 - DNA, 75 bp, synthetic construct
  source 1..75: mol_type = other DNA
ccatcaacgcggaactgtctggcacaaaaagggatttgatttcctgcttaacgataatacctacctgaaagttcg

SEQ ID NO: 549289 - DNA, 75 bp, synthetic construct
  source 1..75: mol_type = other DNA
gaacgggtggctggggcggcccgcttgagctgaaagccacaccgggaaaaaaaatcgtctatatcaccgccggta

SEQ ID NO: 549290 - DNA, 75 bp, synthetic construct
  source 1..75: mol_type = other DNA
ctacttaaaccactccatgtacgtgatcatggaccgtgcgttgccgtttattggtgatggtctgaaacccgttca

SEQ ID NO: 549291 - DNA, 75 bp, synthetic construct
  source 1..75: mol_type = other DNA
gtggaccgacggtaacgccaccagagtactggataatctgaaaaaactcgctgctgcgggcaaaaaaatcatcat

SEQ ID NO: 549292 - DNA, 75 bp, synthetic construct
  source 1..75: mol_type = other DNA
ctccagtaattctcggttttgttatcgtgccgtttttggtatggccgacggttattgccttagttatgcttatat

SEQ ID NO: 549293 - DNA, 75 bp, synthetic construct
  source 1..75: mol_type = other DNA
ctgctccttcccactgctttcacctttcctcggcccaggcgcagttatcgcacaggttatcggcgtattgattgg

SEQ ID NO: 549294 - DNA, 75 bp, synthetic construct
  source 1..75: mol_type = other DNA
atgacaccagcaagaaaatcaccgaacaaagcgatggtttactggcgaaggtgggaatggggatgggttctgccg

SEQ ID NO: 549295 - DNA, 75 bp, synthetic construct
  source 1..75: mol_type = other DNA
tcgtcggtcttacaagggatcaaaggcctgaattttcagactggtacggctgttcttaatggggtttccgggata

SEQ ID NO: 549296 - DNA, 75 bp, synthetic construct
  source 1..75: mol_type = other DNA
acaaagtattgttcgaggactatgccagagcgtatttcagttgaagaaatcaatgaggttaaaatttatccagag

SEQ ID NO: 549297 - DNA, 75 bp, synthetic construct
  source 1..75: mol_type = other DNA
ggagcaaattgctgcgcaaatgcgcaacaaaaaactgccgatggttgacgatctgcgcgatgaatctgaccacga

SEQ ID NO: 549298 - DNA, 75 bp, synthetic construct
  source 1..75: mol_type = other DNA
ggtagtgtttgttgattccaccggtcgtagctatgccattgacccgattacgctgccgtcggcgcgtggtcaggg

SEQ ID NO: 549299 - DNA, 75 bp, synthetic construct
  source 1..75: mol_type = other DNA
cacccgaacaaataattagcatactcagcaaaattgccagcgtaatgaagcctggcgcaaaagtttgcatcatgg

SEQ ID NO: 549300 - DNA, 75 bp, synthetic construct
  source 1..75: mol_type = other DNA
attactattcagatggtgcatttaacgccgcactgccttatgtattcgccaacaaccccacaacattgtacgatg

SEQ ID NO: 549301 - DNA, 75 bp, synthetic construct
  source 1..75: mol_type = other DNA
ctgaataaagcaggattccaggtagcagagcgtcacgataatttaggcgttgggcatacacttttgatatgccaa

SEQ ID NO: 549302 - DNA, 75 bp, synthetic construct
  source 1..75: mol_type = other DNA
tcgtctgtcctgcagggcatcaaaggcctcgattttaaaacgggtacagctgttcttagtggtgttgccggtgtg

SEQ ID NO: 549303 - DNA, 75 bp, synthetic construct
  source 1..75: mol_type = other DNA
tgggtttatgcaaatgagccaatatttcatgaacatccactgtctgttggcctttctggtattgtctatcacaag

SEQ ID NO: 549304 - DNA, 75 bp, synthetic construct
  source 1..75: mol_type = other DNA
ttgatggtattaccgcctcagatatcgtgttccggcgtaatccagaaaggcaaagtcttgaattaactgtccaga

SEQ ID NO: 549305 - DNA, 75 bp, synthetic construct
  source 1..75: mol_type = other DNA
ttggtgatggtctgaaacctgttcagcgccgcattgtgtatgcgatgtcagaactgggtctgaatgctaccgcca

SEQ ID NO: 549306 - DNA, 75 bp, synthetic construct
  source 1..75: mol_type = other DNA
ggttacggtttcgtctgcacctttaacgatctggtggcgcgtaaccgtgcaggtaaggctttgatcactttaccg

SEQ ID NO: 549307 - DNA, 75 bp, synthetic construct
  source 1..75: mol_type = other DNA
actaagtggtggagccggaaatgattctctgtatggtggcgaagggaacgatgtctatctcttcagtaaaggcga

SEQ ID NO: 549308 - DNA, 75 bp, synthetic construct
  source 1..75: mol_type = other DNA
aatcctggtacgccagctcaatcatttcattcaacagtttttttggggggcaccacgacttcgggcaatactttc

SEQ ID NO: 549309 - DNA, 75 bp, synthetic construct
  source 1..75: mol_type = other DNA
tgtctggtggccaacgtgcgcgggtggctctgctgcgcgcccttctcgcccagccaaaggcattattgcttgatg

SEQ ID NO: 549310 - DNA, 75 bp, synthetic construct
  source 1..75: mol_type = other DNA
ctgtccgggcagttttcttgtacaggtgagctttggctcaatgagcaacgcctcgatagcctgccgactgcacag

SEQ ID NO: 549311 - DNA, 75 bp, synthetic construct
  source 1..75: mol_type = other DNA
ttcttatgccaactataaaaccggcagttataatgtagtggttggttataacgctggcaaactattaacatcagg

SEQ ID NO: 549312 - DNA, 75 bp, synthetic construct
  source 1..75: mol_type = other DNA
cgacccacgacggccccggcattcgcacagtggtttttctgaaaggttgctcgctgggttgtcgctggtgtcaga

SEQ ID NO: 549313 - DNA, 75 bp, synthetic construct
  source 1..75: mol_type = other DNA
cgtttatgcagccggaaatggcggcggcgttactgcaagccagccacgaagccggtattcataccgcagtggaaa

SEQ ID NO: 549314 - DNA, 75 bp, synthetic construct
  source 1..75: mol_type = other DNA
atgaatgagtcagataaaggcgaagcattaaaacttactaatcaaagtaaaaacctgccctatctggcccaaaca

SEQ ID NO: 549315 - DNA, 75 bp, synthetic construct
  source 1..75: mol_type = other DNA
tgttctattttaacgtgcgagaaataccgccaaaaacagataaaaaaaatgtgatgcaagtgactatgcagcacg

SEQ ID NO: 549316 - DNA, 75 bp, synthetic construct
  source 1..75: mol_type = other DNA
ggtacggggcttaatggattttataatgctctgagtgagttgacaaataatgatacaaaactgactattactgtt

SEQ ID NO: 549317 - DNA, 75 bp, synthetic construct
  source 1..75: mol_type = other DNA
gcttgagcgtgcggggctaagtggaactttccatcaggatcccgcaactctgtctggcgggcaacgcgcacgcgt

SEQ ID NO: 549318 - DNA, 75 bp, synthetic construct
  source 1..75: mol_type = other DNA
aaaggtgacattgtcacgttaatggggccgtctggctgtggaaaatccactctgttttcatggatgattggtgca

SEQ ID NO: 549319 - DNA, 75 bp, synthetic construct
  source 1..75: mol_type = other DNA
ctcttctattttaacgtgcgagaaataccgccaaaaacagataaaaaaaatgtgatgcaagtcactatgcagcac

SEQ ID NO: 549320 - DNA, 75 bp, synthetic construct
  source 1..75: mol_type = other DNA
aatcaaaccattagaactacttgaagtattgcgacgaatagagaaacgtggagcactagagaagaccagaaaagt

SEQ ID NO: 549321 - DNA, 75 bp, synthetic construct
  source 1..75: mol_type = other DNA
agcttgttccatatggaaaaatgcgcccacgatttgactgactggaaactgtggccgcgtaacgctattacccat

SEQ ID NO: 549322 - DNA, 75 bp, synthetic construct
  source 1..75: mol_type = other DNA
gctggcgaaaggtcgcggtgcgaaacggatcatcggcgttgatatgctgccggaacgtctggcgatggcaaaaca

SEQ ID NO: 549323 - DNA, 75 bp, synthetic construct
  source 1..75: mol_type = other DNA
cgcttctcactggaacaggcgggtgaggcgtatgcgctgatggcaagtggcaaatgtgggaaagtcgtgattaat

SEQ ID NO: 549324 - DNA, 75 bp, synthetic construct
  source 1..75: mol_type = other DNA
gcttttctgctgcacagcgacgacagcgatgtgcgcatccgctactttacgccaacggttgaagtgccgatttgc

SEQ ID NO: 549325 - DNA, 75 bp, synthetic construct
  source 1..75: mol_type = other DNA
ttaatcacttcgtcatctgctgacggtaaattgttagaaattccatttaatccggtgtatcggaattttgacaaa

SEQ ID NO: 549326 - DNA, 75 bp, synthetic construct
  source 1..75: mol_type = other DNA
cccgttcccgacagtattaatgtgtggtggtctggatgcgatgcagacggactattacagcctgtatgaacgtta

SEQ ID NO: 549327 - DNA, 75 bp, synthetic construct
  source 1..75: mol_type = other DNA
ccgctctctgagcaggtcattatgctatttaagcagcttgaaccaatctcaaaacatcatcccctagtctttatc

SEQ ID NO: 549328 - DNA, 75 bp, synthetic construct
  source 1..75: mol_type = other DNA
taagcctcgcagaagcacgtgagaaacgcgatacggcacgtaaacaggttgcaaacggcattgatccagtagaag

SEQ ID NO: 549329 - DNA, 75 bp, synthetic construct
  source 1..75: mol_type = other DNA
acgtatgaaaatgcgtcgtcctcaccttgtccctttgtcaacgcaggtaatcgatcttttcaaccaactaaaacc

SEQ ID NO: 549330 - DNA, 75 bp, synthetic construct
  source 1..75: mol_type = other DNA
cgactgctaaattcgtagaaagcgtggacgtagctgttaacctcggcatcgatgctcgtaaatctgaccagaacg

SEQ ID NO: 549331 - DNA, 75 bp, synthetic construct
  source 1..75: mol_type = other DNA
cttaccgtgggatgggctctctgggcgcgatgtccaaaggttcttctgaccgttatttccagagcgacaacgccg

SEQ ID NO: 549332 - DNA, 75 bp, synthetic construct
  source 1..75: mol_type = other DNA
gcaaacagagtcagagaacgccttcgaaaagatagccagagagtggcatcaactgaagtctaccaaatggtcggc

SEQ ID NO: 549333 - DNA, 75 bp, synthetic construct
  source 1..75: mol_type = other DNA
cgctggctgcctctgctgtatctggtatggcgcatgcctggacgtctggtgacttcaatggcacggtcgatatcg

SEQ ID NO: 549334 - DNA, 75 bp, synthetic construct
  source 1..75: mol_type = other DNA
gctctattctcggcgccgtggtatttatcgtgttattcaacgtggtgcatctcggtctgcgttttggtcttgcgc

SEQ ID NO: 549335 - DNA, 75 bp, synthetic construct
  source 1..75: mol_type = other DNA
acatatcgaagaactcccgcaggtcatgagcgatgccttccgtattgcgcaatcaggccgccctggcccggtgtg

SEQ ID NO: 549336 - DNA, 75 bp, synthetic construct
  source 1..75: mol_type = other DNA
ccagtctctatgcaatggctggtgctggcatgacaaaattttctgcggatttgaaaatcagtaaaaatatcaaag

SEQ ID NO: 549337 - DNA, 75 bp, synthetic construct
  source 1..75: mol_type = other DNA
gggcggcaattctcaacgcattgcatcttaccgaagacaatattctgccgggtttgccgatccaggtggcaacca

SEQ ID NO: 549338 - DNA, 75 bp, synthetic construct
  source 1..75: mol_type = other DNA
atcgcgataaaccggacgcccgcgctctggcctggtatctccctgattcctatctctgcgttctgctcgacgggc

SEQ ID NO: 549339 - DNA, 75 bp, synthetic construct
  source 1..75: mol_type = other DNA
accaaaaaagtcggtcatgcggcgtctatcgtcgggatgacggtgatcggcgcgctggtagcaacctatgtccga

SEQ ID NO: 549340 - DNA, 75 bp, synthetic construct
  source 1..75: mol_type = other DNA
gtccaatcccgaaagcgtgcgatccattaagccattacggcctgattaatgccgttgccgcctgcgtggatgaca

SEQ ID NO: 549341 - DNA, 75 bp, synthetic construct
  source 1..75: mol_type = other DNA
cacgttacgctgggttatatcggaacaaatggggtaacgatgttaccacaaacgcaaagcttaatggtaacccct

SEQ ID NO: 549342 - DNA, 75 bp, synthetic construct
  source 1..75: mol_type = other DNA
aaacttgccagcggtaaagtaaaacggggtgagctacttgcttttgtcagtattgatcagaaaacaaatgttgtc

SEQ ID NO: 549343 - DNA, 75 bp, synthetic construct
  source 1..75: mol_type = other DNA
gacacctacggcatctctatccccatcactaaacacaactatctggtcagacatatcgaagaactcccgcaggtc

SEQ ID NO: 549344 - DNA, 75 bp, synthetic construct
  source 1..75: mol_type = other DNA
atgctgccaaacgcccggtgctttatctgggcggtggtgtgatcaatgcgcctgcgcgagtgcgtgaactggcgg

SEQ ID NO: 549345 - DNA, 75 bp, synthetic construct
  source 1..75: mol_type = other DNA
gcctatccgctcaatcgcccacgccagtggctgacctccggcgggctgggcacgatgggttttggcctgcctgcg

SEQ ID NO: 549346 - DNA, 75 bp, synthetic construct
  source 1..75: mol_type = other DNA
tagggcgtgacggcgtgattgaagtgacggtgacaattcgcgataaccaaccggagaaagtcaccatttctggca

SEQ ID NO: 549347 - DNA, 75 bp, synthetic construct
  source 1..75: mol_type = other DNA
tgaggcaacttttgatcaggctgtagctgccagcactcagtggagcgctccgctgaacgtagcagttacttataa

SEQ ID NO: 549348 - DNA, 75 bp, synthetic construct
  source 1..75: mol_type = other DNA
accagtagtaggtggtgtaggtgccattccattaatcacattatctggtgcggatggtgtgaaaaaaattttggc

SEQ ID NO: 549349 - DNA, 75 bp, synthetic construct
  source 1..75: mol_type = other DNA
caaagctgaacagtttagcgtctggtgaaatagatgttttaataggctcgactattctggatgtcggtgttgatg

SEQ ID NO: 549350 - DNA, 75 bp, synthetic construct
  source 1..75: mol_type = other DNA
aattttccgaatatttttactggtggtatgcctgccgttacagcgacgaaggcagaaattcaatctggaacaaca

SEQ ID NO: 549351 - DNA, 75 bp, synthetic construct
  source 1..75: mol_type = other DNA
taaagcggagtcctattcattaggctttaatgctggcggcacctcagtttataagggggggctgcccgaaaacat

SEQ ID NO: 549352 - DNA, 75 bp, synthetic construct
  source 1..75: mol_type = other DNA
ccattgatttctatcactgactacgaaaacaagccggtaactgttctcgctgctgcaggtaattataattcacct

SEQ ID NO: 549353 - DNA, 75 bp, synthetic construct
  source 1..75: mol_type = other DNA
atgcttttacctctcaaccgtttcgcggcaattctgccggtgttgttttccccgccgataatctcagcgaagcgc

SEQ ID NO: 549354 - DNA, 75 bp, synthetic construct
  source 1..75: mol_type = other DNA
agcaaaatgatgattatcgtatttcgctggaacaaggtactccaggctttgagccaccactgacaggtgaaacac

SEQ ID NO: 549355 - DNA, 75 bp, synthetic construct
  source 1..75: mol_type = other DNA
ggcttgccaattcaggtggctaccacaggacactcaaaagtgatgattccactgaagccggaagtggatatcgac

SEQ ID NO: 549356 - DNA, 75 bp, synthetic construct
  source 1..75: mol_type = other DNA
gccgaaccaaagaagcatttgctacgccagtaattggtggtgtagatggaattcctcagattgcatttactgact

SEQ ID NO: 549357 - DNA, 75 bp, synthetic construct
  source 1..75: mol_type = other DNA
tggtattgtggaagatccggtgaccggcaatgccaatggcccgatgggtgcatggttggtacatcacaacgtatt

SEQ ID NO: 549358 - DNA, 75 bp, synthetic construct
  source 1..75: mol_type = other DNA
caaaggtattaggtttgggaaattgcacggtctggcaaacgtcgctggcaggaaaacaccgcgtgactatcgaaa

SEQ ID NO: 549359 - DNA, 75 bp, synthetic construct
  source 1..75: mol_type = other DNA
aagagaatccgttccttggttaccgagcagtacgaatctacccggaatttactggcctgtttcgtactcagctac

SEQ ID NO: 549360 - DNA, 75 bp, synthetic construct
  source 1..75: mol_type = other DNA
tttatgttggattcgttaagttttatagacgatatactttagaggtattaatggcatttgctgtacttcagagca

SEQ ID NO: 549361 - DNA, 75 bp, synthetic construct
  source 1..75: mol_type = other DNA
cccggcaaaatcctgacgctgaacggcgatctggcccgacgcctgaccacggattatggcgacacctgggcgctg

SEQ ID NO: 549362 - DNA, 75 bp, synthetic construct
  source 1..75: mol_type = other DNA
taaagtgatgggcaccggttttggtgggattgctgggggtaaaacaattgcttatccgaaaatttctaataatca

SEQ ID NO: 549363 - DNA, 75 bp, synthetic construct
  source 1..75: mol_type = other DNA
ggtctttgcccggcttcagtttgtgggaagcggaaaagacctggcacgcagtgtggcggagagtcttctgtcatc

SEQ ID NO: 549364 - DNA, 75 bp, synthetic construct
  source 1..75: mol_type = other DNA
tctatgttggttttgttaaattttatagaagatatactttagaagtattaatggcatttgctgtacttcaaagta

SEQ ID NO: 549365 - DNA, 75 bp, synthetic construct
  source 1..75: mol_type = other DNA
tatttctgtggtttgacattcgatctagatattgttattgacttaagtgaattgctcagaggtcaaagtcaaatc

SEQ ID NO: 549366 - DNA, 75 bp, synthetic construct
  source 1..75: mol_type = other DNA
atgaatttaatgttccgagtggtttcattacaaagagggattttagccgctaaaaaagcgttactggcttccttc

SEQ ID NO: 549367 - DNA, 75 bp, synthetic construct
  source 1..75: mol_type = other DNA
cgcgtaaaaaggccaatgacgccgtttttaaggctcttaatgaacagcaagaaacactgcaaagcgatgctgata

SEQ ID NO: 549368 - DNA, 75 bp, synthetic construct
  source 1..75: mol_type = other DNA
cattacaaagagggattttagccgctaaaaaagctttaatagttccttttgtggcgtacgtcatggcattaccgg

SEQ ID NO: 549369 - DNA, 75 bp, synthetic construct
  source 1..75: mol_type = other DNA
atgaagacactggcgttctcgaagcccgtctgcagaaagatggcagtgtgcgttttcgtgatcggaggaatggcg

SEQ ID NO: 549370 - DNA, 75 bp, synthetic construct
  source 1..75: mol_type = other DNA
ctttgtaatcagccgcccggatgtggatttacatcgtcagcgtagtgaacagtactaccacgaatatatcaggca

SEQ ID NO: 549371 - DNA, 75 bp, synthetic construct
  source 1..75: mol_type = other DNA
actgcgtcgtgaacgccgtgaagcccgtgcagctgcgcgggaagatttgcgcgcgcgttatcttgcatggaagga

SEQ ID NO: 549372 - DNA, 75 bp, synthetic construct
  source 1..75: mol_type = other DNA
cgcaggtcattacctcagtacccaaagaccagcctgtaaaatgcaccaactttaccgcaggaatgcccggtcagg

SEQ ID NO: 549373 - DNA, 75 bp, synthetic construct
  source 1..75: mol_type = other DNA
aacgagctgtaattctggtagccgcctggcttggcgatgctcgcctgatcgacaacaaaatggtcgagctggcgt

SEQ ID NO: 549374 - DNA, 75 bp, synthetic construct
  source 1..75: mol_type = other DNA
tcagcaaactgttcaacctggtccagccggacatcgcctgcttcggtgaaaaggattttcagcaactggcgctga

SEQ ID NO: 549375 - DNA, 75 bp, synthetic construct
  source 1..75: mol_type = other DNA
aacggtacagaaacccacacctatgttgatgttcccggtctttctaccatgctggaaggtgccagccgtccgggg

SEQ ID NO: 549376 - DNA, 75 bp, synthetic construct
  source 1..75: mol_type = other DNA
attatgttgggcggttgtgcgggctctcacccggtagcatgaatttcatgctaccagcctaccgacgccaataca

SEQ ID NO: 549377 - DNA, 75 bp, synthetic construct
  source 1..75: mol_type = other DNA
ttgacgttcctggcctttcgaccatgctggaaggtgccagccgtccgggacattttcgcggcgtgtcgaccatcg

SEQ ID NO: 549378 - DNA, 75 bp, synthetic construct
  source 1..75: mol_type = other DNA
tggcgaacgggatctcgatgaaattattgctattgccgggcaagaactgaatgaaaaaggtttccgttccgatga

SEQ ID NO: 549379 - DNA, 75 bp, synthetic construct
  source 1..75: mol_type = other DNA
cttccggcaaaagacacaagcctggtttatggcgatacctattcctatttttcgacggtggcatcacaggttcag

SEQ ID NO: 549380 - DNA, 75 bp, synthetic construct
  source 1..75: mol_type = other DNA
gcgtatccaggatatttttaccagttctgtcaggttgctggttgatgcgacgttgatctcaacaatcagtgtgag

SEQ ID NO: 549381 - DNA, 75 bp, synthetic construct
  source 1..75: mol_type = other DNA
cgccgaagtcatggagtccggcatgtttggtgtgcagggaacaccggattgctttaaagctatgctcaaatcagt

SEQ ID NO: 549382 - DNA, 75 bp, synthetic construct
  source 1..75: mol_type = other DNA
gataagttccgtcgtccggtaaacgagcggtcaattgcccgctattttctggcagcgggggctattggcgcgctg

SEQ ID NO: 549383 - DNA, 75 bp, synthetic construct
  source 1..75: mol_type = other DNA
ctgttggtgttcgggcaattttagggaacgatttgagcctactagcaatcaaagctttgttaattcatgcgtcaa

SEQ ID NO: 549384 - DNA, 75 bp, synthetic construct
  source 1..75: mol_type = other DNA
catgcagaggatgatccagacggtttagagcatggtttagctgtgtcttcagcctttttatttggaccaataagt

SEQ ID NO: 549385 - DNA, 75 bp, synthetic construct
  source 1..75: mol_type = other DNA
ctaaaaaagcgttactggcttccttcgtggcgtcaatcatggcattaccggcgcaagccggtatccctgtcatcg

SEQ ID NO: 549386 - DNA, 75 bp, synthetic construct
  source 1..75: mol_type = other DNA
aaatgcgttccgtttgaaggcctgaaagaacgtccgtttaaattacgcctcagcattatcactggcgatcgtcct

SEQ ID NO: 549387 - DNA, 75 bp, synthetic construct
  source 1..75: mol_type = other DNA
aaatcactggcagaatggattgaagactgggccgactaccttgtgggctttgatgctaatggtggcgccattcag

SEQ ID NO: 549388 - DNA, 75 bp, synthetic construct
  source 1..75: mol_type = other DNA
acagaagcatttaacctgtttatcaagaaatttcagtctgttagcttgcttgaggagtacctgcgttcatcacct

SEQ ID NO: 549389 - DNA, 75 bp, synthetic construct
  source 1..75: mol_type = other DNA
tggctgtaaaacagcagatggcgatgatcctcggcggaatttgcggtgtattaacgctggctggcggcgcggggt

SEQ ID NO: 549390 - DNA, 75 bp, synthetic construct
  source 1..75: mol_type = other DNA
agaaatggctaacgaatttcgtgatctgcttgttgaaaaattcaaagacagcaaagtagaaacctttattggtac

SEQ ID NO: 549391 - DNA, 75 bp, synthetic construct
  source 1..75: mol_type = other DNA
gaagtcactggcagaatggattgaagactgggccgactaccttgtgggctttgatgctaatggtgacgccattca

SEQ ID NO: 549392 - DNA, 75 bp, synthetic construct
  source 1..75: mol_type = other DNA
tgtcgaagcgaagaccaaagatattatgccagtggcatttgaatttaaatgcgttccgtttgaaggtctgaaaga

SEQ ID NO: 549393 - DNA, 75 bp, synthetic construct
  source 1..75: mol_type = other DNA
cgatcattaagcgtcactggatgtcgttgacggcaggcgtactgacggcaacggtggtggcagtgaccagctcag

SEQ ID NO: 549394 - DNA, 75 bp, synthetic construct
  source 1..75: mol_type = other DNA
aaccagaccgctgattttgaagataatgacttcagcggcaaacgctccctgatggagtctgtcgaagcgaagacc

SEQ ID NO: 549395 - DNA, 75 bp, synthetic construct
  source 1..75: mol_type = other DNA
atgcgtgccgtcagtgtgcttaacctgggtactattgatgaaccaggtcacgcagataacaccgccactctcaaa

SEQ ID NO: 549396 - DNA, 75 bp, synthetic construct
  source 1..75: mol_type = other DNA
cagtggcatttgaatttaaatgcgttccgtttgaaggcctgaaagaacgtccgtttaaattacgcctcagcatta

SEQ ID NO: 549397 - DNA, 75 bp, synthetic construct
  source 1..75: mol_type = other DNA
accgttctctgccctgttgtctgttaacggcgagcgtaactcccagaagtcactggcagaatggattgaagactg

SEQ ID NO: 549398 - DNA, 75 bp, synthetic construct
  source 1..75: mol_type = other DNA
atatggtcgaatctgttccatatcggcattctggggattttcttcgggcacctgtttggcatgttaacgccgcac

SEQ ID NO: 549399 - DNA, 75 bp, synthetic construct
  source 1..75: mol_type = other DNA
ccactctcaaactgaaaaagacagcaccgttctctgccctgttgtctgttaacggcgagcgtaactcccagaagt

SEQ ID NO: 549400 - DNA, 75 bp, synthetic construct
  source 1..75: mol_type = other DNA
ttaaatcgcttccgtttccgtggtgcgctttccactgccagcatcgatgactttacccgttattctaaagatctt

SEQ ID NO: 549401 - DNA, 75 bp, synthetic construct
  source 1..75: mol_type = other DNA
ccactctcaaactgaaaaagacagcaccgttctctgctctgttgtctgttaatggcgagcgtaactcccagaagt

SEQ ID NO: 549402 - DNA, 75 bp, synthetic construct
  source 1..75: mol_type = other DNA
ctttcatgtcggttgtctataccatcgagcatgtcagcacggttccgttgcgtcactggcatgctttcgtcctgg

SEQ ID NO: 549403 - DNA, 75 bp, synthetic construct
  source 1..75: mol_type = other DNA
cccgtgagccggtggtatatacccttgagcaggttgccacaataccggaaaagcagtggcatgcttttgttctgg

SEQ ID NO: 549404 - DNA, 75 bp, synthetic construct
  source 1..75: mol_type = other DNA
caattaatcaaatccatgcccttatttctgctcagagtgttaatgaaattatcagtaagattggtgccgatgctg

SEQ ID NO: 549405 - DNA, 75 bp, synthetic construct
  source 1..75: mol_type = other DNA
atgtatgagggtaagcaaaccggaagaaatcgctgcatgtttattgacgaacaaaatgtgattaaccgagtttaa

SEQ ID NO: 549406 - DNA, 75 bp, synthetic construct
  source 1..75: mol_type = other DNA
ttacccgttattctaaagatcttgcagatgaaggcacccgctgctttatcgatgccgataatatgcgagccgtca

SEQ ID NO: 549407 - DNA, 75 bp, synthetic construct
  source 1..75: mol_type = other DNA
catccggacggcagcgaaatgatgaagctggtgggctgggcgcaaagcatcgtcactttccagggcggtgcatcg

SEQ ID NO: 549408 - DNA, 75 bp, synthetic construct
  source 1..75: mol_type = other DNA
gcgcattttgacgcatttcaggacgggttactttcttttaccgcggcattaaccgattacaaaatttacctttta

SEQ ID NO: 549409 - DNA, 75 bp, synthetic construct
  source 1..75: mol_type = other DNA
gctcattttgatgaatttcaggaagggttactttcttttacggcagcattaacagattacaaaatttatttgctg

SEQ ID NO: 549410 - DNA, 75 bp, synthetic construct
  source 1..75: mol_type = other DNA
aagagccactggatgtggttattggacgggcagacagagcaatgtacgaaggtaaacagaccggcaggaatcgtt

SEQ ID NO: 549411 - DNA, 75 bp, synthetic construct
  source 1..75: mol_type = other DNA
cgccaaaatgttcaccctgcaagtacaggatccgaaaattgatcgtgtgcgcacccgcgcgtggaccaaagtgaa

SEQ ID NO: 549412 - DNA, 75 bp, synthetic construct
  source 1..75: mol_type = other DNA
cgcccggatgtggtggcacatatctctgaccatgtgttctatgccaacgccaataaagcagctacgccgctggtg

SEQ ID NO: 549413 - DNA, 75 bp, synthetic construct
  source 1..75: mol_type = other DNA
ttatctcggcaaagatcccaacagcactaaagcggatgattacaccggaccggcaaccgatctgctgttaaagct

SEQ ID NO: 549414 - DNA, 75 bp, synthetic construct
  source 1..75: mol_type = other DNA
gccgtttgcggtggttcaggtgcagcggcggtttgcaccggaagctgtcagccattcactggcactggcggcgtc

SEQ ID NO: 549415 - DNA, 75 bp, synthetic construct
  source 1..75: mol_type = other DNA
gtcggtggtgaggagttttgtgtgattctgccaggcgcgagtctgacggaggctgcggaggtcgcagaacgtatt

SEQ ID NO: 549416 - DNA, 75 bp, synthetic construct
  source 1..75: mol_type = other DNA
tggaccatttcgacggtgtgctggtgcgcgtccatacgctaagcgaaggcgtgcgcggcgatttcggcagtatca

SEQ ID NO: 549417 - DNA, 75 bp, synthetic construct
  source 1..75: mol_type = other DNA
aaagaaaccggtattaaagtcgtttacgatgttttcgattccaacgaagtactggaaggaaaattaatggcgggg

SEQ ID NO: 549418 - DNA, 75 bp, synthetic construct
  source 1..75: mol_type = other DNA
agcaccggctttgacctggtggtgccgtcagcaagctttcttgaacgccagctgacagcgggagttttccagccg

SEQ ID NO: 549419 - DNA, 75 bp, synthetic construct
  source 1..75: mol_type = other DNA
tattacagaccatgaacacacaggaatatgaagatatccgggctgccggaagtgatgaacgccgtgagctgacac

SEQ ID NO: 549420 - DNA, 75 bp, synthetic construct
  source 1..75: mol_type = other DNA
atgaccgccttaaataaaaaatggctttcgggtctggttgcgggtgctctgatggccgtctctgtcggcacgctc

SEQ ID NO: 549421 - DNA, 75 bp, synthetic construct
  source 1..75: mol_type = other DNA
gattccaaaagaaggggcgatggcgttctttgatgtattcgccatgcctgcggatgccaaaaaaaagacgaagcc

SEQ ID NO: 549422 - DNA, 75 bp, synthetic construct
  source 1..75: mol_type = other DNA
tcttcccaatacatcaatgatctggcgaatggtgacatctgcgtggcgattggctgggcgggcgatgtctggcag

SEQ ID NO: 549423 - DNA, 75 bp, synthetic construct
  source 1..75: mol_type = other DNA
cagtctgacagcgcgcctcgatgccgatggctacagtcaggccagcattatcagtgtcctggcgatggagggtgc

SEQ ID NO: 549424 - DNA, 75 bp, synthetic construct
  source 1..75: mol_type = other DNA
aacaagcatatgaacagggattcagccagcgcggtgcacagtgggggaaacaaacgctcaccattggttcgacgc

SEQ ID NO: 549425 - DNA, 75 bp, synthetic construct
  source 1..75: mol_type = other DNA
tgcagtccatgaacgcacaggaatatgaagatatccgggctgccggaagtgatgaacgccgtgagctgactcacg

SEQ ID NO: 549426 - DNA, 75 bp, synthetic construct
  source 1..75: mol_type = other DNA
ttcaggccatgaacgcacaggaatatgaagatatccgggctgccggaagtgatgaacgccgtgagctgactcacg

SEQ ID NO: 549427 - DNA, 75 bp, synthetic construct
  source 1..75: mol_type = other DNA
gtcgttcaggtgcaacatatcttcacgcctgtcgcgatcagtcacacgctggcgcttgccgcgacactggatgcg

SEQ ID NO: 549428 - DNA, 75 bp, synthetic construct
  source 1..75: mol_type = other DNA
atgaacggcgagtacggcagcgagtttggcggctttttccccgtccaggtccgtttcacgcctgcccacgaacgt

SEQ ID NO: 549429 - DNA, 75 bp, synthetic construct
  source 1..75: mol_type = other DNA
tgctgcgggaagcgatatgcgccgtaatctcactcacgaggtgatgcgtaaagtggacgcaccggctaactggat

SEQ ID NO: 549430 - DNA, 75 bp, synthetic construct
  source 1..75: mol_type = other DNA
atgaaaactgaactgaccctgaatgtattacagaccatgaatgcacaggaatatgaagatatccgggctgccgga

SEQ ID NO: 549431 - DNA, 75 bp, synthetic construct
  source 1..75: mol_type = other DNA
ggcactggcggcgtcacttgatgcgcagggatacagtgttaacgacatcatccatatcctgatggcagaaggagg

SEQ ID NO: 549432 - DNA, 75 bp, synthetic construct
  source 1..75: mol_type = other DNA
gagtatggcagtgagttcgggggctttttccccgtccaggtacgcttcacgcccgttcatgaacgcttccatctg

SEQ ID NO: 549433 - DNA, 75 bp, synthetic construct
  source 1..75: mol_type = other DNA
gaatataatgccgaatacggcggactcttcccggtgcagtgtcgtttcacgccagcgcatgagcatttccatatc

SEQ ID NO: 549434 - DNA, 75 bp, synthetic construct
  source 1..75: mol_type = other DNA
tactgaaaaccatgatccccagcgagttcgaggattaccgcaacggcggcaatgacctgcgccgcgccctgacgc

SEQ ID NO: 549435 - DNA, 75 bp, synthetic construct
  source 1..75: mol_type = other DNA
cactacagaccatgaacgcacaggaatatgaagaaatccgggctgccggaagcgataaacgccgtaagctcacac

SEQ ID NO: 549436 - DNA, 75 bp, synthetic construct
  source 1..75: mol_type = other DNA
gcctgtcgctatcagtcacacgctggcgcttgccgcgacacttgatgcgcagggatacagtgttaacgacatcat

SEQ ID NO: 549437 - DNA, 75 bp, synthetic construct
  source 1..75: mol_type = other DNA
aagatactggagatgccaggcactatggacccgttggcttttgccgactttatctataacgaatgcactcctgat

SEQ ID NO: 549438 - DNA, 75 bp, synthetic construct
  source 1..75: mol_type = other DNA
ctaatttgcttattggtattgaagcagatggcgatatcgaagaaattattcaggcggcgggaagcgtggcgaccg

SEQ ID NO: 549439 - DNA, 75 bp, synthetic construct
  source 1..75: mol_type = other DNA
ttccgtactctactggaatccaccgtctgggtgcctggtacggcggcgcagggcgaggctgtggttgaagatagc

SEQ ID NO: 549440 - DNA, 75 bp, synthetic construct
  source 1..75: mol_type = other DNA
aatggagatgttaccgtcaaattccggtatggctcagtcaccaataatttagtttttataaaccaacccaacttg

SEQ ID NO: 549441 - DNA, 75 bp, synthetic construct
  source 1..75: mol_type = other DNA
gcagcaggagattatccagtccgtacagcaaaaagggagcagaaccactgttacttctggtcacggtacagggaa

SEQ ID NO: 549442 - DNA, 75 bp, synthetic construct
  source 1..75: mol_type = other DNA
gttcttaactcggaagaatcaccgttcgtcacaccacaattcatcaagcagaagcttctggaatatggcgggcgc

SEQ ID NO: 549443 - DNA, 75 bp, synthetic construct
  source 1..75: mol_type = other DNA
ggaaggtaaattagaaggttggcaggaaggtatgcatgaacaagccattaaaattgctttgcgcatgctggaaca

SEQ ID NO: 549444 - DNA, 75 bp, synthetic construct
  source 1..75: mol_type = other DNA
gcaatgcggcgatacctcccgtttcacccgttttattgaggagattgccgaacgttcaccactacaaaaggagag

SEQ ID NO: 549445 - DNA, 75 bp, synthetic construct
  source 1..75: mol_type = other DNA
gaaaagagatgaggggctatcttgagtatctcggcaatatgctgctggttgaacggattacaaatgctgctgtat

SEQ ID NO: 549446 - DNA, 75 bp, synthetic construct
  source 1..75: mol_type = other DNA
ccgtcaagtttggcgagtggttggactttgagtacggaatagctgtagcggatgcctttgtgtctatgacctcca

SEQ ID NO: 549447 - DNA, 75 bp, synthetic construct
  source 1..75: mol_type = other DNA
caggaggggaaattggagggtttgcagaaaggcaaagtagaaggtatgcatgaacaagccattaaaattgccttg

SEQ ID NO: 549448 - DNA, 75 bp, synthetic construct
  source 1..75: mol_type = other DNA
atgaacaagccattaaaattgccttgcgcatgctggagcagggctttgatcgtgacctggtgctcgcggccaccc

SEQ ID NO: 549449 - DNA, 75 bp, synthetic construct
  source 1..75: mol_type = other DNA
acgaaaaagcccatgcgaacgacatcaagaaacgttttgccaatcgcagcgtaaccaccgggcagattatcctgt

SEQ ID NO: 549450 - DNA, 75 bp, synthetic construct
  source 1..75: mol_type = other DNA
gtcggcaagtaataaccgtatttctgaagatattaattggtttcccgggattagcctggaacacgcattacgcaa

SEQ ID NO: 549451 - DNA, 75 bp, synthetic construct
  source 1..75: mol_type = other DNA
tattgttctgtgcctgggttatagctttgattgtgattttattttgggttattaaatatcacagacatctccatt

SEQ ID NO: 549452 - DNA, 75 bp, synthetic construct
  source 1..75: mol_type = other DNA
tttttattttcgaaagtacattagagccagaaaagttttatcaaatagctgatgttttttgcctgacatcaacat

SEQ ID NO: 549453 - DNA, 75 bp, synthetic construct
  source 1..75: mol_type = other DNA
ggcactggcggcgtcactggatacgcaggggtacagcgttaatgacatcattcatattctgatggcggaaggtgg

SEQ ID NO: 549454 - DNA, 75 bp, synthetic construct
  source 1..75: mol_type = other DNA
ggcactggcggcgtcactggacgcgcaggggtacagtgttaacgacatcatccatatcctgatggcagaaggagg

SEQ ID NO: 549455 - DNA, 75 bp, synthetic construct
  source 1..75: mol_type = other DNA
tgatcatcgacggtatcaaaaccaacgttgatctgcagatccgcatcatgaatgacgaaaacttccagcatggtg

SEQ ID NO: 549456 - DNA, 75 bp, synthetic construct
  source 1..75: mol_type = other DNA
gcgatattactctggtcactaaccggggtacagggacattttcacaggtgtttgatttcgtagaaaaagacgggt

SEQ ID NO: 549457 - DNA, 75 bp, synthetic construct
  source 1..75: mol_type = other DNA
ccagatgatttccgctattattattttgctcacagccgcctggatgttctggcgcacctggcgtggcgaacgctt

SEQ ID NO: 549458 - DNA, 75 bp, synthetic construct
  source 1..75: mol_type = other DNA
gaagcgctggagcggactggatacactcgcccggcgtgcgccgtatttctccagcgccctgattgccattgttgg

SEQ ID NO: 549459 - DNA, 75 bp, synthetic construct
  source 1..75: mol_type = other DNA
attgtctttgtcggattgacggcgtatgacactcagaaactgaaaaatatgggtgagcagattgatacccgcgac

SEQ ID NO: 549460 - DNA, 75 bp, synthetic construct
  source 1..75: mol_type = other DNA
cgctcgcgatagtggtggcctggttgccgctctccactgacagctatggtctggccggagtattcatgttgatca

SEQ ID NO: 549461 - DNA, 75 bp, synthetic construct
  source 1..75: mol_type = other DNA
atgtttgtgctggtttttgtggcatcgggtgggaatagcacgtggtgtgggtggcttttttttgaacgttttcac

SEQ ID NO: 549462 - DNA, 75 bp, synthetic construct
  source 1..75: mol_type = other DNA
ataccgtgacactgtatgcgaaggggctgacctgtgaagccgacaccctcggctcctgtggttacgtttatctgg

SEQ ID NO: 549463 - DNA, 75 bp, synthetic construct
  source 1..75: mol_type = other DNA
ttcagcatcaggggcgctattaccatgaatacagtatgcacattactgttgagcgtgattcccccatcggccagc

SEQ ID NO: 549464 - DNA, 75 bp, synthetic construct
  source 1..75: mol_type = other DNA
ctgtattaatgcttgtgaaaacaacattctgcaacgcggcgcgggcggctatccgagcgttaatttcaaaaataa

SEQ ID NO: 549465 - DNA, 75 bp, synthetic construct
  source 1..75: mol_type = other DNA
gctgaactggcgcagtctatctccatgacccgtgcggaagcgaaagctgcttttagcaatgatatggtttatatg

SEQ ID NO: 549466 - DNA, 75 bp, synthetic construct
  source 1..75: mol_type = other DNA
atggaagagccgtgcatctggttcagcggattctgcagccagggggacggagcctgttttgaagggcgctggcac

SEQ ID NO: 549467 - DNA, 75 bp, synthetic construct
  source 1..75: mol_type = other DNA
atgcattcactccaacgaaaagttttacgtactatttgcccggatcaaaaaggtctgatcgcgcgtattaccaat

SEQ ID NO: 549468 - DNA, 75 bp, synthetic construct
  source 1..75: mol_type = other DNA
aaggcatcgccctgccgatcctgccgtggtggaatgcggttgccatcaacgacgtacctgcgcagagtgatttct

SEQ ID NO: 549469 - DNA, 75 bp, synthetic construct
  source 1..75: mol_type = other DNA
gctgattagccagcaagggctggaaagcgccctcaaccagccactggcgcggattctggaacaggtgcaactggc

SEQ ID NO: 549470 - DNA, 75 bp, synthetic construct
  source 1..75: mol_type = other DNA
caggcggtgattggtcgcccgatcaacttccaggggctgggcggcgatgaagcaaacgcccaggcgcaagggatt

SEQ ID NO: 549471 - DNA, 75 bp, synthetic construct
  source 1..75: mol_type = other DNA
cattcttccaggagcaggccagactgataggcagcgtgaaaggcgtcggcgatatcaccgtcgcgtcgctgattg

SEQ ID NO: 549472 - DNA, 75 bp, synthetic construct
  source 1..75: mol_type = other DNA
taagcttcagtcagaaggatacgatgtggttgtgatcaacccacgacaggctagggattttgcccgttcaatggg

SEQ ID NO: 549473 - DNA, 75 bp, synthetic construct
  source 1..75: mol_type = other DNA
caatcgacgggagattagtgctctaactggcgtcgctcctctaaacagagactccgggaaaatgcgagggaaacg

SEQ ID NO: 549474 - DNA, 75 bp, synthetic construct
  source 1..75: mol_type = other DNA
aagaatcaccgcgagggtgaggcactctttttatcaggttgctgcggcacttgccggggcatggcgtgcggatga

SEQ ID NO: 549475 - DNA, 75 bp, synthetic construct
  source 1..75: mol_type = other DNA
gtttgaactcgtcacaaaaatagatatagatatacataaaaagaacaggtatgcgagttatgatcttagaaggaa

SEQ ID NO: 549476 - DNA, 75 bp, synthetic construct
  source 1..75: mol_type = other DNA
atagatatggatatacataaaaagaacaggtatgcgagttatgatcttagaaggaaaatcgaaatgcagcatgaa

SEQ ID NO: 549477 - DNA, 75 bp, synthetic construct
  source 1..75: mol_type = other DNA
atgaattacgatgaaataacgaaaattacagctgaacgtattagcgactatatgaccgaagcagttaatacagac

SEQ ID NO: 549478 - DNA, 75 bp, synthetic construct
  source 1..75: mol_type = other DNA
gatggtggtattttctgaaggcgcatcagccagcgcactcggggtcgcaacgtttcagaccgcactgaaccgccc

SEQ ID NO: 549479 - DNA, 75 bp, synthetic construct
  source 1..75: mol_type = other DNA
acatatccacgacgacgcgctatgactgtcgtggtgagagcatgaaaatcagcgccagtcagcagcttaaatgct

SEQ ID NO: 549480 - DNA, 75 bp, synthetic construct
  source 1..75: mol_type = other DNA
aaaccaccgtgttcgatgcgtatattgtcggtctggccccctcgggacggcgaggtatcaccagcctgttaaacc

SEQ ID NO: 549481 - DNA, 75 bp, synthetic construct
  source 1..75: mol_type = other DNA
ggaaaggctgttacatggtgggcacctacgccaggcgaacaggtgttactttttgccccatgcggcgatctggaa

SEQ ID NO: 549482 - DNA, 75 bp, synthetic construct
  source 1..75: mol_type = other DNA
ggtgttactgctctgtttaagcggtgagttaaccaccgccgtggcgcttcctgccatttactctgacgccaaccc

SEQ ID NO: 549483 - DNA, 75 bp, synthetic construct
  source 1..75: mol_type = other DNA
acatcgccgagctgcaccggcgcattgaaaacctgatccgtaccggcaccgttgaagaggtgaagggcgatcgag

SEQ ID NO: 549484 - DNA, 75 bp, synthetic construct
  source 1..75: mol_type = other DNA
caatgaaataacgaaaattaccgctgaacgtattagcgactacatgaccgaagcagttgatacagactctaaagc

SEQ ID NO: 549485 - DNA, 75 bp, synthetic construct
  source 1..75: mol_type = other DNA
atagatatggatatgcataaaaagaacgggtatgcgagttatgatcttagaaggaaaatcgaaatgcagcatgaa

SEQ ID NO: 549486 - DNA, 75 bp, synthetic construct
  source 1..75: mol_type = other DNA
tctatagccgttgcggaaatgtttcataacgctgcatggggagtgcgaacattgtggtttgacctcgtcacaaaa

SEQ ID NO: 549487 - DNA, 75 bp, synthetic construct
  source 1..75: mol_type = other DNA
agcaaacacccaggcgcaagggattctggaacgcgcggcaaagcgtgccgggtttaaggatgtggtattccagta

SEQ ID NO: 549488 - DNA, 75 bp, synthetic construct
  source 1..75: mol_type = other DNA
ccttccacctcggggtggacggcggcatcgaggtgacggcgagccacaacccgatgaactacaacggcatgaagc

SEQ ID NO: 549489 - DNA, 75 bp, synthetic construct
  source 1..75: mol_type = other DNA
tggttcgcgagggggctcgcccgatcagcggagataccggactgcgcgacgtccagcgtctggctgaagccaacg

SEQ ID NO: 549490 - DNA, 75 bp, synthetic construct
  source 1..75: mol_type = other DNA
gatttatcgcctccgccagcagaagccggtctgggcactgtgcaatgacacggcctgttctgcagccatgctgct

SEQ ID NO: 549491 - DNA, 75 bp, synthetic construct
  source 1..75: mol_type = other DNA
cgaagaactgaatgaagatatcgcctggcgcattgggcgtgcctatggcgaatttctcaaaccgaaaaccattgt

SEQ ID NO: 549492 - DNA, 75 bp, synthetic construct
  source 1..75: mol_type = other DNA
atatggggattgctttcgacggcgatttcgaccgctgctttctgtttgatgaaaaaggtcagtttattgagggtt

SEQ ID NO: 549493 - DNA, 75 bp, synthetic construct
  source 1..75: mol_type = other DNA
ggcggaccgccaggcggcgttcccggcgtcgggggagatcaaccgcaagctggggaatgcggcggaggcgatagc

SEQ ID NO: 549494 - DNA, 75 bp, synthetic construct
  source 1..75: mol_type = other DNA
taaagaagcacattgccttggcgatttgctgatgaaagccaattacggcggcctggatgtcgaaatcgcggcagt

SEQ ID NO: 549495 - DNA, 75 bp, synthetic construct
  source 1..75: mol_type = other DNA
tggtgcgggaaggcgcacgccccatcagcggcgataccggcctgcgcgacgtacagcgcctggcggaagccaacg

SEQ ID NO: 549496 - DNA, 75 bp, synthetic construct
  source 1..75: mol_type = other DNA
ccttccatctcggcgttgatggcggtatcgaagtgaccgccagccataacccgatggattacaacggcatgaagc

SEQ ID NO: 549497 - DNA, 75 bp, synthetic construct
  source 1..75: mol_type = other DNA
gcctgtcttcagcaggcaatggcggatagccaggtgcggggcgtactgctggacattgacagtccgggcgggcag

SEQ ID NO: 549498 - DNA, 75 bp, synthetic construct
  source 1..75: mol_type = other DNA
ggggcgtactgctggacattgacagtccgggcgggcaggccgccggcgcgtttgactgcgctgacatgatttacc

SEQ ID NO: 549499 - DNA, 75 bp, synthetic construct
  source 1..75: mol_type = other DNA
aggaggcactatgccgcaattaactgcaacggaagccgccgcgcaggagaaccagcgagtgatggggatcctgac

SEQ ID NO: 549500 - DNA, 75 bp, synthetic construct
  source 1..75: mol_type = other DNA
atggccaactattgcctgaaaaagggtaacgatatgaaaaaattaacctgctttaaagcctatgatattcgcgga

SEQ ID NO: 549501 - DNA, 75 bp, synthetic construct
  source 1..75: mol_type = other DNA
gaacagaggccgccgtttttgaaggtcagtccggtattgaggccggactggcggatgaattaatcaatgcgtcgg

SEQ ID NO: 549502 - DNA, 75 bp, synthetic construct
  source 1..75: mol_type = other DNA
tgcggccattttccggaatgacaggctatgacggcattgtcgcctgtcttcagcaggcaatggcagatagccagg

SEQ ID NO: 549503 - DNA, 75 bp, synthetic construct
  source 1..75: mol_type = other DNA
tcgttggccaggaggcggcggttctgcgttagcattttatgatggcggtgggttcacttatgtccaggattcaca

SEQ ID NO: 549504 - DNA, 75 bp, synthetic construct
  source 1..75: mol_type = other DNA
cggcctgctggcagaagcattcctcgaaaaaatcccggcgcgaagatcatccacgatccacgtctctcctggaac

SEQ ID NO: 549505 - DNA, 75 bp, synthetic construct
  source 1..75: mol_type = other DNA
tgcttttgatggcgattttgaccgctgtttcctgtttgacgaaaaagggcagtttatcgagggctactacattgt

SEQ ID NO: 549506 - DNA, 75 bp, synthetic construct
  source 1..75: mol_type = other DNA
gaattgatcaaagtgcacaacacgccggacggtaatttccccaacggtattcctaacccgctactgccagaatgc

SEQ ID NO: 549507 - DNA, 75 bp, synthetic construct
  source 1..75: mol_type = other DNA
gtctttccgtctatggctggaaacgcgagataatggcaccgtccctaacttccctaatctggcaaaagtaggctc

SEQ ID NO: 549508 - DNA, 75 bp, synthetic construct
  source 1..75: mol_type = other DNA
tgcgcgatgtccagcgtctggcagaagccaatgacttccctcctgtcgatgaaaccaaacgcggtcgctatcagc

SEQ ID NO: 549509 - DNA, 75 bp, synthetic construct
  source 1..75: mol_type = other DNA
cgcccaatcagcggtgataccggactgcgcgatgtccagcgtctggcagaagccaatgacttccctcctgtcgat

SEQ ID NO: 549510 - DNA, 75 bp, synthetic construct
  source 1..75: mol_type = other DNA
gcaccgcagcagccggtggcatccacgcagagtgaagccgatcgcattatggcgtgtgaagaggcgaaaggtcgt

SEQ ID NO: 549511 - DNA, 75 bp, synthetic construct
  source 1..75: mol_type = other DNA
ggtttgagttggttttctggcctttcattacaatatacgctttcgctgatgctatgcgcatcaacatcatgcggg

SEQ ID NO: 549512 - DNA, 75 bp, synthetic construct
  source 1..75: mol_type = other DNA
tgggcgcttttcagaaagctgttgatagtgacggcattatttggttcgagctagtcttctggcctttcattacga

SEQ ID NO: 549513 - DNA, 75 bp, synthetic construct
  source 1..75: mol_type = other DNA
gtgaatggtcaattaggtcactggttacaggatggtaatgcatgcgcagttatctcctttgccagtggtttagtc

SEQ ID NO: 549514 - DNA, 75 bp, synthetic construct
  source 1..75: mol_type = other DNA
ggcaagaaggtaaattagaaggtttgcaggaaggcatgcatgaacaagccattaaaattgctttgcgcatgctgg

SEQ ID NO: 549515 - DNA, 75 bp, synthetic construct
  source 1..75: mol_type = other DNA
tatatagtattaaagatgccaatggccaagtaggcatgctccgccatgctatttggtctgatgtactaatctgcc

SEQ ID NO: 549516 - DNA, 75 bp, synthetic construct
  source 1..75: mol_type = other DNA
atggacgccgttttaagtgttcagggtgcttctgcgcccgtcagaaataagtcgtttttttctaaatttacccgt

SEQ ID NO: 549517 - DNA, 75 bp, synthetic construct
  source 1..75: mol_type = other DNA
ggtaaagatctgatgtccagcggcgatgcaaccgttaaaggaacatttggtaaagactccagcgtggttaagtgg

SEQ ID NO: 549518 - DNA, 75 bp, synthetic construct
  source 1..75: mol_type = other DNA
atcgtctttcttctctaaacttaacctgcttcgcctggtgcgtgcggttgttcctgctgcggtgctgatgatgtt

SEQ ID NO: 549519 - DNA, 75 bp, synthetic construct
  source 1..75: mol_type = other DNA
ggcgtgttaatccctcggattacggtaactttgattcccgctatgtgagagatgtcagacttggcacacgtgttg

SEQ ID NO: 549520 - DNA, 75 bp, synthetic construct
  source 1..75: mol_type = other DNA
caatggcgatgtttctatcggtaatggactcaatgttactggtgatataggaaccaatgcttgggtatatgcaaa

SEQ ID NO: 549521 - DNA, 75 bp, synthetic construct
  source 1..75: mol_type = other DNA
cgcaacactggagaaaaattttccggaagataatgctgtcggtgtgcttgaggtttttgctgccggcaattttgc

SEQ ID NO: 549522 - DNA, 75 bp, synthetic construct
  source 1..75: mol_type = other DNA
tatcggtgaaggtagttgtcccgcagcccagttccgcgttaattataagaacggcggtattttttatcgttctgc

SEQ ID NO: 549523 - DNA, 75 bp, synthetic construct
  source 1..75: mol_type = other DNA
gttaattataagaacggcggtattttttatcgttctgctcgtgatggttacggattcgaggctgactggtctgag

SEQ ID NO: 549524 - DNA, 75 bp, synthetic construct
  source 1..75: mol_type = other DNA
cgacgaagcccagacatggggcgcgaaacagacattcagtgctggcctttctggtgaactgtccggcaatgcggc

SEQ ID NO: 549525 - DNA, 75 bp, synthetic construct
  source 1..75: mol_type = other DNA
tcaaagaacagctgcgtatcgcggcaggtcaaccgctgtcgatcaagcaagaagaagttcacgttcgcggccatg

SEQ ID NO: 549526 - DNA, 75 bp, synthetic construct
  source 1..75: mol_type = other DNA
tcttatatggtgggattgtctgggaatatgtatatctcttctatgataagtccgactataatgatgattaatttg

SEQ ID NO: 549527 - DNA, 75 bp, synthetic construct
  source 1..75: mol_type = other DNA
tgagcagatatatccgcaacaatctactgtacaagttgtggcttttgccggtgaaagtcagcaaccgttgccatt

SEQ ID NO: 549528 - DNA, 75 bp, synthetic construct
  source 1..75: mol_type = other DNA
ttgaagatgattacgacagtgagttccgctatcacggtaagccgttaccggcgctgaaaagtctcgatgcgccgc

SEQ ID NO: 549529 - DNA, 75 bp, synthetic construct
  source 1..75: mol_type = other DNA
gctgaactggcacaatccatctccatgacccgtgcggaagcgaaagctgctttcagcaacgatatggtttacatg

SEQ ID NO: 549530 - DNA, 75 bp, synthetic construct
  source 1..75: mol_type = other DNA
aagtttgtggccggcgttctgctggttttcaacgaccgggttatcgatgccactctggcaagcctcggtatcgcc

SEQ ID NO: 549531 - DNA, 75 bp, synthetic construct
  source 1..75: mol_type = other DNA
tccatctggcgcaaatcactgctggacgggcataccgccctgagcgccagtgaatccatcagtaaggggaacgtc

SEQ ID NO: 549532 - DNA, 75 bp, synthetic construct
  source 1..75: mol_type = other DNA
tgtgccggttgatgacaatggactggatatcacaagcggaatacaaaattatcctgatgcgcgttttgccctgat

SEQ ID NO: 549533 - DNA, 75 bp, synthetic construct
  source 1..75: mol_type = other DNA
ccgcccagggggcaggtcaggacctgatggccgggggtaacgccaccgtcaaggccaccttcggtaaagactcca

SEQ ID NO: 549534 - DNA, 75 bp, synthetic construct
  source 1..75: mol_type = other DNA
gttaaagaaccgcctggcgctggatatctgcacgctgatttttaatctgcaaacctccggtatcgcgctgaaatt

SEQ ID NO: 549535 - DNA, 75 bp, synthetic construct
  source 1..75: mol_type = other DNA
gtacctgttctatggcagaacacactggcagactttcttcgcgaggggcatttctggcggcatctgaagaaaatg

SEQ ID NO: 549536 - DNA, 75 bp, synthetic construct
  source 1..75: mol_type = other DNA
gcgcaggcatcaggtgctggcgtgggcagagcgtgcgcgggcgtggattattgaagacgattacgacagtgaatt

SEQ ID NO: 549537 - DNA, 75 bp, synthetic construct
  source 1..75: mol_type = other DNA
acgcgtttcacgtgggattgattgtcagccagagcaggtctttatcactcacggttatgcggcctcaatagcttt

SEQ ID NO: 549538 - DNA, 75 bp, synthetic construct
  source 1..75: mol_type = other DNA
ttaattacggtactaaatcaacgaataacacaggtgcacatacccacaatgtatctggtactgcaaatagtgctg

SEQ ID NO: 549539 - DNA, 75 bp, synthetic construct
  source 1..75: mol_type = other DNA
tttccaaaattaagccatgcaagtagttttacagcgtcatatgcagaacaaaaaaaagcgtatatattaatgact

SEQ ID NO: 549540 - DNA, 75 bp, synthetic construct
  source 1..75: mol_type = other DNA
ttgaataatttacttggtcatatatacccgctgaatgtgtcatatctggctaatttacgtgatatggatctggat

SEQ ID NO: 549541 - DNA, 75 bp, synthetic construct
  source 1..75: mol_type = other DNA
ctttccggcgatagccctggatactgaatttgtacgtacgcgcacctattacccgcaactggggttgattcaact

SEQ ID NO: 549542 - DNA, 75 bp, synthetic construct
  source 1..75: mol_type = other DNA
cattattaataagttcctaaaagtcggttatgctcgcagggaacatggaagagccaaaagcgatcatctaaaacg

SEQ ID NO: 549543 - DNA, 75 bp, synthetic construct
  source 1..75: mol_type = other DNA
atctcatatccagggagcatcaaaaatatcattctatacagtccctaatgagctggtaactaggcttggaatagt

SEQ ID NO: 549544 - DNA, 75 bp, synthetic construct
  source 1..75: mol_type = other DNA
tgcgataaagtctctaatattattatcatctctgatacctgtattcttagtcacgcaaatactattagcagagct

SEQ ID NO: 549545 - DNA, 75 bp, synthetic construct
  source 1..75: mol_type = other DNA
tgtattcaagatgttcatttcttgaaaacttttaatccattatttgacagagaaataacaccaaagttaattgcc

SEQ ID NO: 549546 - DNA, 75 bp, synthetic construct
  source 1..75: mol_type = other DNA
gtctattcggatgaattatccggatttattgaattagagctaacaggttcagaacgctggccttttcgaatgctg

SEQ ID NO: 549547 - DNA, 75 bp, synthetic construct
  source 1..75: mol_type = other DNA
agtgaaaacgttaaaacttgaaaaagctggtggtactgcaatcccgttgccagaagattatctctctctggttca

SEQ ID NO: 549548 - DNA, 75 bp, synthetic construct
  source 1..75: mol_type = other DNA
ggtgaactttgtcgtgcgtgaagagcatttgtggtcggtagcgcgttatatgccgggaagtttaggcgaactgga

SEQ ID NO: 549549 - DNA, 75 bp, synthetic construct
  source 1..75: mol_type = other DNA
ctggatgaatgccgcctgatgcaaatccgtcgtcaggaagtgctggcgccggaagatgcatggcgtgatatcacg

SEQ ID NO: 549550 - DNA, 75 bp, synthetic construct
  source 1..75: mol_type = other DNA
gccccttcggcgtatcaaatgccgtatcccttttatcttcagcagcgagaggttggctagagaaacttgcttatt

SEQ ID NO: 549551 - DNA, 75 bp, synthetic construct
  source 1..75: mol_type = other DNA
atgggcggcgcatgttgaagatggtatttcggcattaagaaattatagaagcttgaaggagctaagtttagcaat

SEQ ID NO: 549552 - DNA, 75 bp, synthetic construct
  source 1..75: mol_type = other DNA
cactattagaagctgcctctactgggtgctatttatatgttagcgatatagagccccatagagaaattgcatctc

SEQ ID NO: 549553 - DNA, 75 bp, synthetic construct
  source 1..75: mol_type = other DNA
tctgtacatgccttttcgcatgttacgctacagtgtggcggcgatgcagagacatctggagcagcacaaaacgtt

SEQ ID NO: 549554 - DNA, 75 bp, synthetic construct
  source 1..75: mol_type = other DNA
atcttgtcagatcaaaaaagaaagagacaaagaacgtcatgcagtagtgtttgagtggaaaagaccagaaacctt

SEQ ID NO: 549555 - DNA, 75 bp, synthetic construct
  source 1..75: mol_type = other DNA
ctcacacgggcattccattaccgtaaatgctactggtaataccgaaaacaccgtcaaaaacatcgcatttaacta

SEQ ID NO: 549556 - DNA, 75 bp, synthetic construct
  source 1..75: mol_type = other DNA
agcatgagcagtcccgccgccatcctgacgccacgctgacagaaaaaggttttactcagttaagcagtgcaacaa

SEQ ID NO: 549557 - DNA, 75 bp, synthetic construct
  source 1..75: mol_type = other DNA
aattatttgcaacctaaaataaaaaaagctgactataacgctctttctgacgataaactttacaatatatccgat

SEQ ID NO: 549558 - DNA, 75 bp, synthetic construct
  source 1..75: mol_type = other DNA
gctggatcgcaaagggatgaacctcgcgtcgaacctgttccatatcggtattctggggatttttgtcggtcactt

SEQ ID NO: 549559 - DNA, 75 bp, synthetic construct
  source 1..75: mol_type = other DNA
ccctggagcacagaacgcaggaatgactggttgcagtggatatcgctggcgtctgaatgtgatgtgccgatgatg

SEQ ID NO: 549560 - DNA, 75 bp, synthetic construct
  source 1..75: mol_type = other DNA
gccgtcagactgaagatcagcttaaaaagcttaaagggtatactgggattacacccaatattgctgcccggctag

SEQ ID NO: 549561 - DNA, 75 bp, synthetic construct
  source 1..75: mol_type = other DNA
attttaggtcgatcaaagaagaggttaactttgatctgcgtagttcaacaagtaaccacttaagcgataatttgc

SEQ ID NO: 549562 - DNA, 75 bp, synthetic construct
  source 1..75: mol_type = other DNA
ttgacgttgattggcggcgcaggactgctgtggcgcaggctgactaatcagcgcgtgcgtgccacttccactacg

SEQ ID NO: 549563 - DNA, 75 bp, synthetic construct
  source 1..75: mol_type = other DNA
aaatttttcgacaagatgcacaatgcattccgaaaacagtttaccgacggaaaaaaagataagcgggtacaaatc

SEQ ID NO: 549564 - DNA, 75 bp, synthetic construct
  source 1..75: mol_type = other DNA
cgggtgagcgcgaacgaaggacaggtgtggcaggcgtggctgaaccagcagacgtggcttgggcaggggcggcat

SEQ ID NO: 549565 - DNA, 75 bp, synthetic construct
  source 1..75: mol_type = other DNA
gccattcacagcatcgacaccgacattaagctcaatcgcgcattgtgggtgatggctgaaacgctgctggagagc

SEQ ID NO: 549566 - DNA, 75 bp, synthetic construct
  source 1..75: mol_type = other DNA
atatgtggtggacagagtcattgaaggggcttacgaggtggtgggcgtgtttgaccggatagaggagaagcgtga

SEQ ID NO: 549567 - DNA, 75 bp, synthetic construct
  source 1..75: mol_type = other DNA
aacgtatccacacccgtgccattcacagcatcgacaccgatattaagctcaaccgcgcattgtgggtgatggcag

SEQ ID NO: 549568 - DNA, 75 bp, synthetic construct
  source 1..75: mol_type = other DNA
tatccatacccgggccattcacagcattgacaccgacattaagctcaaccgggcattgtgggtgatggcagaaac

SEQ ID NO: 549569 - DNA, 75 bp, synthetic construct
  source 1..75: mol_type = other DNA
ggggcttacgaggtggtgggcgtgtttgaccggatagaggaaaagcgtgatgccatgcagtcgctgattctgccg

SEQ ID NO: 549570 - DNA, 75 bp, synthetic construct
  source 1..75: mol_type = other DNA
gcagcggcacggagccgaatcgcgcctggttccaggtagaagatgacggtccgggtattgcgccagaacagcgta

SEQ ID NO: 549571 - DNA, 75 bp, synthetic construct
  source 1..75: mol_type = other DNA
aacgggctcgtctgcggtgagtcttttggtgaggtgcgggtgccgcacaaaggagatgtggtgagtcaggtgatt

SEQ ID NO: 549572 - DNA, 75 bp, synthetic construct
  source 1..75: mol_type = other DNA
cgtatccatacccgggccattcacagcatcgataccgacattaagctcaaccgggcgttgtgggtgatggcagaa

SEQ ID NO: 549573 - DNA, 75 bp, synthetic construct
  source 1..75: mol_type = other DNA
cgctgttccgctatacgctggcgataatgctgttagcgataggcggtgcgtggctgtttattcgtattcagaacc

SEQ ID NO: 549574 - DNA, 75 bp, synthetic construct
  source 1..75: mol_type = other DNA
attccgccgccgctgcgtgaatatggcgcttcggaggtgcgttcggttacccgcgccttcaaccatatggcggca

SEQ ID NO: 549575 - DNA, 75 bp, synthetic construct
  source 1..75: mol_type = other DNA
gaatatggtggtgaacgccgcccgctatggcaatggctggatcaaagtcagcagcggcacggagccgaatcgcgc

SEQ ID NO: 549576 - DNA, 75 bp, synthetic construct
  source 1..75: mol_type = other DNA
aaaagaacggtttcagttgccagatagaaaccagcggtactcatgaagtgcgttgtacgtcgaatacctgggtca

SEQ ID NO: 549577 - DNA, 75 bp, synthetic construct
  source 1..75: mol_type = other DNA
aaatgtggtggagaaagttattgaaggggcttacgaggtggtgggtgtgtttgaccggatcgaggataagcgtga

SEQ ID NO: 549578 - DNA, 75 bp, synthetic construct
  source 1..75: mol_type = other DNA
aaatgtggtggagaaagttatagaaggggcttacgaggtggtgggtgtgtttgaccggatggaggacaagcgtga

SEQ ID NO: 549579 - DNA, 75 bp, synthetic construct
  source 1..75: mol_type = other DNA
atgcgattagtcagtcgttttggttatgcgaaccagatacgccgtgaccgtccgctgacacatgaagagctgatg

SEQ ID NO: 549580 - DNA, 75 bp, synthetic construct
  source 1..75: mol_type = other DNA
ctaccccctgctccccgaaaaccctgcatttatttgttttataaggatttcactcatgaaaactgtttctcagaa

SEQ ID NO: 549581 - DNA, 75 bp, synthetic construct
  source 1..75: mol_type = other DNA
aaatgtggtggagaaagttatggaaggggcttacgaggtggtgggtgtgtttgaccggatagaggagaagcgtga

SEQ ID NO: 549582 - DNA, 75 bp, synthetic construct
  source 1..75: mol_type = other DNA
aaatgtggtggagaaagttatcgaaggggcttacgaggtggtgggtgtgtttgaccggatggaggaaaagcgtga

SEQ ID NO: 549583 - DNA, 75 bp, synthetic construct
  source 1..75: mol_type = other DNA
ctatgagtcggacattatccagctctcggtttaccgggtaattctgtcacacaagtacaaggcacccgttgccaa

SEQ ID NO: 549584 - DNA, 75 bp, synthetic construct
  source 1..75: mol_type = other DNA
gggtggtgaaccttgtattcatgacttgatgccactaactgacctgctcgaaaagaacggtttcagttgccagat

SEQ ID NO: 549585 - DNA, 75 bp, synthetic construct
  source 1..75: mol_type = other DNA
tatcgaagcactggatgaattgcttgcgacgctgaccgatgataaaccgcgagtcattgcactgcagccgattag

SEQ ID NO: 549586 - DNA, 75 bp, synthetic construct
  source 1..75: mol_type = other DNA
agaccatccaggagaatatgctgaaaggcgggatttccggccgcagtgcaaaaggaaaacgtatccacacccgtg

SEQ ID NO: 549587 - DNA, 75 bp, synthetic construct
  source 1..75: mol_type = other DNA
cagtctctgggggaagtgcgtgttccgcaccggggaaatgtggtggagaaagttattgaaggggcttacgaggtg

SEQ ID NO: 549588 - DNA, 75 bp, synthetic construct
  source 1..75: mol_type = other DNA
aatatgctgaaaggcgggatttccggccgcagtgcaaaaggaaaacgtatccacacccgtgccattcacaacatc

SEQ ID NO: 549589 - DNA, 75 bp, synthetic construct
  source 1..75: mol_type = other DNA
aaggcttccagccattcttcgcctgccagacccgtgtgcgcgacccgggccgccggggatacacaaaacacatgc

SEQ ID NO: 549590 - DNA, 75 bp, synthetic construct
  source 1..75: mol_type = other DNA
aaccgggccggtgccatctcggccgaatgcctggcacgctgcgttgacagccaggtgctggatctcggcctcacc

SEQ ID NO: 549591 - DNA, 75 bp, synthetic construct
  source 1..75: mol_type = other DNA
cggtgcggcgctggtggatctgctccgccagcatggggtcagcaaatacaacgtcggcaccgtgcagcccttcac

SEQ ID NO: 549592 - DNA, 75 bp, synthetic construct
  source 1..75: mol_type = other DNA
acagagtcattgaaggggcttacgaggtggtgggcgtgtttgaccggattgaggaaaagcgtgatgccatgcagt

SEQ ID NO: 549593 - DNA, 75 bp, synthetic construct
  source 1..75: mol_type = other DNA
ccaccggcacgtcaggcactggcacaggcggcgctgacttaccgttatggtgatgaacatcaacccgtcaccact

SEQ ID NO: 549594 - DNA, 75 bp, synthetic construct
  source 1..75: mol_type = other DNA
ccagatccgcgtgcgcgacccgggccgccggggatacaccaaacacatgctgcgtctgcgccgtgacggggagat

SEQ ID NO: 549595 - DNA, 75 bp, synthetic construct
  source 1..75: mol_type = other DNA
ctgacacacgaagaactgatgcactatgttcccagtattttcggtgaagaccggcatacttcccgcagtaaacga

SEQ ID NO: 549596 - DNA, 75 bp, synthetic construct
  source 1..75: mol_type = other DNA
aatttcaatatcaggctggtgggcttcgatacatggaacgccacgcacctgaggacgcagctacagggcgcagga

SEQ ID NO: 549597 - DNA, 75 bp, synthetic construct
  source 1..75: mol_type = other DNA
cccgataacggcgtttattccgcgcttgagctggggatgggcgcacgtcccgaagggctgttatttgccattacc

SEQ ID NO: 549598 - DNA, 75 bp, synthetic construct
  source 1..75: mol_type = other DNA
acatcggggagcaacgttgtttcagcctgtaaacaacactacgactattgctgccagatactggatggtgaagag

SEQ ID NO: 549599 - DNA, 75 bp, synthetic construct
  source 1..75: mol_type = other DNA
taacgtcgtgatgcagagtgacgcgaacgccaatatcaagccaaacaagaaaaaatcaccgaacaagatagaccc

SEQ ID NO: 549600 - DNA, 75 bp, synthetic construct
  source 1..75: mol_type = other DNA
tgaggttgtggagcggtttattgccttttccagggtgtgcccgcacgtaaaagggccgatgcgtggcagacccat

SEQ ID NO: 549601 - DNA, 75 bp, synthetic construct
  source 1..75: mol_type = other DNA
ttatcatcaaccagcgatatttccagcgtgtgctatgcctttccggtcggtaaaaagattatgctggtttcccgt

SEQ ID NO: 549602 - DNA, 75 bp, synthetic construct
  source 1..75: mol_type = other DNA
atgttcccaggattttcggggaagacaaacacacgtcccgaagcaaacgatacgtacatccccaccatcaccgta

SEQ ID NO: 549603 - DNA, 75 bp, synthetic construct
  source 1..75: mol_type = other DNA
attgatggcgatattaaattaaataaagcgttatgggtactgacagcgcaaatgcatgcacacttttctggacgc

SEQ ID NO: 549604 - DNA, 75 bp, synthetic construct
  source 1..75: mol_type = other DNA
gggaagtgcgtgttccgcatcggggaaatgtggtggacagagtcattgaaagggcttacgaggtggtgggcgtgt

SEQ ID NO: 549605 - DNA, 75 bp, synthetic construct
  source 1..75: mol_type = other DNA
atgcaccatgtgccggggattttcggagaagataaacacacgtcccgaagccagaactatacgtacatccccacc

SEQ ID NO: 549606 - DNA, 75 bp, synthetic construct
  source 1..75: mol_type = other DNA
tggcccacaaaggcatcattcagtcagcaattgactgctctctggattcggacatgacccagcttgacctgattg

SEQ ID NO: 549607 - DNA, 75 bp, synthetic construct
  source 1..75: mol_type = other DNA
cagttcgtaccttcggtattttccggtgataaacatgagtcccggagtgaacgttatacgtgtattccaacaatc

SEQ ID NO: 549608 - DNA, 75 bp, synthetic construct
  source 1..75: mol_type = other DNA
cactttgttccatctgtcttttctggtgataaacatgaatcccggagtgagcgttatacatatatcccaaccatc

SEQ ID NO: 549609 - DNA, 75 bp, synthetic construct
  source 1..75: mol_type = other DNA
atgcaaaccagatacgccgtgatcgccccttaactcgcgaagaactgatacaggtcgttcccagcgtattcgggg

SEQ ID NO: 549610 - DNA, 75 bp, synthetic construct
  source 1..75: mol_type = other DNA
ggggcttacgaagtggtgggcgtttttgaccggattgaggaaaagcgtgatgccatgcagtcgctgctcttaccg

SEQ ID NO: 549611 - DNA, 75 bp, synthetic construct
  source 1..75: mol_type = other DNA
tcggcctgccgtactggcagctggaagatggctttatcggttatattggccaccccgccagaggaggcaaggccg

SEQ ID NO: 549612 - DNA, 75 bp, synthetic construct
  source 1..75: mol_type = other DNA
gagtgcttatcagaccattcaggagaatatgctgaaagtggaatttcaggtcgcagcgctaaaggaaacgtatcc

SEQ ID NO: 549613 - DNA, 75 bp, synthetic construct
  source 1..75: mol_type = other DNA
ggctgcgtctgcggtcagtctctgggggaagtgcgtgttccacaccggggaaatgtagtggagaaagttatcgaa

SEQ ID NO: 549614 - DNA, 75 bp, synthetic construct
  source 1..75: mol_type = other DNA
gaactatacttggatccccaccatcaccgtgctggaaagcctgcagcgggaaggctttcagccattcttcgcctg

SEQ ID NO: 549615 - DNA, 75 bp, synthetic construct
  source 1..75: mol_type = other DNA
ggaacaactgctgcgcaagagccagtcggggcaattttgtgtgggggatacgccgacgctggcagattgctgcct

SEQ ID NO: 549616 - DNA, 75 bp, synthetic construct
  source 1..75: mol_type = other DNA
aatatgctgaaaggcgggatttccggccgcagtgccagaggaaaacgtatccatacccgggccattcacagcatc

SEQ ID NO: 549617 - DNA, 75 bp, synthetic construct
  source 1..75: mol_type = other DNA
gcgtgttccgcaccggggaaatgtggtggacagagtcattgaaggggcttacgaggtggtgggcgtgtttgaccg

SEQ ID NO: 549618 - DNA, 75 bp, synthetic construct
  source 1..75: mol_type = other DNA
ttcgtctgccagaacggatgcgtctgtggtcagtctctgggggaagtgcgtgttccgcaccggggaaatgtggtg

SEQ ID NO: 549619 - DNA, 75 bp, synthetic construct
  source 1..75: mol_type = other DNA
aaacgtggtggacagtgtgattgaaggtgcttacgaagtggtgggcgtgtttgaccggatagaggagaagcgtga

SEQ ID NO: 549620 - DNA, 75 bp, synthetic construct
  source 1..75: mol_type = other DNA
cgccatgcagtcgctggtcctgccgccaccgtcacgccaggcgctggcacaggcggcactgacttaccgttatgg

SEQ ID NO: 549621 - DNA, 75 bp, synthetic construct
  source 1..75: mol_type = other DNA
tttctatattgctcagggtgtaaatcgcatcggttttattggcggcgaagacgagccaggcaaagcagatattcg

SEQ ID NO: 549622 - DNA, 75 bp, synthetic construct
  source 1..75: mol_type = other DNA
cacgcatcagtaaagaaatcatcgacttctacatcgatcagggcgttaatcgtattggttttattggcggcgaag

SEQ ID NO: 549623 - DNA, 75 bp, synthetic construct
  source 1..75: mol_type = other DNA
cgattccattgctattggcgtactgcgggcaattcatgaacgtggtctgaacatcccgcaggatatttcacttat

SEQ ID NO: 549624 - DNA, 75 bp, synthetic construct
  source 1..75: mol_type = other DNA
cattctgacaccacgacgcagggaggattacggtcaggacctgtggagcgcatatcagaccatccaggagaatat

SEQ ID NO: 549625 - DNA, 75 bp, synthetic construct
  source 1..75: mol_type = other DNA
cattgaccgacaatatctgttttatcgactttcacgaacccggcagcaattacgatgcggtagatatcgatctgg

SEQ ID NO: 549626 - DNA, 75 bp, synthetic construct
  source 1..75: mol_type = other DNA
cgttgaccgacaatatctgttttatcgactttcacgaacccggcagcggttacgatgcggtggatatcgatctgg

SEQ ID NO: 549627 - DNA, 75 bp, synthetic construct
  source 1..75: mol_type = other DNA
ccagagcaagcgggagcacaccaaacacatgcttcgcctgcgtcgtgccggtcaactgtccggacatcaggtgcc

SEQ ID NO: 549628 - DNA, 75 bp, synthetic construct
  source 1..75: mol_type = other DNA
cgttccggcgcgacctgataaaacactcaccatccgcaaatggacgctgctacccggcgtggatgccgcgacccg

SEQ ID NO: 549629 - DNA, 75 bp, synthetic construct
  source 1..75: mol_type = other DNA
gggaaggctttcagccattcttcgcctgccagacccgtgtgcgcgacccgggccgccggggatacacaaaacaca

SEQ ID NO: 549630 - DNA, 75 bp, synthetic construct
  source 1..75: mol_type = other DNA
ccagaactatacgtacatccccaccatcaccgtgctggaaagcctgcagcgggaaggttttcagccctttttcgc

SEQ ID NO: 549631 - DNA, 75 bp, synthetic construct
  source 1..75: mol_type = other DNA
tggaagcgcagagtgagtatttactgctacgtgaaaccggcggtacggcgacccagatcgaaggcattcttgagc

SEQ ID NO: 549632 - DNA, 75 bp, synthetic construct
  source 1..75: mol_type = other DNA
ctcattccgtcacaagcgctgattgataccggcagcgaacagcgggtgattaccgttgatgccgacgggcgcttt

SEQ ID NO: 549633 - DNA, 75 bp, synthetic construct
  source 1..75: mol_type = other DNA
ataccggcaacgaacagcgggtgattaccgttgatgccgacgggcgctttgtaccgaaacgcgttgccgttttcc

SEQ ID NO: 549634 - DNA, 75 bp, synthetic construct
  source 1..75: mol_type = other DNA
ccgtccgctgacacatgaagagctgatgcaccatgtgccggggattttcggagaagataaacacacatcccgaag

SEQ ID NO: 549635 - DNA, 75 bp, synthetic construct
  source 1..75: mol_type = other DNA
tatggtgacgaacatcagcccgtcaccaccgccgacattctgacgccacgacgccgggaggattacggtaaggac

SEQ ID NO: 549636 - DNA, 75 bp, synthetic construct
  source 1..75: mol_type = other DNA
gtataaatcagatacgccgtgaccggcctctgacccacgaagagctgatgagtcatgtccccagcgtgttcggga

SEQ ID NO: 549637 - DNA, 75 bp, synthetic construct
  source 1..75: mol_type = other DNA
ccacacccgtgccattcacaacatcgacaccgacattaagctcaaccgcgcattgtgggtgatggcagaaacgct

SEQ ID NO: 549638 - DNA, 75 bp, synthetic construct
  source 1..75: mol_type = other DNA
tatccacacccgtgccattcacaccatcgacaccgatattaagctcaaccgcgcattgtgggtaatggcagaaac

SEQ ID NO: 549639 - DNA, 75 bp, synthetic construct
  source 1..75: mol_type = other DNA
ccggcatacttcccgcagtaaacgatatgcgtacattcccaccaatcaccgtactggaaagcctgcagcaggaag

SEQ ID NO: 549640 - DNA, 75 bp, synthetic construct
  source 1..75: mol_type = other DNA
tcaccaccgccgacattctgacaccacgacgccgggaggattacggtaaggacctgtggagtgcttatcagacca

SEQ ID NO: 549641 - DNA, 75 bp, synthetic construct
  source 1..75: mol_type = other DNA
ccagacaaaagttcgcgaccagagcaagcgggagcacaccaagcacatgcttcgactgcgtcgctccgggcaact

SEQ ID NO: 549642 - DNA, 75 bp, synthetic construct
  source 1..75: mol_type = other DNA
ccagacaaaagttcgcgaccagagcaagcgggatcacaccaaacacatgcttcgcctgcgtcgcgccggacaact

SEQ ID NO: 549643 - DNA, 75 bp, synthetic construct
  source 1..75: mol_type = other DNA
accatcctcgaaagcctgcagcgtgaaggctttgagccgttctttgcctgccagacaaaagttcgcgaccagagc

SEQ ID NO: 549644 - DNA, 75 bp, synthetic construct
  source 1..75: mol_type = other DNA
ggcaggatgagagcaatgacctgtggaccacgtaccagcgtattcaggagaacctgattaagggcgggctcagtg

SEQ ID NO: 549645 - DNA, 75 bp, synthetic construct
  source 1..75: mol_type = other DNA
tttttgaccaggtggaagagaaacgcgatgccatgcagtcgctgatgctgcctccccctgcgcaacaggcgctgg

SEQ ID NO: 549646 - DNA, 75 bp, synthetic construct
  source 1..75: mol_type = other DNA
ttgaccgagtggatgagaaacgcgatgcaatgcagtcactggtgttgccagcaccagcccgtcacgcactggcga

SEQ ID NO: 549647 - DNA, 75 bp, synthetic construct
  source 1..75: mol_type = other DNA
ccgtccgctgacacatgaagagctgatgcaccatgtgccggggattttcggggaagataaacacacgtcccgaag

SEQ ID NO: 549648 - DNA, 75 bp, synthetic construct
  source 1..75: mol_type = other DNA
cggcaaccatgtcgatttctcgtttattcagcagggcaatatttctttacttaaaagcattaacgttacgcaatc

SEQ ID NO: 549649 - DNA, 75 bp, synthetic construct
  source 1..75: mol_type = other DNA
ggtgcttacgaagtggtgggcgtgtttgacctgattgaggaaaagcgtgatgccatgcagtcgctgctactgccg

SEQ ID NO: 549650 - DNA, 75 bp, synthetic construct
  source 1..75: mol_type = other DNA
gcgaaatccgcgttccacataaaggtgatattgtcgggcaggttatcgagggagcgtatgaagtactcggtatct

SEQ ID NO: 549651 - DNA, 75 bp, synthetic construct
  source 1..75: mol_type = other DNA
aggcggcactgacttaccgttatggtgacgaacatcagcccgtcattaagctcaaccgcgcattgtgggtgatgg

SEQ ID NO: 549652 - DNA, 75 bp, synthetic construct
  source 1..75: mol_type = other DNA
gaccatctaccagcgtgtgcaggagaacctgatgaagggagggctgccaggacgtaccgcgcagggtaaacgcag

SEQ ID NO: 549653 - DNA, 75 bp, synthetic construct
  source 1..75: mol_type = other DNA
gaatcacagatactctccccgcgccgctggcaagatgagagtagcgacctgtggaccacgtaccagcgtattcaa

SEQ ID NO: 549654 - DNA, 75 bp, synthetic construct
  source 1..75: mol_type = other DNA
tgaaggggcttacgaggtggtgggcgtgtttgaccggatagaggagaagcgtgatgccatgcagtcgctggtcct

SEQ ID NO: 549655 - DNA, 75 bp, synthetic construct
  source 1..75: mol_type = other DNA
actccggcggatggcctgacgtgtacgggaggcttgaatgggataaacaatgtccaacaattactgcgggatttg

SEQ ID NO: 549656 - DNA, 75 bp, synthetic construct
  source 1..75: mol_type = other DNA
attattctgctgaacagccacgacggctccagctcatatcagatgctaccggggttattcagagcagtttgccaa

SEQ ID NO: 549657 - DNA, 75 bp, synthetic construct
  source 1..75: mol_type = other DNA
tcccttaactcgtgaagaactgatgcaggtcgtccccagcgtattcggggaagagaaacacacatccagaagcga

SEQ ID NO: 549658 - DNA, 75 bp, synthetic construct
  source 1..75: mol_type = other DNA
atgttgctgcattattctcgccattatggtgtctgcgtaacctggcaagttattgcacgttttatttttaacgct

SEQ ID NO: 549659 - DNA, 75 bp, synthetic construct
  source 1..75: mol_type = other DNA
ttatgcctgccagtgggcttattctggtctggtattcagtgatgaatatcatcgacaactatcgcaaatggaatt

SEQ ID NO: 549660 - DNA, 75 bp, synthetic construct
  source 1..75: mol_type = other DNA
tgcaatgcagtcactggcactgccagaaccagcccgcaacgccctggcgaatgccgcgctgaagtatcgctttgg

SEQ ID NO: 549661 - DNA, 75 bp, synthetic construct
  source 1..75: mol_type = other DNA
ccagacccgcgttcgtgatgtgggtaaacgtgagcatacaaaacacatgctgcgtctgcgccgggaagaccagat

SEQ ID NO: 549662 - DNA, 75 bp, synthetic construct
  source 1..75: mol_type = other DNA
ccgtccgttaacccgtgaggagctgtttcgcgtggtgcccagcgtattcagcgaggacaaacacgagtcccgtag

SEQ ID NO: 549663 - DNA, 75 bp, synthetic construct
  source 1..75: mol_type = other DNA
attacccttctcgataacttgcaacgcgaaggcttccagccattcttcgcgtgtcaaaccagagtccgcgaccag

SEQ ID NO: 549664 - DNA, 75 bp, synthetic construct
  source 1..75: mol_type = other DNA
ggggcttacgaagtgctcggggtgtttgaccgggtggaggagaagcgcgatgcaatgcagtcactggcgctacct

SEQ ID NO: 549665 - DNA, 75 bp, synthetic construct
  source 1..75: mol_type = other DNA
acctgcgcgtgctgcgctacctgaccgaagagctgaacgtcagtgaagaagataaaaaacgctggtatgcgcact

SEQ ID NO: 549666 - DNA, 75 bp, synthetic construct
  source 1..75: mol_type = other DNA
caatggacgcggtgaatccactctcttacgcgatcctcgaatcctgcggtcgcctgcgttcgactcagcctaacc

SEQ ID NO: 549667 - DNA, 75 bp, synthetic construct
  source 1..75: mol_type = other DNA
gcggaaaagtctaaaggaaagaaaattcaaggtgttgatgaagctctggcagcatttgaaaagtataaaaatgta

SEQ ID NO: 549668 - DNA, 75 bp, synthetic construct
  source 1..75: mol_type = other DNA
ggaaataacaacaataacactgcttcagttaatactgcaccaacgaatgctcaggtcagtgatatggataagagt

SEQ ID NO: 549669 - DNA, 75 bp, synthetic construct
  source 1..75: mol_type = other DNA
agacctatatcgacgaactaaaacagtaccataacccacgctacggtcgtggtccggttggcggcaactattacg

SEQ ID NO: 549670 - DNA, 75 bp, synthetic construct
  source 1..75: mol_type = other DNA
acaacatcgtttcccgcgaaacgctgctggaagcgaaaaaacatccggatcagtaccgcgatctggtggtacgcg

SEQ ID NO: 549671 - DNA, 75 bp, synthetic construct
  source 1..75: mol_type = other DNA
ttacgcgatcctcgaatcctgcggtcgcctgcgttcgactcagcctaacctcagcgtgcgttaccatgcgggatt

SEQ ID NO: 549672 - DNA, 75 bp, synthetic construct
  source 1..75: mol_type = other DNA
ggtgacccggggcaaagcgggggtgcttgccgcgtttcagcagaagtttacccatttcaacgcccggcctgtggc

SEQ ID NO: 549673 - DNA, 75 bp, synthetic construct
  source 1..75: mol_type = other DNA
gtggttatcaaggcgttcatcgcggtgcgggtgctgggcctgcggcagggaggtatcagtgaagaaacacaaaat

SEQ ID NO: 549674 - DNA, 75 bp, synthetic construct
  source 1..75: mol_type = other DNA
actggtccagcgtcgcgatccgatcacgccgacgctctcgccgggttttgccggtgccgtcagtgggcgaatgcg

SEQ ID NO: 549675 - DNA, 75 bp, synthetic construct
  source 1..75: mol_type = other DNA
tgttccattgcgctcagtgcagaaccttcccgaagtaccgcatttctggctatggagaaaatacgtcaggctggc

SEQ ID NO: 549676 - DNA, 75 bp, synthetic construct
  source 1..75: mol_type = other DNA
cggtatcagtgaagaaacacaaaatgacagctgtgagaaaatactgacgccgacagagtggaaactgctgtgggt

SEQ ID NO: 549677 - DNA, 75 bp, synthetic construct
  source 1..75: mol_type = other DNA
tcgtctggcagcacccgatgcagtggtacagcattccaccgctccttaaactttggatcgataaagttttctcgc

SEQ ID NO: 549678 - DNA, 75 bp, synthetic construct
  source 1..75: mol_type = other DNA
actaccggcagttaagcctccagttgccaaaagggagcgatccggcatatcagaaagatgatgccgtaaagaaat

SEQ ID NO: 549679 - DNA, 75 bp, synthetic construct
  source 1..75: mol_type = other DNA
tagtggtcaatacgaccaataaaaatattgccggtatggctgtggctatgctggtgaaagttgtcggttccgtta

SEQ ID NO: 549680 - DNA, 75 bp, synthetic construct
  source 1..75: mol_type = other DNA
caattgtgtaccgagcaacattacctagtatacaggctattgaaggtcatcttctcgaactcccttattctgaaa

SEQ ID NO: 549681 - DNA, 75 bp, synthetic construct
  source 1..75: mol_type = other DNA
ttccaggatgtgacgtggggtgaaagtgtcacgaacggtgcaatagtgatccacacccaacgcctgaaatcagat

SEQ ID NO: 549682 - DNA, 75 bp, synthetic construct
  source 1..75: mol_type = other DNA
aaccccgcgactatagctatctctgtagcaatgtatttcgtaatggaatatctgatgaaagcctgtgatcaaacc

SEQ ID NO: 549683 - DNA, 75 bp, synthetic construct
  source 1..75: mol_type = other DNA
agcaatcccacggctcagcgcgtttccgctgggtcaaggcgccgaccagcccagagctcacccagctgacgcaca

SEQ ID NO: 549684 - DNA, 75 bp, synthetic construct
  source 1..75: mol_type = other DNA
attggtgcgcatccgggctttgatgtgctgtcgcagccgctacaggcgacggcaatctactgcgggctgaactgg

SEQ ID NO: 549685 - DNA, 75 bp, synthetic construct
  source 1..75: mol_type = other DNA
cagaatctatcgcctatctgctgaaagatacgtcgcagtttgaaatttcggtaccggcttatccggataaaacat

SEQ ID NO: 549686 - DNA, 75 bp, synthetic construct
  source 1..75: mol_type = other DNA
aaagtcgacgttgctacgtgccctggcggggctgaataaggttagcggtaatatatttcttgatggggtcaacct

SEQ ID NO: 549687 - DNA, 75 bp, synthetic construct
  source 1..75: mol_type = other DNA
ccagagaatctggctagtgtatatcatattcgtggacggatagagcattgttctcagggcttgttacaacttatt

SEQ ID NO: 549688 - DNA, 75 bp, synthetic construct
  source 1..75: mol_type = other DNA
tgcggaaggtgaaaaaacactcgccgcggcgatccccattggtgatggcgtggatgaggagtttttggggcgatt

SEQ ID NO: 549689 - DNA, 75 bp, synthetic construct
  source 1..75: mol_type = other DNA
ttacctgacctgaccaaaccacagtacgcggtgatgcgcgccattgctgataagcctggtatcgaacaggtggca

SEQ ID NO: 549690 - DNA, 75 bp, synthetic construct
  source 1..75: mol_type = other DNA
cactgagagcaagtttgtagtttatgatgtgattggtcgcaatatgtttcttaaccttctggtcgtggtgtttta

SEQ ID NO: 549691 - DNA, 75 bp, synthetic construct
  source 1..75: mol_type = other DNA
ggcttcactgctgacgtccggcggcgttccggccagccggatccgggtcgtcgggaaaggagataccgtaccggt

SEQ ID NO: 549692 - DNA, 75 bp, synthetic construct
  source 1..75: mol_type = other DNA
tgctgacgggactatttctctgcaagatagcaatggtcgtaaggcaacgattaatctttggcagattgatgaagc

SEQ ID NO: 549693 - DNA, 75 bp, synthetic construct
  source 1..75: mol_type = other DNA
ccagaatatttgatgtttttctggaggccgacaccgcattcattcgactggaagatgtcggctgggatcgttctc

SEQ ID NO: 549694 - DNA, 75 bp, synthetic construct
  source 1..75: mol_type = other DNA
actgattgatgctgcaatggcttccattagtctgattcaactgaaattacaggctgggcggaagctgacgcagcc

SEQ ID NO: 549695 - DNA, 75 bp, synthetic construct
  source 1..75: mol_type = other DNA
cgaaatcgcaggtaataacgcggtggtgaatcaggacggcacgctggacgtcagcggcggcggtcacgggattga

SEQ ID NO: 549696 - DNA, 75 bp, synthetic construct
  source 1..75: mol_type = other DNA
acagtaaacaacactggaaaaaccatcgtcgacggcaaaggcaccaccggaactgaaatcgcgggtaacaacgcg

SEQ ID NO: 549697 - DNA, 75 bp, synthetic construct
  source 1..75: mol_type = other DNA
gattgacggcgacaaggcggttgttaataacgaaggcgagagcaccatcaccaacggcggcaccggcacgcagat

SEQ ID NO: 549698 - DNA, 75 bp, synthetic construct
  source 1..75: mol_type = other DNA
gcggtatgtggatgcgctgcggttggaaaaaaataatctacccacgaatgctgagaatagctatacaaaaatatg

SEQ ID NO: 549699 - DNA, 75 bp, synthetic construct
  source 1..75: mol_type = other DNA
ccgcctcgcgtgacagcacgggcaggccgtggccgctggtgatttaccagcgtgccggacgggaatggctggaag

SEQ ID NO: 549700 - DNA, 75 bp, synthetic construct
  source 1..75: mol_type = other DNA
cggcgatgttcggcagactgccggaccagcgggactatgtgcgctggcgggtgagcgcgaacgaagggcaggtgt

SEQ ID NO: 549701 - DNA, 75 bp, synthetic construct
  source 1..75: mol_type = other DNA
tgcgtggtcaaccgcgtgatgtcatgttccacagcgacagtaataatgccgatgtaagtctttaccaccactcag

SEQ ID NO: 549702 - DNA, 75 bp, synthetic construct
  source 1..75: mol_type = other DNA
cagggctggttctggcagcagaatagtgaagggcggtatgtggatgcgcttcggctggatatccggccgcattaa

SEQ ID NO: 549703 - DNA, 75 bp, synthetic construct
  source 1..75: mol_type = other DNA
aagagagcctggatgacacacagggctggctgtactggctggcgcagttgacggcagctcatgtctcaccacaga

SEQ ID NO: 549704 - DNA, 75 bp, synthetic construct
  source 1..75: mol_type = other DNA
ggtgagctcgttattacgggcgacaataccacagtaaacaacactggaaaaaccatcgtcgacggcaaaggcgcc

SEQ ID NO: 549705 - DNA, 75 bp, synthetic construct
  source 1..75: mol_type = other DNA
aaactggaacgaaacacgctcactgctcttctgaatgtggccagctggcttaaaagaaagccaggtacgccggaa

SEQ ID NO: 549706 - DNA, 75 bp, synthetic construct
  source 1..75: mol_type = other DNA
tgggaatagtaaaggaaaaattacaaattgtaccattgtcaattgatactgatggcttgaataaaaaagttaatt

SEQ ID NO: 549707 - DNA, 75 bp, synthetic construct
  source 1..75: mol_type = other DNA
ggatgatgaatttaatatatatgcagaggcacatattccaaaaataaaatactcggaagataagaagaccggtga

SEQ ID NO: 549708 - DNA, 75 bp, synthetic construct
  source 1..75: mol_type = other DNA
gccgcgcgtgagattgcgcgtgtggggggcgcggtgacggtgaccggccacacggacagccagccgatccactcc

SEQ ID NO: 549709 - DNA, 75 bp, synthetic construct
  source 1..75: mol_type = other DNA
cccgacaatgacggttacggcgcggccataaaggacactcttcgcaaggaggagagcaaggtggtcgttgaggac

SEQ ID NO: 549710 - DNA, 75 bp, synthetic construct
  source 1..75: mol_type = other DNA
ttcatgcgtggagttatcccaacgacggaaatgaaaaaatattgtagtgaaaattgtgccgaaaaagaccagatg

SEQ ID NO: 549711 - DNA, 75 bp, synthetic construct
  source 1..75: mol_type = other DNA
caggaagactgcgaaaagctgaacaagcgcaaagtggatctggttttcgcgccctcggtaaaagagatctacccg

SEQ ID NO: 549712 - DNA, 75 bp, synthetic construct
  source 1..75: mol_type = other DNA
cattttcgcggcgtttcgactattgtcagcaagctgttcaacctggtccagccagatatcgcttgcttcggtgaa

SEQ ID NO: 549713 - DNA, 75 bp, synthetic construct
  source 1..75: mol_type = other DNA
aacgtaaagtggatttagttttcgcgccttcggtaaaagagatctacccgaacggtacagaaacccacacctatg

SEQ ID NO: 549714 - DNA, 75 bp, synthetic construct
  source 1..75: mol_type = other DNA
acgtattccctgccgaatggaaaacaaatcataagtccggtattaatgaagctcagaccagaggaactaccttct

SEQ ID NO: 549715 - DNA, 75 bp, synthetic construct
  source 1..75: mol_type = other DNA
ggagaaagatatgacgtattccctgccgaacggaaaacaaatcataagtccggtattaatgaagttgagaccaga

SEQ ID NO: 549716 - DNA, 75 bp, synthetic construct
  source 1..75: mol_type = other DNA
tctggctcgctatccacgcaccttgcaggaagactgcgagaagctaaacaaacgtaaagtggatctggttttcgc

SEQ ID NO: 549717 - DNA, 75 bp, synthetic construct
  source 1..75: mol_type = other DNA
ccggataacggcgtttattccgcgcttgagctgggcatgggcgcacgtcctgaggcggttctgttcgccattacc

SEQ ID NO: 549718 - DNA, 75 bp, synthetic construct
  source 1..75: mol_type = other DNA
gggatcaggcccgaatcgtgttcgacgatgcccgccagatgtgcctgctgtcaaaaccgctgaaaaagcgcgtca

SEQ ID NO: 549719 - DNA, 75 bp, synthetic construct
  source 1..75: mol_type = other DNA
gtatagcagcgcctttattgaggtgccgcgcaagaatgccaaatccaccgtggccgccatgctggctaactggtt

SEQ ID NO: 549720 - DNA, 75 bp, synthetic construct
  source 1..75: mol_type = other DNA
cggaaggtgattgtgcatcgtggcgatccggtgctggcctggtcaatgagtaatgttgtgatgcagagtgacgca

SEQ ID NO: 549721 - DNA, 75 bp, synthetic construct
  source 1..75: mol_type = other DNA
ggtatgggcgcacgtcctgaggctattttgttcgccataacgaccgccgggagtaacgttgtctcagcctgtaaa

SEQ ID NO: 549722 - DNA, 75 bp, synthetic construct
  source 1..75: mol_type = other DNA
cagggagatccggcttctgacccgccactatctaccggaagcgcaactgcttaacgtcgccaacaaaaaccgcgc

SEQ ID NO: 549723 - DNA, 75 bp, synthetic construct
  source 1..75: mol_type = other DNA
cgttccggcagtgctggcttactatgaccactttattgaatcggttagcccggacatctatacccgttactttat

SEQ ID NO: 549724 - DNA, 75 bp, synthetic construct
  source 1..75: mol_type = other DNA
cgccaactaacggtgcctgcggtatcgttccggcagtgctggcttactatgaccactttattgaatcagttagcc

SEQ ID NO: 549725 - DNA, 75 bp, synthetic construct
  source 1..75: mol_type = other DNA
tgacgaacaaacgttgttggcgatgcggacatggttagcgggtgatttagcggggttggattgggcgacgcttgg

SEQ ID NO: 549726 - DNA, 75 bp, synthetic construct
  source 1..75: mol_type = other DNA
aacacccagtgggacgcgtacgtgatatcgaagcactggatgaattgctggcgacgctgaccgatgataaaccgc

SEQ ID NO: 549727 - DNA, 75 bp, synthetic construct
  source 1..75: mol_type = other DNA
gctgcgctacaaccttgctgccatgattgcgcgcttcaatgaaacgggccgcagccaggtgctggcaaaacgtat

SEQ ID NO: 549728 - DNA, 75 bp, synthetic construct
  source 1..75: mol_type = other DNA
cgaagggctgttatttgctattaccacatcaggcagtaacgtcgtttcagcctgtaagcagcactatgattattg

SEQ ID NO: 549729 - DNA, 75 bp, synthetic construct
  source 1..75: mol_type = other DNA
gggctatatgcaggcgtttgtgaagtatggactacgcaacttgaaagaaggggcgaagttccgcaaaggtattga

SEQ ID NO: 549730 - DNA, 75 bp, synthetic construct
  source 1..75: mol_type = other DNA
tggtgacgaacatcagcctgtcaccaccgctgacattctgaccccccgacgcagggaggattacggtgaggacct

SEQ ID NO: 549731 - DNA, 75 bp, synthetic construct
  source 1..75: mol_type = other DNA
tggtgacgaacatcagccagtcaccaccgctgacattctgacccctcgacgcggggaggattacggtgaggacct

SEQ ID NO: 549732 - DNA, 75 bp, synthetic construct
  source 1..75: mol_type = other DNA
ggtttagtgatgaagcggtgagtggtgcaatcaaggcaggagagcgtccagggtttgctgaactactcaattatg

SEQ ID NO: 549733 - DNA, 75 bp, synthetic construct
  source 1..75: mol_type = other DNA
atacgaaccagatacgccgtgaccgtccgctgacacacgaagaactgatgcactatgttcccggtattttcggtg

SEQ ID NO: 549734 - DNA, 75 bp, synthetic construct
  source 1..75: mol_type = other DNA
gtgcttttatacgcacattttgtgcgtatttggcagatgaactttgttttgttcgtactgtgccctcacagttaa

SEQ ID NO: 549735 - DNA, 75 bp, synthetic construct
  source 1..75: mol_type = other DNA
ccagacccgtgtgcgcgacccgggccgccggggatacaccaaacacatgctgcgtctgcgccgtgacggggagat

SEQ ID NO: 549736 - DNA, 75 bp, synthetic construct
  source 1..75: mol_type = other DNA
agcattgataccgacattaagctcaaccgcgcattgtgggtgatggcagaaacgatgctggagagcctgcgctga

SEQ ID NO: 549737 - DNA, 75 bp, synthetic construct
  source 1..75: mol_type = other DNA
ctgccagatcctggacggcgaagaggtcaacgattcaatttttgtactgatttacgaactggacgacgaaaacga

SEQ ID NO: 549738 - DNA, 75 bp, synthetic construct
  source 1..75: mol_type = other DNA
tggtgacgaacatcagccagtcaccaccgctgacattctgaccccacgacgctgggaggattacggtgaggacct

SEQ ID NO: 549739 - DNA, 75 bp, synthetic construct
  source 1..75: mol_type = other DNA
catccagctaccagatgttacccggatattttcgtgccatttgtaccaatggactggtctgcggtcagtctctgg

SEQ ID NO: 549740 - DNA, 75 bp, synthetic construct
  source 1..75: mol_type = other DNA
gggctatatgcaggcgtttgtgaagtatggactgcgcaacctgaaagaaggggctaaattccgtaaagggattga

SEQ ID NO: 549741 - DNA, 75 bp, synthetic construct
  source 1..75: mol_type = other DNA
cattcaccctgcttgcgatcgcgttgctctgtggcgcagccgtatcgattgctggccccattggttttgtcggcc

SEQ ID NO: 549742 - DNA, 75 bp, synthetic construct
  source 1..75: mol_type = other DNA
gcatggccggtaaatcaggcaaaaatgatgcagctgatgctcagtctatctgtgaagcagttcgtcgcccgcata

SEQ ID NO: 549743 - DNA, 75 bp, synthetic construct
  source 1..75: mol_type = other DNA
tcattaggcattataagcatatgttgggattgcatctttcactattaattttcgttctattcattgcttacattt

SEQ ID NO: 549744 - DNA, 75 bp, synthetic construct
  source 1..75: mol_type = other DNA
gccgagtgcgtgagaagagcaaacacactgtagacaatagctctttgaaagaactggatgatgcaatacaagccc

SEQ ID NO: 549745 - DNA, 75 bp, synthetic construct
  source 1..75: mol_type = other DNA
atcgtggataaccataacgggatgctggagcttggcaccagcgagcggggcgggctttccattcgcgcctggctg

SEQ ID NO: 549746 - DNA, 75 bp, synthetic construct
  source 1..75: mol_type = other DNA
attactgggcaagattgtttcggcagtatggtcatgagccacgtctgatggctgctaagtttatatcgccttatc

SEQ ID NO: 549747 - DNA, 75 bp, synthetic construct
  source 1..75: mol_type = other DNA
cgccaaaaacgcaaggctgtgctggcatcattgcattacggtgatgatttcaggctgtactcagccagctaaagc

SEQ ID NO: 549748 - DNA, 75 bp, synthetic construct
  source 1..75: mol_type = other DNA
gcttgaagtccagagctagtaacgtcttgaatctcttaagcgtaatagcgaatggggaaaaagtggagagaaata

SEQ ID NO: 549749 - DNA, 75 bp, synthetic construct
  source 1..75: mol_type = other DNA
atatggtggagaggctcaacagaaacaacaaaggcccggttatttccgggcggatttatatgagtagtgttgatg

SEQ ID NO: 549750 - DNA, 75 bp, synthetic construct
  source 1..75: mol_type = other DNA
cctgcggcgaccaacgacacgccacagggccgggcagtcaaccggcgtgtcgaaatcagtcttgttccgcgttct

SEQ ID NO: 549751 - DNA, 75 bp, synthetic construct
  source 1..75: mol_type = other DNA
gagaaagagggcgggattacaaaatgcccgattctttccgtgcgcagattcaagcaggaggcaaccagtgagtaa

SEQ ID NO: 549752 - DNA, 75 bp, synthetic construct
  source 1..75: mol_type = other DNA
ttatcgagtatgtggatgcgttgaaagctgccgggtatgaccgtctttttcccgagcttaaaccacataaaacca

SEQ ID NO: 549753 - DNA, 75 bp, synthetic construct
  source 1..75: mol_type = other DNA
tgttctggcagatgacggcgtttattacctgaaccttgaaagcgatagcgaaaacggaaagaaactaaaaaacgc

SEQ ID NO: 549754 - DNA, 75 bp, synthetic construct
  source 1..75: mol_type = other DNA
ttatttgctttcctgctggcgggcgtacaagtttcgcaaaatgttgtgtaaaagccagcaaggctatctgttgat

SEQ ID NO: 549755 - DNA, 75 bp, synthetic construct
  source 1..75: mol_type = other DNA
tttgtcgttgtgctgccggatgttgttatcgacgacgccagtgccgatccgctgcgttacaacctggccgcaatg

SEQ ID NO: 549756 - DNA, 75 bp, synthetic construct
  source 1..75: mol_type = other DNA
gataaacggagaacatgtccttgaaatcattctgctcaactcccatgacggtacctccagctaccagatgctgcc

SEQ ID NO: 549757 - DNA, 75 bp, synthetic construct
  source 1..75: mol_type = other DNA
tgatgctgctgatgctcaggctatctgtgaagctgtccgtcgttcgcatatgcggttcgtaccagtgaaagacga

SEQ ID NO: 549758 - DNA, 75 bp, synthetic construct
  source 1..75: mol_type = other DNA
gggaagtgcgtgttccgcaccggggaaatgtggtggacagagtcattgaaggggcttacgaggtggtgggggttt

SEQ ID NO: 549759 - DNA, 75 bp, synthetic construct
  source 1..75: mol_type = other DNA
gggctatatgcaggcattcgttaagtacggactgcgcaacctgaaggaagggccaaagttccgtaagagcattga

SEQ ID NO: 549760 - DNA, 75 bp, synthetic construct
  source 1..75: mol_type = other DNA
ctggttggggctaacgccatcacaatacagtagtggcggaaaatcaaagcttggcaggataacaaaagcgggtga

SEQ ID NO: 549761 - DNA, 75 bp, synthetic construct
  source 1..75: mol_type = other DNA
tattgattcgtcttgctattgatgaacagacggcattttcccgcaaacccgatcatcaactggcggcgttacagg

SEQ ID NO: 549762 - DNA, 75 bp, synthetic construct
  source 1..75: mol_type = other DNA
cgcaactggcaaaaactactggcggtaacggctggataaaaatgttaaggcaacgcgagctgaaactataccagt

SEQ ID NO: 549763 - DNA, 75 bp, synthetic construct
  source 1..75: mol_type = other DNA
gagcgtccttatatcgtttctaagctggactttgcttatcagttctgctgcgacatgggctatgccattgatatc

SEQ ID NO: 549764 - DNA, 75 bp, synthetic construct
  source 1..75: mol_type = other DNA
ggggttattgccccacaaagcactgatgctctgcgtcatgttgtttctgaccagaaggaaactctgccagtacag

SEQ ID NO: 549765 - DNA, 75 bp, synthetic construct
  source 1..75: mol_type = other DNA
gttcagcaatgtgttgatgatttgatggaacacgttgatcgcattgaagctaacatcactgaatatgaccgaatt

SEQ ID NO: 549766 - DNA, 75 bp, synthetic construct
  source 1..75: mol_type = other DNA
cggagtcgatccgtgcaacctccgttgcagtagcaatatcaggttttggtctgctcattaatcgtccggcgcttt

SEQ ID NO: 549767 - DNA, 75 bp, synthetic construct
  source 1..75: mol_type = other DNA
caatctcctcccgcagttttggcgtagccgataaaataaaaagcggactcggcgttgccggccccgttatcgata

SEQ ID NO: 549768 - DNA, 75 bp, synthetic construct
  source 1..75: mol_type = other DNA
ctgggtgaaaggatgggaaacgttgctgacaagtgcaggaaacctggtgacaatctcctcccgcagttttggcgt

SEQ ID NO: 549769 - DNA, 75 bp, synthetic construct
  source 1..75: mol_type = other DNA
atgggtattgacgtaaaagtggagtttgaggcgaagagaaacggtaagtgggagccggtacataatcaatacgcc

SEQ ID NO: 549770 - DNA, 75 bp, synthetic construct
  source 1..75: mol_type = other DNA
atagcgcggcggacggctacatcaataccaacttgaccgccaatggcagcgtcggctggcagggtaaaaacatcg

SEQ ID NO: 549771 - DNA, 75 bp, synthetic construct
  source 1..75: mol_type = other DNA
aagacggcacactgctggctaacgcacggattaacaaccatatcggccgaacccgaaccgatgaaaacggcgagt

SEQ ID NO: 549772 - DNA, 75 bp, synthetic construct
  source 1..75: mol_type = other DNA
atgaaaaagcgctggcgaaagatctctcctggccggagcggctggtgctggcaaaaagctgtggttttgattttg

SEQ ID NO: 549773 - DNA, 75 bp, synthetic construct
  source 1..75: mol_type = other DNA
atgttgctacagcggttgcaaagtaaaaatctgctccagccttttaataatcaaatcgaaacaagcagaaagtta

SEQ ID NO: 549774 - DNA, 75 bp, synthetic construct
  source 1..75: mol_type = other DNA
attcccgttgccggtggcgacgattttggctcggtcaccgccggtctggcccgctgggcgcaggtggttttcgcc

SEQ ID NO: 549775 - DNA, 75 bp, synthetic construct
  source 1..75: mol_type = other DNA
gcacacaagatccaaacggccttaattagtcaggatgaaggaagtggtaaaattcatgtcaatttaattttggta

SEQ ID NO: 549776 - DNA, 75 bp, synthetic construct
  source 1..75: mol_type = other DNA
cggaatctggcaacaagaaagctgtgatagatagtttctacctcgaggggaaaaatggcacaaaaacagatattg

SEQ ID NO: 549777 - DNA, 75 bp, synthetic construct
  source 1..75: mol_type = other DNA
caagttcgattagcttttagtgtagcgacggctatccgtcctgatgtgctaattatcgatgaggcattatctgtt

SEQ ID NO: 549778 - DNA, 75 bp, synthetic construct
  source 1..75: mol_type = other DNA
gtttccggcgatgatgcgttacgccctgccaggcattggcaacaactggcaggtgattcttaaatcaactgccct

SEQ ID NO: 549779 - DNA, 75 bp, synthetic construct
  source 1..75: mol_type = other DNA
cacgtagaagaagagaaaatcaattacgacttcttcctcagcctgccagaaatcgaccgtactaaactggagcgt

SEQ ID NO: 549780 - DNA, 75 bp, synthetic construct
  source 1..75: mol_type = other DNA
cgttccgcttatctcatttcccaggctgattttgttggctgccaccagttgcagtttatcgataaatatcagatg

SEQ ID NO: 549781 - DNA, 75 bp, synthetic construct
  source 1..75: mol_type = other DNA
acgacacgattcttgaactgatgccgcaggcagaaattgatgcccaccgcgcccgcgcgctgaacccggaacatc

SEQ ID NO: 549782 - DNA, 75 bp, synthetic construct
  source 1..75: mol_type = other DNA
ggcagaacagttatggaaagatgctgcagctgatttgcaaaaacgctatgacttcctggcacaaatggccggaaa

SEQ ID NO: 549783 - DNA, 75 bp, synthetic construct
  source 1..75: mol_type = other DNA
gatccgtacgcagcgtggcggtactggacagaaccaaagaacccggtgcccaggcagaaccgctctatctggatg

SEQ ID NO: 549784 - DNA, 75 bp, synthetic construct
  source 1..75: mol_type = other DNA
tacgatctggcattaagtcacgatcaaatgcgacaacttaccgcaacaggcttctggcctttgtatcgttttgat

SEQ ID NO: 549785 - DNA, 75 bp, synthetic construct
  source 1..75: mol_type = other DNA
cagtgaagttatcgccatctaccctattacccccagttccacgatggcagaacaggctgatgcctgggccggaaa

SEQ ID NO: 549786 - DNA, 75 bp, synthetic construct
  source 1..75: mol_type = other DNA
gcgtaccgacaagattgatgctgcggctgctgcaacagctgcaaaagtcgaatcccgcacactggttggtgtgag

SEQ ID NO: 549787 - DNA, 75 bp, synthetic construct
  source 1..75: mol_type = other DNA
ttttacagggggcgctcgtcacgctggagctggctatcagctctgtagtgctcgctgtaattatcggtcttattg

SEQ ID NO: 549788 - DNA, 75 bp, synthetic construct
  source 1..75: mol_type = other DNA
acgcagcgtggcggtactggacagaaccaaagaacccggtgcccaggcagaaccgctctatctggatgtaatgac

SEQ ID NO: 549789 - DNA, 75 bp, synthetic construct
  source 1..75: mol_type = other DNA
cggtgatccgcggtacgtccgccaatcctgacacttatttccagtctcgcgaagccaccaacccatggtacaacg

SEQ ID NO: 549790 - DNA, 75 bp, synthetic construct
  source 1..75: mol_type = other DNA
agcctgcattcgctggatgtgaaatcgcgtgatatgcgcgggcagaaatatgtcttgcaggtggcaccggaagat

SEQ ID NO: 549791 - DNA, 75 bp, synthetic construct
  source 1..75: mol_type = other DNA
aagtatataaaaacatcaaagccgaattacaaatacgatcaatccttcagcatgcctgggcggagattgaacacg

SEQ ID NO: 549792 - DNA, 75 bp, synthetic construct
  source 1..75: mol_type = other DNA
gtgacgcggggcgtagagcgtctgccgtcggattttgagctttcgctcacggactggtatccgcaggaaggatac

SEQ ID NO: 549793 - DNA, 75 bp, synthetic construct
  source 1..75: mol_type = other DNA
catcgctggtcctgatgccgccggaggcgttcagcgtgcagccgtaccgtttttattccggcgtggccggaaggg

SEQ ID NO: 549794 - DNA, 75 bp, synthetic construct
  source 1..75: mol_type = other DNA
gtgccagacttacatcctgggtcaacgtgatggtaaagcagaaacctattttgtcgcgttagatgatacaggaca

SEQ ID NO: 549795 - DNA, 75 bp, synthetic construct
  source 1..75: mol_type = other DNA
ccgaatacgcttatcccggtcaacatcccgagtctgcagctgcctgacaccgaattgcttatcgcagaggtgact

SEQ ID NO: 549796 - DNA, 75 bp, synthetic construct
  source 1..75: mol_type = other DNA
cggatgttgatgaacttgtgaaggtaccccagttcactctgaactggggtgagtctccgcaagaagtcatcgatc

SEQ ID NO: 549797 - DNA, 75 bp, synthetic construct
  source 1..75: mol_type = other DNA
ggaacgcagcaagcaggatgtttcgctgttaccagaaaatcaacaggcgctgaaatttatcccttgtactgggca

SEQ ID NO: 549798 - DNA, 75 bp, synthetic construct
  source 1..75: mol_type = other DNA
atgggtggcgcggtaaaccagactacgatcaataatggagtgctacaggtttatggcgcggcgactgatcccacg

SEQ ID NO: 549799 - DNA, 75 bp, synthetic construct
  source 1..75: mol_type = other DNA
gagcgtactcaacctggagcatggggacgtattcagttgactgatgccattgctgagttggcgaaaaaacagtcc

SEQ ID NO: 549800 - DNA, 75 bp, synthetic construct
  source 1..75: mol_type = other DNA
atgaatggcctaccgttggcccatgaattactggcacatgtacgtaaccccgacgcgcagccgcacagcattaat

SEQ ID NO: 549801 - DNA, 75 bp, synthetic construct
  source 1..75: mol_type = other DNA
attttgcgtaatggcttaaccgtgccggtcagccgccgttatctgaaaagtttaaaagaggcgattggcctgtaa

SEQ ID NO: 549802 - DNA, 75 bp, synthetic construct
  source 1..75: mol_type = other DNA
tatatcgtttttctcaccgcgtttgacgaatacgctattaaagcctttgaagaacatgcctttgactatctgctg

SEQ ID NO: 549803 - DNA, 75 bp, synthetic construct
  source 1..75: mol_type = other DNA
cgccggaagtatataaagtatttcaaaatggggtgctggattttaaaccctgatatttattgttttgtaataaac

SEQ ID NO: 549804 - DNA, 75 bp, synthetic construct
  source 1..75: mol_type = other DNA
ttatttctgacccgggtggggacaaagcgcgcggccagcggtatcgcagaaggggtaaatatcgaacaggcttat

SEQ ID NO: 549805 - DNA, 75 bp, synthetic construct
  source 1..75: mol_type = other DNA
gactttaaacaaccaagaatgaaaagtttgctcgaaaagctttgggatattttgaaacaacaaggccgcccatga

SEQ ID NO: 549806 - DNA, 75 bp, synthetic construct
  source 1..75: mol_type = other DNA
aaaaatattttaaccggagcagactttaaacaaccaagaatgaaaagtttgctcgaaaaactttgggatattttg

SEQ ID NO: 549807 - DNA, 75 bp, synthetic construct
  source 1..75: mol_type = other DNA
atttttttgatgaccctactttattttcagtattcgataacaagcaggtgtcaggacttagggagttaagatttc

SEQ ID NO: 549808 - DNA, 75 bp, synthetic construct
  source 1..75: mol_type = other DNA
caggccggaatcgggcatatcgtcgcagtacatgtgaaagacaccaaacctggcgtcttcaaaaacgtgccgttt

SEQ ID NO: 549809 - DNA, 75 bp, synthetic construct
  source 1..75: mol_type = other DNA
gactggagccgcgatcagcgtctggcgctggtgaacgcgattgttgaaaccggcgtacgcgtaccgtcaatgtgc

SEQ ID NO: 549810 - DNA, 75 bp, synthetic construct
  source 1..75: mol_type = other DNA
tctcggttattggctacaaaatatgagacaggcgctgatgtaatcggcgcaagaatactttatatgaataataac

SEQ ID NO: 549811 - DNA, 75 bp, synthetic construct
  source 1..75: mol_type = other DNA
cgtctgaccccactatctgaaaaaaccatcaagaagcgcagagaaatgaagcctcccattccaggcgataagccg

SEQ ID NO: 549812 - DNA, 75 bp, synthetic construct
  source 1..75: mol_type = other DNA
gagcaacgctgagctggggtatctccagtccaccggggcaaccgtagagatagacggtgagaccgttactctgcc

SEQ ID NO: 549813 - DNA, 75 bp, synthetic construct
  source 1..75: mol_type = other DNA
taggcctttttgcctgggcggttgcattcatcgtctttactgcattttttaactacacaacgcgccttaattatg

SEQ ID NO: 549814 - DNA, 75 bp, synthetic construct
  source 1..75: mol_type = other DNA
attgacagtaggcacagagcctaacgaatttctttcgatgggcaaacgctttattattagaaatcaaaagatagt

SEQ ID NO: 549815 - DNA, 75 bp, synthetic construct
  source 1..75: mol_type = other DNA
taaagcagattggaatattcttgctgcaagaagtctttctaataaaagcaaagaaaactataaggttttttttaa

SEQ ID NO: 549816 - DNA, 75 bp, synthetic construct
  source 1..75: mol_type = other DNA
accgcccatcctcggcgataagccgttacgtgctcgcggattccttttcagagcgattcagtatgtcgtgaggaa

SEQ ID NO: 549817 - DNA, 75 bp, synthetic construct
  source 1..75: mol_type = other DNA
cataatgatttctaccgtcttgcagaagaagtggtgaaaacactggataccacatctacgtattttcgaaagatc

SEQ ID NO: 549818 - DNA, 75 bp, synthetic construct
  source 1..75: mol_type = other DNA
ttatggggaagtttatgatgctctggatgaacgaaatctgggggcgtttgaggaatccgcagatcggcttgtttc

SEQ ID NO: 549819 - DNA, 75 bp, synthetic construct
  source 1..75: mol_type = other DNA
tatgatactccaattccacttaatgaattgatacctggcgctgtaccacctcagtcctttaggtatatacgcgga

SEQ ID NO: 549820 - DNA, 75 bp, synthetic construct
  source 1..75: mol_type = other DNA
caacgtatcagccagaaagtggttactgcaatcggtgaagggattttttcattttctgataaaaaaaatattgtt

SEQ ID NO: 549821 - DNA, 75 bp, synthetic construct
  source 1..75: mol_type = other DNA
tgaccagtctgattgatgctgaactcagacataatttacgtatgaattctgaatatcaaaaatatcgctggaata

SEQ ID NO: 549822 - DNA, 75 bp, synthetic construct
  source 1..75: mol_type = other DNA
ttgagtttatacctgatactggaatttcagagcgctgggaaaaacaatggattaatattggtattgatagggaaa

SEQ ID NO: 549823 - DNA, 75 bp, synthetic construct
  source 1..75: mol_type = other DNA
tcaatttgcaatgatggactcgattatggaataaatatagacaatcatttctatattagaaatcaggtgatgctg

SEQ ID NO: 549824 - DNA, 75 bp, synthetic construct
  source 1..75: mol_type = other DNA
ttgtgccatcaggcccgtattgtgctgctcctgtctggcacaccgatgcacggtaacgagcgtcacttcctggca

SEQ ID NO: 549825 - DNA, 75 bp, synthetic construct
  source 1..75: mol_type = other DNA
aatagaagtaaaaaaccctctgcgctatgatactccaattccacttaatgaattgatacctggcgctgtaccacc

SEQ ID NO: 549826 - DNA, 75 bp, synthetic construct
  source 1..75: mol_type = other DNA
agtaaacaattttttgactcatattttcatagcaaagaaaaggcctttgctatagaaattggtaatctaaaaatc

SEQ ID NO: 549827 - DNA, 75 bp, synthetic construct
  source 1..75: mol_type = other DNA
aagacaagccaagtattgtatgggaaaaaacaagccaatacgcgggtatcagtaaacaattttttgactcatatt

SEQ ID NO: 549828 - DNA, 75 bp, synthetic construct
  source 1..75: mol_type = other DNA
cattactggtacggaattcatcttttggccgtttacgtctgttccgttatcctgatgatacgatgttctgcacgt

SEQ ID NO: 549829 - DNA, 75 bp, synthetic construct
  source 1..75: mol_type = other DNA
taccaactctggtcgccgcatcagaccgggcaaaggtcgatattgagttaattattaacaagctaaaagaggtcg

SEQ ID NO: 549830 - DNA, 75 bp, synthetic construct
  source 1..75: mol_type = other DNA
aatacaaaatgcattgcattcaacataccaactctggtcgccgcatcagaccgggcaaaggtcgatattgagtta

SEQ ID NO: 549831 - DNA, 75 bp, synthetic construct
  source 1..75: mol_type = other DNA
agctgaacagactaacgcccactccgaaccggagtccgtcatcgctactgagtatgagcaatatggtcatttgct

SEQ ID NO: 549832 - DNA, 75 bp, synthetic construct
  source 1..75: mol_type = other DNA
taaatcaggtggtatgggcggttatgccgaatatgcgttcggtaaatccggtaactttatggcgaactacaccta

SEQ ID NO: 549833 - DNA, 75 bp, synthetic construct
  source 1..75: mol_type = other DNA
ggctcaatggcgctggcctgggccttcgcaaaatgcggtatgttcagccgtaaatcaggtggtatgggcggttat

SEQ ID NO: 549834 - DNA, 75 bp, synthetic construct
  source 1..75: mol_type = other DNA
ccgggcggaatccccagactggagagaacatccagatcgcggcggccaacattcctgggttcaaagctggtaagg

SEQ ID NO: 549835 - DNA, 75 bp, synthetic construct
  source 1..75: mol_type = other DNA
gcgacatcacggcaggggaactagaacaatatgctgctggcttacgggaaaaattacgtccgtcaacagtaaacc

SEQ ID NO: 549836 - DNA, 75 bp, synthetic construct
  source 1..75: mol_type = other DNA
ttctgtaacaccgcgaatgaagtcactgatggatatcatagcccgtaaatatccgacattctgtcttccagcctg

SEQ ID NO: 549837 - DNA, 75 bp, synthetic construct
  source 1..75: mol_type = other DNA
aatgccgggtacggcacatcaactgatgcgcgtgctttcagatgttctgctgaagtatgagccacgaattaagtg

SEQ ID NO: 549838 - DNA, 75 bp, synthetic construct
  source 1..75: mol_type = other DNA
tgtggatagtccgtgatgtaaacaatctacgcctgatacagctgggggataactgcgccggtatgcaagtaagca

SEQ ID NO: 549839 - DNA, 75 bp, synthetic construct
  source 1..75: mol_type = other DNA
atggtattggaggattgttgtctcacagcctggaggtggcgatgatctctttaaaaaatgccaatcactctgaat

SEQ ID NO: 549840 - DNA, 75 bp, synthetic construct
  source 1..75: mol_type = other DNA
tgctgacgttcagtttcagcgacgagttaccactggaacaggtcagcgagcgggatcagcttatcctttccgtga

SEQ ID NO: 549841 - DNA, 75 bp, synthetic construct
  source 1..75: mol_type = other DNA
tttgccagccggaactgatcggctggaagcccacgatggtggtgatcgacgaggcccatcaactgactcgacagg

SEQ ID NO: 549842 - DNA, 75 bp, synthetic construct
  source 1..75: mol_type = other DNA
gcttacgtaactggcgtgcaaaacgtacgtgatgtgattccgttcccacgtactccgcgtaacgccagcttctaa

SEQ ID NO: 549843 - DNA, 75 bp, synthetic construct
  source 1..75: mol_type = other DNA
tactccagggccgtgtagccgttgacagcgaagtccccgtgcgcggatgggtacgtccccgccgagattcaaaag

SEQ ID NO: 549844 - DNA, 75 bp, synthetic construct
  source 1..75: mol_type = other DNA
gagcgtttaaaacctggcggcattttcctgctcaacacgccgtacagcgcagatgaagtgtggtcgcgcttgccg

SEQ ID NO: 549845 - DNA, 75 bp, synthetic construct
  source 1..75: mol_type = other DNA
ctattaccagaatatcgccgctctgggcggggctgattggagtctgtacgttttttgcagcactgttatggacga

SEQ ID NO: 549846 - DNA, 75 bp, synthetic construct
  source 1..75: mol_type = other DNA
taataatgaagccagtctcagacaaaatggtaaagcgatgctggcgcatgcgtcatcttcattgagtgatgtaaa

SEQ ID NO: 549847 - DNA, 75 bp, synthetic construct
  source 1..75: mol_type = other DNA
tcaccaacggccaggttgaaagtggtctggacgataaacatctcggccttctgatagaaaatcacacgctggctt

SEQ ID NO: 549848 - DNA, 75 bp, synthetic construct
  source 1..75: mol_type = other DNA
aatcgaccgccagtggtttccgatgccgcccctgctttcgtgaaaaccgtaaccgctgcgatgctcgccgggctt

SEQ ID NO: 549849 - DNA, 75 bp, synthetic construct
  source 1..75: mol_type = other DNA
ttatagcccgtgtgaagagcatggttacgatctggcactcagtcacgaccagatgcgccaactcactgccaccgg

SEQ ID NO: 549850 - DNA, 75 bp, synthetic construct
  source 1..75: mol_type = other DNA
tgaactgctgcgtgacgcagatgcactggtggaaaaatcaatctggctgattggtggtgatggctgggcttacga

SEQ ID NO: 549851 - DNA, 75 bp, synthetic construct
  source 1..75: mol_type = other DNA
tttgaagataatgccgaatttggcctgggtttccgcctgacggtcgatcaacaccgtgtccgcgtgctgcgtctg

SEQ ID NO: 549852 - DNA, 75 bp, synthetic construct
  source 1..75: mol_type = other DNA
gaagccaccaacccatggtacaacgcagtctatgaccatgttgaacaggcgatgaatgatttctctgccgcgaca

SEQ ID NO: 549853 - DNA, 75 bp, synthetic construct
  source 1..75: mol_type = other DNA
gcccgggcgctcaacccggaacatccggtgatccgcggtacgtccgccaatcctgacacttatttccagtctcgc

SEQ ID NO: 549854 - DNA, 75 bp, synthetic construct
  source 1..75: mol_type = other DNA
taatgaagcaagcttcaggcaaaatggcaaagcgatgctggcgcatgcggcatcttcaatgagtaatgtaaaagg

SEQ ID NO: 549855 - DNA, 75 bp, synthetic construct
  source 1..75: mol_type = other DNA
gctgcatgaactgaactatcgcggttctttcctgattgagatgtggaccgaaaaagccaaagaaccggtgctgga

SEQ ID NO: 549856 - DNA, 75 bp, synthetic construct
  source 1..75: mol_type = other DNA
cgacgtctattacgaggaccatgacgaaggcacccagcaacggtttgctgaagggctggcgtgggcggttgaaca

SEQ ID NO: 549857 - DNA, 75 bp, synthetic construct
  source 1..75: mol_type = other DNA
atgaaaaagcgctggcgaaagatctctcctggccggagcggctggtgctggcaaaaagctgcggctttgattttg

SEQ ID NO: 549858 - DNA, 75 bp, synthetic construct
  source 1..75: mol_type = other DNA
cggtatatgctttaattaccgccctttgcgttctatcagccttcatagtaaaacattatatatcttccccaactc

SEQ ID NO: 549859 - DNA, 75 bp, synthetic construct
  source 1..75: mol_type = other DNA
gaaggcacccagcaacgttttgctgaagggctggcgtgggcggttgaacaggcagcggcatcacaagtcatgctg

SEQ ID NO: 549860 - DNA, 75 bp, synthetic construct
  source 1..75: mol_type = other DNA
attcgcctggcgcgcgatctcggtattcgcaccattcaactggcgggctacgacgtctattacgaagaccatgac

SEQ ID NO: 549861 - DNA, 75 bp, synthetic construct
  source 1..75: mol_type = other DNA
taagtgatttgagccttccgacgcgttcgtatatcagtcggacccgacttaatacgtatgaaccaggtcggcagg

SEQ ID NO: 549862 - DNA, 75 bp, synthetic construct
  source 1..75: mol_type = other DNA
tatcaacggcattcgcgacaacactatctccgaagggcagattgccgccctcgcgatgaccattttcttccacga

SEQ ID NO: 549863 - DNA, 75 bp, synthetic construct
  source 1..75: mol_type = other DNA
tgacgccgaagcgcgcgcgaaattgcaggcggtgctggacaacggcaaagcggcagaagtctttggtcgtatggt

SEQ ID NO: 549864 - DNA, 75 bp, synthetic construct
  source 1..75: mol_type = other DNA
ccgcatatccgcgtgcgcgggcgtggttctcatttaccctgcgcgacagcgaacacctgagcgacggtacgccgc

SEQ ID NO: 549865 - DNA, 75 bp, synthetic construct
  source 1..75: mol_type = other DNA
ggcaggccgctggcgcacggttgattggcgggtgctgtcgcaccacgcctgcggatatcgccgcgttaaaagcgc

SEQ ID NO: 549866 - DNA, 75 bp, synthetic construct
  source 1..75: mol_type = other DNA
aggggatgctggatcgcgcgaagggtgaatgggtgatcgaagaggtagggagcgggcgcgaagagacgcgactgc

SEQ ID NO: 549867 - DNA, 75 bp, synthetic construct
  source 1..75: mol_type = other DNA
aggtatgctgtcacgctttgtccgcagcgagtttaaataccgtccgacagacgattttgacgcccgctggccgct

SEQ ID NO: 549868 - DNA, 75 bp, synthetic construct
  source 1..75: mol_type = other DNA
agggtatggacacgatagaggtcgcttatcttgatggtattgatacgccatatcttgaggagcaggagggcttta

SEQ ID NO: 549869 - DNA, 75 bp, synthetic construct
  source 1..75: mol_type = other DNA
atgagagtaaattagactcatatatacattgtatacgaggaataaaagacggagtaaaacttgggaaaaatgaaa

SEQ ID NO: 549870 - DNA, 75 bp, synthetic construct
  source 1..75: mol_type = other DNA
cgcagcgagtttaaataccgcccgacggatgactttgacgcccgctggccgctgattgccgcgcagttgcagtaa

SEQ ID NO: 549871 - DNA, 75 bp, synthetic construct
  source 1..75: mol_type = other DNA
ctgattctgaaagatgagaaagacaccacagcgcgcctgcgtctgatcgtgttgttgctcctcggttttggtgag

SEQ ID NO: 549872 - DNA, 75 bp, synthetic construct
  source 1..75: mol_type = other DNA
atggcagaaaaacaaactgcgaaaaggaaccgtcgcgaagaaatacttcagtctctggcgctgatgctggaatcc

SEQ ID NO: 549873 - DNA, 75 bp, synthetic construct
  source 1..75: mol_type = other DNA
cgataatcagtacacggcgagttttgcttcactgggcacaaaagactacagctctcattcctggtatgccggtgc

SEQ ID NO: 549874 - DNA, 75 bp, synthetic construct
  source 1..75: mol_type = other DNA
gggtggcggtctgtatgcctctgcactctttaattccggagcttattttgacctgattggtaaatatctccatca

SEQ ID NO: 549875 - DNA, 75 bp, synthetic construct
  source 1..75: mol_type = other DNA
tgctgtttttgaccgtgttggcagctttgtcaacagcagcctgaccctcgaaaaaggagcaaaacttacggctca

SEQ ID NO: 549876 - DNA, 75 bp, synthetic construct
  source 1..75: mol_type = other DNA
ccttcagtggtaaaaccaaatccgtggggggagggttgtacgcttcagcactctttgattccggggcttattttg

SEQ ID NO: 549877 - DNA, 75 bp, synthetic construct
  source 1..75: mol_type = other DNA
gttgtcaccactcagaccttcctcagccaacagccgcaaaatgatttcgataaaacaataacctatagcgctggt

SEQ ID NO: 549878 - DNA, 75 bp, synthetic construct
  source 1..75: mol_type = other DNA
ctcagaatgctgtttttgaccgtgttggcagctttgtcaacagcagcctgaccctcggaaaaggagcaaaactta

SEQ ID NO: 549879 - DNA, 75 bp, synthetic construct
  source 1..75: mol_type = other DNA
acaagaccgcctgcaagggcgcatcaaccaacttttcgagcgtattgaagcgcagctgcgtcaggtattgcgtga

SEQ ID NO: 549880 - DNA, 75 bp, synthetic construct
  source 1..75: mol_type = other DNA
ttcctcgcataggggaaaaacgtcttgcttcgtcggtaacaaaggaagatttactgtttatcaggaaagatttgt

SEQ ID NO: 549881 - DNA, 75 bp, synthetic construct
  source 1..75: mol_type = other DNA
ttctgccagcaattcttgctcgtggttttgtccctattgatgagtcgtttttatatgtaaccccaagccgttccc

SEQ ID NO: 549882 - DNA, 75 bp, synthetic construct
  source 1..75: mol_type = other DNA
gcgtgacaccgaaagccagcatgaagaataaatcctggttcaggatgcaggctggggggccgggtgacgcggata

SEQ ID NO: 549883 - DNA, 75 bp, synthetic construct
  source 1..75: mol_type = other DNA
cctatccccgccagcaaagcggcgctgcgtgaggtgatcctgccgttgctggacgagtccgatgaaccgttcgat

SEQ ID NO: 549884 - DNA, 75 bp, synthetic construct
  source 1..75: mol_type = other DNA
gcctgtggttacaagcgctgaccgaaggtgaaagccggacgcagcttgcttccctgaaactgttacaggtcggcg

SEQ ID NO: 549885 - DNA, 75 bp, synthetic construct
  source 1..75: mol_type = other DNA
aaagacaataaccagtcccaggtagaagtactaaacagaaagctatgtacttatgtcccacaggtgccccaacga

SEQ ID NO: 549886 - DNA, 75 bp, synthetic construct
  source 1..75: mol_type = other DNA
gcgggggatcggggtggccagttataaccccatgcagatggtggggctggcgctgacgcacagtacctcagattt

SEQ ID NO: 549887 - DNA, 75 bp, synthetic construct
  source 1..75: mol_type = other DNA
aggcgcagtgtgtggccgatcctgactgttcgctggaaatggcccgcgagcgccttctgaatgaaatgggcaagg

SEQ ID NO: 549888 - DNA, 75 bp, synthetic construct
  source 1..75: mol_type = other DNA
ttgcgaacaaagccattctgcagggctgggaagatgcccctgaaacctatgaacagtggacgcggaaaggtcagt

SEQ ID NO: 549889 - DNA, 75 bp, synthetic construct
  source 1..75: mol_type = other DNA
agtcatcgccgaccaacaaaaacacaccggcccatatttatgccggaaacggcaattttgtgggggacgggatcc

SEQ ID NO: 549890 - DNA, 75 bp, synthetic construct
  source 1..75: mol_type = other DNA
gaataaatcctggttcaggatgcaggcgggtggtcagggtgaggcggatatttatatttatgacgagattggttt

SEQ ID NO: 549891 - DNA, 75 bp, synthetic construct
  source 1..75: mol_type = other DNA
atgttcaaatcgaccctggcagctatggccgctgttttcgctctttctgctctctctcctgcagcgatggccgcg

SEQ ID NO: 549892 - DNA, 75 bp, synthetic construct
  source 1..75: mol_type = other DNA
cgcagctctccggtaaggatgtactggctcttgatggttccgttaacctgccagaaggttcgataaccaagaagt

SEQ ID NO: 549893 - DNA, 75 bp, synthetic construct
  source 1..75: mol_type = other DNA
gcgcatcagcgcggcaaatgggtaggtatttgcggtgaactgggcggtgaaagtcgttatctgccgctactgctt

SEQ ID NO: 549894 - DNA, 75 bp, synthetic construct
  source 1..75: mol_type = other DNA
aagcgcattgatatcgcggcgaatatcggcaccgctctggaagcgccaggcgcgtttgccaacggcgcggaaggc

SEQ ID NO: 549895 - DNA, 75 bp, synthetic construct
  source 1..75: mol_type = other DNA
cggtactgagcggcctgccgctggatgcgattgcccgttatgccgggcaacctgcagtgcttgacgcccagtgcg

SEQ ID NO: 549896 - DNA, 75 bp, synthetic construct
  source 1..75: mol_type = other DNA
ttaatgacagttgcagcctgaacattagcggtagcgatgaagagcaggcgcggcgagtgctggaagagtatatcc

SEQ ID NO: 549897 - DNA, 75 bp, synthetic construct
  source 1..75: mol_type = other DNA
cgcggtgagcggttattatcaggtcgcgcagacgctggcggataaacgccaaaaacaacaggcgcaggccgccgc

SEQ ID NO: 549898 - DNA, 75 bp, synthetic construct
  source 1..75: mol_type = other DNA
acggcgcatccgctgccgcgttcattaagccgcctgaacccggatttactgtacggcaatgtgctggcaagcggc

SEQ ID NO: 549899 - DNA, 75 bp, synthetic construct
  source 1..75: mol_type = other DNA
gcattgcccggctggtgaaaccggttgactggcagtcagaaatgggcgaagtcgaactggtgatcatgctgacac

SEQ ID NO: 549900 - DNA, 75 bp, synthetic construct
  source 1..75: mol_type = other DNA
ctggaagcaccaggcgcgtttgccaacggcgcggaaggcgtcgggctgttccgtaccgaaatgctctatatggat

SEQ ID NO: 549901 - DNA, 75 bp, synthetic construct
  source 1..75: mol_type = other DNA
atggttcacagtctcgatcagatcttatgggtgaaggatgagatccaaaaaacgatcgttgaacttaagcgcgat

SEQ ID NO: 549902 - DNA, 75 bp, synthetic construct
  source 1..75: mol_type = other DNA
ttgtcaccactggcgttggttttggcgtggcgatcccgcacaccaaatctcagtggatccgtcattccagtatca

SEQ ID NO: 549903 - DNA, 75 bp, synthetic construct
  source 1..75: mol_type = other DNA
ccggaactgaagccgcgcaacaatctggtgctggaaaaaccgactattctggtggccgaggatttaaccccaagc

SEQ ID NO: 549904 - DNA, 75 bp, synthetic construct
  source 1..75: mol_type = other DNA
agacgctggcggataaacgccaaaaacaacaggcgcaggctgccgcgcagctggcctattcccgtgataacaagc

SEQ ID NO: 549905 - DNA, 75 bp, synthetic construct
  source 1..75: mol_type = other DNA
tttagcaataaagagcaggcgatccagttcctgtgcggcaacctcggcgttaacgggcgcactgaacatccgttt

SEQ ID NO: 549906 - DNA, 75 bp, synthetic construct
  source 1..75: mol_type = other DNA
agaaccttctccggagacgactggaaaattaccgcgcgagccgggctgggttatcagtttgacctgctggcgaac

SEQ ID NO: 549907 - DNA, 75 bp, synthetic construct
  source 1..75: mol_type = other DNA
agggatataacgctgttctgagtggcaacattacgggtgagcagagtacggtaaatatgaacaatgctctgtggt

SEQ ID NO: 549908 - DNA, 75 bp, synthetic construct
  source 1..75: mol_type = other DNA
gcataatgagaatacaaaactcattatgaacatcattaacgccttggatgcaaaggatattgagcgactatctaa

SEQ ID NO: 549909 - DNA, 75 bp, synthetic construct
  source 1..75: mol_type = other DNA
cgccgggagacctgtattatgacagttctaccagacaatattacatcctgaaaacgagttcatattcaccgttct

SEQ ID NO: 549910 - DNA, 75 bp, synthetic construct
  source 1..75: mol_type = other DNA
gttatagcacaaaattccatgttcacaacaaaaggtattgatatctccggtgagctgactatgatgggaatccct

SEQ ID NO: 549911 - DNA, 75 bp, synthetic construct
  source 1..75: mol_type = other DNA
tgactctgcatggattgagccgcaggcggaacttgtttacggtgctgtatccgggaaacagttctcctggaagga

SEQ ID NO: 549912 - DNA, 75 bp, synthetic construct
  source 1..75: mol_type = other DNA
atgaactatcgtattattccggtcaccgcattctcccagaactgttcattgatctggtgtgaacaaacccgtctg

SEQ ID NO: 549913 - DNA, 75 bp, synthetic construct
  source 1..75: mol_type = other DNA
ggcgtggaagatcgcggcgtaatggcggcgtttatgcaggcactggggtttacggcgcaacagggcggctgggag

SEQ ID NO: 549914 - DNA, 75 bp, synthetic construct
  source 1..75: mol_type = other DNA
ttaagtaaaattaatggactattatatcttcctgctctgggacttatcttgggtgttattggtagtactattgaa

SEQ ID NO: 549915 - DNA, 75 bp, synthetic construct
  source 1..75: mol_type = other DNA
cagcttgaaggtatgtctgacgaacgcgtcagagagattttggaagaaactgagagaagtcgcaaatctaacgcg

SEQ ID NO: 549916 - DNA, 75 bp, synthetic construct
  source 1..75: mol_type = other DNA
ggatgccagtggtttgacgctaatgcaaattctgttgacgcatggtcatctggatcacgttggcgccgcggcgga

SEQ ID NO: 549917 - DNA, 75 bp, synthetic construct
  source 1..75: mol_type = other DNA
tcagtcaaaactgctcatttctggcgacgttattttcaaaggcggagtagggcgtagcgacttccctcgtggtga

SEQ ID NO: 549918 - DNA, 75 bp, synthetic construct
  source 1..75: mol_type = other DNA
acttaaacaatttcggcctgatattttatccgcttgtgaaaaagcaattgcttcagcgaactttgaccttgattt

SEQ ID NO: 549919 - DNA, 75 bp, synthetic construct
  source 1..75: mol_type = other DNA
tttgtagaaaaaccgaactatgataaagctaaagaatacgttgatagtggtgactttgtttggaatagtggcatg

SEQ ID NO: 549920 - DNA, 75 bp, synthetic construct
  source 1..75: mol_type = other DNA
aatcagtcgatttatattccacaaggcgttgaacactccttagcaaatcctggtaaaattcctcttgagttagtt

SEQ ID NO: 549921 - DNA, 75 bp, synthetic construct
  source 1..75: mol_type = other DNA
gagtcggtggattacgcggtcatggaacgtacggcagatgctgttgtggtgccgatggatgcgggctggagcgat

SEQ ID NO: 549922 - DNA, 75 bp, synthetic construct
  source 1..75: mol_type = other DNA
gctatcaggttaagcgcatcaccgtgaagccgggggaagggctgtcgctgcagatgcatcaccaccgggcggaac

SEQ ID NO: 549923 - DNA, 75 bp, synthetic construct
  source 1..75: mol_type = other DNA
gccagccatcgccctggcggcgctggcggctaagcgtcgcgaaccggactgcgacccgctgatgctggtgctggc

SEQ ID NO: 549924 - DNA, 75 bp, synthetic construct
  source 1..75: mol_type = other DNA
aacaaactaacgatgcggttgttgttccaatgaatgctggatggaacgatgttggttcttgggcctcgctttggg

SEQ ID NO: 549925 - DNA, 75 bp, synthetic construct
  source 1..75: mol_type = other DNA
tcacctggtgttgtctaccctacacactaattccacctgcgaaacgctggtacgtttacagcaaatgggagtcgc

SEQ ID NO: 549926 - DNA, 75 bp, synthetic construct
  source 1..75: mol_type = other DNA
aagcgcggaagtcattcatcaactggcgacgctactcaaagcagggttaacgctttctgaagggctggctctgct

SEQ ID NO: 549927 - DNA, 75 bp, synthetic construct
  source 1..75: mol_type = other DNA
cgcttaccaggtggcccgctttgtggagaagccggatcgcgagcgcgccggggtctacctcgcctccggggagta

SEQ ID NO: 549928 - DNA, 75 bp, synthetic construct
  source 1..75: mol_type = other DNA
atccaggtcgccgagcagtatgctgatgaaggtcatctggtcaccttcggtatcgtgccgaatgccccggaaact

SEQ ID NO: 549929 - DNA, 75 bp, synthetic construct
  source 1..75: mol_type = other DNA
ggcgcaacaccgcgccggccatcgccctggcggcccttcaggccacccgctacggtgacgacccgctgatgctgg

SEQ ID NO: 549930 - DNA, 75 bp, synthetic construct
  source 1..75: mol_type = other DNA
cagtttgtcgaaaaaccgaatctggaaaccgcgcaggcctatgtggcaagcggcgaatactactggaacagcggt

SEQ ID NO: 549931 - DNA, 75 bp, synthetic construct
  source 1..75: mol_type = other DNA
ttagcgccaaatccggttacgcaacagttaacgaatctgggagcgacgatttattttaaccatcgcccggaaaac

SEQ ID NO: 549932 - DNA, 75 bp, synthetic construct
  source 1..75: mol_type = other DNA
gctggagagcttccagggaaccggtcgtcgctttgatttcctcggtgagtttccgctggagccggtcaacggtaa

SEQ ID NO: 549933 - DNA, 75 bp, synthetic construct
  source 1..75: mol_type = other DNA
gttaacggtgggctggtaaaagcggctggcgttcatgcacgtttggggcatggccgctacctgattgccgaagcg

SEQ ID NO: 549934 - DNA, 75 bp, synthetic construct
  source 1..75: mol_type = other DNA
gctcatgatgttcgtgaggaaacatccggcgcgttaacgcgcatcagagttctgacctgcctccatctctgtggc

SEQ ID NO: 549935 - DNA, 75 bp, synthetic construct
  source 1..75: mol_type = other DNA
cgctggctggccggataaaaacctggtgatgctgtttcagccgcatcgttttacccgaacccgtgacctgtatga

SEQ ID NO: 549936 - DNA, 75 bp, synthetic construct
  source 1..75: mol_type = other DNA
tgtcggtcgtcagaccaccacttatggcttcagcgaagatgctgatgttcgtgtggaagattatcagcagattgg

SEQ ID NO: 549937 - DNA, 75 bp, synthetic construct
  source 1..75: mol_type = other DNA
atggggtgttaatgcaggggaaaactggtggaaaggtggttgggatccgaagtttaattctgagttgagaagtgt

SEQ ID NO: 549938 - DNA, 75 bp, synthetic construct
  source 1..75: mol_type = other DNA
ctctcaacaccacgaatgacatcgaaaaactgcgtgctatggcacttgccatggtacaaaaagtcatgtcggaga

SEQ ID NO: 549939 - DNA, 75 bp, synthetic construct
  source 1..75: mol_type = other DNA
ctgtgtgatttgcgccaaccgttggcgatcccatctgatttcggtgcagttcatcatgaagtcgaactggctgtg

SEQ ID NO: 549940 - DNA, 75 bp, synthetic construct
  source 1..75: mol_type = other DNA
tctgcacaacctgccgttttacggacgtgcggtgatgtgtgttgacgacccggtgatccgtgagttgttaccgcg

SEQ ID NO: 549941 - DNA, 75 bp, synthetic construct
  source 1..75: mol_type = other DNA
gtccatgaaaaaccctggcaggggattggtgtgggcgcggccgttggactggtattaggactgttgctggcacgc

SEQ ID NO: 549942 - DNA, 75 bp, synthetic construct
  source 1..75: mol_type = other DNA
cgctcctctggcgatcccgccgatcagaaatatgttgagctaaaagcgcgtgcagaaaaagcgctggatgatgtg

SEQ ID NO: 549943 - DNA, 75 bp, synthetic construct
  source 1..75: mol_type = other DNA
tgtatggccatcgccgctgccccactggcaggcacccggttgtgtacattgctaccacggtttttatggtcgtac

SEQ ID NO: 549944 - DNA, 75 bp, synthetic construct
  source 1..75: mol_type = other DNA
aaagcattaacgataactatggacatgaatgtggcgataaagtgttaagcgtgtttgcccagcatattcagaaga

SEQ ID NO: 549945 - DNA, 75 bp, synthetic construct
  source 1..75: mol_type = other DNA
gtggttgatgccgggcagggggttgaagcgcaaaccctggcgaactgttataccgcgatggaaatggatctcgaa

SEQ ID NO: 549946 - DNA, 75 bp, synthetic construct
  source 1..75: mol_type = other DNA
acgatctggatctgatcaccactgcgccgaccgtagtgtatgaagttgaaactacgtcaagagaagttatttacg

SEQ ID NO: 549947 - DNA, 75 bp, synthetic construct
  source 1..75: mol_type = other DNA
atccgtgcgcaggtactggcagagcaaaaagcgcgtgtaaacggtattaatgatctgtttgccatgtttggcggg

SEQ ID NO: 549948 - DNA, 75 bp, synthetic construct
  source 1..75: mol_type = other DNA
aagtgcgtttaattacggaagcagaagagggcgtatttgatgaggtgcttgagagagtgatcactctgattggtg

SEQ ID NO: 549949 - DNA, 75 bp, synthetic construct
  source 1..75: mol_type = other DNA
gttgcagtgccgtcggtgaatcctgtcgatggcctgctaatggcggaaaaaatccgtaaaggcgtagaacttcaa

SEQ ID NO: 549950 - DNA, 75 bp, synthetic construct
  source 1..75: mol_type = other DNA
gccgatcgccaacatgcgctgtttagcggggatgatttcctcaatacatttgttgcagagcactcctccattcgc

SEQ ID NO: 549951 - DNA, 75 bp, synthetic construct
  source 1..75: mol_type = other DNA
attatccatacccagggttacccaatgtgtccggacgatgaagtatgggttgccgatgccgaaggaaatccactg

SEQ ID NO: 549952 - DNA, 75 bp, synthetic construct
  source 1..75: mol_type = other DNA
ggatcgcgtggagtgtgtagattcacttccgctgacggcggtcgggaaagtcgataaaaaacaattacgtcagtg

SEQ ID NO: 549953 - DNA, 75 bp, synthetic construct
  source 1..75: mol_type = other DNA
atcgctattcaggccgcgattggtacgcacattattgcgcgttctaccgttaaacagttgcgtaaaaacgtactg

SEQ ID NO: 549954 - DNA, 75 bp, synthetic construct
  source 1..75: mol_type = other DNA
ggcgatatcgattttgtcatgctggcgaaaaatccgaccatcgacgcctggtggaagctactctcccgcgaggtg

SEQ ID NO: 549955 - DNA, 75 bp, synthetic construct
  source 1..75: mol_type = other DNA
ggcggcgcgctggcgcaaagtgcatggcgatatcgattttgtcatgctggcgaaaaatccgaccatcgacgcctg

SEQ ID NO: 549956 - DNA, 75 bp, synthetic construct
  source 1..75: mol_type = other DNA
ttgcactggcgacctatggcgagctgttcagtatcacccgtcaggccattatcaatgatgatctgaatatgctga

SEQ ID NO: 549957 - DNA, 75 bp, synthetic construct
  source 1..75: mol_type = other DNA
cgttgaatcgctggaaacgcacgcccgacaggcgggtatgcgtacgctttttgaaaacggctgcctggccgtgga

SEQ ID NO: 549958 - DNA, 75 bp, synthetic construct
  source 1..75: mol_type = other DNA
gcggatttgattcaggaaggtaacatcggcctgatgaaagcagtgcgccgttttaacccggaagtgggtgtgcgc

SEQ ID NO: 549959 - DNA, 75 bp, synthetic construct
  source 1..75: mol_type = other DNA
tttcaaccccgaagtgggggtgcgcctggtctccttcgccgtccactggatcaaagcagagatccatgaatacgt

SEQ ID NO: 549960 - DNA, 75 bp, synthetic construct
  source 1..75: mol_type = other DNA
tattccagacaatgtatggccgtcgccgctgccccactggcaggcacccggttgtgtacattgctaccacggttt

SEQ ID NO: 549961 - DNA, 75 bp, synthetic construct
  source 1..75: mol_type = other DNA
gtcacctggtgttgtccacgctacacaccaactctacctgcgaaacactggtgcgtttacagcaaatgggtgttg

SEQ ID NO: 549962 - DNA, 75 bp, synthetic construct
  source 1..75: mol_type = other DNA
atgaatattccacagctcactgccctgtgtctgcgttatcagggagtcttgctggatgccagcgaagaggtggtt

SEQ ID NO: 549963 - DNA, 75 bp, synthetic construct
  source 1..75: mol_type = other DNA
atgagtaaattccgtcatgccctgcaaaaccgggaccagcatattctgaccctgcgggtgatctgcggggtgctg

SEQ ID NO: 549964 - DNA, 75 bp, synthetic construct
  source 1..75: mol_type = other DNA
ggtgattgaccgggataactggatcgtgcgcctggatttggtagcggatgaatatttcagtgcggagccggtcaa

SEQ ID NO: 549965 - DNA, 75 bp, synthetic construct
  source 1..75: mol_type = other DNA
acggttacggcggacgttacaaccgtaatccggtcacggtggaaggccgggacaactggcaggttcgtctcgacc

SEQ ID NO: 549966 - DNA, 75 bp, synthetic construct
  source 1..75: mol_type = other DNA
gttacggtgtttccgctgagcgtgtgcgccagctggaaaagaacgcgatgaaaaaactgcgcgctgccattgaag

SEQ ID NO: 549967 - DNA, 75 bp, synthetic construct
  source 1..75: mol_type = other DNA
gctggattgtctctcggaagcgccgcagcgtctggaagcagcccctgtggttcaggaagagaaaaagggagtgtt

SEQ ID NO: 549968 - DNA, 75 bp, synthetic construct
  source 1..75: mol_type = other DNA
cttcgggctggcgcttgactgctacagcggtacaccacaacggctggaagccgcgccggtgtcttcaggcccggg

SEQ ID NO: 549969 - DNA, 75 bp, synthetic construct
  source 1..75: mol_type = other DNA
tttgattacctgctgagggaagattcgttaactggagtacgggaagggaagtttgcagacagggggattgcatga

SEQ ID NO: 549970 - DNA, 75 bp, synthetic construct
  source 1..75: mol_type = other DNA
ttgtgctgcccgctatctactccaatcagtttccgccaccgtcggattccgtggacggctgcgtgacggagtacc

SEQ ID NO: 549971 - DNA, 75 bp, synthetic construct
  source 1..75: mol_type = other DNA
tatcaccaatctgatccgaacaggtgtagttaccgaagtggaccgggagaactggctttgccgggtgaaaacggg

SEQ ID NO: 549972 - DNA, 75 bp, synthetic construct
  source 1..75: mol_type = other DNA
attcgaatcagtttgcgccaccgtcgacgtcggcggacgcctgtgtgacagaatatcctgacggtggctggtttg

SEQ ID NO: 549973 - DNA, 75 bp, synthetic construct
  source 1..75: mol_type = other DNA
tgtcgcggagcaattgcgtcaactaaacaaactcaccgagaacattattctcgaaccggtagggcgcaacaccgc

SEQ ID NO: 549974 - DNA, 75 bp, synthetic construct
  source 1..75: mol_type = other DNA
tgcagaccaaagatgcggtgctgattgccgaccgtaacgcggtgcaggatgtgaaaaaagtggtcgagcagatca

SEQ ID NO: 549975 - DNA, 75 bp, synthetic construct
  source 1..75: mol_type = other DNA
aaagcgatgagcgccgttgagccagatcttaattttattcgtgtagatgaagaagcgtttctcgcctgtccggaa

SEQ ID NO: 549976 - DNA, 75 bp, synthetic construct
  source 1..75: mol_type = other DNA
cacaggtgtagtcaccgaagtggatcggaagaaatggctgtgccgggtgaaggtaggcgagcttgaaaccaactg

SEQ ID NO: 549977 - DNA, 75 bp, synthetic construct
  source 1..75: mol_type = other DNA
ttctaacggaattgtggttgatgcacatcagcatactggcgtcctgaaaggcggcgacacaaccggaggcccggt

SEQ ID NO: 549978 - DNA, 75 bp, synthetic construct
  source 1..75: mol_type = other DNA
tggccagagtctacccgaccctccgtcttcccgatttgcgcggtgagtttatccgtggatgggacggtggtcgca

SEQ ID NO: 549979 - DNA, 75 bp, synthetic construct
  source 1..75: mol_type = other DNA
gctgagtctgggcggtaatctggaaaccgcgtttgccctgcctgcggtctactcaaaccagtttccgccaccttc

SEQ ID NO: 549980 - DNA, 75 bp, synthetic construct
  source 1..75: mol_type = other DNA
cctgcgtgacagaacatcctgacggcggctggtttgaatacgagcccaccaccgggcgctggtatgtcaggggca

SEQ ID NO: 549981 - DNA, 75 bp, synthetic construct
  source 1..75: mol_type = other DNA
agcgacatggtgatcaatggcagcgtcagccaggagggtggcgcaatgagttctaacgggatcgtggttgatgcg

SEQ ID NO: 549982 - DNA, 75 bp, synthetic construct
  source 1..75: mol_type = other DNA
tcgaaccggcagggcgtaacaccgcacctgccattgcgctggcggcgctggcggcaaaacgtcatagcccggaga

SEQ ID NO: 549983 - DNA, 75 bp, synthetic construct
  source 1..75: mol_type = other DNA
tgtttcattttttagcgcgtgactacattgtgcaggaagggcaacagccgtcctggctgttttacctgacgcgag

SEQ ID NO: 549984 - DNA, 75 bp, synthetic construct
  source 1..75: mol_type = other DNA
gcgagattgagttaatcgataaagaccatgaaccgcgtgcggtgcaggctattgaagagtgttggtgtattgcgc

SEQ ID NO: 549985 - DNA, 75 bp, synthetic construct
  source 1..75: mol_type = other DNA
ttcattttttagcgcgtgactacattgtgcaggaagggcaacagccgtcctggctgttttacctgacgcgaggcc

SEQ ID NO: 549986 - DNA, 75 bp, synthetic construct
  source 1..75: mol_type = other DNA
atgcgcgggttttcttttgcgcgctcgggcgcgagatgggggcagcacgtctttcagtttacgcttacgcaggta

SEQ ID NO: 549987 - DNA, 75 bp, synthetic construct
  source 1..75: mol_type = other DNA
cgacggtttattaattaaaagcaagaaagggtatctcattaaaaacagaaagcagttgtcaggactggcgctgga

SEQ ID NO: 549988 - DNA, 75 bp, synthetic construct
  source 1..75: mol_type = other DNA
gtatcaactggcctgcctgttccgacaacatccaactcaaccctcgcggggggggtgagcgttactcttcataca

SEQ ID NO: 549989 - DNA, 75 bp, synthetic construct
  source 1..75: mol_type = other DNA
tttaattgaagtgcgctccggctcttatctcgaagaggatgatgtggtgcgcttcgcggatcgctacggacgggt

SEQ ID NO: 549990 - DNA, 75 bp, synthetic construct
  source 1..75: mol_type = other DNA
cgattttattcgcgtggatgaagaagcgtttctcgcctgcccggaagagtcggtggattacgcggtcatggaacg

SEQ ID NO: 549991 - DNA, 75 bp, synthetic construct
  source 1..75: mol_type = other DNA
gcggaaacgctgcgtgcttacaccatttcctccacgccaggcgtgagtgaatatatcaccctgaccgtgcggcgg

SEQ ID NO: 549992 - DNA, 75 bp, synthetic construct
  source 1..75: mol_type = other DNA
aaggtctggcgaacagtgacttatcgccaggcgacgccggaagagcaggctggtaccgcgcgcagctgcaccaac

SEQ ID NO: 549993 - DNA, 75 bp, synthetic construct
  source 1..75: mol_type = other DNA
tggtaccgcgcgcagctgcaccaacggaatatttctggagtgccggaacagtccggccatgaagcgagtattgat

SEQ ID NO: 549994 - DNA, 75 bp, synthetic construct
  source 1..75: mol_type = other DNA
ttaggagaaggctcggcgctacccgttggtgtgcctgttccgtggcccaccgccacaccgccagcaggctggtta

SEQ ID NO: 549995 - DNA, 75 bp, synthetic construct
  source 1..75: mol_type = other DNA
caaaaatgacggctatgcggcaaaggggcgcgagctaaaacagcacgtcatggccccgctgatttcttactttcg

SEQ ID NO: 549996 - DNA, 75 bp, synthetic construct
  source 1..75: mol_type = other DNA
cgctggaacgggtgcaacaaggaaagcctgcgggcgtatttccccgccacagagcgcattctgttcgcggaacat

SEQ ID NO: 549997 - DNA, 75 bp, synthetic construct
  source 1..75: mol_type = other DNA
ctggtttggtgccagccagtggcagttaccgaacgaagctgattacagaaagctgcaggcgttgtttgcgcgtgt

SEQ ID NO: 549998 - DNA, 75 bp, synthetic construct
  source 1..75: mol_type = other DNA
atggtgtcgcactggttcagtgccggtcagtggcagctgccgaacgaaagcgattatctgaaattacaggcactg

SEQ ID NO: 549999 - DNA, 75 bp, synthetic construct
  source 1..75: mol_type = other DNA
caaagcggcgctggcactggggcgtcgtgcgattggcgttgagctggagactgagcgttttgagcagacggtcag

SEQ ID NO: 550000 - DNA, 75 bp, synthetic construct
  source 1..75: mol_type = other DNA
ttaccgaatgaacgcgattatctgaaattgcaggcgctgtttgccagggtggcagaagagaaacatcagtgcggt

SEQ ID NO: 550001 - DNA, 75 bp, synthetic construct
  source 1..75: mol_type = other DNA
gccacagagcgcattctgttcgcggaacactatcaggggccgtatcgcccgaaagatgatggctatgaggcgaag

SEQ ID NO: 550002 - DNA, 75 bp, synthetic construct
  source 1..75: mol_type = other DNA
aaccatattatctgggcgaagccgtccggacgctggaacgggtgcaacaaggaaagcctgagggcgtatttcccc

SEQ ID NO: 550003 - DNA, 75 bp, synthetic construct
  source 1..75: mol_type = other DNA
gatgcgtgagcgctttaatgtgcttaaccacattatctgggcgaagccgtccggacgctggaacgggtgcaataa

SEQ ID NO: 550004 - DNA, 75 bp, synthetic construct
  source 1..75: mol_type = other DNA
caggaaagaaaaacatggcgtcgcactggttcagtaccagtcagtggcagctaccgaacgaaagcaattacaaca

SEQ ID NO: 550005 - DNA, 75 bp, synthetic construct
  source 1..75: mol_type = other DNA
gtgcagtactatccagggaaacatccgtgcgaaaaaccggcagaaatgctgcagcagataatcaacgcgagcagt

SEQ ID NO: 550006 - DNA, 75 bp, synthetic construct
  source 1..75: mol_type = other DNA
agaaaaacatcagcgcggggaactggaaaagccacaccaccagctggtcagcacatacagtgaactgaaccggca

SEQ ID NO: 550007 - DNA, 75 bp, synthetic construct
  source 1..75: mol_type = other DNA
cgtgcaattggtgtcgagctggaggctgaacgttttgagcagaccgcaagggatgtacagaatttaatcagaaag

SEQ ID NO: 550008 - DNA, 75 bp, synthetic construct
  source 1..75: mol_type = other DNA
tgcgccttatcaccaacctgatccgtactggggtagtcaccgaagtggaccgggataactggctttgccgggtga

SEQ ID NO: 550009 - DNA, 75 bp, synthetic construct
  source 1..75: mol_type = other DNA
ggccgctgacaatatcaccttgaaaaccagtgagtttgtactggaggctgaccgcacgcgaattaacagcgaagt

SEQ ID NO: 550010 - DNA, 75 bp, synthetic construct
  source 1..75: mol_type = other DNA
gtccgctgacaatatcaccgtgaaaaccagtgagtttgtactggaggctgaccgcacgcgcattaacagcgaagt

SEQ ID NO: 550011 - DNA, 75 bp, synthetic construct
  source 1..75: mol_type = other DNA
ccgttggtgtgcctgttccgtggccctcagccacaccgccaacagggtggctgaaatgtaacggcgcagcatttt

SEQ ID NO: 550012 - DNA, 75 bp, synthetic construct
  source 1..75: mol_type = other DNA
gaatacctatcacgaatgccgcataaatgatgaatggggcggtgtggaaatcattaaacgccctgagtgggcacg

SEQ ID NO: 550013 - DNA, 75 bp, synthetic construct
  source 1..75: mol_type = other DNA
aaattcgatcgtcggacaaaacaaggtaaagctgacgaagaagcatttcttcgtgatgtggcggatatgggtatt

SEQ ID NO: 550014 - DNA, 75 bp, synthetic construct
  source 1..75: mol_type = other DNA
accaactataaacgaccactttgcctttcatcccttatcgcggcggataatcgcttttgaagccattgtgcaaaa

SEQ ID NO: 550015 - DNA, 75 bp, synthetic construct
  source 1..75: mol_type = other DNA
aattacaggcactgtttgcccgggtggcagaagagaagcatcagcggggtgaactggaaagccccaccaccagct

SEQ ID NO: 550016 - DNA, 75 bp, synthetic construct
  source 1..75: mol_type = other DNA
gataacggcaaaacagattgtggatgccacaggaaagaaaaacatggtgtcgcactggttcagtgccagccagtg

SEQ ID NO: 550017 - DNA, 75 bp, synthetic construct
  source 1..75: mol_type = other DNA
gtccgctgacaatatcaccctgaaaaccagtgagtttgtactggaggctgaccgcacgcggattaacagcgaagt

SEQ ID NO: 550018 - DNA, 75 bp, synthetic construct
  source 1..75: mol_type = other DNA
gaccgctgacaatatcaccctgaaaaccagtgagtttgtactggaggctgaccgcacgcgtattaacagcgaagt

SEQ ID NO: 550019 - DNA, 75 bp, synthetic construct
  source 1..75: mol_type = other DNA
attcgaatcagttcgcaccgccgtcaacgtcggcggaagcctgcgtgacagaacatcctgatggtggctggtttg

SEQ ID NO: 550020 - DNA, 75 bp, synthetic construct
  source 1..75: mol_type = other DNA
acccgccggtgtaatgctgaaatcagagtgtgcagtggtcgcgggaatcgcgcaggctgcactaccccagagcgt

SEQ ID NO: 550021 - DNA, 75 bp, synthetic construct
  source 1..75: mol_type = other DNA
gttaagccgcaacgagcacgatcaaaagatggcggatgccattgatgcttatcaacctgactatgtggtgctggc

SEQ ID NO: 550022 - DNA, 75 bp, synthetic construct
  source 1..75: mol_type = other DNA
atggcagttgttaaatgtaaaccgacatctccgggtcgtcgccacgtagttaaagtggttaaccctgagctgcac

SEQ ID NO: 550023 - DNA, 75 bp, synthetic construct
  source 1..75: mol_type = other DNA
tcaccccacctcatgcacctggacatgctgcaatcgccagcatgcaagctatatgtacggggcaagctcgagggc

SEQ ID NO: 550024 - DNA, 75 bp, synthetic construct
  source 1..75: mol_type = other DNA
tcacaccacctcaagcacctggacatgctgcaattgccagcatgcaagcaatatgtacagggcaggctcgagcat

SEQ ID NO: 550025 - DNA, 75 bp, synthetic construct
  source 1..75: mol_type = other DNA
agggcgaccgaaccgtcggtatcaccgagaaaccgtctgcagagtttctggctcgcctgggtgagcgctatggct

SEQ ID NO: 550026 - DNA, 75 bp, synthetic construct
  source 1..75: mol_type = other DNA
atgccgcaattaactgcaacggaagctgccgcgcaggagaaccagcgagtgatggggatcctgacgtgtcaggaa

SEQ ID NO: 550027 - DNA, 75 bp, synthetic construct
  source 1..75: mol_type = other DNA
agacgcaaaaaaacaacccttggaggaactatgccatcaccttctgcttcagctgtgaccactaagccagttgac

SEQ ID NO: 550028 - DNA, 75 bp, synthetic construct
  source 1..75: mol_type = other DNA
acgctggtgcaccggctgggtggcatgcggccattttccggaatgacaggctatgacggcattgtcgcctgtctt

SEQ ID NO: 550029 - DNA, 75 bp, synthetic construct
  source 1..75: mol_type = other DNA
ccggatggcagcttttccagcaagtggggaaattaatagcacgttggaagatccattatgtgctatcgcacgggt

SEQ ID NO: 550030 - DNA, 75 bp, synthetic construct
  source 1..75: mol_type = other DNA
atgacacagttaacttgttttaaggcttatgacatccgtggtgaactgggtgaggaactgaacgaggacatcgcc

SEQ ID NO: 550031 - DNA, 75 bp, synthetic construct
  source 1..75: mol_type = other DNA
acagcgggatgatcccgtggctgctggtggcggagctgctgtgcctgaagaacagctcgctgaaatcgctggtgg

SEQ ID NO: 550032 - DNA, 75 bp, synthetic construct
  source 1..75: mol_type = other DNA
cgcgacgacacccgcaatgcggtcattaaacacggcgcggatatgggcattgcctttgacggtgattttgatcgc

SEQ ID NO: 550033 - DNA, 75 bp, synthetic construct
  source 1..75: mol_type = other DNA
cagcggcgataccggactgcgcgatgtccagcgtctggcagaagccaacgactttccccccgtcgatgaaaccaa

SEQ ID NO: 550034 - DNA, 75 bp, synthetic construct
  source 1..75: mol_type = other DNA
cagcggtgataccggactgcgcgaagtccagcgtctggcagaagcgaacgactttccccccgtcgatgaaaccaa

SEQ ID NO: 550035 - DNA, 75 bp, synthetic construct
  source 1..75: mol_type = other DNA
cagcggagataccggactgcgcgacgtccagcgtctggcagaagctaacgactttccccccgtcgatgaaaccaa

SEQ ID NO: 550036 - DNA, 75 bp, synthetic construct
  source 1..75: mol_type = other DNA
cgcgacgacacccgcaatgcggtcatcaaacacggcgcggatatgggcattgcctttgacggtgattttgaccgc

SEQ ID NO: 550037 - DNA, 75 bp, synthetic construct
  source 1..75: mol_type = other DNA
gtagccgaactggtgtgcctgaaagagaaaacgctgggcgaactggtacgcgaccggatggtggcgtttccggca

SEQ ID NO: 550038 - DNA, 75 bp, synthetic construct
  source 1..75: mol_type = other DNA
acaattgttgtgggtggcgatgtccgtttaaccagcgagagtctgaaactggcactggcaaatggcctgatggat

SEQ ID NO: 550039 - DNA, 75 bp, synthetic construct
  source 1..75: mol_type = other DNA
ggcaccgaagagatttatttcgccacgttccatctcggcgtggatggcggcatagaagttactgccagccataag

SEQ ID NO: 550040 - DNA, 75 bp, synthetic construct
  source 1..75: mol_type = other DNA
aatgtggaatctcgcggtgatgttcaggttatggtaatccatactcaagaaatattatcaattttgacgtcataa

SEQ ID NO: 550041 - DNA, 75 bp, synthetic construct
  source 1..75: mol_type = other DNA
gatgtccgcctcaccagcgaaaccttaaaactggcgctggcgaaaggtttacaggatgcgggcgtcgatgtgctg

SEQ ID NO: 550042 - DNA, 75 bp, synthetic construct
  source 1..75: mol_type = other DNA
ggcaccgaagagatttatttcgccacgttccatctcggcgtggatggcggcatggaagttactgccagccataaa

SEQ ID NO: 550043 - DNA, 75 bp, synthetic construct
  source 1..75: mol_type = other DNA
ggcaccgaagagatttatttcgccacgttccatctcggcgtggatggcggcatggaagttacagccagccataat

SEQ ID NO: 550044 - DNA, 75 bp, synthetic construct
  source 1..75: mol_type = other DNA
ggcaccgaagagatttatttcgccacgttccatctcggcgtggatggcggcatagaagttacggccagccataat

SEQ ID NO: 550045 - DNA, 75 bp, synthetic construct
  source 1..75: mol_type = other DNA
accatgtgccgttctttagcgctgtaggttcttccatcgctatgacgttgtgggctttccttggtctggagtcag

SEQ ID NO: 550046 - DNA, 75 bp, synthetic construct
  source 1..75: mol_type = other DNA
ccggtctgggcactgtgcaatgacactgcctgttctgcagccatgctgctggcgtcggcctgctcccgacggctg

SEQ ID NO: 550047 - DNA, 75 bp, synthetic construct
  source 1..75: mol_type = other DNA
gcacccggtaactccgtggggcgttcagaccaaaggtaagaagacccgtagcaacaagcgtactgataaattcat

SEQ ID NO: 550048 - DNA, 75 bp, synthetic construct
  source 1..75: mol_type = other DNA
ccggcagcggtgcagggcggcgtgtcacagacgtcagcagacggtgatgcggacgtgaaaatgctcatgaccatg

SEQ ID NO: 550049 - DNA, 75 bp, synthetic construct
  source 1..75: mol_type = other DNA
atcctggctgcttcaccgcaggcgaatgccgggccctcacttcgtgatcagatcatggcactggatgaggcaaaa

SEQ ID NO: 550050 - DNA, 75 bp, synthetic construct
  source 1..75: mol_type = other DNA
gccgttgcgaaaacggcagccgctaccaccgcttcacaaccggaaattgcctccggtagcgcgatgattgttgat

SEQ ID NO: 550051 - DNA, 75 bp, synthetic construct
  source 1..75: mol_type = other DNA
aacaaagtgatctattcgaaccacccggatttggtgcgtccgattgcttcaattaccaaattaatgactgcgatg

SEQ ID NO: 550052 - DNA, 75 bp, synthetic construct
  source 1..75: mol_type = other DNA
gcagcagcgttgagctataaaaaacaaaaagccgcccaaatggcggcggcggggcagacggcacagaacgattaa

SEQ ID NO: 550053 - DNA, 75 bp, synthetic construct
  source 1..75: mol_type = other DNA
gcggatgaattagtcaatgcgtcggatgccatcagtgtgatggccacggcgctgaacagtaatgtcagaggaggc

SEQ ID NO: 550054 - DNA, 75 bp, synthetic construct
  source 1..75: mol_type = other DNA
gcgaaatcagccgcaaagagatgctgttgttggcgctgatgtcttcagaaaaccgcgcagcggcaagcctggcgc

SEQ ID NO: 550055 - DNA, 75 bp, synthetic construct
  source 1..75: mol_type = other DNA
gaagtgggtaaagtcattatggcgctgatggtgatgtcctgctgcggttcgctgcttggctggcagttcaccatt

SEQ ID NO: 550056 - DNA, 75 bp, synthetic construct
  source 1..75: mol_type = other DNA
tcgcaaaatgcggtatgttcagccgtaaatcaggtggtatgggcggttatgcggagtatgctttcggtaaatccg

SEQ ID NO: 550057 - DNA, 75 bp, synthetic construct
  source 1..75: mol_type = other DNA
cgtgtgcgaatactgatgtagtggaaaacccggaacgtaatgtgccaatcgcggtactcggcggtacgttaggtg

SEQ ID NO: 550058 - DNA, 75 bp, synthetic construct
  source 1..75: mol_type = other DNA
tgatttatatcgtctccaccaacgtgattgcagggattgtgcctaatatggagctggcaaattcaacggcaccat

SEQ ID NO: 550059 - DNA, 75 bp, synthetic construct
  source 1..75: mol_type = other DNA
cccgtcgctgaacagtcagttcaacgtgctggttaacctggccgtggtgaccaatatcatcccgtatattctgtc

SEQ ID NO: 550060 - DNA, 75 bp, synthetic construct
  source 1..75: mol_type = other DNA
aaagcagcgaatgttccggctgctaaagcgaaagtggctaactttgttgcctttattggtgcgatgtacagcttt

SEQ ID NO: 550061 - DNA, 75 bp, synthetic construct
  source 1..75: mol_type = other DNA
aacggtattgcggtactgccggtgaccggcacgctggtgcaccggctgggggggatgcggccattttccggaatg

SEQ ID NO: 550062 - DNA, 75 bp, synthetic construct
  source 1..75: mol_type = other DNA
gtgagacgtaatctttcacacattattgcagcagcattcaatgaaccgctgcttctggagcccgcctatgcgcgg

SEQ ID NO: 550063 - DNA, 75 bp, synthetic construct
  source 1..75: mol_type = other DNA
tttactcaggggcgcacaaggtggatggcaatcagtttgaagccttaccggcagaggttcgccaggacatgcagc

SEQ ID NO: 550064 - DNA, 75 bp, synthetic construct
  source 1..75: mol_type = other DNA
gtcgccatcgctatttccgccgttggctacggtactgagttgtttgacacaaccctttcgcctgttcagattggt

SEQ ID NO: 550065 - DNA, 75 bp, synthetic construct
  source 1..75: mol_type = other DNA
cgggcgattctggccgcggcggcaccgcagcagccggtggcatccacgcagagtgaagccgatcgcattatggtg

SEQ ID NO: 550066 - DNA, 75 bp, synthetic construct
  source 1..75: mol_type = other DNA
atggcactggatgaggcaaaaggggctgaggcgcaggctgaacagctggctgcctgcccgggaatgactgtggag

SEQ ID NO: 550067 - DNA, 75 bp, synthetic construct
  source 1..75: mol_type = other DNA
accgatgctttcctggctgaaatacgtgcggaggcacgcaacgaggggattaactacaccgcaagccgtcttgct

SEQ ID NO: 550068 - DNA, 75 bp, synthetic construct
  source 1..75: mol_type = other DNA
atgcaaacccgttgtcagatgatgactggcagcgactggcctaaggtgaaggatctgacgccgggcgagatgacg

SEQ ID NO: 550069 - DNA, 75 bp, synthetic construct
  source 1..75: mol_type = other DNA
caggttcatcatgaatggggtgcagatgggttatatcaaggtgccagcagcggaaacagatccagaccttgagac

SEQ ID NO: 550070 - DNA, 75 bp, synthetic construct
  source 1..75: mol_type = other DNA
gaaggatctgacgccgggcgagatgacggctgaatcctacgatgataactacctggatgatgaagacgcggactg

SEQ ID NO: 550071 - DNA, 75 bp, synthetic construct
  source 1..75: mol_type = other DNA
caaagcgatcagtgtgcattcgacagatccacagactgccacggtgaccctgaacgggcttgtggccacggtgaa

SEQ ID NO: 550072 - DNA, 75 bp, synthetic construct
  source 1..75: mol_type = other DNA
ttatgctgatcgacaccgccatctggggtgaagatggcaactttatcgatgccgttgcccatatgatcttaccgg

SEQ ID NO: 550073 - DNA, 75 bp, synthetic construct
  source 1..75: mol_type = other DNA
gatgattccaatccgttaaccggttttatgctgatcgacaccgccatctggggtgaagacggcaactttatcgat

SEQ ID NO: 550074 - DNA, 75 bp, synthetic construct
  source 1..75: mol_type = other DNA
agtgatcacccgtacggtgaaggtcaccaatgtgggccgtccgtcaatggcagaagatcgcagtacggtgacggc

SEQ ID NO: 550075 - DNA, 75 bp, synthetic construct
  source 1..75: mol_type = other DNA
cggtgaaaggtgccggaaccaccctgtgggtttataaggggaacggtgacccttatgcgaacccgctttcagacg

SEQ ID NO: 550076 - DNA, 75 bp, synthetic construct
  source 1..75: mol_type = other DNA
ggtcagaatatcaccctgaccgtggctgttcagccggaaggggcgacggataaaacattccgtgccacgtcggcg

SEQ ID NO: 550077 - DNA, 75 bp, synthetic construct
  source 1..75: mol_type = other DNA
tctgccggtgacaccagttttacgctggcctggaagccgggtgagaaagggcagcgcgatttgattgcctggttt

SEQ ID NO: 550078 - DNA, 75 bp, synthetic construct
  source 1..75: mol_type = other DNA
gacagcagtgagacccgggcctacaaaatccgtttcccgaacggcacggtggatgtgttccgtggctgggtgagt

SEQ ID NO: 550079 - DNA, 75 bp, synthetic construct
  source 1..75: mol_type = other DNA
gaaaggtgttgcggcaggtaaagcgcagatccctgtggtcaccggcaatggtgagtttgcggcggtggcggagat

SEQ ID NO: 550080 - DNA, 75 bp, synthetic construct
  source 1..75: mol_type = other DNA
caagacgttcagagcggtttccgccgatccgtcaacgggaaccattgctgtgaaagatatggtgatcactgtgac

SEQ ID NO: 550081 - DNA, 75 bp, synthetic construct
  source 1..75: mol_type = other DNA
caccggtcaccggtattaccgtgacgccactaacggggaatgtggcaaaaggtcagaatatcaccctgaccgtgg

SEQ ID NO: 550082 - DNA, 75 bp, synthetic construct
  source 1..75: mol_type = other DNA
aatcagaatttcgccaccattaccgtgaaagggaacacgatcaccgtgaaaggtgttgcggcaggtaaagcgcag

SEQ ID NO: 550083 - DNA, 75 bp, synthetic construct
  source 1..75: mol_type = other DNA
tgaaagatatggcgatcactgtgacgggggttaaggctggaaaagtgagtatccccgtgatttccggtaatggtc

SEQ ID NO: 550084 - DNA, 75 bp, synthetic construct
  source 1..75: mol_type = other DNA
accgctgagtcctatgacgacagttatctcgatgatgaagatgcggactggaccgcgaccgggcagggtcagaaa

SEQ ID NO: 550085 - DNA, 75 bp, synthetic construct
  source 1..75: mol_type = other DNA
cagatccctgtggttaccggtaacggtgagtttgcggcggtggcggaaattaccgtcacggatggtgcagcgggt

SEQ ID NO: 550086 - DNA, 75 bp, synthetic construct
  source 1..75: mol_type = other DNA
ggcggtcattgtgcgtatgacacgctcctcgatgctggaagtgctgggcgaggattacatccgcaccgcgcgcgc

SEQ ID NO: 550087 - DNA, 75 bp, synthetic construct
  source 1..75: mol_type = other DNA
aactactggcggaagtgcaatctatctgcccgccgggcgtgactattatgaacgtgcgtcagggcgaacctttag

SEQ ID NO: 550088 - DNA, 75 bp, synthetic construct
  source 1..75: mol_type = other DNA
ctgcctgtcatgggctgttaatcattaccgtgataacgccatgacctacaaagagcagctcgataaaaaagtcag

SEQ ID NO: 550089 - DNA, 75 bp, synthetic construct
  source 1..75: mol_type = other DNA
tgtgcttagtctggggctgaatcattaccgtgataacgccattacctacaaagcccagcgcgacaaaaatgtcag

SEQ ID NO: 550090 - DNA, 75 bp, synthetic construct
  source 1..75: mol_type = other DNA
aagcgcagcgcgataaaaaagtcagtgagctggagctggcaaatgcaaccattactgatatgcagcagcgccagc

SEQ ID NO: 550091 - DNA, 75 bp, synthetic construct
  source 1..75: mol_type = other DNA
caatgatgccaccgtcgaactctctccagttgctggacgaaacgttctcggtatccgggacggaattatccgcga

SEQ ID NO: 550092 - DNA, 75 bp, synthetic construct
  source 1..75: mol_type = other DNA
ccgcccgcgtgggcaatgatgccagcgtcgaactctctcaagttgctggacgaaacgttctcggtatcagagacg

SEQ ID NO: 550093 - DNA, 75 bp, synthetic construct
  source 1..75: mol_type = other DNA
gctgattttgattacctgctgagggaagactcgttaacgggagttcgggaagggaagtttgcagacagggggatt

SEQ ID NO: 550094 - DNA, 75 bp, synthetic construct
  source 1..75: mol_type = other DNA
tggggttaggcgttgtccgtccggcacaaaccgctgttcttggcggtacattctggcagcaagttgtaaacttag

SEQ ID NO: 550095 - DNA, 75 bp, synthetic construct
  source 1..75: mol_type = other DNA
aaagcgacattgttccgtgcgctggaagaaaatgcggcgattgtatcagcgtgtaacttgcagcaaattgctgat

SEQ ID NO: 550096 - DNA, 75 bp, synthetic construct
  source 1..75: mol_type = other DNA
ctgcacaacaatacctttgaaaacgaagtttatcgcgcgaccggacaaacgctggctttaagtgccatccccaga

SEQ ID NO: 550097 - DNA, 75 bp, synthetic construct
  source 1..75: mol_type = other DNA
gggctatatgcaggcatttgtgaagtatgggctgcgtaacctaaaagaaggggcgactttaagaaattacattac

SEQ ID NO: 550098 - DNA, 75 bp, synthetic construct
  source 1..75: mol_type = other DNA
ggtcagagtatcaccctgaccgtggccgttcagccggaaggggtgacggataaaaccttccgtgccacgtcggca

SEQ ID NO: 550099 - DNA, 75 bp, synthetic construct
  source 1..75: mol_type = other DNA
ccagaaggatctggttgactggtttatgagtggtgatgaaaaatcttacaaaattaaatatccaaatggggcagt

SEQ ID NO: 550100 - DNA, 75 bp, synthetic construct
  source 1..75: mol_type = other DNA
cggtgatgatcatggcgggcgaacgtgggatctccccagagcgtcatgcgcaattgctggcagaactcggcttag

SEQ ID NO: 550101 - DNA, 75 bp, synthetic construct
  source 1..75: mol_type = other DNA
cggcctgcaggtgggaacattgctggcgggggcgattctgaccgaaaccatcttctcgtggcccggtctggggcg

SEQ ID NO: 550102 - DNA, 75 bp, synthetic construct
  source 1..75: mol_type = other DNA
cagccgcaaacgctggactcagatattatggccgtgggccgttatgtgctttctgccgatatttggccggaactt

SEQ ID NO: 550103 - DNA, 75 bp, synthetic construct
  source 1..75: mol_type = other DNA
aaaaattaccaatatcggtcgcccttcgctggcggaggatcggggggacatcacaccggtcaccggtattaccgt

SEQ ID NO: 550104 - DNA, 75 bp, synthetic construct
  source 1..75: mol_type = other DNA
gctgcgttacaaccttgccgccatgattgcgcgattcaacgaaacgggtcgtagccaggttctggcaaaacgtat

SEQ ID NO: 550105 - DNA, 75 bp, synthetic construct
  source 1..75: mol_type = other DNA
caaaagtaacggctatgcggcaaaagaaagggaactcaaacagcacataatggcaccgctgatatcgtatttcag

SEQ ID NO: 550106 - DNA, 75 bp, synthetic construct
  source 1..75: mol_type = other DNA
agtctttacctgttctgtggtcatcgcctggcatctgataccgaaatcatgatgcgtgaacgctttaatgtactg

SEQ ID NO: 550107 - DNA, 75 bp, synthetic construct
  source 1..75: mol_type = other DNA
cgtgcaattggcgttgagctggagaccgggcgttttgatcagacggtgagggaagttcaggatttagtcagtcag

SEQ ID NO: 550108 - DNA, 75 bp, synthetic construct
  source 1..75: mol_type = other DNA
tgatgcgcgtgaatcactggggataacgtcgaaacagatagcggaagccaccggaaagaaaaacatggtgtcgca

SEQ ID NO: 550109 - DNA, 75 bp, synthetic construct
  source 1..75: mol_type = other DNA
gaactggaaaagccacaccaccagctggtcagcacatacagtgaactgaaccggcaatatgccagcctgctggat

SEQ ID NO: 550110 - DNA, 75 bp, synthetic construct
  source 1..75: mol_type = other DNA
ggctggatcagtgtctggcgcagttctggcgggtgttaaaacctgccggaagcctttacctgttctgcggtcatc

SEQ ID NO: 550111 - DNA, 75 bp, synthetic construct
  source 1..75: mol_type = other DNA
ccggcaatatgccagcctgctggaagagtacaaatccctgcggcgttatttttccgtatcggcagctgttcctta

SEQ ID NO: 550112 - DNA, 75 bp, synthetic construct
  source 1..75: mol_type = other DNA
tcggtgtgactgtgcaggtgccgtacaccgatgtgtggatgcataaaccggtgcagtactatcccgggaaacatc

SEQ ID NO: 550113 - DNA, 75 bp, synthetic construct
  source 1..75: mol_type = other DNA
aaaagcggcgctgtcactgggacgtcgggcgattggtgttgagctggagaccggacgttttgagcagacagtcag

SEQ ID NO: 550114 - DNA, 75 bp, synthetic construct
  source 1..75: mol_type = other DNA
ggctggaccagtgtctggcacaattctggcgtgtattaaagccaaccggaagcctttacctgttctgtggtcatc

SEQ ID NO: 550115 - DNA, 75 bp, synthetic construct
  source 1..75: mol_type = other DNA
taagtggctggaccactgtctggcccagttctggcgggtgttgaaaccttccggaagtctttacctgttctgtgg

SEQ ID NO: 550116 - DNA, 75 bp, synthetic construct
  source 1..75: mol_type = other DNA
cggcgtgacgcgtttctttaaagagaagttctttacgccagtggcggaagcagcaaccagcggtctgaaattcac

SEQ ID NO: 550117 - DNA, 75 bp, synthetic construct
  source 1..75: mol_type = other DNA
caggaaagaaaaacatggtgtcgcactggttcagtgccagtcagtggcagctaccgaacgaaagtgattatctga

SEQ ID NO: 550118 - DNA, 75 bp, synthetic construct
  source 1..75: mol_type = other DNA
aacattatcaggggccgtatcgtccgaaagatgatggctatgaggcgaagggcagggcactgaaacagcatgtga

SEQ ID NO: 550119 - DNA, 75 bp, synthetic construct
  source 1..75: mol_type = other DNA
tttttatggggtcaggttccacaataaaggcagcattgtcactggagcgtcgggctattggtgtggaactggagg

SEQ ID NO: 550120 - DNA, 75 bp, synthetic construct
  source 1..75: mol_type = other DNA
cggtgcagttctatcccgggaaacatccgtgcgaaaaaccggcagaaatgctgcagcagataatcagcgcaagca

SEQ ID NO: 550121 - DNA, 75 bp, synthetic construct
  source 1..75: mol_type = other DNA
agtctctacctgttctgtggtcatcgcctggcatctgacaccgaaatcatgatgcgtgaacgctttaatgtgctg

SEQ ID NO: 550122 - DNA, 75 bp, synthetic construct
  source 1..75: mol_type = other DNA
ccgatccgccgtacttcaaggtgaaacccaacggctgggacaatcagtggaaaggggacgaagattaccttaagt

SEQ ID NO: 550123 - DNA, 75 bp, synthetic construct
  source 1..75: mol_type = other DNA
aaaggggacgaagattatcttaagtggctggaccactgtctggcccagttctggcgggtgttgaaacctgccgga

SEQ ID NO: 550124 - DNA, 75 bp, synthetic construct
  source 1..75: mol_type = other DNA
ataattgaggccagcagccgtccgggagatttggtggctgatttttttatggggtctggctcaacaataaaagca

SEQ ID NO: 550125 - DNA, 75 bp, synthetic construct
  source 1..75: mol_type = other DNA
agggctgggataaccagtggaagggcgacgatgattacctgaagtggctggaccagtgtctggcgcagttctggc

SEQ ID NO: 550126 - DNA, 75 bp, synthetic construct
  source 1..75: mol_type = other DNA
aagccgtccggacgctggaacggatgcaacaaggaaagcctgcgggcgtatttccccgccacagagcgcattctg

SEQ ID NO: 550127 - DNA, 75 bp, synthetic construct
  source 1..75: mol_type = other DNA
tggtcagcacatacagtgagctgaaccggcagtatgcggagctgctgagtgaatataaacatctgcggcggtatt

SEQ ID NO: 550128 - DNA, 75 bp, synthetic construct
  source 1..75: mol_type = other DNA
ggtgtttgcggctgctgtaaaacaaaagtaatttctggcgaatacacggtgagcagcaccatgacgctgactgac

SEQ ID NO: 550129 - DNA, 75 bp, synthetic construct
  source 1..75: mol_type = other DNA
gcactttcactgggacgtcgtgcaattggcgttgaactggaagaagagagatttaatcagactgtaactgaaata

SEQ ID NO: 550130 - DNA, 75 bp, synthetic construct
  source 1..75: mol_type = other DNA
ccgacaatatgtcagcctgcaggaagcgtataaaaccctgcggcgttatttttccgtatcggctgcggttcctta

SEQ ID NO: 550131 - DNA, 75 bp, synthetic construct
  source 1..75: mol_type = other DNA
ctgaaatcgctggtgaatacctatcaggagatcctgaaaaacgagctggccgagaaagagaaaaacctggcatta

SEQ ID NO: 550132 - DNA, 75 bp, synthetic construct
  source 1..75: mol_type = other DNA
aaggtctgaaaggcggtcactccggcggtgaaatccacgttggcctgggtaatgccaacaaactgctggtgcgct

SEQ ID NO: 550133 - DNA, 75 bp, synthetic construct
  source 1..75: mol_type = other DNA
gcaccacgctgggtgcggataacggcattggtatggcctctgcgctggcggttctggctgacgaaaacgtggttc

SEQ ID NO: 550134 - DNA, 75 bp, synthetic construct
  source 1..75: mol_type = other DNA
cagcggcaaccggtatgaccgtgacgcctgccagtgcttccgtggtgaaagggaagagcaccacgctgaccgtgg

SEQ ID NO: 550135 - DNA, 75 bp, synthetic construct
  source 1..75: mol_type = other DNA
gtgggtttacaacggcaaggctgatgcttatgcaaacccgttgtcagacgatgactggcagcgactggctaaggt

SEQ ID NO: 550136 - DNA, 75 bp, synthetic construct
  source 1..75: mol_type = other DNA
aggtgttgcggcaggtaaagcgcagatccctgtggtcaccggcaatggtgagtttgcggcggtggcggagatcac

SEQ ID NO: 550137 - DNA, 75 bp, synthetic construct
  source 1..75: mol_type = other DNA
gacagcagtgagacccgggcttacaaaatccgcttcccgaacggcacggtggatgtgttccgtggctgggtgagt

SEQ ID NO: 550138 - DNA, 75 bp, synthetic construct
  source 1..75: mol_type = other DNA
cgctgctggcgtggtttaatgaaggtgatacccgtgcctataaaatccgctttcctaacggcacggtcgatgtgt

SEQ ID NO: 550139 - DNA, 75 bp, synthetic construct
  source 1..75: mol_type = other DNA
ggtcagaatatcaccctgaccgtggctgttcagccggaatgggcgacggataaaaccttccgcgccacgtcggcg

SEQ ID NO: 550140 - DNA, 75 bp, synthetic construct
  source 1..75: mol_type = other DNA
gccgtccggacgctggaacgggtgtaacaaggaaagcctgcgggcgtattttccggccacagagcgcattctgtt

SEQ ID NO: 550141 - DNA, 75 bp, synthetic construct
  source 1..75: mol_type = other DNA
tggatggttttctgaaaggtaaatgcatcccacgagatttaaaggttaacgaaacaaacgctgagtacctagtgc

SEQ ID NO: 550142 - DNA, 75 bp, synthetic construct
  source 1..75: mol_type = other DNA
aattacaggaactattcacgcggatcgctatcgataagcacattcagcagaagcttgaacatcctcaccaccagc

SEQ ID NO: 550143 - DNA, 75 bp, synthetic construct
  source 1..75: mol_type = other DNA
cgtgcaactggcgttgagctggagactgaacgttttgagcagacagtcagggaagttcaggatttagccagtcag

SEQ ID NO: 550144 - DNA, 75 bp, synthetic construct
  source 1..75: mol_type = other DNA
catcgttacggtgaaagacgcgacggacgccctgctgcattgtgcggagcaactccgccaaggaggcaaccagtg

SEQ ID NO: 550145 - DNA, 75 bp, synthetic construct
  source 1..75: mol_type = other DNA
aatactgtaaaaatatccagttgtgagttaatcaacgctgattgcctggaatttatccagaccttaccggaaaac

SEQ ID NO: 550146 - DNA, 75 bp, synthetic construct
  source 1..75: mol_type = other DNA
cgtgcaattggcgttgagctggagactgagcgttttgagcagacggtcagggaagttcaggatttagtcagtaag

SEQ ID NO: 550147 - DNA, 75 bp, synthetic construct
  source 1..75: mol_type = other DNA
aacgtgggtaaaccttctgtagcggaagaacgcagcaaaattacgccggtcactgcgattaaggtgacgccgaca

SEQ ID NO: 550148 - DNA, 75 bp, synthetic construct
  source 1..75: mol_type = other DNA
aaggtgaaggatctgacgccgggcgagatgacggcagaaccctacgatgataactacctggatgatgaagacgcg

SEQ ID NO: 550149 - DNA, 75 bp, synthetic construct
  source 1..75: mol_type = other DNA
gactggcctcagacatagagattatgatgcgtgcccggttcaacgttttgaatcatataatttgggcaaaaccat

SEQ ID NO: 550150 - DNA, 75 bp, synthetic construct
  source 1..75: mol_type = other DNA
ggcttgatagctgtctggctgagtatgctcgcgttcttaaacctgctggcagcatttacctgttttgcggtcacc

SEQ ID NO: 550151 - DNA, 75 bp, synthetic construct
  source 1..75: mol_type = other DNA
cctgactgaagtccgggctaaggcgtttgatgacctttgcgcggcgttcgttaagcacgcgtcggtgtccgggct

SEQ ID NO: 550152 - DNA, 75 bp, synthetic construct
  source 1..75: mol_type = other DNA
gtgtccactggtcagatggtcggggggactgctgaatccaccaccatcaacaacaatggccgacaggttatctgg

SEQ ID NO: 550153 - DNA, 75 bp, synthetic construct
  source 1..75: mol_type = other DNA
caaccggaaaaaccatcctgaatctggtgaacgccggcaacagtggtacgggtctggcgaccaccggtaagggta

SEQ ID NO: 550154 - DNA, 75 bp, synthetic construct
  source 1..75: mol_type = other DNA
tatacctggcagggactttccctggatgacggccaggataacgccggttatgtgaagttcgggcatggcagtgca

SEQ ID NO: 550155 - DNA, 75 bp, synthetic construct
  source 1..75: mol_type = other DNA
cgtgaactgccggtgaactgctgggtacagccttctgttatccgcaccttcagctcccgggaggacatgagcatg

SEQ ID NO: 550156 - DNA, 75 bp, synthetic construct
  source 1..75: mol_type = other DNA
acaataacgacttccgcgcccggggctggggctggctgggctcactggaaaccggtctgcccttcagtatcactg

SEQ ID NO: 550157 - DNA, 75 bp, synthetic construct
  source 1..75: mol_type = other DNA
atgatactccggcagtgtgcgggaacgatgacagtcgaaagcatcggcagtctgattggccgtagtggggctgcc

SEQ ID NO: 550158 - DNA, 75 bp, synthetic construct
  source 1..75: mol_type = other DNA
tgtgaagttcgggcgatggcagtgcacaacatgtgcgtgccggtttccgtctgggcagccacaacgatatgacct

SEQ ID NO: 550159 - DNA, 75 bp, synthetic construct
  source 1..75: mol_type = other DNA
aaaacggtaatgctgacggtgttgttctggagtccggtggtcgcctggatgtactggagggccattcagcctgga

SEQ ID NO: 550160 - DNA, 75 bp, synthetic construct
  source 1..75: mol_type = other DNA
cgtcattaatgataagggctggcaggccatcaaatccggcgcagtggcaaccgacacggttgtgaataccggcgc

SEQ ID NO: 550161 - DNA, 75 bp, synthetic construct
  source 1..75: mol_type = other DNA
ttcgtgacggcgggggacagagcctgaacgggctggcagtgaacaccacgctgaataacagaggcgagcagtggg

SEQ ID NO: 550162 - DNA, 75 bp, synthetic construct
  source 1..75: mol_type = other DNA
cgccggttatgtgaagttcgggcatggcagtgcacaacatgtgcgtgccggcttccgtctgggcagccacaacga

SEQ ID NO: 550163 - DNA, 75 bp, synthetic construct
  source 1..75: mol_type = other DNA
gcctttaactacaccctgaaccgtgacagcgatgaagactggtatctgcgcagtgaaaatgcttatcgtgcagaa

SEQ ID NO: 550164 - DNA, 75 bp, synthetic construct
  source 1..75: mol_type = other DNA
acatttaaagatttcgacggtacatttacgtttgatgaaaaggatcctgcagccgataaagtgaatgtgactatt

SEQ ID NO: 550165 - DNA, 75 bp, synthetic construct
  source 1..75: mol_type = other DNA
atgaaaaaaagcctgcttggtttaaccttcgcttccctgatgttctctgccggttcagctgtcgccgccgattac

SEQ ID NO: 550166 - DNA, 75 bp, synthetic construct
  source 1..75: mol_type = other DNA
ccttcgcttccctgatgttctctgccggttcagcggttgccgccgattacaaaattgacaaagaaggtcagcacg

SEQ ID NO: 550167 - DNA, 75 bp, synthetic construct
  source 1..75: mol_type = other DNA
gctgggttcactggaaaccggtctgcccttcagtatcactgacaatctgatgctggagccgcaactgcagtacac

SEQ ID NO: 550168 - DNA, 75 bp, synthetic construct
  source 1..75: mol_type = other DNA
caaccggaaaaaccatcctgaacctggtgaacgccggcaacagtggtacggggctggcgaccagcggtaagggta

SEQ ID NO: 550169 - DNA, 75 bp, synthetic construct
  source 1..75: mol_type = other DNA
ggatgcagaaaacggtgataccgggcagtttgttcgcggggatgccgtacgcacaaccatcaataaaaacggtcg

SEQ ID NO: 550170 - DNA, 75 bp, synthetic construct
  source 1..75: mol_type = other DNA
cagagcgttaaaaatggcgggctggcaacaggaaccatcatcaacaccggcgcagaaggcggcccggattctgaa

SEQ ID NO: 550171 - DNA, 75 bp, synthetic construct
  source 1..75: mol_type = other DNA
gctcagaacagaggttgccggtatgtctctgacgacaggggtgtatggtgctgcaggccattcttccgttgatgt

SEQ ID NO: 550172 - DNA, 75 bp, synthetic construct
  source 1..75: mol_type = other DNA
agtcggtacacggaagggccctgaataccacactgaatggcggttaccagtatgtgcacagggacggacttgcgc

SEQ ID NO: 550173 - DNA, 75 bp, synthetic construct
  source 1..75: mol_type = other DNA
aaatatccacaggcaacattcacctccaccagcgtgaagaaagacggtgacgaactggatattaccggcgatctg

SEQ ID NO: 550174 - DNA, 75 bp, synthetic construct
  source 1..75: mol_type = other DNA
ggcggtaagttcagtattgatggcatatccggtcaggccagcggcctgctgctggaaaatggcggcagctttacg

SEQ ID NO: 550175 - DNA, 75 bp, synthetic construct
  source 1..75: mol_type = other DNA
aaccgtctggggaatttcacggtggaaaacggtaaggctgacggcgttgttctggagtccggcggtcgcctggat

SEQ ID NO: 550176 - DNA, 75 bp, synthetic construct
  source 1..75: mol_type = other DNA
atgaaaatacgcaagggtggcaccatcaatatgcgtgttcgccttgatggcagcaatacctctgaccagctggtg

SEQ ID NO: 550177 - DNA, 75 bp, synthetic construct
  source 1..75: mol_type = other DNA
tacggcggcaaccgtcaccggcagcaaccgtctgggcaatttcgcggtggaaaacggtaatgctgacggtgttgt

SEQ ID NO: 550178 - DNA, 75 bp, synthetic construct
  source 1..75: mol_type = other DNA
cagaacagaggttgccggtatgtctctgacgacaggggtgtatggtgctgcaggccattcttccgttgatgttaa

SEQ ID NO: 550179 - DNA, 75 bp, synthetic construct
  source 1..75: mol_type = other DNA
aacagcagaatccaccaccatcaacaaaaatgggcggcaggttatctggtcttcaggggtggcccgggataccct

SEQ ID NO: 550180 - DNA, 75 bp, synthetic construct
  source 1..75: mol_type = other DNA
taccctggcagtgtctgccggtggtaaggcaacagatgtcaccatgacatccggtggtgccctgatagcagacag

SEQ ID NO: 550181 - DNA, 75 bp, synthetic construct
  source 1..75: mol_type = other DNA
caataaaaatggccggcaggttatctggtcttcggggatggcacgggacaccctcatttacgccggcggtgacca

SEQ ID NO: 550182 - DNA, 75 bp, synthetic construct
  source 1..75: mol_type = other DNA
agtaactccccggtaacgttccataaactgaccaccagtaacctcaccggccaggacggcaccatcaatatgcgt

SEQ ID NO: 550183 - DNA, 75 bp, synthetic construct
  source 1..75: mol_type = other DNA
taacgtgggtgaaatcggtggatgaagccatcgcggcgtgtggtgacgtaccagaaatcatggtgattggcggtg

SEQ ID NO: 550184 - DNA, 75 bp, synthetic construct
  source 1..75: mol_type = other DNA
aagttcgggcatggcagtgcacaacatgtgcgtgccggcttccgtctgggcagccacaacgatatgaactttggt

SEQ ID NO: 550185 - DNA, 75 bp, synthetic construct
  source 1..75: mol_type = other DNA
aaacactggtggatgacggcggaaccctggcagtgtctgccggtggtaaggcaacagatgtcaccatgacatccg

SEQ ID NO: 550186 - DNA, 75 bp, synthetic construct
  source 1..75: mol_type = other DNA
gtcatctcgggcacgtaacaacggtggtattgcccgtggggccacgccggaaagcacggcagctatggcctcgtc

SEQ ID NO: 550187 - DNA, 75 bp, synthetic construct
  source 1..75: mol_type = other DNA
acggccaggataacgccggttatgtgaaattcgggtatggcagtgcacaacatgtgcgtgctggtttccgtctgg

SEQ ID NO: 550188 - DNA, 75 bp, synthetic construct
  source 1..75: mol_type = other DNA
cgccaccgacctgggaacgtatttatccgcttgatttagaaaatcgtgcgcgtgcacgacagattcaggcctggc

SEQ ID NO: 550189 - DNA, 75 bp, synthetic construct
  source 1..75: mol_type = other DNA
acatcacacctgttttcacttttatcttctgtcttcagaggtatcacactatgaaaatcatcacccgtggtgaag

SEQ ID NO: 550190 - DNA, 75 bp, synthetic construct
  source 1..75: mol_type = other DNA
tcccggggtgatatgcgtgtggggacctccaccgcaggcagcgggatgacgttctctccctcacagaatggcact

SEQ ID NO: 550191 - DNA, 75 bp, synthetic construct
  source 1..75: mol_type = other DNA
ccgcgcacggggctggggctggctgggctcactggaaaccggtctgcccttcagtatcactgacaacctgatgct

SEQ ID NO: 550192 - DNA, 75 bp, synthetic construct
  source 1..75: mol_type = other DNA
ggtcgcctggatgtactggaaggccattcagcgcagaataccctggtggatgacggcggtatcctggcagtgtct

SEQ ID NO: 550193 - DNA, 75 bp, synthetic construct
  source 1..75: mol_type = other DNA
ggaaagcagcggcagctatggcttcgtccgtctggagggtgacctgctcagaacagaggttgccggtatgtctct

SEQ ID NO: 550194 - DNA, 75 bp, synthetic construct
  source 1..75: mol_type = other DNA
atggcagataacgtcgtgctggaaaatggcggacgtctggatgtactgagcggccataccgccacaaacacacat

SEQ ID NO: 550195 - DNA, 75 bp, synthetic construct
  source 1..75: mol_type = other DNA
atgaaactgcaaggggtaattttcgatctggatggagtaatcacagatagcgcacatctgcatttccaggcgtgg

SEQ ID NO: 550196 - DNA, 75 bp, synthetic construct
  source 1..75: mol_type = other DNA
tatcgcaaaaatctgctttacgtccactcactgcgcgagctgacggttaatgctgtgctgcccggtattcgcaat

SEQ ID NO: 550197 - DNA, 75 bp, synthetic construct
  source 1..75: mol_type = other DNA
gggtacagccgcagccggcagtaacatgacgttctcaccgtcccagaatggcacgtcactggacctgcaggccgg

SEQ ID NO: 550198 - DNA, 75 bp, synthetic construct
  source 1..75: mol_type = other DNA
gctcccggggagacatgagcatgggtacagccgcagccggcagtaacatgacgttctcaccgtcccggaatggca

SEQ ID NO: 550199 - DNA, 75 bp, synthetic construct
  source 1..75: mol_type = other DNA
ctggtgggtacagccttctgttatccgcaccttcagctcccggggagatatgcgtgtggggacttccactgcagg

SEQ ID NO: 550200 - DNA, 75 bp, synthetic construct
  source 1..75: mol_type = other DNA
accacactgaatggcggttaccagtatgtgcacaaggacggacttgcgctgaacacagtaattaacgaggggggc

SEQ ID NO: 550201 - DNA, 75 bp, synthetic construct
  source 1..75: mol_type = other DNA
ataatcagacgacaccggatgccgcgctgagccgtgctgttgcaaaaggcgactccccggtaacgttccataaac

SEQ ID NO: 550202 - DNA, 75 bp, synthetic construct
  source 1..75: mol_type = other DNA
tgaactgccggtgaactggtgggtacagccttctgttatccgcaccttcagctcccggggggacatgagcatggg

SEQ ID NO: 550203 - DNA, 75 bp, synthetic construct
  source 1..75: mol_type = other DNA
tcaccctgggcgttcaggcgggttatgtccacagcgtcagcggcagcagcgctgaaggatataacggtcaggcca

SEQ ID NO: 550204 - DNA, 75 bp, synthetic construct
  source 1..75: mol_type = other DNA
tcaccctgggcgttcaggctggttatggccacagcgtcagcggcagcagcgctgaaggatataacggtcaggcca

SEQ ID NO: 550205 - DNA, 75 bp, synthetic construct
  source 1..75: mol_type = other DNA
gaaacggtaaatcaggcttctggcgcattacagaaaaaccagaacggcgcagatattcccgataaaaaacttttc

SEQ ID NO: 550206 - DNA, 75 bp, synthetic construct
  source 1..75: mol_type = other DNA
agagctccccaggcgttggcaggagctcaaagggctggaggtgggatatctctgggctcattaccggtagatatt

SEQ ID NO: 550207 - DNA, 75 bp, synthetic construct
  source 1..75: mol_type = other DNA
ccggaacaggtaagacaagacttgccagacacatcgcagcccgtttatcgttacgaatgttaactgtgcgttgcg

SEQ ID NO: 550208 - DNA, 75 bp, synthetic construct
  source 1..75: mol_type = other DNA
ttttcactgagagtattatctaaactatataacctatctgttcgcgggataggaaacattgttaaggaaaataat

SEQ ID NO: 550209 - DNA, 75 bp, synthetic construct
  source 1..75: mol_type = other DNA
gaaaaacaggctaatcgcgcgtgcggtttgcattacgagatttatgcctcccgtttgttgggtatggctatgaat

SEQ ID NO: 550210 - DNA, 75 bp, synthetic construct
  source 1..75: mol_type = other DNA
gttttcgattatgtaatgcagaggccatcagtgctttttttagacgaatttgatgctttagctggagcaagaggt

SEQ ID NO: 550211 - DNA, 75 bp, synthetic construct
  source 1..75: mol_type = other DNA
caggaacaggtaagactatgttatctaagtacatcgctacccgcttagattttccacttcttacagtgcgttgcg

SEQ ID NO: 550212 - DNA, 75 bp, synthetic construct
  source 1..75: mol_type = other DNA
tcaccctgggcgttcaggcgggttatggccacagcgtcagcggcagcagcgctgaaggttataacggtcaggcca

SEQ ID NO: 550213 - DNA, 75 bp, synthetic construct
  source 1..75: mol_type = other DNA
ggggaatcattatctggtctataacgacaaattcattaagattagcgattcctgtccggctaagcccccttcggc

SEQ ID NO: 550214 - DNA, 75 bp, synthetic construct
  source 1..75: mol_type = other DNA
tcacggactgggcggtcatatctccgcgaaatgcacaagatgttactcaggacatcagtccgtatactattactg

SEQ ID NO: 550215 - DNA, 75 bp, synthetic construct
  source 1..75: mol_type = other DNA
cataattttaaacctaatccgtattacaagattgagttcgacaaaggcaaggaaatagctgattatataaggtca

SEQ ID NO: 550216 - DNA, 75 bp, synthetic construct
  source 1..75: mol_type = other DNA
cgcggtgaaaaacgtcattgccattggcgcggggatgtccgacggtatcggttttggtgcgaatgcgcgtacggc

SEQ ID NO: 550217 - DNA, 75 bp, synthetic construct
  source 1..75: mol_type = other DNA
atgtcgcgtcttggcgcggcgcagggtgccgatcctgccacctttatgggcatggcggggctgggcgatctggtg

SEQ ID NO: 550218 - DNA, 75 bp, synthetic construct
  source 1..75: mol_type = other DNA
gccacgcggtcgctgaatgacgctaaaaatattcttgttgctgattgtgaaaatggggagggggggggttatgcg

SEQ ID NO: 550219 - DNA, 75 bp, synthetic construct
  source 1..75: mol_type = other DNA
gacagactggtcattgacggtggcagggcaaccggaaaaaccatcctgaacctggtgaacgccggcaacagtggt

SEQ ID NO: 550220 - DNA, 75 bp, synthetic construct
  source 1..75: mol_type = other DNA
gcaccatcagcctgcgtgtacgcccggatactctcgctgaactgattaacgtggcctgcgataatggctactccc

SEQ ID NO: 550221 - DNA, 75 bp, synthetic construct
  source 1..75: mol_type = other DNA
aacggcggtattgcccgtggggccacgccggaaagcagcggcagctatggcttcgtccgtctggagggtgacctg

SEQ ID NO: 550222 - DNA, 75 bp, synthetic construct
  source 1..75: mol_type = other DNA
gggctggcgaccaccggtaagggtattcaggtggttgaggccattaacggtgccaccacggaggaaggggctttt

SEQ ID NO: 550223 - DNA, 75 bp, synthetic construct
  source 1..75: mol_type = other DNA
acatgtgcgtgccggtttccgtctgggcagccacaacgatatgacctttggtgaaggcacctcatcccgtgcccc

SEQ ID NO: 550224 - DNA, 75 bp, synthetic construct
  source 1..75: mol_type = other DNA
aaaatgcccactgctctggttagcgctcaaaaaggtgatggtggcttttcatttaatgatttaccagtggacaat

SEQ ID NO: 550225 - DNA, 75 bp, synthetic construct
  source 1..75: mol_type = other DNA
gaacgatctgctgtttattgtcattaccgatatgcaaagtcttcgctactcacaccctgaagccccgcgaattgg

SEQ ID NO: 550226 - DNA, 75 bp, synthetic construct
  source 1..75: mol_type = other DNA
atgtcggaaacagcaacctcggggtggcaaccaccggacagggtatccgggttgtggatgcacagaatggcgcca

SEQ ID NO: 550227 - DNA, 75 bp, synthetic construct
  source 1..75: mol_type = other DNA
tactgagccgtgctgttgcaaaaggcgactccccggtaacgttccataaactgaccaccagtaacctcaccggtc

SEQ ID NO: 550228 - DNA, 75 bp, synthetic construct
  source 1..75: mol_type = other DNA
cggcgggctgtgggtacagatatggcggctgataatcgagacaatgttttaatattcagtcatatagattactgt

SEQ ID NO: 550229 - DNA, 75 bp, synthetic construct
  source 1..75: mol_type = other DNA
gcaaatcagtgatatgacgcgagacgggctagctaacaaggcactggcagtagcgcgtaccctcgccgactcgcc

SEQ ID NO: 550230 - DNA, 75 bp, synthetic construct
  source 1..75: mol_type = other DNA
tggatgggctggtcaactatgccgacgcacttcgtgaacgctcccacgaatttatgaacaaattacacgtgattc

SEQ ID NO: 550231 - DNA, 75 bp, synthetic construct
  source 1..75: mol_type = other DNA
gccggttatgcccacagcgtcagcggcagcagcgctgaaggttataacggtcaggccacgctgaatgtgactttc

SEQ ID NO: 550232 - DNA, 75 bp, synthetic construct
  source 1..75: mol_type = other DNA
agaatggcgccaccacagaagaaggtgcgtttgccctgagtcgcccgcttcaggccggcgcctttaactacaccc

SEQ ID NO: 550233 - DNA, 75 bp, synthetic construct
  source 1..75: mol_type = other DNA
cccgtgacactctgcgcgacagtacaaaacacagtgtgagtgaactgccggtgaactggtgggtacagccttctg

SEQ ID NO: 550234 - DNA, 75 bp, synthetic construct
  source 1..75: mol_type = other DNA
cggttatgcccacagtgtcagcggcaacagcgctgaaggctataacggtcaggccacgctgaatgtgaccttctg

SEQ ID NO: 550235 - DNA, 75 bp, synthetic construct
  source 1..75: mol_type = other DNA
gtaacatgacgttctcaccgtcccagaatggcacgtcactggacctgcaggccggactggaagcccgtgtccggg

SEQ ID NO: 550236 - DNA, 75 bp, synthetic construct
  source 1..75: mol_type = other DNA
caccctgcgcgacagtacaaaacacggtgtgagtgaactgcctgtgaactggtgggtacagccttctgttatccg

SEQ ID NO: 550237 - DNA, 75 bp, synthetic construct
  source 1..75: mol_type = other DNA
ccagtgatacggttattcgtgacggcgggggacagagcctgaacgggctggctgtgaacaccacgctgaataaca

SEQ ID NO: 550238 - DNA, 75 bp, synthetic construct
  source 1..75: mol_type = other DNA
actggaaaatggcggacgtctggatgtgctgaccggacacacagccactaatacccgtgtggatgatggcggaac

SEQ ID NO: 550239 - DNA, 75 bp, synthetic construct
  source 1..75: mol_type = other DNA
ctggaagcccgtgtccgggaaaatatcaccctggggcgttcaggcaggttatgtccacagcgtcagcggcagcag

SEQ ID NO: 550240 - DNA, 75 bp, synthetic construct
  source 1..75: mol_type = other DNA
ccagcggtaagggtattcaggtggtggaagccattaacggtgccaccacggaggaaggggcctttgtccagggga

SEQ ID NO: 550241 - DNA, 75 bp, synthetic construct
  source 1..75: mol_type = other DNA
aaaaggaaggcgatactttcaaataataataatgttgacgagatattactccttaaaaaaatcgcatttacaata

SEQ ID NO: 550242 - DNA, 75 bp, synthetic construct
  source 1..75: mol_type = other DNA
ccctggcagtgtctgccggtggtaaggcaacagatgtcaccatgacatccggtggtgccctgatagcagacagtg

SEQ ID NO: 550243 - DNA, 75 bp, synthetic construct
  source 1..75: mol_type = other DNA
cagtactgctgcaactgtcaccggcacaaaccgcctggggcatttctccgtgggaaatggcatggcagataacgt

SEQ ID NO: 550244 - DNA, 75 bp, synthetic construct
  source 1..75: mol_type = other DNA
ggaggaactgccagtgatacggttattcgtgatggcggagggcagagccttaacggactggcggtgaacaccacg

SEQ ID NO: 550245 - DNA, 75 bp, synthetic construct
  source 1..75: mol_type = other DNA
tggtggtcttcagggtgtcaacccaggtggaagtgccacagacacggttatcagtgccggtggaggacagaacct

SEQ ID NO: 550246 - DNA, 75 bp, synthetic construct
  source 1..75: mol_type = other DNA
ccgtatccatgggaaatggcggagtactgctggccgattccggggccgctgtcagtggtacccggagcgacggaa

SEQ ID NO: 550247 - DNA, 75 bp, synthetic construct
  source 1..75: mol_type = other DNA
ggccgattccggtgccactgtcagcggtcagtatgacggtggaggtgccttcagtatcggcagcggacacgcctc

SEQ ID NO: 550248 - DNA, 75 bp, synthetic construct
  source 1..75: mol_type = other DNA
tgaagccattaacggtgccaccacggaggaaggggcctttgtccaggggaacaggctgcaggccggtgcctttaa

SEQ ID NO: 550249 - DNA, 75 bp, synthetic construct
  source 1..75: mol_type = other DNA
atgaaggcgttattatttgtaattctggttttttctgcatctgtatatgcagatacgccatcaaaaatgaatttt

SEQ ID NO: 550250 - DNA, 75 bp, synthetic construct
  source 1..75: mol_type = other DNA
gtagagaagaatccccaactggctcaaaaatggtatcaaaaagcgattgatgcaggtaatacagagcatcagcag

SEQ ID NO: 550251 - DNA, 75 bp, synthetic construct
  source 1..75: mol_type = other DNA
cagaatactataaaaaaggtgataaaaataatgatattacagcacaataccgtctggcaaaactttatgaacaag

SEQ ID NO: 550252 - DNA, 75 bp, synthetic construct
  source 1..75: mol_type = other DNA
atgaacaagagcgaagtgagtacaccggtgcgacggggaagacccaaaagtgcgggacttgatgagcgtaagaaa

SEQ ID NO: 550253 - DNA, 75 bp, synthetic construct
  source 1..75: mol_type = other DNA
aggctcaaatggaatgagtagtgataccagtttgcagataaatgcggcaaccacccaccagagcaacagtatgga

SEQ ID NO: 550254 - DNA, 75 bp, synthetic construct
  source 1..75: mol_type = other DNA
ctgaatgaacaggccattcttaaaggccagagcaccagttcactgctgatgccggggctggaaatcagggttcag

SEQ ID NO: 550255 - DNA, 75 bp, synthetic construct
  source 1..75: mol_type = other DNA
cggctgaacagcatagttggctcaaaaagcattgtagcaatttttgggtttctacagggtatctccagagcaagt

SEQ ID NO: 550256 - DNA, 75 bp, synthetic construct
  source 1..75: mol_type = other DNA
gaagtggggggcgtcctattatgggaattagaataggtactgatgcctttttcactgttcatgctatggcaacaa

SEQ ID NO: 550257 - DNA, 75 bp, synthetic construct
  source 1..75: mol_type = other DNA
ttttaatcgcgaacctgatgatttagaggtgaaccttacagttcctgtaagaaatgcatcagaaattattttccc

SEQ ID NO: 550258 - DNA, 75 bp, synthetic construct
  source 1..75: mol_type = other DNA
attgggggaagcatacctaaatggaaactacaatcaaacggtgaattacgctcagtcttttaaatggttgacgaa

SEQ ID NO: 550259 - DNA, 75 bp, synthetic construct
  source 1..75: mol_type = other DNA
tatttatctctgtatacggatatgcaaatattcctgaaaaaatgagtattaatgaaataataacacgcgctgttc

SEQ ID NO: 550260 - DNA, 75 bp, synthetic construct
  source 1..75: mol_type = other DNA
tttatctttcagcagataaaccgttatacgcattcaggaatattgcacaatgcgtaatcacaattaaagacacac

SEQ ID NO: 550261 - DNA, 75 bp, synthetic construct
  source 1..75: mol_type = other DNA
ttgaaactggatgaaggaagcaatacggcctccggtttgggtatagaaatactggacggaaatatgcgtccggtg

SEQ ID NO: 550262 - DNA, 75 bp, synthetic construct
  source 1..75: mol_type = other DNA
gatgctggaaccacaactgcagtatacctggcagggactctccctggatgacggccaggataacgccggttatgt

SEQ ID NO: 550263 - DNA, 75 bp, synthetic construct
  source 1..75: mol_type = other DNA
cgcattcagcctgacggcaccgccggtacagggaatgccggtgcaggcccccctgcgcaccctgtacggggtcat

SEQ ID NO: 550264 - DNA, 75 bp, synthetic construct
  source 1..75: mol_type = other DNA
cggccataccctactcagaacgctacggctaccgcccggcgcttatcccccgcccggtaatggccggcacgctcc

SEQ ID NO: 550265 - DNA, 75 bp, synthetic construct
  source 1..75: mol_type = other DNA
agcaaaaagagaaaaattatcgcgttaaatttgaagcggttcccagtattgatgacgttgccacagataaaaaag

SEQ ID NO: 550266 - DNA, 75 bp, synthetic construct
  source 1..75: mol_type = other DNA
gtggtctgtttctttttgccgcatcatcagcactggcaaactcagtcccccctggatttgaaactttggctctcg

SEQ ID NO: 550267 - DNA, 75 bp, synthetic construct
  source 1..75: mol_type = other DNA
catgtgcgtgccggtttccgtctgggcagccacaacgatatgagctttggtgaaggcacctcatcccgtgccccc

SEQ ID NO: 550268 - DNA, 75 bp, synthetic construct
  source 1..75: mol_type = other DNA
cgctgccgcttcgccatccttcagggctgcacgacagcgccacggaagccgtatgggggctgaacaccgcataca

SEQ ID NO: 550269 - DNA, 75 bp, synthetic construct
  source 1..75: mol_type = other DNA
cggcatcgccagcgccaccgggcaaccggtactccaggacttgctatcggcgtttccggcaaccattgagctggc

SEQ ID NO: 550270 - DNA, 75 bp, synthetic construct
  source 1..75: mol_type = other DNA
atggttacgctttggggaaattatgaggggatctctcagtgcacagtctcatcggattcgcttaattttaccgta

SEQ ID NO: 550271 - DNA, 75 bp, synthetic construct
  source 1..75: mol_type = other DNA
tatcgaattttatgacgaccagagcggctatgagcgcggactgacgctgccgcttcgccatccttcagggctaca

SEQ ID NO: 550272 - DNA, 75 bp, synthetic construct
  source 1..75: mol_type = other DNA
gccggggctggaaatcagggttcagggcgacgacgcgcctgcggtattccgcaagggcgtgctgattaccggcgt

SEQ ID NO: 550273 - DNA, 75 bp, synthetic construct
  source 1..75: mol_type = other DNA
gcgagcgacaccagatgcgcggtcaggacttcgtgtttaacctcaaaagcgaatacccggcccgcgaactgaacc

SEQ ID NO: 550274 - DNA, 75 bp, synthetic construct
  source 1..75: mol_type = other DNA
ggtgaaaatgctgtagacattttagctgtacaagaggcaggctctccgccgtcaacggctgtagatacaggtaga

SEQ ID NO: 550275 - DNA, 75 bp, synthetic construct
  source 1..75: mol_type = other DNA
gcgatgaatgtgtgcgcgacagtacaatcactggcctataactgtctcaagggaacccaaaactcaagcgcaaaa

SEQ ID NO: 550276 - DNA, 75 bp, synthetic construct
  source 1..75: mol_type = other DNA
agtcaaccgggtacggacgatcgcgtaacgtgggtgaagtcggtggatgaagccattgcggcgtgtggtgacgta

SEQ ID NO: 550277 - DNA, 75 bp, synthetic construct
  source 1..75: mol_type = other DNA
ttttcctcaacatcatcctcgcaccagtcgacgacggtttacgctttacgtatagtggcgacaattttttttatc

SEQ ID NO: 550278 - DNA, 75 bp, synthetic construct
  source 1..75: mol_type = other DNA
acacatttaaggccagcactcagttgggttcacaactccaacgtacagatgcgctggtggccacgacacgtgact

SEQ ID NO: 550279 - DNA, 75 bp, synthetic construct
  source 1..75: mol_type = other DNA
caacctggacagattctccgattctatccgtaataaaaactttagcgatgaagatgtgcgtaattttgcacggaa

SEQ ID NO: 550280 - DNA, 75 bp, synthetic construct
  source 1..75: mol_type = other DNA
gtttgaggcatcattaaagcgtacgaataccatggcatcccaggggcaactctggctgcaattgtccggtgcagc

SEQ ID NO: 550281 - DNA, 75 bp, synthetic construct
  source 1..75: mol_type = other DNA
atgagtaaagccagacgttgggttatcattgtgctatcactggcggttctggtgatgatcggcattaatatggcc

SEQ ID NO: 550282 - DNA, 75 bp, synthetic construct
  source 1..75: mol_type = other DNA
cgaaacacacggcgcttaccgcttccgccggtgcatgacgcacggctgtacgctcgtgaatgtgtatatcacaga

SEQ ID NO: 550283 - DNA, 75 bp, synthetic construct
  source 1..75: mol_type = other DNA
gagcgcacgattagccaccaacagcgctgggtgaatcattaccagaaccgcctggcctacgaacgcgcgatgctc

SEQ ID NO: 550284 - DNA, 75 bp, synthetic construct
  source 1..75: mol_type = other DNA
gaaactgggcttcctgcctggcgatttaagccagaaagtagacccgtatctgcgcccgctgtacgacgcgctgtt

SEQ ID NO: 550285 - DNA, 75 bp, synthetic construct
  source 1..75: mol_type = other DNA
accttcggcgttggcccggcgggtacgggtaaaacctacctggcggtagctgcggcagttgatgccctggagcgt

SEQ ID NO: 550286 - DNA, 75 bp, synthetic construct
  source 1..75: mol_type = other DNA
atgagtaaagccagacgttgggttatcattgtgctatcactggcggttctggtgatgatcggtattaacatgacc

SEQ ID NO: 550287 - DNA, 75 bp, synthetic construct
  source 1..75: mol_type = other DNA
gtgatattgattttgtctggtcggcttttaccggtattgccctgatcttttctcaatatactggtgtaaaagagt

SEQ ID NO: 550288 - DNA, 75 bp, synthetic construct
  source 1..75: mol_type = other DNA
aaagcttggaacacaatcagttggatggcttgaatcagaaatcgatgaatggttgttacatcgtagtcttattaa

SEQ ID NO: 550289 - DNA, 75 bp, synthetic construct
  source 1..75: mol_type = other DNA
caggggcataaagtcgcattgctggacattccggctaatggtgaaattattcgttatggtgaagtgattggttac

SEQ ID NO: 550290 - DNA, 75 bp, synthetic construct
  source 1..75: mol_type = other DNA
cctcgttgtatgctctgcgatctgccgcgcataaactgttgaattacgcgcagcaggcgcgggaatacctggatt

SEQ ID NO: 550291 - DNA, 75 bp, synthetic construct
  source 1..75: mol_type = other DNA
tagtatttttatcgttttacgctcaggcggatttaactgattttcgcgttgcgacctggaaccttcagggcgcat

SEQ ID NO: 550292 - DNA, 75 bp, synthetic construct
  source 1..75: mol_type = other DNA
gtttagaaagcatatctggctacgataaaatcgttgtcaaatataataactggatcaccaaggacaatggcgagt

SEQ ID NO: 550293 - DNA, 75 bp, synthetic construct
  source 1..75: mol_type = other DNA
gatgatgttgctaccgataaaaaagatctctctatgcagttaacggttaatttaatttggggcatcgttgttagt

SEQ ID NO: 550294 - DNA, 75 bp, synthetic construct
  source 1..75: mol_type = other DNA
atgtcttttctaaaacagaagaacaatttaaaaaaaagcccccatggcaaattgcttttcatttccggaaatgaa

SEQ ID NO: 550295 - DNA, 75 bp, synthetic construct
  source 1..75: mol_type = other DNA
atttttattgctgcgatggcaaccgtcaccactaacttaagccagggtttgctgaaggattataaaacagcgttt

SEQ ID NO: 550296 - DNA, 75 bp, synthetic construct
  source 1..75: mol_type = other DNA
ttttaccggtattgccctgatcttttctcaatatactggtgtaaaagagttcctgaccacggccgccgttgtagc

SEQ ID NO: 550297 - DNA, 75 bp, synthetic construct
  source 1..75: mol_type = other DNA
taaccccgctgtcggctacgactctgacctgctggtgcgctgcggcgcaacgaagtcactgaagtacgcgacgcc

SEQ ID NO: 550298 - DNA, 75 bp, synthetic construct
  source 1..75: mol_type = other DNA
cagactgaaggattccctcaacctacaccgtcagttagcagaagaggttgagccggaggacgatgaaactccggt

SEQ ID NO: 550299 - DNA, 75 bp, synthetic construct
  source 1..75: mol_type = other DNA
ggtatccctcttggcaggtatatcagagatagcagattaacaaacgcagcagaagaactacgttctactactgaa

SEQ ID NO: 550300 - DNA, 75 bp, synthetic construct
  source 1..75: mol_type = other DNA
atttgcgctggcacaaattgagcaggaactcatcgcacccgaaaatcgtagccgttgtctggcggtaattgaaga

SEQ ID NO: 550301 - DNA, 75 bp, synthetic construct
  source 1..75: mol_type = other DNA
tacggagtgttatgccatgacggtccattattaccggctgcgggattacgccctgcagcatccggaatgcagcgc

SEQ ID NO: 550302 - DNA, 75 bp, synthetic construct
  source 1..75: mol_type = other DNA
atcgcccccgaaaatcgcagcggttgcctggcggtaattgaagaagtgatgctcgacgaaccgcagtactggaag

SEQ ID NO: 550303 - DNA, 75 bp, synthetic construct
  source 1..75: mol_type = other DNA
cttcagtaaaattcatcttgatgcgtcaatgtcctgtgcgggcgaccctgtacctttagcgccagaaacggttgc

SEQ ID NO: 550304 - DNA, 75 bp, synthetic construct
  source 1..75: mol_type = other DNA
gcggaaagtgtggcgacagattgccagcgtgagcaactgagctatgtcattggcaccgaagttccggttccgggc

SEQ ID NO: 550305 - DNA, 75 bp, synthetic construct
  source 1..75: mol_type = other DNA
cgcggtacagccctgaagctgaccggcagcactgtgctgaacggtgccattgaccccacgaatgtcactctcgcc

SEQ ID NO: 550306 - DNA, 75 bp, synthetic construct
  source 1..75: mol_type = other DNA
gaaggcacctcatcccgtgacactctgcgcgacagtgcaaaacaccgtgtgagtgaactgccggtgaactggtgg

SEQ ID NO: 550307 - DNA, 75 bp, synthetic construct
  source 1..75: mol_type = other DNA
taacatgacgttctcaccgtcacagaatggcacgtcactggacctgcaggccggactggaagcccgtgtccggga

SEQ ID NO: 550308 - DNA, 75 bp, synthetic construct
  source 1..75: mol_type = other DNA
gggtatccgggttgtggatgcacagaatggcgccaccacagaagaaggtgcgtttgccctgagtcgcccgcttca

SEQ ID NO: 550309 - DNA, 75 bp, synthetic construct
  source 1..75: mol_type = other DNA
cgggacagcgatgagactggtacctgcgcagtgaaaatgcttatcgtgctgaagtccccctgtatgcctccatgc

SEQ ID NO: 550310 - DNA, 75 bp, synthetic construct
  source 1..75: mol_type = other DNA
cgggagaaaccgtgaacggcggaacactgacaaatcatgacaaccagattgttctcggtacggccaacggaatga

SEQ ID NO: 550311 - DNA, 75 bp, synthetic construct
  source 1..75: mol_type = other DNA
atgcacagatacgtacagaaagacattcagggaacaacagagccacacgtcagaaacttccatcagccggatctg

SEQ ID NO: 550312 - DNA, 75 bp, synthetic construct
  source 1..75: mol_type = other DNA
attgggaagctgatcggtcgtaccggtgatgccgtcaggactaaagcgcgggagttggggatcagcatgattctg

SEQ ID NO: 550313 - DNA, 75 bp, synthetic construct
  source 1..75: mol_type = other DNA
aaccgtgacagcgatgaagactggtacctgcgcagtgaatatgcctatcgttctgaagtcccccagtatgcctcc

SEQ ID NO: 550314 - DNA, 75 bp, synthetic construct
  source 1..75: mol_type = other DNA
aaccgtgacagcgatgaagactggtacctgcgcagtgaatatgcatatcgttctgaagtccccccgtatgcctcc

SEQ ID NO: 550315 - DNA, 75 bp, synthetic construct
  source 1..75: mol_type = other DNA
ggctgggttcgctggaaaccggtctgcccttcagtatcactgacaatctgatgctggagccgcaactgcagtaca

SEQ ID NO: 550316 - DNA, 75 bp, synthetic construct
  source 1..75: mol_type = other DNA
acatcaccctgggcgttcaggccggttatgcccacagcatcaacggcagcagcgctgaaggttataacagtcagg

SEQ ID NO: 550317 - DNA, 75 bp, synthetic construct
  source 1..75: mol_type = other DNA
caggtagtgaaggatggggcagtggctgaaaataccaccgttaaccagaaaggcaaactgcaggtgaacgccggt

SEQ ID NO: 550318 - DNA, 75 bp, synthetic construct
  source 1..75: mol_type = other DNA
cgcttatccagcgaagagattgccgccgccgattacgtgattctcgccaccgggcgtggcttgagcggcgatgac

SEQ ID NO: 550319 - DNA, 75 bp, synthetic construct
  source 1..75: mol_type = other DNA
aacagcttccgtctcagcattcagggcggtcatctcgggcacgttaacaacggcggtattgcccgtggggccacg

SEQ ID NO: 550320 - DNA, 75 bp, synthetic construct
  source 1..75: mol_type = other DNA
gtgaaggtgatgcactcctgcagggaggcgctctcaccggtaacggcagggtggaaaaatcaggaagtggcacac

SEQ ID NO: 550321 - DNA, 75 bp, synthetic construct
  source 1..75: mol_type = other DNA
ggtgtaccccgacgggaaattgccgaaaagtttgggatgaagttgggcgcagtgaataactacgtttatttcgac

SEQ ID NO: 550322 - DNA, 75 bp, synthetic construct
  source 1..75: mol_type = other DNA
ctcacttactacgttatcgggccggtgatgtccgacctcatgggcgggctactgcacttcctgaataccattcct

SEQ ID NO: 550323 - DNA, 75 bp, synthetic construct
  source 1..75: mol_type = other DNA
actgacaaatcatgacaaccagattgtcttcggtacgaccaacggaatgaccatcagtaccgggctggagtatgg

SEQ ID NO: 550324 - DNA, 75 bp, synthetic construct
  source 1..75: mol_type = other DNA
ggttatgtgaagttcgggcatggcagtacacaacatgtgcgtgccggcttccgtctgggcagccacaacgatatg

SEQ ID NO: 550325 - DNA, 75 bp, synthetic construct
  source 1..75: mol_type = other DNA
gcgattctgcatggcattacacaaaccgaatacgcgcaacgctacaggataccgcaccgcagagcctggaatgcg

SEQ ID NO: 550326 - DNA, 75 bp, synthetic construct
  source 1..75: mol_type = other DNA
tacggcggcaaccgtcaccggcagcaaccgtctgggcaatttcacagtggaaaacggtaatgctgacggtgttgt

SEQ ID NO: 550327 - DNA, 75 bp, synthetic construct
  source 1..75: mol_type = other DNA
cgggcaatgggtacaggatggcggaacagccaacaaaacgactgtcaccagtggtggtcttcagagagtgaaccc

SEQ ID NO: 550328 - DNA, 75 bp, synthetic construct
  source 1..75: mol_type = other DNA
agccacaacgatatgaactttggtaaaggcacctcatcccgtgacaccctgcgcgacagtgcaaaacacagtgtg

SEQ ID NO: 550329 - DNA, 75 bp, synthetic construct
  source 1..75: mol_type = other DNA
cgataacgccacggtgcagtcggtggtggatgacctcagccatgccggacagattcatttcacctcctcacgcac

SEQ ID NO: 550330 - DNA, 75 bp, synthetic construct
  source 1..75: mol_type = other DNA
atacactctttgaaaactttctgaagttgcctgttgcccgccagaaaagagctcaggactacagcgagcgatgcg

SEQ ID NO: 550331 - DNA, 75 bp, synthetic construct
  source 1..75: mol_type = other DNA
atggcagagctgcagggcttactctggggaccgggagtgtattcactctgcaggaaggtgacagcaccagggaca

SEQ ID NO: 550332 - DNA, 75 bp, synthetic construct
  source 1..75: mol_type = other DNA
aacgatatgacctttggtgaaggcacctcatcccgtgcccccctgcgtgacagtgcaaaacacagtgtgcgtgaa

SEQ ID NO: 550333 - DNA, 75 bp, synthetic construct
  source 1..75: mol_type = other DNA
agacggtctgcaggatgtcatggccggtggcagtgccacggatacggttatcagtgccggtggagggcagaatct

SEQ ID NO: 550334 - DNA, 75 bp, synthetic construct
  source 1..75: mol_type = other DNA
ccgggagaaaccgtgaacggcggaacactggcaaatcatgacaaccagattgtcttcggtacgaccaacggaatg

SEQ ID NO: 550335 - DNA, 75 bp, synthetic construct
  source 1..75: mol_type = other DNA
agaccggtgtaaacggtgaaaataacagcgtccgtctcagcattcagggcggccatctcggtcacgataacaacg

SEQ ID NO: 550336 - DNA, 75 bp, synthetic construct
  source 1..75: mol_type = other DNA
caaccggaaaaaccatcctgaacctggtgaacgccggcaacagtgcgtcggggctggcgaccaccggtaagggta

SEQ ID NO: 550337 - DNA, 75 bp, synthetic construct
  source 1..75: mol_type = other DNA
gcgcaggcttctcagggtgaaataaccacccgtattgttattcgctaccgtgccggagttaccagaaaacatcgc

SEQ ID NO: 550338 - DNA, 75 bp, synthetic construct
  source 1..75: mol_type = other DNA
ctggctgggctcactggaaaccggtctgcccttcagtatcactgacaatctgatgctggagccacaactgcagta

SEQ ID NO: 550339 - DNA, 75 bp, synthetic construct
  source 1..75: mol_type = other DNA
gaggcgctcttaccggtaacggcagggtggaaaaatcaggaagtggcacactcactgtcagcaacaccacactca

SEQ ID NO: 550340 - DNA, 75 bp, synthetic construct
  source 1..75: mol_type = other DNA
tcggatgccggatgccggatgccggatgcggcgatgttttggccttacgcgacctttttgcacgttttccccggc

SEQ ID NO: 550341 - DNA, 75 bp, synthetic construct
  source 1..75: mol_type = other DNA
tggacgccattgagctcagaatgggtgaaatgcgtcgctatatcattaccatgatcgacgaacgtgaatttggca

SEQ ID NO: 550342 - DNA, 75 bp, synthetic construct
  source 1..75: mol_type = other DNA
taaaacacattattgatatttctgatgatgttagcagaggattttttaatgaagttagcagcgagggagagcgac

SEQ ID NO: 550343 - DNA, 75 bp, synthetic construct
  source 1..75: mol_type = other DNA
ttattttaatcttaatatcacatactggtctattattgacattattgattctattattggagagctacataatcc

SEQ ID NO: 550344 - DNA, 75 bp, synthetic construct
  source 1..75: mol_type = other DNA
taaaggcacctcatcccgtgacaccctgcacgacagtgcaaaacacagtgtgcgtgaactgccggtgaactggtg

SEQ ID NO: 550345 - DNA, 75 bp, synthetic construct
  source 1..75: mol_type = other DNA
ccggaaagcagcggcagctatggcttcgtccgtctggagggtgacctgctgagaacagaggttgccggtatgtca

SEQ ID NO: 550346 - DNA, 75 bp, synthetic construct
  source 1..75: mol_type = other DNA
atgaaacgatatctgaacaccagctacagactggtatggaatcacattacgggcaccctggtggtggctcccgaa

SEQ ID NO: 550347 - DNA, 75 bp, synthetic construct
  source 1..75: mol_type = other DNA
gaacagattgaacgtgataccgagcgcgatcgcttcctttctgccctgaagcggtggaatacggtctggtcgatt

SEQ ID NO: 550348 - DNA, 75 bp, synthetic construct
  source 1..75: mol_type = other DNA
caccatgcagtttatcaagcctgatgtcagcactatctgtatgggccaggcggcctcaatgggcgcattcctgct

SEQ ID NO: 550349 - DNA, 75 bp, synthetic construct
  source 1..75: mol_type = other DNA
ggtgccgatcctgccacctttatgggcatggcggggctgggcgatctggtgcttacctgtaccgacaaccagtcg

SEQ ID NO: 550350 - DNA, 75 bp, synthetic construct
  source 1..75: mol_type = other DNA
ggaagattcttcatagtcctattgaacgtctgggatttggcatttcgacggatcaactacaaaaagccaaaaaag

SEQ ID NO: 550351 - DNA, 75 bp, synthetic construct
  source 1..75: mol_type = other DNA
tggaagatgcaattgttctttcagttgctgaatcctggacgacgcaagaagaactcaatcacaaattgggtgaag

SEQ ID NO: 550352 - DNA, 75 bp, synthetic construct
  source 1..75: mol_type = other DNA
gtatggagaacgactctatcgggtatggatgtcgtcgagatggcatctgctgatagcgctgctctcctgaagaaa

SEQ ID NO: 550353 - DNA, 75 bp, synthetic construct
  source 1..75: mol_type = other DNA
aggcgttgttgcaagggatccgcgatgacaacaaaaattatgatggcttgcgggcgctccttgagcagcaacggc

SEQ ID NO: 550354 - DNA, 75 bp, synthetic construct
  source 1..75: mol_type = other DNA
gaagccgattaaagactggcctaaggtgtggcgtacaacgctatcaggaatggatgtcgtcgagatggcatcagc

SEQ ID NO: 550355 - DNA, 75 bp, synthetic construct
  source 1..75: mol_type = other DNA
cgagcaaccgcgtaacgaaagggaacgttggctgatcaatactgttgcaacccaggcgcgtcaggctggaattgc

SEQ ID NO: 550356 - DNA, 75 bp, synthetic construct
  source 1..75: mol_type = other DNA
acgtgtcgcgacgctatctgtccgaaaatgaagtccagctgctcctggataccgcacaacaccactccctgcgta

SEQ ID NO: 550357 - DNA, 75 bp, synthetic construct
  source 1..75: mol_type = other DNA
catcatgaatacgggaatatgatgaaaaatatctgcagggaactggataatatacagcatatactgaaaagaatg

SEQ ID NO: 550358 - DNA, 75 bp, synthetic construct
  source 1..75: mol_type = other DNA
tgacgaacagaacaaaacggcgccccagcctgaacaggcagaatcacttaacaatccggtactgactgcagctgt

SEQ ID NO: 550359 - DNA, 75 bp, synthetic construct
  source 1..75: mol_type = other DNA
ctggcaggagctgagcagtatacagcataccctgagaagacttgatttacgggccgcggccgggcagcagtgcgt

SEQ ID NO: 550360 - DNA, 75 bp, synthetic construct
  source 1..75: mol_type = other DNA
ggacccggccaccgctctttccccgcctgacctttcactgatacaccatgaatacggcgtcatgataaaaaatat

SEQ ID NO: 550361 - DNA, 75 bp, synthetic construct
  source 1..75: mol_type = other DNA
tacaccgcaaccagtccgtcacgcttccggcaggcatggtcatctcctccccgtcacaccctgataccagaaaaa

SEQ ID NO: 550362 - DNA, 75 bp, synthetic construct
  source 1..75: mol_type = other DNA
caacgccttgagcaaaaagcagaacgctgcaaagcctataacgataaaaacggcgagctgttaattcgccagtat

SEQ ID NO: 550363 - DNA, 75 bp, synthetic construct
  source 1..75: mol_type = other DNA
cgtcaatacggccctcgctgtacgcttacgttgaactggcatcacaacctggagcttgtgttacacagattgcac

SEQ ID NO: 550364 - DNA, 75 bp, synthetic construct
  source 1..75: mol_type = other DNA
tttatccacttccactcagaccagagtcagtgccagttcctgcaaggtggaattccgtcacggtaacatgacgct

SEQ ID NO: 550365 - DNA, 75 bp, synthetic construct
  source 1..75: mol_type = other DNA
aggcggaaaactgtcgcgcgtgtgatacccgtctggccaccctgctggccggcaaacagccgtttgatatttatg

SEQ ID NO: 550366 - DNA, 75 bp, synthetic construct
  source 1..75: mol_type = other DNA
gcatcacaacccggtgcttgtgtggcccagattgctcgagaaaatggcgtcaatgatgatgttattttcaaatgg

SEQ ID NO: 550367 - DNA, 75 bp, synthetic construct
  source 1..75: mol_type = other DNA
gcatcacaacctggagcttgtgttacacagattgcacgagaaaatggcgtcaatgataatgttattttcaaatgg

SEQ ID NO: 550368 - DNA, 75 bp, synthetic construct
  source 1..75: mol_type = other DNA
acctgtggtggccattgcgccgtctttatccacttccactcagaccagagtcagtgccagttcctgcaaggtgga

SEQ ID NO: 550369 - DNA, 75 bp, synthetic construct
  source 1..75: mol_type = other DNA
gaggattaccagcggtatcagcaactgatgaatggccccagggggattcagtccccggggctggacccactctcg

SEQ ID NO: 550370 - DNA, 75 bp, synthetic construct
  source 1..75: mol_type = other DNA
cggtgaacttaccgaaagtcggttttaattttacgaccgatcagctatttatgttgactgcgctgccttcggttt

SEQ ID NO: 550371 - DNA, 75 bp, synthetic construct
  source 1..75: mol_type = other DNA
gtgccgggatattctccgggatattaccgccaccagagagcagaagcggtgagtggctggaagaagtggcgctgg

SEQ ID NO: 550372 - DNA, 75 bp, synthetic construct
  source 1..75: mol_type = other DNA
gtcgctgcaacagcaggccggccggtggggactgagtgaggaggactgggggcgttatcaggcactgatggcggg

SEQ ID NO: 550373 - DNA, 75 bp, synthetic construct
  source 1..75: mol_type = other DNA
ggctgcagaccagaacacaaccatgacggacgcgtcccgtacggatacgtcacagcatacgcagagcgccacgca

SEQ ID NO: 550374 - DNA, 75 bp, synthetic construct
  source 1..75: mol_type = other DNA
aaaatgggtaaaagaggagtttgcccgtacgcaaaaagaactggatttccagcgggaaatcaatacggcatggca

SEQ ID NO: 550375 - DNA, 75 bp, synthetic construct
  source 1..75: mol_type = other DNA
tacccgtcgtgaggatgaggacggcgatattgctgcgttactggacaggattgcacagggcgatgtcagaaaaga

SEQ ID NO: 550376 - DNA, 75 bp, synthetic construct
  source 1..75: mol_type = other DNA
tgtgtttaatgctcataccaaatcgtctgcactgaaacctggctatttctgggaattaactaaggaggcgatctg

SEQ ID NO: 550377 - DNA, 75 bp, synthetic construct
  source 1..75: mol_type = other DNA
gcttgagttgcgcctttaaaaacgctcaagaaacgattaatttactcgatcgatacagtgatgtattaacgcagg

SEQ ID NO: 550378 - DNA, 75 bp, synthetic construct
  source 1..75: mol_type = other DNA
ataatctaaaagagtatatggcaactaagcctaaaggcgatttgctgtttgatatctctgaacgtgaagccggta

SEQ ID NO: 550379 - DNA, 75 bp, synthetic construct
  source 1..75: mol_type = other DNA
acgtctggattcacaacatcgggataaactaattaaccattatttcccatttgccagccatcaagtggtgctatt

SEQ ID NO: 550380 - DNA, 75 bp, synthetic construct
  source 1..75: mol_type = other DNA
gcaggaaacaatcaatttactcgatcggtatagcgacgtattaactcaggcgagagtaaagacgctatctgctaa

SEQ ID NO: 550381 - DNA, 75 bp, synthetic construct
  source 1..75: mol_type = other DNA
tatctttcattgctggaagacgctaaacgggttaagcaacagcaactggattgtgtccgtcaggtgcaaaaactg

SEQ ID NO: 550382 - DNA, 75 bp, synthetic construct
  source 1..75: mol_type = other DNA
tgttatccaatgccctgcgttataccccggagggacaggccatcaccgtctcaataagaaagcaggagagctttt

SEQ ID NO: 550383 - DNA, 75 bp, synthetic construct
  source 1..75: mol_type = other DNA
agactgaaatcgctctgagtcaggatcgaacgcagaaggaacttgaggatgtcctctattccagccttgaagagt

SEQ ID NO: 550384 - DNA, 75 bp, synthetic construct
  source 1..75: mol_type = other DNA
tgaaaaaaaatctgattgcgattgccgtcgtgataagcctgctgattgttctgatcattcgcattgctgtccgtc

SEQ ID NO: 550385 - DNA, 75 bp, synthetic construct
  source 1..75: mol_type = other DNA
ttgatgaaatctttatgatatgcatgttggtaaaagattcatgtgggtatgttattggtaataaaatgaaatatg

SEQ ID NO: 550386 - DNA, 75 bp, synthetic construct
  source 1..75: mol_type = other DNA
aatgaagatggaaacatacaggattatcgcctcctctggccaggcgacatttcagggcaaacagcagaactatgt

SEQ ID NO: 550387 - DNA, 75 bp, synthetic construct
  source 1..75: mol_type = other DNA
tttcatcttcactatctcgacgcactgaaaaagaatctgatcgcgattgctgtggtaataagtctgctgattgtg

SEQ ID NO: 550388 - DNA, 75 bp, synthetic construct
  source 1..75: mol_type = other DNA
ggaagccgctgtcgaattgacctttacctataataagggcggccatgaagcggaatttaccgttacgcgaacctg

SEQ ID NO: 550389 - DNA, 75 bp, synthetic construct
  source 1..75: mol_type = other DNA
ccctgcaagacgttgccgctcagcagtacgcagagaacagcccgcacatcaccgacaagctgagcacatttactg

SEQ ID NO: 550390 - DNA, 75 bp, synthetic construct
  source 1..75: mol_type = other DNA
aagcctcgccatgcttggcgcatgctcctccggtacggcttatatcagcgcccatgaaaaagcgttcactaccta

SEQ ID NO: 550391 - DNA, 75 bp, synthetic construct
  source 1..75: mol_type = other DNA
aacgacagaccgcgctcagtgaaagtgcacaggccgaacaggactggcgcagccgctttcgaactctgcgcggca

SEQ ID NO: 550392 - DNA, 75 bp, synthetic construct
  source 1..75: mol_type = other DNA
agtaacctggtggaagagaaggtggaaaagaccgccatctccatccgcagtgtgctgaccaactatgtcaaggca

SEQ ID NO: 550393 - DNA, 75 bp, synthetic construct
  source 1..75: mol_type = other DNA
acgggcaggtgttgcacgcaacgtcggagcagattctgaaagacgactacatgatctgggccggcaatatgttcc

SEQ ID NO: 550394 - DNA, 75 bp, synthetic construct
  source 1..75: mol_type = other DNA
acgtccattgaacgctgtaaccgggagcgccagactgccctcgatgagagcgcagaggcggagcaggactggcgc

SEQ ID NO: 550395 - DNA, 75 bp, synthetic construct
  source 1..75: mol_type = other DNA
accatggaagttgagatcctcgaagcagcggtggagtatgcacaatcgcgaaaatggatagcgcatgtgcccttg

SEQ ID NO: 550396 - DNA, 75 bp, synthetic construct
  source 1..75: mol_type = other DNA
ccgtcggcaaaatattcacagcgtgatattgagctggcgcggcaactgcatcagcgcggtgtaccccgacgggaa

SEQ ID NO: 550397 - DNA, 75 bp, synthetic construct
  source 1..75: mol_type = other DNA
gatataacccattatgaaggcttgctaaatgctcaggggggcgcttttgcccagactaaagcgcaggaaaaacag

SEQ ID NO: 550398 - DNA, 75 bp, synthetic construct
  source 1..75: mol_type = other DNA
atgcgctggcttctgttactgctgttcgccgcatttaacgccctcgccgacctgccgacgatggaagatccgtcg

SEQ ID NO: 550399 - DNA, 75 bp, synthetic construct
  source 1..75: mol_type = other DNA
ctgcgggtgatgcgagtacaggtagcgttagtggaggaaaccttgcagagcaggcattgtctgccgccctttctt

SEQ ID NO: 550400 - DNA, 75 bp, synthetic construct
  source 1..75: mol_type = other DNA
ttttaacggaaggacacttgatctctgttcgtctcccctcccagtgtcatcaagaagcccggaatcttccccctc

SEQ ID NO: 550401 - DNA, 75 bp, synthetic construct
  source 1..75: mol_type = other DNA
accgtgaggtcttcctcggtgccggcgggaaaaatatgaatatattccggcgcttaatgccacgccggaacatat

SEQ ID NO: 550402 - DNA, 75 bp, synthetic construct
  source 1..75: mol_type = other DNA
ctatcacggcattccgcagcgttatgcggatgaaggcgatgactacccgcaacgttgccggacaacgacccgtga

SEQ ID NO: 550403 - DNA, 75 bp, synthetic construct
  source 1..75: mol_type = other DNA
cgcagtattccgggcatttcgtttattcgcgattatgccgacgacccctcttatattaatgctttagcgaatagc

SEQ ID NO: 550404 - DNA, 75 bp, synthetic construct
  source 1..75: mol_type = other DNA
gtggatgcgacctctgttgccgttgctctgcaacaccgggggaacgatccggaagaactgctgaatgatacagaa

SEQ ID NO: 550405 - DNA, 75 bp, synthetic construct
  source 1..75: mol_type = other DNA
gcctgcccgtgctggggcggatttcgcgcggcttgaataccgcacgctatgctcgaacgctgagcattctcaatg

SEQ ID NO: 550406 - DNA, 75 bp, synthetic construct
  source 1..75: mol_type = other DNA
actgcgcgatggtggcagcaggtgaaacgtcaggtcacttggatcttgtgcttaatcgtctggcggattacaccg

SEQ ID NO: 550407 - DNA, 75 bp, synthetic construct
  source 1..75: mol_type = other DNA
ggcgtgattttgccgctgcgctcgccgcgtgtggcgaagctgtatgcctctgtctggatggaaggtggctcgcca

SEQ ID NO: 550408 - DNA, 75 bp, synthetic construct
  source 1..75: mol_type = other DNA
atgtcattgctagaaactttcctgaccgcttctcccgcttctcagggggcaacaatcctgttccttgccatgctg

SEQ ID NO: 550409 - DNA, 75 bp, synthetic construct
  source 1..75: mol_type = other DNA
atcactcgtaatactcatgttattttgcaccatattgaccgagttttgcggtttactcgcgcagacgattaacgg

SEQ ID NO: 550410 - DNA, 75 bp, synthetic construct
  source 1..75: mol_type = other DNA
gcgcggtggatgaactgctggcggagcatgtcgatcatatcgtggtgctgccgctctacccgcaatactcctgtt

SEQ ID NO: 550411 - DNA, 75 bp, synthetic construct
  source 1..75: mol_type = other DNA
tgctggcaaacctgggtacacccgatgcccccactcctgaagcggtaaaacgctacctgaaacaatttttaagcg

SEQ ID NO: 550412 - DNA, 75 bp, synthetic construct
  source 1..75: mol_type = other DNA
ggtctggatggaagacggctcgccgctgatggtttacagccgccagcaacagcaggcgctggcacaacgtttacc

SEQ ID NO: 550413 - DNA, 75 bp, synthetic construct
  source 1..75: mol_type = other DNA
ggctttgcgatgctgtcaaaaacgcagttcccggatgttcagattctgcaatacgctttcttcgggccgtttatt

SEQ ID NO: 550414 - DNA, 75 bp, synthetic construct
  source 1..75: mol_type = other DNA
gcctcaggttttggaacgggaggcaaataccagcaggcgatacaggccgcaacggcagcggtacagggactggcc

SEQ ID NO: 550415 - DNA, 75 bp, synthetic construct
  source 1..75: mol_type = other DNA
gttctgtccggtggggacatgcaactgaagggacaggggctggatttaagcaacagccggatacagggacaacat

SEQ ID NO: 550416 - DNA, 75 bp, synthetic construct
  source 1..75: mol_type = other DNA
cttccggcgcgacattgtttgtcagtggccgtcagctggcgttttcgaaccgtgacggcgtggttaaggccgggc

SEQ ID NO: 550417 - DNA, 75 bp, synthetic construct
  source 1..75: mol_type = other DNA
gaactgattgcggggcatgggcggcttgcagcagccgaaattctggaaatggataaagttccggcgattcggttg

SEQ ID NO: 550418 - DNA, 75 bp, synthetic construct
  source 1..75: mol_type = other DNA
tgacggatgttttgcccggtatgaaggctccggcagtggcgactggcgcactgacggtttcatcgtgggtgtcgg

SEQ ID NO: 550419 - DNA, 75 bp, synthetic construct
  source 1..75: mol_type = other DNA
tcagcaacggtaacagcaggctggatgtcacacggtttgataatcagggcggcagactggtggcacagcagtcac

SEQ ID NO: 550420 - DNA, 75 bp, synthetic construct
  source 1..75: mol_type = other DNA
tcgacggttaccagttcaaagtggcgatggccgacagtcggcgtattattcaggttcatgtcaaaatcccggatg

SEQ ID NO: 550421 - DNA, 75 bp, synthetic construct
  source 1..75: mol_type = other DNA
agttgtcgttcctgaaagtaagcgcgtagaccggatgctgaaagagtttcgctctcagcgttaccacatggcgat

SEQ ID NO: 550422 - DNA, 75 bp, synthetic construct
  source 1..75: mol_type = other DNA
gcgtgaaagctgaagggggatctgacgaacgtgcaatgcgcgaagcggcaaccgataccgcagcggcactgggct

SEQ ID NO: 550423 - DNA, 75 bp, synthetic construct
  source 1..75: mol_type = other DNA
tatcagtgcgaaaacggatgtgcatctggcgacaacccgggagctgcataacagtggttctgtttatgcggggca

SEQ ID NO: 550424 - DNA, 75 bp, synthetic construct
  source 1..75: mol_type = other DNA
tcgggtattgttgaatcgtgttgatacatcagtagctctgggtatgaagctgtttgtaactcatattacagtaac

SEQ ID NO: 550425 - DNA, 75 bp, synthetic construct
  source 1..75: mol_type = other DNA
taatctcctggtacatgcgcccggcgtttatgagcgtttgatgcaggtgcaagagacaggccgtccacgggtgga

SEQ ID NO: 550426 - DNA, 75 bp, synthetic construct
  source 1..75: mol_type = other DNA
ctgcactggcgctttctcttattacaggattgctgttgatgttggtcgcacaacccatcctctttttgctattgc

SEQ ID NO: 550427 - DNA, 75 bp, synthetic construct
  source 1..75: mol_type = other DNA
agcaggagtgccttgccgaatttctgggcaccggactctttctgtttcttggtatcagttgcctcgcagcgatga

SEQ ID NO: 550428 - DNA, 75 bp, synthetic construct
  source 1..75: mol_type = other DNA
aaatgtcgccacaaccaatggcacctatgtcctctctcgtctctctggcgcagccatgttgaccgtaacgatggt

SEQ ID NO: 550429 - DNA, 75 bp, synthetic construct
  source 1..75: mol_type = other DNA
tgaagccgtatggttcgctcccgaccaggattatggtcgtaaaggaagctccttcgctccgttctttgcggtaga

SEQ ID NO: 550430 - DNA, 75 bp, synthetic construct
  source 1..75: mol_type = other DNA
tcgtatcgatgccttcgcaacttttcactatggcgcgttcttttaaagccgtagccaatggcgaaatttatatcg

SEQ ID NO: 550431 - DNA, 75 bp, synthetic construct
  source 1..75: mol_type = other DNA
ctatgggctgaatgctgctcagaatcagcctgctgagactgtcagggctgccgcagcgacgaccggtcgttttgc

SEQ ID NO: 550432 - DNA, 75 bp, synthetic construct
  source 1..75: mol_type = other DNA
cgcggtccgctggcaccgctactgattgggatttccgtggccctgattggggttgccatcggtgcactgacgggt

SEQ ID NO: 550433 - DNA, 75 bp, synthetic construct
  source 1..75: mol_type = other DNA
tcttattccgcccttatccactcagactactgtcagtgccagctcctgcaaggtggagttccgtcacggtaacat

SEQ ID NO: 550434 - DNA, 75 bp, synthetic construct
  source 1..75: mol_type = other DNA
cacagattgcacgtgaaaatggcgtcaatgataatgttattttcaaattgaaccgccccgggtttcctggagagt

SEQ ID NO: 550435 - DNA, 75 bp, synthetic construct
  source 1..75: mol_type = other DNA
ggaaaatttattttttgcaatatgaaccgccccgggtttcctggagagtgttttatctgtgaactcaggctgcca

SEQ ID NO: 550436 - DNA, 75 bp, synthetic construct
  source 1..75: mol_type = other DNA
gcatcacaaccaggagcctctgttgcccagattgcacgagaaaatggcgtcaatgatgatgttattttcaaatgg

SEQ ID NO: 550437 - DNA, 75 bp, synthetic construct
  source 1..75: mol_type = other DNA
tcagtgccagttcctgtaaagttgagttccgccacggtaacatgacgctggaaaatccgtcaccagagctgctca

SEQ ID NO: 550438 - DNA, 75 bp, synthetic construct
  source 1..75: mol_type = other DNA
gacctcttctgacactggcgttgaattattacctgtagaaataacgccgatgagcagaaagaacctgtggcggcc

SEQ ID NO: 550439 - DNA, 75 bp, synthetic construct
  source 1..75: mol_type = other DNA
tctcagtaccaggttaccggatatatcagccagggggcggcaatgaacatggcccagaattgggaagcgccgttt

SEQ ID NO: 550440 - DNA, 75 bp, synthetic construct
  source 1..75: mol_type = other DNA
ctggcgtatcacgttggtattcaccgtgtttatgatggcacttatggtcgtaccgctgagcgtggttaacccgcg

SEQ ID NO: 550441 - DNA, 75 bp, synthetic construct
  source 1..75: mol_type = other DNA
tttttttgatattttactttattttattctttattgggcttatcacaggtagttttctgaatgtcgtaatttggc

SEQ ID NO: 550442 - DNA, 75 bp, synthetic construct
  source 1..75: mol_type = other DNA
aacctattgtcgcaacatttttgggttgtcattccccgtgctcaaactggctaaatcatcacggccagaagacat

SEQ ID NO: 550443 - DNA, 75 bp, synthetic construct
  source 1..75: mol_type = other DNA
aataatcttttatggagcattgcttcaattctgcttctctggactgcgattaatcgttgtcgaagtgtgctcctg

SEQ ID NO: 550444 - DNA, 75 bp, synthetic construct
  source 1..75: mol_type = other DNA
tatgtgggccgggccgtggtcatcgcgccatcaggacgaagttctggcggaagcgaaagctaacccgggtatggc

SEQ ID NO: 550445 - DNA, 75 bp, synthetic construct
  source 1..75: mol_type = other DNA
gtgcgggagacgctcaaaagccagttggcgatactcttcatcttgcttttgatcttcttctgtcaaaagttagtg

SEQ ID NO: 550446 - DNA, 75 bp, synthetic construct
  source 1..75: mol_type = other DNA
agagataatatccccgttggggattatctctttgtctttgccgagaagttaacgcggcagccggtgggattttcg

SEQ ID NO: 550447 - DNA, 75 bp, synthetic construct
  source 1..75: mol_type = other DNA
gcacatgggtaaggcgagattttttccctggtgatgttgttgttacatgcgctcttgataccgatacgtcactgg

SEQ ID NO: 550448 - DNA, 75 bp, synthetic construct
  source 1..75: mol_type = other DNA
gatgcaatacctggcaatgtcatagttaggtgttgtcttgacacgggagctgatatcaattggcttgtaaatgga

SEQ ID NO: 550449 - DNA, 75 bp, synthetic construct
  source 1..75: mol_type = other DNA
gtaggcatgataagacgcgcctgcgtcgcatcaggcatctgcgcatggtgtcggatgcagcgcgagcgccttatc

SEQ ID NO: 550450 - DNA, 75 bp, synthetic construct
  source 1..75: mol_type = other DNA
tatcatcctttctgccgatatgtacccctttatgaaacattatttagttgttctgatacaacatttatccgtatg

SEQ ID NO: 550451 - DNA, 75 bp, synthetic construct
  source 1..75: mol_type = other DNA
atgaggccctttaggcatcctactgatttatatgattttatagaacctcaagttaggttacttacaaaaattcct

SEQ ID NO: 550452 - DNA, 75 bp, synthetic construct
  source 1..75: mol_type = other DNA
tggggcgacaccgttgtcgagtgcgtgcttaacaaactctgcccgtcgcatacctacgtaatttttaaatatccg

SEQ ID NO: 550453 - DNA, 75 bp, synthetic construct
  source 1..75: mol_type = other DNA
cagatggctggatgagccggaatgaagcgagggcatttgaggacatgaacccggttgatggtctggatgaaatgc

SEQ ID NO: 550454 - DNA, 75 bp, synthetic construct
  source 1..75: mol_type = other DNA
gcacgcgatcatccggcgttttatctggttcatgatgagcccaatacctggcaaaccagttacaaatggcgcgaa

SEQ ID NO: 550455 - DNA, 75 bp, synthetic construct
  source 1..75: mol_type = other DNA
gataagcccgttccggggctgaaaaatttgatggctgaaacctatccacgcttgcaacgtggacgtatggcctgg

SEQ ID NO: 550456 - DNA, 75 bp, synthetic construct
  source 1..75: mol_type = other DNA
ccggttgatggtctggatgaaatgctggtcagcgtaaatgcagcaaatccgttgaataactttaaagatacgaaa

SEQ ID NO: 550457 - DNA, 75 bp, synthetic construct
  source 1..75: mol_type = other DNA
tcgatttaagccgttataacgccatcgccagccgctttgccgaggaacgccatcgccagccgctttgccgaggaa

SEQ ID NO: 550458 - DNA, 75 bp, synthetic construct
  source 1..75: mol_type = other DNA
ccgtgtactggcaccgtctcaggatcttaaaaccggtacgcttcgtttgctgattgtgccgggaacggtcaggga

SEQ ID NO: 550459 - DNA, 75 bp, synthetic construct
  source 1..75: mol_type = other DNA
tgatgccgaaaacgccggatatacgcttatccccgccgtcctctgtatcctcccggcttatttttccggcagagt

SEQ ID NO: 550460 - DNA, 75 bp, synthetic construct
  source 1..75: mol_type = other DNA
gtgactggcactactatgcgttcgccattggccttatattcattcttaatggcgtggtggggttactgggatttg

SEQ ID NO: 550461 - DNA, 75 bp, synthetic construct
  source 1..75: mol_type = other DNA
tctggcgattaacctgatcggcggcgtctgtatcgggatatttaaatacaacctgagcgccggggctgcatgtgc

SEQ ID NO: 550462 - DNA, 75 bp, synthetic construct
  source 1..75: mol_type = other DNA
atggcgactcactttgcccgagggattttaacggaaggacatctgatttctgttcgtctcccctcccagtgtcat

SEQ ID NO: 550463 - DNA, 75 bp, synthetic construct
  source 1..75: mol_type = other DNA
gattatcgtcacccgcgtcagcgacaacggcgatatcgcccatgacgtgcgtaaccagctgctggcaagcccgtc

SEQ ID NO: 550464 - DNA, 75 bp, synthetic construct
  source 1..75: mol_type = other DNA
tggtctttaacccggtcagccaggtgaaatttgtgcacaccgtaatggcgggctacgtgaccggggccatgttta

SEQ ID NO: 550465 - DNA, 75 bp, synthetic construct
  source 1..75: mol_type = other DNA
acaaagacgatctgctgtttgaacacgacggcgcgaagctgtttgtcccgctgcaagcgatgccgtttattgatg

SEQ ID NO: 550466 - DNA, 75 bp, synthetic construct
  source 1..75: mol_type = other DNA
agttacccaaagttcctcttagtgtacttcaaaccattaataatcttgaagaaaaattacaagagcttgaggaaa

SEQ ID NO: 550467 - DNA, 75 bp, synthetic construct
  source 1..75: mol_type = other DNA
ctccggtattctggagtttccgcattatgatagcttgcggttcgctgctgttactggtgatgctaattgcgctcg

SEQ ID NO: 550468 - DNA, 75 bp, synthetic construct
  source 1..75: mol_type = other DNA
atccgtgaggtggttagacttaacccagggcgggtctgtatgctggatcatgatggggtagtggcaacgggcgcg

SEQ ID NO: 550469 - DNA, 75 bp, synthetic construct
  source 1..75: mol_type = other DNA
tgagtctgttagttttagagctctgcttcaggggaacgggaaagctcctgggcatgcgatagatgtagagaaacg

SEQ ID NO: 550470 - DNA, 75 bp, synthetic construct
  source 1..75: mol_type = other DNA
gccgacactttcggatattgaatttcgtgcaggaaaagcgagcaaagacccggaaaagcgtagagccagtgcatg

SEQ ID NO: 550471 - DNA, 75 bp, synthetic construct
  source 1..75: mol_type = other DNA
acgctcgtttgctatcggttccgtctttggcactctggcgataattggcgcgctgcaacttggagacagctccgc

SEQ ID NO: 550472 - DNA, 75 bp, synthetic construct
  source 1..75: mol_type = other DNA
gtggattttgaatgccaatgggtggatgcagtttccgaccggcgcgcatttcgatatcgacaccttgcgtatgga

SEQ ID NO: 550473 - DNA, 75 bp, synthetic construct
  source 1..75: mol_type = other DNA
caccggcaaaacagtctaccgcgatatgacgcgtttctggggtaagctcttcggtatcaacttcgctctcggcgt

SEQ ID NO: 550474 - DNA, 75 bp, synthetic construct
  source 1..75: mol_type = other DNA
ttgtccatacggtgatggcgggctatgtgaccggggccatgtttattatggcgatcagcgcctggtatttactgc

SEQ ID NO: 550475 - DNA, 75 bp, synthetic construct
  source 1..75: mol_type = other DNA
atgcagttcccgaccggcgcgcatttcgatatcgacaccctgcgtatggagatgaccagtttcagcgatctggtt

SEQ ID NO: 550476 - DNA, 75 bp, synthetic construct
  source 1..75: mol_type = other DNA
gtaaaactggcagcgatggaaggggagtggcagacagaacctgcgccagcgccgtttcatctcattgcctggccg

SEQ ID NO: 550477 - DNA, 75 bp, synthetic construct
  source 1..75: mol_type = other DNA
acgtgggtgattagtttctggctggcggggctgattattcgtcgtcgcgatgaagaaactgaaaacgcccaataa

SEQ ID NO: 550478 - DNA, 75 bp, synthetic construct
  source 1..75: mol_type = other DNA
cgattctgtttcactacaccaatcttgccgaagggatgacagagcagcgactggaaacggatgtttatgtaccgt

SEQ ID NO: 550479 - DNA, 75 bp, synthetic construct
  source 1..75: mol_type = other DNA
cgattctgtttcactacaccaatcttgccgaaggggtgacagagcagcgactggaaacggatgtttatgtgccgt

SEQ ID NO: 550480 - DNA, 75 bp, synthetic construct
  source 1..75: mol_type = other DNA
gggtgccgattgcagaagaggatgcggtttctgaaatgtggttggtctggccgaaacatcatgaacaaagtccag

SEQ ID NO: 550481 - DNA, 75 bp, synthetic construct
  source 1..75: mol_type = other DNA
atgtatttgattgcttttttaataatgctgacagtgattataattttcaccctgccatactggacaggtaaaata

SEQ ID NO: 550482 - DNA, 75 bp, synthetic construct
  source 1..75: mol_type = other DNA
ttatccctttctgcattaatgcaatcaggcgtaccagcaccagaagccatacgtataataatgcgtacagccaat

SEQ ID NO: 550483 - DNA, 75 bp, synthetic construct
  source 1..75: mol_type = other DNA
tgatttttccgctattcttcatccttccaactgaagctcgtgtcacaaacacatcgctggatagctgctttattc

SEQ ID NO: 550484 - DNA, 75 bp, synthetic construct
  source 1..75: mol_type = other DNA
agcagtataatgcttgaagtaccttttggtggattggattacatgacagaaagcgttaaagaacctgagttggac

SEQ ID NO: 550485 - DNA, 75 bp, synthetic construct
  source 1..75: mol_type = other DNA
ccagcagctgctgcactgtggcaaaagtttccgcgtttacagcaatccggatttcattggcgtgcagcttggcgg

SEQ ID NO: 550486 - DNA, 75 bp, synthetic construct
  source 1..75: mol_type = other DNA
tggcggttatctctggcccaacgtttgcgaaagaactggcggcaggtttaccgacggctatttcgctggcctcga

SEQ ID NO: 550487 - DNA, 75 bp, synthetic construct
  source 1..75: mol_type = other DNA
gtgaaagatctgccggtgcatctgttcgaaacgatggggcagattcaggccaaaatcccaaccgaggtgctggtc

SEQ ID NO: 550488 - DNA, 75 bp, synthetic construct
  source 1..75: mol_type = other DNA
atctgttcgaaacgatggggcagattcaggccaaaatcccaaccgaggtgctggtcaccgatcgccgcgaatttg

SEQ ID NO: 550489 - DNA, 75 bp, synthetic construct
  source 1..75: mol_type = other DNA
accttttctatgcatgtccgcgagccagcgtcttttatggcacggcgctcgacgccgaccttcggacgcgcggcg

SEQ ID NO: 550490 - DNA, 75 bp, synthetic construct
  source 1..75: mol_type = other DNA
tggttgtggttttttattatcgttgtcatcattaatcactgccggaattcctacgccggaagcgatacgaataat

SEQ ID NO: 550491 - DNA, 75 bp, synthetic construct
  source 1..75: mol_type = other DNA
tcgctggtgttccctgcattgggcgtagtggcggtaaaagcggttccgcagcaaaatcagggggcggcgctggca

SEQ ID NO: 550492 - DNA, 75 bp, synthetic construct
  source 1..75: mol_type = other DNA
gccttatgttgcattcctgtgttctcatcaggatgccgtctggctggcacgtaagctgaggagggatgcggagtc

SEQ ID NO: 550493 - DNA, 75 bp, synthetic construct
  source 1..75: mol_type = other DNA
gggcgtacatgaatacgatgataaacggggaaacaaagcccgtggagagattgaattactgttaaaagaaacgga

SEQ ID NO: 550494 - DNA, 75 bp, synthetic construct
  source 1..75: mol_type = other DNA
gtgggcggtcgccagtacatcaccgaagacccggaaattaaccgttaccgcccgcgcattctggtcaatgaagac

SEQ ID NO: 550495 - DNA, 75 bp, synthetic construct
  source 1..75: mol_type = other DNA
aacagggcgacagcggcccgttgtggcagaccaaccgccttgttgatatcgacgacagcatccagaacctgaaaa

SEQ ID NO: 550496 - DNA, 75 bp, synthetic construct
  source 1..75: mol_type = other DNA
cggacatctcctttgcagtaaaagaaccctgttacagcaatgccgctgtggaaaagctttcattgcccacacagg

SEQ ID NO: 550497 - DNA, 75 bp, synthetic construct
  source 1..75: mol_type = other DNA
gagagaaattgccagaaaattcggaatgccgttgcgcacagtgaataactacgtttatttcaacaggagggttct

SEQ ID NO: 550498 - DNA, 75 bp, synthetic construct
  source 1..75: mol_type = other DNA
ccgcagtgcagtgaaggttttccgtgagtttcttgatgataaggaagcgaacaaacgcgacccgctcaccattga

SEQ ID NO: 550499 - DNA, 75 bp, synthetic construct
  source 1..75: mol_type = other DNA
attgatctgttcaatcatgtgattggggaaacggatattgcgggttgtggttctgcgggtccggtttttcgatga

SEQ ID NO: 550500 - DNA, 75 bp, synthetic construct
  source 1..75: mol_type = other DNA
aactgcgcaatcaacttaatgatgatcctgactggcttcctgttccccgtcagcgtatctatatgcgcactgcgc

SEQ ID NO: 550501 - DNA, 75 bp, synthetic construct
  source 1..75: mol_type = other DNA
aggagctggctgacaccatcaaagcgcggggggtgaaaatgccaatttccgttcgtgaaaacccggagcaggcgg

SEQ ID NO: 550502 - DNA, 75 bp, synthetic construct
  source 1..75: mol_type = other DNA
aaattgccgtacacattggccgcaaactggctgagggagtatcaaaatctcagattgctaaaaggcttggcaagt

SEQ ID NO: 550503 - DNA, 75 bp, synthetic construct
  source 1..75: mol_type = other DNA
atttaacggtggcgggccagtcttccagggtgccggtggtctttaagttgaaagattgcaaaggcccggcggatt

SEQ ID NO: 550504 - DNA, 75 bp, synthetic construct
  source 1..75: mol_type = other DNA
ctttcaatctcagtgacggcgcgaatagcctcaattttaatgcgtggttacaggcgaaaagcggtcgtgacgtaa

SEQ ID NO: 550505 - DNA, 75 bp, synthetic construct
  source 1..75: mol_type = other DNA
cattcagcactggctgctaataatctgcatttttacggcaacctgatgagcaaaacctgtactccggtggaacag

SEQ ID NO: 550506 - DNA, 75 bp, synthetic construct
  source 1..75: mol_type = other DNA
ttcagggcctggttacaggcgaaaagcggtcgggaagtgacgatgggcgattttaccgcctccttaaccgcaacc

SEQ ID NO: 550507 - DNA, 75 bp, synthetic construct
  source 1..75: mol_type = other DNA
taatgcaacgtggtcagtcagatcgcgtaccgttagtttttcagttgaaagattgcaaaagcaccacggcgttta

SEQ ID NO: 550508 - DNA, 75 bp, synthetic construct
  source 1..75: mol_type = other DNA
ttctggcaagcctgatgctcaccgccagcggaaccacgttggcggcggacaacctgcatttttacggcaacttgt

SEQ ID NO: 550509 - DNA, 75 bp, synthetic construct
  source 1..75: mol_type = other DNA
ttcaagctggcgctgttgcagtctcttcctgcagtaattgagaaatccgttgagccaatgaagtctattgacggt

SEQ ID NO: 550510 - DNA, 75 bp, synthetic construct
  source 1..75: mol_type = other DNA
ctgccgccctttcttaccgcacacaggcaccgctgattgactccttgctcaatgaaattggtgtttcaggcggct

SEQ ID NO: 550511 - DNA, 75 bp, synthetic construct
  source 1..75: mol_type = other DNA
accgaaatcgccaaccagacgaaatcgatcgctattgccgccaaatcggaacaacagtcccaggcagaagcgcgt

SEQ ID NO: 550512 - DNA, 75 bp, synthetic construct
  source 1..75: mol_type = other DNA
tcatcgtaatgctgttactggcaggaaatagcacagcgcgtgcagacaataatttgcacttctacggaaatttat

SEQ ID NO: 550513 - DNA, 75 bp, synthetic construct
  source 1..75: mol_type = other DNA
ttattacctgtagaaataacgccgggtgagcagaaagaacctgtggcggccattgagccgtctttatccacttcc

SEQ ID NO: 550514 - DNA, 75 bp, synthetic construct
  source 1..75: mol_type = other DNA
taaatcgtggcggcgctgcgggtgatgcgacatcaggcagcgttggcggaggaaacctggcggagcaggcattat

SEQ ID NO: 550515 - DNA, 75 bp, synthetic construct
  source 1..75: mol_type = other DNA
agcaattatgagcaaaccgtgccgtattccattacctgcgatacggcggttcgcgacccattaatggaaatgacc

SEQ ID NO: 550516 - DNA, 75 bp, synthetic construct
  source 1..75: mol_type = other DNA
gcgcggctgcactggcggcggtgctgctgatgccccacgtgcaggcggcagacaatctgcatttctacggcaatt

SEQ ID NO: 550517 - DNA, 75 bp, synthetic construct
  source 1..75: mol_type = other DNA
atggttggtcaggagcaactggagtcgtcaccattatgccaggatagtgacaatgaaccagaaacgaaacgggaa

SEQ ID NO: 550518 - DNA, 75 bp, synthetic construct
  source 1..75: mol_type = other DNA
ttcagggcaaacagcagaactatgtcatgctgactggcctatccattaatttccatctccattacctcgatgcgc

SEQ ID NO: 550519 - DNA, 75 bp, synthetic construct
  source 1..75: mol_type = other DNA
ctctactctaatctcgaagagctgacgcgaatggcgaaaatggtcagcgatatgctgtttctcgctcaggccgat

SEQ ID NO: 550520 - DNA, 75 bp, synthetic construct
  source 1..75: mol_type = other DNA
gctacgcggcgctggcggcgctgttggtgtacggcggcacgacacaggcggctgacaacctgcatttctacggca

SEQ ID NO: 550521 - DNA, 75 bp, synthetic construct
  source 1..75: mol_type = other DNA
ctccaggcgaaaagcggccgggaagtgacgatgggtgaatttaccgcttttttaaccgcaacgtttgagtacatt

SEQ ID NO: 550522 - DNA, 75 bp, synthetic construct
  source 1..75: mol_type = other DNA
ggtcggtattggcatggaaaaaacggacggaacgtgggttgccattaacaacactgccggaacgacgttcatgct

SEQ ID NO: 550523 - DNA, 75 bp, synthetic construct
  source 1..75: mol_type = other DNA
tctccggtaatttattaagtaaatcctgtgcgctggtggtggatggccaatatctggcagaggtgcgctttccca

SEQ ID NO: 550524 - DNA, 75 bp, synthetic construct
  source 1..75: mol_type = other DNA
aacagaagatagtgaactgcccggatttctggcttttgacgcctcgtcttctgcgtccggcgctgggattggaat

SEQ ID NO: 550525 - DNA, 75 bp, synthetic construct
  source 1..75: mol_type = other DNA
tctgggcgccgtggtgcgggccttgccgtaactttgcccctatttttgaagatgttgcgcaagagcgtagtggca

SEQ ID NO: 550526 - DNA, 75 bp, synthetic construct
  source 1..75: mol_type = other DNA
ccgtcagcaaccgggatttgatggtcgccgggcagtccgcgcatctgccggttgtgtttaagctgaaagactgca

SEQ ID NO: 550527 - DNA, 75 bp, synthetic construct
  source 1..75: mol_type = other DNA
acaccaccggggcgaccttcgcgcttatcaacggtaacaatgacattaacttcagggcctggatccaggcgaaaa

SEQ ID NO: 550528 - DNA, 75 bp, synthetic construct
  source 1..75: mol_type = other DNA
cgcgcagctatcaggccaacgtggaagtgcttaacacggtgaaaagcatgatgctgaaaaccctcacgctcggtc

SEQ ID NO: 550529 - DNA, 75 bp, synthetic construct
  source 1..75: mol_type = other DNA
gcgcgagccgaacaggaaggctggaatcctggattcacggaaaaaatggtgggatgggcaaaaaaaatggaatct

SEQ ID NO: 550530 - DNA, 75 bp, synthetic construct
  source 1..75: mol_type = other DNA
gcgcgagctgaacaggaaggctggaatcctggattcacggaaaaaatggttggctgggcaaaaaaaatggagtct

SEQ ID NO: 550531 - DNA, 75 bp, synthetic construct
  source 1..75: mol_type = other DNA
acagcaggaagccttcatgactctggagcaacaacaacgggtaaaaacccgcacggcggagcagaatgccagtat

SEQ ID NO: 550532 - DNA, 75 bp, synthetic construct
  source 1..75: mol_type = other DNA
taacatgacgctggaaaatccttcaccagagctgctcacggtgttgatccgtaaactgaccgggaggggacgatg

SEQ ID NO: 550533 - DNA, 75 bp, synthetic construct
  source 1..75: mol_type = other DNA
gcgtaaagcaccgattctgtttcactacaccaatcttgccgaaggggtgacagagcagcgactggaaacggatgt

SEQ ID NO: 550534 - DNA, 75 bp, synthetic construct
  source 1..75: mol_type = other DNA
gggatgggcaaaaaaaatggagtctggtgaacgcgtggtgattaaaaatccagaatacttctcgtcttatatgca

SEQ ID NO: 550535 - DNA, 75 bp, synthetic construct
  source 1..75: mol_type = other DNA
ttattacctgtagaaataacgccggatgagcagaatgaaccgccccgggtttcctggagagtgttttatctgtga

SEQ ID NO: 550536 - DNA, 75 bp, synthetic construct
  source 1..75: mol_type = other DNA
tctgaaccatctgttcagggaatatggtgttgattactgcgtagacacttctatctatgcggggatgatggaaca

SEQ ID NO: 550537 - DNA, 75 bp, synthetic construct
  source 1..75: mol_type = other DNA
gttcctggtctacatatggctggaggcagacgatgatgggtggactatatgcactgtccgggatatccgtagttg

SEQ ID NO: 550538 - DNA, 75 bp, synthetic construct
  source 1..75: mol_type = other DNA
gtgagaaggcgtggctgggggcgggccgaaatcatgatactccggcagtgtgcgggaacgatgaaggtgaaaagc

SEQ ID NO: 550539 - DNA, 75 bp, synthetic construct
  source 1..75: mol_type = other DNA
aacatgacgctggaaaatccttcaccagagctgctcacagtgttgatctgtgaactgaccgggaggggacgatga

SEQ ID NO: 550540 - DNA, 75 bp, synthetic construct
  source 1..75: mol_type = other DNA
atggaacaaaaaacattatccgcagaaccccgccgatcattttcaaatgagtttaaacttcaaatggttaaactg

SEQ ID NO: 550541 - DNA, 75 bp, synthetic construct
  source 1..75: mol_type = other DNA
gaaggcgcgctggagagcatcgtgccgaagattgctgatgctgtttccggcctaagcgatgctgatgtggatgcg

SEQ ID NO: 550542 - DNA, 75 bp, synthetic construct
  source 1..75: mol_type = other DNA
gttttcagtaaagcgcaacactatggattacctgtaaaactgcatgccgaacagctttctgaccagcaaggcgcg

SEQ ID NO: 550543 - DNA, 75 bp, synthetic construct
  source 1..75: mol_type = other DNA
ataccaccctgacgacgctttcggctaatgattggggggtgattgaaaacggtgcattaatcagccgtggtgact

SEQ ID NO: 550544 - DNA, 75 bp, synthetic construct
  source 1..75: mol_type = other DNA
tggcttggccgtaatgccgactgcccggcgtttccccatgcacaacagcatgtattcgacggcgggataattacc

SEQ ID NO: 550545 - DNA, 75 bp, synthetic construct
  source 1..75: mol_type = other DNA
gagatggttaacaccatgtcggcgtcacgcagctatcaggccaatgttgaagtgctcaacacggtgaaaagcatg

SEQ ID NO: 550546 - DNA, 75 bp, synthetic construct
  source 1..75: mol_type = other DNA
aaagtaagccggaagaattaatggcttttcgcatgatgcgttattccattgcggcaatgcaaaaccatcttgatg

SEQ ID NO: 550547 - DNA, 75 bp, synthetic construct
  source 1..75: mol_type = other DNA
tgatgatcaatatggcctgtacgctgtttcgcatgacgccgctggaagccgttcagggcgttacgcgtaatgcgg

SEQ ID NO: 550548 - DNA, 75 bp, synthetic construct
  source 1..75: mol_type = other DNA
gtgattcatccgtgtctgagcgtcgtttcccgccagcacgaaaagggctggacgaaggtgttcgatcagggcgta

SEQ ID NO: 550549 - DNA, 75 bp, synthetic construct
  source 1..75: mol_type = other DNA
ggagaagatcagcagcaaagacaccgaaggcgcgatggctaccatcctgccaaagattgccaatgctgtgtccga

SEQ ID NO: 550550 - DNA, 75 bp, synthetic construct
  source 1..75: mol_type = other DNA
ggtgccggtctgccagcatggcgaaatggcgtttgacgatatcgacctgcttaccatgctgcaactggtggcgcg

SEQ ID NO: 550551 - DNA, 75 bp, synthetic construct
  source 1..75: mol_type = other DNA
catccggcggagctaagctactggctgggaggctccctttcgaaacaggtgatttatcaaggtaaggaggtttat

SEQ ID NO: 550552 - DNA, 75 bp, synthetic construct
  source 1..75: mol_type = other DNA
actaaaagcaccgattgtgattgggcgcgatcatcttgataccggttctgtcgccagcccgaaccgcgaaaccga

SEQ ID NO: 550553 - DNA, 75 bp, synthetic construct
  source 1..75: mol_type = other DNA
gcaaatcaacgcctcgaaaatgaaagccaatgcggtattactgcatagctgtgaagtcaccagcggtacgccagg

SEQ ID NO: 550554 - DNA, 75 bp, synthetic construct
  source 1..75: mol_type = other DNA
gctgaagtacgggcgcagggtgttgaattgttgcgcgagcatcctgctatccagatttgctctttaacgcacgta

SEQ ID NO: 550555 - DNA, 75 bp, synthetic construct
  source 1..75: mol_type = other DNA
gcccttcgctacgaccgccagactatttttggccttgtccgtgaacgtccgatcgacattcacaaagatcccgta

SEQ ID NO: 550556 - DNA, 75 bp, synthetic construct
  source 1..75: mol_type = other DNA
gaaatgggtaaaggggattgaaacccgcgattctgtaaaccagaaccagcaagaatcggaacagaacgaccagaa

SEQ ID NO: 550557 - DNA, 75 bp, synthetic construct
  source 1..75: mol_type = other DNA
catcatgccagcgatagtgaaactggcgagacggcaaatcccttaattaagataaccagtcatcacaaatataag

SEQ ID NO: 550558 - DNA, 75 bp, synthetic construct
  source 1..75: mol_type = other DNA
gaaatatcagaaactgcgggcagaactccatgaatcccggaaaaacattccgccccaaaatcctgtcgacgaaga

SEQ ID NO: 550559 - DNA, 75 bp, synthetic construct
  source 1..75: mol_type = other DNA
atggaaggcactgaacatctgcacaaggagaacactggcagcgatcagtatcacgccagcgataataaaactggc

SEQ ID NO: 550560 - DNA, 75 bp, synthetic construct
  source 1..75: mol_type = other DNA
ggtactcactcggcggacgggtggcgatgatggcggcttgccaggggatggcggggctttgtggcgtgattgtcg

SEQ ID NO: 550561 - DNA, 75 bp, synthetic construct
  source 1..75: mol_type = other DNA
ggcggtatttgccgactggtatcaacagcctgtttttgcctcgctcaatgacgatcaacgccgggagctggtggc

SEQ ID NO: 550562 - DNA, 75 bp, synthetic construct
  source 1..75: mol_type = other DNA
aaggcggtcatccggggctgcaaaatgctgaacaacgtgcggaacgtcagcgttccgatcgccaatgggcgcagc

SEQ ID NO: 550563 - DNA, 75 bp, synthetic construct
  source 1..75: mol_type = other DNA
tcttggcattaataacattctcggcgcaggcggcaccatttcaggtcacaagtagcgaaatcaaaaatggagagt

SEQ ID NO: 550564 - DNA, 75 bp, synthetic construct
  source 1..75: mol_type = other DNA
aaaatacagtatctggaattaaaggacggaatttgcgcaccagcattgcggtggacggtagtgcggaactggacg

SEQ ID NO: 550565 - DNA, 75 bp, synthetic construct
  source 1..75: mol_type = other DNA
gttttcgctcagaaccgttaacggcggtgtttaccgactggtatcaacagcctgtttttgcctcgctcaatgacg

SEQ ID NO: 550566 - DNA, 75 bp, synthetic construct
  source 1..75: mol_type = other DNA
tccaccagcagagtgtggattcacctgtcggtcgaccttgaaacgatgggaacaaatcctgatgcgccaatcaac

SEQ ID NO: 550567 - DNA, 75 bp, synthetic construct
  source 1..75: mol_type = other DNA
actacgtcaacgtctgaacgaacttgcattggaatcggtaacgaaaaaagacactgataatatggctcgaaatgt

SEQ ID NO: 550568 - DNA, 75 bp, synthetic construct
  source 1..75: mol_type = other DNA
aatacgaaaccaacggaagaagaaattgaccagtttacccgtgatgctggcttaaaatgcaggaaagaaaaatcg

SEQ ID NO: 550569 - DNA, 75 bp, synthetic construct
  source 1..75: mol_type = other DNA
tcagattcgttcacaaacaatcattgtgtagaaaataaagcaaagcccattgcagaaacgataacgcaaaacatc

SEQ ID NO: 550570 - DNA, 75 bp, synthetic construct
  source 1..75: mol_type = other DNA
cactacattatccgtatctgcgccggatgtcctgggcgcagataacggcagcagctgaagatgcggaaatacatc

SEQ ID NO: 550571 - DNA, 75 bp, synthetic construct
  source 1..75: mol_type = other DNA
tctgtgaggttgttggcgacaacactgagattatctccgtgttggttgggcgagatggcgttctggttattttgg

SEQ ID NO: 550572 - DNA, 75 bp, synthetic construct
  source 1..75: mol_type = other DNA
actacgtcaacatctgaacgaagctatggctgaatctgcaaagaaagaaaccattgataacatggctcgtaatgt

SEQ ID NO: 550573 - DNA, 75 bp, synthetic construct
  source 1..75: mol_type = other DNA
gcaatatttttcgatccgcaaaccggagagatgggaccagaatttaataaaaccatcgatctggaaactgctggc

SEQ ID NO: 550574 - DNA, 75 bp, synthetic construct
  source 1..75: mol_type = other DNA
aagatatcctggaagaaattaacggcggactggctgctgagtgcaaaacagaagaagaaaaaaatgatgaagaaa

SEQ ID NO: 550575 - DNA, 75 bp, synthetic construct
  source 1..75: mol_type = other DNA
accagaagagcaacaagaaccggaaaaagtctgcaccgcctgcggtcagatcggcgacggcaactgtcctgactg

SEQ ID NO: 550576 - DNA, 75 bp, synthetic construct
  source 1..75: mol_type = other DNA
gtaaacaaaattatgcaggcagccaatatcagccagcctgacgccgataagttgcttgctgcctctcgcggagaa

SEQ ID NO: 550577 - DNA, 75 bp, synthetic construct
  source 1..75: mol_type = other DNA
ttctgtgtaccagaatcagccagaaacggaacagaacgaccagaaagcggaacaaaacagcccaaatacgcaaca

SEQ ID NO: 550578 - DNA, 75 bp, synthetic construct
  source 1..75: mol_type = other DNA
cagccagcactgacaataccaacgtcaacggcgaagatatgacagagattgaggatggtatgctcctgccgattt

SEQ ID NO: 550579 - DNA, 75 bp, synthetic construct
  source 1..75: mol_type = other DNA
acggggctttgtggggttattgtcgaaggcgggcatccggggctgcaaaatgctgaacaacgtgcggaacgtcag

SEQ ID NO: 550580 - DNA, 75 bp, synthetic construct
  source 1..75: mol_type = other DNA
ggctggaaaacgggctgccagaaatgcccgaccttaaataattatccgccggtgaagattgatcgcgcacaccag

SEQ ID NO: 550581 - DNA, 75 bp, synthetic construct
  source 1..75: mol_type = other DNA
ggaatggatgatggtgagctagtgaggcttaaatatgcgacggacgccctgctgcattgtgcagaccaacttcgc

SEQ ID NO: 550582 - DNA, 75 bp, synthetic construct
  source 1..75: mol_type = other DNA
tatcgatgtattttctttaatgaatacttttcaacagcatgtgcagattattgagcgagttcgcaggatgacgtc

SEQ ID NO: 550583 - DNA, 75 bp, synthetic construct
  source 1..75: mol_type = other DNA
gcgcggaagaaaaatctcatgccctggtgacctggttacaggcattagtcaatcaactcaagctacccaacaatc

SEQ ID NO: 550584 - DNA, 75 bp, synthetic construct
  source 1..75: mol_type = other DNA
gatgcccttggcgatgcctcttttgatgtggtggtcgggatcggcggtggcagcgtgttggatgtggcgaagctg

SEQ ID NO: 550585 - DNA, 75 bp, synthetic construct
  source 1..75: mol_type = other DNA
tggcgacaacaccgaggttatcgctgaggtggttgggcgagatggcgttctggttattttggaggccatgaaggc

SEQ ID NO: 550586 - DNA, 75 bp, synthetic construct
  source 1..75: mol_type = other DNA
gcgctctgaagaagtccggagcgcactgaaacagaaactccgccagaaccttgagtcgcgtcttgatgcagaagt

SEQ ID NO: 550587 - DNA, 75 bp, synthetic construct
  source 1..75: mol_type = other DNA
cctggcggatttaaaggaagaactctggtactacaacctctacataaatccgtcggcagacgaacttatgaatgc

SEQ ID NO: 550588 - DNA, 75 bp, synthetic construct
  source 1..75: mol_type = other DNA
accggggaaattttcgcaaccaaccgtgagcaggtggaagcaatgatcgaatatctgtggaaaataaggcgcaga

SEQ ID NO: 550589 - DNA, 75 bp, synthetic construct
  source 1..75: mol_type = other DNA
cacatcctgcgtgacaagttgtcaccgtatgacaccgaagagatgcttgaggctatgtgtatttttctggaagaa

SEQ ID NO: 550590 - DNA, 75 bp, synthetic construct
  source 1..75: mol_type = other DNA
ctgttccgctaaaagcgggtgaacgtctggccggtctcaaccatgtggctgaattgcgcgcgagatattggggcg

SEQ ID NO: 550591 - DNA, 75 bp, synthetic construct
  source 1..75: mol_type = other DNA
tgataaaagggccgctgagagaatcagcgccagtcagtcagccggaagcaaacccgaagatccgctcattccgta

SEQ ID NO: 550592 - DNA, 75 bp, synthetic construct
  source 1..75: mol_type = other DNA
gccactcatatcgagcaggttgaaacactgtatgaagaactgggcaaaatcgatattgtccgcatggttctgtaa

SEQ ID NO: 550593 - DNA, 75 bp, synthetic construct
  source 1..75: mol_type = other DNA
caggtccgaacctcaacaacacgttaaaaaaggcattcgtgggtggagtcgtcgcgcgggtgatgctgccaactt

SEQ ID NO: 550594 - DNA, 75 bp, synthetic construct
  source 1..75: mol_type = other DNA
tgtgatcattatttgaagatttataacaatcaggatgtttcacatctttttgttgaacttaaaggaagtgatgtt

SEQ ID NO: 550595 - DNA, 75 bp, synthetic construct
  source 1..75: mol_type = other DNA
aagatactgacttttctttatcaacaggaaatttcatcgctgttcggcctgttttccagactgcgcggcggaggg

SEQ ID NO: 550596 - DNA, 75 bp, synthetic construct
  source 1..75: mol_type = other DNA
gattgccacgaatggcaagaagtgggcgaggcgtttgccgactactcacggttgtatgttgatctcccaggtcat

SEQ ID NO: 550597 - DNA, 75 bp, synthetic construct
  source 1..75: mol_type = other DNA
gcgaagcgtttgccgactactcgcggttgtatgttgatctcccaggtcacggcggttcggcggaaattagcgtcg

SEQ ID NO: 550598 - DNA, 75 bp, synthetic construct
  source 1..75: mol_type = other DNA
atgatcctgcacgcgcaggcaaaacacggaaaaccaggtttaccctggctggtgtttttgcacggtttttccggc

SEQ ID NO: 550599 - DNA, 75 bp, synthetic construct
  source 1..75: mol_type = other DNA
gcgctctgaagaagtccggagtgcactgaaacagaaactccgccagaatcttgagtcgcgtcttgatgcagaagt

SEQ ID NO: 550600 - DNA, 75 bp, synthetic construct
  source 1..75: mol_type = other DNA
aattgttgcgcgagcatcctgctatccagatttgctctttaacgcacgtatgcgacgagttcgccgcccagcttc

SEQ ID NO: 550601 - DNA, 75 bp, synthetic construct
  source 1..75: mol_type = other DNA
ctatcactatcaacgccactcatatcgagcaggttgaaacactgtacgaagaactgggcaaaattgatatcgtcc

SEQ ID NO: 550602 - DNA, 75 bp, synthetic construct
  source 1..75: mol_type = other DNA
actggcatacgccctgtaccagatgacgctggttcgtgatgcactggcgatatttgttatcggggcgacgatggg

SEQ ID NO: 550603 - DNA, 75 bp, synthetic construct
  source 1..75: mol_type = other DNA
atgacacgcgaacgttttactgaaaatctgctgatgtatccgggaatggcgctgatggttgcttccgttatctgg

SEQ ID NO: 550604 - DNA, 75 bp, synthetic construct
  source 1..75: mol_type = other DNA
acgctggttcgtgatgcactggcgatatttgtggtcggggcgacactgggcttgtccggtctggggctggccgcc

SEQ ID NO: 550605 - DNA, 75 bp, synthetic construct
  source 1..75: mol_type = other DNA
ttactggaaaaaatgcctctctctgtacccggagaagatacaccaccactgactttgccctgggggcagcataat

SEQ ID NO: 550606 - DNA, 75 bp, synthetic construct
  source 1..75: mol_type = other DNA
tgacggaattacagacgcgtttacgcgaaagtctggctctgcgtcaacaaaatgaatcggtggtcaggctgatgc

SEQ ID NO: 550607 - DNA, 75 bp, synthetic construct
  source 1..75: mol_type = other DNA
tacccgctgtgagacactgttacagacggcgcagaacaccatcagtcgcgactttacgctgcgttttgccgagct

SEQ ID NO: 550608 - DNA, 75 bp, synthetic construct
  source 1..75: mol_type = other DNA
gggcactgatttccgggacgctgatgaaaggctgtattacgccacagcagatatttccggtgtcgtcgatgtggg

SEQ ID NO: 550609 - DNA, 75 bp, synthetic construct
  source 1..75: mol_type = other DNA
cgaaagcctggctctgcgtcaacaaaatgaatctgtagttaagatgatgcagcagcaattgcagcagactgtgat

SEQ ID NO: 550610 - DNA, 75 bp, synthetic construct
  source 1..75: mol_type = other DNA
ggctttaccctggagtcagcctaatatcgccgagcgtcacgcgatgctgaataatgagttgcgtaaaatttcccg

SEQ ID NO: 550611 - DNA, 75 bp, synthetic construct
  source 1..75: mol_type = other DNA
cgacggcgtaccaatttttggtctttatcagaagttcgccaacaaagtgacggtcgaatggaaagaaaacggtaa

SEQ ID NO: 550612 - DNA, 75 bp, synthetic construct
  source 1..75: mol_type = other DNA
ggtcatgaaagatgattatgtggtgcacacttcggccatcgtcaataattacatggataaccgctctatctccga

SEQ ID NO: 550613 - DNA, 75 bp, synthetic construct
  source 1..75: mol_type = other DNA
ccgttgagtggaaagaaaacggcaaggtcatgaaagatgattatgtggtgcacacttcggccatcgtcaacaatt

SEQ ID NO: 550614 - DNA, 75 bp, synthetic construct
  source 1..75: mol_type = other DNA
ggtgatcagataaaagtgttgtgggctgacagtgacggactgtgcctcttcaccaaacgcctggagcggggccgc

SEQ ID NO: 550615 - DNA, 75 bp, synthetic construct
  source 1..75: mol_type = other DNA
gcatctggctggttgccggtatcaccgacatgcgaaatggctttaacggcctggcctcaaaagttcagaacgtcc

SEQ ID NO: 550616 - DNA, 75 bp, synthetic construct
  source 1..75: mol_type = other DNA
atgatatctctccctgccggttcgcgtatctggctggttgccggtatcaccgatatgcgaaatggttttaacggc

SEQ ID NO: 550617 - DNA, 75 bp, synthetic construct
  source 1..75: mol_type = other DNA
ggtgcccagccaatttttcattgtctgaaaagtttgaatgatttggtgcgtctggcgaaggcgctggacgtcgat

SEQ ID NO: 550618 - DNA, 75 bp, synthetic construct
  source 1..75: mol_type = other DNA
ttgtccagttacggggcaccaggagacagtggatctcctttatttgcctatgattcatggcagaaaaaatgggtg

SEQ ID NO: 550619 - DNA, 75 bp, synthetic construct
  source 1..75: mol_type = other DNA
aatggtggatatacaaacgttagctttggtgatggtgaaaaccgttacaatatcgtggaccggaataatgcgccg

SEQ ID NO: 550620 - DNA, 75 bp, synthetic construct
  source 1..75: mol_type = other DNA
ttatggcaaatttaagtataagagagaaaaggatgaaagattaatatttaatgctggtttaaacattgttaataa

SEQ ID NO: 550621 - DNA, 75 bp, synthetic construct
  source 1..75: mol_type = other DNA
caacaatgatgcagacggcggtgcatgggccatgacagggtacagccatggtggatatgacgacttcagcctgaa

SEQ ID NO: 550622 - DNA, 75 bp, synthetic construct
  source 1..75: mol_type = other DNA
gactctggcttctgcgcctgtcggaacctctcacgggtatttctcttttgccagtctgaaccggggcttcaccgt

SEQ ID NO: 550623 - DNA, 75 bp, synthetic construct
  source 1..75: mol_type = other DNA
atggccgcgttttctgctatcatgcgcggcatgaacatacttctctctattgcaatcacaacaggcattctctcc

SEQ ID NO: 550624 - DNA, 75 bp, synthetic construct
  source 1..75: mol_type = other DNA
aagccagacagatttgcacagcatcaaatgcacctgctgcacgtggcagacgatatgcacaaggggctgacgtat

SEQ ID NO: 550625 - DNA, 75 bp, synthetic construct
  source 1..75: mol_type = other DNA
ccaattcggcagcagagtatgcccgtgttaacgaagagttctttggcctgaaacaacaggcctgttgccaagtgc

SEQ ID NO: 550626 - DNA, 75 bp, synthetic construct
  source 1..75: mol_type = other DNA
cagcattgtgcttagcgagctgtatggcttttagctcatcagctattgcagacatcgtaatttcaggtacacacg

SEQ ID NO: 550627 - DNA, 75 bp, synthetic construct
  source 1..75: mol_type = other DNA
aagaccaagaaaaataaaaagataatgtactgccaccgcgggttagatcgaatggttacagttacgtgtggaaac

SEQ ID NO: 550628 - DNA, 75 bp, synthetic construct
  source 1..75: mol_type = other DNA
agcattgaacaggacgcagactcaatcatcatgctctatcgggaagcggtatatgacgagaacagtagcgccgcg

SEQ ID NO: 550629 - DNA, 75 bp, synthetic construct
  source 1..75: mol_type = other DNA
cgttgctaacggcatgagtcagcttgcagatttggatgtatgggtagtcgatgcctcgcggttatcggtcgaaga

SEQ ID NO: 550630 - DNA, 75 bp, synthetic construct
  source 1..75: mol_type = other DNA
aacttcaggcattacatatcgctcgggctgaagagctaccggcagttactgccctggctatttcgcacaaaacca

SEQ ID NO: 550631 - DNA, 75 bp, synthetic construct
  source 1..75: mol_type = other DNA
ctgcgcctttaccgacggttgcgaaggctggaaaacgggctgccagaaatgcccgaccttaaataattatccgcc

SEQ ID NO: 550632 - DNA, 75 bp, synthetic construct
  source 1..75: mol_type = other DNA
tcagtttatttcccccagccagcatgtggctgacgctttcaatagcctgtacggtccagggcgttgccggatcat

SEQ ID NO: 550633 - DNA, 75 bp, synthetic construct
  source 1..75: mol_type = other DNA
tgaaatgcagactatattccggaaaaccgctgttaccgtgcaaccctggagtttcaggtcacggtgtactttttt

SEQ ID NO: 550634 - DNA, 75 bp, synthetic construct
  source 1..75: mol_type = other DNA
ggcaactggcaccctccgttatttctaaaacgcaggggtatgatcctgactcccgtctgagcagagccacgcttg

SEQ ID NO: 550635 - DNA, 75 bp, synthetic construct
  source 1..75: mol_type = other DNA
agccaacgcagccgtgccgcctacagtggacaacagatgctggaggagtatgtcaacttctatcagaatctgtag

SEQ ID NO: 550636 - DNA, 75 bp, synthetic construct
  source 1..75: mol_type = other DNA
cgccgcggatgaccgcgatggcgaacattgcgttgtttcgtctgtttaatcgcgatctgttcggcaatttcaatg

SEQ ID NO: 550637 - DNA, 75 bp, synthetic construct
  source 1..75: mol_type = other DNA
ggacggcggccagtacgctggtcaagattggtgccgggttactggtcggtaagctgctggcggtatcatttggtc

SEQ ID NO: 550638 - DNA, 75 bp, synthetic construct
  source 1..75: mol_type = other DNA
cgcatggtgcgctgggcgcggcgcaggcttatatggcaacgtatatcgtctatttctctctttgttgtggcgtgt

SEQ ID NO: 550639 - DNA, 75 bp, synthetic construct
  source 1..75: mol_type = other DNA
atgtcgctggcaaaagcgtccttatggacggcggccagtacgctggtcaagattggcgccggattactggtcggt

SEQ ID NO: 550640 - DNA, 75 bp, synthetic construct
  source 1..75: mol_type = other DNA
atgataacgctgccaaccggtaccagaatctggatcatcgctggtatcaccgatatgcgaaatggctttaacggc

SEQ ID NO: 550641 - DNA, 75 bp, synthetic construct
  source 1..75: mol_type = other DNA
actgtgcatgacggtaagggtgggaaaagcagaaacagcctactgcccacgcgcctaatcccagcaataaaataa

SEQ ID NO: 550642 - DNA, 75 bp, synthetic construct
  source 1..75: mol_type = other DNA
gcgttcttgcgtactacgtcagttaccgtttgggcggttatgaaggggcgttgctggggctggcgttgattcccg

SEQ ID NO: 550643 - DNA, 75 bp, synthetic construct
  source 1..75: mol_type = other DNA
tgctgctggccccgggatccgtcagtgaaatgcaggactatattccggaaaaccgctgttaccgtgcaactctgg

SEQ ID NO: 550644 - DNA, 75 bp, synthetic construct
  source 1..75: mol_type = other DNA
cgggaaaaagatccggaggaaatggaaagtgccggactcccgaacaaggagtgcaccgaaggcgatcaacatgcc

SEQ ID NO: 550645 - DNA, 75 bp, synthetic construct
  source 1..75: mol_type = other DNA
ttgcacttatccggagcgcccaccctgagttttatcactacccgggacgtcttcaggggtatatcaatgccaacc

SEQ ID NO: 550646 - DNA, 75 bp, synthetic construct
  source 1..75: mol_type = other DNA
ccggtcaggaactgcccattcgctggcttgcgcaacatggctgcgaaaaaccggtaacgcacgtttcacgggaag

SEQ ID NO: 550647 - DNA, 75 bp, synthetic construct
  source 1..75: mol_type = other DNA
caacactattttacgaacctcgtacgaacgcctgaacatcccctgcccgtggcgttactacaacgatcgcgatgt

SEQ ID NO: 550648 - DNA, 75 bp, synthetic construct
  source 1..75: mol_type = other DNA
agtggatgaaaggaaatcgtgtttcgcgtatcacccgtacggcttccggtgcaaatgccggtggcgggaacaaaa

SEQ ID NO: 550649 - DNA, 75 bp, synthetic construct
  source 1..75: mol_type = other DNA
ccgtggcgttacaccaatgatcgcgatgtaagaacgatggtcgctctggggttggtgatggatttcgatgcccac

SEQ ID NO: 550650 - DNA, 75 bp, synthetic construct
  source 1..75: mol_type = other DNA
tggaagaagttaaccgcgaactggctgctaagcaggaaacagaagaagaaaatgatgaagaaaaaccgcaaccat

SEQ ID NO: 550651 - DNA, 75 bp, synthetic construct
  source 1..75: mol_type = other DNA
gcaatatttttcgatccgcaaaccggagatatgggaccggaatttagtaagactatcgatctggaaactgctggc

SEQ ID NO: 550652 - DNA, 75 bp, synthetic construct
  source 1..75: mol_type = other DNA
gaggagaacatgctcctgccggtttccggtcaggaactgcccattcgctggcttgctcaacgtggcagcgaaaaa

SEQ ID NO: 550653 - DNA, 75 bp, synthetic construct
  source 1..75: mol_type = other DNA
tgattatctgaaccaaaataatatcacattgaaccgccccgggtttcctggagagtgttttatctgtgaactcag

SEQ ID NO: 550654 - DNA, 75 bp, synthetic construct
  source 1..75: mol_type = other DNA
tgagaatgctggtaacgatcagcatcacaccagcgatagtgaaactggcgaggcggcagatcccttaattgcggt

SEQ ID NO: 550655 - DNA, 75 bp, synthetic construct
  source 1..75: mol_type = other DNA
cgcatcacccgcacggcttccggtgctaatgctggtggtgggaacaaaaccgatcgcaatccgaatttagtacac

SEQ ID NO: 550656 - DNA, 75 bp, synthetic construct
  source 1..75: mol_type = other DNA
gcaaaacattcgctcaggatctgaccaaccagaaaggcgaagatgcatggccgattacctctaccacgttcattc

SEQ ID NO: 550657 - DNA, 75 bp, synthetic construct
  source 1..75: mol_type = other DNA
acggaaagaaaaacatggtgcgattataaaacgattaaaacagttacactggatgagattatttactggtatttc

SEQ ID NO: 550658 - DNA, 75 bp, synthetic construct
  source 1..75: mol_type = other DNA
atgaatgagaacaaaacgatgaatttagcgcaatcgctcgccatcgatagccagcttcgcttaccgggaagtgca

SEQ ID NO: 550659 - DNA, 75 bp, synthetic construct
  source 1..75: mol_type = other DNA
ttcttcgactgggcatacaaaaccggggctaaacaggcgaacgacctggattacgccagcctgccggatagcgta

SEQ ID NO: 550660 - DNA, 75 bp, synthetic construct
  source 1..75: mol_type = other DNA
caaatgggctgacacttaccagaaagaaaacggtaataaagttaactaccagggtatcggttcttctggtggtgt

SEQ ID NO: 550661 - DNA, 75 bp, synthetic construct
  source 1..75: mol_type = other DNA
ttcagcgtctgccgggggcaattggctacgttgaatatgcttacgcgaagcaaaacaacctcgcctacaccaaac

SEQ ID NO: 550662 - DNA, 75 bp, synthetic construct
  source 1..75: mol_type = other DNA
acagtttctttgctgagtcataatgatgtcaatgcccgtcgggcctggctggaaaaccagcaattctccccgcag

SEQ ID NO: 550663 - DNA, 75 bp, synthetic construct
  source 1..75: mol_type = other DNA
ctttgtgataatagtgaaatccagacccgcccgattaaaggcacgctaccacgcctgcccgatcctcaggaagat

SEQ ID NO: 550664 - DNA, 75 bp, synthetic construct
  source 1..75: mol_type = other DNA
atgaagacgttatctcccgctgtgattactttaccctggcgtcaggacgccgctgaattttatttctcacgctta

SEQ ID NO: 550665 - DNA, 75 bp, synthetic construct
  source 1..75: mol_type = other DNA
aggtgaagcacaggatgtacgaacattagtacatggtctggcacaacgagtgcctcaacaaggagaggaactgat

SEQ ID NO: 550666 - DNA, 75 bp, synthetic construct
  source 1..75: mol_type = other DNA
gcagacgtgaatgacgctgatatatttttaatgttaaaagcgtttgtagaaatgggattcaaaattagtttacac

SEQ ID NO: 550667 - DNA, 75 bp, synthetic construct
  source 1..75: mol_type = other DNA
gtgaacgacgctgatatatttttaatgttaaaagcgtttgtagaaatgggatttaaaatcagtttacacaaataa

SEQ ID NO: 550668 - DNA, 75 bp, synthetic construct
  source 1..75: mol_type = other DNA
tgaaagcggcaaccgcaccggacaggccgatcaagctattcgatggtgatggcctgtatctttacgtcgcggtat

SEQ ID NO: 550669 - DNA, 75 bp, synthetic construct
  source 1..75: mol_type = other DNA
ttgatgtatcacctgctggtattgttgcaggatcaggatctggatttaacgacggtgattgagaacttacgcaag

SEQ ID NO: 550670 - DNA, 75 bp, synthetic construct
  source 1..75: mol_type = other DNA
aactggactgggaaaaaaccgacggacttatgccggtgattgtgcaacacgcggtatccggcgaagtgttaatgc

SEQ ID NO: 550671 - DNA, 75 bp, synthetic construct
  source 1..75: mol_type = other DNA
atcgggcaatttcctcaacgtagtgagcattgcgccggactgcgacaacgacacactactggtgctggcgaatcc

SEQ ID NO: 550672 - DNA, 75 bp, synthetic construct
  source 1..75: mol_type = other DNA
caccaaacgcattgcgcagaaagtgggcgaagaaggcgtggaaaccgcactggcagcaacggtacatgaccgctt

SEQ ID NO: 550673 - DNA, 75 bp, synthetic construct
  source 1..75: mol_type = other DNA
tgctggtcaacccgattggcccgacttgccacaaaggcacttccagctgcttcggcgacgccagccaccagtggc

SEQ ID NO: 550674 - DNA, 75 bp, synthetic construct
  source 1..75: mol_type = other DNA
ctgctggtgttgttgcaggatcaggatctggatttaacgacggtgattgagaacctgcgcaaacggcatcagtga

SEQ ID NO: 550675 - DNA, 75 bp, synthetic construct
  source 1..75: mol_type = other DNA
agtggattgcgttctgtgggttaaaaacagccaacttatgcctaatgattacaacccaaacaacgtggcaccacc

SEQ ID NO: 550676 - DNA, 75 bp, synthetic construct
  source 1..75: mol_type = other DNA
ctgtgggttaaaaacagccaacttatgcctaatgattacaacccaaacaacgtggcaccacccgaaaaaaactgc

SEQ ID NO: 550677 - DNA, 75 bp, synthetic construct
  source 1..75: mol_type = other DNA
cgggctatgcctgttcttgaagccgatgtttatgagttgcactcatcgtcggggaatacagcaattggtaaaaaa

SEQ ID NO: 550678 - DNA, 75 bp, synthetic construct
  source 1..75: mol_type = other DNA
catcgggccaacctgccacaaaggcaccagcagctgcttcggcgacaccgctcaccagtggctgttcctgtatca

SEQ ID NO: 550679 - DNA, 75 bp, synthetic construct
  source 1..75: mol_type = other DNA
ctggctggagcgcaaacgctcaccgctcgatccggtagtacgatcgcttgtcagcgcgcgcattgcgcaaatgtg

SEQ ID NO: 550680 - DNA, 75 bp, synthetic construct
  source 1..75: mol_type = other DNA
ttgtttttcttatttcaactattaaagacataaaggatattttttgtaaatccaaaaataataaattactacgtc

SEQ ID NO: 550681 - DNA, 75 bp, synthetic construct
  source 1..75: mol_type = other DNA
acgggctatggaaattatcgacgaactggaaccgcagcgacgcaatgcctggtgcggcagcattggctatttgag

SEQ ID NO: 550682 - DNA, 75 bp, synthetic construct
  source 1..75: mol_type = other DNA
cgtattcgattgctggatgttgtgtcgggactatttgaagcgtgagtttaacgtcgaactaaacccgaacgcaca

SEQ ID NO: 550683 - DNA, 75 bp, synthetic construct
  source 1..75: mol_type = other DNA
ccgttctgctctctgttggtgctgagaagctctcacaacgtgaatgggactggatgaagatgctcaaacccatgg

SEQ ID NO: 550684 - DNA, 75 bp, synthetic construct
  source 1..75: mol_type = other DNA
accctagacactgccaaagagctggcaatggtcgagcgcaacgaaaaaggccgccaaatccgccgatactttatc

SEQ ID NO: 550685 - DNA, 75 bp, synthetic construct
  source 1..75: mol_type = other DNA
gggggggaaaccccgcgacatccactgtttgaggcgatcgatcaactgcttgcagaaccattgtcgatccgcgat

SEQ ID NO: 550686 - DNA, 75 bp, synthetic construct
  source 1..75: mol_type = other DNA
tgctggtggtgacctttaccgaggctgccacggcagaattgcgcggtcgtatccgtagcaatattcacgagttgc

SEQ ID NO: 550687 - DNA, 75 bp, synthetic construct
  source 1..75: mol_type = other DNA
gcggaaatcaatcaccatacggccacggattttgccttcttccatctcggtaaagatggtgttgatgtccgctaa

SEQ ID NO: 550688 - DNA, 75 bp, synthetic construct
  source 1..75: mol_type = other DNA
gccctaatgatccggtcactttagctgatgtccgtcaggcgggcgcgactggcgtggttaccgctttgcaccata

SEQ ID NO: 550689 - DNA, 75 bp, synthetic construct
  source 1..75: mol_type = other DNA
aacaccgtcgtaaagcggaaggcaaagaagacctgatcccgatgcgtccggatcacggtcatcagatgctggacg

SEQ ID NO: 550690 - DNA, 75 bp, synthetic construct
  source 1..75: mol_type = other DNA
cggacgatccgccgcgcccgatcctcggcctgccgcgcattgtttccaccattgaagatatgcagtggatggttg

SEQ ID NO: 550691 - DNA, 75 bp, synthetic construct
  source 1..75: mol_type = other DNA
taacccttatttttgccgggtaatttgcgttaacgacggctccacggacaataccgaagcggtcatggcggaagt

SEQ ID NO: 550692 - DNA, 75 bp, synthetic construct
  source 1..75: mol_type = other DNA
ggcgcagtgcggcattcgcaccgtgtgctacaacttcatgccggtgcttgactggacccgtactgacctcgaata

SEQ ID NO: 550693 - DNA, 75 bp, synthetic construct
  source 1..75: mol_type = other DNA
accgaagaagaaattgctcaggcagcagaacgcttcgccaccatgagcgatgaagacaaagcgcgtctgactcgt

SEQ ID NO: 550694 - DNA, 75 bp, synthetic construct
  source 1..75: mol_type = other DNA
ttgctttacgtggcgctgacgcgttcggtttggcattgtagcctcggcgttgcgccgctggtgcgtcgtcgtggc

SEQ ID NO: 550695 - DNA, 75 bp, synthetic construct
  source 1..75: mol_type = other DNA
gctttcaagaaaggctatggtgatacaagggaattgtttgtagaactcgctaacgtgcgatatagccactattac

SEQ ID NO: 550696 - DNA, 75 bp, synthetic construct
  source 1..75: mol_type = other DNA
atgctaattaatcagcaagaaagagatgaattagccttgtcttgtaccgatcatgaatatcgtttacccgttaag

SEQ ID NO: 550697 - DNA, 75 bp, synthetic construct
  source 1..75: mol_type = other DNA
cagaaagcgtcgatctcgcggaggccgaacgtctggcggaagatctgcgtttgctttacgtggcgctgacgcgtt

SEQ ID NO: 550698 - DNA, 75 bp, synthetic construct
  source 1..75: mol_type = other DNA
agcaagcgctggaccgtgcgcatatccagcccacgtataataacgatttgccatttcagggcggtgcgctgggtt

SEQ ID NO: 550699 - DNA, 75 bp, synthetic construct
  source 1..75: mol_type = other DNA
gcttttaagaaaggctatggtgatacaagggaactattcgttgaactcgctaacgtgcgatatagccactattac

SEQ ID NO: 550700 - DNA, 75 bp, synthetic construct
  source 1..75: mol_type = other DNA
gagttgtatcgtgatcatgggtataccgatattcataacttctttaagaagcatcgcacatcacagacagagttt

SEQ ID NO: 550701 - DNA, 75 bp, synthetic construct
  source 1..75: mol_type = other DNA
aaaacgccgccgtggcgaactgggttttgacgacatgttaagtcggctggattccgcgttgtgtagcgaaagcgg

SEQ ID NO: 550702 - DNA, 75 bp, synthetic construct
  source 1..75: mol_type = other DNA
taagtcagctttccgcccgtgataaacaggtggagatggagttttatctgccgattagtgaaccgcttatcgcca

SEQ ID NO: 550703 - DNA, 75 bp, synthetic construct
  source 1..75: mol_type = other DNA
ccgcaacaggggatttacacaacccgacccaatgcagggttgattgacctgatggatgagatgtttgccggtatg

SEQ ID NO: 550704 - DNA, 75 bp, synthetic construct
  source 1..75: mol_type = other DNA
tgcagcagcgtggtcacggtatcgctcaggatctgatgccacggctggatgttgatgccgcaggtgtggtcagcg

SEQ ID NO: 550705 - DNA, 75 bp, synthetic construct
  source 1..75: mol_type = other DNA
ccgattagtgaaccgcttatcgccagtcagcttgatacgttaatccgccagtttgacccgctatccgcaggctgc

SEQ ID NO: 550706 - DNA, 75 bp, synthetic construct
  source 1..75: mol_type = other DNA
tttcttagaagatcgcacgaaggccgggggggaaaccccgcgacatccactgtttgaggcgatcgatcaactgct

SEQ ID NO: 550707 - DNA, 75 bp, synthetic construct
  source 1..75: mol_type = other DNA
cctatggggatcgtgtagataatgccctgattaaatttgattatacagacacattacagatcaaatatgctaatc

SEQ ID NO: 550708 - DNA, 75 bp, synthetic construct
  source 1..75: mol_type = other DNA
atgtcaagcgaccgcatttaaccagatagactggccccctgaatcaccagacaaccaatatcacttatttaagtg

SEQ ID NO: 550709 - DNA, 75 bp, synthetic construct
  source 1..75: mol_type = other DNA
agtactttgccgacaactggtactgtctttggtggtaaacatcgttcaattcataagactgccgataaaatcgat

SEQ ID NO: 550710 - DNA, 75 bp, synthetic construct
  source 1..75: mol_type = other DNA
atcagatcatcgctgtgattaagtcagttgaagccggacgaaccgttaaagatatctgctgggaggccggtatct

SEQ ID NO: 550711 - DNA, 75 bp, synthetic construct
  source 1..75: mol_type = other DNA
tcaggtgatcgataatgcaaccgaccgcatccgtaaaatgaacggctatacatacacgcttaaagaaaacggtat

SEQ ID NO: 550712 - DNA, 75 bp, synthetic construct
  source 1..75: mol_type = other DNA
ttacaccgacacattacagatcaaatatgccaatcatgggtcaaccatgacattaaacacacagggaaccgctta

SEQ ID NO: 550713 - DNA, 75 bp, synthetic construct
  source 1..75: mol_type = other DNA
aaaacgtccgcatgatgctgaccgattcggtttccagcgtgcagattgaagatgccgcatcacagtcggctgcct

SEQ ID NO: 550714 - DNA, 75 bp, synthetic construct
  source 1..75: mol_type = other DNA
ccagttttcaatggcgcatcaggacgttcgctattatttaaacggtatgttgttcgaaaccgaaggcgaagagct

SEQ ID NO: 550715 - DNA, 75 bp, synthetic construct
  source 1..75: mol_type = other DNA
ggaagctacgtaacaaaatcatatgtagacagcaaaaatgaaaccgttaatgactggtctgctgcatggtatcag

SEQ ID NO: 550716 - DNA, 75 bp, synthetic construct
  source 1..75: mol_type = other DNA
gcgtattgcgaactatacctcaaaaaatggatagacagtccaggtaacgcaatggcgcgccttaacctgaacgat

SEQ ID NO: 550717 - DNA, 75 bp, synthetic construct
  source 1..75: mol_type = other DNA
ttcggtttccagcgtgcagattgaagatgcggccagccagagcgcggcttatgttgtcatgccaatgagactgta

SEQ ID NO: 550718 - DNA, 75 bp, synthetic construct
  source 1..75: mol_type = other DNA
gctgcgatctgctcaagcaggcgtttgctcgcgcggcgattctctctaacgagaaattccgcggcgtgcgtctgt

SEQ ID NO: 550719 - DNA, 75 bp, synthetic construct
  source 1..75: mol_type = other DNA
cgtccgcatggtgcgattttccacgacgaaagtacggcccaccgcccgtctgtttttcagtttcttaatctaaat

SEQ ID NO: 550720 - DNA, 75 bp, synthetic construct
  source 1..75: mol_type = other DNA
ttaaccaaatccaccctttatctgcctgataccgcaaaagaagagttagagaagaagaaaaatatggggtattga

SEQ ID NO: 550721 - DNA, 75 bp, synthetic construct
  source 1..75: mol_type = other DNA
agacaaatctctctatatgaccactgtcaccgctgacaacattcttgaaggtaagctgattggtgactggctggt

SEQ ID NO: 550722 - DNA, 75 bp, synthetic construct
  source 1..75: mol_type = other DNA
cgggcctgaagccgggtaaagatatcctcacgggttccattgatggcgtaccggatatctacaaagcgatgattg

SEQ ID NO: 550723 - DNA, 75 bp, synthetic construct
  source 1..75: mol_type = other DNA
agggcaccgttggggccagcgtcgccattgaccgtaagaaaggctttgccgaagccattaagagtgcgccaaata

SEQ ID NO: 550724 - DNA, 75 bp, synthetic construct
  source 1..75: mol_type = other DNA
ccggacatttacaaagcgatgatggatggcgaggcgaacgccagcgttgaactgacgccaaacatggctggcccg

SEQ ID NO: 550725 - DNA, 75 bp, synthetic construct
  source 1..75: mol_type = other DNA
atggcgaagcgaacgccagcgttgaactgacgccaaacatggccggcccggccttcgacgcgctggagaaataca

SEQ ID NO: 550726 - DNA, 75 bp, synthetic construct
  source 1..75: mol_type = other DNA
taaaattctcaagtgtcataaatgctccgctgaatataaatttccccgaaatatagaagtcagtggcaaaattcc

SEQ ID NO: 550727 - DNA, 75 bp, synthetic construct
  source 1..75: mol_type = other DNA
aataccatacttctaatgccgcttataaaattctcaagtgtcataaatgctccgctgaatataaatttccccgaa

SEQ ID NO: 550728 - DNA, 75 bp, synthetic construct
  source 1..75: mol_type = other DNA
ctatgaaatgtaccacccaattaccaatacggtggtctatgtactgaagcctactgacgatcctgagttcaagcc

SEQ ID NO: 550729 - DNA, 75 bp, synthetic construct
  source 1..75: mol_type = other DNA
gaacaggtgcggcagaccattttgctctacgcccgctccagtgcgacggtattgatacagggagaaacaggaacc

SEQ ID NO: 550730 - DNA, 75 bp, synthetic construct
  source 1..75: mol_type = other DNA
ctttgcagactcgcctgctgcgggttctggaagaaaaagaggtcactcgcgtcggcggacatcaaccgattccgg

SEQ ID NO: 550731 - DNA, 75 bp, synthetic construct
  source 1..75: mol_type = other DNA
cgcggctggctctaacggcgcgtacctgaaaagccgcctgtcagtgccagttattttgattaaaccgagcggcta

SEQ ID NO: 550732 - DNA, 75 bp, synthetic construct
  source 1..75: mol_type = other DNA
gaagccgtagggtctatgatgaaatatccagacggcgggagtggattagatggagaagaaggtgaacggtattac

SEQ ID NO: 550733 - DNA, 75 bp, synthetic construct
  source 1..75: mol_type = other DNA
ctggtcgatgaaaaacgtcaacttttccgccagatgctggcgctgggctgccgttttatttcacccagtcagcat

SEQ ID NO: 550734 - DNA, 75 bp, synthetic construct
  source 1..75: mol_type = other DNA
acgatcactggagcgtgaccgggcgctgtgcctttcttgacggctgcgaaggctggaaaagcggctgtcagaagt

SEQ ID NO: 550735 - DNA, 75 bp, synthetic construct
  source 1..75: mol_type = other DNA
cgttcttcctcggtattcccgtcttctttgatgtcggctttattattcttgcgccaatcatttacggttttgcca

SEQ ID NO: 550736 - DNA, 75 bp, synthetic construct
  source 1..75: mol_type = other DNA
tgctgtacacaatcgacggtgacttttcatattcagcagcttgaacaggagttctcggtacagttgtttgagaaa

SEQ ID NO: 550737 - DNA, 75 bp, synthetic construct
  source 1..75: mol_type = other DNA
tgggacgctgccgcgttatcaataatggcattgatgtggcaaccgaagccattcttgccgaactacccgcgatgc

SEQ ID NO: 550738 - DNA, 75 bp, synthetic construct
  source 1..75: mol_type = other DNA
caataacgggatcgacgtcgccaccgaagcgattcttgccgagctgacgccggtaaaacgcttctcctcgcggcc

SEQ ID NO: 550739 - DNA, 75 bp, synthetic construct
  source 1..75: mol_type = other DNA
ggcaaaggtcagcagtggctgatgaagcgattgcttgatgctggtgtgctggtacctgtcgcggcaacgcgctaa

SEQ ID NO: 550740 - DNA, 75 bp, synthetic construct
  source 1..75: mol_type = other DNA
ctgccgttgagcaagcaacacgatcacaaacgccctggacgcttgatccggttgcggttggtgcgctcgattatc

SEQ ID NO: 550741 - DNA, 75 bp, synthetic construct
  source 1..75: mol_type = other DNA
gcgctgtcgccagaagtgaagggccgggcagttttattgcacattttcttgatgcgctctggcagctgacaccgg

SEQ ID NO: 550742 - DNA, 75 bp, synthetic construct
  source 1..75: mol_type = other DNA
cgctggtgctggcattctggttattggctttacgtcgcggctggagcttacaacacaccagcgacattatgggct

SEQ ID NO: 550743 - DNA, 75 bp, synthetic construct
  source 1..75: mol_type = other DNA
tgttcgccttctccacctgggtttccaccaacggggcgaaaatgttggggccaattacctccgtcacttcaacgc

SEQ ID NO: 550744 - DNA, 75 bp, synthetic construct
  source 1..75: mol_type = other DNA
tttctcccgcgtttcggctgaaggtaaaccagacatttatcgactatcgagccggaagattacaacctgctattc

SEQ ID NO: 550745 - DNA, 75 bp, synthetic construct
  source 1..75: mol_type = other DNA
ttacggccatgtgcgcacaccatgctggaaaagcggttagcccggcgatgcacacttttattcagtgtgttgaag

SEQ ID NO: 550746 - DNA, 75 bp, synthetic construct
  source 1..75: mol_type = other DNA
aacgatttatgcgttgcttgattcgccgcgtgcgacaggcgcttacaagttcgttgttatgccgggacgtgacac

SEQ ID NO: 550747 - DNA, 75 bp, synthetic construct
  source 1..75: mol_type = other DNA
ggtaaccccgaaaggggagtggggcaaaggtagcgttgagctggtagaaattccgaccaacgatgaaactaacga

SEQ ID NO: 550748 - DNA, 75 bp, synthetic construct
  source 1..75: mol_type = other DNA
tggttttgccggttttaaagtgctttacccgatcaacagcaaagataaaaatgatgaaatcgtcagcatgctcgg

SEQ ID NO: 550749 - DNA, 75 bp, synthetic construct
  source 1..75: mol_type = other DNA
atggttacaaaaacagtaattcctgatgacatcaaaacgctaaaatccgatgttagtaaactacaaaacgatcaa

SEQ ID NO: 550750 - DNA, 75 bp, synthetic construct
  source 1..75: mol_type = other DNA
ttacgatcttcgtccaagcgcatgggtgactccgaaaggggagtggggcaaaggcagcgttgagctggtggaaat

SEQ ID NO: 550751 - DNA, 75 bp, synthetic construct
  source 1..75: mol_type = other DNA
aacatctggcgatcagcagcttctcgatggaaaacccgcaaggcttcggtctgttgcagcgcggccgcgatttct

SEQ ID NO: 550752 - DNA, 75 bp, synthetic construct
  source 1..75: mol_type = other DNA
tatacatacacgcttaaagaaaacggtatgccttacgctggtgttattgcacaagaaaccctggaagccatcccc

SEQ ID NO: 550753 - DNA, 75 bp, synthetic construct
  source 1..75: mol_type = other DNA
gcttattaagtttgactgcacagacacattacaaatcaaatatgctaatcatgggtcaaccatgacaataaacac

SEQ ID NO: 550754 - DNA, 75 bp, synthetic construct
  source 1..75: mol_type = other DNA
accgggtccggtggtcctgcattttcatgtgctgcacagctactggctaaatcttaagagcgtggtgcgcttttg

SEQ ID NO: 550755 - DNA, 75 bp, synthetic construct
  source 1..75: mol_type = other DNA
caggcgcgcgtcaccgacgaagatttagtggtcgaaatcccgcgttacactatcaaccatgcgcgtgagcattaa

SEQ ID NO: 550756 - DNA, 75 bp, synthetic construct
  source 1..75: mol_type = other DNA
acggtatcgagattgaacacgcctgtgaaaaatcctgtgcttgcaccacctgccactgcatcgttcgtgaaggtt

SEQ ID NO: 550757 - DNA, 75 bp, synthetic construct
  source 1..75: mol_type = other DNA
gtttaagctgccaggcgcgcgttaccgacgaagatttagtagtcgaaatcccgcgttacactatcaaccatgcgc

SEQ ID NO: 550758 - DNA, 75 bp, synthetic construct
  source 1..75: mol_type = other DNA
ggtggcgacgccttgtggctgaaagccggggctgaggcagaaaaattatttggaaatatgacgctgaaggcaggt

SEQ ID NO: 550759 - DNA, 75 bp, synthetic construct
  source 1..75: mol_type = other DNA
ctttcaacggtgccggagttcgcgatactgcccgtacgctgaaaatcggcattaatactgtcattcggactttaa

SEQ ID NO: 550760 - DNA, 75 bp, synthetic construct
  source 1..75: mol_type = other DNA
ctctggcgtaagcaataccaggaaggaagtcttactgctgtcgccgccggagaacaggttgttcctgcctctgaa

SEQ ID NO: 550761 - DNA, 75 bp, synthetic construct
  source 1..75: mol_type = other DNA
cgtgcccggtttcgctgccgtgactgccatcgtgtatttctgctcacctacacctatgaagcccgtaagcccggc

SEQ ID NO: 550762 - DNA, 75 bp, synthetic construct
  source 1..75: mol_type = other DNA
cgggtacgggtgaagtttcactgggaccgttatcacgggatgacggaggagagttcgtgctgggtgagggtgtca

SEQ ID NO: 550763 - DNA, 75 bp, synthetic construct
  source 1..75: mol_type = other DNA
ccggggagtctgccggggacgaagacgcagatgacgatacggtcgaagacgtataaaggaagcggttttaacgag

SEQ ID NO: 550764 - DNA, 75 bp, synthetic construct
  source 1..75: mol_type = other DNA
cccgttgtcagtctgctcaggtctaccgccatggtcagaaccctaaaggccgtgaccggtttcgctgtcgtgact

SEQ ID NO: 550765 - DNA, 75 bp, synthetic construct
  source 1..75: mol_type = other DNA
tatcagagggaagtatattgaatgccaatgttccggacgccaactccaatggtgattttgttgccgagttctctc

SEQ ID NO: 550766 - DNA, 75 bp, synthetic construct
  source 1..75: mol_type = other DNA
cggcaaaggtgcagacgacgctgaaagacgatccgatgtcaggtcacgtttttatcttccgtgggcgtaatggca

SEQ ID NO: 550767 - DNA, 75 bp, synthetic construct
  source 1..75: mol_type = other DNA
gcaaagtgttccttacgcaggcgcagctggcgatgctgctggaaggtatcgactggcggcagcccaagaggctgc

SEQ ID NO: 550768 - DNA, 75 bp, synthetic construct
  source 1..75: mol_type = other DNA
tataccgccagaacactgaaaatcggcatcaataccgtcatacggacattaaaaagctctcgccccggcggataa

SEQ ID NO: 550769 - DNA, 75 bp, synthetic construct
  source 1..75: mol_type = other DNA
ctttcaacggagccggaattcgtgataccgccagaacactgaaggtcggcgtcaacactgttatccggactttaa

SEQ ID NO: 550770 - DNA, 75 bp, synthetic construct
  source 1..75: mol_type = other DNA
agcagagctttgaaccgggaatgacggtctcccttgttgcccggcaacacggtgtggcagccagccagttatttc

SEQ ID NO: 550771 - DNA, 75 bp, synthetic construct
  source 1..75: mol_type = other DNA
ctcaatgacggcgtacccgttagcggcagtagtgggttgttcgacctggttcagaatatgtcaccggaacagcaa

SEQ ID NO: 550772 - DNA, 75 bp, synthetic construct
  source 1..75: mol_type = other DNA
ggcactgtccggtatgcatgggttcggtcaggcatttaccagcaccgaagccctgacatttaacggacaggccga

SEQ ID NO: 550773 - DNA, 75 bp, synthetic construct
  source 1..75: mol_type = other DNA
taaacttgctgatgccgcaacgctgaccggtgaggcaaaagccagcgccgaagcggctgcaaaaagcgagcggct

SEQ ID NO: 550774 - DNA, 75 bp, synthetic construct
  source 1..75: mol_type = other DNA
acagcgcgctccgcaaccgggtagcctggttcttgccgcatacctgccagatagcggcagcagtgatgtcacatt

SEQ ID NO: 550775 - DNA, 75 bp, synthetic construct
  source 1..75: mol_type = other DNA
ggcgaaggccagccaggatgcgagcgcaggcaatgcgcaggaagcgaaacagcacagggacgaggcgcaacggat

SEQ ID NO: 550776 - DNA, 75 bp, synthetic construct
  source 1..75: mol_type = other DNA
gtcgtttacgacggcgattcgctggcgttctttctggcggggacagcaggcaatggtccgtcctcttattacaaa

SEQ ID NO: 550777 - DNA, 75 bp, synthetic construct
  source 1..75: mol_type = other DNA
attgcgcgcctctaaccagggtgaaccggtcattctcgacattaacgccgatgcgggtaaagcctacgcagatac

SEQ ID NO: 550778 - DNA, 75 bp, synthetic construct
  source 1..75: mol_type = other DNA
ggaatattttaggtctggttattccacttattatggcgatccccgttatggggatcatggctcgtttattaggtg

SEQ ID NO: 550779 - DNA, 75 bp, synthetic construct
  source 1..75: mol_type = other DNA
gcagagcaggctgtcaaggatgccgacacgatagtccggaaagcggtcgataaacttgctgatgctgcaacgctg

SEQ ID NO: 550780 - DNA, 75 bp, synthetic construct
  source 1..75: mol_type = other DNA
cctgcaggatgcaaaggctgaactggatgagttagagagcctgatgcagttcaaccaacccaggatcgtagagcg

SEQ ID NO: 550781 - DNA, 75 bp, synthetic construct
  source 1..75: mol_type = other DNA
attacaccttttccacacaaacggaagaaacaaccgggataacagaaattatctggctggataatggctggggcg

SEQ ID NO: 550782 - DNA, 75 bp, synthetic construct
  source 1..75: mol_type = other DNA
cttttcattaaggtcattattggattttataattctattcctggttgaaaggatcggtatctataacatggatag

SEQ ID NO: 550783 - DNA, 75 bp, synthetic construct
  source 1..75: mol_type = other DNA
agtgtttttgatggaggaatatctcgtgcagttattcggtttgtatctatttatagaaatgacaatgaaaaagtt

SEQ ID NO: 550784 - DNA, 75 bp, synthetic construct
  source 1..75: mol_type = other DNA
ggggctttggtttacactgcgcgacgcctgacatgcagttaaccgggatcgaaattgcgccagaggccattgcct

SEQ ID NO: 550785 - DNA, 75 bp, synthetic construct
  source 1..75: mol_type = other DNA
cggaagtgtctagattatccgtggcgattcatgaagcgatgatcccgttaccttccgggacaaaaatctggctgg

SEQ ID NO: 550786 - DNA, 75 bp, synthetic construct
  source 1..75: mol_type = other DNA
ggtgaccagataaaagtgctgtgggctgacagtgacggactgtgcctcttcaccaaacgcctggagcggagccgc

SEQ ID NO: 550787 - DNA, 75 bp, synthetic construct
  source 1..75: mol_type = other DNA
aaatttggctggttgccggtatcaccgatatgagaaatggcttcaacggccaggctgcgaaagtacagacggcgc

SEQ ID NO: 550788 - DNA, 75 bp, synthetic construct
  source 1..75: mol_type = other DNA
cgcagctggcaatgcttctggaaggcatcgactggcggcagcctaaaagactgcttacgtccctgaccatgttgt

SEQ ID NO: 550789 - DNA, 75 bp, synthetic construct
  source 1..75: mol_type = other DNA
ctgctggaaggtatcgactggcgacagcctaagcggcctgctgacctccctgaccatgctgtaaatctctttatc

SEQ ID NO: 550790 - DNA, 75 bp, synthetic construct
  source 1..75: mol_type = other DNA
gtgcagatggcgctgaaagacgatccgatgtccggccatgtcttcatcttccgcggccgcagtggcagccaggtc

SEQ ID NO: 550791 - DNA, 75 bp, synthetic construct
  source 1..75: mol_type = other DNA
tttgtgaatgaaggctttactacgcgaattgttgatgtcagcgagaaagagagcgaagccttgttaagttttttg

SEQ ID NO: 550792 - DNA, 75 bp, synthetic construct
  source 1..75: mol_type = other DNA
gattacctgccacagcggcggattatgcatcgggcgacgatccttggggataaaccgttttatcgggcggggtga

SEQ ID NO: 550793 - DNA, 75 bp, synthetic construct
  source 1..75: mol_type = other DNA
gatgtgacgtttattgagacgccacccgctggggcgattctggcggcgaaagagttgccctcgaccggcggtgac

SEQ ID NO: 550794 - DNA, 75 bp, synthetic construct
  source 1..75: mol_type = other DNA
aaatttggctggttgccggtatcaccgatatgagaaatggcttcaacggcctagcggcaaaggtgcagacgacgc

SEQ ID NO: 550795 - DNA, 75 bp, synthetic construct
  source 1..75: mol_type = other DNA
ccgccagctgttgagcgggctgcgtgcggagcatgatttccgtaaatcgttcccggaatacaaataccgcaaaac

SEQ ID NO: 550796 - DNA, 75 bp, synthetic construct
  source 1..75: mol_type = other DNA
atgaggcgctctctgttcccttccgccagctgttgagcgggctgcgtgcggagcatgatttccgtaaatcgttcc

SEQ ID NO: 550797 - DNA, 75 bp, synthetic construct
  source 1..75: mol_type = other DNA
atgataatgacggtaacaagcatgttagacaatttagacaatgttttaagaattgccacacgccaaagcccactt

SEQ ID NO: 550798 - DNA, 75 bp, synthetic construct
  source 1..75: mol_type = other DNA
tttgcgattgcccgctttatcctgcctcatttgcgcccgtttttgcggcgctaaaaccgtttatcgcccgtgcgg

SEQ ID NO: 550799 - DNA, 75 bp, synthetic construct
  source 1..75: mol_type = other DNA
cccgaacaagggtttcgtaataaagccaaaatggtggtgagtggcagcgttgaaaagccactgctcggaatgcta

SEQ ID NO: 550800 - DNA, 75 bp, synthetic construct
  source 1..75: mol_type = other DNA
cagctggcgatgctccttgaagggatcgactggcgacagcctaagaggctgctgacctccctgaccatgctgtaa

SEQ ID NO: 550801 - DNA, 75 bp, synthetic construct
  source 1..75: mol_type = other DNA
tatccgcgaactaccaggatatcgcattgagcgggtacagcttttcgatatgttcccccacaccgcacattatga

SEQ ID NO: 550802 - DNA, 75 bp, synthetic construct
  source 1..75: mol_type = other DNA
tatccgcgagctgccgggttatcgcatcgaacgggtacagcttttcgacatgttcccccacaccgcgcattacga

SEQ ID NO: 550803 - DNA, 75 bp, synthetic construct
  source 1..75: mol_type = other DNA
catatggcgataatggaaggggagacggagatctacctgaccgaacagcaggcgctggcagagcgttttaatgac

SEQ ID NO: 550804 - DNA, 75 bp, synthetic construct
  source 1..75: mol_type = other DNA
cttatttgtgaaagagctggaagtcgcgctcctggaaaatcgcgccgatattgccgttcattcaatgaaagatgt

SEQ ID NO: 550805 - DNA, 75 bp, synthetic construct
  source 1..75: mol_type = other DNA
tagataatgttttaagaattgccacacgccaaagcccacttgcactctggcaggcacactatgtcaaagacaagt

SEQ ID NO: 550806 - DNA, 75 bp, synthetic construct
  source 1..75: mol_type = other DNA
ctggaagtcgcgctcctcgaaaatcgcgccgatatcgccgtacattcaatgaaagatgtgccggttgaattcccg

SEQ ID NO: 550807 - DNA, 75 bp, synthetic construct
  source 1..75: mol_type = other DNA
actgctgtggtccaccggtgacggactgtgcctcctgaccaaacggctggagcgtgggcgcttcgcctggccgtc

SEQ ID NO: 550808 - DNA, 75 bp, synthetic construct
  source 1..75: mol_type = other DNA
gccggttgaatttccgcaaggtctggggctggtcaccatttgcgagcgcgaagatcctcgcgatgcctttgtttc

SEQ ID NO: 550809 - DNA, 75 bp, synthetic construct
  source 1..75: mol_type = other DNA
gggctggtcaccatttgcgagcgcgaagatccccgcgatgcctttgtatccaacacctatgacagtctggatgcg

SEQ ID NO: 550810 - DNA, 75 bp, synthetic construct
  source 1..75: mol_type = other DNA
tgaagattttgcagattcgtttatcaactccggttcgcatgaagaaacaatggcaattaaacatcgaatcgatca

SEQ ID NO: 550811 - DNA, 75 bp, synthetic construct
  source 1..75: mol_type = other DNA
tgagcgacgggaatgtgcaaattgttaagaccggcgaggtcattggcgcgacgcaacttactgaaggcgagttga

SEQ ID NO: 550812 - DNA, 75 bp, synthetic construct
  source 1..75: mol_type = other DNA
atttcggcccgcgccgccgcttgctgggctatcgaattaaatatttatacgaacaacgacgcgagcgtgtagccg

SEQ ID NO: 550813 - DNA, 75 bp, synthetic construct
  source 1..75: mol_type = other DNA
tgtcatttcccattcccgggtaaaaaccgacctgaaagggactggcgacctgttttgtgctcagcttatcagtgg

SEQ ID NO: 550814 - DNA, 75 bp, synthetic construct
  source 1..75: mol_type = other DNA
gtgtactggaagtgatgcgctacacccagcaacatgagagcgatgaattgattttgccaccgctggtggaagcat

SEQ ID NO: 550815 - DNA, 75 bp, synthetic construct
  source 1..75: mol_type = other DNA
gcaatacgacgccatgctttataagcagatggaagctactcgtgatgcttaccagcagtacagcaaatctgtcag

SEQ ID NO: 550816 - DNA, 75 bp, synthetic construct
  source 1..75: mol_type = other DNA
gaaactggtatcccgtggaattacctgtcgcgcacgctgcgtttaatggtacttgatgaaacgctttgcatagac

SEQ ID NO: 550817 - DNA, 75 bp, synthetic construct
  source 1..75: mol_type = other DNA
aaagttatatatctttgtgagtatcttgatgatggtctttctaaaaatttccataaccagcttaaaaaataccca

SEQ ID NO: 550818 - DNA, 75 bp, synthetic construct
  source 1..75: mol_type = other DNA
aaataagcggggcggttggccgttattcaaagaaattcccgccaggtaaggtgttcactgtatatcagatgataa

SEQ ID NO: 550819 - DNA, 75 bp, synthetic construct
  source 1..75: mol_type = other DNA
gacaattaaacacttaataaaaaacggcatcgtcgagcgcgtgtatacatgttttggacgccgccgccgcctgct

SEQ ID NO: 550820 - DNA, 75 bp, synthetic construct
  source 1..75: mol_type = other DNA
cgttatttagtgactacagcgttaaaaagcgtatgcgcgacattagcgctgaaacgggaataccgtggaattatc

SEQ ID NO: 550821 - DNA, 75 bp, synthetic construct
  source 1..75: mol_type = other DNA
gaaacgggtatcccatggaattacctgtcgcgcacgctgcgtttaatggtgctggatgaaacactttgcatagac

SEQ ID NO: 550822 - DNA, 75 bp, synthetic construct
  source 1..75: mol_type = other DNA
agtgccattgctgccgcaaaaagtctgctttcagacacattaaaatgggtggtgattaccagcgcctccggtaat

SEQ ID NO: 550823 - DNA, 75 bp, synthetic construct
  source 1..75: mol_type = other DNA
aaaatccgactcaatgagtctctggcttgtaagcttgaggagttattcaacgtatcgacagacttctggatcaag

SEQ ID NO: 550824 - DNA, 75 bp, synthetic construct
  source 1..75: mol_type = other DNA
atgaaggacttcattgtaagggcatagatatcaaagaagacccaaaagagggcggtttgcgctatgacagcttat

SEQ ID NO: 550825 - DNA, 75 bp, synthetic construct
  source 1..75: mol_type = other DNA
attagccagatcccgaagatgattgcagtgatgctggaagccattcctatcattaccagacaactagaagaagct

SEQ ID NO: 550826 - DNA, 75 bp, synthetic construct
  source 1..75: mol_type = other DNA
tcttatcagctctgtcttttggtgcttttgcttctgtaaattcgacagataagagtgatgctggcactgctcaat

SEQ ID NO: 550827 - DNA, 75 bp, synthetic construct
  source 1..75: mol_type = other DNA
gttaccggcgattcgtgccctgatatctggcttgccagacacctcgattcttttcagaaaggggaccgatggcgc

SEQ ID NO: 550828 - DNA, 75 bp, synthetic construct
  source 1..75: mol_type = other DNA
acagcacctgctggggctccccggaaaagtgcaggcgattcgcgtctcggcgctgacggtgccggaaaacgaact

SEQ ID NO: 550829 - DNA, 75 bp, synthetic construct
  source 1..75: mol_type = other DNA
atgcgctgcgccaacttcgtgctgtaactacgggctatatggggacggcatcgcaaattaaaatccttgctgagt

SEQ ID NO: 550830 - DNA, 75 bp, synthetic construct
  source 1..75: mol_type = other DNA
atatctttgagctggaaatcctgacaggtaaaaattgccgcgatctcgacagcgccattgctgccgcaaaaagtc

SEQ ID NO: 550831 - DNA, 75 bp, synthetic construct
  source 1..75: mol_type = other DNA
tggtggtcagtgccgacagcgtgaatgtcatttcccattcacgggtaaaaaccgacctgaaagggactggcgacc

SEQ ID NO: 550832 - DNA, 75 bp, synthetic construct
  source 1..75: mol_type = other DNA
ttatgtttgcgtttgactcggtaccggcaatcattgccgtcagtcgtgaaccgcttatcgtctatagtgccatga

SEQ ID NO: 550833 - DNA, 75 bp, synthetic construct
  source 1..75: mol_type = other DNA
aagcattagacagtggtttcttatctcgcttcctgtttgcctgcattccatccaacaatcactatccttccggag

SEQ ID NO: 550834 - DNA, 75 bp, synthetic construct
  source 1..75: mol_type = other DNA
gttgcagagacctctctttctcaatttcatgaaaaagaatcaggacaagcttttaaatagtggtctgttagcccg

SEQ ID NO: 550835 - DNA, 75 bp, synthetic construct
  source 1..75: mol_type = other DNA
ccaaagtttaaagatgaaaaatttgttccagaactgtttatatggaataaaattacagatgttgccaaaataata

SEQ ID NO: 550836 - DNA, 75 bp, synthetic construct
  source 1..75: mol_type = other DNA
gcagcagatagttgatgacctgaatgcaacaaatgcctccacgacagaaaaaggtctggtgcaactgtgtagtga

SEQ ID NO: 550837 - DNA, 75 bp, synthetic construct
  source 1..75: mol_type = other DNA
accaaaggatggtgatttacgtccggaggtgatgaagcgttttgaggaaatggtggatgtagttacccggcagtc

SEQ ID NO: 550838 - DNA, 75 bp, synthetic construct
  source 1..75: mol_type = other DNA
tgccgattatggcggcatatcagggggaaagttttggtgctgatgtgtctctgggactcggtgatattgtgccgg

SEQ ID NO: 550839 - DNA, 75 bp, synthetic construct
  source 1..75: mol_type = other DNA
acatacgcatcctcaccgcaggttgtgattggcggtgctggtgaatacaacttccccggtcgttacacggcgctt

SEQ ID NO: 550840 - DNA, 75 bp, synthetic construct
  source 1..75: mol_type = other DNA
gcaactctgtagtgatacagacaacgacagcgaagaactggctgccacaccaaaggctgtcaaagccgtcatgga

SEQ ID NO: 550841 - DNA, 75 bp, synthetic construct
  source 1..75: mol_type = other DNA
ggagataaggaaataaaaattggccttggggatgtagtggcggggtcgcgacttggtcctgtggctatcgactgt

SEQ ID NO: 550842 - DNA, 75 bp, synthetic construct
  source 1..75: mol_type = other DNA
acggacaggccgattttgctgaatggctgaaagaggccacgccggggcgttatgcggtcagtattgcggactctt

SEQ ID NO: 550843 - DNA, 75 bp, synthetic construct
  source 1..75: mol_type = other DNA
caacggatagtcgatgacctgaaaggaaccaacgccagcacgacgcaaaaaggcctggtgcaactctgtagtgat

SEQ ID NO: 550844 - DNA, 75 bp, synthetic construct
  source 1..75: mol_type = other DNA
agataaagtgattcccggggtcctgttcagcggcaccgttgaaattatctggccggagcctcaagccaaccccaa

SEQ ID NO: 550845 - DNA, 75 bp, synthetic construct
  source 1..75: mol_type = other DNA
agcacagtattcatcgcctgacttacagctttagtggaaacaactggaatgcaacagtaaaccccattatttacg

SEQ ID NO: 550846 - DNA, 75 bp, synthetic construct
  source 1..75: mol_type = other DNA
gctgcgacgatggaaccccagaccgatatccgtgaccgtacacccggcaggctgtcgctaccgggcgcttttggc

SEQ ID NO: 550847 - DNA, 75 bp, synthetic construct
  source 1..75: mol_type = other DNA
ccactcagtgacgtgttaaccgcaatcagtaatctggaagaacgggcagataatcttctgtgctttaatcaggac

SEQ ID NO: 550848 - DNA, 75 bp, synthetic construct
  source 1..75: mol_type = other DNA
cgcgcaccgggcaggctggcactgtccggtatgcatgggttcggtcaggcatttgccagcaccgaagccctgaca

SEQ ID NO: 550849 - DNA, 75 bp, synthetic construct
  source 1..75: mol_type = other DNA
atgagttatgtagactggccgccattaattttgaggcacacgactacatggctgaattcgaaaccacttttgcag

SEQ ID NO: 550850 - DNA, 75 bp, synthetic construct
  source 1..75: mol_type = other DNA
acgaaatgctgcgcatgggcttcatcgaagatgttgaaaccattatggcgcagatcccagaaggtcatcagaccg

SEQ ID NO: 550851 - DNA, 75 bp, synthetic construct
  source 1..75: mol_type = other DNA
gcagctggaaagcagcgatctggatcaataccgcgcactgctgagcaaaattcagccgactgcagaaggtgaaga

SEQ ID NO: 550852 - DNA, 75 bp, synthetic construct
  source 1..75: mol_type = other DNA
ttgatgatagtgttgatagtttttgttatctttctgcaactgacgctgggcatcttttcaaaggcgatcttgcat

SEQ ID NO: 550853 - DNA, 75 bp, synthetic construct
  source 1..75: mol_type = other DNA
taaataattcttcagaacatatatactatttaaatgcgactgagattagcaatttaataaatggtgatgttgcat

SEQ ID NO: 550854 - DNA, 75 bp, synthetic construct
  source 1..75: mol_type = other DNA
cgtggggcgttgagcttttcggtgtcactaatcgttataccaaaatggcatttgcaaaagagctcggttccattc

SEQ ID NO: 550855 - DNA, 75 bp, synthetic construct
  source 1..75: mol_type = other DNA
ctcagtataggtctatttcaggggagatatcctctgataactttaatggattaaccattgttgggcaaaacaaca

SEQ ID NO: 550856 - DNA, 75 bp, synthetic construct
  source 1..75: mol_type = other DNA
agcggctgcgacgatggaaccccagaccgatatccgtgaccgcacaccgggcagactggcactgtccggcatgca

SEQ ID NO: 550857 - DNA, 75 bp, synthetic construct
  source 1..75: mol_type = other DNA
ccatgcgcgcggagcttgaactgaaagcggctgcgacgatggaaccccagaccgatatccgtgaccgcacacccg

SEQ ID NO: 550858 - DNA, 75 bp, synthetic construct
  source 1..75: mol_type = other DNA
tacgaaaaaccatctccaattcaggcggagtgtattccacatctgctgaatggccgcgacgtactgggtatggcc

SEQ ID NO: 550859 - DNA, 75 bp, synthetic construct
  source 1..75: mol_type = other DNA
ggaagattttgatgcggcgattattttcgttcgtaccaaaaacgcgactctggaagtggctgaagccctggaacg

SEQ ID NO: 550860 - DNA, 75 bp, synthetic construct
  source 1..75: mol_type = other DNA
ccaagacgatgatgatgacgatgatgactcgattattgaacttggtgttttaggggagcaagaagaacctagtaa

SEQ ID NO: 550861 - DNA, 75 bp, synthetic construct
  source 1..75: mol_type = other DNA
aaagatgaattaataccaacaagatttaataatattcaaagatatgaagtaaaaaaaatatctagatcatttatt

SEQ ID NO: 550862 - DNA, 75 bp, synthetic construct
  source 1..75: mol_type = other DNA
caaccgacgccacgggaactcattatcaaccatattcaggacatcctggcgcagtactacacagcctgtgaaggc

SEQ ID NO: 550863 - DNA, 75 bp, synthetic construct
  source 1..75: mol_type = other DNA
gcgttactggcgcgtgaactgggtattcgtcatgtcgataccgtttgtatttccagctacgatcacgacaaccag

SEQ ID NO: 550864 - DNA, 75 bp, synthetic construct
  source 1..75: mol_type = other DNA
aagcgggggaatattactctgtgcaggctgtttctatgtttacgacaaaccagtttattttcctttgtcctaagg

SEQ ID NO: 550865 - DNA, 75 bp, synthetic construct
  source 1..75: mol_type = other DNA
gataagagtgttaatttcaaagtgatagctgaactggctttcatgtcatattttatctttcttctgacaatgctt

SEQ ID NO: 550866 - DNA, 75 bp, synthetic construct
  source 1..75: mol_type = other DNA
atggctatggttgaaatgcaaaccactgcagcgctggcggaatcccgccgcaaaatgcaggcgcgtcgtcgcctc

SEQ ID NO: 550867 - DNA, 75 bp, synthetic construct
  source 1..75: mol_type = other DNA
tgaggtgttagcccgctggaaacaacctcacggtggatatatatcacccgcggcatttattccacttgctgaaaa

SEQ ID NO: 550868 - DNA, 75 bp, synthetic construct
  source 1..75: mol_type = other DNA
gtgctggaaaccctgctgggacaggcaaatgccgtggcctcgatgacgttcgataccagtgatgcggcgttatct

SEQ ID NO: 550869 - DNA, 75 bp, synthetic construct
  source 1..75: mol_type = other DNA
cattgatgcggtgaaatctgctattgataatggcgactggttcgacgcactcgacgggctgggtgacatggctga

SEQ ID NO: 550870 - DNA, 75 bp, synthetic construct
  source 1..75: mol_type = other DNA
gtggtgtttattaatgaggactgtttcatccacgatgcttctaacagtcagcgcatcaagcacatcattaatcaa

SEQ ID NO: 550871 - DNA, 75 bp, synthetic construct
  source 1..75: mol_type = other DNA
cattcatgatggcgatgtgctggtcgtcgatcgggcagaagaaccccggcacggcagcatcgtgattgccagcat

SEQ ID NO: 550872 - DNA, 75 bp, synthetic construct
  source 1..75: mol_type = other DNA
gttctggctgatctggattttaatgtccaccatcactcgcggtatcgatggtatgtcgctggcgctgttcactga

SEQ ID NO: 550873 - DNA, 75 bp, synthetic construct
  source 1..75: mol_type = other DNA
cggatcagaagtggcggcctgctgctgccggtattgctgcatatggaagctaccgcgctgggtttactgttgggc

SEQ ID NO: 550874 - DNA, 75 bp, synthetic construct
  source 1..75: mol_type = other DNA
aaatttatcatgtggggcatccttaccgctctggcgtatcacgtcgtcgtaggtattcgccacatgatgatggat

SEQ ID NO: 550875 - DNA, 75 bp, synthetic construct
  source 1..75: mol_type = other DNA
ctcactttccgtctgagctattttgcaaaagagcgaaccaaaagctactgccgcgcagaacgttcattcgggtgt

SEQ ID NO: 550876 - DNA, 75 bp, synthetic construct
  source 1..75: mol_type = other DNA
aataggaatagtggtctgatatcccgtttcattgaatcgcttaatgcaaaaatcgatgctcggtaccgaaataaa

SEQ ID NO: 550877 - DNA, 75 bp, synthetic construct
  source 1..75: mol_type = other DNA
ggttatacgggcggacgttccatgctgcgttactacatccagcccaaacgtaaaatgcgtccgtcaaaaagaaca

SEQ ID NO: 550878 - DNA, 75 bp, synthetic construct
  source 1..75: mol_type = other DNA
aaaacacgccacaaaatggccgaaatggactatatcgacatgcgtctggctgagaattgtcaacgacggatgaaa

SEQ ID NO: 550879 - DNA, 75 bp, synthetic construct
  source 1..75: mol_type = other DNA
aaaatgcgtccgtcaaaaagaacagttcgcttcgaaactcagccaggataccagctccagcacgactggggcgaa

SEQ ID NO: 550880 - DNA, 75 bp, synthetic construct
  source 1..75: mol_type = other DNA
cagattggttgctctgaacggacggtcagacgctacctcaaataccctgaaccgccagcagaaaaacccgccaca

SEQ ID NO: 550881 - DNA, 75 bp, synthetic construct
  source 1..75: mol_type = other DNA
cttagcctttgaatatggctattcaacgtctgcgcctcagcaactggttatttgggaagcacagtttggtgactt

SEQ ID NO: 550882 - DNA, 75 bp, synthetic construct
  source 1..75: mol_type = other DNA
ggtaatacaactgatcaatgcctggcgcacgcaggggcatctgcgcgcaaagcttgatccacttggtttgaatcc

SEQ ID NO: 550883 - DNA, 75 bp, synthetic construct
  source 1..75: mol_type = other DNA
tgggtaaacggggaggcataagcgtcaatgcctgtatgcagaccagtatccctgacatctacgccgtgggggatg

SEQ ID NO: 550884 - DNA, 75 bp, synthetic construct
  source 1..75: mol_type = other DNA
cttgccacaggagccgggctcgcagtgggtaaacggggaggcataagcgtcaatgcctgtatgcagaccagtatc

SEQ ID NO: 550885 - DNA, 75 bp, synthetic construct
  source 1..75: mol_type = other DNA
tcgtcacagcctttaccatggcagtcaggggacatccatttgtaaggtattttcgctgagtattggcagtgtcgg

SEQ ID NO: 550886 - DNA, 75 bp, synthetic construct
  source 1..75: mol_type = other DNA
ttaatgcaaagttactgggtaatagcttccaggacgatttaaacgcccttttagacgcgctcaatacccccggac

SEQ ID NO: 550887 - DNA, 75 bp, synthetic construct
  source 1..75: mol_type = other DNA
gcaaccaggtatctctccacagattaactatggtgatgctgttaatgttgatgcatttgaaaatggtcgtgcacc

SEQ ID NO: 550888 - DNA, 75 bp, synthetic construct
  source 1..75: mol_type = other DNA
taagccaattgatcgagggcgatacgcccgaaacgctacaacgctacctgcccgcaacgctgcagtttaggcatc

SEQ ID NO: 550889 - DNA, 75 bp, synthetic construct
  source 1..75: mol_type = other DNA
gtacgggcatcaatgagggcggtctgaaggtcggggacggaaccgttgtactgaaccagcaagcggacaataaag

SEQ ID NO: 550890 - DNA, 75 bp, synthetic construct
  source 1..75: mol_type = other DNA
actgtcagtgcaggcaaaagtaaacagcagttttgatggttactttaagacagatgcggaaggaatactgggtat

SEQ ID NO: 550891 - DNA, 75 bp, synthetic construct
  source 1..75: mol_type = other DNA
gggcgataacttgcataaaattggtgaaggtacgctgacggtacagggtacaggtattaatgaaggtggcctgaa

SEQ ID NO: 550892 - DNA, 75 bp, synthetic construct
  source 1..75: mol_type = other DNA
cgggagctgtctgaagattacactattcagggagagctgagtgacctgtccggcagggcaaaaagccatatcctg

SEQ ID NO: 550893 - DNA, 75 bp, synthetic construct
  source 1..75: mol_type = other DNA
aacgggggatatacaaacgttagctttggtgatggtgaaaaccgttacaatatcgtggaccggaatgatgcgccg

SEQ ID NO: 550894 - DNA, 75 bp, synthetic construct
  source 1..75: mol_type = other DNA
cagtggccggccgaccgtggtactgagtgatgagcggcaggtaaatccggataccgtctcatggggatatcgtgg

SEQ ID NO: 550895 - DNA, 75 bp, synthetic construct
  source 1..75: mol_type = other DNA
gatggcgatgccttgtggctgaaagccggggttgaggcagaaaaattatttggaaatatgacgctgaaggcaggt

SEQ ID NO: 550896 - DNA, 75 bp, synthetic construct
  source 1..75: mol_type = other DNA
atgaacagaatttattctcttcgctacagtgccgtagcccggggctttattgccgtctctgagtttaccagaaaa

SEQ ID NO: 550897 - DNA, 75 bp, synthetic construct
  source 1..75: mol_type = other DNA
tcccttgtgacagacaactggtcgccgaaaacgctgacggtaaacacactgcacgccagcagtatgaatatcgcc

SEQ ID NO: 550898 - DNA, 75 bp, synthetic construct
  source 1..75: mol_type = other DNA
aaactggtagctgaccgtttcaatactgcagggtatctgtttcacggacaactgaaaggcaatctgaatgtggac

SEQ ID NO: 550899 - DNA, 75 bp, synthetic construct
  source 1..75: mol_type = other DNA
gggaagacgacactggatatcatgaacgcaacctttaatggtgatatcagcggtcatgccagctctcatgtagag

SEQ ID NO: 550900 - DNA, 75 bp, synthetic construct
  source 1..75: mol_type = other DNA
ttcgatcgccacatgaacggcagcacattgccattggtcattactgactcagtttctcccaccgccaccctggtg

SEQ ID NO: 550901 - DNA, 75 bp, synthetic construct
  source 1..75: mol_type = other DNA
ctgtggctgcctctgctgcagtatccggttctgcgatggcgtggactgcaaacggcactggtggttctgttgaac

SEQ ID NO: 550902 - DNA, 75 bp, synthetic construct
  source 1..75: mol_type = other DNA
acatcacaatcacccttgatcaagctgtaacaggtgatactcagattcagtggaaagcatccctgccggtgactg

SEQ ID NO: 550903 - DNA, 75 bp, synthetic construct
  source 1..75: mol_type = other DNA
cgaaaccgcctggacggatgataacggggccgttccggggcaacagcagattaacgcaaagctgccaggtaaaaa

SEQ ID NO: 550904 - DNA, 75 bp, synthetic construct
  source 1..75: mol_type = other DNA
gatatttcttggattatacgatgacatatctctagccgttaatgccagaaaattggcggaatcacgattggggta

SEQ ID NO: 550905 - DNA, 75 bp, synthetic construct
  source 1..75: mol_type = other DNA
atggtgataaaatataaaaataatattttaattcgtttcgcaaataaaatcattaataaggttaagtgctatttt

SEQ ID NO: 550906 - DNA, 75 bp, synthetic construct
  source 1..75: mol_type = other DNA
agcaatatccggttctgccatggcgtggactccgaatggcaacggtggttctgttcaactgagcggcatgttgac

SEQ ID NO: 550907 - DNA, 75 bp, synthetic construct
  source 1..75: mol_type = other DNA
acctttgacaggctgtcactgaagaacaccgattttggccttggtcgtaatgccacgctgaacaccatgcttgag

SEQ ID NO: 550908 - DNA, 75 bp, synthetic construct
  source 1..75: mol_type = other DNA
gatgactggaaagcccgtcactatgatgcagagaaggctgaccgctataccgtttcgtttggtatcaacggaaag

SEQ ID NO: 550909 - DNA, 75 bp, synthetic construct
  source 1..75: mol_type = other DNA
tatctacttcgttgctggttggcgctgaatattcttatactgggccaagtaatggtaagtatgtaatggtggcat

SEQ ID NO: 550910 - DNA, 75 bp, synthetic construct
  source 1..75: mol_type = other DNA
aacagcacaatcaagattacccttgatcaggcagcttccggtgatgctccaatcaaatggaaatcaaacctgccg

SEQ ID NO: 550911 - DNA, 75 bp, synthetic construct
  source 1..75: mol_type = other DNA
ctgtggctgcatctgcggcagtatctggctccgctatggcatggactgcaaacggtactggtggtaacgttgaga

SEQ ID NO: 550912 - DNA, 75 bp, synthetic construct
  source 1..75: mol_type = other DNA
ccaaggggatattgctgaggttagcggtagctccgggcgaaccatacgtttagcccagtcagaacgcgtcttttt

SEQ ID NO: 550913 - DNA, 75 bp, synthetic construct
  source 1..75: mol_type = other DNA
tgggacagtattcgcgcgcgtgtcctgaagcgtgacaaaggcctgtgtcagttatgtctgcgtgctggtgtggtg

SEQ ID NO: 550914 - DNA, 75 bp, synthetic construct
  source 1..75: mol_type = other DNA
atgccatcacgaatcccccgcgcatgccgtaagcgaggttgcgcaggcacaacaacagacagctctggctactgc

SEQ ID NO: 550915 - DNA, 75 bp, synthetic construct
  source 1..75: mol_type = other DNA
aaggccagttgatgaatttgaggcataacagacaacacagcaatgccgcaatgccgcaatgccgcaatgccgcaa

SEQ ID NO: 550916 - DNA, 75 bp, synthetic construct
  source 1..75: mol_type = other DNA
tcctcgaccagttgcgtcgcacgctaaatgcggcctgggtgcatatggccgataaacacgcggaaacggccaata

SEQ ID NO: 550917 - DNA, 75 bp, synthetic construct
  source 1..75: mol_type = other DNA
cgcttacggtttcttgctgaagcagctgcttaccgtgaagcgtggccggggcatgatggcggcgtggtactgata

SEQ ID NO: 550918 - DNA, 75 bp, synthetic construct
  source 1..75: mol_type = other DNA
tgaagcgtgataatcatctgtgtcagaactgcctgcgcaatgggagagccgttgaagccagaactgtggaccaca

SEQ ID NO: 550919 - DNA, 75 bp, synthetic construct
  source 1..75: mol_type = other DNA
gataaacatcggggtgaaggctgggtgcagcaccagcgcggactgagccgccatcagcgtggctatggctcaaaa

SEQ ID NO: 550920 - DNA, 75 bp, synthetic construct
  source 1..75: mol_type = other DNA
gttgtgcctgcgtgccggtgtggtgcgtgaagcgaaaaccgttgaccacatcatccctaaagcgcatggcggcac

SEQ ID NO: 550921 - DNA, 75 bp, synthetic construct
  source 1..75: mol_type = other DNA
gccgcgttcgcggctgccgcaataccacgactgacccgtcaggctactgcgaaagccacaaaagcgaaggctgga

SEQ ID NO: 550922 - DNA, 75 bp, synthetic construct
  source 1..75: mol_type = other DNA
aaccacagacccgtcaggctactgcgaaagccacaaaagcgaaggctggaagcagtacaaacctagacaatcccg

SEQ ID NO: 550923 - DNA, 75 bp, synthetic construct
  source 1..75: mol_type = other DNA
tggcaattgccaatgttcattttgatgaatatctattggtcagaaaaaatttattgataagttctaaatcgatta

SEQ ID NO: 550924 - DNA, 75 bp, synthetic construct
  source 1..75: mol_type = other DNA
tactttcccaatggagtaagccgctccgcgctgctcaaggcaccggtggtggcgtttgaccatcttgacgatatg

SEQ ID NO: 550925 - DNA, 75 bp, synthetic construct
  source 1..75: mol_type = other DNA
cattgatcgtcagtggcctgctcgttggctgtaatcaactcacccaatacaccatcaccgaacaagaaattaacc

SEQ ID NO: 550926 - DNA, 75 bp, synthetic construct
  source 1..75: mol_type = other DNA
aacttgctgccgccatgaagcagattaaagaactccagcgtctgctcggcaaaaaaacgatggaaaatgaactcc

SEQ ID NO: 550927 - DNA, 75 bp, synthetic construct
  source 1..75: mol_type = other DNA
aattcagtatctttagctaatcatcactctaaagccgcacatttggcctttgagcagttaaactacattgatgat

SEQ ID NO: 550928 - DNA, 75 bp, synthetic construct
  source 1..75: mol_type = other DNA
gccgaaggggttgacgagatcatcgtgctggatacccataacgataatccgccggataacgacaactggcatacc

SEQ ID NO: 550929 - DNA, 75 bp, synthetic construct
  source 1..75: mol_type = other DNA
gcagtaagggcgaagcaatggcgaagaaactggcgaaaggtattgaagtgaagcctggtgaaattgtcattccgt

SEQ ID NO: 550930 - DNA, 75 bp, synthetic construct
  source 1..75: mol_type = other DNA
cctgcttacgtcctgcgcgaagatggcagccagggcgaagcaatggcgaaaaaactggcgaaaggcattgaagtg

SEQ ID NO: 550931 - DNA, 75 bp, synthetic construct
  source 1..75: mol_type = other DNA
ccgtctcacagcgcattaagcaactggaaaatatgttcgggcagccgctgttggtgcgtaccgtaccgccgcgcc

SEQ ID NO: 550932 - DNA, 75 bp, synthetic construct
  source 1..75: mol_type = other DNA
ccagaaagccgcatgatgcgtaaagtcactgatgctttactagactatggtcacaaagtacttcgtcaggattaa

SEQ ID NO: 550933 - DNA, 75 bp, synthetic construct
  source 1..75: mol_type = other DNA
tcgatctgccgccaggtagcgtaccgtgccatatcgttaactcgtctgaagccttcgttcaactcgctcgccagg

SEQ ID NO: 550934 - DNA, 75 bp, synthetic construct
  source 1..75: mol_type = other DNA
ttagttccttagctctgttcccattaggtcaaagattattcaatttttttgacctaaatcagttagcccgaagtg

SEQ ID NO: 550935 - DNA, 75 bp, synthetic construct
  source 1..75: mol_type = other DNA
aggaaaacaagccatttcagaatgtagagttaattcccatgaaaatgccccatcgttatttctacctctttgtga

SEQ ID NO: 550936 - DNA, 75 bp, synthetic construct
  source 1..75: mol_type = other DNA
ctactgagcaagggcaaaaactgctggcactgcttcgccaggttgagttgctggaagaggagtggctgggcgatg

SEQ ID NO: 550937 - DNA, 75 bp, synthetic construct
  source 1..75: mol_type = other DNA
ttcgcggctgccgtaataccactacagacccgtcaggctactgcgaaagccacaaaagcgaaggctggaagcaat

SEQ ID NO: 550938 - DNA, 75 bp, synthetic construct
  source 1..75: mol_type = other DNA
cgcttaatggacattatccctataccgagaaggttcactccacaaaatatcatttcactattatctttaacccgc

SEQ ID NO: 550939 - DNA, 75 bp, synthetic construct
  source 1..75: mol_type = other DNA
ctgctgcttttttgtttgataaatattttaacaagagtgacacacctgaagagatcctgcgtagagcaataagca

SEQ ID NO: 550940 - DNA, 75 bp, synthetic construct
  source 1..75: mol_type = other DNA
cacctgaatatatttcaggcttctccggactggaggaagatattcgccatcagttactggatgagcagaaaatga

SEQ ID NO: 550941 - DNA, 75 bp, synthetic construct
  source 1..75: mol_type = other DNA
aatgttcttaatgcttcaggcggatctcgttccgtttatccagtaatgtcggatgacatgaatggtttatcctag

SEQ ID NO: 550942 - DNA, 75 bp, synthetic construct
  source 1..75: mol_type = other DNA
tcaaaatattgggtcatggaagattcttcaggaacggtaattgccaatacctctgtcgtaaaagaatggagtgat

SEQ ID NO: 550943 - DNA, 75 bp, synthetic construct
  source 1..75: mol_type = other DNA
ggaaaatgaactccttaaagaagccgttgaatatgggcgtgcaaaaaagtggataacgcacgcgcccttattgcc

SEQ ID NO: 550944 - DNA, 75 bp, synthetic construct
  source 1..75: mol_type = other DNA
cccggacttttctttgcttatatagtggcatatagtggcttcggaattttatctattggtatgattatttatctt

SEQ ID NO: 550945 - DNA, 75 bp, synthetic construct
  source 1..75: mol_type = other DNA
cccggactcttcttcgcttatatggtggcatatatcggcttcggaattttatctatcggcatgattgtttatctt

SEQ ID NO: 550946 - DNA, 75 bp, synthetic construct
  source 1..75: mol_type = other DNA
ctaatggattacctgaatattattgtcaccgtggtaacgacataaaagatgcgatagttcgggattttactattc

SEQ ID NO: 550947 - DNA, 75 bp, synthetic construct
  source 1..75: mol_type = other DNA
agcggttaacattgccgggaaggaatgcgacctcgaggagcaatatcagcttggcactgaagcagctctgaaacc

SEQ ID NO: 550948 - DNA, 75 bp, synthetic construct
  source 1..75: mol_type = other DNA
tgcaaatgaaaatgtcgccggggctcaaaacgtaggtgtagttatattttccattctggacccggccaatacatt

SEQ ID NO: 550949 - DNA, 75 bp, synthetic construct
  source 1..75: mol_type = other DNA
tgaaaaaaacaggtttgtttttgtctttaatattgtccacggcctctcccgctattgccggcatggatattgata

SEQ ID NO: 550950 - DNA, 75 bp, synthetic construct
  source 1..75: mol_type = other DNA
cagactgtgcattacagggaactggcgatgtgcttaatcagttacatattgattttagagcccttagcggtgtca

SEQ ID NO: 550951 - DNA, 75 bp, synthetic construct
  source 1..75: mol_type = other DNA
tgatgccgacagcaatctgcagagcctgtgctggccgtgtcataaggcgaagacggcccgtgaacggctgaagta

SEQ ID NO: 550952 - DNA, 75 bp, synthetic construct
  source 1..75: mol_type = other DNA
gtggtgcgtgaggcgaaaaccgttgaccacatcatccctaaagcgcatggcggcactgatgccgactgtaatctg

SEQ ID NO: 550953 - DNA, 75 bp, synthetic construct
  source 1..75: mol_type = other DNA
gaaagccacaaaagtgaaggctggaagcaatacaagccgggccagtccagacaccagcgcggttatggttcgaaa

SEQ ID NO: 550954 - DNA, 75 bp, synthetic construct
  source 1..75: mol_type = other DNA
atgccaccacgaatcccaaaggcctgccgtgttcgcggctgccgctctataaccacagacccgtcaggttattgc

SEQ ID NO: 550955 - DNA, 75 bp, synthetic construct
  source 1..75: mol_type = other DNA
agcaatacaaacctggacaatcccgtcatcagcgcggctacggttcgaagtgggacagtatccgcgcgcgtgtcc

SEQ ID NO: 550956 - DNA, 75 bp, synthetic construct
  source 1..75: mol_type = other DNA
tcaaacacgcatattttactgaaagccgaaacaatgtatcgcctgcttttatcagtcagcaggcgatatctctca

SEQ ID NO: 550957 - DNA, 75 bp, synthetic construct
  source 1..75: mol_type = other DNA
atttaagtggaaaaaacaatacctggaaggaagtctcactgctgttgctgccggagaggatgtcgttcctgcctc

SEQ ID NO: 550958 - DNA, 75 bp, synthetic construct
  source 1..75: mol_type = other DNA
cttctgccctgcataattcttcatggaaattttatgccagaatgcaaaaatcgatcccgcgctggatgtcatatc

SEQ ID NO: 550959 - DNA, 75 bp, synthetic construct
  source 1..75: mol_type = other DNA
gattttagagcccttagcggtgtcatggctgcaggttcaaggcaaatatttgccaatgaagtcgcaaccggggct

SEQ ID NO: 550960 - DNA, 75 bp, synthetic construct
  source 1..75: mol_type = other DNA
ttctgaagggcaatggttcggggcgctcgggctcacccgaacccgaaacgcatcacgttattataactggtctca

SEQ ID NO: 550961 - DNA, 75 bp, synthetic construct
  source 1..75: mol_type = other DNA
agcaatacaaaccaggcctgtcacgtcatcagcgcggttacggttcgaagtgggataccatccgtgaacgtgtgc

SEQ ID NO: 550962 - DNA, 75 bp, synthetic construct
  source 1..75: mol_type = other DNA
caccttgagcgctgggagttattcagcatttcgtacagatgatttattttaccgtcgtgatttgtctaatacaac

SEQ ID NO: 550963 - DNA, 75 bp, synthetic construct
  source 1..75: mol_type = other DNA
tgtaccgatcattgatgcgctgccgtgatggcttcatgcaggggagaagcaggcgcaatgagcgccagcctgtgc

SEQ ID NO: 550964 - DNA, 75 bp, synthetic construct
  source 1..75: mol_type = other DNA
ccaacgttagatctgaattattatcacgatccccatgcgacggaaattgaagaagatggcagcactatcagtgac

SEQ ID NO: 550965 - DNA, 75 bp, synthetic construct
  source 1..75: mol_type = other DNA
acatcagtgatggcaccgttttgcgcctgacgagtcaggatacttccgccgcactggatgcctcgctgtttaacg

SEQ ID NO: 550966 - DNA, 75 bp, synthetic construct
  source 1..75: mol_type = other DNA
acggttatcggcagtcaggatgtggtagatcttgcaggcggaaacgatatgcatatcggcggcgacgggaaagat

SEQ ID NO: 550967 - DNA, 75 bp, synthetic construct
  source 1..75: mol_type = other DNA
ggaaccaaagtcggggctctgcgggcgcgcgcactctggctgaaatgctgactcaaaacggcgtcccgatgaacc

SEQ ID NO: 550968 - DNA, 75 bp, synthetic construct
  source 1..75: mol_type = other DNA
gaaacccgtggtaagcccggcggggtgatgttccacagcgatcagggcagtcattatacgagcaggcagttccgg

SEQ ID NO: 550969 - DNA, 75 bp, synthetic construct
  source 1..75: mol_type = other DNA
acggtgtcgcggcggccattgattcatgtcagggatatgatatcaaagcgagttgtcacgccagcaggcaaagcc

SEQ ID NO: 550970 - DNA, 75 bp, synthetic construct
  source 1..75: mol_type = other DNA
ggacgctggtgaatgccaccgatggcgtgacgttgacaggtgagcttaataccaaccttgaaactgacagcctga

SEQ ID NO: 550971 - DNA, 75 bp, synthetic construct
  source 1..75: mol_type = other DNA
ggcgggtacgctggagctgaccgccagcggtacaacgcagtcggcggtacgtgtcgaagaaggcaccctgaaagg

SEQ ID NO: 550972 - DNA, 75 bp, synthetic construct
  source 1..75: mol_type = other DNA
acggttatgccgttgggctgacctcaagctggtatcagcacggtaatcagaagccgggtatcagtggttaccggg

SEQ ID NO: 550973 - DNA, 75 bp, synthetic construct
  source 1..75: mol_type = other DNA
agtcagcggcagcagcggaacggttatcggcagtcaggatgtggtagatcttgcaggcggaaacaatatgcatat

SEQ ID NO: 550974 - DNA, 75 bp, synthetic construct
  source 1..75: mol_type = other DNA
cagggattggtgagccgacatcgacaggcattaaagtggttgatttcgcagctgatcccacgcagtttcaaaaca

SEQ ID NO: 550975 - DNA, 75 bp, synthetic construct
  source 1..75: mol_type = other DNA
cacgcagtggggcgcactgatggctgacagcagcgggcagcatcaggatgagggtagcacattgacgaaaacggg

SEQ ID NO: 550976 - DNA, 75 bp, synthetic construct
  source 1..75: mol_type = other DNA
tcaggcagagtatgagccggcgcggaaattgctgggataacagcccaatggaacgcctcttcagaagtctgaaga

SEQ ID NO: 550977 - DNA, 75 bp, synthetic construct
  source 1..75: mol_type = other DNA
atgaagaaattattggtaaccgtaaagccttttcagggaacaattccgttccgtattttgcagcgtggtcgtgtt

SEQ ID NO: 550978 - DNA, 75 bp, synthetic construct
  source 1..75: mol_type = other DNA
atgctgctagttgggcaactggtctttctgctccaaattataacagagaccagttatagtttcggtgctgtgttt

SEQ ID NO: 550979 - DNA, 75 bp, synthetic construct
  source 1..75: mol_type = other DNA
tatttacagtcgcaagattattgctgcagaggtatttgccagcgaatctggaaaacatgcagcagaactactcca

SEQ ID NO: 550980 - DNA, 75 bp, synthetic construct
  source 1..75: mol_type = other DNA
atgaaaatagaaaaagcgaaagtacagctcaggataatgcttgctggtccggctgcgagttatatgacacattcg

SEQ ID NO: 550981 - DNA, 75 bp, synthetic construct
  source 1..75: mol_type = other DNA
atgtcactgatgcaattgttagtcaggatctcatggttgtcgctcatgtataacctgagacttgaacgcacacta

SEQ ID NO: 550982 - DNA, 75 bp, synthetic construct
  source 1..75: mol_type = other DNA
gctgcccatgaaataacggactatatcgttgggtattacaacgcgctcaggccgcacgaatataacggtgggttg

SEQ ID NO: 550983 - DNA, 75 bp, synthetic construct
  source 1..75: mol_type = other DNA
tcaggcagagtatgagtcggcgtggaaactgctgggataacagcccaatggagcgcttcttcaggccagatatag

SEQ ID NO: 550984 - DNA, 75 bp, synthetic construct
  source 1..75: mol_type = other DNA
gttgttctcgacctgttcgcaagaaaaccagtgggctgggccatgtcgttctcgccggacagcaggctcaccatg

SEQ ID NO: 550985 - DNA, 75 bp, synthetic construct
  source 1..75: mol_type = other DNA
ctatccctaattaccttgaacggcagttcgccgtaccaggccaaatcaggtgtggtgcggtgatgttacctatat

SEQ ID NO: 550986 - DNA, 75 bp, synthetic construct
  source 1..75: mol_type = other DNA
ggcaggctctgtggcgctgtcggataaagcagagtatgagtcgacggggtaactgctgggataatgccccgatgg

SEQ ID NO: 550987 - DNA, 75 bp, synthetic construct
  source 1..75: mol_type = other DNA
cccgatccggacccgactccagatcctgatcccacgccggatcccgacccaacccccgaccctggacctacgcct

SEQ ID NO: 550988 - DNA, 75 bp, synthetic construct
  source 1..75: mol_type = other DNA
atgaaatcaacggccatatgcagatgatcaaaggtggcggcgcggcgctgacccgtgaaaaaatcatcgcttcag

SEQ ID NO: 550989 - DNA, 75 bp, synthetic construct
  source 1..75: mol_type = other DNA
aagttatcccgatggcacgtagtgcagtggcgcgtcagctggtgaaactgggcggtcgtccggaataccgtcagg

SEQ ID NO: 550990 - DNA, 75 bp, synthetic construct
  source 1..75: mol_type = other DNA
tcagacagagtatgagccggcgcggaaactgctgggataacagcccaatggaacgcttcttcaggagtctgaaga

SEQ ID NO: 550991 - DNA, 75 bp, synthetic construct
  source 1..75: mol_type = other DNA
cacagaacgcgcagattgcggttgggcaacttggtggtacaccttccgtcgataagcaggcgctcaacgccacca

SEQ ID NO: 550992 - DNA, 75 bp, synthetic construct
  source 1..75: mol_type = other DNA
agaacgaatggatgccggtggtgggttacgtaagcttcagcgaggcagctcacgccataacggacgatatcgttg

SEQ ID NO: 550993 - DNA, 75 bp, synthetic construct
  source 1..75: mol_type = other DNA
tcagacagagtatgagccggcgcggaaactgctgggataacagcccaatggaacgcttcttcaggagtagactgg

SEQ ID NO: 550994 - DNA, 75 bp, synthetic construct
  source 1..75: mol_type = other DNA
ttcctggtttcgctgactccgcccccgtagaacgcctgatcacccatgaaaaacttgcgtttatgacggaaaagt

SEQ ID NO: 550995 - DNA, 75 bp, synthetic construct
  source 1..75: mol_type = other DNA
ggatctggcgattgccgccggggaagccgcagcaaaaaccgtgctttcagcgatgaaaagcgacgatttcagtaa

SEQ ID NO: 550996 - DNA, 75 bp, synthetic construct
  source 1..75: mol_type = other DNA
ctgtcgctggggctggtttgtggtctgcatcatctgcatgacgcaaaaaaatcggtgccgcaaatgctggaagat

SEQ ID NO: 550997 - DNA, 75 bp, synthetic construct
  source 1..75: mol_type = other DNA
tacttgagctacatggcatcagccacggttcggccggagcaagaagcatcgccacaatggcaacccggagaggct

SEQ ID NO: 550998 - DNA, 75 bp, synthetic construct
  source 1..75: mol_type = other DNA
aaagggctggtgaaacgtaaagaacaaggtaatgaatccccgctgaacatcatcgcctgtgaaaacatggtacgc

SEQ ID NO: 550999 - DNA, 75 bp, synthetic construct
  source 1..75: mol_type = other DNA
ctttataccaatgaaaataccctgtcgctggggctggtttgtggtctgcatcatctgcatgacgcgaaaaaatcg

SEQ ID NO: 551000 - DNA, 75 bp, synthetic construct
  source 1..75: mol_type = other DNA
gaaaaagacaacatcatgtcggtgtttgccactgttggttctggccccggggtaacgggcaaaacgtggcgcgaa

SEQ ID NO: 551001 - DNA, 75 bp, synthetic construct
  source 1..75: mol_type = other DNA
gccgacatctacaggtattaaagtagttgatttcgcagctgatcccgcgcagtttcaaaacaatgcgcagttcag

SEQ ID NO: 551002 - DNA, 75 bp, synthetic construct
  source 1..75: mol_type = other DNA
gcaccatcgaaggtgctggtcagctcaccattgcgcaaaacggcagctacgtgctgtcgggggcgcagtcgatgg

SEQ ID NO: 551003 - DNA, 75 bp, synthetic construct
  source 1..75: mol_type = other DNA
tagggagtattgataagtaccagaatcaggcagagctaaacgttggctccacccaacaaacctttgtgcactcat

SEQ ID NO: 551004 - DNA, 75 bp, synthetic construct
  source 1..75: mol_type = other DNA
cggcagcgtcgcatggcagaagggaagtgatgattttgcccagacggcaggatttttgtcgatgacggtgaaatg

SEQ ID NO: 551005 - DNA, 75 bp, synthetic construct
  source 1..75: mol_type = other DNA
gagaatataataacggcggggccatatttgctaaagaaaactcaacgctgaatcttactgatgttattttttccg

SEQ ID NO: 551006 - DNA, 75 bp, synthetic construct
  source 1..75: mol_type = other DNA
attttaccgccgctaaccgtgcgcgggtgtcgcaatcgcagggcgatgatattcagacgcgtgtcgggatacata

SEQ ID NO: 551007 - DNA, 75 bp, synthetic construct
  source 1..75: mol_type = other DNA
tcaacctgtggtatgtgcgtaacaaagacggtgggatggtgcccttctctgccttcgcgacctctcgctgggaga

SEQ ID NO: 551008 - DNA, 75 bp, synthetic construct
  source 1..75: mol_type = other DNA
ccatcgtggtggtggaaaacgttgaacgtattatgagtgaggaagggctcactcctcgcgaagcgacgcgcaaat

SEQ ID NO: 551009 - DNA, 75 bp, synthetic construct
  source 1..75: mol_type = other DNA
gtgaatcaggacggctcagaggtaaggctgggcgatgtcgccaccgtcgaaatgggggcggagaaatacgattat

SEQ ID NO: 551010 - DNA, 75 bp, synthetic construct
  source 1..75: mol_type = other DNA
gcattgatggccgacagcagtggacagcaccaggacgcgggaaccacactgacgaaaaccggtgcaggcacgctg

SEQ ID NO: 551011 - DNA, 75 bp, synthetic construct
  source 1..75: mol_type = other DNA
gcaagaagaacgccaccattgccacctgatccagaccctgacccaacacccgatccaatccccgcttaccagccg

SEQ ID NO: 551012 - DNA, 75 bp, synthetic construct
  source 1..75: mol_type = other DNA
cgttgatgatggtgcggtgctttcactggaaggcgacgcggcagatcttgccgctctccaggacgatccgcagtc

SEQ ID NO: 551013 - DNA, 75 bp, synthetic construct
  source 1..75: mol_type = other DNA
tcaccctgttactgagcgccgctgccgtgcaggcctccaccctgaatgagattgagcgactctggaatccgcagg

SEQ ID NO: 551014 - DNA, 75 bp, synthetic construct
  source 1..75: mol_type = other DNA
tagaacaaagtcgacatctaatactattgagttggccacgccaatcagtgaattaataattggtgttctgaatat

SEQ ID NO: 551015 - DNA, 75 bp, synthetic construct
  source 1..75: mol_type = other DNA
gtttgcgaattaaagggggaatgctctgagtcgaaatcagagtctgtaaaaccagtagccacaaaaagtgtccat

SEQ ID NO: 551016 - DNA, 75 bp, synthetic construct
  source 1..75: mol_type = other DNA
ccgtggtgctcatgtccctctgcctggccacacaggcttccacaatggacgagatcaaatcgttatggcatccac

SEQ ID NO: 551017 - DNA, 75 bp, synthetic construct
  source 1..75: mol_type = other DNA
ttacagggcgcatcagatgctgccggttttatggcgcggatggataccgttctgcagatgtacggaggaaaaaaa

SEQ ID NO: 551018 - DNA, 75 bp, synthetic construct
  source 1..75: mol_type = other DNA
gcggctggatgaagccgaagcgtcggcgcgtagcgggattgaagtcttgtcgtcttatcagccacagcaacagct

SEQ ID NO: 551019 - DNA, 75 bp, synthetic construct
  source 1..75: mol_type = other DNA
cagccagcggcgcacgttatgccatcgccagccgtcgctttgtttcggcagaacaactgccgctgatggcgctgg

SEQ ID NO: 551020 - DNA, 75 bp, synthetic construct
  source 1..75: mol_type = other DNA
atgcacaataaaaccacaccggacgcagcagaagaagcaatgcaaatactgatacgtgcgctcgttgatgttacc

SEQ ID NO: 551021 - DNA, 75 bp, synthetic construct
  source 1..75: mol_type = other DNA
gccaaaaactcgctgataaaagttacagacatccttaatgaggacattaaaagaataagggagaaaatttgtgat

SEQ ID NO: 551022 - DNA, 75 bp, synthetic construct
  source 1..75: mol_type = other DNA
aaatcccgcctcaagcgcgtttttaacgatgtatatgtacagcttgatgcaatctatgaccctgaaagtgtagag

SEQ ID NO: 551023 - DNA, 75 bp, synthetic construct
  source 1..75: mol_type = other DNA
cccgtatatccgttacccgatacagccgggtgatcgaggagtaacaatttccgctgatgtatccctgcgcggtgt

SEQ ID NO: 551024 - DNA, 75 bp, synthetic construct
  source 1..75: mol_type = other DNA
atgtcaaacgctcaaaaattaccgtttctccgaacgctgtcggagatgatgaccagttctggtaaccagcaagcc

SEQ ID NO: 551025 - DNA, 75 bp, synthetic construct
  source 1..75: mol_type = other DNA
cacaccatcgctcaccttgtgcgccagggatatctggttatagcctgcggcggcggcggtatacctgtggtgcga

SEQ ID NO: 551026 - DNA, 75 bp, synthetic construct
  source 1..75: mol_type = other DNA
ctgaacagctggccggataacgttaatctggataaagcccgtcgattgctgtggccagtcaagaaaaaatacggc

SEQ ID NO: 551027 - DNA, 75 bp, synthetic construct
  source 1..75: mol_type = other DNA
gatcgccagtcaaacctggcgcgatcattcggtggatttattgctctcgctgctggtgcaaagtctgacagggtt

SEQ ID NO: 551028 - DNA, 75 bp, synthetic construct
  source 1..75: mol_type = other DNA
gagcaggccatccgctcactgatgcgggaaatggagctggaagggcgcggcattgtcagtcatctcgaatggcga

SEQ ID NO: 551029 - DNA, 75 bp, synthetic construct
  source 1..75: mol_type = other DNA
ttttttgttaatctgctggatatgtcaacacgatggagtaaagcagataaagaagatacatacaatggattcgat

SEQ ID NO: 551030 - DNA, 75 bp, synthetic construct
  source 1..75: mol_type = other DNA
ttcgatctgttcctgaaaaacgacgccatgcacgatccgatggtcaacgaatcttactgcgaaacctttggctgg

SEQ ID NO: 551031 - DNA, 75 bp, synthetic construct
  source 1..75: mol_type = other DNA
gataccgaatgtctggtgaaaaagctggatatggtaccggttgagtgtgtcgtgcgtaaccgtgctgctggctct

SEQ ID NO: 551032 - DNA, 75 bp, synthetic construct
  source 1..75: mol_type = other DNA
ctggagaagttcttcgacctagtggatcacagacccctgatgacgcgtctggccagaacgataaaggacaggcgg

SEQ ID NO: 551033 - DNA, 75 bp, synthetic construct
  source 1..75: mol_type = other DNA
gatgtcgatgaaagatatcggcattatggatggcgacttgctggctgtgcataaaactcaggacgtacgtaatgg

SEQ ID NO: 551034 - DNA, 75 bp, synthetic construct
  source 1..75: mol_type = other DNA
ccgattgtcgttgaccttcgtcagcagagcttcactattgaagggctggcagttggggttattcgcaacggtgac

SEQ ID NO: 551035 - DNA, 75 bp, synthetic construct
  source 1..75: mol_type = other DNA
gtaatgttgcccttgaatccatgggatttaaaacgctgggatttgctggcggaagagaagatgactgggagtcgg

SEQ ID NO: 551036 - DNA, 75 bp, synthetic construct
  source 1..75: mol_type = other DNA
gtgccggtggcgaacattttgcccgcagacggtattgacccgcaggcggcagcattgattgaacctttcgctatt

SEQ ID NO: 551037 - DNA, 75 bp, synthetic construct
  source 1..75: mol_type = other DNA
tgttaacccaccgctatccgttcgccacgctggcagaaacctacgagcgcgatgtgattaacaatcgtgagttga

SEQ ID NO: 551038 - DNA, 75 bp, synthetic construct
  source 1..75: mol_type = other DNA
cttatggcaccaaccagaaattcgtcaagttggctctggatcccgctcaaagaggatgcggatgacgatagcgaa

SEQ ID NO: 551039 - DNA, 75 bp, synthetic construct
  source 1..75: mol_type = other DNA
cccgtagagatctttttgaacgtattaactctggcagcgatatattgaaagatatggaagtccgtaaaggatcag

SEQ ID NO: 551040 - DNA, 75 bp, synthetic construct
  source 1..75: mol_type = other DNA
tgctgcgctgattgcgcaatcgtataccgactcgttaaccgggctaccgaatcggcgggcgatttttgaaaacct

SEQ ID NO: 551041 - DNA, 75 bp, synthetic construct
  source 1..75: mol_type = other DNA
attaatcaatgatcgttttggtcataatagtggcgatctgtttctcattcaggttggcgagcgccttaatacgct

SEQ ID NO: 551042 - DNA, 75 bp, synthetic construct
  source 1..75: mol_type = other DNA
gacctaaccaaacacaccgatgtgattttgaaaaaatcgtatgaagtgatgcatggtgagctggggagtgcggat

SEQ ID NO: 551043 - DNA, 75 bp, synthetic construct
  source 1..75: mol_type = other DNA
acaatctgacattacgcgataaagacggcttaattctcgctgggttaagtcatgccgtcagcggtaagggcagca

SEQ ID NO: 551044 - DNA, 75 bp, synthetic construct
  source 1..75: mol_type = other DNA
aaccatttcccagcaggctttaagaaaactatcactgcaaaatctacacctcgagttagatttgaatctctcgct

SEQ ID NO: 551045 - DNA, 75 bp, synthetic construct
  source 1..75: mol_type = other DNA
ctccattcatccgcgctcatgactcctctgattgagagcaatacactggacataaaaaaccccatactgtattgg

SEQ ID NO: 551046 - DNA, 75 bp, synthetic construct
  source 1..75: mol_type = other DNA
gcgcttggtgtgctaagttcttattcccggccaagagtcagcaatgataatccttactcagaatctttgtttcgg

SEQ ID NO: 551047 - DNA, 75 bp, synthetic construct
  source 1..75: mol_type = other DNA
ttacacgttgttggcgaaaatgtatgcgcttggtgtgctaagttcttattcccggccaagagtcagcaatgataa

SEQ ID NO: 551048 - DNA, 75 bp, synthetic construct
  source 1..75: mol_type = other DNA
catcttaaccataagataatgatcgcgtttatcgatctggataacttcaaattaatcaatgatcgttttggtcat

SEQ ID NO: 551049 - DNA, 75 bp, synthetic construct
  source 1..75: mol_type = other DNA
aatatgatgttggtaatatcgacgcggtgatggaagcagataccagcaccgcgccgggggttatctggccagttc

SEQ ID NO: 551050 - DNA, 75 bp, synthetic construct
  source 1..75: mol_type = other DNA
ctgcagagctgctctgtcgacctgaatctcgttaccccgaacgcgacagtgaacagagcaggaatgctagcaaac

SEQ ID NO: 551051 - DNA, 75 bp, synthetic construct
  source 1..75: mol_type = other DNA
cagaatggggggcggaagttatctggatcgaaaacgtcgcctgggccgacaccattcgcgttcaaccgaactacc

SEQ ID NO: 551052 - DNA, 75 bp, synthetic construct
  source 1..75: mol_type = other DNA
ctgacctgttttcttgatcttcccgttccggcatcactggaagaaatggagccacatgaccgtaaggcctggtat

SEQ ID NO: 551053 - DNA, 75 bp, synthetic construct
  source 1..75: mol_type = other DNA
aatacccgctgatgaagtggcgcgtgaattctcattgatggcgaaagccgtcgtcatggtacttgaaactctccc

SEQ ID NO: 551054 - DNA, 75 bp, synthetic construct
  source 1..75: mol_type = other DNA
ttcaagctggagtttggcctgtacaaaggtgaagtggtactgggcgatgagttctccccggacggcagccgcctg

SEQ ID NO: 551055 - DNA, 75 bp, synthetic construct
  source 1..75: mol_type = other DNA
ttgactcaataagaaatgccccaggaatgcgccatcaaaacgtacagggtacgcttgaagaacgagccagggggc

SEQ ID NO: 551056 - DNA, 75 bp, synthetic construct
  source 1..75: mol_type = other DNA
tggggttaccaccgccggttgctgagagcgaaatggatccacatgaacgcaaagcctggtatcagtctgaacgtg

SEQ ID NO: 551057 - DNA, 75 bp, synthetic construct
  source 1..75: mol_type = other DNA
tcaggaatttcaggatctgccagacggtgctgagacgacgcttacatttatggggttaccaccgccggttgctga

SEQ ID NO: 551058 - DNA, 75 bp, synthetic construct
  source 1..75: mol_type = other DNA
atggacggcgagctgaaaaatatgaagttaaatattaatcaactggcatccctttcaggcctgcaccggcagact

SEQ ID NO: 551059 - DNA, 75 bp, synthetic construct
  source 1..75: mol_type = other DNA
aatggattggcagaaacattcggtgtatctgttggctcaaaaatgccaagatgggtaccaaatgggaagccaggt

SEQ ID NO: 551060 - DNA, 75 bp, synthetic construct
  source 1..75: mol_type = other DNA
atggcatggacacggctgccattttgaaaaatatcggctacagcgaaaacgacattcaggagttggtcagcaaag

SEQ ID NO: 551061 - DNA, 75 bp, synthetic construct
  source 1..75: mol_type = other DNA
tggataaagaccgtttccgccagagcctcggtggtttgatcgaagcttatgaagccgtcgcccgccgcctgggtg

SEQ ID NO: 551062 - DNA, 75 bp, synthetic construct
  source 1..75: mol_type = other DNA
gataccgaatgtctggtgaaaaagctggatatggtgccggttgaatgtgtcgtgcgtaaccgtgctgctggctct

SEQ ID NO: 551063 - DNA, 75 bp, synthetic construct
  source 1..75: mol_type = other DNA
actgtcaggtgtacatcgccagactgctgcggcaaggctgcaaaatctacccgttgcaggggggcatgaaagcaa

SEQ ID NO: 551064 - DNA, 75 bp, synthetic construct
  source 1..75: mol_type = other DNA
atgctgtacgcaccaatgtgtgacgcattcggcacaaatggcgacagattttacttgcaaagtgagccaaaaact

SEQ ID NO: 551065 - DNA, 75 bp, synthetic construct
  source 1..75: mol_type = other DNA
tttgaggacaaatcctttatcacgctccgtgaacctgcctgcggtgccggcagtatgattctggctatggctgac

SEQ ID NO: 551066 - DNA, 75 bp, synthetic construct
  source 1..75: mol_type = other DNA
accctgaaccattcgggatatccggcatatcgcaggatgtgggtgtctgcaatggatattgacccgctggcagcc

SEQ ID NO: 551067 - DNA, 75 bp, synthetic construct
  source 1..75: mol_type = other DNA
taaaactttatttgaaggtcagaaagttgaattcgccattcaccgcggagacaagggtcctgctgctgcaaacgt

SEQ ID NO: 551068 - DNA, 75 bp, synthetic construct
  source 1..75: mol_type = other DNA
catcttttgggggaaaactgtgcagtgttggcagtcaaactcgttgacaaaacaaagtgtacagaacgactgccc

SEQ ID NO: 551069 - DNA, 75 bp, synthetic construct
  source 1..75: mol_type = other DNA
cctggctttctgcacagacgatgagggactgctgattgataaggtactgggggcagtcctcattacgggtggtca

SEQ ID NO: 551070 - DNA, 75 bp, synthetic construct
  source 1..75: mol_type = other DNA
accccgaattggaccaaaccgtgcaagaggcctttgccgatgaacaaggcgagttgatggcgctacccaatgcct

SEQ ID NO: 551071 - DNA, 75 bp, synthetic construct
  source 1..75: mol_type = other DNA
agcatcgctgcaaagcgctgtggtctgagctgcgccaccccgaattggaccaaaccgtgcaagaggcctttgccg

SEQ ID NO: 551072 - DNA, 75 bp, synthetic construct
  source 1..75: mol_type = other DNA
gttctgtaatccagcatcgggttgggagaaaggccagattgagaagaacgtgcaggattcccgccaacgcctgtg

SEQ ID NO: 551073 - DNA, 75 bp, synthetic construct
  source 1..75: mol_type = other DNA
cagaagtatctgcggatcgtcagtggttatgaaaagcaggatgttatccacattgcgcatttgcttgctcatgtc

SEQ ID NO: 551074 - DNA, 75 bp, synthetic construct
  source 1..75: mol_type = other DNA
tttgagaacaaaccctttatcacgctcagtgaaccggcctgtggtgccggtagtatgatactggctatggctgat

SEQ ID NO: 551075 - DNA, 75 bp, synthetic construct
  source 1..75: mol_type = other DNA
tgtggcaagccatcgaaggagcatgtgcttaatctgttgggacgtttgaccgaagaacctccacccaaaccgatt

SEQ ID NO: 551076 - DNA, 75 bp, synthetic construct
  source 1..75: mol_type = other DNA
acttgtatagatattgctgaccgctttaacgaaactataaaagtcctggttccagtatggcggcaacacacactt

SEQ ID NO: 551077 - DNA, 75 bp, synthetic construct
  source 1..75: mol_type = other DNA
gaaaagcgcgtccgataccaacacgcacgtgaaaaggtggaaactctcattaatgaggggaacggttttcttacg

SEQ ID NO: 551078 - DNA, 75 bp, synthetic construct
  source 1..75: mol_type = other DNA
aatcaaaccacttgaacttctgaatgtgctgcggcgcatcgaggggcgcggtgctacagaaaaagccaaaaaagt

SEQ ID NO: 551079 - DNA, 75 bp, synthetic construct
  source 1..75: mol_type = other DNA
caggagatcgattttgataatcgtttgtgggaagtgcctaaagaacgaatgaagatgcgccgtcctcattgtgtg

SEQ ID NO: 551080 - DNA, 75 bp, synthetic construct
  source 1..75: mol_type = other DNA
tttgaaactttagttgtaactaagatacattgtatgcttaacccaagccaatgtaatcttacacacgattttatc

SEQ ID NO: 551081 - DNA, 75 bp, synthetic construct
  source 1..75: mol_type = other DNA
actttcagtatggagaaaaaggtaataacagcagagcaatacagagactggcaattaattgcagccagtctcagg

SEQ ID NO: 551082 - DNA, 75 bp, synthetic construct
  source 1..75: mol_type = other DNA
ctttctttagggacatacccgaaggtttccttatcccaagcgcgtagacagcgagatgaggctcaggatctgctg

SEQ ID NO: 551083 - DNA, 75 bp, synthetic construct
  source 1..75: mol_type = other DNA
aggccagtatcagtttattttccccggtcgtattcaccacagtaagccaatgagtgaaatggcgatgaatgtgct

SEQ ID NO: 551084 - DNA, 75 bp, synthetic construct
  source 1..75: mol_type = other DNA
acgtttgaaaaagacgtttttccgtacattggaggtaggcccatcgcagagattaagccgatggaattgctcgcg

SEQ ID NO: 551085 - DNA, 75 bp, synthetic construct
  source 1..75: mol_type = other DNA
aaagagcattacgcctatttgaaggccgacgaactgccggaatttttccgcgtttttaatacgtacaccggaagc

SEQ ID NO: 551086 - DNA, 75 bp, synthetic construct
  source 1..75: mol_type = other DNA
atgcgtataggacaaaatcgttttttgggggctatacacatgttgctttcagaccttgctatccgtcgcgcgaag

SEQ ID NO: 551087 - DNA, 75 bp, synthetic construct
  source 1..75: mol_type = other DNA
tcacgcgcaatatctggacggacggcgggagatgctccagtggtacgccgactatatggactcactggaacaggg

SEQ ID NO: 551088 - DNA, 75 bp, synthetic construct
  source 1..75: mol_type = other DNA
gcagggttataactccgcgtggatagaaacgcagctggcgcacgtcgataaaaactcgatccgtggcacatacaa

SEQ ID NO: 551089 - DNA, 75 bp, synthetic construct
  source 1..75: mol_type = other DNA
gatgcgcacacgcaggccttccgggtgtttggtggagttcctgagcgcggtatttacgacaacatgaaaacggct

SEQ ID NO: 551090 - DNA, 75 bp, synthetic construct
  source 1..75: mol_type = other DNA
attaacggcaatgttaatagctcagacaagatggttatggatgctatcaaacgtcacgctaagttagttgctcag

SEQ ID NO: 551091 - DNA, 75 bp, synthetic construct
  source 1..75: mol_type = other DNA
gaaaacactaaagctatgcagatggctttcaatgctcataaggcattctccattggacaagcgacggtgaacatg

SEQ ID NO: 551092 - DNA, 75 bp, synthetic construct
  source 1..75: mol_type = other DNA
acaagatggtcatggatgctatcaaacgtcacgctaagttagttgctcaggcggtagaagacgcacaacgccgta

SEQ ID NO: 551093 - DNA, 75 bp, synthetic construct
  source 1..75: mol_type = other DNA
agacgcagccgcgaaacgccaggcgctaatcgatcagaatactgaaaacgtttataaaatgatgttgggtgctga

SEQ ID NO: 551094 - DNA, 75 bp, synthetic construct
  source 1..75: mol_type = other DNA
ccagctacaccaactagaccagcttcattgggtaagtctggtaatgagaagaaagccgaggaagaagccaagaag

SEQ ID NO: 551095 - DNA, 75 bp, synthetic construct
  source 1..75: mol_type = other DNA
taacgtcaccgaagaaaacgccaagaaatacgataaattttctcagaatatcagtaagctggaaaataacctgaa

SEQ ID NO: 551096 - DNA, 75 bp, synthetic construct
  source 1..75: mol_type = other DNA
aagtgtaggtttgaagattaaagattatgccgagtttatgaacgatccacaaggcgggatgaaagcggcgatcaa

SEQ ID NO: 551097 - DNA, 75 bp, synthetic construct
  source 1..75: mol_type = other DNA
aatgcccgtccggccctcgattgcccggttgtgtatccgtatgcgccaaacgcagtgttagttggtttcttgttt

SEQ ID NO: 551098 - DNA, 75 bp, synthetic construct
  source 1..75: mol_type = other DNA
gaacctggcgcgttatctctcgccttttgccataaccggacttgtagtagcgctatttgtgctgctggttgcctg

SEQ ID NO: 551099 - DNA, 75 bp, synthetic construct
  source 1..75: mol_type = other DNA
aatagcgcagacaagatggtcatggaagctatcaagcgtcatgctaaattagttgctcaaacggtagaagacgca

SEQ ID NO: 551100 - DNA, 75 bp, synthetic construct
  source 1..75: mol_type = other DNA
caataaaccaaattatcctgatcgttgggtggatagtgaaggcgttacccgtgataaaaacggtgatccggtaat

SEQ ID NO: 551101 - DNA, 75 bp, synthetic construct
  source 1..75: mol_type = other DNA
tagcgggtggacaagccagcttcaacaataaaccaaattatcctgatcgttgggtggatagtgaaggcgttaccc

SEQ ID NO: 551102 - DNA, 75 bp, synthetic construct
  source 1..75: mol_type = other DNA
cgccaaccataaagacgctcaaaagattattgacaagtacaataaagaaaagcgttggaataatctggcagattg

SEQ ID NO: 551103 - DNA, 75 bp, synthetic construct
  source 1..75: mol_type = other DNA
ccctatcttattgatatttctgttgatgacagctacagccagaacggcggcgtgttagtcgatgagaacaatagc

SEQ ID NO: 551104 - DNA, 75 bp, synthetic construct
  source 1..75: mol_type = other DNA
ttggtgaatgccaccgatggcgtgacgttgacaggcgagcttaatactaacctggaaactgacagcctgacctat

SEQ ID NO: 551105 - DNA, 75 bp, synthetic construct
  source 1..75: mol_type = other DNA
atcgcaagaagtaacgccgccatcgccacctgatccagacccgactcccgatcctgatcccacgccggatcctga

SEQ ID NO: 551106 - DNA, 75 bp, synthetic construct
  source 1..75: mol_type = other DNA
gatacatatgtgtcagaaaggaaatcacagaaggatcagcagaaggcaggcacaacagggcaagcaccggaagca

SEQ ID NO: 551107 - DNA, 75 bp, synthetic construct
  source 1..75: mol_type = other DNA
atcagagcgatccgcagcagttcggctccctgttgaaagcgtcaatgtacgcaacgatgcctattgagaagcagg

SEQ ID NO: 551108 - DNA, 75 bp, synthetic construct
  source 1..75: mol_type = other DNA
cacggttatgccgttgggctgacctcaagctggtttcagcgcggtagccaaaaacagggggcctggctggatagc

SEQ ID NO: 551109 - DNA, 75 bp, synthetic construct
  source 1..75: mol_type = other DNA
ctgatcccacgccggatcctgatccaacacccgacccagctccagcccctacgcctgcctaccagccggtgctga

SEQ ID NO: 551110 - DNA, 75 bp, synthetic construct
  source 1..75: mol_type = other DNA
tgacgggctttcagaatggcactttaaatatcgatgctggtggcaatgttactgttaatcaaggcagttttgctg

SEQ ID NO: 551111 - DNA, 75 bp, synthetic construct
  source 1..75: mol_type = other DNA
gggaacatctaacccgcaaggcagatcctaacactgatttgactatccctactacaccaactcgaccagaatcat

SEQ ID NO: 551112 - DNA, 75 bp, synthetic construct
  source 1..75: mol_type = other DNA
tctgaccaatacgtccggtgcggttagcctgcaaaatggcgtcgctggcgatacgctgacggtaaacggtgatta

SEQ ID NO: 551113 - DNA, 75 bp, synthetic construct
  source 1..75: mol_type = other DNA
gccgaaggttatggcggggcgatatataccaatagcgtgacggctccctatcttattgatatttctgttgatgac

SEQ ID NO: 551114 - DNA, 75 bp, synthetic construct
  source 1..75: mol_type = other DNA
acgactggtatctgcgatcgcaagaagtaacgccgccatcgccacctgatccagacccgactcccgatcctgatc

SEQ ID NO: 551115 - DNA, 75 bp, synthetic construct
  source 1..75: mol_type = other DNA
agcgcctgctcggcaagaaaacgatggaaaatgaactcctcaaagaagccgttgaatatggacgggcaaaaagtg

SEQ ID NO: 551116 - DNA, 75 bp, synthetic construct
  source 1..75: mol_type = other DNA
gaaaacactgcccgcccgcagtattgtgctgttgcatccgtgttgccataacccaacaggcgccgatctcaacaa

SEQ ID NO: 551117 - DNA, 75 bp, synthetic construct
  source 1..75: mol_type = other DNA
attctcaaagcccgcgagcttatcccattcctcgatattgcctatcaaggatttggtgccggtatggaagaggat

SEQ ID NO: 551118 - DNA, 75 bp, synthetic construct
  source 1..75: mol_type = other DNA
cgacattcctctcaaacgccagcaaacgatacctggtgtacgaacctgcacggaatgccagcgggtactggaaat

SEQ ID NO: 551119 - DNA, 75 bp, synthetic construct
  source 1..75: mol_type = other DNA
agccagccagttatttctctggcgtaagcaataccaggagggaagtcttactgctgtggctgccggagaacaggt

SEQ ID NO: 551120 - DNA, 75 bp, synthetic construct
  source 1..75: mol_type = other DNA
ctgctgtggccgcaggagagcaggtcgttcctgcctctgaacttgctgctgccatgaagcagattaaagaactcc

SEQ ID NO: 551121 - DNA, 75 bp, synthetic construct
  source 1..75: mol_type = other DNA
atcgccgaatggacgggattaagccgtagccaggcggcactgacgcagttacatgaggcatctgtaacgcttatc

SEQ ID NO: 551122 - DNA, 75 bp, synthetic construct
  source 1..75: mol_type = other DNA
atgaatatgatgatctcatatcaggaacttgttcgcaccttccctaacactaacgccaattttgagatgaccggg

SEQ ID NO: 551123 - DNA, 75 bp, synthetic construct
  source 1..75: mol_type = other DNA
acaacagcgcgtggcgactattcaaacgcttggcggttcaggggcattgaaagtgggggctgacttcctgaaacg

SEQ ID NO: 551124 - DNA, 75 bp, synthetic construct
  source 1..75: mol_type = other DNA
tcatgaggatccggcccgcgtctggcgaacgcagcgagaaggaccggaaggctggcgtgaaggcctggaccattt

SEQ ID NO: 551125 - DNA, 75 bp, synthetic construct
  source 1..75: mol_type = other DNA
aaatgttggggctacaaggcttaccgctgattgcagagaatggtgcagtgatccagcttgctgaacaatggcagg

SEQ ID NO: 551126 - DNA, 75 bp, synthetic construct
  source 1..75: mol_type = other DNA
gttggtgaaaccgagcaggtagataccgtttctggcgtcgatgccgtcagcagcattggtgatgatgtcgttgat

SEQ ID NO: 551127 - DNA, 75 bp, synthetic construct
  source 1..75: mol_type = other DNA
cccggaaaacatcagtataaaaatgcccgtcaggagcataccagccagccgaatctgcttgagcgtcagttcgca

SEQ ID NO: 551128 - DNA, 75 bp, synthetic construct
  source 1..75: mol_type = other DNA
ttactgtggcgttaccagatcaaacagagtctgagtcgacgaggaaattgctgggataacagcccgatggagcgc

SEQ ID NO: 551129 - DNA, 75 bp, synthetic construct
  source 1..75: mol_type = other DNA
cacgccataacggactatatcgttgaatattacagcacactaagaccgcacgaatataacggtggttaccccccc

SEQ ID NO: 551130 - DNA, 75 bp, synthetic construct
  source 1..75: mol_type = other DNA
gcgtgaaggaactgatcgagttaccgaagtcggttatcgaagaccgttttcagttgcagggtaatcagggggcgg

SEQ ID NO: 551131 - DNA, 75 bp, synthetic construct
  source 1..75: mol_type = other DNA
tcatctgcatgacgcaaaaaaatcggtgccgcaaatgctggaagattttaaacaacaccccgccattcgcccact

SEQ ID NO: 551132 - DNA, 75 bp, synthetic construct
  source 1..75: mol_type = other DNA
atcgttggatattacagcgcactaagaccgcacgaatataatggtgggttaccaccaaacgaatcggaaaatcga

SEQ ID NO: 551133 - DNA, 75 bp, synthetic construct
  source 1..75: mol_type = other DNA
cgtaggccgtcagccgctgcgtaaactgagcgcgggcgaccgtctgataaaaccgctgctgggtacgctggaata

SEQ ID NO: 551134 - DNA, 75 bp, synthetic construct
  source 1..75: mol_type = other DNA
gtcggtgaaaccgagcaggtcgataccgtttccggcgttgatgccgtcagcagtattggtgatgacgtggtggat

SEQ ID NO: 551135 - DNA, 75 bp, synthetic construct
  source 1..75: mol_type = other DNA
atctgaaagatgatgtagagcgcgtaggccgtcagccactgcgtaaactgagtgctggcgaccgtctgatcaagc

SEQ ID NO: 551136 - DNA, 75 bp, synthetic construct
  source 1..75: mol_type = other DNA
agacgcttccaagcaggttgatattctgggtaaattcccgctgccagtagaagttatcccgatggcacgtagtgc

SEQ ID NO: 551137 - DNA, 75 bp, synthetic construct
  source 1..75: mol_type = other DNA
cggcaaaaagcccctctcctcacggagagggtttgggtgagggaaaagcctcaccccagccctctcgggtaaaaa

SEQ ID NO: 551138 - DNA, 75 bp, synthetic construct
  source 1..75: mol_type = other DNA
gttctcgacctgttcgcaagaaaaccagtgggctgggccatgtcgttctcgccggacagcaggctcaccatgaaa

SEQ ID NO: 551139 - DNA, 75 bp, synthetic construct
  source 1..75: mol_type = other DNA
ggatagcgcacgcgcccttattgcccggggatggggtgaaccgccccgggtttcctggagagtattttatctgtg

SEQ ID NO: 551140 - DNA, 75 bp, synthetic construct
  source 1..75: mol_type = other DNA
gcttccatcggaaacgatgatctggcagcctgagttcacagataaaatactctccaggaaacccggggcggttca

SEQ ID NO: 551141 - DNA, 75 bp, synthetic construct
  source 1..75: mol_type = other DNA
tcctgtttacctctttctcaggaagtttagtctccaggattcccggggcggttcacattggagagcagatgactg

SEQ ID NO: 551142 - DNA, 75 bp, synthetic construct
  source 1..75: mol_type = other DNA
atgactgatgtcttaggaccggagaaacgcagacagcgtactacacagaaaaagatcgctattgttcagcagagt

SEQ ID NO: 551143 - DNA, 75 bp, synthetic construct
  source 1..75: mol_type = other DNA
tgttcctgcctctgaacttgttgccgccatgaagcagattaaagaactccagtcgcctgctcggcaagaaaacga

SEQ ID NO: 551144 - DNA, 75 bp, synthetic construct
  source 1..75: mol_type = other DNA
atgaagtgcttgaccccggtcgcttaacgctggtggtggaaggcgatctggcggcgtgtcgtgcggcgctggatg

SEQ ID NO: 551145 - DNA, 75 bp, synthetic construct
  source 1..75: mol_type = other DNA
atgaacaatgcactgggtttgttggaagttgacggcatggtcgccgcaatcgatgcggcagatgccatgctgaaa

SEQ ID NO: 551146 - DNA, 75 bp, synthetic construct
  source 1..75: mol_type = other DNA
gcgcgtttaccggataatgagcgaaaatagcctgttgttgttacatgacaaaccatcacgacggcagcgggaaca

SEQ ID NO: 551147 - DNA, 75 bp, synthetic construct
  source 1..75: mol_type = other DNA
tcctgtctggcgacaacataccctgtcgctaatcacgacaacaaacatggacccggatatggtcagtaaagctac

SEQ ID NO: 551148 - DNA, 75 bp, synthetic construct
  source 1..75: mol_type = other DNA
aataacctgttgttgttacatgacaaaccttcacgaccgcagcgggaacataaaggccgaatatcggtgaaggaa

SEQ ID NO: 551149 - DNA, 75 bp, synthetic construct
  source 1..75: mol_type = other DNA
tcagcttcagcgtttactgggcaagaaaactatggaagttgagatcctcaaagaagcggtggagtatgcgcagtc

SEQ ID NO: 551150 - DNA, 75 bp, synthetic construct
  source 1..75: mol_type = other DNA
gttgaatatggacgggcaaaaaagtggatagcgcacgcgcccttattgcccggggatggggagtatgatcctacc

SEQ ID NO: 551151 - DNA, 75 bp, synthetic construct
  source 1..75: mol_type = other DNA
ttccaaccaaggaacgactgaaagaggtcattttaccgaccttattcagcgatgcaaatgcgataagcagatatg

SEQ ID NO: 551152 - DNA, 75 bp, synthetic construct
  source 1..75: mol_type = other DNA
aagcagattaaagaactccagcgcctgctcggcaagaaaacgatggaaaatgaactcctcaaagaagccgttgaa

SEQ ID NO: 551153 - DNA, 75 bp, synthetic construct
  source 1..75: mol_type = other DNA
gaggatttcgttcagcgtgtgaatgccgatatcgtgaacaaagtggttaacctggcgtcccgtaacgctggcttt

SEQ ID NO: 551154 - DNA, 75 bp, synthetic construct
  source 1..75: mol_type = other DNA
atcaacaagcgttttgacggtgtgctggcaagcgagctggctgaccctgagctgtacaaaacctttaccgatgcc

SEQ ID NO: 551155 - DNA, 75 bp, synthetic construct
  source 1..75: mol_type = other DNA
aacgcaatgtcttctccggtattcgttctgcctacccggatccgcaggcactgattggtcgtcacaccattatgg

SEQ ID NO: 551156 - DNA, 75 bp, synthetic construct
  source 1..75: mol_type = other DNA
ggatagcgcacgcgcccttattgcccgggatggggagtaagcttagtcagccgttgtctccgggtgtcgcgtgcg

SEQ ID NO: 551157 - DNA, 75 bp, synthetic construct
  source 1..75: mol_type = other DNA
aatgccggggtattggggcatcctctttgtctgggcgctatttggcgttacctgcgacatgatgaactggcctgt

SEQ ID NO: 551158 - DNA, 75 bp, synthetic construct
  source 1..75: mol_type = other DNA
gattactgggtgtttatttgacgacaatgccggggtattggggcatcctctttgtctgggcgctatttggcgtta

SEQ ID NO: 551159 - DNA, 75 bp, synthetic construct
  source 1..75: mol_type = other DNA
atgttgcaggcatggacccgcagcggtgcgttgcaggagcaggtggcaaataaaatgcaggagtggtttgaatcc

SEQ ID NO: 551160 - DNA, 75 bp, synthetic construct
  source 1..75: mol_type = other DNA
cggccacgagctcaacttcatctgcgccgacgatgcccacggtacaccgatcatgctgaaagctcagcagcttgg

SEQ ID NO: 551161 - DNA, 75 bp, synthetic construct
  source 1..75: mol_type = other DNA
agtcttactgctgtggccgcaggagaacaggtcgttcctgcctctgaacttgctgctgccatgaagcagattaaa

SEQ ID NO: 551162 - DNA, 75 bp, synthetic construct
  source 1..75: mol_type = other DNA
ggcctgcaacagtgggatatctcccgcgacgcaccttacttcggttttgaaattccgaacgcgccgggcaaatat

SEQ ID NO: 551163 - DNA, 75 bp, synthetic construct
  source 1..75: mol_type = other DNA
atgtgacggtgaacggcgcgaagatgtccaagtctcgcggcacctttattaaagccagcacctggctgaatcatt

SEQ ID NO: 551164 - DNA, 75 bp, synthetic construct
  source 1..75: mol_type = other DNA
gctggccccggcgggaaggatatcttcctgttaagcccggatgccggtgctaaaccgggtcatcaggtgaaataa

SEQ ID NO: 551165 - DNA, 75 bp, synthetic construct
  source 1..75: mol_type = other DNA
aaaaaacaggaaccatacttcacctgttgaaagtctgattgataaagcgagtaaacttgatctaactgttccaga

SEQ ID NO: 551166 - DNA, 75 bp, synthetic construct
  source 1..75: mol_type = other DNA
tgtcgcagtggcaatcgccggtttcaatcagatgaaccgcggtggcccggcgggaaatgccgtggtgatgcacta

SEQ ID NO: 551167 - DNA, 75 bp, synthetic construct
  source 1..75: mol_type = other DNA
atgaaaatcaagcatgaacacatccgcatggcgatgaatgcctgggcgcatccggacggtgaaaaagttccggct

SEQ ID NO: 551168 - DNA, 75 bp, synthetic construct
  source 1..75: mol_type = other DNA
tgttgaaaaaatgcaggctctgttaccggcgatcgaaaaggcgatgccgcctttgctggtggcccgtatgcgcag

SEQ ID NO: 551169 - DNA, 75 bp, synthetic construct
  source 1..75: mol_type = other DNA
tgcgccatatatcaatttcacggggctggtggagagcggtgcaaatttgcgcgctctgcaggtaaaaggtgttga

SEQ ID NO: 551170 - DNA, 75 bp, synthetic construct
  source 1..75: mol_type = other DNA
ctggtggaaagtggcgcgaatctgcgcgcaatccaggtgaagggcgttaacccgcaacaggaacagcgtctgagc

SEQ ID NO: 551171 - DNA, 75 bp, synthetic construct
  source 1..75: mol_type = other DNA
atgaaaatcaagcatgagcacatccgcatggcgatgaatgcctgggcgtatccggacggtgaaaaagttccagca

SEQ ID NO: 551172 - DNA, 75 bp, synthetic construct
  source 1..75: mol_type = other DNA
gcatggctatgaatgcttgggcgcgtccggatggtgaaaaagttccggcggccaagataaccagggcttatttcg

SEQ ID NO: 551173 - DNA, 75 bp, synthetic construct
  source 1..75: mol_type = other DNA
tgttgcatcagcgatcactttgttcgatcagatgaatcgtggtggcccggcaggaaatgctgtggcggtacattg

SEQ ID NO: 551174 - DNA, 75 bp, synthetic construct
  source 1..75: mol_type = other DNA
tgtcgcagtggcgattgctggtttcaaccagatgaatcgtggtggcccggcaggaaacactctggctgtgcatta

SEQ ID NO: 551175 - DNA, 75 bp, synthetic construct
  source 1..75: mol_type = other DNA
gcatggcgatgaatgcctgggcgcatccggacggtgaaaaagttccggctgcgaaaattaccaaagcgtatttcg

SEQ ID NO: 551176 - DNA, 75 bp, synthetic construct
  source 1..75: mol_type = other DNA
gctgaaataacccgggcttattttgagctgggtatgacgttcccggagctatatgacgacaggcatccggaagcc

SEQ ID NO: 551177 - DNA, 75 bp, synthetic construct
  source 1..75: mol_type = other DNA
gctgaaataacccgggcttattttgagctgggtatgacgttcccggagctatatgacgacagccatccggaagcg

SEQ ID NO: 551178 - DNA, 75 bp, synthetic construct
  source 1..75: mol_type = other DNA
cgccattatgtatctggcgatggtactggtgattggtgtggcctgtttcaacatcgtctccaccttagtgatggc

SEQ ID NO: 551179 - DNA, 75 bp, synthetic construct
  source 1..75: mol_type = other DNA
gatgttcctggatgagtttccgtctattggttacatgccaatcattaaaaaaggttcgggttatattgccgggtt

SEQ ID NO: 551180 - DNA, 75 bp, synthetic construct
  source 1..75: mol_type = other DNA
tacgtgaaaaactgctgggtaataaagtctatcttcttgaccctttcaacagtaaaacgcatcagtttaacccgc

SEQ ID NO: 551181 - DNA, 75 bp, synthetic construct
  source 1..75: mol_type = other DNA
gtcggggcatataaaggtaaatacctgtggtataccgcaccagattttgtatcacttggcgcaggaacccgcgca

SEQ ID NO: 551182 - DNA, 75 bp, synthetic construct
  source 1..75: mol_type = other DNA
tacacctcagctgccaaatgcagaggtcatggggccgggtgaagccgacggccgtattgaaatcgcttataacat

SEQ ID NO: 551183 - DNA, 75 bp, synthetic construct
  source 1..75: mol_type = other DNA
gtatggggatcggtttccctggtgccgttactcgtccacaggacctcaccgcagagcctgcaatcctcgatgcca

SEQ ID NO: 551184 - DNA, 75 bp, synthetic construct
  source 1..75: mol_type = other DNA
ggcagtgggcttttataatactggtaatgtgtttgattgcatactacacaggttcggtcgcaatctattttttca

SEQ ID NO: 551185 - DNA, 75 bp, synthetic construct
  source 1..75: mol_type = other DNA
cgccgctgcgccatatatcaatttcaccggactggtagaaagcggtacgaatctgcgcgctctgcaggtgaaagg

SEQ ID NO: 551186 - DNA, 75 bp, synthetic construct
  source 1..75: mol_type = other DNA
gtgtgcgtttgcacgttgccggtattttgcagttgagtggtcaactcgatcacagttttgccatgatcccgctgg

SEQ ID NO: 551187 - DNA, 75 bp, synthetic construct
  source 1..75: mol_type = other DNA
ctgtttggcagcctgtgtggcgtggttatcggcgtggtggtttcgctgcaacttactccgattattgagtggatt

SEQ ID NO: 551188 - DNA, 75 bp, synthetic construct
  source 1..75: mol_type = other DNA
ggtaacagaccttttaagtcttggggaaacaatttataccactgacggtaaaagtggagccgaaaagcattttaa

SEQ ID NO: 551189 - DNA, 75 bp, synthetic construct
  source 1..75: mol_type = other DNA
tgcgttttagtcgcggacggcggcgtggcggcatggtgtcgctgatctccgttatttctaccattggcattgccc

SEQ ID NO: 551190 - DNA, 75 bp, synthetic construct
  source 1..75: mol_type = other DNA
cgtcggcttaagcgcgatgaacggctttgaacgcgaactgaataaccgcattctggcggtagtaccgcatggcga

SEQ ID NO: 551191 - DNA, 75 bp, synthetic construct
  source 1..75: mol_type = other DNA
aaagccagaaggaatacgtaagaaaaaaccgcaacgaattggattccatgactcgcgccgcctattgcggaagcg

SEQ ID NO: 551192 - DNA, 75 bp, synthetic construct
  source 1..75: mol_type = other DNA
tgtctcttatcagaccgtttcccgcgtggtgaaccaggcctgccacgtttctgcgaaaacgcgggaaaaagtgga

SEQ ID NO: 551193 - DNA, 75 bp, synthetic construct
  source 1..75: mol_type = other DNA
ctggctcgcaatactcagaaaattttccgctgggtggagaaagatactcctgatgcggttaaaaaattcaggcgt

SEQ ID NO: 551194 - DNA, 75 bp, synthetic construct
  source 1..75: mol_type = other DNA
tatcgcagtggcaatcgccggtttcaatcagatgaatcgtggtggcccggcgggtaatgctgtggtgatgcactg

SEQ ID NO: 551195 - DNA, 75 bp, synthetic construct
  source 1..75: mol_type = other DNA
tgccgcctctgctggtggcccgtatgcgcagccacagttctgaatattaccgtgagatcgtcgaacggagggatc

SEQ ID NO: 551196 - DNA, 75 bp, synthetic construct
  source 1..75: mol_type = other DNA
gcatggcgatgaatgcctgggcgtatccggacggtgaaaaagttccggcggctgaaataacccaggcttattttg

SEQ ID NO: 551197 - DNA, 75 bp, synthetic construct
  source 1..75: mol_type = other DNA
ctggctcgtaatacccagaaaattttccgctgggtggagaaagacacccctgatgctgttgaaaaaattcaggcg

SEQ ID NO: 551198 - DNA, 75 bp, synthetic construct
  source 1..75: mol_type = other DNA
ttgaggatgcacagaaattgtataatcggtctcacttcactcagcgtctgaatcaggacgatataaccagcatga

SEQ ID NO: 551199 - DNA, 75 bp, synthetic construct
  source 1..75: mol_type = other DNA
agtcaggttgatgccgcactattggctgccaccatggtgattaaagcagaacaggaaggagctaaagtactgacg

SEQ ID NO: 551200 - DNA, 75 bp, synthetic construct
  source 1..75: mol_type = other DNA
gctggcgacaagcgcacgcaggatgcagatatagatgaggctattcgctgcctcaaagactatttgaagaggtga

SEQ ID NO: 551201 - DNA, 75 bp, synthetic construct
  source 1..75: mol_type = other DNA
tgaaagctcggctacaaatgaccggctgcagaagctcattcaaatcatcagcaatgctgacaacgactactgcat

SEQ ID NO: 551202 - DNA, 75 bp, synthetic construct
  source 1..75: mol_type = other DNA
caaaacctgattgaagcgccctgccgtgtactgggattgagtaaagatcaggcgctggcccgtgcagaaaaattg

SEQ ID NO: 551203 - DNA, 75 bp, synthetic construct
  source 1..75: mol_type = other DNA
gagaggcatattggctaacatagataggcaaatatggttaaataataatttaattatatttagcttacttagatt

SEQ ID NO: 551204 - DNA, 75 bp, synthetic construct
  source 1..75: mol_type = other DNA
atgatcattgttgatgaaggcattcctgcggatagtctggaaggactgcgaaaggctggggttgaagtgattctg

SEQ ID NO: 551205 - DNA, 75 bp, synthetic construct
  source 1..75: mol_type = other DNA
cttttaatatcaacggcctgcgcgccagaccacaccagcttgaagctatcgtcgacaagcaccagcctgatgtga

SEQ ID NO: 551206 - DNA, 75 bp, synthetic construct
  source 1..75: mol_type = other DNA
gcgaagaggctcaacgacgaattattatggcggaaattccctcgccgctgggcaatgtcaccgtgatcaacggct

SEQ ID NO: 551207 - DNA, 75 bp, synthetic construct
  source 1..75: mol_type = other DNA
accgcgagaacctgttctttatcgatgtgcaggcacgcggggcgtatccctcctactccgcccgcgtattccgcg

SEQ ID NO: 551208 - DNA, 75 bp, synthetic construct
  source 1..75: mol_type = other DNA
acggcggataattatggcggaaattccttcgccgctgggtaatgttaccgtgatcaacggctacttccctcaggg

SEQ ID NO: 551209 - DNA, 75 bp, synthetic construct
  source 1..75: mol_type = other DNA
cgtgatcaacggttacttcccgcagggtgaaagccgcgaccatccgataaaattcccggcaaaggcgcagtttta

SEQ ID NO: 551210 - DNA, 75 bp, synthetic construct
  source 1..75: mol_type = other DNA
gcttgaagccatcgtcgaaaagcaccaaccggatgtgattggcctgcaggagacaaaagttcatgatgatatgtt

SEQ ID NO: 551211 - DNA, 75 bp, synthetic construct
  source 1..75: mol_type = other DNA
tccgcctcaacgggtgaaatgagcaaacgctacggttttgtctacgtagaccgtgacgacgcaggcaacggcacg

SEQ ID NO: 551212 - DNA, 75 bp, synthetic construct
  source 1..75: mol_type = other DNA
ctacccttacagctgcaaaccggaagatgtctgggcggcgctggagaaagatcgggaaaacctgttttttatcga

SEQ ID NO: 551213 - DNA, 75 bp, synthetic construct
  source 1..75: mol_type = other DNA
cgcaagctggtggagtttttcagccgctacgcccggacctgctttgaagcatttgatggtctggtgaaatactgg

SEQ ID NO: 551214 - DNA, 75 bp, synthetic construct
  source 1..75: mol_type = other DNA
catcagctatttacgcgaacatatccgcgcaatgggcgaagcgattgcagacggcattccgctgatgggctacac

SEQ ID NO: 551215 - DNA, 75 bp, synthetic construct
  source 1..75: mol_type = other DNA
gaaatatcaggctgcgcatcaccagctggttgccagtgcgctagccaccaaaatcgcccatgaggttaacccgca

SEQ ID NO: 551216 - DNA, 75 bp, synthetic construct
  source 1..75: mol_type = other DNA
tgtgcaggcacggggcgcgtatccggcttactctgcccgcgtattccgcgaaaaaggggtaaccattgataaagc

SEQ ID NO: 551217 - DNA, 75 bp, synthetic construct
  source 1..75: mol_type = other DNA
tatagaagctgcaaaaaatctggtggcccaagaatatgagtataaggatttcaaagcggcgcagagtgattgctg

SEQ ID NO: 551218 - DNA, 75 bp, synthetic construct
  source 1..75: mol_type = other DNA
agattgaacgcgacggtgtaatccgtcatcgactggcggaaggccgacgccgctcaccgctcctgcaagtcagtc

SEQ ID NO: 551219 - DNA, 75 bp, synthetic construct
  source 1..75: mol_type = other DNA
cgacctcagtcataaagaggtagtcacgatgaccttcagtgaatcagagcagattgaacgcgacggtgtaatccg

SEQ ID NO: 551220 - DNA, 75 bp, synthetic construct
  source 1..75: mol_type = other DNA
tcttgatactgatgctctggcagacgggctaccgctgtatgtgtcgctgtaccccacagaagggggcatgcagga

SEQ ID NO: 551221 - DNA, 75 bp, synthetic construct
  source 1..75: mol_type = other DNA
atgagtacagaaatgaaaacggggctggtgctgtccggcggcggggcggtgggcgcttatcaggcaggtgtggtt

SEQ ID NO: 551222 - DNA, 75 bp, synthetic construct
  source 1..75: mol_type = other DNA
atcttcatcggcccgaaagcagacaccattcgcctgatgggtgacaaagtatccgcaatcgccgcgatgaaaaaa

SEQ ID NO: 551223 - DNA, 75 bp, synthetic construct
  source 1..75: mol_type = other DNA
atcagtcaccgcgcggcaagtttacttttattgccaccagcggcgcgttccacggtaaatcgcttggcgcactgt

SEQ ID NO: 551224 - DNA, 75 bp, synthetic construct
  source 1..75: mol_type = other DNA
aggcgctggcggccatgcgagtaagtgtcgaagaagggggaaccgcagaattcggaaaaaatcgtacgctaagct

SEQ ID NO: 551225 - DNA, 75 bp, synthetic construct
  source 1..75: mol_type = other DNA
gggtttccgtcatgtaccgtttggcaatattgaagccatgcgcacagcccttagcgagtgcaaaaaaaccggtga

SEQ ID NO: 551226 - DNA, 75 bp, synthetic construct
  source 1..75: mol_type = other DNA
aaagttaaattcttcgaatggttagctgaagtctttaaaaataacctggcatttgatggtcacggtaacgttgct

SEQ ID NO: 551227 - DNA, 75 bp, synthetic construct
  source 1..75: mol_type = other DNA
gatactcagatacacacagcattgcgtgaagcgctggtaaataccttagttcatgccgattatactggacgaatc

SEQ ID NO: 551228 - DNA, 75 bp, synthetic construct
  source 1..75: mol_type = other DNA
ctgctgtagcagcatcagtattgatagctatgtccgctcaggcagctgagatttataacaaagacagcaataaat

SEQ ID NO: 551229 - DNA, 75 bp, synthetic construct
  source 1..75: mol_type = other DNA
aggcgcctttcccgatggggaaagacaataccgaatactatctgctcacatccgattacgtcagcgttgccgaat

SEQ ID NO: 551230 - DNA, 75 bp, synthetic construct
  source 1..75: mol_type = other DNA
tgtttagctctgaaccgctagcgcaatttagcccattgctacatgccaggaatatcattacaacgccgcatattg

SEQ ID NO: 551231 - DNA, 75 bp, synthetic construct
  source 1..75: mol_type = other DNA
aatttatcattggtcttatcttcgcgagcatgagaaatatcccaggcagctatcatgcgatgcaaaatggttact

SEQ ID NO: 551232 - DNA, 75 bp, synthetic construct
  source 1..75: mol_type = other DNA
atgaacctctgccagatccccggacgtgcaggtgcactgcttacgactcttcttcgccatatatcgataatcaac

SEQ ID NO: 551233 - DNA, 75 bp, synthetic construct
  source 1..75: mol_type = other DNA
tgacccgtgcggaagcgaaagccgcattcaataacgatatggtttacatggagaaatacctggaaaatcctcgcc

SEQ ID NO: 551234 - DNA, 75 bp, synthetic construct
  source 1..75: mol_type = other DNA
gaaatgatcactggcgttgacctgatcaaagaacagctgcgtatcgctgccggtcaaccgctgtcgatcaagcaa

SEQ ID NO: 551235 - DNA, 75 bp, synthetic construct
  source 1..75: mol_type = other DNA
ttgatcttcgtgcagcacaacaatccggtattgtagtcaataatgcggttgggattaattcaaatgctgtcgcgg

SEQ ID NO: 551236 - DNA, 75 bp, synthetic construct
  source 1..75: mol_type = other DNA
gcgcagcaagccttccatgacgcttctttcatgctccgcccggcacaccagcaacaggttgcttctattcttcac

SEQ ID NO: 551237 - DNA, 75 bp, synthetic construct
  source 1..75: mol_type = other DNA
agacgcctttcccgatggggaaagacaataccgagtactatctgctcacatccgattacgttagtgttgccgaat

SEQ ID NO: 551238 - DNA, 75 bp, synthetic construct
  source 1..75: mol_type = other DNA
aaagagctgattgacgccggtaaagaacttccgcagtacatcaaagatcacccgatctactacgcgggtccggcg

SEQ ID NO: 551239 - DNA, 75 bp, synthetic construct
  source 1..75: mol_type = other DNA
cagcagaaagaggctctgcttgcgtcagccgcgctgcccctgctgttccgtccccgtgaggttcaggggacaatg

SEQ ID NO: 551240 - DNA, 75 bp, synthetic construct
  source 1..75: mol_type = other DNA
cccggacgtgcaggagcactgcttacgacgcttcttcgccatatatcgataatcaacggcttcgacaatccgatg

SEQ ID NO: 551241 - DNA, 75 bp, synthetic construct
  source 1..75: mol_type = other DNA
gaaaaccgtcaagttggcaagtgctcactattacgatgagctgccgactgaagggaacgaacacggtcaggcttt

SEQ ID NO: 551242 - DNA, 75 bp, synthetic construct
  source 1..75: mol_type = other DNA
tcaccgccgtgcgtaagctgtgcgatgagttcggcgcactgatgatcctcgatgaagtacaaacgggcatggggc

SEQ ID NO: 551243 - DNA, 75 bp, synthetic construct
  source 1..75: mol_type = other DNA
ggctgcagaaaatacctcgcttaagcaatctgagaaggaatttaatgacttttgtcgtgaggagtttagcgaatg

SEQ ID NO: 551244 - DNA, 75 bp, synthetic construct
  source 1..75: mol_type = other DNA
agtttggtggaaatacctggactcaaactgatgtatttatgacccagcgtgctacaggcgtagcgacctaccgta

SEQ ID NO: 551245 - DNA, 75 bp, synthetic construct
  source 1..75: mol_type = other DNA
atttacgcgtaccgaggatgttgctctctgtgctgacaggggcgggactggcaatggtaggggcgttgttacaaa

SEQ ID NO: 551246 - DNA, 75 bp, synthetic construct
  source 1..75: mol_type = other DNA
tctttctggtgatagcgatacgatttatgatatacaggaagaattacccttttcatggggatggattcccgtttc

SEQ ID NO: 551247 - DNA, 75 bp, synthetic construct
  source 1..75: mol_type = other DNA
agtttggtggagatacctggactcagactgatgtatttatgacccagcgtgctactggcgtcgcgacctatcgta

SEQ ID NO: 551248 - DNA, 75 bp, synthetic construct
  source 1..75: mol_type = other DNA
agctgctggcgacgctgaatctgaagctggaaccggcggatgattttcgtgatgaaccggtgaagttaacggcgt

SEQ ID NO: 551249 - DNA, 75 bp, synthetic construct
  source 1..75: mol_type = other DNA
cttatacgccaacgatcaaaaacgtgttacgtctgactctctggaccgggtgtcgtacaggtgaagtctgcaata

SEQ ID NO: 551250 - DNA, 75 bp, synthetic construct
  source 1..75: mol_type = other DNA
taatccggcgttgctggcgaaatcaagcctgcgacaggccagaattaagcttactagcgagcgaggaacgcgagt

SEQ ID NO: 551251 - DNA, 75 bp, synthetic construct
  source 1..75: mol_type = other DNA
tatcccctctcttttatcaggtatggtttcgtctctcatcgtgcctgtttttattatctggcaactgaataaaac

SEQ ID NO: 551252 - DNA, 75 bp, synthetic construct
  source 1..75: mol_type = other DNA
gaaactacctaaaacacagatcacagccacacccgcggagatcattctctggtcacctattgtagaatgggagct

SEQ ID NO: 551253 - DNA, 75 bp, synthetic construct
  source 1..75: mol_type = other DNA
aaattgtagatgcggcagaaaaccactactttaacatgataaaagaaagccatgaaaaacaggggattggaagaa

SEQ ID NO: 551254 - DNA, 75 bp, synthetic construct
  source 1..75: mol_type = other DNA
ggcccagaaaggcgcagcatgggaaaaattgtagatgcggcagaaaaccactactttaacatgataaaagaaagc

SEQ ID NO: 551255 - DNA, 75 bp, synthetic construct
  source 1..75: mol_type = other DNA
tgttgtttttcctgcaaatagaatagacgagctggttgttgatgctatttctcttaaggatcctggcttacacat

SEQ ID NO: 551256 - DNA, 75 bp, synthetic construct
  source 1..75: mol_type = other DNA
gattcacgcaacgcttgtagaaaacctgcgttatgccgcgaatatgctgatgaaagaagatattttattattgat

SEQ ID NO: 551257 - DNA, 75 bp, synthetic construct
  source 1..75: mol_type = other DNA
tcgaaaattctgactacaacggttgggttgggtgtgaatataaaccccaaaccaccacggaagccggtttacgct

SEQ ID NO: 551258 - DNA, 75 bp, synthetic construct
  source 1..75: mol_type = other DNA
tgctgcaatttgaaaattcagtatgacatttatcatatgcagcggatggaaggtgaattaaccaacaccatgact

SEQ ID NO: 551259 - DNA, 75 bp, synthetic construct
  source 1..75: mol_type = other DNA
gttttggaattttcaacgtggggcaccgtaatccagttgtggtttccgccgtacagaatcaacttgcgaaacaac

SEQ ID NO: 551260 - DNA, 75 bp, synthetic construct
  source 1..75: mol_type = other DNA
tgaaccgggtcgtagccactgggaaggttatgaaaccggtactcgcgcagcggcaaaaggtggtatcaccaccat

SEQ ID NO: 551261 - DNA, 75 bp, synthetic construct
  source 1..75: mol_type = other DNA
gattcacgcaacgcttgtagaaaacctgcgttatgccgcgaatatgttgatgaaagaagatattttattactgat

SEQ ID NO: 551262 - DNA, 75 bp, synthetic construct
  source 1..75: mol_type = other DNA
ttgtctggagattcagggggccagtctacccaaatcaacgatcaactgactggtttcggtcagtgggaatatgaa

SEQ ID NO: 551263 - DNA, 75 bp, synthetic construct
  source 1..75: mol_type = other DNA
ttcgataaagcaggcgactggaagagtgttccggtaaaagatactgaagtggttgaacgactggagcacaccctg

SEQ ID NO: 551264 - DNA, 75 bp, synthetic construct
  source 1..75: mol_type = other DNA
cctgcaatctaaaggaaaagacttgggtgcgtggggtgatcaggacctggttgaatatattgatgtaggtgcaac

SEQ ID NO: 551265 - DNA, 75 bp, synthetic construct
  source 1..75: mol_type = other DNA
ggcgagatggttccggtttcagccggggagattgatgccctcgatactgacgatctggagatgtggctggagcag

SEQ ID NO: 551266 - DNA, 75 bp, synthetic construct
  source 1..75: mol_type = other DNA
gtaaagaccttggtgttcatggtgaccgagacttagtcaagtatgtcgatgtcggtgctacttactactttaata

SEQ ID NO: 551267 - DNA, 75 bp, synthetic construct
  source 1..75: mol_type = other DNA
ttcggtctgtcagctacttatgattatgaaggatttggcattggcgcaacttatgcaaaatctgaccgtactgat

SEQ ID NO: 551268 - DNA, 75 bp, synthetic construct
  source 1..75: mol_type = other DNA
cggtcaggtctggtgctggcagcgtgccggaagccgggccgttattctggaggtcagtggacgctggatggaagc

SEQ ID NO: 551269 - DNA, 75 bp, synthetic construct
  source 1..75: mol_type = other DNA
agggtgtaacgaaaaagcagccttcattactccaggagtcagaaggctgaaaggagtttatgagatttgcttttt

SEQ ID NO: 551270 - DNA, 75 bp, synthetic construct
  source 1..75: mol_type = other DNA
caatcagcatttcttcagtctgaagcacgcgaacgtcaggcagaagcggaagctcgcgcaacaaaactggtgtcg

SEQ ID NO: 551271 - DNA, 75 bp, synthetic construct
  source 1..75: mol_type = other DNA
agcagaaatgattgatgccgatatgctgatcattctgactgcggtagaaaaagtggccattaacttcggtaaaga

SEQ ID NO: 551272 - DNA, 75 bp, synthetic construct
  source 1..75: mol_type = other DNA
gtgtatccactcgcagtatcactaccaagataaagatcctgcgataataacatgtatcgtaaacgtaaataatac

SEQ ID NO: 551273 - DNA, 75 bp, synthetic construct
  source 1..75: mol_type = other DNA
gcgctaccggcaggtcggacgccgggctgtccggctggaagtcaggggggactggccgggagccgctgaggcatg

SEQ ID NO: 551274 - DNA, 75 bp, synthetic construct
  source 1..75: mol_type = other DNA
gcctcagtaatggcaggcaggttaacctggccgactggaaggtggtgctgtttatgcaggggcattgcccttact

SEQ ID NO: 551275 - DNA, 75 bp, synthetic construct
  source 1..75: mol_type = other DNA
gtttaagtgtgaaatccgtcatcgtgaagtggatattatcgctgatttgctggatgaactggaggaagcaaaaca

SEQ ID NO: 551276 - DNA, 75 bp, synthetic construct
  source 1..75: mol_type = other DNA
gtcagggtgataccgcctttccggaggcattgccggtgccaccggacgtgatgcagaccttcttcccgaatatcc

SEQ ID NO: 551277 - DNA, 75 bp, synthetic construct
  source 1..75: mol_type = other DNA
aatactgaaagcggaaggggaacggcaatcagcatttcttcagtctgaagcacgcgaacgtcaggcagaagcgga

SEQ ID NO: 551278 - DNA, 75 bp, synthetic construct
  source 1..75: mol_type = other DNA
gtggaaaaactccccgttgaagagtgggatatcccacttcctgcggtggttacaccgtcgaaagtctgggagtgg

SEQ ID NO: 551279 - DNA, 75 bp, synthetic construct
  source 1..75: mol_type = other DNA
ccagccactcatagaacaactctggcgcgccggtaagcgcgtatatcttccagttttgcatccctttagtgccgg

SEQ ID NO: 551280 - DNA, 75 bp, synthetic construct
  source 1..75: mol_type = other DNA
accaaaccgatcggctcattctttaccgagcaggaagcagaacaactgacaaaacagggttacaccctgaaagaa

SEQ ID NO: 551281 - DNA, 75 bp, synthetic construct
  source 1..75: mol_type = other DNA
gttgaggccgaatcgctatcgccgtccggctgtccagtgtttttgagaccctgtgtgaatactgcaccaaaaaca

SEQ ID NO: 551282 - DNA, 75 bp, synthetic construct
  source 1..75: mol_type = other DNA
gttgaaaaatatcgaccagattttcagtgaattaccgacaaactcgcagctttttgccgcagatagcggcgtaaa

SEQ ID NO: 551283 - DNA, 75 bp, synthetic construct
  source 1..75: mol_type = other DNA
gcgggcggaagtgacagcattagcggttgaggcggaatctgctatcgccgttcgactgtccagcgcttttgagac

SEQ ID NO: 551284 - DNA, 75 bp, synthetic construct
  source 1..75: mol_type = other DNA
gtcagaaaccgaaagaattagtctggaaacagcgtgagatacctattccaggtgacagtgaagcattaataaaaa

SEQ ID NO: 551285 - DNA, 75 bp, synthetic construct
  source 1..75: mol_type = other DNA
ggcagagtgcgaattgttagctcgggtgattaaagctgtattgctacgttcaattgagcagggcggcacgacgct

SEQ ID NO: 551286 - DNA, 75 bp, synthetic construct
  source 1..75: mol_type = other DNA
gttgtccatgaggcacgcttttatatggcacagagcgctgaggccatgctggaggcaggtaaacggctaataatc

SEQ ID NO: 551287 - DNA, 75 bp, synthetic construct
  source 1..75: mol_type = other DNA
gccgacgcccagcgccgcgttctggctgacaagaacagcaaaatcgacaacctctccacccagcttgccaaaaaa

SEQ ID NO: 551288 - DNA, 75 bp, synthetic construct
  source 1..75: mol_type = other DNA
cctgcccggtaggcatgggagtctcctgctccgctgaccgtaacattaaagcgaaaatcaaccgcgaaggtatct

SEQ ID NO: 551289 - DNA, 75 bp, synthetic construct
  source 1..75: mol_type = other DNA
caggccgcgaagcgctgattaccgtgttaagcaaagcgaaagaagggattgaaggtaaaaccggaacggtgattt

SEQ ID NO: 551290 - DNA, 75 bp, synthetic construct
  source 1..75: mol_type = other DNA
ttgccactttatcttcctgacgacgaaacctttgcaagtttctggccgggggataactcctctttactggccgcg

SEQ ID NO: 551291 - DNA, 75 bp, synthetic construct
  source 1..75: mol_type = other DNA
gagttgtgggaaatggcgattttcgatctctacaaccgcattctggaatcgggcaacacgcgcttgttgatcact

SEQ ID NO: 551292 - DNA, 75 bp, synthetic construct
  source 1..75: mol_type = other DNA
aggcgcggggcgcagccatctgctgcacgcggcttgcgcggaactatcgcaacgtggcgatgcggtggggtatgt

SEQ ID NO: 551293 - DNA, 75 bp, synthetic construct
  source 1..75: mol_type = other DNA
cctggccgactggaagggggtgctgtttatgcaggggcattgcccttactgtcaccagtttgacccggtactgaa

SEQ ID NO: 551294 - DNA, 75 bp, synthetic construct
  source 1..75: mol_type = other DNA
gtcggttgctccacatttttgattggttttattccgacgtatcaggaaattgggatctgggcaccgctcatatta

SEQ ID NO: 551295 - DNA, 75 bp, synthetic construct
  source 1..75: mol_type = other DNA
ttggtcttggtggcgagtacggcggagcggcattgatgaccatagaatcagcgcccgaatcccgacgcggatttt

SEQ ID NO: 551296 - DNA, 75 bp, synthetic construct
  source 1..75: mol_type = other DNA
atgaacggcaggtctgtatcgaaaccttacctgcagagacgctgattgattatgcgtttcacccggagactgcat

SEQ ID NO: 551297 - DNA, 75 bp, synthetic construct
  source 1..75: mol_type = other DNA
tggctgcttaaaaaaagaacaaatggttgtgtccgctattgccagtacacctcaaactgagttctcatggttccg

SEQ ID NO: 551298 - DNA, 75 bp, synthetic construct
  source 1..75: mol_type = other DNA
gtacgaaaacgggctgtatacgcgccacatcagactcagtcgcccagtatctgacagcaaataccccttgccacc

SEQ ID NO: 551299 - DNA, 75 bp, synthetic construct
  source 1..75: mol_type = other DNA
ccgatacggacagtataacgaaacgggtatttacatctcgatcgagaagaccattatcattacaatcaccgtttc

SEQ ID NO: 551300 - DNA, 75 bp, synthetic construct
  source 1..75: mol_type = other DNA
ttcaactacaaagaggttgagggggtgattgacacagagaaactcactttcaccgtctgtgacagtgaatacaaa

SEQ ID NO: 551301 - DNA, 75 bp, synthetic construct
  source 1..75: mol_type = other DNA
ccgaaagaatcatttatctggcaggatccacttcctgctgctgattacactatgatcgatagtcaggatataaaa

SEQ ID NO: 551302 - DNA, 75 bp, synthetic construct
  source 1..75: mol_type = other DNA
tgccggtgcttatcagtggaaacctaaaaacgcagcaaacattgttcaggatgcacatgacccatcggtattgca

SEQ ID NO: 551303 - DNA, 75 bp, synthetic construct
  source 1..75: mol_type = other DNA
gaactgaaaaccctttaccacaaaaatgtcagaattgtggtgatagatgccacgacagatgaggatattcatcaa

SEQ ID NO: 551304 - DNA, 75 bp, synthetic construct
  source 1..75: mol_type = other DNA
tcggtctcataccaggaagcttatgcgcgggtatcccggtatcttgagattattaacccagaaatcacgacaatc

SEQ ID NO: 551305 - DNA, 75 bp, synthetic construct
  source 1..75: mol_type = other DNA
gccactgctgcacagagggggcccactggattgagagcaggctcttcacctccgggcaggcagaccctgaagaat

SEQ ID NO: 551306 - DNA, 75 bp, synthetic construct
  source 1..75: mol_type = other DNA
gaattcaaagccgcctgtgaaaaatatcactacacatcggcgcaaattctcccccatgacagttatctgattaat

SEQ ID NO: 551307 - DNA, 75 bp, synthetic construct
  source 1..75: mol_type = other DNA
ccgtttttccctacaccctggatggtcagggggataccgcctttccggaagcattaccggtgccaccggacgtga

SEQ ID NO: 551308 - DNA, 75 bp, synthetic construct
  source 1..75: mol_type = other DNA
gacaagacagaaaagccggctccccgctggttccgcctcagcaacggcaggcaggttaacctggccgactggaag

SEQ ID NO: 551309 - DNA, 75 bp, synthetic construct
  source 1..75: mol_type = other DNA
tggtggccatcgccattccgcttcttctggtaacgggggcgcaggcatcgacatttgcggagattgagcgactct

SEQ ID NO: 551310 - DNA, 75 bp, synthetic construct
  source 1..75: mol_type = other DNA
gtcaccagtttgacccggtactgaaacagctggcacagcagtacggtttttccgtttttccctacaccctggatg

SEQ ID NO: 551311 - DNA, 75 bp, synthetic construct
  source 1..75: mol_type = other DNA
gtgacgcaaatgatgcgcatgtttaactttatgaaaagtatcggagcaactcccatcgttaaagctatcgatgta

SEQ ID NO: 551312 - DNA, 75 bp, synthetic construct
  source 1..75: mol_type = other DNA
tgaggcattaccgcttttacagggggcaacggatgccgccggttttatggcgcggatggataccgttctgcagat

SEQ ID NO: 551313 - DNA, 75 bp, synthetic construct
  source 1..75: mol_type = other DNA
tttttattattgtcttcctgctttctggctgttcaacatcagggaaccagaaccttaaaagcgaaacaccacaaa

SEQ ID NO: 551314 - DNA, 75 bp, synthetic construct
  source 1..75: mol_type = other DNA
aaaaaaagcaaaaagacagtgggaagtatatcgtcaatgtgaaaaacttggcttttttaagtcattaatgtgttt

SEQ ID NO: 551315 - DNA, 75 bp, synthetic construct
  source 1..75: mol_type = other DNA
ataagaacagctcaggattatgcattttggttatcgattttaaaagacaataatagggcgtatttaattccattt

SEQ ID NO: 551316 - DNA, 75 bp, synthetic construct
  source 1..75: mol_type = other DNA
catccagaaagcaaaagcaggatgtccggtttcacaggtactgaaagcggaaattacgctggtattagacgtcaa

SEQ ID NO: 551317 - DNA, 75 bp, synthetic construct
  source 1..75: mol_type = other DNA
cgggaagggaacagtatctaccgagagcggtgtgctgaaccaacaaccgtatgggtttaacacgcgttttgaagg

SEQ ID NO: 551318 - DNA, 75 bp, synthetic construct
  source 1..75: mol_type = other DNA
ctgattggcgcagcgcatgccgcatgtttctcaatggcgctttcattaatgctgggggaagcgggattcacgcca

SEQ ID NO: 551319 - DNA, 75 bp, synthetic construct
  source 1..75: mol_type = other DNA
cactggagcagtccggtgagatgggccggaaaatggatgcctttaaggagcgggtgatccgcaacagtctgcggc

SEQ ID NO: 551320 - DNA, 75 bp, synthetic construct
  source 1..75: mol_type = other DNA
tgggggcagagtgtggccgccgccgatcttggcacctggggcgatctgtggccggtaaaggagccggacatgctg

SEQ ID NO: 551321 - DNA, 75 bp, synthetic construct
  source 1..75: mol_type = other DNA
gctgctgtttgttatcagcctctggctgcaactggggttgccgaacgaactgtcgcgctttacgccattctgcct

SEQ ID NO: 551322 - DNA, 75 bp, synthetic construct
  source 1..75: mol_type = other DNA
ctgatgtggtgacggtggggattgacggcggagggctggatgatctgctggggatgtatgtgattgggcgtgacc

SEQ ID NO: 551323 - DNA, 75 bp, synthetic construct
  source 1..75: mol_type = other DNA
gagcgaggcgtcccggtttcaggatcttgttgcctgtggagatatgaccattgtccggcgtgtcggggatgacac

SEQ ID NO: 551324 - DNA, 75 bp, synthetic construct
  source 1..75: mol_type = other DNA
tggatgaaacgccagacgccgcccacactggagagcaaaattatcctcgtgcagggcagtatcccggagatgcag

SEQ ID NO: 551325 - DNA, 75 bp, synthetic construct
  source 1..75: mol_type = other DNA
gacgttgttgcctgtggcgttgatctcccgctatcgccatcagcgtgactggcgcaccttgctgttacaaggtgc

SEQ ID NO: 551326 - DNA, 75 bp, synthetic construct
  source 1..75: mol_type = other DNA
gtggctgctgatttactggctaacgcaggcggtcggtttaacccattttccgttattgatgatcggtagtttact

SEQ ID NO: 551327 - DNA, 75 bp, synthetic construct
  source 1..75: mol_type = other DNA
ttaaggagcgggtgatccggaacagtctgcggccccctgccgtgcccggtatcggacgcacggagaaatacggaa

SEQ ID NO: 551328 - DNA, 75 bp, synthetic construct
  source 1..75: mol_type = other DNA
cgctgcaaaaggagctggcacgcaatcagcatcttgccgaacgtttgctggaaaccgaagagagcgtgcgccgcg

SEQ ID NO: 551329 - DNA, 75 bp, synthetic construct
  source 1..75: mol_type = other DNA
atactgtaatttcctgcttttttatcttctctgccgcatggttttgcctgtggagtattagcctgcatctggttg

SEQ ID NO: 551330 - DNA, 75 bp, synthetic construct
  source 1..75: mol_type = other DNA
taccggaatgcgtgagcgggtaacggcactgggcggcacgttgacgatttcctgtctgcacggtacacgcgtcag

SEQ ID NO: 551331 - DNA, 75 bp, synthetic construct
  source 1..75: mol_type = other DNA
cgcgaatggctgggctggggccatgcctgggcgcatgaaaccgcggtggccagacgaaaaagtgaggcagcccgt

SEQ ID NO: 551332 - DNA, 75 bp, synthetic construct
  source 1..75: mol_type = other DNA
tattttagctgttgaaatttatccatgtgaaatacatagtgtaagatgcctttctgaaaaggggttactaatgga

SEQ ID NO: 551333 - DNA, 75 bp, synthetic construct
  source 1..75: mol_type = other DNA
ggtgatatacatagtgtcaaatgcctgtcaccgaatgcccttatgttggagataaaggaaggaccatttgaccca

SEQ ID NO: 551334 - DNA, 75 bp, synthetic construct
  source 1..75: mol_type = other DNA
actggccgcggatatccgggataacgaaggacgtgtcttcgcccgccagggggaggtgatgaatccgctgcagta

SEQ ID NO: 551335 - DNA, 75 bp, synthetic construct
  source 1..75: mol_type = other DNA
tctggatgacctctgccaggtgcagacacatatccggaccatcacccacagggtgacggacaccacccttaaggt

SEQ ID NO: 551336 - DNA, 75 bp, synthetic construct
  source 1..75: mol_type = other DNA
tgtcaaaacacgccaatgtggaaattggccttgccctgcgttctgaccgctgggcgggcgcggatttctgggagc

SEQ ID NO: 551337 - DNA, 75 bp, synthetic construct
  source 1..75: mol_type = other DNA
ggtgatatacacagtgtcgaatgtctctctccgagagcattaatgatggaagtgaaagaagggccttttgatcct

SEQ ID NO: 551338 - DNA, 75 bp, synthetic construct
  source 1..75: mol_type = other DNA
gccagttggcctaccagggcgcggtaattcagatgattgcgcacggcttgtcggcggcgggtctgtttattctct

SEQ ID NO: 551339 - DNA, 75 bp, synthetic construct
  source 1..75: mol_type = other DNA
ctggttaccggatgcgcactcccaggctccgaccgccggttccgttgacctcgcggggatcttgctgaaaaccgc

SEQ ID NO: 551340 - DNA, 75 bp, synthetic construct
  source 1..75: mol_type = other DNA
ttgatgaactgtggctgtttggcaagcagtacaaagcggaagacatgctacgtgaagccatcggcgggcttgcct

SEQ ID NO: 551341 - DNA, 75 bp, synthetic construct
  source 1..75: mol_type = other DNA
cgtcctcgggtagacgcgttaatccaattcttgaacgataaagtagttgattatgctattccaaggaaaaaaatc

SEQ ID NO: 551342 - DNA, 75 bp, synthetic construct
  source 1..75: mol_type = other DNA
ttccctttattggcggcttcctgtgctggcagactgaacgctttggcgtcaaggtgccacgctggatcgcgctga

SEQ ID NO: 551343 - DNA, 75 bp, synthetic construct
  source 1..75: mol_type = other DNA
tcgcggggatcttgctgaaaactgccgcttacggtttgctgcgtttctccctaccgctgttcccgaacgcgtcgg

SEQ ID NO: 551344 - DNA, 75 bp, synthetic construct
  source 1..75: mol_type = other DNA
ttaaggagcgggtgatccggaacagtctgcggccccctgccgtgcccggtatcggacgcactgagaaatacggta

SEQ ID NO: 551345 - DNA, 75 bp, synthetic construct
  source 1..75: mol_type = other DNA
aagccagaatccccgcgctgcgtgagcgggccaatggcctgttattgcaagggcagtggctggatgcctccattc

SEQ ID NO: 551346 - DNA, 75 bp, synthetic construct
  source 1..75: mol_type = other DNA
tcaggttcagacactggcggagaaaaaccagcatcaggcgcaaattgagcgcgatgccttgcgtgtggtaggtct

SEQ ID NO: 551347 - DNA, 75 bp, synthetic construct
  source 1..75: mol_type = other DNA
tcaactcacttccttaattaataatgccatacagaacgcgccggatatgcaggttgctgaacagcgcattcaact

SEQ ID NO: 551348 - DNA, 75 bp, synthetic construct
  source 1..75: mol_type = other DNA
aacgacaaaaattccttctgtccccaatattaattgccatcctgctactaagcggttgcggggacaaaaacgagc

SEQ ID NO: 551349 - DNA, 75 bp, synthetic construct
  source 1..75: mol_type = other DNA
caagttaattgccttgcaggaaaacatccaggtggttattcgcatgaacaatgtcatgaaacactggtcgaaaat

SEQ ID NO: 551350 - DNA, 75 bp, synthetic construct
  source 1..75: mol_type = other DNA
gcgcaggcccgctttaacgcgggcatcattgctggttcccgcgtcagcgaagccagaatcccggcgctgcgtgag

SEQ ID NO: 551351 - DNA, 75 bp, synthetic construct
  source 1..75: mol_type = other DNA
aagaatcgggcggaggttactgctcgcctgggtacggttaaagcacgggcggcggaacgcgagcaaacccgccaa

SEQ ID NO: 551352 - DNA, 75 bp, synthetic construct
  source 1..75: mol_type = other DNA
atgatgaactgccaacggaagggaatgagcacggtcaggcgttccgcgatgtggaactggaaaaagaattgctga

SEQ ID NO: 551353 - DNA, 75 bp, synthetic construct
  source 1..75: mol_type = other DNA
cggtgctggatccttcagcagaggattttgatgaccagttgcgggcgcaatttggtggttctttggcgcagaaag

SEQ ID NO: 551354 - DNA, 75 bp, synthetic construct
  source 1..75: mol_type = other DNA
gcgctgcgtgagcgggccaatggcctgttattgcaagggcagtggctggatgcctccattcaactcactggtgcg

SEQ ID NO: 551355 - DNA, 75 bp, synthetic construct
  source 1..75: mol_type = other DNA
gccttgaacacggtcttgcagcaaatcgaaaaagagcagaacaccattatcgcgaccgatcgccagctctatcag

SEQ ID NO: 551356 - DNA, 75 bp, synthetic construct
  source 1..75: mol_type = other DNA
gtaaagaagaagcgcgtattgactggtcactttcggcagcacagcttgaacgctgcattcgcgctttcaatccat

SEQ ID NO: 551357 - DNA, 75 bp, synthetic construct
  source 1..75: mol_type = other DNA
ttaaggagcgggtgatccgaaacagtctgcggccccctgccgtgcccggtatcggacgcacagagaaatacggaa

SEQ ID NO: 551358 - DNA, 75 bp, synthetic construct
  source 1..75: mol_type = other DNA
cgggaatgtttgattatcactacaatcagtggcttcaagctgaaaatcaaaccccatcggccatcgacgctttcc

SEQ ID NO: 551359 - DNA, 75 bp, synthetic construct
  source 1..75: mol_type = other DNA
tccgacatgccgaaggctccagtcatgcagaaatgttggggatcgagcaagaagacgatattggccttccgagta

SEQ ID NO: 551360 - DNA, 75 bp, synthetic construct
  source 1..75: mol_type = other DNA
ttaaggagcgggtgatccggaacagtctgcggccccctgccgtgcccggtatcggacgcacagagaaatacggga

SEQ ID NO: 551361 - DNA, 75 bp, synthetic construct
  source 1..75: mol_type = other DNA
ttaaggagcgggtgatccgcaacagtctgcggccccctgccgtgcccggtatcggacgcaccgagaaatacggaa

SEQ ID NO: 551362 - DNA, 75 bp, synthetic construct
  source 1..75: mol_type = other DNA
ttaaggagcgggtgatccgcaacagtctgcggccccctgccgtgcccggtatcggacgcacagagaaatacggca

SEQ ID NO: 551363 - DNA, 75 bp, synthetic construct
  source 1..75: mol_type = other DNA
ctgtcattcctgaatgtgtggcagatttgaaaggatatccactctatatcatcgtggcttattggggattaagaa

SEQ ID NO: 551364 - DNA, 75 bp, synthetic construct
  source 1..75: mol_type = other DNA
agaaaagcatttttaatgaattgccctggggcagatcctgctcacgtcagtaaaattatgagtaagtttggaaga

SEQ ID NO: 551365 - DNA, 75 bp, synthetic construct
  source 1..75: mol_type = other DNA
gagatgccgcgtcttggctgtatcaacgttcatggttcactgctgccgcgctggcgcggtgccgcgccaatccaa

SEQ ID NO: 551366 - DNA, 75 bp, synthetic construct
  source 1..75: mol_type = other DNA
atcaaccaatcggtactttctatttaacatcaataagagccattgacttgctcgatatagttagagttgatcgtc

SEQ ID NO: 551367 - DNA, 75 bp, synthetic construct
  source 1..75: mol_type = other DNA
cacagaaaagcgtcactgaatcctcttccacaccgcatccagcaaagaaaaaaacgtcgtctgtacttaacggaa

SEQ ID NO: 551368 - DNA, 75 bp, synthetic construct
  source 1..75: mol_type = other DNA
gcatgcctccgtttaatgatgcggatgctggcgtacagacctggcaaaccacacaagaatcatcaccttccgttc

SEQ ID NO: 551369 - DNA, 75 bp, synthetic construct
  source 1..75: mol_type = other DNA
cgaaaacgctgcgtgaaagtgcggaacctgtcaccattgtttctaccggaccgcaaactaacgttgccttgctgc

SEQ ID NO: 551370 - DNA, 75 bp, synthetic construct
  source 1..75: mol_type = other DNA
ccaacggactgttgatgcagctggtgatggatctcaaaagtggctatctgcgccgctgtgaagcgctggggcttt

SEQ ID NO: 551371 - DNA, 75 bp, synthetic construct
  source 1..75: mol_type = other DNA
gatggacctcaagagcggctacctgcgtcgctgcgaatctctggggctggcccgggaggaaatgcagatgctgca

SEQ ID NO: 551372 - DNA, 75 bp, synthetic construct
  source 1..75: mol_type = other DNA
gtatggataccagcaatatggatgtttttgttcagcagtatgctgatacagtgaaatatctgtccgagaaaaaat

SEQ ID NO: 551373 - DNA, 75 bp, synthetic construct
  source 1..75: mol_type = other DNA
cgcttgcatccgtacatgaaatgatggaatcactgcatgatatcggtgcagtaacaaaacagactatgcgggaat

SEQ ID NO: 551374 - DNA, 75 bp, synthetic construct
  source 1..75: mol_type = other DNA
tcatgcaactgaaatgactcaatatgatcaatctcttcattttaatatgacaacggctaatattgattatgcttc

SEQ ID NO: 551375 - DNA, 75 bp, synthetic construct
  source 1..75: mol_type = other DNA
gggggtgcaggtaatgaagtgaccgttaccggaaaagggaatattgatgttactgttgatgggggcgggctgagc

SEQ ID NO: 551376 - DNA, 75 bp, synthetic construct
  source 1..75: mol_type = other DNA
gagatggtcttctcgtccggatgaccagaaacctccgtgatttagccagcgcggtttttggtacaggtgggcaga

SEQ ID NO: 551377 - DNA, 75 bp, synthetic construct
  source 1..75: mol_type = other DNA
acactttaactgttaaaggtgatggagatattgcagttactgttaatgataaaggaatgacgattgacggaacaa

SEQ ID NO: 551378 - DNA, 75 bp, synthetic construct
  source 1..75: mol_type = other DNA
ccctcaatgatgacctgacagtggggcatgacaaagcggggagtataaccgtcaataatgctgcaggtaacagca

SEQ ID NO: 551379 - DNA, 75 bp, synthetic construct
  source 1..75: mol_type = other DNA
gttgccattggcagccgcacgctttccggtggggagttgtcgctggctctgggctccatcgcccttgcgaaaggt

SEQ ID NO: 551380 - DNA, 75 bp, synthetic construct
  source 1..75: mol_type = other DNA
ttcaacagcctcaggaataggttctgttgccattggcagccgcacgctttccggtggggagttgtcgctggctct

SEQ ID NO: 551381 - DNA, 75 bp, synthetic construct
  source 1..75: mol_type = other DNA
accaaataccacgtcaacttcatgggtggagacctgggcaaagatctgactcaggcctgggcagtggcgatggcg

SEQ ID NO: 551382 - DNA, 75 bp, synthetic construct
  source 1..75: mol_type = other DNA
tatggtgaagtcacaatccctgataattatgaggcatcaacagctagtggtgatggaagtattgtgcttggtgct

SEQ ID NO: 551383 - DNA, 75 bp, synthetic construct
  source 1..75: mol_type = other DNA
ggcagtcagttgcatgcaactaaccgtcaggttgccggaaatacacaggcgataaacactctcgggaataaattc

SEQ ID NO: 551384 - DNA, 75 bp, synthetic construct
  source 1..75: mol_type = other DNA
acgaaaaaacttggtgaagaagttgagtttaatgatgccggaccaataaaaacaaaaattaataataacaaactt

SEQ ID NO: 551385 - DNA, 75 bp, synthetic construct
  source 1..75: mol_type = other DNA
agaacattctgtctcacttggttcttatgcaaaggcgacagatgtcaatacagtgagtgttggtctaaactctga

SEQ ID NO: 551386 - DNA, 75 bp, synthetic construct
  source 1..75: mol_type = other DNA
aaggcccattaaaaacccaggtggttgacgataagctagagataacagcagaaatagccgattttgtaactaacg

SEQ ID NO: 551387 - DNA, 75 bp, synthetic construct
  source 1..75: mol_type = other DNA
ccccaagctgttttttctattggggcggaaaggaatgaacgtcagatagtcaatgtcgccgctggttctatatct

SEQ ID NO: 551388 - DNA, 75 bp, synthetic construct
  source 1..75: mol_type = other DNA
attgtcagcacaagacggaacagggatgacgctgtttgaaaataataccgtgagtggtgagtataataatggcgg

SEQ ID NO: 551389 - DNA, 75 bp, synthetic construct
  source 1..75: mol_type = other DNA
cttcagggggtaaacgataaggtgtataccctggcaaagttgtataatttgccgtctgatgtcctgcctcgttaa

SEQ ID NO: 551390 - DNA, 75 bp, synthetic construct
  source 1..75: mol_type = other DNA
gtatggataccagcaatatggatgtttttgttcagcaatatgctgacacagtgaaatatctgtctgagaaaaaat

SEQ ID NO: 551391 - DNA, 75 bp, synthetic construct
  source 1..75: mol_type = other DNA
tccagaaaaccagattccagtatatctggaacgagaagatggtacttatgttcaggtgccacagccaatcgttat

SEQ ID NO: 551392 - DNA, 75 bp, synthetic construct
  source 1..75: mol_type = other DNA
taccagtgtgttcgttaacccagatgaatacggctatgactatcgtaatgcggcaacttttgagtttgagatagc

SEQ ID NO: 551393 - DNA, 75 bp, synthetic construct
  source 1..75: mol_type = other DNA
cagttaatactgaagattctgatgttctctctgatatgaacttggatatagcattttctcttgcagaaaatgaaa

SEQ ID NO: 551394 - DNA, 75 bp, synthetic construct
  source 1..75: mol_type = other DNA
attatcaggttacacagcaaaaaaacaaaatgacaaactggaggtaagcagtcatttgaaatatattgatttaca

SEQ ID NO: 551395 - DNA, 75 bp, synthetic construct
  source 1..75: mol_type = other DNA
accccgcggcgatgcccgtcctggctaccgtcggaggattgatcatcggcagttttttgaatgtggtgatttggc

SEQ ID NO: 551396 - DNA, 75 bp, synthetic construct
  source 1..75: mol_type = other DNA
aaagaagcattaggcatgggcgatgtattattgttcgctgcgttaggtagttgggggggccgttgtcgctaccca

SEQ ID NO: 551397 - DNA, 75 bp, synthetic construct
  source 1..75: mol_type = other DNA
gatttatcactttttactctctgcgctggatagccggaatagttctgcgtaaagaagcattaggcatgggcgatg

SEQ ID NO: 551398 - DNA, 75 bp, synthetic construct
  source 1..75: mol_type = other DNA
ctggcctgctgatgccattgcccgggcggaagatgtggtgttgcgtctgtccgggatgagcggggctgttcatgc

SEQ ID NO: 551399 - DNA, 75 bp, synthetic construct
  source 1..75: mol_type = other DNA
atgcattttgatgtttttcagcaatatcctgctgcgatacctgtcctggcaaccgcaggaggattgatcatcggc

SEQ ID NO: 551400 - DNA, 75 bp, synthetic construct
  source 1..75: mol_type = other DNA
ataaggcgctcgcgccgcatccggcatgatataaggcgtatcgggttaacacatatgcccgatgcgccatcttat

SEQ ID NO: 551401 - DNA, 75 bp, synthetic construct
  source 1..75: mol_type = other DNA
ttccgcacgaggacaaacagaaaagtatgttatcaagaaagtacttcgtcatcgcgtgattcaagggaaaaaatt

SEQ ID NO: 551402 - DNA, 75 bp, synthetic construct
  source 1..75: mol_type = other DNA
caaaccgttaagttaatggttactaatccagcagaagcgggatcactcggcgtatcctatacgatgatggagctt

SEQ ID NO: 551403 - DNA, 75 bp, synthetic construct
  source 1..75: mol_type = other DNA
atgaacgagcaaacccatcacgtaccaaaagacatcgagcggcttaaattcatcgacgccatagacaacggagat

SEQ ID NO: 551404 - DNA, 75 bp, synthetic construct
  source 1..75: mol_type = other DNA
tcgccgttgttctcgacctgttcgcaagaaaaccagtgggctgggcatgtcgttctcgccggacagcaggctcac

SEQ ID NO: 551405 - DNA, 75 bp, synthetic construct
  source 1..75: mol_type = other DNA
taagcccgtcggggtgatgttccaagcgatcaaggcagtcattatacgagcaggcagttccggcagttactgtgg

SEQ ID NO: 551406 - DNA, 75 bp, synthetic construct
  source 1..75: mol_type = other DNA
gggtccatcgcagcagctacaaatactggaaaaaccgtcctgaaaaaccagacggcagacgggctgtattacgca

SEQ ID NO: 551407 - DNA, 75 bp, synthetic construct
  source 1..75: mol_type = other DNA
tccaacaattttagctttctttattattaagtttatttgtatcaatagcctcgatgctttaagagtttttcagct

SEQ ID NO: 551408 - DNA, 75 bp, synthetic construct
  source 1..75: mol_type = other DNA
tcatcaatcccgtcggaagcactgacagcggtttctgaggcgcttccggcagcgaccgccgatgacgatgacagc

SEQ ID NO: 551409 - DNA, 75 bp, synthetic construct
  source 1..75: mol_type = other DNA
ggaacactgcttaacccggtggttgccggagcggcaatggcgctctcgtcgattaccgtagtgagtaacgccaac

SEQ ID NO: 551410 - DNA, 75 bp, synthetic construct
  source 1..75: mol_type = other DNA
aatttcagaaaattggatatgagattgaatattatagtttatatcattattttcttctgcagcacatttccaata

SEQ ID NO: 551411 - DNA, 75 bp, synthetic construct
  source 1..75: mol_type = other DNA
gcatcgcaaggggcaacgcctgtgctgctggcggttgacgggaaagcggtagccctgctggctgtacgcgatcca

SEQ ID NO: 551412 - DNA, 75 bp, synthetic construct
  source 1..75: mol_type = other DNA
ttcgggcgtcgggcgggcggctgagtttggcgtgctggtacgggacgccgacgcgctgcaacgcgccagtacgct

SEQ ID NO: 551413 - DNA, 75 bp, synthetic construct
  source 1..75: mol_type = other DNA
atactacgctgtcgcggattattcgtatggtgcgccaggcccagagcagtaagccagaaatcggtcagctggcgg

SEQ ID NO: 551414 - DNA, 75 bp, synthetic construct
  source 1..75: mol_type = other DNA
tatttcccagcgatcatgatcctaaaaaagtaatgagtgaaaatacagtaaatagtgccttacgtgtaatgggat

SEQ ID NO: 551415 - DNA, 75 bp, synthetic construct
  source 1..75: mol_type = other DNA
cttgagctttatatcttccctcacatcggttcgtccgacattcgccagcttaaaaccagccacctgttagccccg

SEQ ID NO: 551416 - DNA, 75 bp, synthetic construct
  source 1..75: mol_type = other DNA
gcatgggtttaggactatggcgcgtggtgcgttgggggagtcggggttatggagtgatgacgcgatagagaggca

SEQ ID NO: 551417 - DNA, 75 bp, synthetic construct
  source 1..75: mol_type = other DNA
tgccagatataaatatagggttaggacagtatataaacaacaatcagtggttctcatctcttacagacagcaatt

SEQ ID NO: 551418 - DNA, 75 bp, synthetic construct
  source 1..75: mol_type = other DNA
acacgcaagaggacgtaactggacatggattccgtgccacagcctgtagttccctgatggagtccggtttgtggc

SEQ ID NO: 551419 - DNA, 75 bp, synthetic construct
  source 1..75: mol_type = other DNA
caagtaatctaacctggagcgaagatcatagtcgtcgcgttctgctgacgcttgagcagtatattttcccctcga

SEQ ID NO: 551420 - DNA, 75 bp, synthetic construct
  source 1..75: mol_type = other DNA
cgacagaacgtttctggaggttcacaggcctggaatgttgctgacgggcaatggttgattttttcggatatggct

SEQ ID NO: 551421 - DNA, 75 bp, synthetic construct
  source 1..75: mol_type = other DNA
gataccggtgcagccgatttacgtgtcactaacgccgtatttcacaataacatcgctaatgacggcaaaggcggt

SEQ ID NO: 551422 - DNA, 75 bp, synthetic construct
  source 1..75: mol_type = other DNA
tgagccttaatcctgccagcggagctatcaatggcacggcgccgggaggttttaacctgaacgggcttaaaattc

SEQ ID NO: 551423 - DNA, 75 bp, synthetic construct
  source 1..75: mol_type = other DNA
taatgcgtttaccggcgagatgagtatccagaatggcgaggtgacgctggggcgcagcgatgagttaatgaatgt

SEQ ID NO: 551424 - DNA, 75 bp, synthetic construct
  source 1..75: mol_type = other DNA
aaccgggcaaaatcaggatattcgttcaatcgatgccacctctggcggcgatatcgacataaccgatggtactgt

SEQ ID NO: 551425 - DNA, 75 bp, synthetic construct
  source 1..75: mol_type = other DNA
gagttgaccgccagcggcactgcgacgtctgcggtacgtgtggaggacggaacgctaaaaggtgaagcggagaat

SEQ ID NO: 551426 - DNA, 75 bp, synthetic construct
  source 1..75: mol_type = other DNA
acggcaaccgcgttaccaaaaattacccgctgctggtggatgtgccggtggtatttccgcgcggcggcggctgca

SEQ ID NO: 551427 - DNA, 75 bp, synthetic construct
  source 1..75: mol_type = other DNA
aatgccgggggcggtggatgtggatctgggtcttgatgacagtgctctggacacagaattttccattggtggtac

SEQ ID NO: 551428 - DNA, 75 bp, synthetic construct
  source 1..75: mol_type = other DNA
agttgcgcttcaccggctctatccagcgtgacgataccggagaagtgcaggccgtggagctggtggtgcgtggac

SEQ ID NO: 551429 - DNA, 75 bp, synthetic construct
  source 1..75: mol_type = other DNA
cagatccgagtcgccttgcctggcattattcagtcattcgatcctgatgcggtgacggcggttgtgcagcctgct

SEQ ID NO: 551430 - DNA, 75 bp, synthetic construct
  source 1..75: mol_type = other DNA
cgacgaccgggtgcatgatttatcggatgctttctgtatcgtcgggccgcagtctcaggcgcagaaaataagcgg

SEQ ID NO: 551431 - DNA, 75 bp, synthetic construct
  source 1..75: mol_type = other DNA
gatgcgttctgtatcgtcggtccgcagtctcaggcgcagaaaatcagcggaatcagcaccagcgccgcgcaactg

SEQ ID NO: 551432 - DNA, 75 bp, synthetic construct
  source 1..75: mol_type = other DNA
atgccaaagttggtggctatctcaataacctacgtgcggcaaatcaggcatttgtgatggagcgacgcgatcacg

SEQ ID NO: 551433 - DNA, 75 bp, synthetic construct
  source 1..75: mol_type = other DNA
gtttaacgggtaccgcaatacctggagcgggagcctgaatgcaccggatgccaccgtcagcatgacagacaccca

SEQ ID NO: 551434 - DNA, 75 bp, synthetic construct
  source 1..75: mol_type = other DNA
gtatgctttacggtgtggggttaaatgcccggtttggcgacaatacgcgtctggggctggaagttgaacgctctg

SEQ ID NO: 551435 - DNA, 75 bp, synthetic construct
  source 1..75: mol_type = other DNA
tccggctctgctgatggcggtttcactgaccactataccctgctgcagatgggggctgaccgtaagcacgaactg

SEQ ID NO: 551436 - DNA, 75 bp, synthetic construct
  source 1..75: mol_type = other DNA
caacggcaccgtcaacctggataatcagtcagtgctgaatatcaatgagatattcaatggcggaatacaggcgaa

SEQ ID NO: 551437 - DNA, 75 bp, synthetic construct
  source 1..75: mol_type = other DNA
tcacctggcaggttaatggcgagaaaggcgataatctgcataaaatcggtgagggcacactgattgtacagggaa

SEQ ID NO: 551438 - DNA, 75 bp, synthetic construct
  source 1..75: mol_type = other DNA
atgaacggaaactccacggcaggaaatatgaaacttaaccggacaatagtcggttttaacgggggaacatcaccg

SEQ ID NO: 551439 - DNA, 75 bp, synthetic construct
  source 1..75: mol_type = other DNA
gctgggttggtgtcgaaacacaagggaaatatactcagggtatgacggttgttgattattactatctcactggta

SEQ ID NO: 551440 - DNA, 75 bp, synthetic construct
  source 1..75: mol_type = other DNA
cgaaaacgctgcgcgaaagtgcggaacctgtcacgattgtgtctaccggaccgcaaactaacgttgccttgctgc

SEQ ID NO: 551441 - DNA, 75 bp, synthetic construct
  source 1..75: mol_type = other DNA
cgggcatcattaatgcttctggataatgggatcttgtgtgattgtctgacaaaaggggatgaaaatgcagaataa

SEQ ID NO: 551442 - DNA, 75 bp, synthetic construct
  source 1..75: mol_type = other DNA
cgtgccggcctgcattatgagttcgatctgacggacagtgctgacgttcatctgaaggatgcagcgggagaacat

SEQ ID NO: 551443 - DNA, 75 bp, synthetic construct
  source 1..75: mol_type = other DNA
attgtcttccagtccgggattccggtggtgatggccggtctggatgttactcacaaagcgcaaatttatgttgaa

SEQ ID NO: 551444 - DNA, 75 bp, synthetic construct
  source 1..75: mol_type = other DNA
caaaattgcccgtatcgtgattatgggtggcgctatgggactgggtaactggacgcctgcggctgaatttaatat

SEQ ID NO: 551445 - DNA, 75 bp, synthetic construct
  source 1..75: mol_type = other DNA
aaatcacgaattttcgatcaattcagaaaatagttattgatagtgcgcgactacagattattgttggtaataatg

SEQ ID NO: 551446 - DNA, 75 bp, synthetic construct
  source 1..75: mol_type = other DNA
aacttattcaatttaggggtgcaattggaaaatcctaccatagactttatgagcaagttatacctatgaaggatg

SEQ ID NO: 551447 - DNA, 75 bp, synthetic construct
  source 1..75: mol_type = other DNA
agaggcgcaattgggaagtcatatcaccgactttatgagcaaattatcccgataaaagatgagttagaatatctc

SEQ ID NO: 551448 - DNA, 75 bp, synthetic construct
  source 1..75: mol_type = other DNA
gtccgcgaggcatacagcgatttttcgcgggtgattaacatcatccggatcctggaccagcaacgcatcaccgaa

SEQ ID NO: 551449 - DNA, 75 bp, synthetic construct
  source 1..75: mol_type = other DNA
atctccatcggccttagctaaattcattcagttttctgcaagtaaaatccccgataaaaaagaaaattcgatttc

SEQ ID NO: 551450 - DNA, 75 bp, synthetic construct
  source 1..75: mol_type = other DNA
ttttcccctaaacttattcaatttaggggggcaattggaaaatcctaccatagactttatgagcaagttatacct

SEQ ID NO: 551451 - DNA, 75 bp, synthetic construct
  source 1..75: mol_type = other DNA
agcgcaattggcttggtacgtttctttaatgctacatcccggcttggtaagcccaacatcaatggaaagagtcat

SEQ ID NO: 551452 - DNA, 75 bp, synthetic construct
  source 1..75: mol_type = other DNA
agtacagataaacgttcagctatagcaataggacagaatgcaaaggtcactgttagtgatagtagtgttgctatt

SEQ ID NO: 551453 - DNA, 75 bp, synthetic construct
  source 1..75: mol_type = other DNA
ccatgaatgacggtctttcttttgtgggtgatgacggaaaggttattcataaaaaactgaatgaaaaactgacca

SEQ ID NO: 551454 - DNA, 75 bp, synthetic construct
  source 1..75: mol_type = other DNA
gtaacggtgattttacgttctctgttgttgatactccgtcattcagcagtgttcagctgaatggaaaaggaaata

SEQ ID NO: 551455 - DNA, 75 bp, synthetic construct
  source 1..75: mol_type = other DNA
ctcatccgaaggtaataagctgacattgtcaggcggtaatggtgccggacaaaatggtgttgttatcagtggtgt

SEQ ID NO: 551456 - DNA, 75 bp, synthetic construct
  source 1..75: mol_type = other DNA
gataggtaataatagtaaaactgataaaatttcagcgaccgcgataggttcacaggctagtgtgatatttgataa

SEQ ID NO: 551457 - DNA, 75 bp, synthetic construct
  source 1..75: mol_type = other DNA
cccgactacgaatgggaagactgttcattatactggatttgcagggggaaacccaaacagcgttttttctgttgg

SEQ ID NO: 551458 - DNA, 75 bp, synthetic construct
  source 1..75: mol_type = other DNA
gactcgtcattaagtaaagcaatccacggcattgttgccgcacgctgtggcctgctgacccaaagttatcagttc

SEQ ID NO: 551459 - DNA, 75 bp, synthetic construct
  source 1..75: mol_type = other DNA
gaaaaagaacgcaatgactctgccctggcagaagcacaggctaaagccgactccgcattcagtgcctgcggtaaa

SEQ ID NO: 551460 - DNA, 75 bp, synthetic construct
  source 1..75: mol_type = other DNA
cgaagaaaaggccaaagccgatgaagccgcagaggaacagcgtaaagctgatgaagctgcggcaaaggaggcgga

SEQ ID NO: 551461 - DNA, 75 bp, synthetic construct
  source 1..75: mol_type = other DNA
cctatgcccaaattggcgtcgaaagcgccgtaatgagcgccagccaacaacaattggtcaccatgctatttgacg

SEQ ID NO: 551462 - DNA, 75 bp, synthetic construct
  source 1..75: mol_type = other DNA
cttaaagcgctgtcagtggcgaccgacgtgaaagagggaatcgatctcgcggcgctggaacaggcgttacaggat

SEQ ID NO: 551463 - DNA, 75 bp, synthetic construct
  source 1..75: mol_type = other DNA
agtttttaaggcgatgcaatggccttccggttatcgcaaaccatcctgacgacgcagttctgacggaggaggatt

SEQ ID NO: 551464 - DNA, 75 bp, synthetic construct
  source 1..75: mol_type = other DNA
aacgcgccagcaccgttttctggtgaaaatgcgctggactaccgcaagcgtgcgctaattgaaccgccccgggtt

SEQ ID NO: 551465 - DNA, 75 bp, synthetic construct
  source 1..75: mol_type = other DNA
cttcccggcaagtattcagcggatcctggccaaccaactgggattcgattttatcgatcgctccaggaaccgcga

SEQ ID NO: 551466 - DNA, 75 bp, synthetic construct
  source 1..75: mol_type = other DNA
atcggcttgatgtgaagtttgacaacgaatcgctattacgcgcggcggggtatcataaaaatggaaagggtgaca

SEQ ID NO: 551467 - DNA, 75 bp, synthetic construct
  source 1..75: mol_type = other DNA
tgatggtatccatgctgccgcaactggcgctatctggctgggggcgattcagggttttgccggggtgagcgtgcg

SEQ ID NO: 551468 - DNA, 75 bp, synthetic construct
  source 1..75: mol_type = other DNA
accaatttgtttgatcatcttatgcaactagcagtcgataacaaggcaaaactacgctctgaatacaacgcttat

SEQ ID NO: 551469 - DNA, 75 bp, synthetic construct
  source 1..75: mol_type = other DNA
ggtatcagatgcggtaaacggcggagggatcgttgagagattattctgggattttgacgggaaaactattacgtt

SEQ ID NO: 551470 - DNA, 75 bp, synthetic construct
  source 1..75: mol_type = other DNA
aggcaattgccaacataaaaatctggcacaagggtgaacagcgcgcgccgcataaaccattgttattgctatacg

SEQ ID NO: 551471 - DNA, 75 bp, synthetic construct
  source 1..75: mol_type = other DNA
accgagttttgcggtttactcgcgcagacgattaacggtgttcgcagttatgccggtccatttggcaaaagcgat

SEQ ID NO: 551472 - DNA, 75 bp, synthetic construct
  source 1..75: mol_type = other DNA
agaattattgttggaagaacaggaagcggtaagtctgcgttgcttaaaaaaatattagacaaaggaaatattaag

SEQ ID NO: 551473 - DNA, 75 bp, synthetic construct
  source 1..75: mol_type = other DNA
ctcgggagcgaaaagcccatgcctcgtcaggaccgatagtgacgctttcctccgtcattgaggcgttttttggca

SEQ ID NO: 551474 - DNA, 75 bp, synthetic construct
  source 1..75: mol_type = other DNA
tttatgttggctattaccagagtggtaaagaaacaacatcgtacagtaatgttgctaactcacaggataatgggc

SEQ ID NO: 551475 - DNA, 75 bp, synthetic construct
  source 1..75: mol_type = other DNA
atgtcaggctaactatatacgtgatgttcagggagggactgtggctccatcatcttcttctaaattgacggggat

SEQ ID NO: 551476 - DNA, 75 bp, synthetic construct
  source 1..75: mol_type = other DNA
ctctatttaccgtttttatttttaccggaaagtaacgcatcactcgtgatactcatgttattttgcaccatattg

SEQ ID NO: 551477 - DNA, 75 bp, synthetic construct
  source 1..75: mol_type = other DNA
agggatgaatacgcagacgaagagtattttaatcaagaggctaataaaatcaggattataggccaagtattttgg

SEQ ID NO: 551478 - DNA, 75 bp, synthetic construct
  source 1..75: mol_type = other DNA
attcgtgaaaaggaggagacactgaaacaacgcgtgatccgcgcgctggcgggtttttcgggttacgggcgggtg

SEQ ID NO: 551479 - DNA, 75 bp, synthetic construct
  source 1..75: mol_type = other DNA
ccgctatagtaagggatgccataggcataccatataaaaacatgatgtactatgtttatagtgacaaagttcttt

SEQ ID NO: 551480 - DNA, 75 bp, synthetic construct
  source 1..75: mol_type = other DNA
atgacaaaacatgaatttgtgtcctttgtcagtggagaattgcggcagggcgctgtacgcttttctcttgctttt

SEQ ID NO: 551481 - DNA, 75 bp, synthetic construct
  source 1..75: mol_type = other DNA
tgagtccgtttgaatccctgctgattgtggatttgggcggaaccacgctggatgtggcaaaggttcagggacaac

SEQ ID NO: 551482 - DNA, 75 bp, synthetic construct
  source 1..75: mol_type = other DNA
cgacacgcaataccagtacagcgatgtgaatgtcattgccattcatcacgcgctggtcaaatcaggcatcacacc

SEQ ID NO: 551483 - DNA, 75 bp, synthetic construct
  source 1..75: mol_type = other DNA
agataaggatgattccactggactggtttatacggtttctctgaatcatgtcactacaacagatgtaacagttac

SEQ ID NO: 551484 - DNA, 75 bp, synthetic construct
  source 1..75: mol_type = other DNA
ggtagcgatactctggttctggcaggtaatatttctgtcaatctggctacagggaagaatgaaggtattgccggc

SEQ ID NO: 551485 - DNA, 75 bp, synthetic construct
  source 1..75: mol_type = other DNA
tgagtattagcgttgagacaacatcaacagatgtcaatggtgatggttttactggtatagctagtgtcaatggga

SEQ ID NO: 551486 - DNA, 75 bp, synthetic construct
  source 1..75: mol_type = other DNA
cgcaggagtcatcacgcgcaacaccactctgtttgaccccggctggtggcagttaccgggatcggaaaagcgcta

SEQ ID NO: 551487 - DNA, 75 bp, synthetic construct
  source 1..75: mol_type = other DNA
tattagcgttgagacaacatcaacagatgtcaatggtgatggttttactggtatagctagtgtcaatgggaccgt

SEQ ID NO: 551488 - DNA, 75 bp, synthetic construct
  source 1..75: mol_type = other DNA
aacagtgaagttaccggggttgccaaagatccgagcggtaatgaaagtgacccgtcaaccgtaacctcaaaaact

SEQ ID NO: 551489 - DNA, 75 bp, synthetic construct
  source 1..75: mol_type = other DNA
ttgccaaagatccgagcggtaatgaaagtgacccgtcaaccgtaacctcaaaaactgatgtgttaccaacagtga

SEQ ID NO: 551490 - DNA, 75 bp, synthetic construct
  source 1..75: mol_type = other DNA
gaagttgaagttaacaaccgtggtcgcgttatccgccagttaaaagaagtcccaccgcaagccgggcacgatatt

SEQ ID NO: 551491 - DNA, 75 bp, synthetic construct
  source 1..75: mol_type = other DNA
accgatccgcgcacaggtggtgtgctggcgctggtttccacgccaagctatgacccaaacttgtttgttgacggt

SEQ ID NO: 551492 - DNA, 75 bp, synthetic construct
  source 1..75: mol_type = other DNA
caggaagtttaggaacattcactgcaacagctacaaccgccaaagcaactgcgttagatggcactgagcatagtt

SEQ ID NO: 551493 - DNA, 75 bp, synthetic construct
  source 1..75: mol_type = other DNA
tgcattccgaaaagagcgcgcacgttcacaccgtttcacctccattccggtgaaaactaacctgaccgaagtaca

SEQ ID NO: 551494 - DNA, 75 bp, synthetic construct
  source 1..75: mol_type = other DNA
cggtatgtacggtgttgctaaccgccctaacggtacggcgcataaatactttgccagcgcaccgtacaaaattgc

SEQ ID NO: 551495 - DNA, 75 bp, synthetic construct
  source 1..75: mol_type = other DNA
ccgtgactggaaaaaatgggggcatggtcgcctgaatgtcacgagatcgctggaagaatctgcggataccttctt

SEQ ID NO: 551496 - DNA, 75 bp, synthetic construct
  source 1..75: mol_type = other DNA
aactcctggataatctggtgcgcagccatatcagcaaggcgctgtcgggtgagcgaatggcagcccgtgacagaa

SEQ ID NO: 551497 - DNA, 75 bp, synthetic construct
  source 1..75: mol_type = other DNA
tgtccggtgccggcatgacgattgtggcagacaaactgtttaatgataagagtcaggttgttgcaggcggtaaac

SEQ ID NO: 551498 - DNA, 75 bp, synthetic construct
  source 1..75: mol_type = other DNA
ccacctcgctggataaccgtgatggtggtcggctggtcagtgaaggtgaactctgtctgcatacgggaggcctgc

SEQ ID NO: 551499 - DNA, 75 bp, synthetic construct
  source 1..75: mol_type = other DNA
gcagattgagaaaaagaccggtgatgtctcttcacagcctcagatggcactggatgtggccagtcttggcggaat

SEQ ID NO: 551500 - DNA, 75 bp, synthetic construct
  source 1..75: mol_type = other DNA
cgtgacggtgtggttaaggccgggcagtcagtatccgtgacagccggtcagcttggtggtgacgggaaactgctt

SEQ ID NO: 551501 - DNA, 75 bp, synthetic construct
  source 1..75: mol_type = other DNA
ccgggaaacaggccgtgcagctcagtgcagataatattcacaaccaggccggcaccattcagggagcaaatgtca

SEQ ID NO: 551502 - DNA, 75 bp, synthetic construct
  source 1..75: mol_type = other DNA
acatgcagaaggcgttttctcagaacggggataacatgctcaaacgtctgggagacggtttttacgagcagcgtc

SEQ ID NO: 551503 - DNA, 75 bp, synthetic construct
  source 1..75: mol_type = other DNA
accacctcgctggataaccgtgagggtggccggctggtcagtgaaggtgaactccgtctgcatacgggaggtctg

SEQ ID NO: 551504 - DNA, 75 bp, synthetic construct
  source 1..75: mol_type = other DNA
gtgctggaacaccgggtgggtggggaccggataatgaagaaaaagcccgtcatcaggaggttcagcaacaacgat

SEQ ID NO: 551505 - DNA, 75 bp, synthetic construct
  source 1..75: mol_type = other DNA
ataattctttaaaagatgcaaggattagcagccaaaaagaatttgcaaaagatccaaataatgctaaaaggatgg

SEQ ID NO: 551506 - DNA, 75 bp, synthetic construct
  source 1..75: mol_type = other DNA
gtaatattgggggaacaattactggtgaagctatcgggaatgtaacaaaaggaacactagatgaagctgataaat

SEQ ID NO: 551507 - DNA, 75 bp, synthetic construct
  source 1..75: mol_type = other DNA
ttgcagaaataatcaaaaataacaccccggacggtgcggggcgtgtggccgcccatgcggttgtgaatgccgcgc

SEQ ID NO: 551508 - DNA, 75 bp, synthetic construct
  source 1..75: mol_type = other DNA
ggcagataaaaaccggctggataccggtacactgggcttcagtgatatcgaaaatcgtgctgattacaaagttga

SEQ ID NO: 551509 - DNA, 75 bp, synthetic construct
  source 1..75: mol_type = other DNA
cgatatgtatatcggtggcacgctggatgcgaatggcagcgccacaggtaaagccggtgtactgaataatcacag

SEQ ID NO: 551510 - DNA, 75 bp, synthetic construct
  source 1..75: mol_type = other DNA
attatcagcaggccattgaaaatggatttgtccggatgacgcaacgcatggtggagatcatgcacggcggggagg

SEQ ID NO: 551511 - DNA, 75 bp, synthetic construct
  source 1..75: mol_type = other DNA
agctgtcggagctaatcaatgctgattttgatatctccctgacaggattcagcccgacagaaattgatgaactgt

SEQ ID NO: 551512 - DNA, 75 bp, synthetic construct
  source 1..75: mol_type = other DNA
tccttcagtggtctgacaaaaccatttacgggtggacaagtgtttattttttccgactattaacagagagaatat

SEQ ID NO: 551513 - DNA, 75 bp, synthetic construct
  source 1..75: mol_type = other DNA
ccccgctgaaattcagggcctttttgaggagtcggcactggtgatcattgattatcagcaagccatcgaaaatgg

SEQ ID NO: 551514 - DNA, 75 bp, synthetic construct
  source 1..75: mol_type = other DNA
taatcgcttgccactgaacgctggctgggatgaagaactgttacggatggagctgtcggagttaatcaatgctga

SEQ ID NO: 551515 - DNA, 75 bp, synthetic construct
  source 1..75: mol_type = other DNA
gaggagtcggcgctggtgatcattgattatcagcaggctattgaaaatggatttgtccggatgacgcagcgcatg

SEQ ID NO: 551516 - DNA, 75 bp, synthetic construct
  source 1..75: mol_type = other DNA
cgtggatggatatcaggatggtgtaatgattgccggggcatggtatctggggcctgctgcttcggtcggtaaaat

SEQ ID NO: 551517 - DNA, 75 bp, synthetic construct
  source 1..75: mol_type = other DNA
atctgtccacacagaatgcgcaactgagtgccggtacgctttccgcccggactgccgggcagttcagcaataatg

SEQ ID NO: 551518 - DNA, 75 bp, synthetic construct
  source 1..75: mol_type = other DNA
gtagccgctactgaccggataccgcttcgcccggtggtgtctgccggtgaaccggtcattctgttgccggggcag

SEQ ID NO: 551519 - DNA, 75 bp, synthetic construct
  source 1..75: mol_type = other DNA
cgctgcaggaaaaaggcgcaaaccgcgacttcagctttatcatcaaacagaacggcatgttctccttcagtggcc

SEQ ID NO: 551520 - DNA, 75 bp, synthetic construct
  source 1..75: mol_type = other DNA
cgttgatcgcgcgttcagccagatgaaggcagcgattcgtgcgaactattctaacccaccagcgcacggagcttc

SEQ ID NO: 551521 - DNA, 75 bp, synthetic construct
  source 1..75: mol_type = other DNA
atcaataacgtcaatgaccatttcaccacggagcgcgtggtggtttccacggaaaaggtgactgagtatcagctc

SEQ ID NO: 551522 - DNA, 75 bp, synthetic construct
  source 1..75: mol_type = other DNA
tggcggggtcacgaaggtattaggctggcgtgcagatgtgtctgccgggttgacttttgggccttacccgattaa

SEQ ID NO: 551523 - DNA, 75 bp, synthetic construct
  source 1..75: mol_type = other DNA
tgacacttacctcgaaagacatcatcaacgatgccggcggcctgatacagagcggtgcatcgctgaatatccgtg

SEQ ID NO: 551524 - DNA, 75 bp, synthetic construct
  source 1..75: mol_type = other DNA
ggcggtggtgctgtctctgagtttaccaatggaattatcaaggatttcaataatcctcaagctcctgaaaaaaag

SEQ ID NO: 551525 - DNA, 75 bp, synthetic construct
  source 1..75: mol_type = other DNA
agaccatgaacagccgccacctgaccggtgatgcggtggatgttgtggcctacattggcagccaggtgtcatggg

SEQ ID NO: 551526 - DNA, 75 bp, synthetic construct
  source 1..75: mol_type = other DNA
atgtcagaaaaatttagttatcgtagtgaaaataatcttgatggcgttaaacgagaactggttgctgtggttcgt

SEQ ID NO: 551527 - DNA, 75 bp, synthetic construct
  source 1..75: mol_type = other DNA
gtcagaacgaaagcgcgggaactgggtgtcagcctgatgttacggggtgattatcaccagtcaacaaaatatccg

SEQ ID NO: 551528 - DNA, 75 bp, synthetic construct
  source 1..75: mol_type = other DNA
acactgccggacggcagcacgcagacggttcaggtacctcaggtgtatgcccgtgtaaaacccggtgatgtgaac

SEQ ID NO: 551529 - DNA, 75 bp, synthetic construct
  source 1..75: mol_type = other DNA
gctgtctcaggagaagttactggcaaccaagtaaaagataaactggacaaggtagggaataaaaatgggagcaat

SEQ ID NO: 551530 - DNA, 75 bp, synthetic construct
  source 1..75: mol_type = other DNA
catgttacggactcaggaacatccacgtattattaccgtatcaggaaaaaaggaaaggataagcagggggagaaa

SEQ ID NO: 551531 - DNA, 75 bp, synthetic construct
  source 1..75: mol_type = other DNA
acgcggtggacaataatctgacaccggaacaaacacaggctgggctggataagatagcgaaaggtgatatgccgg

SEQ ID NO: 551532 - DNA, 75 bp, synthetic construct
  source 1..75: mol_type = other DNA
acgcgcagggcgccgatgccggaaataataacacggtgggcatcagcctctcttacggcagccagtcttcgaaat

SEQ ID NO: 551533 - DNA, 75 bp, synthetic construct
  source 1..75: mol_type = other DNA
ttcggtaagtaaccgttatggtacgacgaaagtgtttgaaagccagaatctgacggataaacagatccataatta

SEQ ID NO: 551534 - DNA, 75 bp, synthetic construct
  source 1..75: mol_type = other DNA
gagctgggaactgccatcgaatggggcggggactggaaaacactgaaagacgggcctcactttcagttgaagtgc

SEQ ID NO: 551535 - DNA, 75 bp, synthetic construct
  source 1..75: mol_type = other DNA
cgcctggtcaccgacgaaggtgaaaaaaacgtgcctctggcagaagtgcagccaggtatgttgctgcgcctgacg

SEQ ID NO: 551536 - DNA, 75 bp, synthetic construct
  source 1..75: mol_type = other DNA
atgtcggaaaaattccgtttcagtcaacgtagcgagaaaaatctggctggcgtaaaaccacaactggtggcggtt

SEQ ID NO: 551537 - DNA, 75 bp, synthetic construct
  source 1..75: mol_type = other DNA
ccacagctggttgctgtcgttcgccgtgcgctggagctgacggaggttgatttcggtattacggaaggcctgcgc

SEQ ID NO: 551538 - DNA, 75 bp, synthetic construct
  source 1..75: mol_type = other DNA
gatttactacaggtgggataacggcgaaaaattgcaggcattacgcaaagagtacgcaatatccgaaacccatat

SEQ ID NO: 551539 - DNA, 75 bp, synthetic construct
  source 1..75: mol_type = other DNA
gttcgccgtgcgctggagctgacggaggttgatttcggtattacggaaggtctgcgcacgaaagagcgccagaaa

SEQ ID NO: 551540 - DNA, 75 bp, synthetic construct
  source 1..75: mol_type = other DNA
acaatggatacgctggtggcgctgggaacgggtgttgcgtggctctattcgatgagcgtcaacctgtggccgcag

SEQ ID NO: 551541 - DNA, 75 bp, synthetic construct
  source 1..75: mol_type = other DNA
ccgcaggggtttccggcgcgcatcttaatcccgctgttaccattgcattgtggctgtttgcctgtttcgacaagc

SEQ ID NO: 551542 - DNA, 75 bp, synthetic construct
  source 1..75: mol_type = other DNA
cgtcaaaccacagctggttgctgtcgttcgccgtgcactggagctgacggaggttgatttcggtattacggaagg

SEQ ID NO: 551543 - DNA, 75 bp, synthetic construct
  source 1..75: mol_type = other DNA
gagctgggaactgccatcgaatggggcggggactggaaaacactgaaagacgggcctcattttcaattgaagcga

SEQ ID NO: 551544 - DNA, 75 bp, synthetic construct
  source 1..75: mol_type = other DNA
gagctgggaaccgccatcgaatggggcggtgagtggcggtcgttaaaggacggggctcactttcagctgaaacga

SEQ ID NO: 551545 - DNA, 75 bp, synthetic construct
  source 1..75: mol_type = other DNA
tgtaggtgcatttgcctaccgcaaactgattggtcgccatttgccttgcgatatctgtgttgtggaagaaaagga

SEQ ID NO: 551546 - DNA, 75 bp, synthetic construct
  source 1..75: mol_type = other DNA
taccgggttgttgatttttttcggtgtgggttgcgttgcagcactaaaagtcgctggtgcgtcttttggtcagtg

SEQ ID NO: 551547 - DNA, 75 bp, synthetic construct
  source 1..75: mol_type = other DNA
aatcaggaacggcgataagacattagccactgctaatgagctgattaagctggaaaatgcagataaacgtagtga

SEQ ID NO: 551548 - DNA, 75 bp, synthetic construct
  source 1..75: mol_type = other DNA
gcagtttaccgttcgcttcgatgaaaacctcaacccggttatctttgatcagcaaaacgttcgccagaaaagcgt

SEQ ID NO: 551549 - DNA, 75 bp, synthetic construct
  source 1..75: mol_type = other DNA
aaagcacggcacgggatctgacgacacagatcctcgcctggccacaagagggcaaatctgcccgtgctgtcagtg

SEQ ID NO: 551550 - DNA, 75 bp, synthetic construct
  source 1..75: mol_type = other DNA
ccatcggtttattattggcatgtagtaccggtatggcaaaaacacagcatttaacgctggaacaacgcatggaat

SEQ ID NO: 551551 - DNA, 75 bp, synthetic construct
  source 1..75: mol_type = other DNA
ataagagtgatttttggtacgaaagggggacgggaaagaatgacgacggttgttgaccgggataaagttcttgat

SEQ ID NO: 551552 - DNA, 75 bp, synthetic construct
  source 1..75: mol_type = other DNA
atgatccgcaggcgttgatttttgattttggtccccggcagtttaccgttcgcttcgatgaaaacctcaacccgg

SEQ ID NO: 551553 - DNA, 75 bp, synthetic construct
  source 1..75: mol_type = other DNA
atgaataatgatatggcgctgatacagctgcatcatgtatcacaacgggcgaaatcctcttcattacgtgaaaac

SEQ ID NO: 551554 - DNA, 75 bp, synthetic construct
  source 1..75: mol_type = other DNA
atgcttgtggggtcgcgacggatatcccaggacatcagcacccgtgatgaaggcggagacggtaaggtggtggtt

SEQ ID NO: 551555 - DNA, 75 bp, synthetic construct
  source 1..75: mol_type = other DNA
atgcttgtggggtcgcggcggatatcccaggacatcagcacccgcgatgagggcggggacgggcaggtggtggtt

SEQ ID NO: 551556 - DNA, 75 bp, synthetic construct
  source 1..75: mol_type = other DNA
cggcattaaagacggctccacagaaggttacggaaaggaatttgctgacgttgtgcgtcaactaatggaaacaaa

SEQ ID NO: 551557 - DNA, 75 bp, synthetic construct
  source 1..75: mol_type = other DNA
cgataactggtattttgaattaaacacgttactggaagacggaacatctttatataacgacggtaattatcatgg

SEQ ID NO: 551558 - DNA, 75 bp, synthetic construct
  source 1..75: mol_type = other DNA
ttcgagctgggttatatctacgcacataataagattgatgaatttagtggtgtcgtgtgtaataatggttgctgg

SEQ ID NO: 551559 - DNA, 75 bp, synthetic construct
  source 1..75: mol_type = other DNA
acaggctctggcatcaatggatttgggacatggcgatggcaggggacaatacgtggctcgtgtttataataaggt

SEQ ID NO: 551560 - DNA, 75 bp, synthetic construct
  source 1..75: mol_type = other DNA
gacagggaaaaagagcagcagcgactgcagcaggcgcaactcatcggtgagattggtaaccaggtggcagatatt

SEQ ID NO: 551561 - DNA, 75 bp, synthetic construct
  source 1..75: mol_type = other DNA
cttgcattctctttgtggctggcttcggggatggtgcattctgtcaatgctgcaggcattgccgcagaccatggc

SEQ ID NO: 551562 - DNA, 75 bp, synthetic construct
  source 1..75: mol_type = other DNA
actccgggcaaagtgtttaaaggcaagaaaatggcaggtcagatgggtaacgaacgtgtaaccgttcagagcctt

SEQ ID NO: 551563 - DNA, 75 bp, synthetic construct
  source 1..75: mol_type = other DNA
ggaacgttatttaccgatggtcttgataaaggcgctttagttggtgcaggcacaggttgggctgtaggtggtatg

SEQ ID NO: 551564 - DNA, 75 bp, synthetic construct
  source 1..75: mol_type = other DNA
agttcgctggatgaataccataaagtgaccggcagcagcgggatgttgtcgaaaaccaccacaaccacgcatgat

SEQ ID NO: 551565 - DNA, 75 bp, synthetic construct
  source 1..75: mol_type = other DNA
tttttaacaaagcccggggaatgctgatggtggtggcagatattgcccgttccggtcgcgccggtgcatcaccgt

SEQ ID NO: 551566 - DNA, 75 bp, synthetic construct
  source 1..75: mol_type = other DNA
tacgtcaggccggtaaacataaaatggcagatcctgaacatccccgtctcagcaataaggcgttaggtatttcag

SEQ ID NO: 551567 - DNA, 75 bp, synthetic construct
  source 1..75: mol_type = other DNA
gtgtccagacgtgaaaaattactgaaacaggatttggttgctcatatccggaaagaccgggggagtttcaagaag

SEQ ID NO: 551568 - DNA, 75 bp, synthetic construct
  source 1..75: mol_type = other DNA
gttgtatttgggacaaaaggaggacgaccaagagatacaacggtattagatcgtgaatcaactctggctgcaatc

SEQ ID NO: 551569 - DNA, 75 bp, synthetic construct
  source 1..75: mol_type = other DNA
tgcccgctggcgaagacgctgaacggtaccgggcagtatttatcgataatctccgctacgctgccgaccgctttg

SEQ ID NO: 551570 - DNA, 75 bp, synthetic construct
  source 1..75: mol_type = other DNA
aaatcaactatccgtggctgttccgcctgttcgatgaggtgggatatcagggctggatcggttgtgaatataaac

SEQ ID NO: 551571 - DNA, 75 bp, synthetic construct
  source 1..75: mol_type = other DNA
taaatgggaattacattctgttattatttgtggtcctcgcgcttgggctatgtctcgggaaattacgacttggtt

SEQ ID NO: 551572 - DNA, 75 bp, synthetic construct
  source 1..75: mol_type = other DNA
cagagggaagacgaaaacctgtcttccctggtattaaaacccgggcagataccgacaggccagcagcgggccaga

SEQ ID NO: 551573 - DNA, 75 bp, synthetic construct
  source 1..75: mol_type = other DNA
cgagttacaacaaataaacggcgctgattattttatatttggacatatgatgtttgataacattcagacgttcgc

SEQ ID NO: 551574 - DNA, 75 bp, synthetic construct
  source 1..75: mol_type = other DNA
ttaatgcccatcactatcgccatatatgggccgttggtgatattcatggtgactatcaattattacaatcccgct

SEQ ID NO: 551575 - DNA, 75 bp, synthetic construct
  source 1..75: mol_type = other DNA
ggcaaccacgaagcaatggcgctggatgcgttcgcgaccggcgatggcaatatgtggcttgccagcggtggtgac

SEQ ID NO: 551576 - DNA, 75 bp, synthetic construct
  source 1..75: mol_type = other DNA
tggaaggtgtcgccagcggtaaagacgccgtggctgaaatcggtgccagtctgcagattgcaaaaatcggggcgg

SEQ ID NO: 551577 - DNA, 75 bp, synthetic construct
  source 1..75: mol_type = other DNA
taccgtgaaatacgtgccggtgctctcaaagcagcggataacgatcttcttggaaactcttacgaccagcggctg

SEQ ID NO: 551578 - DNA, 75 bp, synthetic construct
  source 1..75: mol_type = other DNA
gtccgtgccacactggaagcgcatgggatgagcgtcggaaatgagagtcccctgctccgccggagacaatgccgg

SEQ ID NO: 551579 - DNA, 75 bp, synthetic construct
  source 1..75: mol_type = other DNA
acggattctgcagaacagccgcagagcattacctctgacgcgtgtacggtaacggttaatggtgcgggcggataa

SEQ ID NO: 551580 - DNA, 75 bp, synthetic construct
  source 1..75: mol_type = other DNA
tggtaccgctggcgtttgtgaaaaatctggataagacacttaccgtgaataccggtgcgctgctgacaatgtcag

SEQ ID NO: 551581 - DNA, 75 bp, synthetic construct
  source 1..75: mol_type = other DNA
aatgcgcagtcaggtgataagggggcttatacctgcgtggtaacggattctgcagaacagccgcagagcattacc

SEQ ID NO: 551582 - DNA, 75 bp, synthetic construct
  source 1..75: mol_type = other DNA
tcaatgcccatcactatcgccatatatgggtcgttggtgatattcatggtgaatatcagttattacaatcccgct

SEQ ID NO: 551583 - DNA, 75 bp, synthetic construct
  source 1..75: mol_type = other DNA
tcatctgccccggcgactgctgaaactatggataaggcggaatatctgcgcctggactgcaccatcaaggaagtc

SEQ ID NO: 551584 - DNA, 75 bp, synthetic construct
  source 1..75: mol_type = other DNA
aatatgcctgcgtggtgaccgattcggcagagaaggcacagagtgtgacgtctgttgaatgcaccgggacagtga

SEQ ID NO: 551585 - DNA, 75 bp, synthetic construct
  source 1..75: mol_type = other DNA
cactgtctggtgcgttgaatatgagtctgcatgaactggaaaaaatgctggcgcgtctgctggcccagaaacaac

SEQ ID NO: 551586 - DNA, 75 bp, synthetic construct
  source 1..75: mol_type = other DNA
caaaattcatcacaatgacagcggttattttctctggctggagctccccgagccgttagatgcaggagaattaag

SEQ ID NO: 551587 - DNA, 75 bp, synthetic construct
  source 1..75: mol_type = other DNA
cgtcagccatgcctatcagttgctcgaaagtcaggggcatattatcgcgagaccgcagtcgggttattacgttgc

SEQ ID NO: 551588 - DNA, 75 bp, synthetic construct
  source 1..75: mol_type = other DNA
gtgctggctgatgactaatagccagaatccactcggatttaccttaacgccgcaaaaaaagcacaactggtggcg

SEQ ID NO: 551589 - DNA, 75 bp, synthetic construct
  source 1..75: mol_type = other DNA
tttgacaaaggataacaagccaaaagaatcgggtgcaggagtgagttttctggggttcagaacagcacaaataaa

SEQ ID NO: 551590 - DNA, 75 bp, synthetic construct
  source 1..75: mol_type = other DNA
acaaattgaagttatggcgataataccaaaagaaacctcttatgttaagaggtgcttaattgatactggaggaat

SEQ ID NO: 551591 - DNA, 75 bp, synthetic construct
  source 1..75: mol_type = other DNA
taaaaaagtattactctcagattaatgaactgggcctttctctgatagaagtgtctctggcgagtacgctgttat

SEQ ID NO: 551592 - DNA, 75 bp, synthetic construct
  source 1..75: mol_type = other DNA
gataaatggcatcagaaacaaatgggagtcactgaaaaccagcataatcggaatgggtgacagcatcagtgactg

SEQ ID NO: 551593 - DNA, 75 bp, synthetic construct
  source 1..75: mol_type = other DNA
cggtgatgcgttgaaggctaaccgcctggcgctctatggtcagggtgcagaaacctatgctattggcagaacgct

SEQ ID NO: 551594 - DNA, 75 bp, synthetic construct
  source 1..75: mol_type = other DNA
gccatcggtactgccattcgtcgggcatcccttcaggtcaatcagctccaggagtcgctgctagggggtgttggt

SEQ ID NO: 551595 - DNA, 75 bp, synthetic construct
  source 1..75: mol_type = other DNA
ttttaatactgcatggcagtggggagaacgcgaagaacaagcggtaaaacaattaggcaaacttattcaagagca

SEQ ID NO: 551596 - DNA, 75 bp, synthetic construct
  source 1..75: mol_type = other DNA
atggcactctacggtcagggagtagaaacgtatgcacaggcaagggctgcttacagtcttgtgtccccggctata

SEQ ID NO: 551597 - DNA, 75 bp, synthetic construct
  source 1..75: mol_type = other DNA
tggtttaaacagcgctgggctgacattcaggaagcctttaacggcggcatcgcgggaattggtaaactgctggtt

SEQ ID NO: 551598 - DNA, 75 bp, synthetic construct
  source 1..75: mol_type = other DNA
ccgccttataaatacgcctggaagaaggatggtcagccggttgaggggcagactactgacactttcagtaaagcc

SEQ ID NO: 551599 - DNA, 75 bp, synthetic construct
  source 1..75: mol_type = other DNA
tagagcaaacaatcaatcttgttaataaatcggaagtaaagaaaaattttattatctacggtcctcagctcatct

SEQ ID NO: 551600 - DNA, 75 bp, synthetic construct
  source 1..75: mol_type = other DNA
attgcatacaattcgcaatactctaatttgtagtaataagcatccgcgaattacggtaatgactccaacttactg

SEQ ID NO: 551601 - DNA, 75 bp, synthetic construct
  source 1..75: mol_type = other DNA
gcatgatgcgtccgattccagacccgtactggaagccgggtgatagtatggatgcgcagcatccggtgctgaaaa

SEQ ID NO: 551602 - DNA, 75 bp, synthetic construct
  source 1..75: mol_type = other DNA
ctttatgaatcccaccaagaatctcttaatttaaaggaaataaaactagagcaccccctacccttggttaagctt

SEQ ID NO: 551603 - DNA, 75 bp, synthetic construct
  source 1..75: mol_type = other DNA
acatccgttaccttcaataaagctttacatttcctataataaatcttctttaaacaatctggtgttctcccgatt

SEQ ID NO: 551604 - DNA, 75 bp, synthetic construct
  source 1..75: mol_type = other DNA
gtcgagattgagtgccatgacacacttatttcagccgagaatgctgaagaactgttggttcatcgcaaagccgat

SEQ ID NO: 551605 - DNA, 75 bp, synthetic construct
  source 1..75: mol_type = other DNA
gcaacggtatttcaatcattatcttcgccggtattgtcgcgggacccccgccagccattgcccatactatcgagc

SEQ ID NO: 551606 - DNA, 75 bp, synthetic construct
  source 1..75: mol_type = other DNA
ctctggtggtgcccttagccgtgcttctatctttgctctgggtatcatgccgtacatttcggcatcaattattat

SEQ ID NO: 551607 - DNA, 75 bp, synthetic construct
  source 1..75: mol_type = other DNA
gtattggctcttttattccgatccctggtattgatgccgctgtacttgccaaactgcttgagcaacagcgaggca

SEQ ID NO: 551608 - DNA, 75 bp, synthetic construct
  source 1..75: mol_type = other DNA
ccagccctggtttacatcggctaaaggcaaccacgaagcgatggcgcttgaggcattcgaaactggcgatggaaa

SEQ ID NO: 551609 - DNA, 75 bp, synthetic construct
  source 1..75: mol_type = other DNA
atggtactgaattacaacggcaaactgctgctggttaaggatattgatattcagtcgcccactgcccgcggtgcc

SEQ ID NO: 551610 - DNA, 75 bp, synthetic construct
  source 1..75: mol_type = other DNA
gtgctggcaatattccagtcgatcggtattgctactggtctgccgaatatgcctggtatgcaaggcctggtgatt

SEQ ID NO: 551611 - DNA, 75 bp, synthetic construct
  source 1..75: mol_type = other DNA
atggcgctgaaatgtcctgaatgcggcaccgttgcacacgccagaaccaccgcctatgaagcaccgtcggttaaa

SEQ ID NO: 551612 - DNA, 75 bp, synthetic construct
  source 1..75: mol_type = other DNA
gtacgaagaaagattggtcgatgaagcgagagcatttatctcccgcctatacgacacactgggaccagttaccac

SEQ ID NO: 551613 - DNA, 75 bp, synthetic construct
  source 1..75: mol_type = other DNA
cagcgtggaagtggttgcttgcggtgaagaagggcaggtggaaaaattaatgcagtggttaaagagtggcggccc

SEQ ID NO: 551614 - DNA, 75 bp, synthetic construct
  source 1..75: mol_type = other DNA
atgtcgaaagtctgcataattgcctgggtttacgggcgagttcagggcgttggatttcgctataccacgcagtac

SEQ ID NO: 551615 - DNA, 75 bp, synthetic construct
  source 1..75: mol_type = other DNA
atggtaatgcacatgaataaaaaagtgacaactaatgttcctccggtttccgggattaagcgtattcgcgctttt

SEQ ID NO: 551616 - DNA, 75 bp, synthetic construct
  source 1..75: mol_type = other DNA
cagtataacccggtgcgtaacatgctggaggagcttcagctgacgctggtgacaaaaagcagcaggcactttatc

SEQ ID NO: 551617 - DNA, 75 bp, synthetic construct
  source 1..75: mol_type = other DNA
gatattgttcagggtggtgctcaggttatgggcagactggcaggtcgtggattttgtgttggcccctctccacag

SEQ ID NO: 551618 - DNA, 75 bp, synthetic construct
  source 1..75: mol_type = other DNA
aaaacggttctggatctggctgatactgatatgcattttatccggaagcacttcaatgttgtcttggagagaacg

SEQ ID NO: 551619 - DNA, 75 bp, synthetic construct
  source 1..75: mol_type = other DNA
ctttaacgttgtgctggagcgaaccgtccgggagctgcgcggcgagccatgcctggatctcgaagagttcgcgcc

SEQ ID NO: 551620 - DNA, 75 bp, synthetic construct
  source 1..75: mol_type = other DNA
gaaggggaacgctgtattttgcagggcaggggatccaaacggcctggcagatgaagcgggaaatgctttcacctt

SEQ ID NO: 551621 - DNA, 75 bp, synthetic construct
  source 1..75: mol_type = other DNA
atgaaatttttggtcgtaaagattacatctctatcgattccccgatggctcgcgcattgttgaaaaaagaggtgg

SEQ ID NO: 551622 - DNA, 75 bp, synthetic construct
  source 1..75: mol_type = other DNA
gcgatctggcaatagtgaataccccagccggagaggcgagttggtacgttaatgccatcgaatacgtgaaaccgt

SEQ ID NO: 551623 - DNA, 75 bp, synthetic construct
  source 1..75: mol_type = other DNA
gagccctattatggcaataatgcctccgtgaagcttctgacgcctacgcaggacagtcgggatatcatcagtgca

SEQ ID NO: 551624 - DNA, 75 bp, synthetic construct
  source 1..75: mol_type = other DNA
ccagtttatgcagaattactattctgtcgaaattcttcctgtcggcatggatggcagacctttacaaaatgggtt

SEQ ID NO: 551625 - DNA, 75 bp, synthetic construct
  source 1..75: mol_type = other DNA
ggtacgatatgcctacggcggacccggtgaactacctgaatgcgggtggcagtttaggaggcccatatgcacgct

SEQ ID NO: 551626 - DNA, 75 bp, synthetic construct
  source 1..75: mol_type = other DNA
taaaattcgcgaagtgccaactattttccttgtgtcgaaagacgggtcatcagcgcaacgaattagcgaaggtat

SEQ ID NO: 551627 - DNA, 75 bp, synthetic construct
  source 1..75: mol_type = other DNA
aactgatccctgcgctgatgcgtgcacaaaaccgcgaaacggtgtcagcggatgtcagccagtttgttgccgggc

SEQ ID NO: 551628 - DNA, 75 bp, synthetic construct
  source 1..75: mol_type = other DNA
tgatgcgccattactggaagtgatggattacgctgtagttgtaaaaggactgaaccgtgaaggcgtacatctgca

SEQ ID NO: 551629 - DNA, 75 bp, synthetic construct
  source 1..75: mol_type = other DNA
ccataaaacaaaaaatccctgtcaccatcctctacattctcttgtttagcgttgttcaacgtttatgctacatac

SEQ ID NO: 551630 - DNA, 75 bp, synthetic construct
  source 1..75: mol_type = other DNA
atatctgggtattctctccatccagaggtgttcttgacgggctacagtgggatggctcgatgtttactgatgatg

SEQ ID NO: 551631 - DNA, 75 bp, synthetic construct
  source 1..75: mol_type = other DNA
tactgggtaacccgtcccatacagcaactgactgaaaatgtcagcggaatagagcaggacagtattagtgctatt

SEQ ID NO: 551632 - DNA, 75 bp, synthetic construct
  source 1..75: mol_type = other DNA
tcaccggacattaaagagtctgtttgagcgtctgatgacgcttaatcccagtgtggagctgtatattgtctcgcc

SEQ ID NO: 551633 - DNA, 75 bp, synthetic construct
  source 1..75: mol_type = other DNA
aatggataagaaactggaagggtacgatatgccaacggcggacccagtgaactacctgaatgtcggtggcagttt

SEQ ID NO: 551634 - DNA, 75 bp, synthetic construct
  source 1..75: mol_type = other DNA
attgcggactacttgctcgacaacagtaattgcacaattattcacactggcggtgcagtgtgtcgggaaaaccgt

SEQ ID NO: 551635 - DNA, 75 bp, synthetic construct
  source 1..75: mol_type = other DNA
cagccacaatcagcaccatgatgacacgctatatgttcgagctgaccttgtgaatgacaactatccggtaactcc

SEQ ID NO: 551636 - DNA, 75 bp, synthetic construct
  source 1..75: mol_type = other DNA
tggccgccagcttgcgcgctaaccgtgccactactgagcgcgatgttaaccagttaaccccacgcgagcgcgata

SEQ ID NO: 551637 - DNA, 75 bp, synthetic construct
  source 1..75: mol_type = other DNA
atgcgtaatggaaaaatactggctacgggagaaaatgtctccctggggactaatgccgatcagttaaggatcagt

SEQ ID NO: 551638 - DNA, 75 bp, synthetic construct
  source 1..75: mol_type = other DNA
gtttatcgtcgacaaggtatcgaccacgcacactgagtttttcagtgatggcgcggccaggaagattgattttac

SEQ ID NO: 551639 - DNA, 75 bp, synthetic construct
  source 1..75: mol_type = other DNA
tcactggccgcgctttatggcgatatcggtaaacaggcggagtcgctcatcggtaaggccggcagtctggcgacc

SEQ ID NO: 551640 - DNA, 75 bp, synthetic construct
  source 1..75: mol_type = other DNA
tatttttgttgggacagatgaaactggtgctgattcttcctggtgtcgttcctcacttcttcaccggagcaactg

SEQ ID NO: 551641 - DNA, 75 bp, synthetic construct
  source 1..75: mol_type = other DNA
ttatctttcgggtgccaccactgacagtgcccgacaagtgtttgctaacacagcacctgatgcaacaaaagcatc

SEQ ID NO: 551642 - DNA, 75 bp, synthetic construct
  source 1..75: mol_type = other DNA
tcctggaagcgcagaaataccccttggcgtatattgctcaagcgaacaaaagctctcattttatctttcgggtgc

SEQ ID NO: 551643 - DNA, 75 bp, synthetic construct
  source 1..75: mol_type = other DNA
tgatggacagcaagcgcaattgcaaggtttgcaaaattactggcgtaatactctggtgccgggtctgctacatgc

SEQ ID NO: 551644 - DNA, 75 bp, synthetic construct
  source 1..75: mol_type = other DNA
ctggatatcaccgaaagcacagtaaaagtgcacgtcaagcacatgctgaagaaaatgaagctcaagtctcgcgtg

SEQ ID NO: 551645 - DNA, 75 bp, synthetic construct
  source 1..75: mol_type = other DNA
atgcttaaacgttgtctctctccgctcaccctggttaatcaggttgcgcttattgttttgctttctaccgctatt

SEQ ID NO: 551646 - DNA, 75 bp, synthetic construct
  source 1..75: mol_type = other DNA
acctgccagccagatatgacttgtgatgataaaggctgccagctctgcccgcgcggcgtattacccgttggcgat

SEQ ID NO: 551647 - DNA, 75 bp, synthetic construct
  source 1..75: mol_type = other DNA
acattccgtttacagctcaccgaaccggggttacgcccggcactggaagcaagttgtgaagaatacagcgccaaa

SEQ ID NO: 551648 - DNA, 75 bp, synthetic construct
  source 1..75: mol_type = other DNA
attcccgcgcgccgctgtgtgaacgtttatcgccagtacttaatggtctacaaaatttaacgttgctgcgtaata

SEQ ID NO: 551649 - DNA, 75 bp, synthetic construct
  source 1..75: mol_type = other DNA
gttttggaacgggaggcaaataccagcaggtgatacaggccgcaacggcagcggtacagggactggccggtggta

SEQ ID NO: 551650 - DNA, 75 bp, synthetic construct
  source 1..75: mol_type = other DNA
atgaaactcaaacatgttggtatgattgtcgtttctgtgttggcgatgtcgtctgctgcggtaagcgcagccgag

SEQ ID NO: 551651 - DNA, 75 bp, synthetic construct
  source 1..75: mol_type = other DNA
atgcccgttactggatgaatcattgccaacactgccatatgaagcagggagacttccagttacactgtgaagttg

SEQ ID NO: 551652 - DNA, 75 bp, synthetic construct
  source 1..75: mol_type = other DNA
gctttactggcaaatgcaggagttgcccgcctttatcttttacgtggatgatatccccgagcaaaatctgaaaaa

SEQ ID NO: 551653 - DNA, 75 bp, synthetic construct
  source 1..75: mol_type = other DNA
acgcgtcatttcgcggcgtgccgtttaaggttgaagaagaaagtgcgggaaccggtcgccgtgtggaaacacatg

SEQ ID NO: 551654 - DNA, 75 bp, synthetic construct
  source 1..75: mol_type = other DNA
atgctgaatgaacattacgatgtcaccacagcagcctatgctgtcgcggtaagcgcagccgagggtgatgaatca

SEQ ID NO: 551655 - DNA, 75 bp, synthetic construct
  source 1..75: mol_type = other DNA
gtaacagcaatatcatcaatcccgtatgttgctgaaaatagtttctcatatggtattggtgttggtaattatcag

SEQ ID NO: 551656 - DNA, 75 bp, synthetic construct
  source 1..75: mol_type = other DNA
cgacggtctgattaacggtatcaaaaacaaatgggagtcgctcaaatccagtgtaaccggaatgggtgacagcat

SEQ ID NO: 551657 - DNA, 75 bp, synthetic construct
  source 1..75: mol_type = other DNA
ggtgacaatatcgcgcagggggccgccattggcctgcagcggaccactccgcttgcagctctggccgggcagcga

SEQ ID NO: 551658 - DNA, 75 bp, synthetic construct
  source 1..75: mol_type = other DNA
ggtttaaacagcgctgggcagacattcaggaagcctttaacggcggcattgtgggaactggtaagttgctgatta

SEQ ID NO: 551659 - DNA, 75 bp, synthetic construct
  source 1..75: mol_type = other DNA
gaaagataacgtccgcatctcgctcatgcacacgcgtctgtttttcggcatgttgccgcgtattccttcactgct

SEQ ID NO: 551660 - DNA, 75 bp, synthetic construct
  source 1..75: mol_type = other DNA
acgcgctccagtcgcctctcgactggtttaattttttcgatttctggcaactgccggaagtccaggacaaggagt

SEQ ID NO: 551661 - DNA, 75 bp, synthetic construct
  source 1..75: mol_type = other DNA
cagctatcagcactttctacgtttcggtaatgccatgctcgacaaaatcgccagctggcgcggcgagctacaact

SEQ ID NO: 551662 - DNA, 75 bp, synthetic construct
  source 1..75: mol_type = other DNA
ctggccttccgtcacgcatccggcactgaacaatgcaccggcggtgaaaaacacggttgatctgccgacgtggga

SEQ ID NO: 551663 - DNA, 75 bp, synthetic construct
  source 1..75: mol_type = other DNA
ctggaaaatgatgagttaattgtcggtagtgaagacggcattgatccggtgtcactggcggcactgacgcgcaag

SEQ ID NO: 551664 - DNA, 75 bp, synthetic construct
  source 1..75: mol_type = other DNA
acgaccccgatactcagcgtgatgttgacgaagtgtgtgctcgcttcccgaacgtgcataaggtggtctgcgcac

SEQ ID NO: 551665 - DNA, 75 bp, synthetic construct
  source 1..75: mol_type = other DNA
tcagcgattaacgtcctgttgctacgccatgaacgcagtaatctgccacttggcaaatttttggttacagaaggc

SEQ ID NO: 551666 - DNA, 75 bp, synthetic construct
  source 1..75: mol_type = other DNA
tcttgccggtgctgcaggtgcagccaccggcgaggtggtgggaatgattgccacacagatgtacggtaagccgat

SEQ ID NO: 551667 - DNA, 75 bp, synthetic construct
  source 1..75: mol_type = other DNA
tcaatgctgatgcaggggctgattagcgccgagcagctggcacaggcgctggcagagcaaaacggcgtggcgtgg

SEQ ID NO: 551668 - DNA, 75 bp, synthetic construct
  source 1..75: mol_type = other DNA
gggtggaagcatctgataacgatgagcactatgacccaggaaaaagaatcacttatcgcagtaaagtcaaagacc

SEQ ID NO: 551669 - DNA, 75 bp, synthetic construct
  source 1..75: mol_type = other DNA
tggtgggagatgactgctttgaccagcgtgatcgcctgattgaagcgctgaataaacccggtcccggcacgcttg

SEQ ID NO: 551670 - DNA, 75 bp, synthetic construct
  source 1..75: mol_type = other DNA
aatatccgaaccgcgacaagccctataccgaagatctgggaaaagtcactttccgcccgtccatcacagcttatg

SEQ ID NO: 551671 - DNA, 75 bp, synthetic construct
  source 1..75: mol_type = other DNA
tggtggattctgccgtatcggatgctgccaggctgttgcagggggatatctcggtacttctgccgccaccatcgt

SEQ ID NO: 551672 - DNA, 75 bp, synthetic construct
  source 1..75: mol_type = other DNA
gcatggttaatgaccctgctgtggctaaactttggcttgatgatcaaccgcattgtgcaacgggtgatttttgtc

SEQ ID NO: 551673 - DNA, 75 bp, synthetic construct
  source 1..75: mol_type = other DNA
agtcgcgtgggataaaacgacgcacgatttcccgagtgtcacaggcgatacacgttcgttacgcccgctgggtca

SEQ ID NO: 551674 - DNA, 75 bp, synthetic construct
  source 1..75: mol_type = other DNA
atgtctggaaatataggggcaaatccatccatcacagcttatgtggtgggagatgactgctttgaccagcgagat

SEQ ID NO: 551675 - DNA, 75 bp, synthetic construct
  source 1..75: mol_type = other DNA
gcgctcggctgcatcgtattagcgccgtcgagcacgatcagaatatggcgtttattcaggcactgcgccactttg

SEQ ID NO: 551676 - DNA, 75 bp, synthetic construct
  source 1..75: mol_type = other DNA
tttccgcaaggttgagcactggttcggtgattacgcgcaacgcttccagagtgaaagccgtgtgttattgcgtca

SEQ ID NO: 551677 - DNA, 75 bp, synthetic construct
  source 1..75: mol_type = other DNA
caacttctggcgctctcttcgcccatttatcgccttgaactggcgatggtcgggcgactgtttgcccaggatccg

SEQ ID NO: 551678 - DNA, 75 bp, synthetic construct
  source 1..75: mol_type = other DNA
ttggcgggcttggcatcagcggcggtagcgttgaacaagacatggatattgcccaaagcgcaatggcggcaatta

SEQ ID NO: 551679 - DNA, 75 bp, synthetic construct
  source 1..75: mol_type = other DNA
gaaaaccatcgcatattactggaagccattcagcaacagatattttggtttagcgccgaactcgccagtgaaagc

SEQ ID NO: 551680 - DNA, 75 bp, synthetic construct
  source 1..75: mol_type = other DNA
ggccttcagcgtacagtcagcatttgcctatacggtcaacgttaacagcagcattcccatctcaacgcaggttat

SEQ ID NO: 551681 - DNA, 75 bp, synthetic construct
  source 1..75: mol_type = other DNA
gggtgagggctttccatgctctcagtcgtggcgcagccggtagcctagcattcagtcagatgttgcgccagagtt

SEQ ID NO: 551682 - DNA, 75 bp, synthetic construct
  source 1..75: mol_type = other DNA
tccgcaatatgtagcgttctatatccataaagccgctttcccgatattattgcaaacaggctataaagcacgagt

SEQ ID NO: 551683 - DNA, 75 bp, synthetic construct
  source 1..75: mol_type = other DNA
cattaaagcgtcgcaaagagattatgcgcagcatgtagctttctacatccataaaagcgcttttcctgtcgttgt

SEQ ID NO: 551684 - DNA, 75 bp, synthetic construct
  source 1..75: mol_type = other DNA
ctacttttgcctatggcctgcatctggcagaagaaaatgttcagcttgagcagcttctggcgctctcgtctccta

SEQ ID NO: 551685 - DNA, 75 bp, synthetic construct
  source 1..75: mol_type = other DNA
tcagtgaaaaatggaccgttacaggccatgctagcggcgcatgatggtccggtgttgggactacacccgatgttc

SEQ ID NO: 551686 - DNA, 75 bp, synthetic construct
  source 1..75: mol_type = other DNA
caccgccttttccatcagtttttcgcagaacttcagcgttcctgcaccttcacggggtgtaaacaccggattcgg

SEQ ID NO: 551687 - DNA, 75 bp, synthetic construct
  source 1..75: mol_type = other DNA
atgattcaggaaatcacaaaacgttatcacgaagccaaccacacaccagcattgaaggaacgcacaatgccgctc

SEQ ID NO: 551688 - DNA, 75 bp, synthetic construct
  source 1..75: mol_type = other DNA
cggatgtgtctatcactgaagcgcacgttaccgggactgccagtgcagaacagctgatcgaaaccatcaaacaag

SEQ ID NO: 551689 - DNA, 75 bp, synthetic construct
  source 1..75: mol_type = other DNA
actacaacaatctggcaaatatcggccttggtgctcttacaggtcaggcaaacgccgggcagaactacgccaaca

SEQ ID NO: 551690 - DNA, 75 bp, synthetic construct
  source 1..75: mol_type = other DNA
gagaataatagtttggttcctgatccgaattggaactgggcctatcccatgttctctatcggattagaggatagc

SEQ ID NO: 551691 - DNA, 75 bp, synthetic construct
  source 1..75: mol_type = other DNA
ttgccgcaggtcaacggtttccgcacattgcgcggcctgggtgtgagcggcgaagctgaaggccatacgctgcta

SEQ ID NO: 551692 - DNA, 75 bp, synthetic construct
  source 1..75: mol_type = other DNA
cagcgcctccccacaagatttggttcaggcggttgagaaagcaggctacggcgcggaagcaattgaagatgatgc

SEQ ID NO: 551693 - DNA, 75 bp, synthetic construct
  source 1..75: mol_type = other DNA
cccaaaggctaaaccgctggcggagtcatcaatcccgtcggaagcactgacagcggtttctgaggcgcttccggc

SEQ ID NO: 551694 - DNA, 75 bp, synthetic construct
  source 1..75: mol_type = other DNA
cgcacggtggctcgacgggctgaaagacgtctggttgaactgacaacggaaaccaccgtccggaatgttttgctg

SEQ ID NO: 551695 - DNA, 75 bp, synthetic construct
  source 1..75: mol_type = other DNA
agccgcaagccgcatgcatttcgcccgcacagtggctcgcagggccgaaagacgtctggttgaactgacaacgga

SEQ ID NO: 551696 - DNA, 75 bp, synthetic construct
  source 1..75: mol_type = other DNA
gaacagccatcagcgcagcaacgttacatcagtacggaagaaatcgccgcgctggaaaaagcgatcgacagtgca

SEQ ID NO: 551697 - DNA, 75 bp, synthetic construct
  source 1..75: mol_type = other DNA
tagtaatgacgaaaaactcaaaccaaagtctgatatcaaacaatatcttaattgggaaattgacgaagataactt

SEQ ID NO: 551698 - DNA, 75 bp, synthetic construct
  source 1..75: mol_type = other DNA
acacaccggatgagattgcaaagttgtgcgattgtggcagggctacagtgtttcgcgtgaaaaaagaaatgaatg

SEQ ID NO: 551699 - DNA, 75 bp, synthetic construct
  source 1..75: mol_type = other DNA
acctgaattgttgaacctgctttcacacctccgcgaaggtgacacgctcgttactcactcgattgatcgccttgc

SEQ ID NO: 551700 - DNA, 75 bp, synthetic construct
  source 1..75: mol_type = other DNA
gcttcctcggcaacggcggcaggaaattccgcgaaggccgcaaaaacgtctgagacgaatgcggataacagcgca

SEQ ID NO: 551701 - DNA, 75 bp, synthetic construct
  source 1..75: mol_type = other DNA
aacgccaagaagatgatgcccattcctgacggtttggatgtcaatggcgcggccatccgcctcggtgaaccgact

SEQ ID NO: 551702 - DNA, 75 bp, synthetic construct
  source 1..75: mol_type = other DNA
agtagaaaaaacagactgtctgcggttcaatccggctatggcctactacgacgaagatggcaatgaagttgggaa

SEQ ID NO: 551703 - DNA, 75 bp, synthetic construct
  source 1..75: mol_type = other DNA
gcaccgcaagtacaacatgcggccacacaaccggaagagcaaagcagcgaaaacaagccgaaagttgttccgatg

SEQ ID NO: 551704 - DNA, 75 bp, synthetic construct
  source 1..75: mol_type = other DNA
tggcacaaagttgctatttagtgaatgcgcctgagctgggtaaaggtgaacatcgggtttacatcgctaaacagg

SEQ ID NO: 551705 - DNA, 75 bp, synthetic construct
  source 1..75: mol_type = other DNA
ccccatcttgaaccagctctccgtaaacccggtcgtcatgtttcttgccctatccacggcgggaaagatggcttc

SEQ ID NO: 551706 - DNA, 75 bp, synthetic construct
  source 1..75: mol_type = other DNA
tcgagtcactcaaatcccggtttggtcaacggtcaatgcgaccctgatggagtccttcgaggttccagaaggtgt

SEQ ID NO: 551707 - DNA, 75 bp, synthetic construct
  source 1..75: mol_type = other DNA
gtcactgttccaggcaatgtctggcatggtgcacagctttacgcagttcgtgttggtgcgtatcggtatggggat

SEQ ID NO: 551708 - DNA, 75 bp, synthetic construct
  source 1..75: mol_type = other DNA
tagcttctcgtatgactgcgtcggtgggcagtatccagaactttgccagttttatctgtgcctctttcgcgccga

SEQ ID NO: 551709 - DNA, 75 bp, synthetic construct
  source 1..75: mol_type = other DNA
ataaaaatcattaggggattcatcagtgcgcagcttccttgcggcccgctattggatcgtaaaggccctcgcctg

SEQ ID NO: 551710 - DNA, 75 bp, synthetic construct
  source 1..75: mol_type = other DNA
tcgattccaagaatcgtaaaaaatccattgccggtactctgattgcccacggtaaagctccttatgagcataacg

SEQ ID NO: 551711 - DNA, 75 bp, synthetic construct
  source 1..75: mol_type = other DNA
cgaaagctggtgcggcactattcagtggatttgcccaagcccgtatcgaccacatcatgggcgtaaaaactggtt

SEQ ID NO: 551712 - DNA, 75 bp, synthetic construct
  source 1..75: mol_type = other DNA
tcaacatcaaagagcgcggacgcccaatgggcttcttcaacgccgcctccaccattggcgttgccgtaagcccgc

SEQ ID NO: 551713 - DNA, 75 bp, synthetic construct
  source 1..75: mol_type = other DNA
tgcgcctgagctgggtaaaggtgaacatcgggtttacatcgctaaacaggatggccagccggtagctgccgttct

SEQ ID NO: 551714 - DNA, 75 bp, synthetic construct
  source 1..75: mol_type = other DNA
ataccggtagcacatctctttttaccgggcaacgcgtcagtaaaacccatccacgcgttgaagcttacggtacgc

SEQ ID NO: 551715 - DNA, 75 bp, synthetic construct
  source 1..75: mol_type = other DNA
gcagcaacaggaaaatagcgcggtgctgaaatcgcagcggcgaatgttccatcaccagattgaacgtggcaaccc

SEQ ID NO: 551716 - DNA, 75 bp, synthetic construct
  source 1..75: mol_type = other DNA
gcttgatgatggtcgccacaatggtgctggctgaacctgcaatggcgcaggagctaagtagcagcggtgttatga

SEQ ID NO: 551717 - DNA, 75 bp, synthetic construct
  source 1..75: mol_type = other DNA
atgagtaaccgttattggatgatttccttccataaaaatacgcgtaatctaatggttcgctctgtaccaaaagaa

SEQ ID NO: 551718 - DNA, 75 bp, synthetic construct
  source 1..75: mol_type = other DNA
atgatcttgctacaactctcctctgctcaggggccggaagaatgttgtctcgcagtgaaaaaagcactggacagg

SEQ ID NO: 551719 - DNA, 75 bp, synthetic construct
  source 1..75: mol_type = other DNA
ttcatacttactgggcgaaaatggtatacttgaagaaatagataagctctacgaattaaatgatcacggaattga

SEQ ID NO: 551720 - DNA, 75 bp, synthetic construct
  source 1..75: mol_type = other DNA
ttgaactgcgtctctctgactggataacccatttcgcggataaaaaaatcagtggtgcgaatgacggtcactggg

SEQ ID NO: 551721 - DNA, 75 bp, synthetic construct
  source 1..75: mol_type = other DNA
tcgaactgcgcctttctgactggatcacccattttgcgggtaaaaaatcagtggtgcggatgatgcgaactgggc

SEQ ID NO: 551722 - DNA, 75 bp, synthetic construct
  source 1..75: mol_type = other DNA
gttgctatctggtaactgcgccagagttaggtaaaggtgagcatcgggtttacatcgccaaacaggatgacaaac

SEQ ID NO: 551723 - DNA, 75 bp, synthetic construct
  source 1..75: mol_type = other DNA
gaaagagtacggcctgaattatgagaagcggcacactaagcaggggatacaaaccaatctgtcgctgaaagagga

SEQ ID NO: 551724 - DNA, 75 bp, synthetic construct
  source 1..75: mol_type = other DNA
tgattattcacttcccggaacagatagccccgcaggagcgcgacccgcagcttaaggacaaaatcacccgcgagc

SEQ ID NO: 551725 - DNA, 75 bp, synthetic construct
  source 1..75: mol_type = other DNA
accagctttttaggtaatggtattgaatcccgtatccttttcgatcagcaacgacccgacaacattattgagtgg

SEQ ID NO: 551726 - DNA, 75 bp, synthetic construct
  source 1..75: mol_type = other DNA
aatatacctacatcatcaacaccacctcaggccgtcgtgcgattgaagactcccgcgtgatccgtcgcagtgcgc

SEQ ID NO: 551727 - DNA, 75 bp, synthetic construct
  source 1..75: mol_type = other DNA
ttttgagaccattatggttaactgtaacccggaaaccgtctccaccgactacgacacttccgatcgcctctactt

SEQ ID NO: 551728 - DNA, 75 bp, synthetic construct
  source 1..75: mol_type = other DNA
tttgactactctggcgcgcaagcatgtaaagccctgcgtgaagaaggttaccgcgtcattctggtgaactctaac

SEQ ID NO: 551729 - DNA, 75 bp, synthetic construct
  source 1..75: mol_type = other DNA
gatgaaatcggttggcgaagtgatggcgattggtcgcacgcagcaggaatccctacaaaaagcgctgcgcggcct

SEQ ID NO: 551730 - DNA, 75 bp, synthetic construct
  source 1..75: mol_type = other DNA
agcgtatctggtacatcgccgatgctttccgcgcgggcctgtctgtagacggcgtcttcaacctgaccaacattg

SEQ ID NO: 551731 - DNA, 75 bp, synthetic construct
  source 1..75: mol_type = other DNA
cggcggtcagaccccgctgaaactggcgcgcgcgctggaagccgctggcgtaccggttatcggcaccagcccgga

SEQ ID NO: 551732 - DNA, 75 bp, synthetic construct
  source 1..75: mol_type = other DNA
tacaagcgcgtggatacctgtgcggcagagttcgccaccgacaccgcttacatgtactccacttatgaagaagag

SEQ ID NO: 551733 - DNA, 75 bp, synthetic construct
  source 1..75: mol_type = other DNA
gtagcggaagtgggtatcactggcctgaacgctgaattcctgcgccagctgaaacgcaaaggctttgccgatgcg

SEQ ID NO: 551734 - DNA, 75 bp, synthetic construct
  source 1..75: mol_type = other DNA
gccgattcactgggaagtagtacgcaaaattatcgaaaaagagcgcccggatgcagttctgccaacgatgggcgg

SEQ ID NO: 551735 - DNA, 75 bp, synthetic construct
  source 1..75: mol_type = other DNA
gaaggcgacaaagaacgcgtggttgatctggcggcaaaactgctgaaacagggcttcgagctggatgcgacccac

SEQ ID NO: 551736 - DNA, 75 bp, synthetic construct
  source 1..75: mol_type = other DNA
atacctacatcatcaacaccacttcaggccgtcgtgcgattgaagactcccgcgtgattcgtcgcagtgcgctgc

SEQ ID NO: 551737 - DNA, 75 bp, synthetic construct
  source 1..75: mol_type = other DNA
tgtgatggctggcaaatcgctggctgagcagggcgtaaccaaagaagttatcccgccgtactactcggtgaaaga

SEQ ID NO: 551738 - DNA, 75 bp, synthetic construct
  source 1..75: mol_type = other DNA
caggaccgtatcaagaatggcgaatatacctacattatcaacaccacctcaggccgtcgtgcgattgaagactcc

SEQ ID NO: 551739 - DNA, 75 bp, synthetic construct
  source 1..75: mol_type = other DNA
ttagctgacggtgacggtattgctttcgacgtgcagagtctgactgaagattacgacattggcttccgcctgaaa

SEQ ID NO: 551740 - DNA, 75 bp, synthetic construct
  source 1..75: mol_type = other DNA
gaagagaaccgccagttgtcagaacttatctactctcgcctgaaagaaaacggttttattaaaaaccgcaccatc

SEQ ID NO: 551741 - DNA, 75 bp, synthetic construct
  source 1..75: mol_type = other DNA
tgacaactatcactcgacgcacagtgaagagaaccgacagttgtcagaacttatctatactcgcctgaaggaaaa

SEQ ID NO: 551742 - DNA, 75 bp, synthetic construct
  source 1..75: mol_type = other DNA
aaatgccgcgcggcattccggtgggtacactggcgattggtaaagctggcgcggcaaacgcggcgttactggcag

SEQ ID NO: 551743 - DNA, 75 bp, synthetic construct
  source 1..75: mol_type = other DNA
ctatcaaacaagatttgacaaacgatataccgaattaccactcggatttaggttgtaaaaatagatccagaaatc

SEQ ID NO: 551744 - DNA, 75 bp, synthetic construct
  source 1..75: mol_type = other DNA
tgatctgcgtgcgcgaatatttccccgataccttttcgactgcggttcggcaaaaatctcgctggatcatcggca

SEQ ID NO: 551745 - DNA, 75 bp, synthetic construct
  source 1..75: mol_type = other DNA
tgacgaagtgtgcgctcgcttcccgaatgtgcataaggtagtctgcgcgcgtcctggtcccaccagcaaagccga

SEQ ID NO: 551746 - DNA, 75 bp, synthetic construct
  source 1..75: mol_type = other DNA
gctgacactgtggccggatatcgaacttgtcagcggtcagcgtctgctgaaactgctgaacggaacattactgac

SEQ ID NO: 551747 - DNA, 75 bp, synthetic construct
  source 1..75: mol_type = other DNA
tccagtttgcggtgaacccgaaaaacggtcgcctgattgttatcgaaatgaacccgcgcgtgtcgcgttcttcgg

SEQ ID NO: 551748 - DNA, 75 bp, synthetic construct
  source 1..75: mol_type = other DNA
cctggcctcccgtaacgcgggctttatcaacaagcgttttgacggcgtgttggcaagcgaactggctgaccctga

SEQ ID NO: 551749 - DNA, 75 bp, synthetic construct
  source 1..75: mol_type = other DNA
gtgaacggcgcgaagatgtccaagtctcgcggcacctttattaaagccagcacctggctgaatcattttgacgcc

SEQ ID NO: 551750 - DNA, 75 bp, synthetic construct
  source 1..75: mol_type = other DNA
ggctactacggcctcacgcagggcctgctttccgtcctgcgtcttttctggggcaacctgattaacttcatggcc

SEQ ID NO: 551751 - DNA, 75 bp, synthetic construct
  source 1..75: mol_type = other DNA
ccgataaattaaccatccagcccggtggcttaattaatgataagagtatcagttcgggtggtgcagtgtatctgg

SEQ ID NO: 551752 - DNA, 75 bp, synthetic construct
  source 1..75: mol_type = other DNA
gttggaaagaatatgtggtggactgataccacttccggttatgtgtgtcccgatccggtcttcttccctattgtt

SEQ ID NO: 551753 - DNA, 75 bp, synthetic construct
  source 1..75: mol_type = other DNA
ggaaagccagactaagcgcaatcgtactaactcaagcgcactgattaagattaaagctcatcaagaaaatccaca

SEQ ID NO: 551754 - DNA, 75 bp, synthetic construct
  source 1..75: mol_type = other DNA
attggtcgcaatatatggtgggctgatacttcatcgggttatgtgcttccacatccggtgtattttcctgttatc

SEQ ID NO: 551755 - DNA, 75 bp, synthetic construct
  source 1..75: mol_type = other DNA
acataccggtatgtgtacgatgcgctggggaggcggacggaaaacagcacatcagccctgacggtaaaccgtaca

SEQ ID NO: 551756 - DNA, 75 bp, synthetic construct
  source 1..75: mol_type = other DNA
acgaagttatcgtgttaaccggtaaagacaaaggtaagcgcggtaaagttaagaatgtcctgtcttccggcaagg

SEQ ID NO: 551757 - DNA, 75 bp, synthetic construct
  source 1..75: mol_type = other DNA
caaaatatgaccttgaactggttacttcctatcaggattttggtgtatctgcattcaaaggggctaacagtagaa

SEQ ID NO: 551758 - DNA, 75 bp, synthetic construct
  source 1..75: mol_type = other DNA
gtcggtgcgcgttacttgcctaagttgcagcatcaggacttacagaccagcgcccagcaaatcgctcgtgagcga

SEQ ID NO: 551759 - DNA, 75 bp, synthetic construct
  source 1..75: mol_type = other DNA
aaagccgaagcgattaaacgtctgcaaagcgagggacgccaggtagcgatggtgggcgacggcattaacgacgcg

SEQ ID NO: 551760 - DNA, 75 bp, synthetic construct
  source 1..75: mol_type = other DNA
tgatggtcaccgccgacaaccgcagcctgtggctggttattgggctgataaccctggcggttatggttttcgctg

SEQ ID NO: 551761 - DNA, 75 bp, synthetic construct
  source 1..75: mol_type = other DNA
taatgttgtttgctcgtgcaaatgaggaaagtcagactaaacgcaatcgcactaactcaagcgcactactcaagg

SEQ ID NO: 551762 - DNA, 75 bp, synthetic construct
  source 1..75: mol_type = other DNA
ctggctgcggctaaagagcagaacatctcgattctgtcttacctggctaaccactttaacgcaccggttatcgcg

SEQ ID NO: 551763 - DNA, 75 bp, synthetic construct
  source 1..75: mol_type = other DNA
gtttatataaaacacaggcagatcaggcccgttatcagaaccttgtctcagcagaagctaccggggggcttggct

SEQ ID NO: 551764 - DNA, 75 bp, synthetic construct
  source 1..75: mol_type = other DNA
atgtcacaatcgcggggctatcagccatcacatttgatgcaaaaaaaaaatattttctatgctattaacgatagc

SEQ ID NO: 551765 - DNA, 75 bp, synthetic construct
  source 1..75: mol_type = other DNA
ttaactggaacgacagtggaatggatgtctcaatgcgtcgtaacagcgttaatcctctggtaggcagaaccggcg

SEQ ID NO: 551766 - DNA, 75 bp, synthetic construct
  source 1..75: mol_type = other DNA
cattggttatggacggctcagcgaatatgtccggtacatttactcaggaaaacgggcgtctgacgctgcaggggc

SEQ ID NO: 551767 - DNA, 75 bp, synthetic construct
  source 1..75: mol_type = other DNA
atgagtcgttacgctcctacaccggaggttatggctattggtcaaattaatatttccggcaatgtcacaccgcca

SEQ ID NO: 551768 - DNA, 75 bp, synthetic construct
  source 1..75: mol_type = other DNA
ggaatttgaacaggcctggcaggaatatcccaaacgtgctggtggcaattccaagtcagcagccttcaaagcctg

SEQ ID NO: 551769 - DNA, 75 bp, synthetic construct
  source 1..75: mol_type = other DNA
ttcactagggggtagtgcaaataattcactatctggtgcagcaaattcactaggtagtgcaggagttgcaccagg

SEQ ID NO: 551770 - DNA, 75 bp, synthetic construct
  source 1..75: mol_type = other DNA
ccggtttggcgacaatacgcgtctggggctggaagttgaacgctctgcattcggtaaatacaacacagatgatgc

SEQ ID NO: 551771 - DNA, 75 bp, synthetic construct
  source 1..75: mol_type = other DNA
cgcgatcctcatcgtgacgcagttcagattaacccagggccagcccggtacagacagcgccccgcgactcgatgc

SEQ ID NO: 551772 - DNA, 75 bp, synthetic construct
  source 1..75: mol_type = other DNA
aagattttcagatggaaatagaagcgattctggcaaaccgaaaaatagcatttcgtagctcgtcactgtttacta

SEQ ID NO: 551773 - DNA, 75 bp, synthetic construct
  source 1..75: mol_type = other DNA
tgcaattaaaacaaataaaactaaaacataacctcccctctaatacactttatatttcctataataaatcatcat

SEQ ID NO: 551774 - DNA, 75 bp, synthetic construct
  source 1..75: mol_type = other DNA
ttactctggatttacgcacggtggaaatgctcgatggggtgaaatgcagcaatattttgtttgtcgggatcaacc

SEQ ID NO: 551775 - DNA, 75 bp, synthetic construct
  source 1..75: mol_type = other DNA
acaatcacacaaagttccattaagactaatggtaccgatggtgtcattcaggttatgcccgtgtctgaaaacaga

SEQ ID NO: 551776 - DNA, 75 bp, synthetic construct
  source 1..75: mol_type = other DNA
tgcagtccgggcaagttatcagtggcgcgattcttatcgtgacaactgagcgactgacgcagggacagactggcc

SEQ ID NO: 551777 - DNA, 75 bp, synthetic construct
  source 1..75: mol_type = other DNA
catgcggtagccgaccttggtgccttaagtggcgatctcgaccgtctggcgcgcggacgaaaagcacgggtgcag

SEQ ID NO: 551778 - DNA, 75 bp, synthetic construct
  source 1..75: mol_type = other DNA
ataatattgtgcaatatatattgggatttggcccgacggtaatgttaccgctggtattatttattcttgctctct

SEQ ID NO: 551779 - DNA, 75 bp, synthetic construct
  source 1..75: mol_type = other DNA
ggaaaccgtacagaaaaagtttggcatcttcggcgaaccgatgatggttggcactattctgggcattctgctcgg

SEQ ID NO: 551780 - DNA, 75 bp, synthetic construct
  source 1..75: mol_type = other DNA
ggtgttaagcgcgtgacctgtagcgcccgcgaagacgcggtggagtttttcgccaagctggggtttgttaatcag

SEQ ID NO: 551781 - DNA, 75 bp, synthetic construct
  source 1..75: mol_type = other DNA
atgtatcaccttcgggttccacaaacagaagaagaattagagcgctactatcagttccgctgggagatgttgcgt

SEQ ID NO: 551782 - DNA, 75 bp, synthetic construct
  source 1..75: mol_type = other DNA
agacgccgggtgcagtgtttgaaggcacgtatatcgttctgcccgcgaagccatttggtccgtatgaagagggcg

SEQ ID NO: 551783 - DNA, 75 bp, synthetic construct
  source 1..75: mol_type = other DNA
ccaaagagtatgcaaagacaggtatgaagctgaaagagcgcctggctatgctggtggcgttgttcaaaaacgatc

SEQ ID NO: 551784 - DNA, 75 bp, synthetic construct
  source 1..75: mol_type = other DNA
aaatacaaagtggcagagccgcttagtgagtccgtcccaagtgacgaaaaagccattgatgtactgaataagctg

SEQ ID NO: 551785 - DNA, 75 bp, synthetic construct
  source 1..75: mol_type = other DNA
atgggttcgacggaaaagagctcgcctcctatggcttcgggttagtgctcgccggtcactaccacaaccacaaaa

SEQ ID NO: 551786 - DNA, 75 bp, synthetic construct
  source 1..75: mol_type = other DNA
ctcatcgccattgctctggtgccggttattgccctggtgctgtatggcattttccgaatgacgcggagcacggtt

SEQ ID NO: 551787 - DNA, 75 bp, synthetic construct
  source 1..75: mol_type = other DNA
gcctcaatcgtattcatatcgatccggaaaccgtacagaaaaagtttggcatattcggcgaaccgatgatggttg

SEQ ID NO: 551788 - DNA, 75 bp, synthetic construct
  source 1..75: mol_type = other DNA
ttatcatgttttcgacttcttcctaccggaatggtgtcacgaacggtgcaatagtgatccacacccaacgcctga

SEQ ID NO: 551789 - DNA, 75 bp, synthetic construct
  source 1..75: mol_type = other DNA
atgaaaaagaaaaattctggctttactgccagcggtcacgctcggcctgaaatccgccccggcgatattttccgg

SEQ ID NO: 551790 - DNA, 75 bp, synthetic construct
  source 1..75: mol_type = other DNA
gcagtcagtggcagtcgctgccggtacttccggcagacggaacacaggtgtcttttccgtatgccggtgaatggc

SEQ ID NO: 551791 - DNA, 75 bp, synthetic construct
  source 1..75: mol_type = other DNA
gcgataaattgtatttcaacagtggtgtaaaaacccctgaggcagtaaggaaattaacgcgcgacagggcactgg

SEQ ID NO: 551792 - DNA, 75 bp, synthetic construct
  source 1..75: mol_type = other DNA
gccgagtacggtttcgcgggtgctggctggcaaagcgaataccagtgcacgcgctcgcgaacaggtgctggcctg

SEQ ID NO: 551793 - DNA, 75 bp, synthetic construct
  source 1..75: mol_type = other DNA
tgcagtgtcagttgccgggtggcagaagatgcgcggcgtatcagggcggcgctgaccacaaccggtcagacgttg

SEQ ID NO: 551794 - DNA, 75 bp, synthetic construct
  source 1..75: mol_type = other DNA
tggcagaagatgcgcggcgtatccgggcggcgctgaccacaaccggtcagacgttgctgacccgccagacgcgcc

SEQ ID NO: 551795 - DNA, 75 bp, synthetic construct
  source 1..75: mol_type = other DNA
cgctggtttgaccgtggtgttctgcgggaggttgttctggaggcccggactgaaatccgtagcatggcggatgca

SEQ ID NO: 551796 - DNA, 75 bp, synthetic construct
  source 1..75: mol_type = other DNA
atggacgctgacagttctaacagcactgttacgccaggcaggttgcccgacggtttatcctcttgcccttgcttc

SEQ ID NO: 551797 - DNA, 75 bp, synthetic construct
  source 1..75: mol_type = other DNA
catccctgcgtgtcgtcacatatgcgctttgaaagggaattcatcctggtaagtaaagcgccactagcagaatta

SEQ ID NO: 551798 - DNA, 75 bp, synthetic construct
  source 1..75: mol_type = other DNA
atgaaaaagaaaaattctggctttactgccagcggcctccctcggcctgaaatccgccccgacgatattttcaaa

SEQ ID NO: 551799 - DNA, 75 bp, synthetic construct
  source 1..75: mol_type = other DNA
ggcgtgcgcattcagcaatataccgggcaaaaatttatcactaccatgccagaaaccggcaatcagaatccgcac

SEQ ID NO: 551800 - DNA, 75 bp, synthetic construct
  source 1..75: mol_type = other DNA
cgccgattcgccattttttgatgattaagcccgtcgccactctggatgatattttgcatcgcggcgactggtgcg

SEQ ID NO: 551801 - DNA, 75 bp, synthetic construct
  source 1..75: mol_type = other DNA
attatcccgttcgcttgaaaaaccgattgcgaacggatgcacctcccgttttatttggctgcgggaataaagcat

SEQ ID NO: 551802 - DNA, 75 bp, synthetic construct
  source 1..75: mol_type = other DNA
gaaaaaacgctgttcgaggaccacaaagtcgctctgctgccatggcgcgattccatggacgatctgcgtgcggat

SEQ ID NO: 551803 - DNA, 75 bp, synthetic construct
  source 1..75: mol_type = other DNA
agatgttatgccggggcggcgggcgcattcaaaaaccatcgctcgcaacctgtcgccgggaagttgacgaaatcc

SEQ ID NO: 551804 - DNA, 75 bp, synthetic construct
  source 1..75: mol_type = other DNA
gctggagatattggcggttctataggatccgagctaggtggaaaagtaacagataaagtatctgaggaactcaag

SEQ ID NO: 551805 - DNA, 75 bp, synthetic construct
  source 1..75: mol_type = other DNA
aatgtagtatccggtgtattcgatatccacagcagcgattatgttctgaacgctgacttggtgaacgaccgtacc

SEQ ID NO: 551806 - DNA, 75 bp, synthetic construct
  source 1..75: mol_type = other DNA
agatcccgctgcctttatcaaaaccggtctggatgccgcaggtatgagtcaggcggattttgaagcggcactgaa

SEQ ID NO: 551807 - DNA, 75 bp, synthetic construct
  source 1..75: mol_type = other DNA
acggtaaaggcgttctggttgccctacgtccggtaccgggtatccgcgttgaacaagccctgacgctgtgtcgcc

SEQ ID NO: 551808 - DNA, 75 bp, synthetic construct
  source 1..75: mol_type = other DNA
tcaatgcttcgttgtttatgatttacccggttctggatagtgcgtttaaaaaccggaaacgtgtagagaaaatta

SEQ ID NO: 551809 - DNA, 75 bp, synthetic construct
  source 1..75: mol_type = other DNA
ttcctgattatcgtcattatctacatacgatctacgtattacagactgagaaatggcgtggagaaacggtgagac

SEQ ID NO: 551810 - DNA, 75 bp, synthetic construct
  source 1..75: mol_type = other DNA
ggcagttgatgctgtccgtgcaggcggtcgtgttgtggctgtcggtctaccgccggagtctatgagcctggatat

SEQ ID NO: 551811 - DNA, 75 bp, synthetic construct
  source 1..75: mol_type = other DNA
cttagtttagacattaataaagaagacgatctaatatcgcttgctcaatttcatgttaatgaaaagaaaggggct

SEQ ID NO: 551812 - DNA, 75 bp, synthetic construct
  source 1..75: mol_type = other DNA
ccttactttctgatactattggcttaactaatggctcttcactgaacattggtgaagatggtgaagttgctactg

SEQ ID NO: 551813 - DNA, 75 bp, synthetic construct
  source 1..75: mol_type = other DNA
gagttttatgaggcatcagacaggtcttcctggatgttgctgccgggttatgtgaaggggacgagctgttgccag

SEQ ID NO: 551814 - DNA, 75 bp, synthetic construct
  source 1..75: mol_type = other DNA
ggtattgaagtggtcggttcgctggtcggcacgcgtcaggatctaaccgaagccttccagtttgccgccgaaggc

SEQ ID NO: 551815 - DNA, 75 bp, synthetic construct
  source 1..75: mol_type = other DNA
aataagaagcactggattgattctcctgtttatttctttgaaatcagaccagatggtttttattacggtttgggc

SEQ ID NO: 551816 - DNA, 75 bp, synthetic construct
  source 1..75: mol_type = other DNA
gctacatgctgatggagaaattcaaaccgctcgatcagttgatgcgctacgtgcaggaacagcgcggtaagtccg

SEQ ID NO: 551817 - DNA, 75 bp, synthetic construct
  source 1..75: mol_type = other DNA
ggcggcggcgtgccttaactcgacgcaaacccgcgagcagcaacttgaagtgatgacaggctgccgcaccgggca

SEQ ID NO: 551818 - DNA, 75 bp, synthetic construct
  source 1..75: mol_type = other DNA
aactgcgatatttgcctcgatccgccgaaacagtacgatggttcaaccgatgcacagattgccctttccaccatt

SEQ ID NO: 551819 - DNA, 75 bp, synthetic construct
  source 1..75: mol_type = other DNA
cacaaatgttatttcagcacctcaatgcattgatgttaaaggtgcaggtgtatacagtaatagctataaaaaccc

SEQ ID NO: 551820 - DNA, 75 bp, synthetic construct
  source 1..75: mol_type = other DNA
agtgcgaacccggcagagactgttgttgagggaccgtttagtaaagacgtcatcctcaaaatcacctataactag

SEQ ID NO: 551821 - DNA, 75 bp, synthetic construct
  source 1..75: mol_type = other DNA
agcgcatgagcagcgtaatagcgaagttcatggagagcgtagagccgggaagagttatgacaagaccaatgtgta

SEQ ID NO: 551822 - DNA, 75 bp, synthetic construct
  source 1..75: mol_type = other DNA
ggttatctatcaatccttcttcaaactgagcaatagtggcgcgtttgttgcccgtctgctggggccgctgctcgc

SEQ ID NO: 551823 - DNA, 75 bp, synthetic construct
  source 1..75: mol_type = other DNA
tagcctgtatacggcagccgcgggcttcactgtgctgactggcgcggttggcgtgagcggcgcgctgtcgctggt

SEQ ID NO: 551824 - DNA, 75 bp, synthetic construct
  source 1..75: mol_type = other DNA
tggatcgtgtaagggaaaatattatttgtcgcaaaaatgaattccgaaatgctacagatcatcttttaccagcat

SEQ ID NO: 551825 - DNA, 75 bp, synthetic construct
  source 1..75: mol_type = other DNA
gcggcgtggcgtggtttgtcgccgccgctgttctggcatttctcttttcttttcaaaaggcgctaagtggctgga

SEQ ID NO: 551826 - DNA, 75 bp, synthetic construct
  source 1..75: mol_type = other DNA
ttgtcgccgccgctgttctggcatttctcttttcaaaaagcgctaagtggctggatagccggaattggcggcgcg

SEQ ID NO: 551827 - DNA, 75 bp, synthetic construct
  source 1..75: mol_type = other DNA
gttcctcaccagcaacagtaaagagagcaaactgtggtttgcgctggggcgtcttggcactctgcttctggcgat

SEQ ID NO: 551828 - DNA, 75 bp, synthetic construct
  source 1..75: mol_type = other DNA
ggttttacaagaaacctttggctaccaacagtttcgccctggtcaggaagaaattatcgacaccgtgctttctgg

SEQ ID NO: 551829 - DNA, 75 bp, synthetic construct
  source 1..75: mol_type = other DNA
gatgaagtgcagtgcgggatggggcggaccggcgatctgtttgcttacatgcactacggcgtgacgccggatatt

SEQ ID NO: 551830 - DNA, 75 bp, synthetic construct
  source 1..75: mol_type = other DNA
aaccggcgctgcgtcttgggcgtaagctgatcgaggcaacctttgccgaacgcgtggtgtttatgaactccggga

SEQ ID NO: 551831 - DNA, 75 bp, synthetic construct
  source 1..75: mol_type = other DNA
actgttcgccaaattacgcaaactgcgtaaatcgattgccgatgaaagcaatgtcccgccgtacgtggtgtttaa

SEQ ID NO: 551832 - DNA, 75 bp, synthetic construct
  source 1..75: mol_type = other DNA
aactgcgatatctgcctcgatccgccgaaacaatacgacggttcaaccgatgcgcagattgcgctttccaccatt

SEQ ID NO: 551833 - DNA, 75 bp, synthetic construct
  source 1..75: mol_type = other DNA
gttttgaccgcccgaatattcgctacatgttgatggagaagttcaaaccactcgatcaactgatgcgttacgtgc

SEQ ID NO: 551834 - DNA, 75 bp, synthetic construct
  source 1..75: mol_type = other DNA
acggtaaaggcgttctggtggctctgcgcccggtgcctggcatccgtgtcgagcaagcactgacgctgtgccgcc

SEQ ID NO: 551835 - DNA, 75 bp, synthetic construct
  source 1..75: mol_type = other DNA
aagatgcgcggcgtatccgggcggcgctgaccacaaccggtcagacgttactgacccgccagacgcgccgctttc

SEQ ID NO: 551836 - DNA, 75 bp, synthetic construct
  source 1..75: mol_type = other DNA
atgctgtcgatttcatcctcaccgacccgccagacgcgccgctttcgcctggtcgtgaaggaaagcgatcacccc

SEQ ID NO: 551837 - DNA, 75 bp, synthetic construct
  source 1..75: mol_type = other DNA
gcggcttcccgattagcgccatgctgaccacggcggaaattgcttctgcgtttcatcctggttctcacggttcca

SEQ ID NO: 551838 - DNA, 75 bp, synthetic construct
  source 1..75: mol_type = other DNA
atattcgcggtatggggctgttgattggcgcggagctgaaaccacagtacaaaggtcgggcgcgtgatttcctgt

SEQ ID NO: 551839 - DNA, 75 bp, synthetic construct
  source 1..75: mol_type = other DNA
cacgcgcgactttcgatgaagtgatcctgccgatttatgctccggcagagtttattccggtaaaaggtcagggca

SEQ ID NO: 551840 - DNA, 75 bp, synthetic construct
  source 1..75: mol_type = other DNA
ctttacaacttgccgtgccgcgtattgtggcgctcaaaccgaaagcgatgcataaatcgttcggtggcaattacg

SEQ ID NO: 551841 - DNA, 75 bp, synthetic construct
  source 1..75: mol_type = other DNA
ttcgtggcgctggcgactatggctgcgaatttttttgctcccacggagtctgcgaaaccgtccgtggcggtgatg

SEQ ID NO: 551842 - DNA, 75 bp, synthetic construct
  source 1..75: mol_type = other DNA
agcggaactgtcgaccatgcgcacggaggatttcggggcgctttccacggcggcaacgtattttttctcgccgaa

SEQ ID NO: 551843 - DNA, 75 bp, synthetic construct
  source 1..75: mol_type = other DNA
gtcaacccgttgtataccccgcgcgagcttgagcatcagcttaacgatagtggcgcatcggcgattgttatcgtg

SEQ ID NO: 551844 - DNA, 75 bp, synthetic construct
  source 1..75: mol_type = other DNA
ttatccggaatacatgagccgaccaaaggcaccattaccattaataacattaactataacaagctggatcataaa

SEQ ID NO: 551845 - DNA, 75 bp, synthetic construct
  source 1..75: mol_type = other DNA
atgaacctacccgcggcatcgacgttggcgcgaaagccgaaatttacaaagtgatgcgccaactggcggacgacg

SEQ ID NO: 551846 - DNA, 75 bp, synthetic construct
  source 1..75: mol_type = other DNA
cggagaaatccgtcttaatggcaaagatatctctccacgttcccccctggatgcagtgaaaaagggatggcttac

SEQ ID NO: 551847 - DNA, 75 bp, synthetic construct
  source 1..75: mol_type = other DNA
ttcagcaagtggtggcagaacgttgggtgaaactgaccggacagtatctgctggaaggttatggcctgaccgagt

SEQ ID NO: 551848 - DNA, 75 bp, synthetic construct
  source 1..75: mol_type = other DNA
cgccaggctggttcgctgcgggggctgtctctggtggatttgtatggcatgaaatttgatgcgctgctggcatat

SEQ ID NO: 551849 - DNA, 75 bp, synthetic construct
  source 1..75: mol_type = other DNA
aaacggcagaactggtcactgacaaagatatcggaagtaatgcgtctccggatgttatcagcctgattactccgg

SEQ ID NO: 551850 - DNA, 75 bp, synthetic construct
  source 1..75: mol_type = other DNA
ctggaaggttatggcttaaccgagtgtgcgccactggtgagcgttaacccgtatgatattgattatcacagcggt

SEQ ID NO: 551851 - DNA, 75 bp, synthetic construct
  source 1..75: mol_type = other DNA
gtaacggcactgccgctctatcacatttttgcactgaccattaactgcctgctgtttatcgaactcggcgggcag

SEQ ID NO: 551852 - DNA, 75 bp, synthetic construct
  source 1..75: mol_type = other DNA
atgttaacgacatgtatatcacttggggttgcgatgacgacgaacacgcattttagaggtgaagaattgaagaag

SEQ ID NO: 551853 - DNA, 75 bp, synthetic construct
  source 1..75: mol_type = other DNA
gtggcagaagatacgcggcgtatccgggcggcgctgaccacaaccggtcagacgttactgacccgccagacgcgc

SEQ ID NO: 551854 - DNA, 75 bp, synthetic construct
  source 1..75: mol_type = other DNA
ctgacccgccagacgcgccgctttcgcctggtcgtgaaggaaagcgatcacccctgctggctcgatgaagatgac

SEQ ID NO: 551855 - DNA, 75 bp, synthetic construct
  source 1..75: mol_type = other DNA
cgttcgctggcgtactggcgctgtttatccacaccaccggcgtactttccaaactgctttccgaagcggtagaag

SEQ ID NO: 551856 - DNA, 75 bp, synthetic construct
  source 1..75: mol_type = other DNA
ctggaagagatcctctacggcgtgctgccacaggtgatgccgctgctgatctcctactccctctatcgcttcgaa

SEQ ID NO: 551857 - DNA, 75 bp, synthetic construct
  source 1..75: mol_type = other DNA
cgctggtttgaccgggatattctgcgggaggttgttctggaggcacgggatgaaatccgcagcatggcggatgcc

SEQ ID NO: 551858 - DNA, 75 bp, synthetic construct
  source 1..75: mol_type = other DNA
atgaacgaaacgctgaatgcactggtttgtcgtcacgcccgtaacctgctactggcgcagggctggccggaagat

SEQ ID NO: 551859 - DNA, 75 bp, synthetic construct
  source 1..75: mol_type = other DNA
ggcctgcgatgtgctgcgtataccggatgaaccgccccgccagtggtttgaccgtggtgttctgcgggaagttgt

SEQ ID NO: 551860 - DNA, 75 bp, synthetic construct
  source 1..75: mol_type = other DNA
ctgacccgccagacgcgccgctttcgtctggttgtgaaggaaagcgattacccctgctggctcgatgaagacgac

SEQ ID NO: 551861 - DNA, 75 bp, synthetic construct
  source 1..75: mol_type = other DNA
ggcagttcttgatgcggtacgcgatgcagtacgctgtgtcagttaccaggtggcagaagatacgcggcgtatccg

SEQ ID NO: 551862 - DNA, 75 bp, synthetic construct
  source 1..75: mol_type = other DNA
ggcgctgaccaccaccggtcagacgttgctgacccgccagacgcgccgctttcgtctggttgtgaaggaaagcga

SEQ ID NO: 551863 - DNA, 75 bp, synthetic construct
  source 1..75: mol_type = other DNA
atgcaaaccatcaccatcgccccacccaagcgcagctggttctcgcttctgagctgggccattgttctcgccgtg

SEQ ID NO: 551864 - DNA, 75 bp, synthetic construct
  source 1..75: mol_type = other DNA
gcctggtggtgaaggaaagcgatcacccctgctggctcgatgaagacgacgaaaacctgcccgtggtgctcgatg

SEQ ID NO: 551865 - DNA, 75 bp, synthetic construct
  source 1..75: mol_type = other DNA
ctgcgggaggtggtcctggaagcccggagtgaaatccgcagcatggcggatgcactggcaaaaatcaggggctga

SEQ ID NO: 551866 - DNA, 75 bp, synthetic construct
  source 1..75: mol_type = other DNA
agtaatattaccgtactggaaggcgcgccgccgctatcggaacactggaaattatttgataataacgaagcgctg

SEQ ID NO: 551867 - DNA, 75 bp, synthetic construct
  source 1..75: mol_type = other DNA
tatctggactttcaccctgcgcgataacgcaaaatgggcggatggcacaccggtaacggcacaggattttgtcta

SEQ ID NO: 551868 - DNA, 75 bp, synthetic construct
  source 1..75: mol_type = other DNA
tgtataacacttcagaaaaccatcaaaaaaattgcgattgctgtagcatcgatgtggaaaaagaacctgggcgta

SEQ ID NO: 551869 - DNA, 75 bp, synthetic construct
  source 1..75: mol_type = other DNA
cgctcaggcgattattgatggtaaggctacgcctgaccaactaggtgtcaccgctgttgatgctcataccctgaa

SEQ ID NO: 551870 - DNA, 75 bp, synthetic construct
  source 1..75: mol_type = other DNA
ttcgtctggcattaagtatgacgatagatcgccgcctgatgaccgaaaaagtgttggggacgggcgaaaagccag

SEQ ID NO: 551871 - DNA, 75 bp, synthetic construct
  source 1..75: mol_type = other DNA
cgaaaagccagcgtggcattttacaccagatgttaccgcgggatttacgccggaaccttcgccgtttgaacaaat

SEQ ID NO: 551872 - DNA, 75 bp, synthetic construct
  source 1..75: mol_type = other DNA
atgttaaattgcaaaaccaggaatggaaaacctatatcgatagccgtaacaccggcaattttgatgttatccgcg

SEQ ID NO: 551873 - DNA, 75 bp, synthetic construct
  source 1..75: mol_type = other DNA
caggtgtctttcccgtatgccggtgaatggctgacggaggaagaaatcagggcggtttttgatgcgatgcgcgat

SEQ ID NO: 551874 - DNA, 75 bp, synthetic construct
  source 1..75: mol_type = other DNA
cttgcggcggtgcgcgatgcggtacgcagtgtcagttgccgggtggcagaagatgcgcggcgtatccgggcggcg

SEQ ID NO: 551875 - DNA, 75 bp, synthetic construct
  source 1..75: mol_type = other DNA
acgaagcatctgttaccaggtggcagaagatgcgcggcgtatccgtgcggcgctgaccaccaccggtcagacgtt

SEQ ID NO: 551876 - DNA, 75 bp, synthetic construct
  source 1..75: mol_type = other DNA
ttctctttcgtatgctgcagaagttccgagcggcacagtactggcagagaagcaggagctggtgcgccacattaa

SEQ ID NO: 551877 - DNA, 75 bp, synthetic construct
  source 1..75: mol_type = other DNA
caggtgtctttcccgtatgccggtgagtggctggcagaagacgaaatcagggctgtacttgcggcggtgcgcgat

SEQ ID NO: 551878 - DNA, 75 bp, synthetic construct
  source 1..75: mol_type = other DNA
tgcagtgtcagttgccgggtggcagaagatgcgcggcgtatccgggcggcgctgaccaccaccggtcagacgttg

SEQ ID NO: 551879 - DNA, 75 bp, synthetic construct
  source 1..75: mol_type = other DNA
aaatcactaataaaaaagcccgacataatgaatttgtgggcttaaaaatattgtcgcttactgaaattaacatgg

SEQ ID NO: 551880 - DNA, 75 bp, synthetic construct
  source 1..75: mol_type = other DNA
tcccgaccatgccgccagggggaacagcattaaaacagcggccattgctattaaggatcaggaatggaacggatt

SEQ ID NO: 551881 - DNA, 75 bp, synthetic construct
  source 1..75: mol_type = other DNA
tgctggcggtgctgctcaacaatgccggaaaagtgctcacccagcgccagctccttaaccaggtatggggaccaa

SEQ ID NO: 551882 - DNA, 75 bp, synthetic construct
  source 1..75: mol_type = other DNA
caaaaactggaacaggatcccgcccgcccacgccatttcattactgaaaccggtattggctatcggtttatgctt

SEQ ID NO: 551883 - DNA, 75 bp, synthetic construct
  source 1..75: mol_type = other DNA
atgcctctcgtggtgaacggcatgaaaatcactaataaaaaagcccgacatattaagtttgtgggcttaaaaata

SEQ ID NO: 551884 - DNA, 75 bp, synthetic construct
  source 1..75: mol_type = other DNA
cggtcagcgcggcgcagacttgccccggactgtgtactgagctttgccgggcgcattccctgcggaggtgaacat

SEQ ID NO: 551885 - DNA, 75 bp, synthetic construct
  source 1..75: mol_type = other DNA
tgaataatattgatttttctctgatgcctgaagtcaaagcaaaaacagtccttagtcttaatgatgcagataaat

SEQ ID NO: 551886 - DNA, 75 bp, synthetic construct
  source 1..75: mol_type = other DNA
caaaaactggagcaagatcccgcccgccctcgccattttattactgaaaccggtattgggtatcggtttatgcca

SEQ ID NO: 551887 - DNA, 75 bp, synthetic construct
  source 1..75: mol_type = other DNA
ctgtagaaggaaaagaacgtctgcgcccggcgctttccagcggcaatctacaaaaaaccctgaccgcgcccgtca

SEQ ID NO: 551888 - DNA, 75 bp, synthetic construct
  source 1..75: mol_type = other DNA
tgtcatcggaaagtggtgtgatatgaatcattgttgtgatgcgaatggttataccgtcgactatctgaattttgc

SEQ ID NO: 551889 - DNA, 75 bp, synthetic construct
  source 1..75: mol_type = other DNA
gtgagcagtcctaatatcagttttgacactatcggtacgaaccgcaagccaggtcagtatattgagttcaacacc

SEQ ID NO: 551890 - DNA, 75 bp, synthetic construct
  source 1..75: mol_type = other DNA
atgagtgaaattcagtttgacaccatttcgggcagtatccgtaagcccggtgtgcattttgagtttaatacccgg

SEQ ID NO: 551891 - DNA, 75 bp, synthetic construct
  source 1..75: mol_type = other DNA
ttgttatcgacaaaattgatggcctcaaaggtcaggtcatcatcgccttagtcgttcatggcaaatccagcatca

SEQ ID NO: 551892 - DNA, 75 bp, synthetic construct
  source 1..75: mol_type = other DNA
gtggatgcgctgattaatcgtagtcgccgtgctcctaaccttaagaaccgtaccgatgaggcaactgaacaagct

SEQ ID NO: 551893 - DNA, 75 bp, synthetic construct
  source 1..75: mol_type = other DNA
cccaatgtataaaacagtctggagtacagtatacttataacagcggtgtctcagtatgtatgcaaggccttaatg

SEQ ID NO: 551894 - DNA, 75 bp, synthetic construct
  source 1..75: mol_type = other DNA
actcagggtcgagaatgcctacttaaaaaagctgaaagccttggttcaacagaaaacatgctcaacgttcaggaa

SEQ ID NO: 551895 - DNA, 75 bp, synthetic construct
  source 1..75: mol_type = other DNA
aagagtgtggacatcagcgtccaggataacagcgtttctttggtggtcaggccaaaaaagtctttaatcatccag

SEQ ID NO: 551896 - DNA, 75 bp, synthetic construct
  source 1..75: mol_type = other DNA
gcgaacggccagcttctgtcccgctatgaaaacggcatctggaaaaatatccctgccgccactttttcacgaaat

SEQ ID NO: 551897 - DNA, 75 bp, synthetic construct
  source 1..75: mol_type = other DNA
tgatgcgtttgttcagaaaggcgaagaggcgacacgaaaagcgatttatgacgccatccggccaccggctgacag

SEQ ID NO: 551898 - DNA, 75 bp, synthetic construct
  source 1..75: mol_type = other DNA
atgagtattattatcaacaactggcggatggacccgtcgcttaatgccttaatacattgcgaaacgggtgaaaca

SEQ ID NO: 551899 - DNA, 75 bp, synthetic construct
  source 1..75: mol_type = other DNA
cattcagccttctcccgcacaggcacagaacattcgggagaaaacggaggcggtattccgtctgttccggcccgt

SEQ ID NO: 551900 - DNA, 75 bp, synthetic construct
  source 1..75: mol_type = other DNA
cggcgtagaaggtgaaaacagcgccgactggattgtcgttgatttgggcgaagttattgtccatgtcatgcagga

SEQ ID NO: 551901 - DNA, 75 bp, synthetic construct
  source 1..75: mol_type = other DNA
tgtatgcaactggcttgaaaaatatagaaaatatggcgaagatgctttcatccgaaaaaataaaaagagtattcc

SEQ ID NO: 551902 - DNA, 75 bp, synthetic construct
  source 1..75: mol_type = other DNA
tattaccgaccagatacaggaaacagtaccagaagagatatcttctacaacaccgcctgtgcctgttagaaaaaa

SEQ ID NO: 551903 - DNA, 75 bp, synthetic construct
  source 1..75: mol_type = other DNA
aacagaacattattaaaaccatcccgaaaaaaggttacctgtgcaataaagagtatgtgtctttgccggagtcat

SEQ ID NO: 551904 - DNA, 75 bp, synthetic construct
  source 1..75: mol_type = other DNA
tgcaacgtgggctgctggaggcggcaacccgtaagccggatttgattattctcgatctcggcctgcccgatggcg

SEQ ID NO: 551905 - DNA, 75 bp, synthetic construct
  source 1..75: mol_type = other DNA
gcggtggcgttggaacggtattagggacgctttttggcgtggcgattcagggactgattcagacttacataaact

SEQ ID NO: 551906 - DNA, 75 bp, synthetic construct
  source 1..75: mol_type = other DNA
gctagtgctggtgatgggctgtgccttcggcgcatttatggggcttctgatcgacgccctgaagatcccggcatt

SEQ ID NO: 551907 - DNA, 75 bp, synthetic construct
  source 1..75: mol_type = other DNA
caccgttttcctcaggaaaaattgcctcactggtggaaacattaaagttaattgttccgcagcagcaaaatccgg

SEQ ID NO: 551908 - DNA, 75 bp, synthetic construct
  source 1..75: mol_type = other DNA
gctggtgctgctgatggggtgtgcattcggcgcatttatggggcttctgatcgacgcgctgaagatcccggcatt

SEQ ID NO: 551909 - DNA, 75 bp, synthetic construct
  source 1..75: mol_type = other DNA
gctgatgctggcggtggtggttatcggcatattcctcgcgcatcgtacccgttttggtaatcaggtgtacgccat

SEQ ID NO: 551910 - DNA, 75 bp, synthetic construct
  source 1..75: mol_type = other DNA
ggcatattcctcgcgcatcgtacccgctttggtaatcaggtgtacgccattggcggcaatgcgacgtcggcaaac

SEQ ID NO: 551911 - DNA, 75 bp, synthetic construct
  source 1..75: mol_type = other DNA
tttgatttttgcggataccttgaagtcctgcctgacaccacgggaatgtttatggggaacgctaacattgtccca

SEQ ID NO: 551912 - DNA, 75 bp, synthetic construct
  source 1..75: mol_type = other DNA
atgaaaatgaacgtaacggaaaccgttaaacaggcctgcggccactggccgcgcattctcccggcgctgggtgtg

SEQ ID NO: 551913 - DNA, 75 bp, synthetic construct
  source 1..75: mol_type = other DNA
agcagaactccgacgaggcactcagcatcaaacgcgacgctgacccgacattcgatttttgtggctatctggagg

SEQ ID NO: 551914 - DNA, 75 bp, synthetic construct
  source 1..75: mol_type = other DNA
cggaccgcgatctgaatggttcaggccagaacagggctgaaactgctgcaaaagcgtgtcagtgtgacattgtgc

SEQ ID NO: 551915 - DNA, 75 bp, synthetic construct
  source 1..75: mol_type = other DNA
taacggctataaaaatacgctcagtctgaccatgtttggcaaggggctaccgttaatgctcaaggaatatgggct

SEQ ID NO: 551916 - DNA, 75 bp, synthetic construct
  source 1..75: mol_type = other DNA
agctagcggtgattgttcgccagcttatgcagcgtttcagcgacccaatgagtgccaggacattgcttcagtcac

SEQ ID NO: 551917 - DNA, 75 bp, synthetic construct
  source 1..75: mol_type = other DNA
gacgctttttggcgtggcaattcagggactgatccagacttacatcaactttgacggcacgctgagttcctggtg

SEQ ID NO: 551918 - DNA, 75 bp, synthetic construct
  source 1..75: mol_type = other DNA
cgggccgggttctgtggtagccggttgtggaaaccctgtacgtctcaccaccccgagttttccacctctggatgg

SEQ ID NO: 551919 - DNA, 75 bp, synthetic construct
  source 1..75: mol_type = other DNA
ggtagttccaaccctgtacgtctcaccaccccgagcttggaacctctggatggtgagtttttaaaacttactagc

SEQ ID NO: 551920 - DNA, 75 bp, synthetic construct
  source 1..75: mol_type = other DNA
ccacccacagtttcgcagctctggatggtgagttttcacaacttactacacaaggggccacaccatggcaaaccg

SEQ ID NO: 551921 - DNA, 75 bp, synthetic construct
  source 1..75: mol_type = other DNA
cactgctcctcttaacgaggacgaaaaacaggttcttgctgcatataacgagcgattcggtaaagagaaaggcgc

SEQ ID NO: 551922 - DNA, 75 bp, synthetic construct
  source 1..75: mol_type = other DNA
tagaaagtcgctatgctgcttttatcgcagggctgattgaatcctcacctatgagtcaggcccaaatagccagac

SEQ ID NO: 551923 - DNA, 75 bp, synthetic construct
  source 1..75: mol_type = other DNA
caacccacccagaactttaaagcctttttcgcaggctttggtaaaaaatcttggcttaggtgttagtttggaaga

SEQ ID NO: 551924 - DNA, 75 bp, synthetic construct
  source 1..75: mol_type = other DNA
gcctgaaaaatccgcccattggccattctgctgtgccagattactttgatgaaatgctggaacgcattcgtgata

SEQ ID NO: 551925 - DNA, 75 bp, synthetic construct
  source 1..75: mol_type = other DNA
tccaagaaagacgctgatgacaaagcgaaattggagtttgaccgctttgcccagcagcgccgtcgtttaaaagaa

SEQ ID NO: 551926 - DNA, 75 bp, synthetic construct
  source 1..75: mol_type = other DNA
cagcgtggattaacggtgctgtgggagaatcgccagagttcgccagtgacaagagtcaatattgcgcagcgataa

SEQ ID NO: 551927 - DNA, 75 bp, synthetic construct
  source 1..75: mol_type = other DNA
gccacgaacccgtgattggcattatggggaaaagcggggccggtaaatcctcactctgtaatgcactgtttcagg

SEQ ID NO: 551928 - DNA, 75 bp, synthetic construct
  source 1..75: mol_type = other DNA
tcaaccgcagacttttccgcgcattccgcgtcgcgcatatcatgcacatcaatatgctgcatgaacgcagtcacg

SEQ ID NO: 551929 - DNA, 75 bp, synthetic construct
  source 1..75: mol_type = other DNA
attattcacttcccggaacagatagccccgcaggagcgcgacccgcagcttaaagacaaaatcacccgcgagctg

SEQ ID NO: 551930 - DNA, 75 bp, synthetic construct
  source 1..75: mol_type = other DNA
caaagctgacctgggtgcatacacctatcaggctgaacagcgcggtaacactgaaccgccccgggtttcctggag

SEQ ID NO: 551931 - DNA, 75 bp, synthetic construct
  source 1..75: mol_type = other DNA
atgtgtatctaccttaacttaatgattttgataaaaatcattaggggattcatcagtgccgagcggcttcgctca

SEQ ID NO: 551932 - DNA, 75 bp, synthetic construct
  source 1..75: mol_type = other DNA
agcaattcaacgctgatgggtgatgttgcctttaccagcacctggaatagtaattttgatccgaatggtcatgat

SEQ ID NO: 551933 - DNA, 75 bp, synthetic construct
  source 1..75: mol_type = other DNA
ctggtgggcgttgacgctacacaagaaccacgcgttcactccggcggcacgccaaaaaatctaagtcacctgcct

SEQ ID NO: 551934 - DNA, 75 bp, synthetic construct
  source 1..75: mol_type = other DNA
tgctgacgttcagtttcagcggcgagttaccgctggaacaggtcagcgagcgggatcagcttatcctttccgtga

SEQ ID NO: 551935 - DNA, 75 bp, synthetic construct
  source 1..75: mol_type = other DNA
cgcggtaacaccgttgttctgcaacagatggagctgaccgactacgctaacatggcgctgagcatcccgtctgcg

SEQ ID NO: 551936 - DNA, 75 bp, synthetic construct
  source 1..75: mol_type = other DNA
tggcatcagacatcagtccgattagcagggcttttaagtatgcgcttgatgaaatcacaaagaaaaaatccccgg

SEQ ID NO: 551937 - DNA, 75 bp, synthetic construct
  source 1..75: mol_type = other DNA
gattagcagggcttttaagtatgcgcttgatgaactcaccaataaaaaacgcccggtgtgcaagaccgagcgttc

SEQ ID NO: 551938 - DNA, 75 bp, synthetic construct
  source 1..75: mol_type = other DNA
cacatgaggaaaggcaaaatggacaaaatggacaagatgaaaaaggatgatatgggtaaaaaagacagcatgaac

SEQ ID NO: 551939 - DNA, 75 bp, synthetic construct
  source 1..75: mol_type = other DNA
ttgcagcaggagccgaacatatttttccggttctgcttgtcctgggactggcaacgcgtttttccgacactagtg

SEQ ID NO: 551940 - DNA, 75 bp, synthetic construct
  source 1..75: mol_type = other DNA
tgcttgcagcaggagccgaacatatttttccggttctgcttgtcctgggactggcaacgcgtttttccgcactag

SEQ ID NO: 551941 - DNA, 75 bp, synthetic construct
  source 1..75: mol_type = other DNA
gttcagatgttgagtgtggccacacgtttgttatgaatctgacgttctcccacactctcagccccagcgctaaaa

SEQ ID NO: 551942 - DNA, 75 bp, synthetic construct
  source 1..75: mol_type = other DNA
gttccgccaggagctgcgtgatgccgcttatcatttccagggcgatgccgacaacgatcagctttccgtaacgcc

SEQ ID NO: 551943 - DNA, 75 bp, synthetic construct
  source 1..75: mol_type = other DNA
gaacgtccagctgctgcagaacaacatggacgcgccgaaaatcatcggttcattcccgtgtaaaaaggttgatgg

SEQ ID NO: 551944 - DNA, 75 bp, synthetic construct
  source 1..75: mol_type = other DNA
gcctgctaaagatggcaacaactatgggtttgagtatatccatcgccctggtaccgaaacgcgtttcctgaacgt

SEQ ID NO: 551945 - DNA, 75 bp, synthetic construct
  source 1..75: mol_type = other DNA
gtccaactgctgcagaacagcatggatgcgccgaaaatcatcggctctttcccgtgtaaaaaggtttctggttaa

SEQ ID NO: 551946 - DNA, 75 bp, synthetic construct
  source 1..75: mol_type = other DNA
atcggcaccggtaacggtagggcaagtaacctttcaataaaggataatcccttgaagctgatatgggatatgttg

SEQ ID NO: 551947 - DNA, 75 bp, synthetic construct
  source 1..75: mol_type = other DNA
aactcggtgatgatggactcaaagttgagatgacattgatgcctgcgcgtgatgggaatatgtacggctttgaat

SEQ ID NO: 551948 - DNA, 75 bp, synthetic construct
  source 1..75: mol_type = other DNA
gacaacgcgatgcagacgactgcaacgtttgataattctaccctgatgggcgacgttttcttctccagcaacttt

SEQ ID NO: 551949 - DNA, 75 bp, synthetic construct
  source 1..75: mol_type = other DNA
tgactgctttgttaatgttgatctggaaccagctgatggcgttgtcgactttggtaaaataaattcccgaacaat

SEQ ID NO: 551950 - DNA, 75 bp, synthetic construct
  source 1..75: mol_type = other DNA
gcatgatattacggccaatgtcgtcactaaaaaaagatatgtgtattgtcataaccctgcacctttttataaagg

SEQ ID NO: 551951 - DNA, 75 bp, synthetic construct
  source 1..75: mol_type = other DNA
ctgcggtcaattttaccactggcggtccatttaccattttgaaaaaatttttggcagcaactaataataaagaaa

SEQ ID NO: 551952 - DNA, 75 bp, synthetic construct
  source 1..75: mol_type = other DNA
ccagagccagagccagagccagaagaaaaacagcgtaaaaagcctggtcgaaaacctaaggcggcagcagatgaa

SEQ ID NO: 551953 - DNA, 75 bp, synthetic construct
  source 1..75: mol_type = other DNA
taacaccaactacaacatggcggtctgtggcacctccggggccggtaaaaccgggctgatacagccacttatccg

SEQ ID NO: 551954 - DNA, 75 bp, synthetic construct
  source 1..75: mol_type = other DNA
atttatcgtaaactaggagcccccaaattacgggttacccccttaacagacccaagatcattgagcaattttgtt

SEQ ID NO: 551955 - DNA, 75 bp, synthetic construct
  source 1..75: mol_type = other DNA
gtgcaaagatgccatgaacaaggatcatatgaggaaaggcaatatgggcaaaatggacaagatggacaagatgaa

SEQ ID NO: 551956 - DNA, 75 bp, synthetic construct
  source 1..75: mol_type = other DNA
ttcaataaaaaatctgttgtcttagagccaattgccgatccattcggtgaggtgctggaattcgaaagggttgta

SEQ ID NO: 551957 - DNA, 75 bp, synthetic construct
  source 1..75: mol_type = other DNA
acaccagagatgcttaatggcgttaaacagcgtcacgactggtttgttgagcgtcttaatactattaatcaccgc

SEQ ID NO: 551958 - DNA, 75 bp, synthetic construct
  source 1..75: mol_type = other DNA
ttcctctctttctgccggattaacgatctggataccgcattgaatcatatcttcccactacctactggcgacatt

SEQ ID NO: 551959 - DNA, 75 bp, synthetic construct
  source 1..75: mol_type = other DNA
ggctccatgtcgcgaccggatcggtctgctcaacgtcctgctcgctgaagggctcaatctgggcctgcgtaagat

SEQ ID NO: 551960 - DNA, 75 bp, synthetic construct
  source 1..75: mol_type = other DNA
tcgccagaaaggcgtttcctgcggcccagctccaaatggaaccgtcatttacgagctcaggaaaaaggagatacc

SEQ ID NO: 551961 - DNA, 75 bp, synthetic construct
  source 1..75: mol_type = other DNA
gcattgaactgaccgacagccaaatagccgcgctggaacgtaaagccagcgatgacgaggcttgtggtgaaattg

SEQ ID NO: 551962 - DNA, 75 bp, synthetic construct
  source 1..75: mol_type = other DNA
ttctcgccgaaatcgcgaccctgctcgccggagaggataacgccacgtcagccgatatcgacacactggaagacc

SEQ ID NO: 551963 - DNA, 75 bp, synthetic construct
  source 1..75: mol_type = other DNA
agtagagtggctgacggataatggttcatgctaccgggctaatgaaacacggcagtttgcccggatgttgggctt

SEQ ID NO: 551964 - DNA, 75 bp, synthetic construct
  source 1..75: mol_type = other DNA
attctggagctcgccgatcatttttttgatggtatgtcaaagtcttgcgtcattgctggagaaggcagagaccaa

SEQ ID NO: 551965 - DNA, 75 bp, synthetic construct
  source 1..75: mol_type = other DNA
tgtggagttgcaaaacatctgataccccatggactttcagctctctgctgaaaaaacttttggctgttgagttgt

SEQ ID NO: 551966 - DNA, 75 bp, synthetic construct
  source 1..75: mol_type = other DNA
ctcgcctatgggagatcgcggtgctgttccatctgcgcgatgcgttccgctccggagatgtctggcttactaggt

SEQ ID NO: 551967 - DNA, 75 bp, synthetic construct
  source 1..75: mol_type = other DNA
gaagtcagaaatcataaagttacgaagagagagagaaatcgatgctgtacaggctcgcgaaatgtgggtcgaggc

SEQ ID NO: 551968 - DNA, 75 bp, synthetic construct
  source 1..75: mol_type = other DNA
atcgttctggtacgccagccaaggcgcttacccaaatggatgctgccggtgctggatgctgttggtctggcagtg

SEQ ID NO: 551969 - DNA, 75 bp, synthetic construct
  source 1..75: mol_type = other DNA
tcggtacagcggtatttgccatctccggcgttttgctggccggaaaattgcgtatggacccttttggcgtcctgg

SEQ ID NO: 551970 - DNA, 75 bp, synthetic construct
  source 1..75: mol_type = other DNA
atggaacaaacaagttacagcaagctaacacagcgagaaattgatcgcgcagaaacagatttactcatcaacctg

SEQ ID NO: 551971 - DNA, 75 bp, synthetic construct
  source 1..75: mol_type = other DNA
atgaatatggctgaacgtacttaccctggcgggaccaagtttctccttgtggccagccggacaaccgacgaccac

SEQ ID NO: 551972 - DNA, 75 bp, synthetic construct
  source 1..75: mol_type = other DNA
aatttcgtcggtcaagtagcgaggaaacactggaaaaggttattgaacatatggagccaaaagtaagcaaggatg

SEQ ID NO: 551973 - DNA, 75 bp, synthetic construct
  source 1..75: mol_type = other DNA
ttcacctccgggatgcttttcgttccggagatgtctggctcgctcattcgcgccgctatggtgacctcaagcagg

SEQ ID NO: 551974 - DNA, 75 bp, synthetic construct
  source 1..75: mol_type = other DNA
accctgcgctgaccggatcgggctaatgaacgttatcttggcggaagggatcaacctcggcttgcgcaaaatggc

SEQ ID NO: 551975 - DNA, 75 bp, synthetic construct
  source 1..75: mol_type = other DNA
aaccaagccatgatcgagcgcaattggcccgacatcctgcgcatcgccgccaccattgctgccgggaccgtcgcg

SEQ ID NO: 551976 - DNA, 75 bp, synthetic construct
  source 1..75: mol_type = other DNA
atgctcctgaattaacacctgcaggctatgttaaagttgccctcacacacaatctacctgttttctcgtgtgtgt

SEQ ID NO: 551977 - DNA, 75 bp, synthetic construct
  source 1..75: mol_type = other DNA
accaatatttggtctgataacaatgctcctgaattaacacctgcaggctatgttaaagttgccctcacacacaat

SEQ ID NO: 551978 - DNA, 75 bp, synthetic construct
  source 1..75: mol_type = other DNA
gaatgggtgattctttgcccgcgcgtggcgaaaacccatccgaaaattgttaaatggagctatggctatgagtaa

SEQ ID NO: 551979 - DNA, 75 bp, synthetic construct
  source 1..75: mol_type = other DNA
atgaaattgccagtcagagaatttgatgcagttgtgattggtgctggcggcgcaggtatgtgcgcggcgctgcaa

SEQ ID NO: 551980 - DNA, 75 bp, synthetic construct
  source 1..75: mol_type = other DNA
gcggcatagacctgcaacacgcgtcctgggtcaccgccgcgttccagattggcggtacgttgggcgcgctggcgc

SEQ ID NO: 551981 - DNA, 75 bp, synthetic construct
  source 1..75: mol_type = other DNA
cagaagttcttggcaggcgaccatctcctggttttattgctcagaaaatgcaggctgaagcactcaaattacccg

SEQ ID NO: 551982 - DNA, 75 bp, synthetic construct
  source 1..75: mol_type = other DNA
attaggaagaacaatttctattcataacccgatgaggcgatactatttaattcgtaatagtatcttaatatgcaa

SEQ ID NO: 551983 - DNA, 75 bp, synthetic construct
  source 1..75: mol_type = other DNA
tcgccccgctttttggcgcgggtctgctggggttaaccgcaggcgcactgctttgtggcccgttgtccgatcgct

SEQ ID NO: 551984 - DNA, 75 bp, synthetic construct
  source 1..75: mol_type = other DNA
caagatgcagtggtgcgttatcatctgctgttttctggtggtaatgctcgatggttttgacaccgcggctatcgg

SEQ ID NO: 551985 - DNA, 75 bp, synthetic construct
  source 1..75: mol_type = other DNA
gtgcgtctttttgtttggcgcgttaagcctcgcctcggctttctcaccggatctgcaaacgctggtattcctgcg

SEQ ID NO: 551986 - DNA, 75 bp, synthetic construct
  source 1..75: mol_type = other DNA
ttaccgaaatgtttttagtctacgccttcactctgcctgcaatggtggaagccagacgtgaacaaaaaagatcag

SEQ ID NO: 551987 - DNA, 75 bp, synthetic construct
  source 1..75: mol_type = other DNA
tacgaatagatgccaataaagcagttcatacagatgaagtattcacaccaattgaggcaagccagatactgagtt

SEQ ID NO: 551988 - DNA, 75 bp, synthetic construct
  source 1..75: mol_type = other DNA
tacgaattgatgccaataaagcagttcatacagatgaagttttcacaccaattgaggcaagccagatcctgagtt

SEQ ID NO: 551989 - DNA, 75 bp, synthetic construct
  source 1..75: mol_type = other DNA
ctgcgatcattgttacatttaatccggatttgactattttcggagaaatacttgaaagaatagcctctcaagtag

SEQ ID NO: 551990 - DNA, 75 bp, synthetic construct
  source 1..75: mol_type = other DNA
ttacaaaaaaggcctgatcactgaacagatgaaggaatgggctcatattgtacgaattgatgccaataaagcagt

SEQ ID NO: 551991 - DNA, 75 bp, synthetic construct
  source 1..75: mol_type = other DNA
tcgatattctgatttcaggaaatagccagtaccgtttccgcaagatctatcctgtggtcaaaaaaattaccgcac

SEQ ID NO: 551992 - DNA, 75 bp, synthetic construct
  source 1..75: mol_type = other DNA
tatgtcgatacccacttttatctcaatgaaccagccgctattgccaaaggcagcattcgccagttgtttgccggg

SEQ ID NO: 551993 - DNA, 75 bp, synthetic construct
  source 1..75: mol_type = other DNA
gtggcaaaaaccaggaagcggagaaaacgctcccccaatggcacacgcgctccccgcaaaaaaagccgctcacca

SEQ ID NO: 551994 - DNA, 75 bp, synthetic construct
  source 1..75: mol_type = other DNA
gatcgtcgaattgcccgctggacggaagtgattggcatggaacatatccgtgacgtgcaggcgcaaaagcgcggc

SEQ ID NO: 551995 - DNA, 75 bp, synthetic construct
  source 1..75: mol_type = other DNA
tacatcgcaacctggaactgtgcttcccggagatgagcgaacaagaacgccatgaaatgatggtgaagaatttcg

SEQ ID NO: 551996 - DNA, 75 bp, synthetic construct
  source 1..75: mol_type = other DNA
cggcaaactgccaacccgtgacgaactcgccgcctacaaaacgaaactgaaagccctgcgtggtttaccggctaa

SEQ ID NO: 551997 - DNA, 75 bp, synthetic construct
  source 1..75: mol_type = other DNA
cgtgcgtactgtactggaggctttacctgcggcgtcacatccgatggatgtcatgcgcaccggcgtttccgcgct

SEQ ID NO: 551998 - DNA, 75 bp, synthetic construct
  source 1..75: mol_type = other DNA
ctgtctggcagaggcgtaaaccgaagaaggcgaaaaagaaacgagcccggcgctcagcgaatggtacgcgcagac

SEQ ID NO: 551999 - DNA, 75 bp, synthetic construct
  source 1..75: mol_type = other DNA
caggtagagggggcgctgtacgaggtaaagcccgatgccagcattctgacgacgatacggagctgctgcgcgatt

SEQ ID NO: 552000 - DNA, 75 bp, synthetic construct
  source 1..75: mol_type = other DNA
gccagcattcctgacgacgatacggagctgctgcgcgattacgtaaagaagttattgaagcatcctcgtcagtaa

SEQ ID NO: 552001 - DNA, 75 bp, synthetic construct
  source 1..75: mol_type = other DNA
atgatatttaaacaatgtaatctgttatataccagtaagggaaaatatgaaaaaatattgttagtttgcgctgcg

SEQ ID NO: 552002 - DNA, 75 bp, synthetic construct
  source 1..75: mol_type = other DNA
ctttaagccttataatgctgggaccgttggcacatgcggaagaaattggttctgtcgataccgtatttaaaatga

SEQ ID NO: 552003 - DNA, 75 bp, synthetic construct
  source 1..75: mol_type = other DNA
ccgtgtggcagagaaaaaagccgaaaaccaaaaaagggaagaaacgggcaaaacgttctccgaacggcacgcgca

SEQ ID NO: 552004 - DNA, 75 bp, synthetic construct
  source 1..75: mol_type = other DNA
aataccgtttgcgactgcccaggctatgactaaagtggttcgccagatagaagcggcccaaaaaacagcatttga

SEQ ID NO: 552005 - DNA, 75 bp, synthetic construct
  source 1..75: mol_type = other DNA
gctgattatttacctgctctcaagctggatgccgacgctactgaaccatcgcggcatcgacctgcaacacgcgtc

SEQ ID NO: 552006 - DNA, 75 bp, synthetic construct
  source 1..75: mol_type = other DNA
gaagagggaatacccataacattcagtgtccaaaccatgttttcagatactaattttattgctgaacaacgagct

SEQ ID NO: 552007 - DNA, 75 bp, synthetic construct
  source 1..75: mol_type = other DNA
taataacattagatatgaaaaaacaaaagtgctgaatgtcgaatcattgttatcgctaatcctaaacccgacaag

SEQ ID NO: 552008 - DNA, 75 bp, synthetic construct
  source 1..75: mol_type = other DNA
acgctgccagctgacgatcagcaaaaagcacagaccaccgcagaaaacatcattaatacgctggttattcagtaa

SEQ ID NO: 552009 - DNA, 75 bp, synthetic construct
  source 1..75: mol_type = other DNA
cggtacagttgagactgattgcggaaccggttatgtctacgatgtcattgccgattttgatggcaagccgtctat

SEQ ID NO: 552010 - DNA, 75 bp, synthetic construct
  source 1..75: mol_type = other DNA
aaccggcgctgactattgccctgcagaaagatctgcaacctcgtgaaagcaaaacgctgaccctcacttcgcgcg

SEQ ID NO: 552011 - DNA, 75 bp, synthetic construct
  source 1..75: mol_type = other DNA
tcgtcaaattattgcgccttaccgtggagcagtttcttatgtgcagtttacaactgaccaacgtaagccctggta

SEQ ID NO: 552012 - DNA, 75 bp, synthetic construct
  source 1..75: mol_type = other DNA
gaaaactggctgtgtcactccctgtatctgccagagtcggaatccatgacgcgacgtagcgtcaacatggaaccg

SEQ ID NO: 552013 - DNA, 75 bp, synthetic construct
  source 1..75: mol_type = other DNA
ggatctggtgaaaaaccaggatggcgcagtggtgggttgtaccgcactgtgcatcgaaaccggtgaagtggttta

SEQ ID NO: 552014 - DNA, 75 bp, synthetic construct
  source 1..75: mol_type = other DNA
ccgaaagccgtggcgcacatagccgcttcgacttcccggatcgcgatgatgaaaactggctgtgccactccctgt

SEQ ID NO: 552015 - DNA, 75 bp, synthetic construct
  source 1..75: mol_type = other DNA
actcgtggaacaaatgggaaccgattgccggatacggatgggaaagtacctggcgaccgctggcggatgaaaatt

SEQ ID NO: 552016 - DNA, 75 bp, synthetic construct
  source 1..75: mol_type = other DNA
cacgtttcgcttacgacaaagaaaaaaccgatcgctataacgagcgaccgtggggtggcggtttttggcctgtcg

SEQ ID NO: 552017 - DNA, 75 bp, synthetic construct
  source 1..75: mol_type = other DNA
acgtttagagaaaatattgcacaaacctggcaacagcctgaacattatgatttatatattcctgccatcacctag

SEQ ID NO: 552018 - DNA, 75 bp, synthetic construct
  source 1..75: mol_type = other DNA
ccgcgctggcacgcctggcccgttcttatcggctggcgattgttcacggcaacgggccgcaggtggggctgctgg

SEQ ID NO: 552019 - DNA, 75 bp, synthetic construct
  source 1..75: mol_type = other DNA
cgataaagcgcgcaccagcgaagatatcaacgatgcgctgaattatcgcaccgtaacgaaaaacattattcagca

SEQ ID NO: 552020 - DNA, 75 bp, synthetic construct
  source 1..75: mol_type = other DNA
attaacaaccgtcaggatattgttatcaatgtgacgatccactaccccgccgataaagcgcgtaccagtgaagat

SEQ ID NO: 552021 - DNA, 75 bp, synthetic construct
  source 1..75: mol_type = other DNA
gcactggaattgcgccgcgatccggtccgttcgacgctggcgctgatgggaacagtgatcctgatgctgataatg

SEQ ID NO: 552022 - DNA, 75 bp, synthetic construct
  source 1..75: mol_type = other DNA
atttcgtcctatcaatcggtagttactgacgctcgtttccctccagccgaaaccatgtaccgtctaatcgatact

SEQ ID NO: 552023 - DNA, 75 bp, synthetic construct
  source 1..75: mol_type = other DNA
atttgggggttgaaaaaacgcgcggatggttcttttagtggagagttgagaaaatttcgcaactcgaacattccg

SEQ ID NO: 552024 - DNA, 75 bp, synthetic construct
  source 1..75: mol_type = other DNA
atggcacaacctgccgctattattcgtataaagaaccttcgtttacgcacgtttattggaattaaggacgaagaa

SEQ ID NO: 552025 - DNA, 75 bp, synthetic construct
  source 1..75: mol_type = other DNA
aaacgtgctgatgaccttttcgattgttacacctacggattgattatcgcgcacggtaattacgcggaattgtaa

SEQ ID NO: 552026 - DNA, 75 bp, synthetic construct
  source 1..75: mol_type = other DNA
cctcaaccagaaagcggaaaccgaaggctgggatatgacgccgattaaatcagcgttaaccagcaaagggaaaga

SEQ ID NO: 552027 - DNA, 75 bp, synthetic construct
  source 1..75: mol_type = other DNA
aggtttcgcctgatgatccggcgtttttgcagccagagaaatttattggtccggtttatcagccagaagaacaag

SEQ ID NO: 552028 - DNA, 75 bp, synthetic construct
  source 1..75: mol_type = other DNA
acgtctgcccgcgcatcgcctggatgccgcaggggctgggtaaaaacctctaccacaccttgtcggtgtataaaa

SEQ ID NO: 552029 - DNA, 75 bp, synthetic construct
  source 1..75: mol_type = other DNA
acgtcgattttttcgcccgcctgttcggtcatgacaaaacggagcgggaagtccgaatcaatgagctgctgacca

SEQ ID NO: 552030 - DNA, 75 bp, synthetic construct
  source 1..75: mol_type = other DNA
cggcttcacagaagcaaaaagcggcggctaccaaaaagttctgggaagggaaagacgaacccggcccgtcgaagg

SEQ ID NO: 552031 - DNA, 75 bp, synthetic construct
  source 1..75: mol_type = other DNA
tgaaggtgatagtgttaagttatcgctgtatgatttagataataataaaaatataaatgttaatattgatacttc

SEQ ID NO: 552032 - DNA, 75 bp, synthetic construct
  source 1..75: mol_type = other DNA
aaagccgtcgcaaagctgggaaaaggcgatgcatatctcgctggtgctgtacgccgaacacgagtttaacgcttc

SEQ ID NO: 552033 - DNA, 75 bp, synthetic construct
  source 1..75: mol_type = other DNA
atggctattagcacaccgatgttggtgacattttgtgtctatatttttggcatgatattgattgggtttatcgcc

SEQ ID NO: 552034 - DNA, 75 bp, synthetic construct
  source 1..75: mol_type = other DNA
agattgttgatgaaatctgcgattttgtggcgaatcagcaggctgtattcctcggcggtcactacatccttcacc

SEQ ID NO: 552035 - DNA, 75 bp, synthetic construct
  source 1..75: mol_type = other DNA
aggttgttgatgaaatctgcgattttgtggcgaatcagcaggcggttttcctcggtggtcactacatcctgcagg

SEQ ID NO: 552036 - DNA, 75 bp, synthetic construct
  source 1..75: mol_type = other DNA
tgttattaagagatatattcgagttatctaagcaaaccagtggggatgttctaatctataatactctttggcaat

SEQ ID NO: 552037 - DNA, 75 bp, synthetic construct
  source 1..75: mol_type = other DNA
acgctgaacgcgtgtttatcgaactggcgcaaattctgtttaacccgtggattgccgggattctgctgtcggcga

SEQ ID NO: 552038 - DNA, 75 bp, synthetic construct
  source 1..75: mol_type = other DNA
accggcccatatttatgccggaaacggtaattttgttggagacgggatccgcaaggcgctgatggcccgcgccgg

SEQ ID NO: 552039 - DNA, 75 bp, synthetic construct
  source 1..75: mol_type = other DNA
cggacatcagcaggtgctgtttgtggtgacgcaggccgacaaaacggagccctgccatgaatgggatatggccgg

SEQ ID NO: 552040 - DNA, 75 bp, synthetic construct
  source 1..75: mol_type = other DNA
agtgatcaaacaaaagagcattgaaaacgtggatatgctcaaagggttgaattttgtcgccattatctcgctgat

SEQ ID NO: 552041 - DNA, 75 bp, synthetic construct
  source 1..75: mol_type = other DNA
acctggatgatcctctgcctggcaggggcggtggctgtcggcttctttggtattgcttactttaatgagcacccg

SEQ ID NO: 552042 - DNA, 75 bp, synthetic construct
  source 1..75: mol_type = other DNA
actttgttgccattatctcgctgatgggctggggactgggttacttcgggcagccgcacatcctggcgcgtttta

SEQ ID NO: 552043 - DNA, 75 bp, synthetic construct
  source 1..75: mol_type = other DNA
gacgagctgcgcacggaatctgtccgcgctcaggcccgtgaacagtttaccggtgcggtggaccggatatttgac

SEQ ID NO: 552044 - DNA, 75 bp, synthetic construct
  source 1..75: mol_type = other DNA
aaattctgcgcaattacaaagccgtgattaatgcacgacgtcgtgagatggggcagaaaccgctcaccaccgcgc

SEQ ID NO: 552045 - DNA, 75 bp, synthetic construct
  source 1..75: mol_type = other DNA
ggtgttttcagcgacattcgctacgcttattggctcactgacggctgttgcgctgtaccgctatcgcttccgcgg

SEQ ID NO: 552046 - DNA, 75 bp, synthetic construct
  source 1..75: mol_type = other DNA
tcgctggtgatggttattgccagccagcttattgctcgtgataaaacgaaaggtaacacaggggacgttaaatga

SEQ ID NO: 552047 - DNA, 75 bp, synthetic construct
  source 1..75: mol_type = other DNA
gtgaatttgtatcgcgcaattgtgaaagccgacaaccgcctgccagaaaatctcaagccaaaagatattaccgaa

SEQ ID NO: 552048 - DNA, 75 bp, synthetic construct
  source 1..75: mol_type = other DNA
ccgttttggcggcaatctggcgctcaatctcgggacatttggcggcgtgtttattgcgggcggtatcgtgccgcg

SEQ ID NO: 552049 - DNA, 75 bp, synthetic construct
  source 1..75: mol_type = other DNA
agattgttgatgaaatctgcgattttgtggtgaatcagcaggctgttttcctcggcggtcactacatcttacagg

SEQ ID NO: 552050 - DNA, 75 bp, synthetic construct
  source 1..75: mol_type = other DNA
tgtgattttgtggcgaatcagcaggcggttttcctcggtggtcactatatccttcagggcagcagaaacaggtga

SEQ ID NO: 552051 - DNA, 75 bp, synthetic construct
  source 1..75: mol_type = other DNA
atgaaacttgcaccacaaagccgtgagatcctgcgacagtacaaagccctgattaatgcccgccgacgtgatgcc

SEQ ID NO: 552052 - DNA, 75 bp, synthetic construct
  source 1..75: mol_type = other DNA
ctcaccaccgcgcagattgttgatgaaatctgcgattttgtggtgaatcagcaggcggttttcctcggcggtcac

SEQ ID NO: 552053 - DNA, 75 bp, synthetic construct
  source 1..75: mol_type = other DNA
tcggtaaaggtacgctgaccgtttccgaaatcttctttacctccccaagtcgttgcgctgtcgcagacagttgcg

SEQ ID NO: 552054 - DNA, 75 bp, synthetic construct
  source 1..75: mol_type = other DNA
ggctgttcggcaaagcaccggtcgttgataagtggacattctcaactaacggcgtctccatcatgggccgtcacg

SEQ ID NO: 552055 - DNA, 75 bp, synthetic construct
  source 1..75: mol_type = other DNA
atggctaagaatattccattcaaactgattcttgaaaaagcaaaagattaccaggcggacatgactcgcttcctg

SEQ ID NO: 552056 - DNA, 75 bp, synthetic construct
  source 1..75: mol_type = other DNA
taaaagcacacagcttttttattttcagcttactattgacattaattttattttgcattaccaccttatataatg

SEQ ID NO: 552057 - DNA, 75 bp, synthetic construct
  source 1..75: mol_type = other DNA
ggaatcagagcagcaggaaaaagaagaacagtagcagtagcagtagcagtagcagtagcaggaacaacaacatca

SEQ ID NO: 552058 - DNA, 75 bp, synthetic construct
  source 1..75: mol_type = other DNA
cggccttttgccgggatgccaggagcgcaggccacggcgcgacagaggcggcgcgaccggaacagtcgctgcaag

SEQ ID NO: 552059 - DNA, 75 bp, synthetic construct
  source 1..75: mol_type = other DNA
cattccggacacatcacaaacaggaagggtaacgggcgacgcgtcagcgtggcccgcttcccttccggcaggcgt

SEQ ID NO: 552060 - DNA, 75 bp, synthetic construct
  source 1..75: mol_type = other DNA
aatgggctgttttcggttgtggaaacatctgcatcgcaatctacctcacgccttgtgcgttcggtgactggcggt

SEQ ID NO: 552061 - DNA, 75 bp, synthetic construct
  source 1..75: mol_type = other DNA
tcggacacccgctgggggatctttgagatcaacctgtttggtgatgctcaactgatcgaaaacttaaatgcgcaa

SEQ ID NO: 552062 - DNA, 75 bp, synthetic construct
  source 1..75: mol_type = other DNA
aaaacaaaacaatgctgttctgtcactgctcgttgctggttgcattatgtcattgatgctgttgagaaaagccag

SEQ ID NO: 552063 - DNA, 75 bp, synthetic construct
  source 1..75: mol_type = other DNA
gtaaccacagaaaaataacatcagaaaaaaatattcctgacacatcacaaacgggaagaataacgggcgacgcgc

SEQ ID NO: 552064 - DNA, 75 bp, synthetic construct
  source 1..75: mol_type = other DNA
ccagggcggagacagcttcgctggctccgttcacgacagcccgccccgccagggggacgcccgggaaagccataa

SEQ ID NO: 552065 - DNA, 75 bp, synthetic construct
  source 1..75: mol_type = other DNA
gggcatcactgccacggccggaaacgactgtccgggggcagaccgcaaaagtttttgcctgcttctgggcaaaaa

SEQ ID NO: 552066 - DNA, 75 bp, synthetic construct
  source 1..75: mol_type = other DNA
gccagcagctgcctgtcggagtcgggcctgacgaccggataccgccaggcagccgggagccgaaggtgcgcccgg

SEQ ID NO: 552067 - DNA, 75 bp, synthetic construct
  source 1..75: mol_type = other DNA
ggccttttgccgggatgcagggagcgcaggccacggcgcgacaaaggcggcgcgaccggaacggtcgctgcaagc

SEQ ID NO: 552068 - DNA, 75 bp, synthetic construct
  source 1..75: mol_type = other DNA
agcctgccaggggttttcgcgcgggctgacaggcggcctccaccgcctgccctgtatcacctgtttctgctgccc

SEQ ID NO: 552069 - DNA, 75 bp, synthetic construct
  source 1..75: mol_type = other DNA
tcgcccactatgatcaggtaaccacctggcctcggtacgggttgcaggcagatattgtccatattggttttggcg

SEQ ID NO: 552070 - DNA, 75 bp, synthetic construct
  source 1..75: mol_type = other DNA
cagttcagttctacgagagtgattctcagcgaaaacccaaaagaagagctggcccgcatttacaataaatatgta

SEQ ID NO: 552071 - DNA, 75 bp, synthetic construct
  source 1..75: mol_type = other DNA
tcgttcgctatgcgccttatgcggagactgaagagttcgcaaacataggcgtacttctgtgcgcgccaaaagaaa

SEQ ID NO: 552072 - DNA, 75 bp, synthetic construct
  source 1..75: mol_type = other DNA
tgattgcggaagcgcgtcttgatgcggcagatccgaaaacctggtatctggcggcggcacagggcactgacacca

SEQ ID NO: 552073 - DNA, 75 bp, synthetic construct
  source 1..75: mol_type = other DNA
tttcgagtaaactgtttgttgtcaccttcttgatatataacatatttcaggaactacaactttccagcaaactgg

SEQ ID NO: 552074 - DNA, 75 bp, synthetic construct
  source 1..75: mol_type = other DNA
atgatgtttctattttctatattttccgccaactcagttttatttgtttaacctcgctggcgctcttttgttatg

SEQ ID NO: 552075 - DNA, 75 bp, synthetic construct
  source 1..75: mol_type = other DNA
atggttcctatgggtacacaaaaattaaaagcacaaagcttttttattttcagcttgttactgacattaatttta

SEQ ID NO: 552076 - DNA, 75 bp, synthetic construct
  source 1..75: mol_type = other DNA
gatatcgatctggtcaggaaggttgtagccgactatcaacgtaatccagctgagcctgtccctgctgatgtcaga

SEQ ID NO: 552077 - DNA, 75 bp, synthetic construct
  source 1..75: mol_type = other DNA
gccgtgcgtcaggcactggcgaaagatccgcagaaaatttttaactatatccagcttacgcctgtgcgtaaggag

SEQ ID NO: 552078 - DNA, 75 bp, synthetic construct
  source 1..75: mol_type = other DNA
acaacgcggtgattgaggaaatcaatcgcgaccatgtgatgctgcgctatcagggaaaaatagagcgcctgagcc

SEQ ID NO: 552079 - DNA, 75 bp, synthetic construct
  source 1..75: mol_type = other DNA
tcggcggtcgctatcagacgcttcaggcacagtgcgtggctgatcctgactgttcgctggaaatggcccgtgaac

SEQ ID NO: 552080 - DNA, 75 bp, synthetic construct
  source 1..75: mol_type = other DNA
tgttacgtaccaaaggcattgatggcctgactgcgcaactgaagtctatttctcaacagaaaatcactctggaag

SEQ ID NO: 552081 - DNA, 75 bp, synthetic construct
  source 1..75: mol_type = other DNA
ttgctggataaagtcgaatcggtactgttgccagcctatgcgcagaaaaccggaaaaaccaccgatgaaattgcc

SEQ ID NO: 552082 - DNA, 75 bp, synthetic construct
  source 1..75: mol_type = other DNA
agcgggcaccatcagccacgggcaaatgtgggcaatcctgccgcaaacctggctgggtaacctggtcggttccgt

SEQ ID NO: 552083 - DNA, 75 bp, synthetic construct
  source 1..75: mol_type = other DNA
tgtgtaactggctggtttgcctggcaatctggatggcgctgcgcactgaaggggcggcgaaatttatcgctatct

SEQ ID NO: 552084 - DNA, 75 bp, synthetic construct
  source 1..75: mol_type = other DNA
ttgctcgatccatccgtacgccctctggtgatgggcgcgacctttggtatcgctttaacgctggtgattatcgcc

SEQ ID NO: 552085 - DNA, 75 bp, synthetic construct
  source 1..75: mol_type = other DNA
ggtggtgtctgctggcgtttattgcgtccggttacgagcactccatcgctaacatgacgctgttcgcgctctcct

SEQ ID NO: 552086 - DNA, 75 bp, synthetic construct
  source 1..75: mol_type = other DNA
ctctcctggttcggcaaccacagcgaagcctacacgctggcgggtattggtcataacctgctgtgggtgacgctg

SEQ ID NO: 552087 - DNA, 75 bp, synthetic construct
  source 1..75: mol_type = other DNA
gtgcggcgaacgctgcgcgcatcgcacgcctgtcggcaaataacccgcttggcttttgggtcagctccgcaatgg

SEQ ID NO: 552088 - DNA, 75 bp, synthetic construct
  source 1..75: mol_type = other DNA
ggtaaagcgccatcagcggcgatgcaaaaacgctttgccgaggccgatgcgcactatcattcggctccgccgtca

SEQ ID NO: 552089 - DNA, 75 bp, synthetic construct
  source 1..75: mol_type = other DNA
aggaatggtggtcactcaaaatattgaggcggccattcgatactacaaagcgataaggcgaatacttgaggagca

SEQ ID NO: 552090 - DNA, 75 bp, synthetic construct
  source 1..75: mol_type = other DNA
tttgggtatggttttttttcctgttgtccttaggtatctgtgtagcactagggaagttgcgattaagtggtccgc

SEQ ID NO: 552091 - DNA, 75 bp, synthetic construct
  source 1..75: mol_type = other DNA
gcataacgtgacaggaagtacggtgattgccgctcatgaaggcaaagcaccgcagcagatcatcattatggcgca

SEQ ID NO: 552092 - DNA, 75 bp, synthetic construct
  source 1..75: mol_type = other DNA
caaagccggtattgcggtactttcggtggaggcaactaactggaatcttgggaataaggatggctatcagcaacg

SEQ ID NO: 552093 - DNA, 75 bp, synthetic construct
  source 1..75: mol_type = other DNA
gaacggagcagtgctgtacgagcaacagcgtgatttcccggcagtggaaggcaccagccgtttgtccgctagtct

SEQ ID NO: 552094 - DNA, 75 bp, synthetic construct
  source 1..75: mol_type = other DNA
gtaaactggcgcaagaggcttctattaaagccagcgatggcgggcagacggtttccggtgtagtaaaaacgatgg

SEQ ID NO: 552095 - DNA, 75 bp, synthetic construct
  source 1..75: mol_type = other DNA
cgggtgcgtctgtggccagtctctgggggaagtccgtgttccacaccggggaaatgtggtggacagagtcattga

SEQ ID NO: 552096 - DNA, 75 bp, synthetic construct
  source 1..75: mol_type = other DNA
atactctctgtcaatcataatgaagatggtacacctgcaaaggaagatgacaaatgggagtttaaaaaaagtgag

SEQ ID NO: 552097 - DNA, 75 bp, synthetic construct
  source 1..75: mol_type = other DNA
taggttttttgcatcacatcaggctggttccgttatttgcctgcattcttggcggtatcttacttctgtttgcct

SEQ ID NO: 552098 - DNA, 75 bp, synthetic construct
  source 1..75: mol_type = other DNA
tgaagcggtagatgtattccgtctgacgaaacaatctgcgtcggcagctcaacgagtggcgggggattcagttag

SEQ ID NO: 552099 - DNA, 75 bp, synthetic construct
  source 1..75: mol_type = other DNA
gaaaatttctgagatcaccgccgtcatcaacagtattgctttccagacgaatattctggcactgaatgctgccgt

SEQ ID NO: 552100 - DNA, 75 bp, synthetic construct
  source 1..75: mol_type = other DNA
ctgattgatggtgatttggcagccaataacggtggctggcagtgggcggcgtctacgggtactgatgcagcgccg

SEQ ID NO: 552101 - DNA, 75 bp, synthetic construct
  source 1..75: mol_type = other DNA
ttggcagccaataacggtggctggcagtgggcggcgtctacgggtactgatgcagcgccgtattttcgtattttc

SEQ ID NO: 552102 - DNA, 75 bp, synthetic construct
  source 1..75: mol_type = other DNA
cgtagtagcggatcgatagagccctcgccatccattacgctgaattatcctcgtcagtctttcgatactgcgcat

SEQ ID NO: 552103 - DNA, 75 bp, synthetic construct
  source 1..75: mol_type = other DNA
cgcgcgaacgcgcatcttttgtcggcaaaagcctgatcaccctacccgaccaagcaacatatacgggttccgggc

SEQ ID NO: 552104 - DNA, 75 bp, synthetic construct
  source 1..75: mol_type = other DNA
cgccgatgccgagttgcgccgccagctttcgcagattttcaaagataacggggtcccctttacaccgtacgaggt

SEQ ID NO: 552105 - DNA, 75 bp, synthetic construct
  source 1..75: mol_type = other DNA
aggtgagtttatccgccgatggttaccggagctgcgcgatgtaccagggaaagcggtgcatgagccgtggaagtg

SEQ ID NO: 552106 - DNA, 75 bp, synthetic construct
  source 1..75: mol_type = other DNA
aagacagcttggcgaatattattcagcattttgtgcgtctggatgggtcaagcaaagatccattaccaaagcgaa

SEQ ID NO: 552107 - DNA, 75 bp, synthetic construct
  source 1..75: mol_type = other DNA
atgtaccagcagctactgatgggcggcagtgtgttgattttcctgtaactgaggcatttggcgacaattggcagg

SEQ ID NO: 552108 - DNA, 75 bp, synthetic construct
  source 1..75: mol_type = other DNA
ccacaggttgacggagaaggagaacagtacaaaacgagttcccccgtaccggattttattccgcaaaacctcttc

SEQ ID NO: 552109 - DNA, 75 bp, synthetic construct
  source 1..75: mol_type = other DNA
ggatgaaatattggaaatatggctctgtgaaatagagtctggtggcagcggaatcctgatccgactgcagcaaaa

SEQ ID NO: 552110 - DNA, 75 bp, synthetic construct
  source 1..75: mol_type = other DNA
atctacgtttctggcagaaacatcatgcgatgccgcgcggcgtcaaaccgcgggcgattttgcttattttgctca

SEQ ID NO: 552111 - DNA, 75 bp, synthetic construct
  source 1..75: mol_type = other DNA
gcaccgattgtttgccgcattttgttggcctgtctgcaacgcttaccgacgcgcagcacttctttgccaggttgg

SEQ ID NO: 552112 - DNA, 75 bp, synthetic construct
  source 1..75: mol_type = other DNA
tccagttggatgagcgatccccgcaagggagcagaatggctggaaatctggctctgtgagatggagtctggcggc

SEQ ID NO: 552113 - DNA, 75 bp, synthetic construct
  source 1..75: mol_type = other DNA
ctaaccccatcgccttcggtttcccggtggaaaacagccatccgatgattgttgatatggcgaccagtgccacgg

SEQ ID NO: 552114 - DNA, 75 bp, synthetic construct
  source 1..75: mol_type = other DNA
actcaatcgctgatgaactgggtatcacccaaggagcggtagggcattatcttaatggcagaaacgcgctaaacg

SEQ ID NO: 552115 - DNA, 75 bp, synthetic construct
  source 1..75: mol_type = other DNA
atgctatcagtctggcgaatcaaacaattgcatcccaggctgcaaccgcacacgtcgcggtcattagcatggaca

SEQ ID NO: 552116 - DNA, 75 bp, synthetic construct
  source 1..75: mol_type = other DNA
agtgacgagcaaccacgctaacgtaacctccgccttgcaggtaatggggactgcggaagggatggccagacttgt

SEQ ID NO: 552117 - DNA, 75 bp, synthetic construct
  source 1..75: mol_type = other DNA
atgatttatttatggatgtttctcgccctgtgtattgtctgcgtaagcggatacatcggtcaggtactgaacgtg

SEQ ID NO: 552118 - DNA, 75 bp, synthetic construct
  source 1..75: mol_type = other DNA
atctgttctcaaaaatgggcagtgaagaggcggaagaaactccagttaccaacctcgataaaaaaatcgctaact

SEQ ID NO: 552119 - DNA, 75 bp, synthetic construct
  source 1..75: mol_type = other DNA
tacgctgggcgtggtattaccggtattgccgactacgccgtttatcctgttggcggcctggtgctttgcgcgctc

SEQ ID NO: 552120 - DNA, 75 bp, synthetic construct
  source 1..75: mol_type = other DNA
tgtaagtaatgacaaaattgctgtaacgccagaacagctacagcatcatcgctttgtgctggaaagcgtaaacgg

SEQ ID NO: 552121 - DNA, 75 bp, synthetic construct
  source 1..75: mol_type = other DNA
cggtcggctggttgccactatccaggccaatcgcaccgacaatcagacgccatttaacgctgatattacattgag

SEQ ID NO: 552122 - DNA, 75 bp, synthetic construct
  source 1..75: mol_type = other DNA
tgaatgccagttcaggccatgccatcaccgacaacgagcatatagcgcagtctatcggcgatattctgttaacgc

SEQ ID NO: 552123 - DNA, 75 bp, synthetic construct
  source 1..75: mol_type = other DNA
ttactctgccacaaccggtgtggtcgaagctgaatttggcctgggcaatcttttttatcctttgtgggctggcga

SEQ ID NO: 552124 - DNA, 75 bp, synthetic construct
  source 1..75: mol_type = other DNA
cgggacattctgctgacgccgcagggtagccgcattgcccgtcggaaatatggttccctgctgtcggcactgata

SEQ ID NO: 552125 - DNA, 75 bp, synthetic construct
  source 1..75: mol_type = other DNA
aagggctggcaatgacccgtatgatgtgcgctaacccgcagcttaatgaactcgataacacggtaatgactccaa

SEQ ID NO: 552126 - DNA, 75 bp, synthetic construct
  source 1..75: mol_type = other DNA
gcgaagaatgtctttaacgccaaagtgatcgccattgatgtcaatgatgagcagttaaaactggcaaccgaaatg

SEQ ID NO: 552127 - DNA, 75 bp, synthetic construct
  source 1..75: mol_type = other DNA
tacgcgctcgaagccgaagtgttcgctctgcccgctacaaaacggttgtattgccgccgccaataatagctggtc

SEQ ID NO: 552128 - DNA, 75 bp, synthetic construct
  source 1..75: mol_type = other DNA
acatatgatgtgggtacgcatcctgctattgatcatcctcggttgtttgttgatttttatgtggcgaatcccggt

SEQ ID NO: 552129 - DNA, 75 bp, synthetic construct
  source 1..75: mol_type = other DNA
taattcctaaaggttggaaattttcaaatgttaatagcttactaaaaaatacaattggtggtgactgggggtgtg

SEQ ID NO: 552130 - DNA, 75 bp, synthetic construct
  source 1..75: mol_type = other DNA
ttagtttacacctcaataaaatatataacgatggaaaaatgtgggaataccaaaaccaaagtacaggaatcgcta

SEQ ID NO: 552131 - DNA, 75 bp, synthetic construct
  source 1..75: mol_type = other DNA
gcaggtgggcgtgtcgtggctgtaggtctaccgccggaatctatgagtcttgatattccacggctggtgctggat

SEQ ID NO: 552132 - DNA, 75 bp, synthetic construct
  source 1..75: mol_type = other DNA
tcacgccatcatcctgatggtcggcgggcaatacacctacgcgaaagtccccgttggttttgaggtgcaggaatg

SEQ ID NO: 552133 - DNA, 75 bp, synthetic construct
  source 1..75: mol_type = other DNA
tgctgcgccgtattttcgtattttcaatccgataactcagggcgagaaatttgaccgtgagggcgagtttatccg

SEQ ID NO: 552134 - DNA, 75 bp, synthetic construct
  source 1..75: mol_type = other DNA
acgacgttagacattgctctaacgctttatctgtagaccctgccgaaaccgacgctgcccgcgccattgctgaac

SEQ ID NO: 552135 - DNA, 75 bp, synthetic construct
  source 1..75: mol_type = other DNA
cgctgctctatgcactgattttctttcacgccatcatcctgatggtcggcggtcagtacacctacgcgaaagtcc

SEQ ID NO: 552136 - DNA, 75 bp, synthetic construct
  source 1..75: mol_type = other DNA
gctggggctgagtcgtaatccgtatgacaagctggggcacttttttcaggggctggtgcctgcactggtggcgcg

SEQ ID NO: 552137 - DNA, 75 bp, synthetic construct
  source 1..75: mol_type = other DNA
gacaagctgggacattttttccaggggctggtgcctgcactggcggcacgagaaatacttgtgcgcggggtatac

SEQ ID NO: 552138 - DNA, 75 bp, synthetic construct
  source 1..75: mol_type = other DNA
atgtcaaaaccaccgagcactggaaacgccactggcgacgggcgcggatggcccatgagttcgcttatggagaac

SEQ ID NO: 552139 - DNA, 75 bp, synthetic construct
  source 1..75: mol_type = other DNA
gaacctggcactaccctttctcccctggcaccaccagcgatgaccgcattaacgccagttactggcaagatatgc

SEQ ID NO: 552140 - DNA, 75 bp, synthetic construct
  source 1..75: mol_type = other DNA
aagatccgattgtctgtgaaaccagtgaagaaactttgaaaaaagcggctcaatttgtacgtagcgcactactta

SEQ ID NO: 552141 - DNA, 75 bp, synthetic construct
  source 1..75: mol_type = other DNA
gttggggaagaggttggtgaagccattaatgcggcgatgtcgcaattcaatggcggcaccaagcgctctctgttt

SEQ ID NO: 552142 - DNA, 75 bp, synthetic construct
  source 1..75: mol_type = other DNA
atgaattagatcgcaaagcgattgaagcactgatccgtattgctgacgaacaatcccgttccttaatgagtgaac

SEQ ID NO: 552143 - DNA, 75 bp, synthetic construct
  source 1..75: mol_type = other DNA
tgccttaatcgcttcggcgtgtttgcccgttcccatgccgcaccaacggaatcggcatggacctataaaattcgc

SEQ ID NO: 552144 - DNA, 75 bp, synthetic construct
  source 1..75: mol_type = other DNA
atggtgaattaccgtcttatatcactggcgctgacacggatacggcatgcggactgcaggcagagaaaactggcc

SEQ ID NO: 552145 - DNA, 75 bp, synthetic construct
  source 1..75: mol_type = other DNA
acgtcgtcgcgtgggctacatgtcgcaggcattctcactgtacaacgagttgagcgtacggcagaacctggtact

SEQ ID NO: 552146 - DNA, 75 bp, synthetic construct
  source 1..75: mol_type = other DNA
tcattcgccaggtgctggacagcggtggtcgggcctgggtgtttgatatgggggactcctacaaggggctctgtc

SEQ ID NO: 552147 - DNA, 75 bp, synthetic construct
  source 1..75: mol_type = other DNA
ggcgaatttccgccacggcaatattgaaccacctgccggacatgtggcggagtttgaaccgctgaacactgaatg

SEQ ID NO: 552148 - DNA, 75 bp, synthetic construct
  source 1..75: mol_type = other DNA
gtgaaggcggttatctgctgaacaaacatggcgaacgctttatggagcgttatgcgccgaacgccaaagacctgg

SEQ ID NO: 552149 - DNA, 75 bp, synthetic construct
  source 1..75: mol_type = other DNA
aaagcgctgcaagaatgtatgcagcataacttctcggtcttccgtgaaggtgatgcgatggcgaaagggcttgag

SEQ ID NO: 552150 - DNA, 75 bp, synthetic construct
  source 1..75: mol_type = other DNA
taacactggcgacggcgtcggcatggctatccgtgcaggcgtaccggtgcaggatatggaaatgtggcagttcca

SEQ ID NO: 552151 - DNA, 75 bp, synthetic construct
  source 1..75: mol_type = other DNA
agcgaaatgcagcaaggggagtgggttaacaatctactgaaaggcaccgttggggcgagttttgtcgccagtgcc

SEQ ID NO: 552152 - DNA, 75 bp, synthetic construct
  source 1..75: mol_type = other DNA
agcgggtgtgcatgaatatgttgtttccacaggcgatacgctaagtagcatcctcaatcaatatggtattgatat

SEQ ID NO: 552153 - DNA, 75 bp, synthetic construct
  source 1..75: mol_type = other DNA
atggtgaattaccgtcttatatcactggcgctgacattccgggcgtcttctccgccacaacgccatttgcagtgc

SEQ ID NO: 552154 - DNA, 75 bp, synthetic construct
  source 1..75: mol_type = other DNA
aacctgaagtgaaaggctggcaggtgttgctgtcgcaactcatgggcggctggaaaaaaccggacggcagccagc

SEQ ID NO: 552155 - DNA, 75 bp, synthetic construct
  source 1..75: mol_type = other DNA
aatctgaagtgaaaggctggcaggtgttgttatcgcaactcatgggcggctggaaaaaaccggacggcagccagc

SEQ ID NO: 552156 - DNA, 75 bp, synthetic construct
  source 1..75: mol_type = other DNA
gcccagattgacgatatcgtgcactacatgcggaaagcgctggagcagccggaataccgcgataccaccaccgtg

SEQ ID NO: 552157 - DNA, 75 bp, synthetic construct
  source 1..75: mol_type = other DNA
tcacccccccaatcctgtgcagaaaaaagggggatggtttgagttaaacacagcaattgaacagatcaaagcagg

SEQ ID NO: 552158 - DNA, 75 bp, synthetic construct
  source 1..75: mol_type = other DNA
cgtgacggttgagttaagtggattggttacttcaacgatgcagccggtaagaggcgcggtaaaagtgaaggagtc

SEQ ID NO: 552159 - DNA, 75 bp, synthetic construct
  source 1..75: mol_type = other DNA
tatcctcgtcagtctttcgatactgcgcatttcccggtggaagaaaaagcggcgattgcgcaattacgccagttt

SEQ ID NO: 552160 - DNA, 75 bp, synthetic construct
  source 1..75: mol_type = other DNA
ggagtgcgtcgctgcgccaaaagtacgtagtagcggaatgatagaacccgcgccatccattacgctgaattatcc

SEQ ID NO: 552161 - DNA, 75 bp, synthetic construct
  source 1..75: mol_type = other DNA
ctcgatgcgccacaaaacgacgtgacgcgtctgcagtgcatgagcgcggtggttatggcgctcgcacagtgggag

SEQ ID NO: 552162 - DNA, 75 bp, synthetic construct
  source 1..75: mol_type = other DNA
tggttccctgctgtcggctttaatagatcagccacaaaatccggcgttacgcctgcaggtcatgtcggctgtgta

SEQ ID NO: 552163 - DNA, 75 bp, synthetic construct
  source 1..75: mol_type = other DNA
cgggacattctgctgacgccgcagggtagccgcattgctcgccgtgaatatggttccctgctgttggcactgata

SEQ ID NO: 552164 - DNA, 75 bp, synthetic construct
  source 1..75: mol_type = other DNA
agcggcgagtattttctctgttgggtatggtggcgctgacactgttgtatggtgcccggcaagcaggaatagata

SEQ ID NO: 552165 - DNA, 75 bp, synthetic construct
  source 1..75: mol_type = other DNA
cgaatgtgctttggcaaaacctattgctacagcaatggtagagcgcgatccggcggcattacagggattatggac

SEQ ID NO: 552166 - DNA, 75 bp, synthetic construct
  source 1..75: mol_type = other DNA
actaaccgcaatggccgataactgggcagataagtggtttgataatgctgtatatgactcacccagcagtttcga

SEQ ID NO: 552167 - DNA, 75 bp, synthetic construct
  source 1..75: mol_type = other DNA
gtgtcgaaatagttaaacaggtgtgcgcggaaaacagcgttactcatcttttttataactatcagtatgaagtga

SEQ ID NO: 552168 - DNA, 75 bp, synthetic construct
  source 1..75: mol_type = other DNA
tcgtcagcctttcgatactgcgcatttcccggtggaagaaaaagcggcgattgcgcaattacgccagttttgcca

SEQ ID NO: 552169 - DNA, 75 bp, synthetic construct
  source 1..75: mol_type = other DNA
ggcggcgcataatatgtcgccgcgtcaggctgaacttatcaatgctcaactgaacgggctacaaatcgcgctggc

SEQ ID NO: 552170 - DNA, 75 bp, synthetic construct
  source 1..75: mol_type = other DNA
ctggcacccgtaccggcttctccggcaatcatggtcccggtggcgcaacctgccaggggaggcttcctgaaaaaa

SEQ ID NO: 552171 - DNA, 75 bp, synthetic construct
  source 1..75: mol_type = other DNA
tgcgacagatgtgcctgccgaggaattacctgattcagaaatgttcctgcttgggcgtccaatgctccaggctcg

SEQ ID NO: 552172 - DNA, 75 bp, synthetic construct
  source 1..75: mol_type = other DNA
cgcaccatccagatgaaagctcaggtgaagcgtcaggaagaggtggcgaaagccatctacgaccgccggatgaac

SEQ ID NO: 552173 - DNA, 75 bp, synthetic construct
  source 1..75: mol_type = other DNA
ctgagcaacataatatctctcgcagcgcgacagatgtcccggcggatgaattgcctgattcagaaatgtttttgt

SEQ ID NO: 552174 - DNA, 75 bp, synthetic construct
  source 1..75: mol_type = other DNA
ccgcgctattaattagtgcatgttctcacccccccaatcctgtgcagaaaaaagggggatggtttgagttaaaca

SEQ ID NO: 552175 - DNA, 75 bp, synthetic construct
  source 1..75: mol_type = other DNA
gagatcccgactgccgtgcgtcaggcactggcgaaagatccgcagaaaatttttaactatatccagcttacgcct

SEQ ID NO: 552176 - DNA, 75 bp, synthetic construct
  source 1..75: mol_type = other DNA
aatcgcgctggcgtatactttttttgctcgtcaggagtggagcgcgacggcgattaccgatcgtccaacggtgaa

SEQ ID NO: 552177 - DNA, 75 bp, synthetic construct
  source 1..75: mol_type = other DNA
taaaatgtggagcaatttacgtctgttccgcgacggcgatggctttgcgtggattgaacggcgcagcgtgcgtga

SEQ ID NO: 552178 - DNA, 75 bp, synthetic construct
  source 1..75: mol_type = other DNA
ggcgctgggcggcatcagttttaagaaaggctgctataccgggcaagagatggtggcgcgggccaaattccgcgg

SEQ ID NO: 552179 - DNA, 75 bp, synthetic construct
  source 1..75: mol_type = other DNA
tttgcataaggacgtagatgacgttctggcaaaagccgctgcgcgcgatgtgaaattttgtctggcggtcgccac

SEQ ID NO: 552180 - DNA, 75 bp, synthetic construct
  source 1..75: mol_type = other DNA
gggcatttttgtcgccttgctgtacccggcgggcgttgttcgctttttcagtaactacatcaaagcaattatgga

SEQ ID NO: 552181 - DNA, 75 bp, synthetic construct
  source 1..75: mol_type = other DNA
gcaccacaagaggcagagcaaagcacatatctggtaggtcagatcgattctaccgtggataaggcttctctaagc

SEQ ID NO: 552182 - DNA, 75 bp, synthetic construct
  source 1..75: mol_type = other DNA
ctggcgggtagtgccagtcgtgtgccggaagtgggtgaagacttagaactgaaaatgggcgagaactggcgtcgt

SEQ ID NO: 552183 - DNA, 75 bp, synthetic construct
  source 1..75: mol_type = other DNA
gcaacgccgtgcgtcgtggcaacatcggtattgttggcgcatctggcaccggcagccaggaactgagcgtccgca

SEQ ID NO: 552184 - DNA, 75 bp, synthetic construct
  source 1..75: mol_type = other DNA
gggctgctgacgccggagctggaacaggccaaaaacggcgacctgatgattgtcatcaacggcaaaccagacgca

SEQ ID NO: 552185 - DNA, 75 bp, synthetic construct
  source 1..75: mol_type = other DNA
cattgaaagcggtgatgctctccggcgtgaaacaagaacatctcgacctgcatacgcttaaccagccgttgattg

SEQ ID NO: 552186 - DNA, 75 bp, synthetic construct
  source 1..75: mol_type = other DNA
gacctgagcgagaaaatcggtggcctgatgatgctcgacgccatcggcatgttagaaaacgatccgcaaactgaa

SEQ ID NO: 552187 - DNA, 75 bp, synthetic construct
  source 1..75: mol_type = other DNA
atgaggggatctctcagcgtcgagcaggcatttgtggcgatggcgaccgaaatgaacaaaggtgtactgaaaaat

SEQ ID NO: 552188 - DNA, 75 bp, synthetic construct
  source 1..75: mol_type = other DNA
cgcgtctgcaaccgcagcagaaatacattcgtggcctgttctgcggcggcacgctgtgcgacgaaaccatgttcg

SEQ ID NO: 552189 - DNA, 75 bp, synthetic construct
  source 1..75: mol_type = other DNA
aataaactcgacggcgtcgagcaggcatttgtggcgatggcgaccgaaatgaacaaaggtgtactgaaaaattta

SEQ ID NO: 552190 - DNA, 75 bp, synthetic construct
  source 1..75: mol_type = other DNA
gtttgtcatcaggctggaaaactgccatgcaacagcagttggcaaaattgtgacactgacctttaaggggaggga

SEQ ID NO: 552191 - DNA, 75 bp, synthetic construct
  source 1..75: mol_type = other DNA
ggggtcatcgcgtaaatccgccacgaactccgttctgtggtttatgggcgatgatattccacatgtgccgaacaa

SEQ ID NO: 552192 - DNA, 75 bp, synthetic construct
  source 1..75: mol_type = other DNA
gccagtggatgagcaggggctacagtttgctcgcggcagcaaagaggcggcattgaaagcggtgatgctctccgg

SEQ ID NO: 552193 - DNA, 75 bp, synthetic construct
  source 1..75: mol_type = other DNA
gaattccgcctgcaagatatcaaccgcagcatcaaacacaccttcctcgactttggcgatgacgacttcaccaac

SEQ ID NO: 552194 - DNA, 75 bp, synthetic construct
  source 1..75: mol_type = other DNA
gcaggggctacagtttgctcgcggcagcaaagaggcggcgctgaaagcggtgatgctctccggcgtgaaacaaga

SEQ ID NO: 552195 - DNA, 75 bp, synthetic construct
  source 1..75: mol_type = other DNA
gaaaactgtaaacatgctaatgaggctcactggcaaattcagcaattaaatgcgccaaccgtcgatttgaatcaa

SEQ ID NO: 552196 - DNA, 75 bp, synthetic construct
  source 1..75: mol_type = other DNA
cgcagttcagtgcttactgtacgctgccaccggtgcccgggtttgtctgcgtttattggcagataatgaagcctt

SEQ ID NO: 552197 - DNA, 75 bp, synthetic construct
  source 1..75: mol_type = other DNA
tcgttgtggcgaacaggcgaagtcatcgatggaaacattgtttttcgccacgcggctggagcgatttttgtccgc

SEQ ID NO: 552198 - DNA, 75 bp, synthetic construct
  source 1..75: mol_type = other DNA
gagacatcagagagatgtattacgtaaccaccctgagtacgtagaagactctgtgttaacaccagatgatgttct

SEQ ID NO: 552199 - DNA, 75 bp, synthetic construct
  source 1..75: mol_type = other DNA
cagtatgaacggtgtctcacaggcggatgaattgttgacgcgggatgattttttcgtagcagatgaaagccgcca

SEQ ID NO: 552200 - DNA, 75 bp, synthetic construct
  source 1..75: mol_type = other DNA
cagcatgagtagtgtgctgcaggcaggtgagctggtcgtgcgggatgacttttttgtggcagatgaaaaccgtca

SEQ ID NO: 552201 - DNA, 75 bp, synthetic construct
  source 1..75: mol_type = other DNA
tatattaaaagaatgggaaaatgatgttcctctgtcagagcataagggttatggaagtattagggaagttttacg

SEQ ID NO: 552202 - DNA, 75 bp, synthetic construct
  source 1..75: mol_type = other DNA
tcgccgcctgccgtgctcttcaccaggatgaagccgatcctgaactgatgtttcaggattatgagggattcccgg

SEQ ID NO: 552203 - DNA, 75 bp, synthetic construct
  source 1..75: mol_type = other DNA
cctgccgtgctcttcaccaggatgaagccgatcctgaactgatgtttcaggattatgagggattcccggggaata

SEQ ID NO: 552204 - DNA, 75 bp, synthetic construct
  source 1..75: mol_type = other DNA
tttatcccatggcctgactataaaagtggtcacagtagccaactgactaaaggcattggagaattgcaggaaaag

SEQ ID NO: 552205 - DNA, 75 bp, synthetic construct
  source 1..75: mol_type = other DNA
ctgcagaacacttcgataagggtaaacggcagaatcagatttcttctgaacatataaaaaaattattgatactta

SEQ ID NO: 552206 - DNA, 75 bp, synthetic construct
  source 1..75: mol_type = other DNA
gtttgcagctggctcaggtaaaaaagccggtgagttttacacacctcaacatatttcagatatcttatctgccat

SEQ ID NO: 552207 - DNA, 75 bp, synthetic construct
  source 1..75: mol_type = other DNA
aaagccgtggagaaatccgggcgtcttgaagtggcttcccgccttcaacagcgcaccacggccatcatgcgttat

SEQ ID NO: 552208 - DNA, 75 bp, synthetic construct
  source 1..75: mol_type = other DNA
gtgaccgtgactgggaaaacttacttatcgcagcccgccagaccacaatacgtaatcgttttatgctatctcttg

SEQ ID NO: 552209 - DNA, 75 bp, synthetic construct
  source 1..75: mol_type = other DNA
ttattttactcatgatttacaaactgttgataccggggcttctattaacgaaagttttttccttcgtcgtatggc

SEQ ID NO: 552210 - DNA, 75 bp, synthetic construct
  source 1..75: mol_type = other DNA
tatggctgaatatcccaaagcaaaagaaaaaccagaagaaaagtcagaagaacagtcaccatctccagatttatc

SEQ ID NO: 552211 - DNA, 75 bp, synthetic construct
  source 1..75: mol_type = other DNA
gattttacttattatcagtggaatctataagtagcctgtcatcgatttatgaatatatatttaatggcagattgt

SEQ ID NO: 552212 - DNA, 75 bp, synthetic construct
  source 1..75: mol_type = other DNA
tattccggctctgggggtggttctaccactgctgactatcctgactgcgcgtatggataaagccgcgtgggcgtt

SEQ ID NO: 552213 - DNA, 75 bp, synthetic construct
  source 1..75: mol_type = other DNA
ccgctgctgaccatcctgactgcacgtatggataaagccgcgtgggcgtttgtgttctcctccctgacgctggcc

SEQ ID NO: 552214 - DNA, 75 bp, synthetic construct
  source 1..75: mol_type = other DNA
gattccggcgctgggtgtggttctgcctctgctgactatcctgactgcacgtatggataaagccgcgtgggcgtt

SEQ ID NO: 552215 - DNA, 75 bp, synthetic construct
  source 1..75: mol_type = other DNA
gccgccgaatgcagattgagcaaaacttcagggatgaaaaaagtgagcgttttgggttcggtctgcgagccagtt

SEQ ID NO: 552216 - DNA, 75 bp, synthetic construct
  source 1..75: mol_type = other DNA
atccctgcatccccgatgccagagttattattgtcacggatgctggatttcagagcacatggtttcaccatatta

SEQ ID NO: 552217 - DNA, 75 bp, synthetic construct
  source 1..75: mol_type = other DNA
cttgaggatgagcactttataccgctgcttttgaacgttttgcaaccgaacatgcgaacacgagtttgtacggtt

SEQ ID NO: 552218 - DNA, 75 bp, synthetic construct
  source 1..75: mol_type = other DNA
catctttagatggagtgaattataaagaaggaatgctttctgagctggatagggctgtgagaagaggattacatc

SEQ ID NO: 552219 - DNA, 75 bp, synthetic construct
  source 1..75: mol_type = other DNA
aaggaaaagaatttactctcagtgacgatattgtgaacggcaaggggcaattacttattggtgatacattctggc

SEQ ID NO: 552220 - DNA, 75 bp, synthetic construct
  source 1..75: mol_type = other DNA
catcgcgcagcagtagcatctggtgcaaatgccagaaccaaggagccaggaaagtttctgaaccgccccggaaat

SEQ ID NO: 552221 - DNA, 75 bp, synthetic construct
  source 1..75: mol_type = other DNA
cgttatgctatcgctaccggacgagccactgtcaacccagcatctgaactaaccagcactctggcggcaccaaaa

SEQ ID NO: 552222 - DNA, 75 bp, synthetic construct
  source 1..75: mol_type = other DNA
gctatcaagtgtgctggcacccagcaattacgagaaagaattagccgtgttttgggcgacgttattacgccagat

SEQ ID NO: 552223 - DNA, 75 bp, synthetic construct
  source 1..75: mol_type = other DNA
aggcggcattaaacattaagccggggcatacgcttggcattattgatgcactgttggttcataagatggccaggg

SEQ ID NO: 552224 - DNA, 75 bp, synthetic construct
  source 1..75: mol_type = other DNA
atccgcattaagccgcatgtttatcgcgaactggttaaccgcctccacgatacagcgatcaagtgtgctggcacc

SEQ ID NO: 552225 - DNA, 75 bp, synthetic construct
  source 1..75: mol_type = other DNA
ccgtgctgcgggtaaactgctggatgcgcataaaggccagctgccgacccgcctgtgggtggcaccgccaacccg

SEQ ID NO: 552226 - DNA, 75 bp, synthetic construct
  source 1..75: mol_type = other DNA
gaaagaagtcgacgtgacgcaactgaagtcgatgggctttcagaaagtgtttatcgcgctacacggtcgcggcgg

SEQ ID NO: 552227 - DNA, 75 bp, synthetic construct
  source 1..75: mol_type = other DNA
ggctggcaactatccggatagttcggtgccagcgccaggaaagggcgtcaccggtgaacgtatccgcattaagcc

SEQ ID NO: 552228 - DNA, 75 bp, synthetic construct
  source 1..75: mol_type = other DNA
atgaaatttacccaacgccttagtctgcgagtcaggctgacgctgatctttttgattctggcctcggtgacctgg

SEQ ID NO: 552229 - DNA, 75 bp, synthetic construct
  source 1..75: mol_type = other DNA
tgtggacgattcagcaaacactgaacgcgccaaaagggcaatacaataaattcggtggctatagctataggtcgg

SEQ ID NO: 552230 - DNA, 75 bp, synthetic construct
  source 1..75: mol_type = other DNA
cgagcggatccaggaactgatggcacaagggatgagcagcggccaggcaatcgcgttggtggcagaagagctgcg

SEQ ID NO: 552231 - DNA, 75 bp, synthetic construct
  source 1..75: mol_type = other DNA
tgacctcccctgatggaaaataccgtattgtggttggtcaggagtgggaataccgcgaagatatggcgctggcga

SEQ ID NO: 552232 - DNA, 75 bp, synthetic construct
  source 1..75: mol_type = other DNA
gatggcgataatggcgaagatattccctatagctatcaacgtgaaggttttgctaacgggcaactggtaggtgaa

SEQ ID NO: 552233 - DNA, 75 bp, synthetic construct
  source 1..75: mol_type = other DNA
tgacatcaaacgtaccggacagccgctattactaagtttgctggtacgaaatctgctggataatgccgtgcgcta

SEQ ID NO: 552234 - DNA, 75 bp, synthetic construct
  source 1..75: mol_type = other DNA
cagcaataccctatccctttgctattgtttgtttccattgacaacaaaagagaaatccttgacacgctggaagcg

SEQ ID NO: 552235 - DNA, 75 bp, synthetic construct
  source 1..75: mol_type = other DNA
aggcagtcagtagtattccaaaggaagcattcgcttgcggctttacagtcacggattcatacccgactctggtac

SEQ ID NO: 552236 - DNA, 75 bp, synthetic construct
  source 1..75: mol_type = other DNA
tggtcctgctgatgcccatacctatccccgggtgataggagagctggcgggaacaagtaaccagtatgtttttaa

SEQ ID NO: 552237 - DNA, 75 bp, synthetic construct
  source 1..75: mol_type = other DNA
cgacaaaatttccgtttacagcgcgcgtgtgaatatgggcacgaaactgggtgagaaaattgcccgcgaatggga

SEQ ID NO: 552238 - DNA, 75 bp, synthetic construct
  source 1..75: mol_type = other DNA
cttccgtttgcgtaaagcgaacgggctggtgagcgatgtatttgaagctcgccatatgcagcgtttgcagggcaa

SEQ ID NO: 552239 - DNA, 75 bp, synthetic construct
  source 1..75: mol_type = other DNA
gccgcgcaacgtaatggcacgctgattcaggttgcaccgcagcaaacgcgcacttttacagttaccacaggaatt

SEQ ID NO: 552240 - DNA, 75 bp, synthetic construct
  source 1..75: mol_type = other DNA
tcatcacctccagcctgatgatgagtctgaccgtcgatgaaagcgatctttctgtgcatctggtaggacgaaaaa

SEQ ID NO: 552241 - DNA, 75 bp, synthetic construct
  source 1..75: mol_type = other DNA
catgccgatacggcaatgtacacggcgaaggaaggtggccgtgggcagttttgcgttttttctccagaaatgaat

SEQ ID NO: 552242 - DNA, 75 bp, synthetic construct
  source 1..75: mol_type = other DNA
attctggacagccggggaaatatccaacgttttaatcggttatgcgaagaatataccggactaaaagagcacgat

SEQ ID NO: 552243 - DNA, 75 bp, synthetic construct
  source 1..75: mol_type = other DNA
ccgctgtgtatacaggtatgactgatgaaaatgaaagcatatgggaacgtgttgatggggttgacgttgccttca

SEQ ID NO: 552244 - DNA, 75 bp, synthetic construct
  source 1..75: mol_type = other DNA
atgaaaaccgttagggagtccacaacgttgtacaactttctcggatcgcacaacccatactggcggttgtcggaa

SEQ ID NO: 552245 - DNA, 75 bp, synthetic construct
  source 1..75: mol_type = other DNA
tgtttatgagtcgccgtgaagccgcgatctcccggcgtaacaacagcagtttttttcgtagtggcaacgcctatg

SEQ ID NO: 552246 - DNA, 75 bp, synthetic construct
  source 1..75: mol_type = other DNA
cagggctacctcgatttcctcgatacgttacgtaatgatgacgccaaagcagtgcaacgtcagaacgaagtggaa

SEQ ID NO: 552247 - DNA, 75 bp, synthetic construct
  source 1..75: mol_type = other DNA
gacggtattgagcgtaaactggaaattgaaaaagcagtcactgatgttgccgaactgaacggtgatttacgtaat

SEQ ID NO: 552248 - DNA, 75 bp, synthetic construct
  source 1..75: mol_type = other DNA
gaagtgacgctcattttcccgattatcctctggcgtcgcccagtaataatgaaattgatttacttaatctaatcg

SEQ ID NO: 552249 - DNA, 75 bp, synthetic construct
  source 1..75: mol_type = other DNA
gccttatgtcagttttagtgttgcgccagatactgactcttatgagatgccatcgtggcaggaaggactgattca

SEQ ID NO: 552250 - DNA, 75 bp, synthetic construct
  source 1..75: mol_type = other DNA
gctattcagtggcaggacctggagaaaaactttactaaactgcgcgttctggatcttgatgttaatctcgatcgt

SEQ ID NO: 552251 - DNA, 75 bp, synthetic construct
  source 1..75: mol_type = other DNA
gacggtattgaacgcaaacttgaaattgaaaaagcggtcaccgatgttgcggaactgaacggtgagttacgtaat

SEQ ID NO: 552252 - DNA, 75 bp, synthetic construct
  source 1..75: mol_type = other DNA
atggttgcgtgtggcagcgtgcttttgcgctatgcaatggcatccagaaaacaggatgccatgatggaaggccac

SEQ ID NO: 552253 - DNA, 75 bp, synthetic construct
  source 1..75: mol_type = other DNA
ctcgatttcctcgatactttacgtaatgacgacgctaaagcagtgcaacgtcagaacgaagttgaaaacctggaa

SEQ ID NO: 552254 - DNA, 75 bp, synthetic construct
  source 1..75: mol_type = other DNA
ctcgatttcctcgataccttacgtaacgacgacgctaaagcggtgcagcgtcagaacgaagtggaaaatctggaa

SEQ ID NO: 552255 - DNA, 75 bp, synthetic construct
  source 1..75: mol_type = other DNA
tctgatcgaagccgttcgcgctgaaaacccggatattcatcagtttgaatgttcggtattcaacggcatctatgt

SEQ ID NO: 552256 - DNA, 75 bp, synthetic construct
  source 1..75: mol_type = other DNA
ccgatcccggaaacctcgtgtgatatcgcgctggaaattgcgcgtattctgggcaaaccgtaccgtcagggcttc

SEQ ID NO: 552257 - DNA, 75 bp, synthetic construct
  source 1..75: mol_type = other DNA
cgcccacggtcgtgaagtggatgaaattcgccagatcatcggtgctgacggtttgattttccaggatctgaacga

SEQ ID NO: 552258 - DNA, 75 bp, synthetic construct
  source 1..75: mol_type = other DNA
agatctggatatcgacgtggttattccaatcccggaaacttcctgcgatatcgcgctggaaatcgctcgaattct

SEQ ID NO: 552259 - DNA, 75 bp, synthetic construct
  source 1..75: mol_type = other DNA
aattgtgcctttaggccgttgggtgattctcgatgtcgtacgccaggtggcaaagtggcgggataaaggtattaa

SEQ ID NO: 552260 - DNA, 75 bp, synthetic construct
  source 1..75: mol_type = other DNA
tgaacaaaccattagaactcactgaacatgaaaaacagtggattaagcagcatcccgatttaaaggtgctggaaa

SEQ ID NO: 552261 - DNA, 75 bp, synthetic construct
  source 1..75: mol_type = other DNA
ggcgttatgggggatattcttaatattattacattgcaaacaggtttaagattttctccgatcaccgtttcacac

SEQ ID NO: 552262 - DNA, 75 bp, synthetic construct
  source 1..75: mol_type = other DNA
gaaagaaaatcgaacaatatacacacaggtatttgaaattgataatggcatcgagaaaagatgcattaatcactg

SEQ ID NO: 552263 - DNA, 75 bp, synthetic construct
  source 1..75: mol_type = other DNA
gcagatcaaatcgaaaagttgaacgttacgttgaagccagaggcattgaaataattacgtcaggagcactgacag

SEQ ID NO: 552264 - DNA, 75 bp, synthetic construct
  source 1..75: mol_type = other DNA
acaatcgtgtcacacttgatccactgcgtctgagcaacaaggagttgcgttggctggcaagcaaaaaaaatcttg

SEQ ID NO: 552265 - DNA, 75 bp, synthetic construct
  source 1..75: mol_type = other DNA
accccggtggatgggatataatacctggcgctatttatagtgaagatcgagaaaataatgttttatttgctgaag

SEQ ID NO: 552266 - DNA, 75 bp, synthetic construct
  source 1..75: mol_type = other DNA
taactttcgtgcaaagatcaacggtggactagacctacatattcatcatactgatggtgtagtcgccagccacgg

SEQ ID NO: 552267 - DNA, 75 bp, synthetic construct
  source 1..75: mol_type = other DNA
ctatcgcagaataagaatcttcgctatgcagaaatgctacgtaaaagagcattaatctttgcgttgttatctgtt

SEQ ID NO: 552268 - DNA, 75 bp, synthetic construct
  source 1..75: mol_type = other DNA
cgaaaaagcaggatgcaaatgtcgtgacgctaaaccattcatcgaactactgacagaaacaaaaacacgtaaggc

SEQ ID NO: 552269 - DNA, 75 bp, synthetic construct
  source 1..75: mol_type = other DNA
aaaatactttgttaacctactgaagaagacaaaaacacgaggcgcatatactgaagaagatttgatcatggttat

SEQ ID NO: 552270 - DNA, 75 bp, synthetic construct
  source 1..75: mol_type = other DNA
aacaatacacttcgtgtattggaaaaagacgagtctatcagcgaagaagatcgggtggctgatttggcagcgtcg

SEQ ID NO: 552271 - DNA, 75 bp, synthetic construct
  source 1..75: mol_type = other DNA
gccgaacttgatcgtgatcttgaacgcaagatctatgcgttcactgactacctgaaagacaaaagcattaacggc

SEQ ID NO: 552272 - DNA, 75 bp, synthetic construct
  source 1..75: mol_type = other DNA
aatattgaggcgttagccaaaggaatacagttgttaatagacaatcctattattagagatgagtatgcgaaaaat

SEQ ID NO: 552273 - DNA, 75 bp, synthetic construct
  source 1..75: mol_type = other DNA
attctcgacagccgggggaatattcaacgcttcaatcggttatgtgaagattacacagggttgaaagaacacgac

SEQ ID NO: 552274 - DNA, 75 bp, synthetic construct
  source 1..75: mol_type = other DNA
ctcatcttaggttacgtaacctgaatgcccttcgacaggctgccatgaggcatgaagagaatgagagggctttct

SEQ ID NO: 552275 - DNA, 75 bp, synthetic construct
  source 1..75: mol_type = other DNA
gcgtttgccaatgacgccacttacggagaatggtcgtgagtgtgtcaaagcggcgcttaagcatgccggtttgct

SEQ ID NO: 552276 - DNA, 75 bp, synthetic construct
  source 1..75: mol_type = other DNA
tcacgaattttgacccgcttacgactcccctttcgcattggtttaattgaagtttataccagctgttcagtaggt

SEQ ID NO: 552277 - DNA, 75 bp, synthetic construct
  source 1..75: mol_type = other DNA
cctatagatgttgaactgacagagagttgtctgattgagaatgatgaactggcactgtctgttattcaacaattt

SEQ ID NO: 552278 - DNA, 75 bp, synthetic construct
  source 1..75: mol_type = other DNA
ggcgaagtgcgcagtctggaagcactagtacgttggcagtcacctgaacgtgggttgattccaccgttggactga

SEQ ID NO: 552279 - DNA, 75 bp, synthetic construct
  source 1..75: mol_type = other DNA
ccaatgcgcgttttatcttggtcggatgagaataatcgatttgagctttcgctaagtggtggtgcgtacccaaaa

SEQ ID NO: 552280 - DNA, 75 bp, synthetic construct
  source 1..75: mol_type = other DNA
aacagtgagtatcccaattcccaaatcaggtgtttatgttcctggtcattatacacttggtcttaacgcaggctt

SEQ ID NO: 552281 - DNA, 75 bp, synthetic construct
  source 1..75: mol_type = other DNA
gatctggcaaaccggttccggtacccaaagcaacatgaacatgaacgaagtactggcaaatcgcgccagtgaatt

SEQ ID NO: 552282 - DNA, 75 bp, synthetic construct
  source 1..75: mol_type = other DNA
ctgacggtgaccccttattacaaccgcccgtcgcaggaaggtctgtatcagcatttcaaagccatcgctgaacat

SEQ ID NO: 552283 - DNA, 75 bp, synthetic construct
  source 1..75: mol_type = other DNA
cgccgtccatgacagccgtagcaggcttatcgatcagcatacagtcgatatgatcggcaacactgtacttgatgc

SEQ ID NO: 552284 - DNA, 75 bp, synthetic construct
  source 1..75: mol_type = other DNA
cccggaggcgctgccgggatgtcgttccatttctgatgatgacctgtgcagactgagtacaggcaatggcatccg

SEQ ID NO: 552285 - DNA, 75 bp, synthetic construct
  source 1..75: mol_type = other DNA
tttactgcaccgacaaaagaagaagcacagcaggttctggcaggttatatccagtatatttccaatctggtggtt

SEQ ID NO: 552286 - DNA, 75 bp, synthetic construct
  source 1..75: mol_type = other DNA
gccggaaccgcaacgtattgtcgaagcacctgccattaaggcgctgatccaacaaggctttgtagtgattggtgc

SEQ ID NO: 552287 - DNA, 75 bp, synthetic construct
  source 1..75: mol_type = other DNA
ccacgagcgcgaagggctgccattaacgccgctggcgaactgtgtagcggatacgcaaggcggcattggctatct

SEQ ID NO: 552288 - DNA, 75 bp, synthetic construct
  source 1..75: mol_type = other DNA
gcagttgttgaaaaaggttcgtcactttatggataccggcagtccattccccggtggaaaacatgggctggctaa

SEQ ID NO: 552289 - DNA, 75 bp, synthetic construct
  source 1..75: mol_type = other DNA
tgcgcggcgtttgcgaactgctgggactggacgcccttaactttgccaacgaaggcaaactggtgatcgccgttg

SEQ ID NO: 552290 - DNA, 75 bp, synthetic construct
  source 1..75: mol_type = other DNA
acggacaggcagtaaaagacgatccagagttttcaatttctctcggtgccgatggtattcagcggaaactggaaa

SEQ ID NO: 552291 - DNA, 75 bp, synthetic construct
  source 1..75: mol_type = other DNA
tatcagcatgttttttaccggctcgctgctgattgaggtgatgttttcactcaatggcctcggcttactgggcta

SEQ ID NO: 552292 - DNA, 75 bp, synthetic construct
  source 1..75: mol_type = other DNA
ctgctcgaaacagtgttccaacataatgcgttcttctctgatgaagggggaaggaaatccaaactggtctggtgg

SEQ ID NO: 552293 - DNA, 75 bp, synthetic construct
  source 1..75: mol_type = other DNA
ggctcaacttgtcttccaaacgtagctctttacgcggcaggctaccggaaatccaaacaactgacagcaagatga

SEQ ID NO: 552294 - DNA, 75 bp, synthetic construct
  source 1..75: mol_type = other DNA
agtgattatcaccacgccggaatgcttgcctgcggcgctacgcggcgaaacgggcacccatattattaaaaccta

SEQ ID NO: 552295 - DNA, 75 bp, synthetic construct
  source 1..75: mol_type = other DNA
tctctctaccgcgctactggcccgtgaaattcacgccgacattctggtgatcaccaccggcgtcgaaaaagtctg

SEQ ID NO: 552296 - DNA, 75 bp, synthetic construct
  source 1..75: mol_type = other DNA
gcgtggacgcggttatcgacaaagatctctctaccgcgctgctggcgcgcgaaattcatgccgacattctggtga

SEQ ID NO: 552297 - DNA, 75 bp, synthetic construct
  source 1..75: mol_type = other DNA
tgctgcgcccgttcctctgttggacgctggattaactggttcgcgcagtcgggcgttgagggactgaaatcatta

SEQ ID NO: 552298 - DNA, 75 bp, synthetic construct
  source 1..75: mol_type = other DNA
ttcccgggcagttgcgcaccctgagctgttcctgagtgaagccaaaggccatgcgaaaccttacactgcgccggt

SEQ ID NO: 552299 - DNA, 75 bp, synthetic construct
  source 1..75: mol_type = other DNA
gcaagcgaaaaaacgcgaagctgccgcagctgctggtgagaaagaagacgcaccgcgccgtgaacgcaagccacg

SEQ ID NO: 552300 - DNA, 75 bp, synthetic construct
  source 1..75: mol_type = other DNA
tccgaccacgccacgccgcaaagaaggcgctgagcgtaaaccacgtgcgcaaaagccggtagagaaagcgccaaa

SEQ ID NO: 552301 - DNA, 75 bp, synthetic construct
  source 1..75: mol_type = other DNA
gaaggtgcaattccgtttgctgctcgtgatccgatgcgtgtgctgccgtgctgtatcgttggtggggcgctgact

SEQ ID NO: 552302 - DNA, 75 bp, synthetic construct
  source 1..75: mol_type = other DNA
gctgaagcgacgccttacgaaccggcgggcaaagctcaaacggcaaccactgaaggtaagaaagagagtgcaggc

SEQ ID NO: 552303 - DNA, 75 bp, synthetic construct
  source 1..75: mol_type = other DNA
acacacctttatggcggctgaagccattgaaaccgaagcgaaaaaacgtggctggtgggtgaaagttgaaacccg

SEQ ID NO: 552304 - DNA, 75 bp, synthetic construct
  source 1..75: mol_type = other DNA
tctgccggcgattttgaccttctgattcttgatggcccagctcgtgcaagcaaagggacttcagaaattgctaag

SEQ ID NO: 552305 - DNA, 75 bp, synthetic construct
  source 1..75: mol_type = other DNA
agtggcaacggcggcccgcaggcgaccgttagcaacctgtgggatcagggtggtttcctgccgcacggcttcacc

SEQ ID NO: 552306 - DNA, 75 bp, synthetic construct
  source 1..75: mol_type = other DNA
ccgaagctaacagagccaatacgcgtcttgatgctcaggactattttgattgcctgcgctgctctgagagatccc

SEQ ID NO: 552307 - DNA, 75 bp, synthetic construct
  source 1..75: mol_type = other DNA
tcaattccgaatggtgtggttgtgtcaagctcatactttttgggtatgctagagaatatattgcctcttttttca

SEQ ID NO: 552308 - DNA, 75 bp, synthetic construct
  source 1..75: mol_type = other DNA
ttgtatttctctcccctttcttcattcgtaaagaaaattattaatcctgcttttgatttgtctataaaaatagaa

SEQ ID NO: 552309 - DNA, 75 bp, synthetic construct
  source 1..75: mol_type = other DNA
atcttataaattatcaaagacaatggttgttgttaataactatttgaatgaaatatctagtgactatagtagtat

SEQ ID NO: 552310 - DNA, 75 bp, synthetic construct
  source 1..75: mol_type = other DNA
tgatggcaaaaaccgatgaagtactttgcctgaatcatcacatctgctgttctggcaccccggaagtggtttctc

SEQ ID NO: 552311 - DNA, 75 bp, synthetic construct
  source 1..75: mol_type = other DNA
aattatcattgagtggctaaatgaaaatgatgttcctttcgatgaaatttatgttgggaaaccttggtgtgggta

SEQ ID NO: 552312 - DNA, 75 bp, synthetic construct
  source 1..75: mol_type = other DNA
gatgatagagctattcgaccatcagaactttgcaatatgaccttagaagagatttctaatatgttagaacaggag

SEQ ID NO: 552313 - DNA, 75 bp, synthetic construct
  source 1..75: mol_type = other DNA
ctccggctccaatccagacagtccatggcttgccgcgctggcctgggccaaaggtgtttttgccaagcagcagcg

SEQ ID NO: 552314 - DNA, 75 bp, synthetic construct
  source 1..75: mol_type = other DNA
gaaaccacttcccgagccattgaagtggtgggcggcgcggcaaaagggaaggcgattattgtgcttaacccagca

SEQ ID NO: 552315 - DNA, 75 bp, synthetic construct
  source 1..75: mol_type = other DNA
tcggttctggcaacattggcaccgatctgatgattaaaattttgcgtcacggtcagcatctggagatggcggtga

SEQ ID NO: 552316 - DNA, 75 bp, synthetic construct
  source 1..75: mol_type = other DNA
ataatactatcacaatccataacgatgaaccatacggtaaaaaaccagtaaatcaagatgttgtaaataaaatga

SEQ ID NO: 552317 - DNA, 75 bp, synthetic construct
  source 1..75: mol_type = other DNA
aatcacccatactggatgtgcaaatgttcatggtcatacggcaataataaaattattaccgatactggctgtgga

SEQ ID NO: 552318 - DNA, 75 bp, synthetic construct
  source 1..75: mol_type = other DNA
ggaactggaatagcggcgtttatgatgcagatatcagtggcgcatcgacattaatcctccactttaatatgaatg

SEQ ID NO: 552319 - DNA, 75 bp, synthetic construct
  source 1..75: mol_type = other DNA
aatagcggggtctataacgcaaacattggtggcgcatcgacattaatcctccacttcaatatgaatacggggagc

SEQ ID NO: 552320 - DNA, 75 bp, synthetic construct
  source 1..75: mol_type = other DNA
ttaatgcattaaagactaatgataaaaaacagacttacctggacactttgcgtgaatatctgaagaactcccccc

SEQ ID NO: 552321 - DNA, 75 bp, synthetic construct
  source 1..75: mol_type = other DNA
caatatgaatgcggggagttgccctgctgtacagttccgcgtgaattataagaacggcggtatcttttatcgttc

SEQ ID NO: 552322 - DNA, 75 bp, synthetic construct
  source 1..75: mol_type = other DNA
gtgatgaattaattgatacaactcaggcaaggccaattcagtattgcattaatgggacgtggtataacgcgggga

SEQ ID NO: 552323 - DNA, 75 bp, synthetic construct
  source 1..75: mol_type = other DNA
gaaaccacttcccgagccattgaagtggtggcggcgcggcaaaagggaaggcgattattgtgcttaacccagcag

SEQ ID NO: 552324 - DNA, 75 bp, synthetic construct
  source 1..75: mol_type = other DNA
atgaatttatctgaaattactcaacaaatgggtgaagtaggtaaaacgctgagtgattctgtgccagagttactt

SEQ ID NO: 552325 - DNA, 75 bp, synthetic construct
  source 1..75: mol_type = other DNA
tctcctttaaacagaagcgcctttggggatggctggcgctggtgtttattgccacgctgggaatgagcggttggc

SEQ ID NO: 552326 - DNA, 75 bp, synthetic construct
  source 1..75: mol_type = other DNA
cttccgccacagaattcatacgcaaagcagagcgtggcggtgaacggttaatggcgctgcccgtcggtattcgcc

SEQ ID NO: 552327 - DNA, 75 bp, synthetic construct
  source 1..75: mol_type = other DNA
atgtctcggtttcttttggccaacgccgcgtcctctctgatgtgtcgctggaacttaaacctggaaaaattttga

SEQ ID NO: 552328 - DNA, 75 bp, synthetic construct
  source 1..75: mol_type = other DNA
cttacaatgcaaacgcaaaccagcaatgagagcagaagtaataacactgacaacgttgaccagaaaatatgaagg

SEQ ID NO: 552329 - DNA, 75 bp, synthetic construct
  source 1..75: mol_type = other DNA
aaatgggtgaagttggtaaaacgctgagtgattctgttcccgggttacttaatagtaccgatctggttaatgacc

SEQ ID NO: 552330 - DNA, 75 bp, synthetic construct
  source 1..75: mol_type = other DNA
aaatgggcagccgccgaaccctgcgctaccgggaaatggaaagtggcatggaaaacgccggtaaattacagtatc

SEQ ID NO: 552331 - DNA, 75 bp, synthetic construct
  source 1..75: mol_type = other DNA
acgctgaaacagcaatatgaacaatcccgaaaacaaattgcagctttacctgacgccagtcaggatatggcctgt

SEQ ID NO: 552332 - DNA, 75 bp, synthetic construct
  source 1..75: mol_type = other DNA
ggtcagcatctggagatggcggtgatggttggcattgatcctcagtccgacggtctggcgcgcgccagacgtatg

SEQ ID NO: 552333 - DNA, 75 bp, synthetic construct
  source 1..75: mol_type = other DNA
atagtaatgtttcaataatcgttattccaaatcatttactcaaaaatatcggatgggatgatggtacgttattgg

SEQ ID NO: 552334 - DNA, 75 bp, synthetic construct
  source 1..75: mol_type = other DNA
aacattaaatgtgttaatgctgaaaggcaggggagaagagtcagcaaagtccgttttgagatcgaaatgaggtaa

SEQ ID NO: 552335 - DNA, 75 bp, synthetic construct
  source 1..75: mol_type = other DNA
ctgcaaaagtctataaaaacacagttaaaggcactgtcaggcgaactacaccgacaatggaaagcgtttaatcgt

SEQ ID NO: 552336 - DNA, 75 bp, synthetic construct
  source 1..75: mol_type = other DNA
gtcgcgggggcgaatttattatcgataccgtagaggccgtgcgctttgttcccttagtgaagggggagctggctt

SEQ ID NO: 552337 - DNA, 75 bp, synthetic construct
  source 1..75: mol_type = other DNA
tgctcggttgaacggattaaaggcttgcagtggcaggcgcgtcgccgcctgaaaaatcttgatttacataatgtt

SEQ ID NO: 552338 - DNA, 75 bp, synthetic construct
  source 1..75: mol_type = other DNA
atgacgttgactcctctgaactggcgtttaaactggctgcttctatcgcctttaaagaaggttttaagaaagcga

SEQ ID NO: 552339 - DNA, 75 bp, synthetic construct
  source 1..75: mol_type = other DNA
cgtgaggaactggataaaattgctctggagattggctatcgcagggggcggcgtatttcaagctctggtgttgtc

SEQ ID NO: 552340 - DNA, 75 bp, synthetic construct
  source 1..75: mol_type = other DNA
agattgaagaaacccgctggcgtaacatgtgggactggggcatcttcattggtagcttcgttccgccgctggtga

SEQ ID NO: 552341 - DNA, 75 bp, synthetic construct
  source 1..75: mol_type = other DNA
tgacgccattatcgtaacggcagcgccgcccgaaatcccaacagcgttaatgacgcaactggacgaaggcggcat

SEQ ID NO: 552342 - DNA, 75 bp, synthetic construct
  source 1..75: mol_type = other DNA
acttggggtgctgatttccggtgccacacgagtcacccggaatatgtttctggcatctgcccgggcactggcatc

SEQ ID NO: 552343 - DNA, 75 bp, synthetic construct
  source 1..75: mol_type = other DNA
gtggaaaaacgctggcccggcgtgttgctgcagtttgaagactttgcactgaaacatgccacgccgttactggaa

SEQ ID NO: 552344 - DNA, 75 bp, synthetic construct
  source 1..75: mol_type = other DNA
ttgaacatcagaacagggatgtgcgcttttttattgagcttaatgcttcctgcgcaggctaccagctttaccgaa

SEQ ID NO: 552345 - DNA, 75 bp, synthetic construct
  source 1..75: mol_type = other DNA
ctgctatcggtctgaaagacgtaaccactggtgacaccctgtgtgacccggatgcaccgatcattctggaacgta

SEQ ID NO: 552346 - DNA, 75 bp, synthetic construct
  source 1..75: mol_type = other DNA
cggtggttctggatgtgggaacaaacaatgaatcgttactggatagtcctgtatatatgggcgcccggcatccac

SEQ ID NO: 552347 - DNA, 75 bp, synthetic construct
  source 1..75: mol_type = other DNA
atgcattgcctgggaagacagagacaatattgatgctttgttgaggaacgttccgtcagataatatcagggtcat

SEQ ID NO: 552348 - DNA, 75 bp, synthetic construct
  source 1..75: mol_type = other DNA
gaaaacgctcacgaacggtgaagataatccactctggcgtaccgtggtactgcgcgacggcctgctggtgcgccg

SEQ ID NO: 552349 - DNA, 75 bp, synthetic construct
  source 1..75: mol_type = other DNA
atggagaaagaaataagtaagattttggtaaggatgccgcagtcgttaaaagatgcgattacaggaaaggccaaa

SEQ ID NO: 552350 - DNA, 75 bp, synthetic construct
  source 1..75: mol_type = other DNA
gccacctggcaggcgctctcctccatgactcaggagcaggcgaatacgctggtgatcaacgccgacgaaaatatt

SEQ ID NO: 552351 - DNA, 75 bp, synthetic construct
  source 1..75: mol_type = other DNA
aatcgatgccagtcaggggcgtccttccattgatttactgcgcgcgttaattgctcaggaaccgctgctcggcgc

SEQ ID NO: 552352 - DNA, 75 bp, synthetic construct
  source 1..75: mol_type = other DNA
ctcggtttgtcactgatgatgggcggtatagcgcaaatcatatctccgcaagccactaacgaaagtgtgaggcag

SEQ ID NO: 552353 - DNA, 75 bp, synthetic construct
  source 1..75: mol_type = other DNA
tcgacggccctcaaaatacagaaaaccagggcaacccagtacaacttatctatggcgaggaaattctggttggct

SEQ ID NO: 552354 - DNA, 75 bp, synthetic construct
  source 1..75: mol_type = other DNA
atagtatttgtcacgaaggaaacgctttcattattcctccagattctcaaggaggaggcgttaaattttcatgct

SEQ ID NO: 552355 - DNA, 75 bp, synthetic construct
  source 1..75: mol_type = other DNA
tcaactggtggatgaactggtgccgcagcctggcgatattgtgctgccgaagccgcgctatagcggtttcttcaa

SEQ ID NO: 552356 - DNA, 75 bp, synthetic construct
  source 1..75: mol_type = other DNA
ggcctgatggtaccaccattaatgctggcgctactgacgcaggaaaaagcattagatgtgtcgccggaacatttc

SEQ ID NO: 552357 - DNA, 75 bp, synthetic construct
  source 1..75: mol_type = other DNA
cattcgccgcagcagcgaatggaaacgttaatcagtcaggcgcttgttccggttgtgcaggcactagaagcaacg

SEQ ID NO: 552358 - DNA, 75 bp, synthetic construct
  source 1..75: mol_type = other DNA
atgaaagccgggatcgccgactggcaaaaacgttatccgaacaatccgggcgcgaaaatgctgccaacgcagttg

SEQ ID NO: 552359 - DNA, 75 bp, synthetic construct
  source 1..75: mol_type = other DNA
gccgacgaaaatattctgcaaggctggctggatctgcagcgcgtctggtttgataaccgtaacgatcccgacatg

SEQ ID NO: 552360 - DNA, 75 bp, synthetic construct
  source 1..75: mol_type = other DNA
attcagcaaggatttgaagcggcgaaaaatatcggtactcaaccagtagcagcgcaggtagctgccgcacctgcc

SEQ ID NO: 552361 - DNA, 75 bp, synthetic construct
  source 1..75: mol_type = other DNA
aggaaagtgggcgttgctggcgtgacgcttgagaagatgccaaatgaagaagattactggcaattaaccgctaaa

SEQ ID NO: 552362 - DNA, 75 bp, synthetic construct
  source 1..75: mol_type = other DNA
cggcgacgggaaaacggcggtgattgagatggcggcagcaagtggcctgatgctggtcgcgcctgaaaagcgtaa

SEQ ID NO: 552363 - DNA, 75 bp, synthetic construct
  source 1..75: mol_type = other DNA
ccagatggcgggcggcggcgcggcgggcggtatgggtattgcggcggcggtatttctcaatgcggatattaaacc

SEQ ID NO: 552364 - DNA, 75 bp, synthetic construct
  source 1..75: mol_type = other DNA
cctgaaaagcgtaatccgttgctggcgtcaagttatggcaccggcgagctgattcgtcatgcgctggataacggc

SEQ ID NO: 552365 - DNA, 75 bp, synthetic construct
  source 1..75: mol_type = other DNA
acccaggggggaagaacatggaatacaacagcggttctcaataagaaattatcattaccctctgacagttcagaa

SEQ ID NO: 552366 - DNA, 75 bp, synthetic construct
  source 1..75: mol_type = other DNA
aagtgctcgccagcggtgaaaccaatctcttcaacagcgcgcgaaatattgcctgcgccattaaaataggtcagg

SEQ ID NO: 552367 - DNA, 75 bp, synthetic construct
  source 1..75: mol_type = other DNA
cgcggcgcggcggcggtgtttggtccgcaaaaaggggcaacgccggaaatggtcgaagagctggagcaggggctg

SEQ ID NO: 552368 - DNA, 75 bp, synthetic construct
  source 1..75: mol_type = other DNA
ttaccgcaggtattaaaccagaaattgctatctctttggctattccactgggattgctcggcgttgttctggaaa

SEQ ID NO: 552369 - DNA, 75 bp, synthetic construct
  source 1..75: mol_type = other DNA
ctgttcgcccgcacacatacgatgatggttcgtgaacgacgctttaccctgagagatcccctcataatttcccca

SEQ ID NO: 552370 - DNA, 75 bp, synthetic construct
  source 1..75: mol_type = other DNA
agcaggaaggtggcaaagccgctctggtactgggactgtgctttatttcggaaggtgcaattccgtttgctgctc

SEQ ID NO: 552371 - DNA, 75 bp, synthetic construct
  source 1..75: mol_type = other DNA
aatggtcgaagagctggaacaggggctgcaaaattacgcccgtgttttacaacagcaaactgaaatcaacgtctg

SEQ ID NO: 552372 - DNA, 75 bp, synthetic construct
  source 1..75: mol_type = other DNA
acaatatcttctcataaagtcgccgcccgcctctggcaagagtcgtgcgctgatgttcgtcgcactcgataaact

SEQ ID NO: 552373 - DNA, 75 bp, synthetic construct
  source 1..75: mol_type = other DNA
catccgtttccgttacttatgcacgcaacggagcatcgaccaaggctaatgcccttgggatgcgccctatgcaag

SEQ ID NO: 552374 - DNA, 75 bp, synthetic construct
  source 1..75: mol_type = other DNA
aggaacgccagcgtcgtcagcggcatgacccgcttttttcatgtggtgtttccggcaaaaagcgaaaagcggagg

SEQ ID NO: 552375 - DNA, 75 bp, synthetic construct
  source 1..75: mol_type = other DNA
atcaggtaaaagacgccaaatggcagcgtgttcacggctggtttggcaagttaagctatcccgcgctcacgcgtt

SEQ ID NO: 552376 - DNA, 75 bp, synthetic construct
  source 1..75: mol_type = other DNA
ttgccacagcagcgaatggaaaagttaatcagtcaggcgatcgccccggttgtgcaggcattagaagccaccggc

SEQ ID NO: 552377 - DNA, 75 bp, synthetic construct
  source 1..75: mol_type = other DNA
gtggaggcatccggtgccagcctggagaaagggcggcacgaccagttgcttaccgcgcttcgtgcgctgctgtta

SEQ ID NO: 552378 - DNA, 75 bp, synthetic construct
  source 1..75: mol_type = other DNA
tgctgcctgcgcaggccacaggttttaccgagtatctgccgatgagcgacagcgaatacgctcataaacggtcgc

SEQ ID NO: 552379 - DNA, 75 bp, synthetic construct
  source 1..75: mol_type = other DNA
cgcttgaaaagatgccaaatgatgatagtgaatggcaattgaacggtaaagatcgcgccggtaaatcctggtctg

SEQ ID NO: 552380 - DNA, 75 bp, synthetic construct
  source 1..75: mol_type = other DNA
ttgatcgtaacggcattcaggatctggttatctggttaccaagtaccggtaatggtctggctccttatgcacatt

SEQ ID NO: 552381 - DNA, 75 bp, synthetic construct
  source 1..75: mol_type = other DNA
ctggttcgggatatcaaacggcaatcctggcgcatcttgtccagcatgtttgctcggttgaacggattaaaggct

SEQ ID NO: 552382 - DNA, 75 bp, synthetic construct
  source 1..75: mol_type = other DNA
ccgtagctacgatcaattgatcgcctgtatgcgcagcgaaaaggtttatcgcgtgtttattaagccaaatctcgg

SEQ ID NO: 552383 - DNA, 75 bp, synthetic construct
  source 1..75: mol_type = other DNA
ccgtagctacgatcaactgatcgcctgtatgcgcagcgaaaaggtttatcgcgtgtttattaagccgaatttcgg

SEQ ID NO: 552384 - DNA, 75 bp, synthetic construct
  source 1..75: mol_type = other DNA
ctggatatgcagtttgattccggttactggataaccagtctgtatcaggtaaaagacgccaaatggcagcgtgtt

SEQ ID NO: 552385 - DNA, 75 bp, synthetic construct
  source 1..75: mol_type = other DNA
tgcacaggccaccagctttaccgaatatctaccgatgagtgacagcgaatacgcgcaaaagcgggcgctgaaacc

SEQ ID NO: 552386 - DNA, 75 bp, synthetic construct
  source 1..75: mol_type = other DNA
tgcacaggccaccagctttaccgaatatctgccaatgagtgacagcgaatacgcgcaaaagcgggcgctgaaacc

SEQ ID NO: 552387 - DNA, 75 bp, synthetic construct
  source 1..75: mol_type = other DNA
aaaaaagatgagtctgcattgtatacttcctggacgctaagtttcaccgcacccaccagtgaagaggcacagaaa

SEQ ID NO: 552388 - DNA, 75 bp, synthetic construct
  source 1..75: mol_type = other DNA
ggaaagaaaggagcgacttagagagggagcttaatacctggatccgtcagtatgttgccgaccaggaaaatccac

SEQ ID NO: 552389 - DNA, 75 bp, synthetic construct
  source 1..75: mol_type = other DNA
aacccggctggtaccaggtcgcgctgagcgtgcggccccattttaaatttatgggggcaaactttgagctttccc

SEQ ID NO: 552390 - DNA, 75 bp, synthetic construct
  source 1..75: mol_type = other DNA
acggttttgagattgaaggaactggtaaaaagtacgcgttgcgaaatggtgaatatgtcgatgcgtattttatgg

SEQ ID NO: 552391 - DNA, 75 bp, synthetic construct
  source 1..75: mol_type = other DNA
cgaggaaaaaatcaaggttgaagcctttggttgtaaatttttgatcgatagcttattggatattgatacgtcggg

SEQ ID NO: 552392 - DNA, 75 bp, synthetic construct
  source 1..75: mol_type = other DNA
ggtaccaggtcgcactgagtgtgagaccacatttcaaatttatgggggcaaactttgagctctccctggttggtc

SEQ ID NO: 552393 - DNA, 75 bp, synthetic construct
  source 1..75: mol_type = other DNA
ctgcaatccactgcatctgccgaaccggtcaataaactggccgtggacagcatgattgcagatatcgatgaacgc

SEQ ID NO: 552394 - DNA, 75 bp, synthetic construct
  source 1..75: mol_type = other DNA
actcatcaaaattcgtgatgagaaatgcgatggtaaagcggttaacgtggccagaaagatcgggcgcgagccttc

SEQ ID NO: 552395 - DNA, 75 bp, synthetic construct
  source 1..75: mol_type = other DNA
atggacaaatatgaatttagacgacaacaactcatcaaaattcgtgatgagaaatgcgatggtaaagcggttaac

SEQ ID NO: 552396 - DNA, 75 bp, synthetic construct
  source 1..75: mol_type = other DNA
aaagctgaggcgtttgaagagtcggtgcggatgctcgatgcggtaaaaatgccggaagcgcgtaaacgcatgaaa

SEQ ID NO: 552397 - DNA, 75 bp, synthetic construct
  source 1..75: mol_type = other DNA
ctcgtggtgatttaggacttgttgaaaagcagacaacatatatcattaacttattaacaaccccccccaatgatg

SEQ ID NO: 552398 - DNA, 75 bp, synthetic construct
  source 1..75: mol_type = other DNA
gatggcatcagcatgacctttgccgactggcgctttaacctgcgctcctccaacaccgagccggtggtgcggttg

SEQ ID NO: 552399 - DNA, 75 bp, synthetic construct
  source 1..75: mol_type = other DNA
taacttattaaaaactcttgaagagaaaaaacagtattacaatatgatctacgaagaaatccgtaaaaagaaagc

SEQ ID NO: 552400 - DNA, 75 bp, synthetic construct
  source 1..75: mol_type = other DNA
ttagcgtttttaaaagattaaaagtgacaaaggaatttgcttatagtcaacagggtaaggttgaaatattatttt

SEQ ID NO: 552401 - DNA, 75 bp, synthetic construct
  source 1..75: mol_type = other DNA
gcttcacgactgccgcggatctgttgcttcagctctcaacagcgcagaaacagggccgatataagaacacgttgc

SEQ ID NO: 552402 - DNA, 75 bp, synthetic construct
  source 1..75: mol_type = other DNA
cgggcatctgctgctggtaagcgtgttgtacaagggcttcacctactggccgattggcaacgcgctgcatccgca

SEQ ID NO: 552403 - DNA, 75 bp, synthetic construct
  source 1..75: mol_type = other DNA
aagcactactggctggcatggggatgccgtgcccaaaagagattgccattcaacagatttcgcaattaacagagg

SEQ ID NO: 552404 - DNA, 75 bp, synthetic construct
  source 1..75: mol_type = other DNA
cgctgctggcgctgccgaccacttttatcatgctgattgtgcagggctgctttggcctgctcaaccgcattgcgc

SEQ ID NO: 552405 - DNA, 75 bp, synthetic construct
  source 1..75: mol_type = other DNA
atcgctcaacagcctgatcctgacggtggagcaaattttatggggcatgttgttcgggctgatgtttcagtttct

SEQ ID NO: 552406 - DNA, 75 bp, synthetic construct
  source 1..75: mol_type = other DNA
ggatgaacccactactgcgctggacgtcaccgtacaggcgcagatcatgacgctattaaatgaactgaagcggga

SEQ ID NO: 552407 - DNA, 75 bp, synthetic construct
  source 1..75: mol_type = other DNA
tgttgagtgggggagggaatagagaaaacaaaagaatctatatttacacgttaaaaggagagcttgtaagaaagt

SEQ ID NO: 552408 - DNA, 75 bp, synthetic construct
  source 1..75: mol_type = other DNA
aacgttactcaaggtcttgtgattgatgataaaactgatggtctatacacactacatgtaacagggaaaccagaa

SEQ ID NO: 552409 - DNA, 75 bp, synthetic construct
  source 1..75: mol_type = other DNA
acctgcaggcaaatcgtattgggtggcgagtgcttaattctgatgatttttcagaacttaatgcaattactgtca

SEQ ID NO: 552410 - DNA, 75 bp, synthetic construct
  source 1..75: mol_type = other DNA
cgatcatcgcgatactgttcagtccgctgagtgcggctggcgatctcacatcacaattgcaaaccttttttgccg

SEQ ID NO: 552411 - DNA, 75 bp, synthetic construct
  source 1..75: mol_type = other DNA
caacaaatatacctttggctaattttatttctcatttaaatgatgatattgttacgagaaaagtgagattatata

SEQ ID NO: 552412 - DNA, 75 bp, synthetic construct
  source 1..75: mol_type = other DNA
aaacattgggaacctgaaggtttagctattgatcgcaaatcaaaatcattggttatcatgtttgctcttggggat

SEQ ID NO: 552413 - DNA, 75 bp, synthetic construct
  source 1..75: mol_type = other DNA
catttttgggattacgaaagcgataaaaaaagtcatgttctcagtttgcaacctgaagcgattgtatctctagtt

SEQ ID NO: 552414 - DNA, 75 bp, synthetic construct
  source 1..75: mol_type = other DNA
tggatgagctggtggattgcgtggaggaactggaaggacaggtaagccagtttgaaacgctggtgaaggagttta

SEQ ID NO: 552415 - DNA, 75 bp, synthetic construct
  source 1..75: mol_type = other DNA
atgtggtatttattgtggttcgtcggaattttgttgatgtgttcactctccaccgtggtgttggtatggctggaa

SEQ ID NO: 552416 - DNA, 75 bp, synthetic construct
  source 1..75: mol_type = other DNA
gattacggcaactatgacgctaaatttattggttcgacaggagtccgtgctcattattccggagaaaatatggca

SEQ ID NO: 552417 - DNA, 75 bp, synthetic construct
  source 1..75: mol_type = other DNA
ttaacggttcgtgcgctttggtattaaacaacccatactttgaggctaatgccggggggggcagaccttgctata

SEQ ID NO: 552418 - DNA, 75 bp, synthetic construct
  source 1..75: mol_type = other DNA
ctcaacggcacaacgttccagagcgcaggggattatcagccaagtgcagaacgaccatactggataacaggagct

SEQ ID NO: 552419 - DNA, 75 bp, synthetic construct
  source 1..75: mol_type = other DNA
gatcgcaaatcaaaatcattggttatcatgtttgctcttggggatcataaaaaaagatttgctcaattatattat

SEQ ID NO: 552420 - DNA, 75 bp, synthetic construct
  source 1..75: mol_type = other DNA
agccgcattgactcagccgctaaatgcactgcgggaatgggcagcaaatcgtccagaattgcaggcgttatgtac

SEQ ID NO: 552421 - DNA, 75 bp, synthetic construct
  source 1..75: mol_type = other DNA
tttccacccttatcaaggggcgatcccgacatatctttttagcaaggtttcagggagtccggacaaactgaaggg

SEQ ID NO: 552422 - DNA, 75 bp, synthetic construct
  source 1..75: mol_type = other DNA
acctgaagcacttgagctgctgcttcatcagaagcaaagaaatacaaaaatatcattagactggaaaaatggacg

SEQ ID NO: 552423 - DNA, 75 bp, synthetic construct
  source 1..75: mol_type = other DNA
tggaaatttgtagtagtgcgccgccgctggaagagtttacgcctggtcgtctgcgtgcctgctttaaaccggtgg

SEQ ID NO: 552424 - DNA, 75 bp, synthetic construct
  source 1..75: mol_type = other DNA
ataagagcatgagtaaggctgaagcgtttgaagagtcggtacgaatgcttgatgcggtgaaaatgccggaagcgc

SEQ ID NO: 552425 - DNA, 75 bp, synthetic construct
  source 1..75: mol_type = other DNA
tcggctttgagattgaaggcaccggtaaaaattacgcttttcgtaatggtgaatatgtcgatgcgtattatatgg

SEQ ID NO: 552426 - DNA, 75 bp, synthetic construct
  source 1..75: mol_type = other DNA
acgaatttacccataaactctgcgcccgctgggaagaaattgcctgccgggcgcaaagtgacaaaacgcgagtgt

SEQ ID NO: 552427 - DNA, 75 bp, synthetic construct
  source 1..75: mol_type = other DNA
cgaaaggtgttacattaaatggtatccccggtgtcttttctatttatggcagaagctgtcccgacatcagaagta

SEQ ID NO: 552428 - DNA, 75 bp, synthetic construct
  source 1..75: mol_type = other DNA
ctaacaaaggatggtttgttacatattttaaatacaatgatttttcttttccttatgagacaaaaattataaaaa

SEQ ID NO: 552429 - DNA, 75 bp, synthetic construct
  source 1..75: mol_type = other DNA
atttcagtcgaaatgatcgaaaagtggctcgaacgagttcaacgcatcagaaaattctacagtcagattcatgtg

SEQ ID NO: 552430 - DNA, 75 bp, synthetic construct
  source 1..75: mol_type = other DNA
ggagttaatgcgactttcatcgcggacggggtgccacagtttgctctggttaatgggctgtacgcaatggacaag

SEQ ID NO: 552431 - DNA, 75 bp, synthetic construct
  source 1..75: mol_type = other DNA
atgaatatagtgatcaccggagggacaggattaattggtcgccatttaatcccgcgtttgctggagttgggccat

SEQ ID NO: 552432 - DNA, 75 bp, synthetic construct
  source 1..75: mol_type = other DNA
cgcactggctgcgcacgctgtgcgacgtggattttcccccgccggtggaaggcgaaatgctggagactcacgcgc

SEQ ID NO: 552433 - DNA, 75 bp, synthetic construct
  source 1..75: mol_type = other DNA
ggcagcctgagttcacagataaaacactctccaggaaacccggggcggttcagccttactcgctttcccgtcaca

SEQ ID NO: 552434 - DNA, 75 bp, synthetic construct
  source 1..75: mol_type = other DNA
acgccatccggccaccggctgacagtcctttcactaccatgagcgaggcggaatttaccgccatgagcaccagtg

SEQ ID NO: 552435 - DNA, 75 bp, synthetic construct
  source 1..75: mol_type = other DNA
ccggggatgtggttgtcccgctttatgatgatagcggcgcactggttaacgtccagctcattaacgcggacggtc

SEQ ID NO: 552436 - DNA, 75 bp, synthetic construct
  source 1..75: mol_type = other DNA
cgtaaaactgacggagaaagcccgaccggtcaccggcaacgcctacctcacccgcaagggcttccccggccggga

SEQ ID NO: 552437 - DNA, 75 bp, synthetic construct
  source 1..75: mol_type = other DNA
ggacctggtactgtggctgattaaagccgatgaccgtgccctgtctgtggatgagtatttctggcgacacatcct

SEQ ID NO: 552438 - DNA, 75 bp, synthetic construct
  source 1..75: mol_type = other DNA
cgcagcggcggtgtgtcgcgccgccgggtgattatccacttcccggagcagattgcgccggaggaacgcgacccg

SEQ ID NO: 552439 - DNA, 75 bp, synthetic construct
  source 1..75: mol_type = other DNA
ttctggccgaaatcgcgaccctgctcgccggggaagataacgccacgtcagccgatatcgacacactggaagacc

SEQ ID NO: 552440 - DNA, 75 bp, synthetic construct
  source 1..75: mol_type = other DNA
gcgaacggccagctcctgtcccgctatgaaaacggcatctggaaaaatatccctgccgccactttctcacggaat

SEQ ID NO: 552441 - DNA, 75 bp, synthetic construct
  source 1..75: mol_type = other DNA
tgaatgccgtcaccggaaatctgtcgccggtcgccccggaagtgattgcggccgcagaagctgaaaccgatgctg

SEQ ID NO: 552442 - DNA, 75 bp, synthetic construct
  source 1..75: mol_type = other DNA
cagactaacctgtcgctgaaagaggaaagctacggcgactggctgcctaagtgcgacgaacccacagcgatataa

SEQ ID NO: 552443 - DNA, 75 bp, synthetic construct
  source 1..75: mol_type = other DNA
aaggtgattaaaaaccgccatcagtcctgcccggtgtgcggtggctctgaccgcttccgctttgacgataaagag

SEQ ID NO: 552444 - DNA, 75 bp, synthetic construct
  source 1..75: mol_type = other DNA
ggcgagccttgcccgtcacacatacccggcctgccggattgtgctggccgccgaccgtgacctcagcggcgacgg

SEQ ID NO: 552445 - DNA, 75 bp, synthetic construct
  source 1..75: mol_type = other DNA
cagggcatacaaaccaatctaacactaagagaggaaagcaacgccgactggctgccgaaatgtgatgaccctgta

SEQ ID NO: 552446 - DNA, 75 bp, synthetic construct
  source 1..75: mol_type = other DNA
gaattacggtaagcgacgaacaaatcaggggatgcagacgaaccttgcgctcagggaggaaagcaacgccgactg

SEQ ID NO: 552447 - DNA, 75 bp, synthetic construct
  source 1..75: mol_type = other DNA
caggacttaaggccatcactggcggtgatgctgtatcggtcgacccgaaatacaaggatgcgtattccactcata

SEQ ID NO: 552448 - DNA, 75 bp, synthetic construct
  source 1..75: mol_type = other DNA
caggggatacaaaccaatctgtcgctgaaagaggaaagctacggcgactggctgccgaagtgcgacgaccccgca

SEQ ID NO: 552449 - DNA, 75 bp, synthetic construct
  source 1..75: mol_type = other DNA
tactggccgaaattgcgaccctgctcgccggggaagataatgccacgtcagccgacatcgacacgctggaagacc

SEQ ID NO: 552450 - DNA, 75 bp, synthetic construct
  source 1..75: mol_type = other DNA
ggctgtggatagcggagggctacgcgaccgcgctcaccgtgcatcacctgaccggcgaaaccgtcatggtggcgc

SEQ ID NO: 552451 - DNA, 75 bp, synthetic construct
  source 1..75: mol_type = other DNA
gaggccacgcggaaagccatttatgacgccatccggccaccggcgcaaagtccatttgataccatgagcgaggcg

SEQ ID NO: 552452 - DNA, 75 bp, synthetic construct
  source 1..75: mol_type = other DNA
gggcgcggcacatggttctgtaaccagtgcggcgcgggtgacggactgaaactggttgagaaagtgttcggcgta

SEQ ID NO: 552453 - DNA, 75 bp, synthetic construct
  source 1..75: mol_type = other DNA
cgatgcggtctccgtcgacccgaaataccgcgatgcatactccacccatattccggcggtgatactggccgtgaa

SEQ ID NO: 552454 - DNA, 75 bp, synthetic construct
  source 1..75: mol_type = other DNA
ggtaaaaggagcgagccacaccatcgaagggcaaaaacaggcgggaaaacggctgtggatagcggagggctatgc

SEQ ID NO: 552455 - DNA, 75 bp, synthetic construct
  source 1..75: mol_type = other DNA
ctggcagctctttctcgaagtcaccggtcccggaggcagcggcaaaagtattctggccgaaatcgcgaccctgct

SEQ ID NO: 552456 - DNA, 75 bp, synthetic construct
  source 1..75: mol_type = other DNA
ggggaaacgctggagacgcacgcgccgaacttctggcgctggctcgaccgtgcgtccggtaaaaacccacaaaaa

SEQ ID NO: 552457 - DNA, 75 bp, synthetic construct
  source 1..75: mol_type = other DNA
cggcgggtgattattcacttcccggaacagatagccccgcaggagcgcgacccgcagcttaaggacaaaatcacc

SEQ ID NO: 552458 - DNA, 75 bp, synthetic construct
  source 1..75: mol_type = other DNA
acgcgctgcaacgtactgaaaattacgccgaaagcattgctgccctgctgaaagataaacaccccgctatgttgc

SEQ ID NO: 552459 - DNA, 75 bp, synthetic construct
  source 1..75: mol_type = other DNA
acaacacctctgaagcgcacactacttacggtgtaatcggcgttaaagtgtggatcttcaaaggcgagatcctgg

SEQ ID NO: 552460 - DNA, 75 bp, synthetic construct
  source 1..75: mol_type = other DNA
atgggtcagaaagtacatcgtaatggtattcgcttgggtattgtaaaaccatggaactctacttggtttgcgaac

SEQ ID NO: 552461 - DNA, 75 bp, synthetic construct
  source 1..75: mol_type = other DNA
acctgaaaatggttcacgaactggcggcggcactgaatgctgaagtcggctgctcacgcccgattgccgaaggcg

SEQ ID NO: 552462 - DNA, 75 bp, synthetic construct
  source 1..75: mol_type = other DNA
caggaaccgtgcaccagtgatacctctcatcagtgcccgacagaaacggtaccttatgttgccccgcgtcatgaa

SEQ ID NO: 552463 - DNA, 75 bp, synthetic construct
  source 1..75: mol_type = other DNA
ggtacgttgctgattgaagcggcgatgctggcgaccgatcgcgcaccaggcttacatcgtgggcgctggggcttt

SEQ ID NO: 552464 - DNA, 75 bp, synthetic construct
  source 1..75: mol_type = other DNA
gctctcgatttaagcggtgatggtttgcatctgcgtggctaccgtgatcgtgctggtatcgcgccgatcaaagaa

SEQ ID NO: 552465 - DNA, 75 bp, synthetic construct
  source 1..75: mol_type = other DNA
cccgccgccacgcgccgaaattctgctgaaccgctttcgtggactcgagtgaacctgctgcttagctgtgattta

SEQ ID NO: 552466 - DNA, 75 bp, synthetic construct
  source 1..75: mol_type = other DNA
acgttacgaaaagagcgcgatgatcctgacctctaacctgccgttcgggcagtgggaccagacgttcgccgggga

SEQ ID NO: 552467 - DNA, 75 bp, synthetic construct
  source 1..75: mol_type = other DNA
gataaagagctacagcgggaaatggcgcaaatttttattgatgccgaagtcgcctattcgcagaacgcgattaaa

SEQ ID NO: 552468 - DNA, 75 bp, synthetic construct
  source 1..75: mol_type = other DNA
ggaaagggcgctggtagtgggctattcgctgattatcatgccggatatgacccggtacgctggcgacggcgcagg

SEQ ID NO: 552469 - DNA, 75 bp, synthetic construct
  source 1..75: mol_type = other DNA
ttccggcggtcatcctggctgtgaacaataatccgatgcgtttcacggaccgtagcggtggagtttcacgccgta

SEQ ID NO: 552470 - DNA, 75 bp, synthetic construct
  source 1..75: mol_type = other DNA
gtcggccaccatcgagacgctggaatccccgcgtgaacgtgccgcgttaactggcttctcactgatacgcctgcc

SEQ ID NO: 552471 - DNA, 75 bp, synthetic construct
  source 1..75: mol_type = other DNA
aaaacgcgacgtgattctggccgcactgtttatggtgctggcaaaccgctacgactggcagctctttctggaggt

SEQ ID NO: 552472 - DNA, 75 bp, synthetic construct
  source 1..75: mol_type = other DNA
acaggagaagccgtcatggtggcattttcgtcggtcaactttctttctctgagcagcgttgcccataataagtat

SEQ ID NO: 552473 - DNA, 75 bp, synthetic construct
  source 1..75: mol_type = other DNA
aggcgatgtatacccgaatggcagccttcccggcggtgaaaacgttcgtaagcgtacagcctgaaccgtctggtc

SEQ ID NO: 552474 - DNA, 75 bp, synthetic construct
  source 1..75: mol_type = other DNA
ctgcattctggcgctggctggaccggtctgcaggttttaaacctgaaaagcgggacattattctggcagcattgt

SEQ ID NO: 552475 - DNA, 75 bp, synthetic construct
  source 1..75: mol_type = other DNA
aaaaagcgcagagggtagtggatcactataaaaatgcgctggcagtagatcctaacgggcagctcctttcgcgct

SEQ ID NO: 552476 - DNA, 75 bp, synthetic construct
  source 1..75: mol_type = other DNA
tcaaattagccaacaaaacgaatcttgacaaagctatctggcaaaaagtgaaatgtataaattgggaagcaaagg

SEQ ID NO: 552477 - DNA, 75 bp, synthetic construct
  source 1..75: mol_type = other DNA
ctgatcaattcagaaaatgatattttaatgatgcagcgttgtttgtcagcgattaaaagatggaatgaaaaattt

SEQ ID NO: 552478 - DNA, 75 bp, synthetic construct
  source 1..75: mol_type = other DNA
gacagatattatctccgtgaatcccccgccacctttccggtgcgcggggttttgtcttttttcaccgggaataca

SEQ ID NO: 552479 - DNA, 75 bp, synthetic construct
  source 1..75: mol_type = other DNA
aaattgcctgttgtggtcgttcgcgtcggtgatgctaccgttgatgtcctcgtagggcagcaaacctggacgctg

SEQ ID NO: 552480 - DNA, 75 bp, synthetic construct
  source 1..75: mol_type = other DNA
cccggaaaatgcagcttgccgtggtgatgagtggaaccattatcgcacttacctgtggttggctactgctgtcct

SEQ ID NO: 552481 - DNA, 75 bp, synthetic construct
  source 1..75: mol_type = other DNA
tatcccgacgtcaacgtggtggaacagatggcggacatgatgtcggcctcgcgcgatttcgaaaccaacgtcgat

SEQ ID NO: 552482 - DNA, 75 bp, synthetic construct
  source 1..75: mol_type = other DNA
acaacatgcgtgaagatgaaggtttggctgaccgtgcgaccttcgttgttgacccgcagggtatcatccaggcaa

SEQ ID NO: 552483 - DNA, 75 bp, synthetic construct
  source 1..75: mol_type = other DNA
acggctacttacttaaacatgcgccgaatgtgatgggctgtgcacagctcattgcccaggtgtttaaagatgcgg

SEQ ID NO: 552484 - DNA, 75 bp, synthetic construct
  source 1..75: mol_type = other DNA
tttggtcgtgagctttcccatttcggtttacatgagttctgtaatatccagacggtgtggaaagaccggatctga

SEQ ID NO: 552485 - DNA, 75 bp, synthetic construct
  source 1..75: mol_type = other DNA
ttttgaagcgttgagcactcaggttgaactgctaggtaagcagtgtttacgggcttttgacacaaatggccgttg

SEQ ID NO: 552486 - DNA, 75 bp, synthetic construct
  source 1..75: mol_type = other DNA
aatgaaatggtcgcttttgcgccggcctggactgatatatgcggggcagcggaggaactatttcggcgctttggg

SEQ ID NO: 552487 - DNA, 75 bp, synthetic construct
  source 1..75: mol_type = other DNA
atggaattgaaaactaagaaattgcagtcttctatcagtcagctagcacaacagtggcttgacgatgatcgccta

SEQ ID NO: 552488 - DNA, 75 bp, synthetic construct
  source 1..75: mol_type = other DNA
ggtgaggctggaagtggaaaaacctggctggcgcagcaactacaaaaagataaacatcgccgtgtgattacttta

SEQ ID NO: 552489 - DNA, 75 bp, synthetic construct
  source 1..75: mol_type = other DNA
atgatatcattaaaagctccgcacaataatttgatgccatatacgcaacaaagcatacttaatacggttaaaaac

SEQ ID NO: 552490 - DNA, 75 bp, synthetic construct
  source 1..75: mol_type = other DNA
ccgacaaaacggagccctgccatgaatgggatatggccggcattcagccttctcccgcacaggcacagaatattc

SEQ ID NO: 552491 - DNA, 75 bp, synthetic construct
  source 1..75: mol_type = other DNA
tggcatctgcaacccggtcaactggttgtgacagcagctgatttaggtcttcagttatgcgacagacatggcaag

SEQ ID NO: 552492 - DNA, 75 bp, synthetic construct
  source 1..75: mol_type = other DNA
acagtttgggtatatgaccaggatgatgcgtttcttgatattaaagcaaacgtgcaggctggacgctttaccggg

SEQ ID NO: 552493 - DNA, 75 bp, synthetic construct
  source 1..75: mol_type = other DNA
tgatttccctggattttatgactggatggattaccctgatcacccggttaagtttgtttttcgcatacttgaaaa

SEQ ID NO: 552494 - DNA, 75 bp, synthetic construct
  source 1..75: mol_type = other DNA
cgtgaagggaaagaatgtgagcatgtagaaaaatggcttcgcgaaatgtcgcgcattccggacgcagacgcacct

SEQ ID NO: 552495 - DNA, 75 bp, synthetic construct
  source 1..75: mol_type = other DNA
atggaaactgtcggtcagcgcatcaaagctctcaggcgcataaccaaaacctcgcagaaagaactgggtaagttc

SEQ ID NO: 552496 - DNA, 75 bp, synthetic construct
  source 1..75: mol_type = other DNA
cgcatcgcttaaagtcggggacaaaaaattgcctgttgtggtcgttcgcgtcggtgaggctaccgttgatgtcct

SEQ ID NO: 552497 - DNA, 75 bp, synthetic construct
  source 1..75: mol_type = other DNA
actgacggtgttgttggcttttcaacgttagtacatctctggcaggtggcaggggagagtgccggtgatgctgcc

SEQ ID NO: 552498 - DNA, 75 bp, synthetic construct
  source 1..75: mol_type = other DNA
cctgccatgaatgggatatggccggcattcagccttctcccgcacaggcacagaacattcgtgagaaaacggagg

SEQ ID NO: 552499 - DNA, 75 bp, synthetic construct
  source 1..75: mol_type = other DNA
cgaaacgattttgggaaaaaaattgaatggttgggtgatatcagttattcatcttatcttttacattttcctttg

SEQ ID NO: 552500 - DNA, 75 bp, synthetic construct
  source 1..75: mol_type = other DNA
ggggatgatctccattgatggagagaagcaaaaaggtcgtgtgatcaccatcacaaattaccatgaatatgctca

SEQ ID NO: 552501 - DNA, 75 bp, synthetic construct
  source 1..75: mol_type = other DNA
tgaagaagagtggctttggtcgtgagctttcccatttcggcttacacgaattctgtaatatccagacggtgtgga

SEQ ID NO: 552502 - DNA, 75 bp, synthetic construct
  source 1..75: mol_type = other DNA
ggtagcggatactacccgcacgatgacggtaatttctgaacaagtgattaaagatcagggcgcaaccaaccttac

SEQ ID NO: 552503 - DNA, 75 bp, synthetic construct
  source 1..75: mol_type = other DNA
atgtccggtgaaatgctggttctggtgccggaaaggctggagatgctgaaggtgttacgaaatatctgcccggtg

SEQ ID NO: 552504 - DNA, 75 bp, synthetic construct
  source 1..75: mol_type = other DNA
gattatgttctccttcggcggtctggaactgattggtattactgctgctgaagcgcgcgctccagaaaaaagcat

SEQ ID NO: 552505 - DNA, 75 bp, synthetic construct
  source 1..75: mol_type = other DNA
ctttcgccgattaccctgagcgttgggctcctgacgcacccgaacagttaaagaagaatgttattgaatatcgaa

SEQ ID NO: 552506 - DNA, 75 bp, synthetic construct
  source 1..75: mol_type = other DNA
ggcagatacaacatatggttggcggcaatggcgctaaaacgattatcgccgtgaataaagataaaaacgcgccaa

SEQ ID NO: 552507 - DNA, 75 bp, synthetic construct
  source 1..75: mol_type = other DNA
ttttccactgtttatagcaattatcttgctaataaccagacaggagtaaccagaccaaccgaaaacaccggggag

SEQ ID NO: 552508 - DNA, 75 bp, synthetic construct
  source 1..75: mol_type = other DNA
tgctctatatattatctttgggtattgcgttaggtatccagaatttaacaatgttggtaggcattgtgattagtg

SEQ ID NO: 552509 - DNA, 75 bp, synthetic construct
  source 1..75: mol_type = other DNA
ataatttgatgccatatacgcaacaaagcatacttaatacggttaaaaacaaccagttaccggaggatatcaaaa

SEQ ID NO: 552510 - DNA, 75 bp, synthetic construct
  source 1..75: mol_type = other DNA
atggcgggccaaaaaaacggtcatggcggtcgtttttgcgtttgcctgcgcaggctcttgctgatctctttcatc

SEQ ID NO: 552511 - DNA, 75 bp, synthetic construct
  source 1..75: mol_type = other DNA
tccataatctcgacagcaacgtggtagcttctgcgctgaacttcgtcattctggtagcatcgctgtcggtgtata

SEQ ID NO: 552512 - DNA, 75 bp, synthetic construct
  source 1..75: mol_type = other DNA
tatgctgtttggcctctctgtgcagggtaacgcaccgaagttccttacccgtgtgagtcatcgcggcgtgccgat

SEQ ID NO: 552513 - DNA, 75 bp, synthetic construct
  source 1..75: mol_type = other DNA
cggcgcgccgcgcaccaaagaagccgaaaacgccacctgtgcgccgctcctgatgagcgtaagcgtagtggccct

SEQ ID NO: 552514 - DNA, 75 bp, synthetic construct
  source 1..75: mol_type = other DNA
cctggcggaaggcaccacgattattgaaaacgcagcgcgtgaaccggaaatcgtcgataccgcgaacttcctgat

SEQ ID NO: 552515 - DNA, 75 bp, synthetic construct
  source 1..75: mol_type = other DNA
aatcgctttatatctggctgaattcacaattgaccgctgaaccttatgcgtttggtgagcaactaacgctgggta

SEQ ID NO: 552516 - DNA, 75 bp, synthetic construct
  source 1..75: mol_type = other DNA
tgacctacaaacaggtcaggcggctttaccaggacctagagagggacggatattctctggaacgaaaatccagaa

SEQ ID NO: 552517 - DNA, 75 bp, synthetic construct
  source 1..75: mol_type = other DNA
tgggtcgctgggttacagctcgacacatggcccttgctgggtacatcacaaaaatcatcatgatcgagactggcc

SEQ ID NO: 552518 - DNA, 75 bp, synthetic construct
  source 1..75: mol_type = other DNA
atcggcgaatttgtgtgactggtatgcagaacatggtccggcgatgttgaaggcggaacctacgctggtggaaaa

SEQ ID NO: 552519 - DNA, 75 bp, synthetic construct
  source 1..75: mol_type = other DNA
agccaggagatctcatcttcgttgatatcagtatcaatcagtttgatggagatggtatctatgtatttggttttg

SEQ ID NO: 552520 - DNA, 75 bp, synthetic construct
  source 1..75: mol_type = other DNA
acgctttccttaaaattcaaactatcctggctggttctgttggcgtgatttgccgttcttcttcaagccgcatcg

SEQ ID NO: 552521 - DNA, 75 bp, synthetic construct
  source 1..75: mol_type = other DNA
gattaccaggcattagctgacacgcttaagcgtgccttcaaacaactggataaaactttcctcgatgatttgtaa

SEQ ID NO: 552522 - DNA, 75 bp, synthetic construct
  source 1..75: mol_type = other DNA
caggtgttggcacccgttgaaggcaagcctgattaccaggcattagctgacacgcttaagcgcgccttcaaacaa

SEQ ID NO: 552523 - DNA, 75 bp, synthetic construct
  source 1..75: mol_type = other DNA
agttcacactgctgaacctggtggcagaaggcaccggattcatcaccgaaacggtctttgaaaaccgctttatgc

SEQ ID NO: 552524 - DNA, 75 bp, synthetic construct
  source 1..75: mol_type = other DNA
ctttactttcgtatgcccgaccgaactgggtgacgttgctgaccattacgaagaattgcagaaactgggcgtaga

SEQ ID NO: 552525 - DNA, 75 bp, synthetic construct
  source 1..75: mol_type = other DNA
ggtgtttcacttgtcttagaaaaggctgaattagtattttcggaatattattccattccgcaaattagctccaaa

SEQ ID NO: 552526 - DNA, 75 bp, synthetic construct
  source 1..75: mol_type = other DNA
tccctgaggatataaaacaacagttacaaaatataatcaatttacccgatgccagtgagtcagaagtgcagttat

SEQ ID NO: 552527 - DNA, 75 bp, synthetic construct
  source 1..75: mol_type = other DNA
gtggctcgttttactgacaacattctgacgcaaaatgcgcgaatgcaggcactggtggaaacgttactacgccag

SEQ ID NO: 552528 - DNA, 75 bp, synthetic construct
  source 1..75: mol_type = other DNA
gaaactattcaaaaacaacaaactggcataataagcagtacaaagactttaactcacgtaattaaatccgttaaa

SEQ ID NO: 552529 - DNA, 75 bp, synthetic construct
  source 1..75: mol_type = other DNA
catacccggctgagtgcgttatggacccgggaggaggctgtgctgacaacgcaaaaacgaaaatttgcgctggcg

SEQ ID NO: 552530 - DNA, 75 bp, synthetic construct
  source 1..75: mol_type = other DNA
gcccgtaaacagtgcgagacggtggaggtggatgaggttcctgtttaccggcagaaaaaatcagagcaggaggat

SEQ ID NO: 552531 - DNA, 75 bp, synthetic construct
  source 1..75: mol_type = other DNA
gaaaaagacatatttcatttaaaatctaatgtaattactacgaccatacagaaaatatcgataaaaactggtttt

SEQ ID NO: 552532 - DNA, 75 bp, synthetic construct
  source 1..75: mol_type = other DNA
atgcaggcattggtagaaacgttactacgccaggcaagactggagaatcgtcaggaagtcgttctgactgttgtt

SEQ ID NO: 552533 - DNA, 75 bp, synthetic construct
  source 1..75: mol_type = other DNA
gaatcggggcgctttcatcatgacggcaatcccatcatgacctggtgtatcggcaacgtggtcggcaaaaccatt

SEQ ID NO: 552534 - DNA, 75 bp, synthetic construct
  source 1..75: mol_type = other DNA
gccagcgccatcttgatgacctgatggaggaaaaaagtaagtcgtttcgttaccgcttcgacaaggacctggctg

SEQ ID NO: 552535 - DNA, 75 bp, synthetic construct
  source 1..75: mol_type = other DNA
aaaagatataaaaatagctacatctcttgatagaacaatttctgctgtaagagaggtggttattaaatgcaacga

SEQ ID NO: 552536 - DNA, 75 bp, synthetic construct
  source 1..75: mol_type = other DNA
gtgatgccgcgaaaaaagcggctaaccgttttgcggtgccaccgccaccccgacaggtggtgaataacgataatg

SEQ ID NO: 552537 - DNA, 75 bp, synthetic construct
  source 1..75: mol_type = other DNA
aaaatcggcaaaaggtgatgccgcgaaaaaagcggctaaccgttttgcggtgccaccacctccccgactggtggt

SEQ ID NO: 552538 - DNA, 75 bp, synthetic construct
  source 1..75: mol_type = other DNA
aatcgatggtgcggttgcgctgattatggcgatcggtcgggcaatgctcaaagaacccgacgatttcctctcatc

SEQ ID NO: 552539 - DNA, 75 bp, synthetic construct
  source 1..75: mol_type = other DNA
tataccgttgatgaaggtgacgactggaccgacccgcaggtgctggaaaaagccaatccaaatattggcgtgtcg

SEQ ID NO: 552540 - DNA, 75 bp, synthetic construct
  source 1..75: mol_type = other DNA
gtaccagtctcctgagcgtaaattgcaacgtgctctcgaaaaacggcaactttgtctctattaccagccaattgt

SEQ ID NO: 552541 - DNA, 75 bp, synthetic construct
  source 1..75: mol_type = other DNA
agcgttgttacgttggcctggtgagcaggggcaagtaatgaatccggcagagtttattccgctggcagaaaagga

SEQ ID NO: 552542 - DNA, 75 bp, synthetic construct
  source 1..75: mol_type = other DNA
tatcaacgaattgatctatgcccacgataacctttttttatgctcaacattaatggctcccgttaacggctatac

SEQ ID NO: 552543 - DNA, 75 bp, synthetic construct
  source 1..75: mol_type = other DNA
aatggctggctttctggctgggtggcgtcatgccgtaagcgttcgccgtgccagcatggaacaatcagtcgttac

SEQ ID NO: 552544 - DNA, 75 bp, synthetic construct
  source 1..75: mol_type = other DNA
aatggctggctttctggctgggtggcgtcatgccataagcgttcgccgtgccagcatggagcaatcagccgatac

SEQ ID NO: 552545 - DNA, 75 bp, synthetic construct
  source 1..75: mol_type = other DNA
aacagaacagcgatttgataatggtctgcagatttacgggtactcgccggaagatgtgagcaaggcacgaaataa

SEQ ID NO: 552546 - DNA, 75 bp, synthetic construct
  source 1..75: mol_type = other DNA
tgggatggatgacactatctgaattcgccgagatctgccggttgccagaatatgcagccaacatgaggccggtta

SEQ ID NO: 552547 - DNA, 75 bp, synthetic construct
  source 1..75: mol_type = other DNA
caataccacagccggacgaaaacaatccggagatgccaccgtccgcggtgatgtctcctggtattgaatatatgg

SEQ ID NO: 552548 - DNA, 75 bp, synthetic construct
  source 1..75: mol_type = other DNA
gcagttcacgcaccacaaaaaaggggatgccggtaaaaaatcggcaaaaggtgacgcggcgaaaaaagcggctaa

SEQ ID NO: 552549 - DNA, 75 bp, synthetic construct
  source 1..75: mol_type = other DNA
tggtactttgcaaaggcgatgccgccgcaggtttttatggcatgggcagagccagtacccgcgcatgacgtcatg

SEQ ID NO: 552550 - DNA, 75 bp, synthetic construct
  source 1..75: mol_type = other DNA
caccgacagcgatcgccagcttagtctctggatacagctgtatcgcaatatgtcaccttcttcacggtcgcaact

SEQ ID NO: 552551 - DNA, 75 bp, synthetic construct
  source 1..75: mol_type = other DNA
gtatgggggatggattttgtctccgatgcgctgtttgacggtcgccggcttcgcctgctgacggtaatcgatctc

SEQ ID NO: 552552 - DNA, 75 bp, synthetic construct
  source 1..75: mol_type = other DNA
gcagaaaaagacgcagacggaggagtgccatcaggaagcccctccggcggaaaagaacaccccggtttcactgcc

SEQ ID NO: 552553 - DNA, 75 bp, synthetic construct
  source 1..75: mol_type = other DNA
gttcaacaccaccatgaactccaccctgcaattaatgcctggtcaatggcaagacattaatctgacattgaaagg

SEQ ID NO: 552554 - DNA, 75 bp, synthetic construct
  source 1..75: mol_type = other DNA
cggtcggtttggcaggccgggtgctggctattgatgcggttgaaaatggcagtgttattcgtatttcgctggtta

SEQ ID NO: 552555 - DNA, 75 bp, synthetic construct
  source 1..75: mol_type = other DNA
aactggccaaaagaagtttaataacagattcatttcaatgctgacatccaaagttaattatcttttgtcaagaga

SEQ ID NO: 552556 - DNA, 75 bp, synthetic construct
  source 1..75: mol_type = other DNA
atttattgtgaccaagatgatatttggttagaaaacaaaatatttgaattagtaaagtatgcaaatgaaattaaa

SEQ ID NO: 552557 - DNA, 75 bp, synthetic construct
  source 1..75: mol_type = other DNA
taacgatgaactgttcgggatcatctataccgttgacgaaggcgacgactggaccgacccgcaggtacttgaaaa

SEQ ID NO: 552558 - DNA, 75 bp, synthetic construct
  source 1..75: mol_type = other DNA
ggtgaaagaccgggtgatataaaagaatatgccaaatggcaacagctactatttagtaccaccatgaactccacg

SEQ ID NO: 552559 - DNA, 75 bp, synthetic construct
  source 1..75: mol_type = other DNA
ggtgtctcccaacaacctgaaatacctgaagttggctattaatatgcagaatatcaacttcgacaaccttccacc

SEQ ID NO: 552560 - DNA, 75 bp, synthetic construct
  source 1..75: mol_type = other DNA
ccctgtttttcctgaatcactggtgatgttattgctctctgttctggacgtaaaaacatacagagatgatgcgcg

SEQ ID NO: 552561 - DNA, 75 bp, synthetic construct
  source 1..75: mol_type = other DNA
gtcggaaaatactcatctgaggcacttgacttattgcgaaaattaataaacggggaacagtttgagttaaaccca

SEQ ID NO: 552562 - DNA, 75 bp, synthetic construct
  source 1..75: mol_type = other DNA
taacggttctgtcggattagcaggacgagttatatctatagaacctgcagataatggtagcgtcatccatatagc

SEQ ID NO: 552563 - DNA, 75 bp, synthetic construct
  source 1..75: mol_type = other DNA
gttgtcacatgaccttgctgatgaagacctgaatcccgtcactatcgtccagaacttcaccaatatgtccgaccc

SEQ ID NO: 552564 - DNA, 75 bp, synthetic construct
  source 1..75: mol_type = other DNA
agatggcgcggtaggactaatgatgggagtcgggcgagccatgctgaacggaactgtcagtaaatcggcttatga

SEQ ID NO: 552565 - DNA, 75 bp, synthetic construct
  source 1..75: mol_type = other DNA
ttgcttttattaatgctctcaatctatataaaaaatcctcttgagctaacttcttttcctacaatcctgttgatt

SEQ ID NO: 552566 - DNA, 75 bp, synthetic construct
  source 1..75: mol_type = other DNA
aacggcgtcattctgaccgctttagatatcaggcgctatgtgaagaaaatgattgaaggttcgttcccgtcagtc

SEQ ID NO: 552567 - DNA, 75 bp, synthetic construct
  source 1..75: mol_type = other DNA
aaagcggctaaccgttttgcggtgccaccgccaccccgactggtggtgaataacgataatgagggcaacggatga

SEQ ID NO: 552568 - DNA, 75 bp, synthetic construct
  source 1..75: mol_type = other DNA
ctgtggcgccactactgaaaaacaagcctggaaagtcttctctcccgctctacaaatggtaaaaaaactcccggc

SEQ ID NO: 552569 - DNA, 75 bp, synthetic construct
  source 1..75: mol_type = other DNA
tcatacggccggtgaatgggccaggaagaaactacgaatagaatttgagccctggcaaaagtttgcccttggtgt

SEQ ID NO: 552570 - DNA, 75 bp, synthetic construct
  source 1..75: mol_type = other DNA
ccgtcaaagagcaggcggaaaacaaaattgacggtgcagttgcgctgattatggcggttgaatggtctgccgtct

SEQ ID NO: 552571 - DNA, 75 bp, synthetic construct
  source 1..75: mol_type = other DNA
atgagccggaaatcttaccccaacgtaaatgcagccaatcagtatgcccgtgatgtcgtgcgcggaaagattgtt

SEQ ID NO: 552572 - DNA, 75 bp, synthetic construct
  source 1..75: mol_type = other DNA
gttgccacacaccaagggggagtgggcattcaagaggatgcccatcacgctggagccgtggcagctctttgtgat

SEQ ID NO: 552573 - DNA, 75 bp, synthetic construct
  source 1..75: mol_type = other DNA
tatgtggcaatttgacatgccatttagtgaggcacttagcctgttttctgtattgtctgtcggtgatgctttggt

SEQ ID NO: 552574 - DNA, 75 bp, synthetic construct
  source 1..75: mol_type = other DNA
ttctggcggtttgcctgttggggatagcctggaaattacagaagaaaagaacatttggaactggcaataataagg

SEQ ID NO: 552575 - DNA, 75 bp, synthetic construct
  source 1..75: mol_type = other DNA
gtgttagtacaaccagacttattctgctgcatcacgatgcgggtgacattatttactccttcggtaactttgttg

SEQ ID NO: 552576 - DNA, 75 bp, synthetic construct
  source 1..75: mol_type = other DNA
agaaggcatttacaaagacagcaaaatatcaagtgtaatggaatactccagatcaattcatgctgaaatggacgt

SEQ ID NO: 552577 - DNA, 75 bp, synthetic construct
  source 1..75: mol_type = other DNA
ttgatcggtttttcggtcttattcatggcaaaaatggtttaacaccaacttttaacgagaaaggtatgtatgctg

SEQ ID NO: 552578 - DNA, 75 bp, synthetic construct
  source 1..75: mol_type = other DNA
ataatgatgaatataaaggtactgtcttcatcattgatcaattcaaaaggccggaagaaatagagttattcagag

SEQ ID NO: 552579 - DNA, 75 bp, synthetic construct
  source 1..75: mol_type = other DNA
caagcagattgcaaccgatgatgaattaaaggaattgcaaaaagaactcatcggaactcccgataaaggtgatct

SEQ ID NO: 552580 - DNA, 75 bp, synthetic construct
  source 1..75: mol_type = other DNA
atgggcaaggcgataatatttatagagacgccaatgtttacgcgtcagatcaagcagattgcaaccgatgatgaa

SEQ ID NO: 552581 - DNA, 75 bp, synthetic construct
  source 1..75: mol_type = other DNA
tatgctcgtttcaatgttgttgaactccggtcatggcattttcagcgataacgatgaacaagaaacgaaagctga

SEQ ID NO: 552582 - DNA, 75 bp, synthetic construct
  source 1..75: mol_type = other DNA
tcgtgatcagtccctccgctgtcgaacgcatgttagtcactctcgctaccgggcgcggtttgatgttggtggggg

SEQ ID NO: 552583 - DNA, 75 bp, synthetic construct
  source 1..75: mol_type = other DNA
ttctatttgtatcaacgattatactttttgggatatatcgttcagattataatgtcgaatcaagcataagattat

SEQ ID NO: 552584 - DNA, 75 bp, synthetic construct
  source 1..75: mol_type = other DNA
cagtatttaaactcatatcgtcaattaaaatatatcctgaggaatatggagattacgacatcactagacagcatg

SEQ ID NO: 552585 - DNA, 75 bp, synthetic construct
  source 1..75: mol_type = other DNA
actgccaatacccgcgatcgcggcgtcaatgaaatgagtgccgcgctaaagcgtcgcttcgattttgaaactgtc

SEQ ID NO: 552586 - DNA, 75 bp, synthetic construct
  source 1..75: mol_type = other DNA
cagcgattatgtccaccgctgaagccgttaacgtagcacacgccgtgggtttccgcgcctggtttttagcgaatc

SEQ ID NO: 552587 - DNA, 75 bp, synthetic construct
  source 1..75: mol_type = other DNA
atgcgcgacggcaaaatcgtccgttttgaagagataacgcgtacaccgctggaagtacaagactgtctgttaggt

SEQ ID NO: 552588 - DNA, 75 bp, synthetic construct
  source 1..75: mol_type = other DNA
agggaaaaagtggtagtgtcagaataatttactttctggcgacggaagagattatttatttgattatggcctatc

SEQ ID NO: 552589 - DNA, 75 bp, synthetic construct
  source 1..75: mol_type = other DNA
atgaaaagctctttatgcgggttgagcaaccatcttaatcacgaaaattttccttggtgtgcactttttaatatg

SEQ ID NO: 552590 - DNA, 75 bp, synthetic construct
  source 1..75: mol_type = other DNA
gggcatagcgatataaaaatgactatgcgttatgcacactttgcgccgggtcatttagaggctgctgttgaactg

SEQ ID NO: 552591 - DNA, 75 bp, synthetic construct
  source 1..75: mol_type = other DNA
ggtgccaggtggagtgaagcagagggattaaagcaatctcaaatactgcccggacgaatcacatttgttaaaacc

SEQ ID NO: 552592 - DNA, 75 bp, synthetic construct
  source 1..75: mol_type = other DNA
tacccctaaagcacgagagatttttgaggctgatttgcggtctgcacgtagaggggcagggtttggagctatatt

SEQ ID NO: 552593 - DNA, 75 bp, synthetic construct
  source 1..75: mol_type = other DNA
tgttggtcgtaatccgaacacaggaaagctgcaacaacacctgcaaaatggttatgaaagattgcaaacaggtga

SEQ ID NO: 552594 - DNA, 75 bp, synthetic construct
  source 1..75: mol_type = other DNA
tttcaggatggttctggcccccgcctttccgagttggttgctcgctggtttgagatgtacggtaagacactgtct

SEQ ID NO: 552595 - DNA, 75 bp, synthetic construct
  source 1..75: mol_type = other DNA
caaaaaatccggtcacttctggtcttgcagtggttatcccaattgtaaagagtcgtacccagatattaaaggtag

SEQ ID NO: 552596 - DNA, 75 bp, synthetic construct
  source 1..75: mol_type = other DNA
ggttgatgaaatccttgatgacatgggatgtactaaaccggttctgcgttactggtgtaatgcgaatgatacggt

SEQ ID NO: 552597 - DNA, 75 bp, synthetic construct
  source 1..75: mol_type = other DNA
atccacgccatgaccaactcgttcatctaatcgcagaacgcggttatatgaatattgaagaactggcacaactgc

SEQ ID NO: 552598 - DNA, 75 bp, synthetic construct
  source 1..75: mol_type = other DNA
cagaagtacggcagaggactaaggttatcacccttagagtaaataacagaatcgcaaacgaaatcagacggcgag

SEQ ID NO: 552599 - DNA, 75 bp, synthetic construct
  source 1..75: mol_type = other DNA
acgtggttttattgaaaacaaaggcaaagacattatcagtaccaagctgggaagggggctgatagccattctgcc

SEQ ID NO: 552600 - DNA, 75 bp, synthetic construct
  source 1..75: mol_type = other DNA
aaattgagcagggcaaacgtgacgttgattcctttgtgaagatgcaggaaaaatttgtacgagatcagattaagg

SEQ ID NO: 552601 - DNA, 75 bp, synthetic construct
  source 1..75: mol_type = other DNA
caaaaaaagaataaatcatcatggtttaatttttatttgtcacttgcaggtatcattattatttatttcgtattg

SEQ ID NO: 552602 - DNA, 75 bp, synthetic construct
  source 1..75: mol_type = other DNA
ctccgacacatgaccgtcacttttttggcggtgatgcgacaagctttgagcagattgaagcggcagatatttttt

SEQ ID NO: 552603 - DNA, 75 bp, synthetic construct
  source 1..75: mol_type = other DNA
aggactagattatataagataatgggctgtagttcgcatgaaatggtgcagctcccaatagagatagaggttagc

SEQ ID NO: 552604 - DNA, 75 bp, synthetic construct
  source 1..75: mol_type = other DNA
taagcatgcagctagtaatggtgggaagccaagtttagttaagtatcaagaacgtacggaggaagtggcattcga

SEQ ID NO: 552605 - DNA, 75 bp, synthetic construct
  source 1..75: mol_type = other DNA
tgcgtaacgtactacaacaaatcaaacaagaggcaaaccatcttcgtaagcgtcaacggagcaccgtattgacgc

SEQ ID NO: 552606 - DNA, 75 bp, synthetic construct
  source 1..75: mol_type = other DNA
gggcggttatgagacttcttcagtcattccggggaagctatgggagttcaaaacaggtaatgcaatctgtttcag

SEQ ID NO: 552607 - DNA, 75 bp, synthetic construct
  source 1..75: mol_type = other DNA
accggtaaaaatcatgctggttggacgtgaaaccgcaggctggaatacgctgaatggtaagaatacgatatcacg

SEQ ID NO: 552608 - DNA, 75 bp, synthetic construct
  source 1..75: mol_type = other DNA
gcggcagtggctcatgctttctacggtttaccgaatgtgaaagtggttatcctctatccacgaggcaaaatcagt

SEQ ID NO: 552609 - DNA, 75 bp, synthetic construct
  source 1..75: mol_type = other DNA
tactttgaggctgtcgcacagttgccgcaagaagcacgtaaccagttggttgtctcggtaccgagtggaaacttc

SEQ ID NO: 552610 - DNA, 75 bp, synthetic construct
  source 1..75: mol_type = other DNA
ggtgaagcaggcgtttgatgatgaagaactgaaagtggcgctggggttaaactcagctaactcgattaacatcag

SEQ ID NO: 552611 - DNA, 75 bp, synthetic construct
  source 1..75: mol_type = other DNA
tctccggctccggcccgaccttgttcgctctatgtgacaagccggataccgcccagcgcgttgccgactggttgg

SEQ ID NO: 552612 - DNA, 75 bp, synthetic construct
  source 1..75: mol_type = other DNA
ccggaaagtctggcaactgaaagagctgggttatgcagcggtggatgatgaaaccacgcaacagacgatgcgcga

SEQ ID NO: 552613 - DNA, 75 bp, synthetic construct
  source 1..75: mol_type = other DNA
ttcgtcacccgtagcgcgaagatcctttcggcgtttattggtgatgagatcccgcaggacgcactggaagagcgc

SEQ ID NO: 552614 - DNA, 75 bp, synthetic construct
  source 1..75: mol_type = other DNA
gaacagcatgaagatttaaaaagtcatgagttggtgtcgctggtcaaagaaagtgagatggagtctctttcctta

SEQ ID NO: 552615 - DNA, 75 bp, synthetic construct
  source 1..75: mol_type = other DNA
ccgtcgagtacggcgagtggcgtaccggcgttcgttcggaaggaacggtctacaccggcttcaccttctttcgca

SEQ ID NO: 552616 - DNA, 75 bp, synthetic construct
  source 1..75: mol_type = other DNA
ccgtcgagtacggcgagtggcgcaccggtgtgcgttcggaaggtacggtctacaccggcttcaccttctttcgca

SEQ ID NO: 552617 - DNA, 75 bp, synthetic construct
  source 1..75: mol_type = other DNA
tgaaggaatgataatactcgtcgatcctgaagtagagccgcgtaacgggaaactggtagttgcaaagctcgaagg

SEQ ID NO: 552618 - DNA, 75 bp, synthetic construct
  source 1..75: mol_type = other DNA
gttcccgattttcggtgcgggctgggatcgcctgatgggacgtcagaacgagacggtaaaagtgaccacctttaa

SEQ ID NO: 552619 - DNA, 75 bp, synthetic construct
  source 1..75: mol_type = other DNA
gtcaccattgtggcgatgggttgcttctacagcctgaacgagaagatgtatgtccgcattgtggaagagatagaa

SEQ ID NO: 552620 - DNA, 75 bp, synthetic construct
  source 1..75: mol_type = other DNA
aacgcgtgttgggcggtaaagctggcgcacgatggcgtgttatccctcaatcaatgtgatgaggggatgccatga

SEQ ID NO: 552621 - DNA, 75 bp, synthetic construct
  source 1..75: mol_type = other DNA
tacgtttttatccacgttatgaaggtaatttgcgcgacgtattatcgattatcgctaacgacattgcctatgtac

SEQ ID NO: 552622 - DNA, 75 bp, synthetic construct
  source 1..75: mol_type = other DNA
ctgtttgattttgcgaatatgatcaatgcaaatgagcatcccatagacgccttaaaaacgatggcaccgcatatt

SEQ ID NO: 552623 - DNA, 75 bp, synthetic construct
  source 1..75: mol_type = other DNA
atgagtcacatcacaacggaagatccagcaactttacgcctgccctttaaagagaaactcttttacggtattggc

SEQ ID NO: 552624 - DNA, 75 bp, synthetic construct
  source 1..75: mol_type = other DNA
atgtgctacacttttatacaaacctatgataaaagcgataaaaaatcttccattttggcgaacattatgacggat

SEQ ID NO: 552625 - DNA, 75 bp, synthetic construct
  source 1..75: mol_type = other DNA
tctggcagaaggaatatgcgctggagctgcaacgtcgtcgcctgacgctgcacgatattgaactggagctgcaaa

SEQ ID NO: 552626 - DNA, 75 bp, synthetic construct
  source 1..75: mol_type = other DNA
aggatctgcagggcatggaaggcgataaccttctccgtgagctgctgcgcaccaccgccctgctgaactggcaga

SEQ ID NO: 552627 - DNA, 75 bp, synthetic construct
  source 1..75: mol_type = other DNA
cttcacgttttagtaccgccctgcaagataatggcgcgacttctttaccttatctgcccgtcatcattcacagca

SEQ ID NO: 552628 - DNA, 75 bp, synthetic construct
  source 1..75: mol_type = other DNA
atgcgtttttctcaccgactgttcttactgctgattctcctgctgacgggagcaccaatactcgctcaggagcct

SEQ ID NO: 552629 - DNA, 75 bp, synthetic construct
  source 1..75: mol_type = other DNA
tactgtgcgcttatagcggtggttggattttccgggatgttcgttatctccattcactcattttcgatggatgaa

SEQ ID NO: 552630 - DNA, 75 bp, synthetic construct
  source 1..75: mol_type = other DNA
atgtttgttatccctgaaaaattcagtctgcaggtcagcagaggaaaaacattagcttgtagtgcgcttattggg

SEQ ID NO: 552631 - DNA, 75 bp, synthetic construct
  source 1..75: mol_type = other DNA
ataatatcgactggtttatatgcctgtgcctctttcttgtggttatctgtgttgttaacgcactggctatgtttg

SEQ ID NO: 552632 - DNA, 75 bp, synthetic construct
  source 1..75: mol_type = other DNA
gtacattttttgagatttatattgctgctctattgaaagtaatgcttccgaatgaagttttttcaaagcatatcc

SEQ ID NO: 552633 - DNA, 75 bp, synthetic construct
  source 1..75: mol_type = other DNA
ctgaatttcaggatttttctcttcaaccgaaccggctgtttgtgtgaagtgattcacatccgccgtgtcgatgga

SEQ ID NO: 552634 - DNA, 75 bp, synthetic construct
  source 1..75: mol_type = other DNA
gctttcctctttcagagtcaaccctgaatttcaggatttttctcttcaaccgaaccggctgtttgtgtgaagtga

SEQ ID NO: 552635 - DNA, 75 bp, synthetic construct
  source 1..75: mol_type = other DNA
aattaacaaaatcagagaagcaattcctgatgaatataaaacaattttctatccacatctcaaaattgcttgtta

SEQ ID NO: 552636 - DNA, 75 bp, synthetic construct
  source 1..75: mol_type = other DNA
ccaatgggatcgaaatgaaaaacttgaagaaatgcttaaaaaattagcataccaattgcctaaggatagtacaat

SEQ ID NO: 552637 - DNA, 75 bp, synthetic construct
  source 1..75: mol_type = other DNA
gaacattttttgaaattttcatggcagcagtattaaagttgatgattcctgatgagcttttctcaaagcacatac

SEQ ID NO: 552638 - DNA, 75 bp, synthetic construct
  source 1..75: mol_type = other DNA
tgatgcttccggggcgatcaactattccatcaatgcatatattgaagtgtttgatcaaattacctggggcgcact

SEQ ID NO: 552639 - DNA, 75 bp, synthetic construct
  source 1..75: mol_type = other DNA
atattgaacagcttaaaacaacctgtacgctgccgactcttgccaatgcgctgaaagaaaaaaaagcagaatggt

SEQ ID NO: 552640 - DNA, 75 bp, synthetic construct
  source 1..75: mol_type = other DNA
gcgatcctgagaaagggattaaatatccccttttcgataatgcactttatccggatatcgcgatccttgatccat

SEQ ID NO: 552641 - DNA, 75 bp, synthetic construct
  source 1..75: mol_type = other DNA
gtttatcgacccggttgccatgtcgcaaattacgcgcattgaaatccccggcgtgaccggcgtattaaccggtat

SEQ ID NO: 552642 - DNA, 75 bp, synthetic construct
  source 1..75: mol_type = other DNA
aactgcggcgcgcactcaataccgtactggtgccgcgtgcgcagaatctgccgctgttcttttcagaggggacct

SEQ ID NO: 552643 - DNA, 75 bp, synthetic construct
  source 1..75: mol_type = other DNA
tctggcaggaagggctgtttgccctgccgcagcattttcagcaacagcagcgtcattgcgagtacctgctgaacc

SEQ ID NO: 552644 - DNA, 75 bp, synthetic construct
  source 1..75: mol_type = other DNA
ctgaaagaaaaaagcagaatggtcaatacgcataccagatatggttcaggcagcgctggcggatgcaacgttgcg

SEQ ID NO: 552645 - DNA, 75 bp, synthetic construct
  source 1..75: mol_type = other DNA
ttcagcgcctactgttcgctggtgtatgtcacgccgatcctcggaggtttcctggcagataaagttctcggcaac

SEQ ID NO: 552646 - DNA, 75 bp, synthetic construct
  source 1..75: mol_type = other DNA
cgcgtcgtgatggcggtttctcgctgatgtatgcggcaggtaacgtgggttctattatcgcccctatcgcctgtg

SEQ ID NO: 552647 - DNA, 75 bp, synthetic construct
  source 1..75: mol_type = other DNA
ttcagtgcctactgttcactggtatatgtcacgccaattcttggcggtttcctggccgataaagtgctcggcaac

SEQ ID NO: 552648 - DNA, 75 bp, synthetic construct
  source 1..75: mol_type = other DNA
gcgatgggctttggcctggcggcggtgggtatgatcgcgggtctggtcattttcttatgtggcaatcgtcatttc

SEQ ID NO: 552649 - DNA, 75 bp, synthetic construct
  source 1..75: mol_type = other DNA
ctgattaccgtactgttctggaaagagtggtcggtatacgccttaattgtcgcgactattattggcctgggtgta

SEQ ID NO: 552650 - DNA, 75 bp, synthetic construct
  source 1..75: mol_type = other DNA
gttggtatgatcgcgggcctggtcattttcttatgtggcaatcgtcattttgctcatacccgcggcgttaacaaa

SEQ ID NO: 552651 - DNA, 75 bp, synthetic construct
  source 1..75: mol_type = other DNA
ttgtgtataattgcggcctttttcggcaatctgccgttttttggcgcttttgccctgctgacttttgaggaaatc

SEQ ID NO: 552652 - DNA, 75 bp, synthetic construct
  source 1..75: mol_type = other DNA
tcgcattttgtagcggcattggcaccgttagtggggcagaggcaatgagtgctgtaagaacacaagaatctggaa

SEQ ID NO: 552653 - DNA, 75 bp, synthetic construct
  source 1..75: mol_type = other DNA
aaactctgttaaaaatgagtctggcgattacggtgtgttacacgttggcattgctggttgctctcaccagaatcg

SEQ ID NO: 552654 - DNA, 75 bp, synthetic construct
  source 1..75: mol_type = other DNA
aactgttatttggccctctgagcgacaaaataggacgtaaacgtccgttaatcttgtcgttgctattgtttattg

SEQ ID NO: 552655 - DNA, 75 bp, synthetic construct
  source 1..75: mol_type = other DNA
ataacggtcgggaagagttgattgattttaatcccgatcatgatttagcgcacattatcaaatcataccggacac

SEQ ID NO: 552656 - DNA, 75 bp, synthetic construct
  source 1..75: mol_type = other DNA
atgagcattatctccaccaaatatctgttacaggatgccctggccaatggttacgctgtgcctgcctttaacatt

SEQ ID NO: 552657 - DNA, 75 bp, synthetic construct
  source 1..75: mol_type = other DNA
catgtttgtctttggcggtatagccgcgccgttatcgggggtaggtggggaaactctgttaaaaatgagcctggc

SEQ ID NO: 552658 - DNA, 75 bp, synthetic construct
  source 1..75: mol_type = other DNA
gatattcctgggtttttgtacctttatggaacacgaactggttgcgaaagagacggatggacggccttatcgtta

SEQ ID NO: 552659 - DNA, 75 bp, synthetic construct
  source 1..75: mol_type = other DNA
tgcctgatcccgcgataggctatatcttccagaatgatattgtggcgttaaagcaggcattttcactgcctgggt

SEQ ID NO: 552660 - DNA, 75 bp, synthetic construct
  source 1..75: mol_type = other DNA
ttgcaaaagtcccgtgttatcagagctcataccatttgtcgtattccagatgactattttcagccattaggtacg

SEQ ID NO: 552661 - DNA, 75 bp, synthetic construct
  source 1..75: mol_type = other DNA
ttctattgctcgtgacaaatatcagggggtaacgctgacccagttctttgcactgttaatgacggtgaatggcct

SEQ ID NO: 552662 - DNA, 75 bp, synthetic construct
  source 1..75: mol_type = other DNA
tgggatcgcagttatgcttcccgtgcaaaaaatcactggcgtaaggtagatccagacagttttgagattttaggg

SEQ ID NO: 552663 - DNA, 75 bp, synthetic construct
  source 1..75: mol_type = other DNA
gtatcactccaaccgaaggcgcattttttgagccggtaacagttgggctgcatgcaatgaagctggctggaggag

SEQ ID NO: 552664 - DNA, 75 bp, synthetic construct
  source 1..75: mol_type = other DNA
tgctgtacagggaaatattgatacttatgttgatgctgtgaagacgcttaatgggaatccaatgaacggaaagat

SEQ ID NO: 552665 - DNA, 75 bp, synthetic construct
  source 1..75: mol_type = other DNA
atcgtgcgctgtccaatattggcaacagccgcagcattaacagcctgacggaagccagcaaggaagcgggggaat

SEQ ID NO: 552666 - DNA, 75 bp, synthetic construct
  source 1..75: mol_type = other DNA
gaccataacatcgattgcaaaatcgacggttttggtccgatgaaactgaaatctgagtttgtgaaaaagaactga

SEQ ID NO: 552667 - DNA, 75 bp, synthetic construct
  source 1..75: mol_type = other DNA
ggcgctgccgtggccactccgttgctggtagccgagatcgcgccggacttcgctgaggccgcaccggcagccacc

SEQ ID NO: 552668 - DNA, 75 bp, synthetic construct
  source 1..75: mol_type = other DNA
ctgtatgggcgcctccattaaaatcagtgcaaccgggaccgttctcaaaaagtctggcacactggtagccacaaa

SEQ ID NO: 552669 - DNA, 75 bp, synthetic construct
  source 1..75: mol_type = other DNA
ccgagcaactggcacaggcgctggcagagcaaaacggcgtggcgtgggaatccatcgatgcctggcagatccctt

SEQ ID NO: 552670 - DNA, 75 bp, synthetic construct
  source 1..75: mol_type = other DNA
accgcgcgctgagcaatatcggcaacagtcgcagcattaacagcctgaatgaagccagcaaagaggccgggcagt

SEQ ID NO: 552671 - DNA, 75 bp, synthetic construct
  source 1..75: mol_type = other DNA
atttccgtcgatctttcccggctttctgcctatcgcctgcgtgaagcccaggccgaaggccaatattgtactgcc

SEQ ID NO: 552672 - DNA, 75 bp, synthetic construct
  source 1..75: mol_type = other DNA
gccctgacgcgtaaagtcggacgcaaagtgcgttacgtcattgttctgcggggacaaattgtcaccggattacgc

SEQ ID NO: 552673 - DNA, 75 bp, synthetic construct
  source 1..75: mol_type = other DNA
aatgcggttcagcatcagtggctcacggaacagcagaccggtgaaatctggcggcaatatgtgccgcatcagttc

SEQ ID NO: 552674 - DNA, 75 bp, synthetic construct
  source 1..75: mol_type = other DNA
cggccctgacgcgtaaagtcggacgcaaagtgcgttacgtcattgttctgcggggacaaattgtcacggggttac

SEQ ID NO: 552675 - DNA, 75 bp, synthetic construct
  source 1..75: mol_type = other DNA
acagacaacaggggatttgaggccgacagggtgacactggaaatcgacgacgctgacggtgaggtggttcttccg

SEQ ID NO: 552676 - DNA, 75 bp, synthetic construct
  source 1..75: mol_type = other DNA
atgacgtgacggtggagcgcgtggtgtctgccattgcccaccgttacggactgaaggcacaaatcagcgagatgt

SEQ ID NO: 552677 - DNA, 75 bp, synthetic construct
  source 1..75: mol_type = other DNA
gacccaggagacatttggtaacgagcactgggcgccaaaaggcattgaaatcgtctcttatcaggggcaggacaa

SEQ ID NO: 552678 - DNA, 75 bp, synthetic construct
  source 1..75: mol_type = other DNA
aggacggcgacagtcaccgctttaccctggcagatcgcggagcttacacgggggtaattgccagctggttgcata

SEQ ID NO: 552679 - DNA, 75 bp, synthetic construct
  source 1..75: mol_type = other DNA
gatctggagctggacgacgccgacggaaaaatcgtgctgccgcgccgtggtgcggtcattacgctggcgctgggc

SEQ ID NO: 552680 - DNA, 75 bp, synthetic construct
  source 1..75: mol_type = other DNA
cagcgacggtgatcaacatcgcttccgtatcgctgaccggcaggcatacacaggggtacgggcatactggctgga

SEQ ID NO: 552681 - DNA, 75 bp, synthetic construct
  source 1..75: mol_type = other DNA
gcaaatcaaaccgcgccattggtgtggcgctgaacgataccgcctgtaaagtgttgcgtgatcaaataggcaagc

SEQ ID NO: 552682 - DNA, 75 bp, synthetic construct
  source 1..75: mol_type = other DNA
gttgcccgtaaggttctgcgcgctgttcgtgacaccgtggtctctgttgcccgcgcggtatggaactggattttc

SEQ ID NO: 552683 - DNA, 75 bp, synthetic construct
  source 1..75: mol_type = other DNA
ctgatgcacaaacaacattacgtagcgggttaggtggtgtactgatgggcttcggtgccagtattgcaggtggtt

SEQ ID NO: 552684 - DNA, 75 bp, synthetic construct
  source 1..75: mol_type = other DNA
ctggacctggtactgtggctgattaaagccgatgaccgtgccctgtctgtggatgagtatttctggcgacacatc

SEQ ID NO: 552685 - DNA, 75 bp, synthetic construct
  source 1..75: mol_type = other DNA
cgaagagaaagcacataaaaaatcactggacgatgacaaaagccggatcggattctggcttcaacatttcgcagg

SEQ ID NO: 552686 - DNA, 75 bp, synthetic construct
  source 1..75: mol_type = other DNA
gcggtgcggctgagttctccatcacactggcacgcggtcgccccgacctgtaccccgaaatgcgcggcacggtat

SEQ ID NO: 552687 - DNA, 75 bp, synthetic construct
  source 1..75: mol_type = other DNA
aaatgcaccgaagaacatcaggcaattgtgcgtaagtggctggaagagcgcaaactggatgaggtacgcaccagc

SEQ ID NO: 552688 - DNA, 75 bp, synthetic construct
  source 1..75: mol_type = other DNA
ttgtgcgtaagtggctggaagaacgcaaactggaagaggtacgcaccagcgaacttttcgacgtttggtgggact

SEQ ID NO: 552689 - DNA, 75 bp, synthetic construct
  source 1..75: mol_type = other DNA
tcatttctactatgtttatgattttgttgattgtagcttataatcttaaaggtgcattgattgccacggctataa

SEQ ID NO: 552690 - DNA, 75 bp, synthetic construct
  source 1..75: mol_type = other DNA
atgcataaatcagaagctgaaaaaatagattctattctggatgaacatcaacagatatatcgcagacataaccaa

SEQ ID NO: 552691 - DNA, 75 bp, synthetic construct
  source 1..75: mol_type = other DNA
ctttacgctatattgattcaaccgcttcactcgttcgcgcaggaataaaatggtatgaaaatcgtatcggaaaag

SEQ ID NO: 552692 - DNA, 75 bp, synthetic construct
  source 1..75: mol_type = other DNA
aacccgaattggcttgttagccaccaatgccacgctatatatgggtttataccaaaaaggaattgagtcgctggg

SEQ ID NO: 552693 - DNA, 75 bp, synthetic construct
  source 1..75: mol_type = other DNA
aggcccgtgaacagtttaccggtgcggtggaccggatatttgacacagcggagagcgtctgtgttgcctctgttg

SEQ ID NO: 552694 - DNA, 75 bp, synthetic construct
  source 1..75: mol_type = other DNA
atcaggactggattattgcaaaagccgagcacaccattgataacagtggctttaccacgcagcttgagcttgagg

SEQ ID NO: 552695 - DNA, 75 bp, synthetic construct
  source 1..75: mol_type = other DNA
ggccagccgttgccatcgttcgccatcacacgcagcagcggcgatcgccatcagttccgcattgctgaccgcgaa

SEQ ID NO: 552696 - DNA, 75 bp, synthetic construct
  source 1..75: mol_type = other DNA
aatattgattgctaaaactggttgggaggatgcagggcaatggcaggccgtatggaagatatctgaggtttatct

SEQ ID NO: 552697 - DNA, 75 bp, synthetic construct
  source 1..75: mol_type = other DNA
ctttatgcataccctcttcaaagtcaggggcatactaaactattcatcagttcagaagtgattttttctatgctc

SEQ ID NO: 552698 - DNA, 75 bp, synthetic construct
  source 1..75: mol_type = other DNA
tagctatatatttataaagtattataatgtacaaggagcaaatattgcatatatgttaacttactttatttattt

SEQ ID NO: 552699 - DNA, 75 bp, synthetic construct
  source 1..75: mol_type = other DNA
atgcagcgtgggcgtttttgcctgacaggtggttttcgcgatatgtatatcgcgaaaaataatcgcatgttttac

SEQ ID NO: 552700 - DNA, 75 bp, synthetic construct
  source 1..75: mol_type = other DNA
tgtggttcagcgctctcccttaagtcgaggcatggcaacatactggattctgaaaggagagaggcaggcgggaca

SEQ ID NO: 552701 - DNA, 75 bp, synthetic construct
  source 1..75: mol_type = other DNA
tgtggttcagcgctctcccttaagacgaggcatggcaacatactggattctgaaaggagagaggcaggcgggtca

SEQ ID NO: 552702 - DNA, 75 bp, synthetic construct
  source 1..75: mol_type = other DNA
catgatttttattattcgaagaaactttgttacagtgagatgagtgaatatatgaagaatgaaatactggaattt

SEQ ID NO: 552703 - DNA, 75 bp, synthetic construct
  source 1..75: mol_type = other DNA
tgtggttcagcgctctcccttaagccgaggcatggcaacatactggcttctgaaaggagagaggcaggcgggtca

SEQ ID NO: 552704 - DNA, 75 bp, synthetic construct
  source 1..75: mol_type = other DNA
tgtggttcagcgctctcccttaagtcgaggcatggcaacatactgggttctgaaaggagagaggcaggcggggca

SEQ ID NO: 552705 - DNA, 75 bp, synthetic construct
  source 1..75: mol_type = other DNA
tgtggttcagcgctctcccttaagtcgaggcatggcaacatactggcttctgaaaggagagaggcaggcgggcca

SEQ ID NO: 552706 - DNA, 75 bp, synthetic construct
  source 1..75: mol_type = other DNA
aaaagtactttgctgaaacagttaattagaaaaataaaagaagaatattcttacgaaaaagactacatccttcca

SEQ ID NO: 552707 - DNA, 75 bp, synthetic construct
  source 1..75: mol_type = other DNA
atgtcgtcaaccctacgagaagccactaaggacacgttgcaggctaaagataaaacctaccattactacagtctg

SEQ ID NO: 552708 - DNA, 75 bp, synthetic construct
  source 1..75: mol_type = other DNA
acatcagtatcagttacctgatggcgctgttgtcattgctgcgataacgtcgtgcaccaacacctctaacccaag

SEQ ID NO: 552709 - DNA, 75 bp, synthetic construct
  source 1..75: mol_type = other DNA
tcatggagtacttttatgctgaaggcttaaggaagaaaggatttgtagatataaatgataaaatatatgaaattt

SEQ ID NO: 552710 - DNA, 75 bp, synthetic construct
  source 1..75: mol_type = other DNA
tagagtctttgcaacgtgaagttgatgatttccatccagttttaagagcactttttccaaaattgccaacagtga

SEQ ID NO: 552711 - DNA, 75 bp, synthetic construct
  source 1..75: mol_type = other DNA
tttatttcttctggctctaagaacatacatttgaatgaaatttgggttattactaattcatcgatctcaaataat

SEQ ID NO: 552712 - DNA, 75 bp, synthetic construct
  source 1..75: mol_type = other DNA
tgtggttcagcgctctcccttaaggcgaggcatggcaacatactgggttctgaaaggagagaggcaggcgggtca

SEQ ID NO: 552713 - DNA, 75 bp, synthetic construct
  source 1..75: mol_type = other DNA
gacctctatttttggtccgcttatccgcggtggattcaacaaacttgtaaaaggaaacaatcatacgatgcatcg

SEQ ID NO: 552714 - DNA, 75 bp, synthetic construct
  source 1..75: mol_type = other DNA
ctatcgcctgttattgatgaactggataaggcaatggatattatcgaaaataataaagcgccccacaccggagaa

SEQ ID NO: 552715 - DNA, 75 bp, synthetic construct
  source 1..75: mol_type = other DNA
aatgcttgccgccgttcagacattactatcgcctgtaattgatgaactggataaggcgatggcaattcacgaaaa

SEQ ID NO: 552716 - DNA, 75 bp, synthetic construct
  source 1..75: mol_type = other DNA
ttcctgacgacatcagcgaaccgcatctcggcgaaggcaaaatgccatctttcggattcagcctgtcgctgatcc

SEQ ID NO: 552717 - DNA, 75 bp, synthetic construct
  source 1..75: mol_type = other DNA
gaagacgattgccgcgcgttttgtaccggagggctctaccgcttacgaatggttcgagtttatcggtcacccgtt

SEQ ID NO: 552718 - DNA, 75 bp, synthetic construct
  source 1..75: mol_type = other DNA
caaccatggtgctggcgcccaacaaaacgctggcagcgcaactatatggtgagatgaaagagttcttcccggaaa

SEQ ID NO: 552719 - DNA, 75 bp, synthetic construct
  source 1..75: mol_type = other DNA
ttccgctatttatggtctgggcgatcctgatttatatctcaaaatgatgctgcacctcacggtcggtatgattat

SEQ ID NO: 552720 - DNA, 75 bp, synthetic construct
  source 1..75: mol_type = other DNA
gtaacggattaccaggcccgctattacctgttattactggaaaaagcaggtatggttcagcgctcaccattaaga

SEQ ID NO: 552721 - DNA, 75 bp, synthetic construct
  source 1..75: mol_type = other DNA
atgcataaaatcccttttgaagtattaatccactctgaaaacgcattaattaaagcacgcgaaatgaatgcgttg

SEQ ID NO: 552722 - DNA, 75 bp, synthetic construct
  source 1..75: mol_type = other DNA
gtgaagagtgaaagtataaatgaaatcccttctgtagagaacacaagtcttgtgccaccagaagaaccgttagat

SEQ ID NO: 552723 - DNA, 75 bp, synthetic construct
  source 1..75: mol_type = other DNA
cttccgcgtgcgtggtgaagtgatcgacattttcccggcggagtccgacgacattgcgctacgcgtggagctgtt

SEQ ID NO: 552724 - DNA, 75 bp, synthetic construct
  source 1..75: mol_type = other DNA
ttttgtcatgttctttgttattaaacccactagctacctatgctagaaattatccctgctcagggaaaaagggag

SEQ ID NO: 552725 - DNA, 75 bp, synthetic construct
  source 1..75: mol_type = other DNA
atgtggtgctggacgaggcgaagtcatgagcgccgggatttaccccctaatctttatataagaaacaatggatat

SEQ ID NO: 552726 - DNA, 75 bp, synthetic construct
  source 1..75: mol_type = other DNA
gagaaatgattctacagccctcctttttctctggagggcgttatcctttaaaatctccatcttcacggtatttcc

SEQ ID NO: 552727 - DNA, 75 bp, synthetic construct
  source 1..75: mol_type = other DNA
gcggtttctttactgttgtagctatcgtgtaatggtggctcaggcggggctgacctcggtcaggccggtatccgt

SEQ ID NO: 552728 - DNA, 75 bp, synthetic construct
  source 1..75: mol_type = other DNA
atgaaaattcaccgcatatccccggagacgcttataacactcatccacgcacacctggccggaaaaactgacagt

SEQ ID NO: 552729 - DNA, 75 bp, synthetic construct
  source 1..75: mol_type = other DNA
tcagatggcaaatttgtttgcaatgatggaactattagtaaatccaaaaaaatctgtactaaaaactcacgataa

SEQ ID NO: 552730 - DNA, 75 bp, synthetic construct
  source 1..75: mol_type = other DNA
aagaggtagatatgtggttaatgtcaaatgctaaatatcatataatagctaatagttcatttagttggtgggggg

SEQ ID NO: 552731 - DNA, 75 bp, synthetic construct
  source 1..75: mol_type = other DNA
aagaaaatggtgaaactaaatactggtctgggcgtggacgtgcgccaaaaccgattgatgaagcaatgaaagccg

SEQ ID NO: 552732 - DNA, 75 bp, synthetic construct
  source 1..75: mol_type = other DNA
ctgcgctcagcaggcagggcaggagtcgcggtttatctacattgaagatctcggtttgggcgtcggcggtgtact

SEQ ID NO: 552733 - DNA, 75 bp, synthetic construct
  source 1..75: mol_type = other DNA
gcgtctgtgttgcctctgttgcacgcacggttctgcgtgccgtccgtgactcggtggtctctgttgcccgtgcgg

SEQ ID NO: 552734 - DNA, 75 bp, synthetic construct
  source 1..75: mol_type = other DNA
tcaggaactgcttcagttaatcgccggagagggtttctcaccggaagaactgcttggtctgtccgaagaagcacc

SEQ ID NO: 552735 - DNA, 75 bp, synthetic construct
  source 1..75: mol_type = other DNA
atgagcggcgccagattcacggcgatgcaggaaaagctcaacgttgttattgaagaacgtcgtgaagatgctgaa

SEQ ID NO: 552736 - DNA, 75 bp, synthetic construct
  source 1..75: mol_type = other DNA
ggcttacagtatgcctgcagcaatccccgcgccatgccgcagagcgccaaaaaacacgggcaccaaagcagttcg

SEQ ID NO: 552737 - DNA, 75 bp, synthetic construct
  source 1..75: mol_type = other DNA
gggatgccgatccgtttctatcaggggtcaaaggttatggtgtcgaacaatgaccttacggcaacgatggcagaa

SEQ ID NO: 552738 - DNA, 75 bp, synthetic construct
  source 1..75: mol_type = other DNA
tcttctggcctggttggtggcacttattctgcatgctgcagtgggctccgctacggtggcaatgatgggggcaac

SEQ ID NO: 552739 - DNA, 75 bp, synthetic construct
  source 1..75: mol_type = other DNA
atcgttacggactcgcttttctggctggtgaagcaatattgcggcgctacgctcaatgaaacatttaaatactat

SEQ ID NO: 552740 - DNA, 75 bp, synthetic construct
  source 1..75: mol_type = other DNA
gctgacccatattgcgggcgataagccagtgaccattctgaccgcgacctccggtgataccggagcggcagtggc

SEQ ID NO: 552741 - DNA, 75 bp, synthetic construct
  source 1..75: mol_type = other DNA
cgacgtccggtaaggactggaaccagatgatggttcgggccgtgaaccgtgcaaaaggttttaatcatccgctgt

SEQ ID NO: 552742 - DNA, 75 bp, synthetic construct
  source 1..75: mol_type = other DNA
ctcttgcgctggtcgataatctctcactgtttattgacgagatggctcatccgttacaaccggtacgcctgtccg

SEQ ID NO: 552743 - DNA, 75 bp, synthetic construct
  source 1..75: mol_type = other DNA
gaagtcatcaaaactgacagaaccggctatcagatgaaggtaaaagagttcgttggtgtaccggagttcaaagca

SEQ ID NO: 552744 - DNA, 75 bp, synthetic construct
  source 1..75: mol_type = other DNA
ggcgattgagcaaagacaaaggcgtatggtacttctctgattcagctctccagaagtcgcaggtggaagagcttg

SEQ ID NO: 552745 - DNA, 75 bp, synthetic construct
  source 1..75: mol_type = other DNA
ctggcagttcccgtatgacatcggccatacgctaaatacgattgtggctaccggtttaataccggatacaaaatc

SEQ ID NO: 552746 - DNA, 75 bp, synthetic construct
  source 1..75: mol_type = other DNA
ctgccagaatggctacgaccccaaccccgttacaccctgaatttacctttcactttctggctgttcgccgttccg

SEQ ID NO: 552747 - DNA, 75 bp, synthetic construct
  source 1..75: mol_type = other DNA
tttttccctttgagccggccacaccatttacgctgcgcttttattctgcagagcaaagcgaatgccaggcggtga

SEQ ID NO: 552748 - DNA, 75 bp, synthetic construct
  source 1..75: mol_type = other DNA
atactgtctctgtcggtgatgtctttgtatcatcctggggctatgagcaaaccaatgtaactttctatcaggttc

SEQ ID NO: 552749 - DNA, 75 bp, synthetic construct
  source 1..75: mol_type = other DNA
atgctgtgtcccaaaagcccgggaggtttgcattacaactgcactacagtacaaaatgtcagacacatgggtaat

SEQ ID NO: 552750 - DNA, 75 bp, synthetic construct
  source 1..75: mol_type = other DNA
taggattttcggtggcatggcgattcccggaaggtacatcggaagaacagattgataaaaccgttgatgatttta

SEQ ID NO: 552751 - DNA, 75 bp, synthetic construct
  source 1..75: mol_type = other DNA
cataagaaaagagcgcaaaacaggtggtcgcttttcttaccagataaacccgatgccgttcgggtgcggcaatcc

SEQ ID NO: 552752 - DNA, 75 bp, synthetic construct
  source 1..75: mol_type = other DNA
ggtcgcttttcttaccagataaacccgatgccgttcgggtgcggcaatccacttaccaacacgtttaaccagcta

SEQ ID NO: 552753 - DNA, 75 bp, synthetic construct
  source 1..75: mol_type = other DNA
acaccgcgcagccggtactgccagcgcaaaaccaggccttaccgccggaagtacgtgcattccttaatgccggga

SEQ ID NO: 552754 - DNA, 75 bp, synthetic construct
  source 1..75: mol_type = other DNA
aaatgcaccgaagaacatcaggccgttgtacgtaagtggctggaagagcgcaaactggaagaggttcgcaccagc

SEQ ID NO: 552755 - DNA, 75 bp, synthetic construct
  source 1..75: mol_type = other DNA
tttggtctgcatgcaggaaatcggcaaatgcaccgaagaacatcaggccgttgtacgtaagtggctggaagagcg

SEQ ID NO: 552756 - DNA, 75 bp, synthetic construct
  source 1..75: mol_type = other DNA
aatcgccgccgcgctgaataccccaaccacagccattaatgctgagttgcgccgactctggcgtgacggcttagt

SEQ ID NO: 552757 - DNA, 75 bp, synthetic construct
  source 1..75: mol_type = other DNA
ttgtgtatggcactgggtaagggctttttagttatagctattctttgtggtgttgccacattctgtgtttctggc

SEQ ID NO: 552758 - DNA, 75 bp, synthetic construct
  source 1..75: mol_type = other DNA
tcagtcgtcaggaattgctctggcttatgagtctgactgaagactgtccggatatgcaccaggaactgcttaact

SEQ ID NO: 552759 - DNA, 75 bp, synthetic construct
  source 1..75: mol_type = other DNA
gggcgggaaacgaattaaggaatctcttggcacaaaggacaagcggcaagctcaggagttgcacgacaagcgaaa

SEQ ID NO: 552760 - DNA, 75 bp, synthetic construct
  source 1..75: mol_type = other DNA
atgaccattctggactacatcactacccatccgggttgtagcggcggagaaatcgccgcagcactaaacacccca

SEQ ID NO: 552761 - DNA, 75 bp, synthetic construct
  source 1..75: mol_type = other DNA
aggcttcttaccacgtaaacccgatgccgttcgggtgtagcaatccacttactcacatgtttaacctgctactga

SEQ ID NO: 552762 - DNA, 75 bp, synthetic construct
  source 1..75: mol_type = other DNA
gcagtttgccaacggcacgcagattcctatcggtacgctgggagcagccatttctcaggcgaagccgcagaaagg

SEQ ID NO: 552763 - DNA, 75 bp, synthetic construct
  source 1..75: mol_type = other DNA
gataaaggcgtagtatcttactttccagaatcaaaggaggcagcacttaagatcgttaaaaacattgaattacgg

SEQ ID NO: 552764 - DNA, 75 bp, synthetic construct
  source 1..75: mol_type = other DNA
tctggctgactggctgcaaggttacggtctggtggtggtggttgagcatggtaaaggcgacatgagtctttacgg

SEQ ID NO: 552765 - DNA, 75 bp, synthetic construct
  source 1..75: mol_type = other DNA
agaaaacgctggcagggctggagtcttccatccagcaaggtcagcaacagttgagcgagctgcgcgccaacgaat

SEQ ID NO: 552766 - DNA, 75 bp, synthetic construct
  source 1..75: mol_type = other DNA
atgcaccggttaagctgctggagtacaacgctgatacaccgacctcgttgtatgagtcggcttatttccagtggt

SEQ ID NO: 552767 - DNA, 75 bp, synthetic construct
  source 1..75: mol_type = other DNA
aatttgtgcccgggaaacaggtcacgctggcacatctcattgcgcaccctggcgaggaactggcgaagaaaatcg

SEQ ID NO: 552768 - DNA, 75 bp, synthetic construct
  source 1..75: mol_type = other DNA
tgtcaccatgatccccatgccctggaaaaatttcctgtccgtgtgcacgatacatccctttatctgtcctgagtg

SEQ ID NO: 552769 - DNA, 75 bp, synthetic construct
  source 1..75: mol_type = other DNA
tattcaggctgatatcgctgccaaagagcgtgcggtacgccaacaacagcaacaacgctcaagtctgctggcaca

SEQ ID NO: 552770 - DNA, 75 bp, synthetic construct
  source 1..75: mol_type = other DNA
aacaacgcgcaagcctgctcgcacaattgaaaaagcaggaagaagcgatctctgaagccacccgtaagctgcgcg

SEQ ID NO: 552771 - DNA, 75 bp, synthetic construct
  source 1..75: mol_type = other DNA
cattgattggtaacctgtttaaatcgacggcggataaaaaagaaaaacgtaacctgatggtgtttatccgcccga

SEQ ID NO: 552772 - DNA, 75 bp, synthetic construct
  source 1..75: mol_type = other DNA
tggcggtcagggcagaccttcactctatttcgaaattcgccgccagggtcaggcggtcaatccacagccgtggtt

SEQ ID NO: 552773 - DNA, 75 bp, synthetic construct
  source 1..75: mol_type = other DNA
ccggttcgcgggccgacgctgcatcgctatggcgaacagctacagggtgaattacgctggaaagggatggtgatt

SEQ ID NO: 552774 - DNA, 75 bp, synthetic construct
  source 1..75: mol_type = other DNA
ctggtgggcagcagtggcggtcagggtcggccttcactctatttcgaaattcgccaccagggtcaggcggtcaat

SEQ ID NO: 552775 - DNA, 75 bp, synthetic construct
  source 1..75: mol_type = other DNA
tattactcacgtcatcttttgaaggtttcccaatgactctacttgaagccttgtcgtgggggatcccttgtatca

SEQ ID NO: 552776 - DNA, 75 bp, synthetic construct
  source 1..75: mol_type = other DNA
agagcgtgaacgtattgaagccgagcaacgagcacagcgcgaagcaaaagaggcagcagaacgagctgaaagaga

SEQ ID NO: 552777 - DNA, 75 bp, synthetic construct
  source 1..75: mol_type = other DNA
ttattgaaaaatcaaatgcaatgactgtatttcagtctgccgaccagattgaagaaatccttcaaaaggttgaac

SEQ ID NO: 552778 - DNA, 75 bp, synthetic construct
  source 1..75: mol_type = other DNA
gattattttagctatcaaaatatatataataatgctaatgaactcgataccttttatcaaaataaggaatatctc

SEQ ID NO: 552779 - DNA, 75 bp, synthetic construct
  source 1..75: mol_type = other DNA
agttcttctttgttgaaaaagagcaaaagcgattcgaaacaaagtgcaacccaatcggtgactggcctatggcgg

SEQ ID NO: 552780 - DNA, 75 bp, synthetic construct
  source 1..75: mol_type = other DNA
cttcatggccgttgccgacaaggttgggttcgaccgccgtggcaacaagctttacaagcgctccccggatggaga

SEQ ID NO: 552781 - DNA, 75 bp, synthetic construct
  source 1..75: mol_type = other DNA
tataaagttgcgcagacgaaaacatatctcgatggtcttggcaaagaccttgttgctgaactgaaggaaattcca

SEQ ID NO: 552782 - DNA, 75 bp, synthetic construct
  source 1..75: mol_type = other DNA
acgctacagtcgtttatctgacgaagttaaaaattcgcctatggtagacaagccatggaacggattgttttccac

SEQ ID NO: 552783 - DNA, 75 bp, synthetic construct
  source 1..75: mol_type = other DNA
cgccattgactcaagccagaactgttttccctccttacacgccgcgctaacgctgttggcggtatgggcgattgc

SEQ ID NO: 552784 - DNA, 75 bp, synthetic construct
  source 1..75: mol_type = other DNA
gtgtggctgtatctctcgttttttttcattgtgccgttaggttatttatccacgccactttgccacctgcgctgg

SEQ ID NO: 552785 - DNA, 75 bp, synthetic construct
  source 1..75: mol_type = other DNA
gccacataaatcaaataacagatttttatattctgacgtaatgaaatttatcgaatcaataaaagataaagaaaa

SEQ ID NO: 552786 - DNA, 75 bp, synthetic construct
  source 1..75: mol_type = other DNA
gtgtcacgtagtgagtcagcccgtagtggcctgaaagcctatgatgcaggcaatggctgggcaccttaccttgaa

SEQ ID NO: 552787 - DNA, 75 bp, synthetic construct
  source 1..75: mol_type = other DNA
acgctacagtcgtttatctgacaaagttaaaaattcgcctatggtggacaagccatggaacggattgttttccac

SEQ ID NO: 552788 - DNA, 75 bp, synthetic construct
  source 1..75: mol_type = other DNA
gctactcgtttcgggattgttcttttgacacctgatgatatgggatactcaaagcgcgccggtgaagcagaaatc

SEQ ID NO: 552789 - DNA, 75 bp, synthetic construct
  source 1..75: mol_type = other DNA
gcaataaccgtttcctgcgctattctcggcatcgtgctggtggtaacacgcgatggctggttaagtctttttatg

SEQ ID NO: 552790 - DNA, 75 bp, synthetic construct
  source 1..75: mol_type = other DNA
tatcagaggctaggaaatctggctgtagcggagtttatcttattgtccataaaggacttttcagtcgtgtggttt

SEQ ID NO: 552791 - DNA, 75 bp, synthetic construct
  source 1..75: mol_type = other DNA
cactaaattagtaagagcttcatctttagccgagaaaacaaaagagcgtgatcataagcaattaacggttgcagg

SEQ ID NO: 552792 - DNA, 75 bp, synthetic construct
  source 1..75: mol_type = other DNA
tcaaggcagtttgtgaaaaacttaaaaaccaaccacgtaaaccaaaaacggtaaagagtaagcatcagcctgtca

SEQ ID NO: 552793 - DNA, 75 bp, synthetic construct
  source 1..75: mol_type = other DNA
gattccttcatggtgcttggataaattaccatgtgacgcacagattttaggtgatgatgggatgtattcttacgt

SEQ ID NO: 552794 - DNA, 75 bp, synthetic construct
  source 1..75: mol_type = other DNA
ttgccgccctggtcgttgctgccgccagtggctttcgcggtgggcgaatcttcccggcagtgtttgtcggcgtgg

SEQ ID NO: 552795 - DNA, 75 bp, synthetic construct
  source 1..75: mol_type = other DNA
atgagcatcgataaaagttactgcggatttattgctatcgtcggacgtccgaatgttggcaaatccacattgttg

SEQ ID NO: 552796 - DNA, 75 bp, synthetic construct
  source 1..75: mol_type = other DNA
gtgggtaaaagtgaaatccggttgggccgacgacgaacgcgcactgcgcagtctcggttacgttgacgatcttta

SEQ ID NO: 552797 - DNA, 75 bp, synthetic construct
  source 1..75: mol_type = other DNA
atgttcaagctatatactctactcgatcggcaggaagaggcctctggtttgaaaattcttcaagagtggaaatac

SEQ ID NO: 552798 - DNA, 75 bp, synthetic construct
  source 1..75: mol_type = other DNA
tcactgcgtgactggcttgataatgacaagccgggaacactgtttattacctggcaggaagaaatgaaaaggtca

SEQ ID NO: 552799 - DNA, 75 bp, synthetic construct
  source 1..75: mol_type = other DNA
ggcaagccagatgaacttcctcgatatcgtgccgatctctgccgaaaccgggctgaatgttgacactattgcggc

SEQ ID NO: 552800 - DNA, 75 bp, synthetic construct
  source 1..75: mol_type = other DNA
tcaacaaactgcgcgatggcaaagcgccggtaatcctcgcggtgaacaaagtggacaacgtgcaggaaaaagccg

SEQ ID NO: 552801 - DNA, 75 bp, synthetic construct
  source 1..75: mol_type = other DNA
gataccgctgcggcaatccgtgctgaactggcgaagatggaaccgttcttcccgtcgggtctgaaaattgtttac

SEQ ID NO: 552802 - DNA, 75 bp, synthetic construct
  source 1..75: mol_type = other DNA
gcgccgcctgcatgatctgcatataaagctattcgaagatcaggaagcgcgggaattattcaaaatttacgggga

SEQ ID NO: 552803 - DNA, 75 bp, synthetic construct
  source 1..75: mol_type = other DNA
aattacgaaggcaaagaatatgaaatatgggtaggtaatagatggtactcatacgggcatatttattcaattggc

SEQ ID NO: 552804 - DNA, 75 bp, synthetic construct
  source 1..75: mol_type = other DNA
acctggggtacccggaattgccagcgactatcgcttcaaaacagctgctggcggcggtagggcagagtcgactga

SEQ ID NO: 552805 - DNA, 75 bp, synthetic construct
  source 1..75: mol_type = other DNA
aagtacctgggttgctaaactagagaagatagaagatatattttctaatattgataaattaaagaaaaattctgg

SEQ ID NO: 552806 - DNA, 75 bp, synthetic construct
  source 1..75: mol_type = other DNA
atgttaaacgatatcctcgacaaaggattaataatggaggttgacgagcttacaatcaaaattaattatgaaggt

SEQ ID NO: 552807 - DNA, 75 bp, synthetic construct
  source 1..75: mol_type = other DNA
gccatgctgtaaatacgctttttggtttttatcaacaaccattcctcaaagaatgggacgaaatgcttaatgaca

SEQ ID NO: 552808 - DNA, 75 bp, synthetic construct
  source 1..75: mol_type = other DNA
ctgggtgccagccgtgcgcaggtgctgtggtttgtcattttgcccggcgcgctgccggaaatcctcaccggatta

SEQ ID NO: 552809 - DNA, 75 bp, synthetic construct
  source 1..75: mol_type = other DNA
tgggctggtctacgctggtggcggcggagctgattgccgcaacgcgcggtttaggatttatggttcagtcagcgg

SEQ ID NO: 552810 - DNA, 75 bp, synthetic construct
  source 1..75: mol_type = other DNA
accccgcctgtgaaccgctgatcggcgcaccggttccgccctctgcgctaccaggacttatcgtagcattaattc

SEQ ID NO: 552811 - DNA, 75 bp, synthetic construct
  source 1..75: mol_type = other DNA
ggaaccaactatgaagagtggttgcgtcagaatgttcagggcgtcgatgtgcgtacctatgatgatgacccaacc

SEQ ID NO: 552812 - DNA, 75 bp, synthetic construct
  source 1..75: mol_type = other DNA
aaaaccaatgatacgctggcagtaaccggcgaagccttctcccgccaggagtcaggtgtggcgctgcgtaaaggt

SEQ ID NO: 552813 - DNA, 75 bp, synthetic construct
  source 1..75: mol_type = other DNA
attgctggtgacagcgtttcaggcctcggaactggcggcatgagtaccaaattgcaggccgctgacgtggcttgc

SEQ ID NO: 552814 - DNA, 75 bp, synthetic construct
  source 1..75: mol_type = other DNA
cttcttatctgtttaaagagaagtttgataccccgaacggtctggcgcagttcttctcctgcgactgggtagcgc

SEQ ID NO: 552815 - DNA, 75 bp, synthetic construct
  source 1..75: mol_type = other DNA
tattgcggtggggttggttatccgtttcagccaggggcatgccggaccagaccccgcctgtgaaccgctgatcgg

SEQ ID NO: 552816 - DNA, 75 bp, synthetic construct
  source 1..75: mol_type = other DNA
tctattcacgaagtggttaaaacgctggtcgaagcgatcatcctcgtgttcctggtaatgtatctgttcttgcag

SEQ ID NO: 552817 - DNA, 75 bp, synthetic construct
  source 1..75: mol_type = other DNA
cccgatggtactgtcaacggtgcgtgaagttggtcactactcttgccgttcgatgactggtaactgtgcggcact

SEQ ID NO: 552818 - DNA, 75 bp, synthetic construct
  source 1..75: mol_type = other DNA
ctatcgacaaactcactgaagagtacccgatggtactgtcaacggtgcgtgaagtcggtcactactcttgccgtt

SEQ ID NO: 552819 - DNA, 75 bp, synthetic construct
  source 1..75: mol_type = other DNA
cgcgccgccgagcagtacgtgattgacgagtacaacaagttgaaaactcgcctgcgcgaagcggcactggcgtaa

SEQ ID NO: 552820 - DNA, 75 bp, synthetic construct
  source 1..75: mol_type = other DNA
tatggaaaaaataaattcgtgcactccatggaagaaagaatgcaaatcgtattatgagtcaataatagtaaatgc

SEQ ID NO: 552821 - DNA, 75 bp, synthetic construct
  source 1..75: mol_type = other DNA
attcccacttttcagtattgctcattctatcttaatcctattgaagcaaatctggaatatgttggtaactatttc

SEQ ID NO: 552822 - DNA, 75 bp, synthetic construct
  source 1..75: mol_type = other DNA
tcttcaaagcggttgaaccgaagtgggatctgaaaacggactggcaaatcatcagtgaaatcgccacccgtatgg

SEQ ID NO: 552823 - DNA, 75 bp, synthetic construct
  source 1..75: mol_type = other DNA
atggtcaggagattgtcgaaacgctggcggaatatgcaggcgtgccagtctggaacggtctgaccaatgagtttc

SEQ ID NO: 552824 - DNA, 75 bp, synthetic construct
  source 1..75: mol_type = other DNA
ggtacgtatgaattacttttgctcctagctgatgaacatcccgattaccagctagtaaagcgagaaaaaaatcag

SEQ ID NO: 552825 - DNA, 75 bp, synthetic construct
  source 1..75: mol_type = other DNA
aaagccatgcagcaggcacaaaaggcaattaacgctctgacgcagggggctaagtctgatgcgttgtcagaatag

SEQ ID NO: 552826 - DNA, 75 bp, synthetic construct
  source 1..75: mol_type = other DNA
tggaacggcctgaccaatgagtttcaccccacgcagctgctggcggatctcctcaccatgcaggagcatttgccc

SEQ ID NO: 552827 - DNA, 75 bp, synthetic construct
  source 1..75: mol_type = other DNA
actcactggtaaaaacatcgcgctcatcttcgaaaaaaactcgacccgtacccgatgctctttcgaagttgccgc

SEQ ID NO: 552828 - DNA, 75 bp, synthetic construct
  source 1..75: mol_type = other DNA
cgctgaaatcaacagcctgcttcagttagccgcgaagctgaaagccgataagaaaaacggtactgaagaagccag

SEQ ID NO: 552829 - DNA, 75 bp, synthetic construct
  source 1..75: mol_type = other DNA
ccacgagtaacaacgcagggattagagcaggactttggccttcagcaaggcgcgctgactccacaaactacagag

SEQ ID NO: 552830 - DNA, 75 bp, synthetic construct
  source 1..75: mol_type = other DNA
cactcctgctggcgttgagagagcggcagcacaggcaccaacacttgctggtcgaattgctcagggggcaactcg

SEQ ID NO: 552831 - DNA, 75 bp, synthetic construct
  source 1..75: mol_type = other DNA
ggttgtaaagtattttatcgttgataaatctggaaaaaatctttatatccgagatgatataaagttcttcaaaac

SEQ ID NO: 552832 - DNA, 75 bp, synthetic construct
  source 1..75: mol_type = other DNA
gtaaatctggatttgaagcaattaagcgatctgcgcagccagttcagaatggacgtgaagggggaacgaccagtg

SEQ ID NO: 552833 - DNA, 75 bp, synthetic construct
  source 1..75: mol_type = other DNA
ctggctggcacaagcggaatgagagcaacgcaacaggaagcgagaagccagttggtgcagagatttgctgataaa

SEQ ID NO: 552834 - DNA, 75 bp, synthetic construct
  source 1..75: mol_type = other DNA
tttaggcgttggtgtacttgctggcggtgctattaacgctgccggacgtggattaggtgctgcttatcgtggcgt

SEQ ID NO: 552835 - DNA, 75 bp, synthetic construct
  source 1..75: mol_type = other DNA
tatctcggcccaagcggcagccagattggtcacaaagagtcgattaaagacactgcccgcgtgcttggtcgcatg

SEQ ID NO: 552836 - DNA, 75 bp, synthetic construct
  source 1..75: mol_type = other DNA
gggaggtcaccccggtcagtgatgttcacgccggcacccgggaagtacggcgcttccgtctgagtggccacggtc

SEQ ID NO: 552837 - DNA, 75 bp, synthetic construct
  source 1..75: mol_type = other DNA
ttggtcttgctggtggcgtcagcctggggccggaacatccgatcatgaccgtcaatatcgcccttgcggttgcca

SEQ ID NO: 552838 - DNA, 75 bp, synthetic construct
  source 1..75: mol_type = other DNA
tatttcttccgctgcggtgatggagattatccgcaacgatagcgaaaaccgcctggtgaccgtccctgctgaact

SEQ ID NO: 552839 - DNA, 75 bp, synthetic construct
  source 1..75: mol_type = other DNA
cgtcccggaatgcgtcacccgtcgtcaggcggtggttaatcaggccggcagcctgctgaaaaacaacacacacga

SEQ ID NO: 552840 - DNA, 75 bp, synthetic construct
  source 1..75: mol_type = other DNA
tctgaccgatcatgaaatcaggaccgtcctggcgcgcctggaggacatcccggaagaccagcggactgaatccgg

SEQ ID NO: 552841 - DNA, 75 bp, synthetic construct
  source 1..75: mol_type = other DNA
cgtcccggaatgcgtcacccaccgacaggcggtggttaatcaggcccgcgccctgctgaaaaacaacacacgcga

SEQ ID NO: 552842 - DNA, 75 bp, synthetic construct
  source 1..75: mol_type = other DNA
cgttgaacttcgaacgtttacaagcgctggcattttgcaatgccatgactggcgtattagcgaagctatatccag

SEQ ID NO: 552843 - DNA, 75 bp, synthetic construct
  source 1..75: mol_type = other DNA
acgggggtaaaatcaccttgacggaagatatcgcctctggggttaaaggcgcagactttatctataccgatgtct

SEQ ID NO: 552844 - DNA, 75 bp, synthetic construct
  source 1..75: mol_type = other DNA
agatgatgcagttgaccggtaacccggaggtcaaattcctccactgcctgcccgcgtttcatgacgaccaaacga

SEQ ID NO: 552845 - DNA, 75 bp, synthetic construct
  source 1..75: mol_type = other DNA
gtggggttggttatccgtttcagccagggtcatgccggaccagaccccgcctgtgaaccgctgatcggcgcaccg

SEQ ID NO: 552846 - DNA, 75 bp, synthetic construct
  source 1..75: mol_type = other DNA
tataccgtgaagtggggaacggtaacggaatacatggtattaaggtcggttctaaagtaagtggtgatagtaaag

SEQ ID NO: 552847 - DNA, 75 bp, synthetic construct
  source 1..75: mol_type = other DNA
actcaggctaactggggatcggttatcgctggtattagtattgcgctggaggaaaaagcagctcaggaatcagaa

SEQ ID NO: 552848 - DNA, 75 bp, synthetic construct
  source 1..75: mol_type = other DNA
cgtccagggcatgaccttagatatgccattgacgccagtaaaattaaacaagatttaggttgggtgccgcaagaa

SEQ ID NO: 552849 - DNA, 75 bp, synthetic construct
  source 1..75: mol_type = other DNA
ttagtcatcgacggaaaactcgtgtatttaagccccctcaatcctcgctatcaatcgtccttactgacacctgaa

SEQ ID NO: 552850 - DNA, 75 bp, synthetic construct
  source 1..75: mol_type = other DNA
cgccaagcattccggttggtgccacagtgatcatgaggcctagagaaaaatataaaaatggtagtatcgtcgctg

SEQ ID NO: 552851 - DNA, 75 bp, synthetic construct
  source 1..75: mol_type = other DNA
tcctcgaaaccaatacaggcatgaataacatgctggaacgcattggggcggagccgtacaagcgttaccgattgt

SEQ ID NO: 552852 - DNA, 75 bp, synthetic construct
  source 1..75: mol_type = other DNA
ggcgttaatgaaggcattattgacgttatcgcgactgaccatgcgccgcatttgctggaggaaaagcagaatgac

SEQ ID NO: 552853 - DNA, 75 bp, synthetic construct
  source 1..75: mol_type = other DNA
acttagccccccttaacccacgctatcaatcatccttacttacaccggaatgtaacatcgttgctgtagcaaaag

SEQ ID NO: 552854 - DNA, 75 bp, synthetic construct
  source 1..75: mol_type = other DNA
tataaaaatggtagcatcgtcgcagtaatagtcccagatccactcacaaacgaaccatccatgactataaaaaaa

SEQ ID NO: 552855 - DNA, 75 bp, synthetic construct
  source 1..75: mol_type = other DNA
ggaggggcggagcggaacacagagttaccgttatgatgcggaacaccggatggtggaagtgacgacagcgcggga

SEQ ID NO: 552856 - DNA, 75 bp, synthetic construct
  source 1..75: mol_type = other DNA
tctcgctttaatgaaaggccaaccaaggaaattgattctatattcaaagcaataaaccaacgcttttcaggagag

SEQ ID NO: 552857 - DNA, 75 bp, synthetic construct
  source 1..75: mol_type = other DNA
caaagttcctacgtggtgcattgaccgtgttccggttggttcaaaaattatttgtgaagatggtgattatcattg

SEQ ID NO: 552858 - DNA, 75 bp, synthetic construct
  source 1..75: mol_type = other DNA
ccccacggggcgcatcacggcgtgccgctcggaggatgaggggtatctggcgagctggcagtacgacgcggcggg

SEQ ID NO: 552859 - DNA, 75 bp, synthetic construct
  source 1..75: mol_type = other DNA
gacggctgccgccagacgtaccgctacaacgcgctgaacgcggtcacggaagtggtgttcaccggggaccggggc

SEQ ID NO: 552860 - DNA, 75 bp, synthetic construct
  source 1..75: mol_type = other DNA
tttttaccgccgccgcaacaggtgctggcaaaactgctcactattgccggaccacaaggatttatggatgccacg

SEQ ID NO: 552861 - DNA, 75 bp, synthetic construct
  source 1..75: mol_type = other DNA
acaggaaactaaccctgagtttgtaattcgtcttggtaagaaagttgtcgcggttcggtcagatacgattaaggc

SEQ ID NO: 552862 - DNA, 75 bp, synthetic construct
  source 1..75: mol_type = other DNA
atgaagcccgacgcacaccaggttaaacagttcctgctcaaccttcaggacacaatttgccaacagctaagcgcc

SEQ ID NO: 552863 - DNA, 75 bp, synthetic construct
  source 1..75: mol_type = other DNA
tttatgcaggcggtaggcaaaggctacaccgacgcttatttaccaattgtagagcgacgtaaagcgatggcctac

SEQ ID NO: 552864 - DNA, 75 bp, synthetic construct
  source 1..75: mol_type = other DNA
ggctgttctttgatgatctgaacacgccagatttcgaccactgttttgcctttatgcaggcggtaggcaaaggct

SEQ ID NO: 552865 - DNA, 75 bp, synthetic construct
  source 1..75: mol_type = other DNA
cgttatgcttttgagcatgcagatatctgcgatgctgtagccatgtcgcgtattttcgcacagcaccagccagac

SEQ ID NO: 552866 - DNA, 75 bp, synthetic construct
  source 1..75: mol_type = other DNA
tctgaacacgccagatttcgaccactgttttgcctttatgcaggcggtaggcaaaggctacaccgacgcttattt

SEQ ID NO: 552867 - DNA, 75 bp, synthetic construct
  source 1..75: mol_type = other DNA
atggcgcagaatttgtcgaagatagttggcagcgcgaagctggcggcggcgggcgcagtcggggtgttgcgtaat

SEQ ID NO: 552868 - DNA, 75 bp, synthetic construct
  source 1..75: mol_type = other DNA
gcgtttatcctggtcgatgacaaaggtaacgacttcttccagcagatcgtcaacaaacagtgcgcgaactgcact

SEQ ID NO: 552869 - DNA, 75 bp, synthetic construct
  source 1..75: mol_type = other DNA
gcagccagcaggtgacggatgcctgtaaaaaacacggcggtttctacctcggtagtatcggtggtccggcagctg

SEQ ID NO: 552870 - DNA, 75 bp, synthetic construct
  source 1..75: mol_type = other DNA
cggttcggtcagatacgattaaggcaatgccgtctaatcgtagtggtactaccaatggcatgactagggagatta

SEQ ID NO: 552871 - DNA, 75 bp, synthetic construct
  source 1..75: mol_type = other DNA
gctcatcgcccggaacttgccgggcgcagtttcgaggcgatgggcgtttcgctggtagtgcatccgcataatccg

SEQ ID NO: 552872 - DNA, 75 bp, synthetic construct
  source 1..75: mol_type = other DNA
agttgtacccagcgacgcagtgcaaatgctacgccgcgaccgtacagcaaaagaatttattatcggctttgataa

SEQ ID NO: 552873 - DNA, 75 bp, synthetic construct
  source 1..75: mol_type = other DNA
agaagcgcgggatattgtgtgggaacagacgctggatctgcacctcaatacagagacaccagaagaatcagagcg

SEQ ID NO: 552874 - DNA, 75 bp, synthetic construct
  source 1..75: mol_type = other DNA
gaactgcgctttaatcagcttatcctcgagacggctggcgtaccgcaaactgtcgaactggcggtagagattgcc

SEQ ID NO: 552875 - DNA, 75 bp, synthetic construct
  source 1..75: mol_type = other DNA
atatgcctattgaggatggggcttttattgaaccgattaccgttggcctgcatgcttttcatttagcgcaaggtt

SEQ ID NO: 552876 - DNA, 75 bp, synthetic construct
  source 1..75: mol_type = other DNA
gacaggattggcatcggtaatgagaacaatctgggtgaaaaatcactcacgctctgtgatagcaataccggtttt

SEQ ID NO: 552877 - DNA, 75 bp, synthetic construct
  source 1..75: mol_type = other DNA
tgcaggatgtgcgttatggttccgaaatgtattacaccccgggaggtaaccaggtatcctggatatttcgctcac

SEQ ID NO: 552878 - DNA, 75 bp, synthetic construct
  source 1..75: mol_type = other DNA
tcgctgtaaacggacagatgaccccatcaaactatggaaatttcgatgcccgttatcagcagcgaaatggcggcg

SEQ ID NO: 552879 - DNA, 75 bp, synthetic construct
  source 1..75: mol_type = other DNA
tattattggtgccggaaccattggcctgctggctattcagtgcgctgtcgcgctgggagcaaagagtgtgacggc

SEQ ID NO: 552880 - DNA, 75 bp, synthetic construct
  source 1..75: mol_type = other DNA
gagcagcaaagccatacccaaaatgcaatccggcgcgtgtgaagctctccggataattagcgttgcccgacgtag

SEQ ID NO: 552881 - DNA, 75 bp, synthetic construct
  source 1..75: mol_type = other DNA
agacgaatcactagataaactgacccgcaagtatgccagtaaccttcgtagccagtttggcgttgggccacagac

SEQ ID NO: 552882 - DNA, 75 bp, synthetic construct
  source 1..75: mol_type = other DNA
tcatcagggaaaacagtaaggcacagattaaaccgtggtggctcacgtgaagcaaacaatgccctgtggacaata

SEQ ID NO: 552883 - DNA, 75 bp, synthetic construct
  source 1..75: mol_type = other DNA
ggataacgtcaacggcgtgtattaccgaccgcttcagaaactgattaacggcacctggtataacgtggcgagtgt

SEQ ID NO: 552884 - DNA, 75 bp, synthetic construct
  source 1..75: mol_type = other DNA
tgatggtgacaccatgagcggggaactgaaaatccgtggtgttaatgcgctgaggattttcaacgaagcatttgg

SEQ ID NO: 552885 - DNA, 75 bp, synthetic construct
  source 1..75: mol_type = other DNA
gaatgcgtaactgcctgcattaacagcgaagtgtcagagcactcaccgttacgtatagccttgtgcagtacgctt

SEQ ID NO: 552886 - DNA, 75 bp, synthetic construct
  source 1..75: mol_type = other DNA
tgtaaacgttacaggacgggtaacaccgtcagactacggaaactttgatgcccgttaccagaccaaaacaggcgg

SEQ ID NO: 552887 - DNA, 75 bp, synthetic construct
  source 1..75: mol_type = other DNA
ctttacagcgtacatatcaacccctatctcattccctttttcatcgggctacagaaccggtttacgcagttccgg

SEQ ID NO: 552888 - DNA, 75 bp, synthetic construct
  source 1..75: mol_type = other DNA
tacaagaactccgatgcgtttgtcctatattgagaagaaaaaaggcaggcagactacacatattgtcttttcttt

SEQ ID NO: 552889 - DNA, 75 bp, synthetic construct
  source 1..75: mol_type = other DNA
ggaggtcgttttttatcggcccgaagaggatgcaggtcaggaaaaggggtacgaatcctttccttggttcattaa

SEQ ID NO: 552890 - DNA, 75 bp, synthetic construct
  source 1..75: mol_type = other DNA
cgttcaccagatcagaaaatccgacggctccctgcaggaacatgacggcatctgcgaaattcacgttgctaaata

SEQ ID NO: 552891 - DNA, 75 bp, synthetic construct
  source 1..75: mol_type = other DNA
cgtcaatctgccgctgcatctgcgtgacggcatctggcaggctgatatccatgacacggaactgctgcaatctgc

SEQ ID NO: 552892 - DNA, 75 bp, synthetic construct
  source 1..75: mol_type = other DNA
agctgccgccggggccgttgcactgcatgtctccggcagttttccggacctgaatatgcaactgtgggcgataag

SEQ ID NO: 552893 - DNA, 75 bp, synthetic construct
  source 1..75: mol_type = other DNA
cacgttaccagacgaaatcagggagcgtgcagaattttcagtataccaacgaggtgtttcacaatcccggaggaa

SEQ ID NO: 552894 - DNA, 75 bp, synthetic construct
  source 1..75: mol_type = other DNA
cggcattctggatgtttatgcgaatggacagcatgtatttcgtttccagaatggtgtggcgatagcgttaaaaaa

SEQ ID NO: 552895 - DNA, 75 bp, synthetic construct
  source 1..75: mol_type = other DNA
atgcaccatcaggtcaccttatcagcggtcttgatggtggtgaaagtatggactgggccaatgcccgcccggtgc

SEQ ID NO: 552896 - DNA, 75 bp, synthetic construct
  source 1..75: mol_type = other DNA
atggcagccaaattcgtttactctgcatgatagatcgatttctgaatcgccgaggggataagtttattatgcagg

SEQ ID NO: 552897 - DNA, 75 bp, synthetic construct
  source 1..75: mol_type = other DNA
cgctgccaacctgcatggttgaagcagcacagatttatcacattcctctccgtggattcctcgccttgtggctga

SEQ ID NO: 552898 - DNA, 75 bp, synthetic construct
  source 1..75: mol_type = other DNA
ctggtcagggaagtttatcgcggcaccatctcacgtctgacggtatcgcctgatcaggaaaaccagtttattgcg

SEQ ID NO: 552899 - DNA, 75 bp, synthetic construct
  source 1..75: mol_type = other DNA
gtggctgtcgccatggataatgcaattttagagaccattttgcggcaagtgcgaccgctgatcggtcagggtaaa

SEQ ID NO: 552900 - DNA, 75 bp, synthetic construct
  source 1..75: mol_type = other DNA
aaaatatcgcacaacaaaccgtaatggagtggtggtatacgacggaatgacaccttatcgggaaaatcacctgat

SEQ ID NO: 552901 - DNA, 75 bp, synthetic construct
  source 1..75: mol_type = other DNA
attttgcagcgggccgtagtcatattgaaggtgcgagcaagcaaagtgattttgtccaggcaggttatcagtatg

SEQ ID NO: 552902 - DNA, 75 bp, synthetic construct
  source 1..75: mol_type = other DNA
ggcaaacaataaagataattatcgccgtgatgaaaacgatgtctatgacattgccgattattaccagaatgattt

SEQ ID NO: 552903 - DNA, 75 bp, synthetic construct
  source 1..75: mol_type = other DNA
ccgatatatttgattccgttcgcttcaccggggttcggttatttcgtgatatgcagatgttgccaaactcgaagc

SEQ ID NO: 552904 - DNA, 75 bp, synthetic construct
  source 1..75: mol_type = other DNA
aatatgattttgcggcgggtcgtagccatattgaaggggcgagcaaacaaagtgattttgtccaggtgggttatc

SEQ ID NO: 552905 - DNA, 75 bp, synthetic construct
  source 1..75: mol_type = other DNA
ttctgatgccagttttagcaaaacagataacaatacaggggagtggaaaagcaatacactgtatctggaacgtgg

SEQ ID NO: 552906 - DNA, 75 bp, synthetic construct
  source 1..75: mol_type = other DNA
agctcgggatgccgaatctgtctcgccggtacaccaccattctttttgatgaagcacaagacgctaaccccgtaa

SEQ ID NO: 552907 - DNA, 75 bp, synthetic construct
  source 1..75: mol_type = other DNA
cgatcgataagttttatcaatctaagtattatgatagattacataatataattatttctgctatttcccggagga

SEQ ID NO: 552908 - DNA, 75 bp, synthetic construct
  source 1..75: mol_type = other DNA
accttcaggcaacaacatatccatagtgaaatgtttttcttttgtcgtaatgacaaaatggataagggatggctg

SEQ ID NO: 552909 - DNA, 75 bp, synthetic construct
  source 1..75: mol_type = other DNA
atggcagttatagtcagtcgagtacttatcgacaggctggtaatgactccaacttattgatagtgttttatgttc

SEQ ID NO: 552910 - DNA, 75 bp, synthetic construct
  source 1..75: mol_type = other DNA
gtgttatcgagacagcgctctccgcgactgaatccggatcacaagtgttttgggttggtggcatcgacgcttatc

SEQ ID NO: 552911 - DNA, 75 bp, synthetic construct
  source 1..75: mol_type = other DNA
caacctaagactcaccgatattgctcaagcggttaataccaaaaactggacgtttgccaaagatattctcgacac

SEQ ID NO: 552912 - DNA, 75 bp, synthetic construct
  source 1..75: mol_type = other DNA
tccaggcgggttatcagtatggttttaataatttattgacgctgtatggcggcacgatggttgctaataattact

SEQ ID NO: 552913 - DNA, 75 bp, synthetic construct
  source 1..75: mol_type = other DNA
agaaggggcggcatgaccagctgcttactgcgcttcgtgcgctgctgttaagccgcaagaatccgtttggcgata

SEQ ID NO: 552914 - DNA, 75 bp, synthetic construct
  source 1..75: mol_type = other DNA
atggcaatataccggagcagtaaatggcttcaggcagtcagggatattgaattttgcgttctttgcggaagatac

SEQ ID NO: 552915 - DNA, 75 bp, synthetic construct
  source 1..75: mol_type = other DNA
attgaacaacatgcggcggattttgtcgctaaacgtcttgctccggcattaccggctaacgacggtaagcaaacc

SEQ ID NO: 552916 - DNA, 75 bp, synthetic construct
  source 1..75: mol_type = other DNA
atgatgcgggcaactctcttgccggtatcgcagtacttgaacaattgacgaaacaattaggacgctcggtttatt

SEQ ID NO: 552917 - DNA, 75 bp, synthetic construct
  source 1..75: mol_type = other DNA
ggctctcgaaaaccttggtttgggagaaggctctgcattacctgttggtgtccctgttccgtggccttcagctac

SEQ ID NO: 552918 - DNA, 75 bp, synthetic construct
  source 1..75: mol_type = other DNA
aaataataatactttcggcgcatttacctcttcaatagtgcaaccaaatctcacaccaattgcgataggtggtac

SEQ ID NO: 552919 - DNA, 75 bp, synthetic construct
  source 1..75: mol_type = other DNA
tcaatgggcaaaaatatcgtacaacaaactgtaatggtgtggtggtgtacgacggactgacaccttatcgggaaa

SEQ ID NO: 552920 - DNA, 75 bp, synthetic construct
  source 1..75: mol_type = other DNA
gatcagtttaactatggtatcaacttgagccatcaacatcagggaaatgaaacgacagctggggccaatttgacc

SEQ ID NO: 552921 - DNA, 75 bp, synthetic construct
  source 1..75: mol_type = other DNA
gccatcggttaatgtggcaattgataagcaacaagggctttcatgcacaatcaccttcggtaaagagattgatga

SEQ ID NO: 552922 - DNA, 75 bp, synthetic construct
  source 1..75: mol_type = other DNA
cgctttaatatctttatatcgatcccctttgactggggcaatgaggttacgacgacaggtcgacaaatatatata

SEQ ID NO: 552923 - DNA, 75 bp, synthetic construct
  source 1..75: mol_type = other DNA
aaaattttactccccgcgtgcagggaatcgcccagagtaacgcactggtaacaattgaacagaatggttttgttg

SEQ ID NO: 552924 - DNA, 75 bp, synthetic construct
  source 1..75: mol_type = other DNA
gataatcccgaagaaacatgcctggcgagagaaattataaagcggttaggtattaataccgatagcttcgccagt

SEQ ID NO: 552925 - DNA, 75 bp, synthetic construct
  source 1..75: mol_type = other DNA
cctgatactcccggttggatctggagtgcgctgttcctcggtatcatcttcctgctgaactacatctcagttcgt

SEQ ID NO: 552926 - DNA, 75 bp, synthetic construct
  source 1..75: mol_type = other DNA
acctgccgtaccgttcgggcttcttcccgttgggaccgatcttcgctttcattctgtgtctgatcatcaccctgg

SEQ ID NO: 552927 - DNA, 75 bp, synthetic construct
  source 1..75: mol_type = other DNA
cttatggtcagaactatgttgaagaaggctttggcttcgcgctgggctggaactattggtacaactgggcggtga

SEQ ID NO: 552928 - DNA, 75 bp, synthetic construct
  source 1..75: mol_type = other DNA
ttttgtcttattcaaaggccttacatttcaaaaactctgcttaccaggcgcatttcgcccaggggatcaccataa

SEQ ID NO: 552929 - DNA, 75 bp, synthetic construct
  source 1..75: mol_type = other DNA
aacgggcatgcggatcagtgagggtttgcaactgcgggtcaaggtatctggatttcgatcacggcacgatcatcg

SEQ ID NO: 552930 - DNA, 75 bp, synthetic construct
  source 1..75: mol_type = other DNA
gcttcctgacctcgatgtttggtaaccagacggtatacctgtggttgctgaacacctctggtatgacaggcttta

SEQ ID NO: 552931 - DNA, 75 bp, synthetic construct
  source 1..75: mol_type = other DNA
tatttgcagaatgccgggttagaagttcttgaagtgtccgcaccagaccggatggaacgacgcaaacggggtaaa

SEQ ID NO: 552932 - DNA, 75 bp, synthetic construct
  source 1..75: mol_type = other DNA
gacatccagcagcagatgcagcgtcgtgaagaggtgaacattaatgtgcaccgggagcgtggggaggatgttgag

SEQ ID NO: 552933 - DNA, 75 bp, synthetic construct
  source 1..75: mol_type = other DNA
tcaacgataagaagtcagattcaggtgtgaatgttccggcaggggggatcgagcaggagctgaaaatgaaaccgg

SEQ ID NO: 552934 - DNA, 75 bp, synthetic construct
  source 1..75: mol_type = other DNA
tattgtctttatcatcgttggcgtgctgatgattatcggtatcttcaaaggcgcgcagcctgcgggctggagcaa

SEQ ID NO: 552935 - DNA, 75 bp, synthetic construct
  source 1..75: mol_type = other DNA
gcggcaacgtatattggtatcccgctgttcctggccatctggtttggttacaagttgattaaaggaacccacttc

SEQ ID NO: 552936 - DNA, 75 bp, synthetic construct
  source 1..75: mol_type = other DNA
gtgtctgccacggttgcacgcgatgatgcatcagattaaaaatccggtgctaatgctgggagttggcggatttat

SEQ ID NO: 552937 - DNA, 75 bp, synthetic construct
  source 1..75: mol_type = other DNA
cgatgatttacacgcatgtgctgaaagttggcggtgccggagtgcgctcaccgcttgatggggtcgtttgcggga

SEQ ID NO: 552938 - DNA, 75 bp, synthetic construct
  source 1..75: mol_type = other DNA
gggtaattatcagggagaatgaggcggaggccactacgggcagcctgactgtcactaatcccggctcccgcccat

SEQ ID NO: 552939 - DNA, 75 bp, synthetic construct
  source 1..75: mol_type = other DNA
tgccatcgcgcgatttcgatgtgacagaggcgttttatgcgaagctgggctttgcgacgagttggaaggatcgcg

SEQ ID NO: 552940 - DNA, 75 bp, synthetic construct
  source 1..75: mol_type = other DNA
gttggtgctgcaaaaatggggatggatatccgtctggtggcaccaaaatctttctggccagatgaagcgctggta

SEQ ID NO: 552941 - DNA, 75 bp, synthetic construct
  source 1..75: mol_type = other DNA
gtggtgaagtcatccgcatttgcaacctcgaaggccgcgatatcgcccacggcgtcagtcgttacaacagcgatg

SEQ ID NO: 552942 - DNA, 75 bp, synthetic construct
  source 1..75: mol_type = other DNA
gaactgaaggacgaacagggacggatggtggagggtgtaccgctgatggtggagccaggggcactgcagcttgcg

SEQ ID NO: 552943 - DNA, 75 bp, synthetic construct
  source 1..75: mol_type = other DNA
gtgtatccggaactgtcccggctggagccagatttttcccgccgcctgctgattgcgccgtctctgtctcagtgg

SEQ ID NO: 552944 - DNA, 75 bp, synthetic construct
  source 1..75: mol_type = other DNA
ccaacattaccgaatttggcgccacgccgctgtttaccaccgatgaattacgcagcgcccatgtcgcaatggcgc

SEQ ID NO: 552945 - DNA, 75 bp, synthetic construct
  source 1..75: mol_type = other DNA
gacgtttgctcgctgccgttgctggtcgatgctgatattggttttggctcttcggcctttaacgtcgctcgtacc

SEQ ID NO: 552946 - DNA, 75 bp, synthetic construct
  source 1..75: mol_type = other DNA
tttcagcgcgccttcaaacgtgccgtagaacaagcaggcatcacgaagggcactgttgcaaatagtcggtggtga

SEQ ID NO: 552947 - DNA, 75 bp, synthetic construct
  source 1..75: mol_type = other DNA
atcctcggttttctggaaggcgagcatcgtttgttcgcccagcttctgtatggaacgggcatgcggatcagtgag

SEQ ID NO: 552948 - DNA, 75 bp, synthetic construct
  source 1..75: mol_type = other DNA
gaaccgaacaggcttatgtccactgggttcgtgccttcatccgtttccacggtgtgcgtcacccggcaaccttgg

SEQ ID NO: 552949 - DNA, 75 bp, synthetic construct
  source 1..75: mol_type = other DNA
cctgattttgtgatcatggcgcgcactgatgcactggcggttgaaggactggatgccgcgatcgagcgtgcgcag

SEQ ID NO: 552950 - DNA, 75 bp, synthetic construct
  source 1..75: mol_type = other DNA
gccacaacagccacaacagccacaacagccagtgtcttctgtcatcagtgataagaagtcagatgcaggtgtgag

SEQ ID NO: 552951 - DNA, 75 bp, synthetic construct
  source 1..75: mol_type = other DNA
aaaatcgtccgttttgaagagataacgcgtacaccgctggaagtgcaggactgtctgttaggtatgctttctgac

SEQ ID NO: 552952 - DNA, 75 bp, synthetic construct
  source 1..75: mol_type = other DNA
ttacgcctacgtgccgtttatggtgctgccgatttataccgcgttgattcgtattgattattcgctggtggaagc

SEQ ID NO: 552953 - DNA, 75 bp, synthetic construct
  source 1..75: mol_type = other DNA
tctgctgtggctgggagttatcgaccagccgctgaccattctgcatacaaacctggctgtttatatcggcattgt

SEQ ID NO: 552954 - DNA, 75 bp, synthetic construct
  source 1..75: mol_type = other DNA
gacctggtggactgtattgccggaaccatcgtcaaagataacgaagaagatcgcgctcgtctgcgccgttacttc

SEQ ID NO: 552955 - DNA, 75 bp, synthetic construct
  source 1..75: mol_type = other DNA
attccgcataaagtgcctgacgcggtactggagttactggtgcgcacctttcgcgatctgcgtgccaacggcgaa

SEQ ID NO: 552956 - DNA, 75 bp, synthetic construct
  source 1..75: mol_type = other DNA
gctgtcgaacgtatgttagtcactcttgctaccggccgcggtttgatgttggtgggggaaccgggtaccgcaaaa

SEQ ID NO: 552957 - DNA, 75 bp, synthetic construct
  source 1..75: mol_type = other DNA
tggcgcgcgctattccaccttataccgaactgatggagtgggctgacgggcaactgtccatcactcttaatctcg

SEQ ID NO: 552958 - DNA, 75 bp, synthetic construct
  source 1..75: mol_type = other DNA
ggcgaaagtgaaaaaaagaaaaaccggcaatctgtctaaacaatgcagaaccagcgaagttgaccccgctctcat

SEQ ID NO: 552959 - DNA, 75 bp, synthetic construct
  source 1..75: mol_type = other DNA
ccagctacctcaaagttaccagcgtatgccggactttcgccgccgtttcctgcaggcaagtgttgacgagatcaa

SEQ ID NO: 552960 - DNA, 75 bp, synthetic construct
  source 1..75: mol_type = other DNA
accattctgcataccaactttgcggtttatattggcattgtttacgctacgtgccgtttatggtgctgccgattt

SEQ ID NO: 552961 - DNA, 75 bp, synthetic construct
  source 1..75: mol_type = other DNA
ctgccaatctacaccgcgttgacgcgtattgattattcgctggtggaagcggcactggatctcggcgcacgaccg

SEQ ID NO: 552962 - DNA, 75 bp, synthetic construct
  source 1..75: mol_type = other DNA
gctgtttctgctgccatttctgattgtctttaagattagccttgcagagatggcgcgatccataccgccttacac

SEQ ID NO: 552963 - DNA, 75 bp, synthetic construct
  source 1..75: mol_type = other DNA
cagactcgccgacctgtaaaaaatgtcagggccgataactgcctggttatccgtaaaccgacaaagaaacgcaat

SEQ ID NO: 552964 - DNA, 75 bp, synthetic construct
  source 1..75: mol_type = other DNA
atgcctttagcagccaaactcaccgacaaaggcacccagcacgacggttattatgagaccgccatcaccgccggg

SEQ ID NO: 552965 - DNA, 75 bp, synthetic construct
  source 1..75: mol_type = other DNA
ggctcgcaacgaggggattaactataccgcaagccgtcttgctgctgctttcaaccacggatttatcaataagtc

SEQ ID NO: 552966 - DNA, 75 bp, synthetic construct
  source 1..75: mol_type = other DNA
atgtctgagcagtttttgtatttcttgcagcagatgtttaacggtgtcacgctgggcagtacctacgcgctgata

SEQ ID NO: 552967 - DNA, 75 bp, synthetic construct
  source 1..75: mol_type = other DNA
atgcctttagctgccagattaaacgacaaaggtacccagcatgatggctaccgtgagacagtcatcattgcggct

SEQ ID NO: 552968 - DNA, 75 bp, synthetic construct
  source 1..75: mol_type = other DNA
aacagccggtgtctcctgccatcaacgataagaagtcagattcaggtgtgaatgttccggcaggggggatcgagc

SEQ ID NO: 552969 - DNA, 75 bp, synthetic construct
  source 1..75: mol_type = other DNA
tgtttatttctcttatggttccaacatccatataggccgcaatttttacgcaaatttcaatttaaccatcgtcga

SEQ ID NO: 552970 - DNA, 75 bp, synthetic construct
  source 1..75: mol_type = other DNA
ctatgattaaggtagtcatagtattattttcccttttattctctacagcacaagcaggcttagtgatcggtggaa

SEQ ID NO: 552971 - DNA, 75 bp, synthetic construct
  source 1..75: mol_type = other DNA
cacggcaacgtatgctggaagtcgtgcgcggcttaagcggtgtgtctgatatttcctacgatacggtggtagcgc

SEQ ID NO: 552972 - DNA, 75 bp, synthetic construct
  source 1..75: mol_type = other DNA
cctgcaaaactacgttagcctgaccgaaggttcgcgtgacgtggcgctgcccagtctgtttaacgggcagtgggt

SEQ ID NO: 552973 - DNA, 75 bp, synthetic construct
  source 1..75: mol_type = other DNA
atggcctgtccggtgaatatgcggagaaatcccttgaagaatgggcggaacagattcgcaaaggaggcaaccagt

SEQ ID NO: 552974 - DNA, 75 bp, synthetic construct
  source 1..75: mol_type = other DNA
aacaatcggtacctgggctccggcattttgcttcttgctcgtttattccagggattatccgttggcggagaatat

SEQ ID NO: 552975 - DNA, 75 bp, synthetic construct
  source 1..75: mol_type = other DNA
atgacacagggctggcgggaggataaatgcccgtctgcccgcgcggggaaaaaaccgcgcgtcggtggcgctgaa

SEQ ID NO: 552976 - DNA, 75 bp, synthetic construct
  source 1..75: mol_type = other DNA
atgacacagggctggcgggaggataaatgcccgtctgcccgcgctgggaaaataccgcgcgtcggtggcgctgaa

SEQ ID NO: 552977 - DNA, 75 bp, synthetic construct
  source 1..75: mol_type = other DNA
atgacacagggctggcgggaggataaatgcccgtctgcccgcgcagggaaaagaccgcgcgtcggtggcgctgaa

SEQ ID NO: 552978 - DNA, 75 bp, synthetic construct
  source 1..75: mol_type = other DNA
gttattgaagttccggatattaccgctaatcgccgtattaccgtgcctggttactggttttaccgcgatggcaat

SEQ ID NO: 552979 - DNA, 75 bp, synthetic construct
  source 1..75: mol_type = other DNA
aaaacaggtcagcatcatgaccagcgaatgggaaaaagacctgctgctgggattaatcagtgacgaagacaggga

SEQ ID NO: 552980 - DNA, 75 bp, synthetic construct
  source 1..75: mol_type = other DNA
acatggctgccgaaattgagaagttgcgagcgcagagagacgcattagcggcggagaatgcagccctgaaagaat

SEQ ID NO: 552981 - DNA, 75 bp, synthetic construct
  source 1..75: mol_type = other DNA
atgacacagggcaggcgggaggataaatgcccgtctgcccgcgccgggaaaagaccgcgcgccggtggcgctgaa

SEQ ID NO: 552982 - DNA, 75 bp, synthetic construct
  source 1..75: mol_type = other DNA
ggcgacattggcagagctgacggcggtgactatttctgaacaagtattattgagcggcggctgtgagcgattgat

SEQ ID NO: 552983 - DNA, 75 bp, synthetic construct
  source 1..75: mol_type = other DNA
aatatgcttagcgattcgtatttttcccagcccgcgccgaaaagcaccggacgcgaatactttaactatggctgg

SEQ ID NO: 552984 - DNA, 75 bp, synthetic construct
  source 1..75: mol_type = other DNA
atgacacagggctggcgggaggataaatgcccgtctgaccgcgccgggaaaacaccgcgcgtcggtggcgctgaa

SEQ ID NO: 552985 - DNA, 75 bp, synthetic construct
  source 1..75: mol_type = other DNA
catattgaagcggtttccgtaagcccaggagaagttatcaaccatgtgaaaggcggcaagctgaagacactggta

SEQ ID NO: 552986 - DNA, 75 bp, synthetic construct
  source 1..75: mol_type = other DNA
ccaaacagatcgagttagtcgtaccctacgcggccggaggcggtacggatctggttgcccgtgcctttgctgatg

SEQ ID NO: 552987 - DNA, 75 bp, synthetic construct
  source 1..75: mol_type = other DNA
ggaaaaactgaaagcatgccgtatttatgcgaaagcactacagcagatgacattctgccaggttacagataaagc

SEQ ID NO: 552988 - DNA, 75 bp, synthetic construct
  source 1..75: mol_type = other DNA
cttcattcaacttttatcgcacagggcgcaaaacaaagcctgtaaaaaaatccagaaacagatatccaactgacg

SEQ ID NO: 552989 - DNA, 75 bp, synthetic construct
  source 1..75: mol_type = other DNA
caagtgcctgtaaaaagacatcctttcgtgacgatttttcgatggtctttaaagataatacggccacactcgccc

SEQ ID NO: 552990 - DNA, 75 bp, synthetic construct
  source 1..75: mol_type = other DNA
ggtgcaccaggattacttcttgcgtatcaaaatggagatattaatacgattcagtctttttttgactcactaata

SEQ ID NO: 552991 - DNA, 75 bp, synthetic construct
  source 1..75: mol_type = other DNA
cgttctattattgcggatatcgtggtgaaagttccggtgaccgccgaggggctggcagctattaagatgttaaaa

SEQ ID NO: 552992 - DNA, 75 bp, synthetic construct
  source 1..75: mol_type = other DNA
gccggatggtgaaaaccttgtgcaggtgcagtctgacgcgccggtcttctcacgaaaacagaaggggtttatctg

SEQ ID NO: 552993 - DNA, 75 bp, synthetic construct
  source 1..75: mol_type = other DNA
gccggagggagaggatcttgtgcaggttcagtctgatccacctgttttttcacgaaaacagaaggggtttatctg

SEQ ID NO: 552994 - DNA, 75 bp, synthetic construct
  source 1..75: mol_type = other DNA
aaaacaggtcagtatcatgaccagcgaatgggaaaaagacctgctgctgggattaatcagcgacgaagacaggga

SEQ ID NO: 552995 - DNA, 75 bp, synthetic construct
  source 1..75: mol_type = other DNA
tttgtcttcgactacaaacttaaagcggaagatgaacgcgatgccctgttacaacgggtcagcatcatgaccagc

SEQ ID NO: 552996 - DNA, 75 bp, synthetic construct
  source 1..75: mol_type = other DNA
atgatgcatttaaaaaatattaccgttcagaatcctaaaacgattgagcaataccagctggcgcgacagcataaa

SEQ ID NO: 552997 - DNA, 75 bp, synthetic construct
  source 1..75: mol_type = other DNA
taaaaaaggtatataacgatactcgatttacagatcttacaaaatctcagatgaaaatcttgtgtgaatcaaaaa

SEQ ID NO: 552998 - DNA, 75 bp, synthetic construct
  source 1..75: mol_type = other DNA
gcgaaatcgctgcaggcgatggatttcagcaccatcactgataaatcctcatataacgccattgaatggcccgtc

SEQ ID NO: 552999 - DNA, 75 bp, synthetic construct
  source 1..75: mol_type = other DNA
tttgttttcgactacaaactaaaagcggaaggcgagcgcgacgccctgttaaaacaggtcagcatcatgaccagc

SEQ ID NO: 553000 - DNA, 75 bp, synthetic construct
  source 1..75: mol_type = other DNA
tcgcgtggcttgcctggcggacgctggcggggctgccaggcaacctgccttcggtcaccggcgcaagcgaggcga

SEQ ID NO: 553001 - DNA, 75 bp, synthetic construct
  source 1..75: mol_type = other DNA
tgcttattcgcttttgccgccatttattacacatggtcagttttccgttaacaaagggtttaattattatatgcg

SEQ ID NO: 553002 - DNA, 75 bp, synthetic construct
  source 1..75: mol_type = other DNA
tgttacagtaacaaatgtatttgcggtttgtgatgacgcctcagcaactaaccctatgtatagttgtgttagtgt

SEQ ID NO: 553003 - DNA, 75 bp, synthetic construct
  source 1..75: mol_type = other DNA
agtccactcaaaaagacgtacctgagtccggtgaaatccgggcgcgggcacgtcgccccacctttggcgggcgcg

SEQ ID NO: 553004 - DNA, 75 bp, synthetic construct
  source 1..75: mol_type = other DNA
cagctacgatctgggccagggtgccggattttatctgaacgcgacggaacatccgtggaacacgcattacaggat

SEQ ID NO: 553005 - DNA, 75 bp, synthetic construct
  source 1..75: mol_type = other DNA
ggcggtaacacctgacagtaccagcgatttaccgagactttctattgattctttctctcagcttggttttgatgt

SEQ ID NO: 553006 - DNA, 75 bp, synthetic construct
  source 1..75: mol_type = other DNA
atggcggtttatgtagtaacaggcaaattaggctcaggcaagacacttgttagtgtttccagaatacaggaaaga

SEQ ID NO: 553007 - DNA, 75 bp, synthetic construct
  source 1..75: mol_type = other DNA
caataaagaccgttctccttatgccagtaaacatgccattcgtgatgtgcgtgcgcgccgccaggcaaatctgga

SEQ ID NO: 553008 - DNA, 75 bp, synthetic construct
  source 1..75: mol_type = other DNA
gccacgaacccatgattggcattatggggaaaagcggggccggtaaatcctcactctgtaatgcgctgtttcagg

SEQ ID NO: 553009 - DNA, 75 bp, synthetic construct
  source 1..75: mol_type = other DNA
tgggatgaagcgttcaagaaaatggacgatccatctggtcgtgcggttggtgttcaccagtcggcgtataagtaa

SEQ ID NO: 553010 - DNA, 75 bp, synthetic construct
  source 1..75: mol_type = other DNA
ggtgcgttaccgcctgtatgtccgtcgtcctgaaggtgatctgcctgacaccgtcaaagacgacaacaaagaggc

SEQ ID NO: 553011 - DNA, 75 bp, synthetic construct
  source 1..75: mol_type = other DNA
cgttaccggctcccacaccttctgagcacgccgcagcagtgcttaatctggttgatgacggtgttatcgaatgga

SEQ ID NO: 553012 - DNA, 75 bp, synthetic construct
  source 1..75: mol_type = other DNA
gaacggtatcagacctcagcgatgggagcttgagtcgctggcgcgtggggcaaccgtaaattatgacgggaaaaa

SEQ ID NO: 553013 - DNA, 75 bp, synthetic construct
  source 1..75: mol_type = other DNA
ggcgcaaccaaaaaagacttcgacaacacagttgccattcacccaacggcggcagaagagttcgtgaccatgcgt

SEQ ID NO: 553014 - DNA, 75 bp, synthetic construct
  source 1..75: mol_type = other DNA
gaagagtgcgaaatggcgtggctggaagcccaggagcaactggaacagatgctcctggaaggccaaagcaactga

SEQ ID NO: 553015 - DNA, 75 bp, synthetic construct
  source 1..75: mol_type = other DNA
aagcgtcaataaatccagcaagctgcctgataaggcgctggagtatctgaagcagaacggactgataagcgtgga

SEQ ID NO: 553016 - DNA, 75 bp, synthetic construct
  source 1..75: mol_type = other DNA
aaaggtgaagtatcggtggatatcccgcatgctgtaaccgggtgtcaacgacggatgaaaagtgatccacttata

SEQ ID NO: 553017 - DNA, 75 bp, synthetic construct
  source 1..75: mol_type = other DNA
gttggttagatactggagatgataacgctgaaccaggacagtattactgtcccctttaccgctacgccaccagta

SEQ ID NO: 553018 - DNA, 75 bp, synthetic construct
  source 1..75: mol_type = other DNA
tgtcaacgtacgtctggaaaataaagggaataacccgttgcttgtccagagttggttagatactggcgatgacaa

SEQ ID NO: 553019 - DNA, 75 bp, synthetic construct
  source 1..75: mol_type = other DNA
tcgccagatgctgcaagagatgggccgtgaaccaacgccggaagaactggctgaacgtatgctgatgccggaaga

SEQ ID NO: 553020 - DNA, 75 bp, synthetic construct
  source 1..75: mol_type = other DNA
gcgctggcgcgtggggcaactgtaaattacgacgggagaagcttcagttatcctgttatatgtgattggagagcg

SEQ ID NO: 553021 - DNA, 75 bp, synthetic construct
  source 1..75: mol_type = other DNA
gctcgataacgataccggcagaccgctgaaagacactgctgcggctgttaccgcatgggcgtcaacgtggcgcat

SEQ ID NO: 553022 - DNA, 75 bp, synthetic construct
  source 1..75: mol_type = other DNA
tttaataacaagccggatgagcatctggattacagcaacattccgaccgtggtcttcagccatccgccgattggt

SEQ ID NO: 553023 - DNA, 75 bp, synthetic construct
  source 1..75: mol_type = other DNA
ttaaagaaatcaaagaacgtatcagcagcctggacgtacgagacgatattgagcgccgggcttatgaaatagcgt

SEQ ID NO: 553024 - DNA, 75 bp, synthetic construct
  source 1..75: mol_type = other DNA
atggcacaagtaatctttaatgaagagtggatggttgaatacggcctgatgcttcgcactggtctgggggccaga

SEQ ID NO: 553025 - DNA, 75 bp, synthetic construct
  source 1..75: mol_type = other DNA
gctcaggggtgcattaaaacacggcctgaaaacaccaaatcgtcagcaaagaaacggaagcccgttaaaaccaca

SEQ ID NO: 553026 - DNA, 75 bp, synthetic construct
  source 1..75: mol_type = other DNA
ttatcttctgtgccgacaacgatcatgcacgccaggttaacaaaggtatcgtcagtgcaacaaaagccgcagaac

SEQ ID NO: 553027 - DNA, 75 bp, synthetic construct
  source 1..75: mol_type = other DNA
gtggatgagtatttctggcgacacatcctgcagtgcggacatcagcaggtgctgtttgtggtgacgcaggccgat

SEQ ID NO: 553028 - DNA, 75 bp, synthetic construct
  source 1..75: mol_type = other DNA
atcgcctattcaacatctggcacgtttagcgccgcaggagctggaacaaaaactgcgtgattacctcggcggctt

SEQ ID NO: 553029 - DNA, 75 bp, synthetic construct
  source 1..75: mol_type = other DNA
gcttacccacaacgctcaattatctgcagggcatgtaacgcaaatactgttttccctggtacagagttacaacag

SEQ ID NO: 553030 - DNA, 75 bp, synthetic construct
  source 1..75: mol_type = other DNA
gatgggcaacaatttcgtgactggctatcggcatacttaactgcatatgcttgtaaaaccggtcttttttgtccc

SEQ ID NO: 553031 - DNA, 75 bp, synthetic construct
  source 1..75: mol_type = other DNA
tggcaactatgggtgcaagaaaagaatcgtaaaatgacctgcccattaacaggcggagataataataatgctaaa

SEQ ID NO: 553032 - DNA, 75 bp, synthetic construct
  source 1..75: mol_type = other DNA
tcggcattattcccaatcactgaaatgtgaaatgaatgtcggcgtctatctcccaccaaaagccgcgaatgaaaa

SEQ ID NO: 553033 - DNA, 75 bp, synthetic construct
  source 1..75: mol_type = other DNA
cagaaattaacgaaagttgtcttctttattatcgcatcgaaaaacaaattacccctttcttttccagtaacttgt

SEQ ID NO: 553034 - DNA, 75 bp, synthetic construct
  source 1..75: mol_type = other DNA
tcacaggatctaaaattagcctttaactggtttacccgcgccgcgcagcataatgttatcgatgctcagtatgcg

SEQ ID NO: 553035 - DNA, 75 bp, synthetic construct
  source 1..75: mol_type = other DNA
ccaacgagcaatatgttgctgtggttgatacggctaaacgctcaagagcgcattatagaaaacaccaccgggaat

SEQ ID NO: 553036 - DNA, 75 bp, synthetic construct
  source 1..75: mol_type = other DNA
tgcgccactctgagacaatatctgcaggcctgtacccacccccgttgggccatagacgttgggctggctggcaga

SEQ ID NO: 553037 - DNA, 75 bp, synthetic construct
  source 1..75: mol_type = other DNA
gcgctggtgctggcgttacgtaacccagatgaatatgtcagcgtctcggcgttttcgcccattgtctccccatcg

SEQ ID NO: 553038 - DNA, 75 bp, synthetic construct
  source 1..75: mol_type = other DNA
tgcgattctgcgtccggttatcgctacgcatgggcattttcgtttactgagtatcctctatccagaggtgaagat

SEQ ID NO: 553039 - DNA, 75 bp, synthetic construct
  source 1..75: mol_type = other DNA
taaccggggcggtgctgcgggatatatcgcgaaatacatctcaaaaaacatcgacggctatgcactggatggtca

SEQ ID NO: 553040 - DNA, 75 bp, synthetic construct
  source 1..75: mol_type = other DNA
aggcaccggtaagacgtttaccggtgcttatgcatggaacgcgccacgcgaggccgtcgggcgcgaaagacccct

SEQ ID NO: 553041 - DNA, 75 bp, synthetic construct
  source 1..75: mol_type = other DNA
cgcgcctcggagtcctgtcaataactgtggaatgctcaccggtggtgatacttcgttaccggctcccacaccttc

SEQ ID NO: 553042 - DNA, 75 bp, synthetic construct
  source 1..75: mol_type = other DNA
ctcattgatgctggggtgatcgactggaatgacccggacgccgtgaaggtgatcaggggcgcgctaaaagcaggg

SEQ ID NO: 553043 - DNA, 75 bp, synthetic construct
  source 1..75: mol_type = other DNA
gcgctggtgcgtggcgcgaccgtaaattatgacgggaaaaaattcacgtatccggtcgctgatgagtggccggga

SEQ ID NO: 553044 - DNA, 75 bp, synthetic construct
  source 1..75: mol_type = other DNA
ccgaaagttccggtcgttgagcctttgactttaaaaagcggcatcgccgcgcctcggagtcctgtcaataactgt

SEQ ID NO: 553045 - DNA, 75 bp, synthetic construct
  source 1..75: mol_type = other DNA
atgtacatgcacgccgtctggcaaatcttgaatacctgaaatcctgcgagctggaaaacaaagttaccggcgaac

SEQ ID NO: 553046 - DNA, 75 bp, synthetic construct
  source 1..75: mol_type = other DNA
ggaatgacccggaggtcgtgagggcgctcaggggcgcattaaaacacggcctgagaacaccaaatcgtcagcaaa

SEQ ID NO: 553047 - DNA, 75 bp, synthetic construct
  source 1..75: mol_type = other DNA
accagaaaggcggagtgggtaagagtaccctctgtatccagcaggccttttatctggcgttacagaagaaaaaga

SEQ ID NO: 553048 - DNA, 75 bp, synthetic construct
  source 1..75: mol_type = other DNA
ctttgactttaaaaagcggcatcgccgcgcctcggagtcctgtcaataactgtggaaggctcgcccgaggtatcg

SEQ ID NO: 553049 - DNA, 75 bp, synthetic construct
  source 1..75: mol_type = other DNA
gggtaaagataagactgtacagctcaatcatggctggaatggtgaggcttacaccccgaaggatgcacagcgtta

SEQ ID NO: 553050 - DNA, 75 bp, synthetic construct
  source 1..75: mol_type = other DNA
cgccgcatggagctgatgaacaccatcgcggggattgagcgttatgccgctgctgagggtgatgtcggtatgttt

SEQ ID NO: 553051 - DNA, 75 bp, synthetic construct
  source 1..75: mol_type = other DNA
gtactggtttaccagagctgcaaaaaatggttccggggatgccatgtatgaattgggaaaatattatttaaccaa

SEQ ID NO: 553052 - DNA, 75 bp, synthetic construct
  source 1..75: mol_type = other DNA
cgtctgctgtgctggcactgctggatgagctggagcacgccagaaccatggctccagccattcgcctgacgctcc

SEQ ID NO: 553053 - DNA, 75 bp, synthetic construct
  source 1..75: mol_type = other DNA
tgagctggagcacgccagaaccatggctcctgccattcgtctgacgctccatcatgaaatcaaggatttctgcgc

SEQ ID NO: 553054 - DNA, 75 bp, synthetic construct
  source 1..75: mol_type = other DNA
tccggacgctaacccgcgtctgcgtgcagcaattgataaagcactgtctaacaacatgacccgtgacactctgaa

SEQ ID NO: 553055 - DNA, 75 bp, synthetic construct
  source 1..75: mol_type = other DNA
taggggatgtgaagagcaccacttcaaagataagaacgcagctctacggattggtccaggccagccagcgagttg

SEQ ID NO: 553056 - DNA, 75 bp, synthetic construct
  source 1..75: mol_type = other DNA
atgagcatcatcaaccaccaggaattacgcgaactggcgactgccgtgcaaagaatacccctccatgaatcacta

SEQ ID NO: 553057 - DNA, 75 bp, synthetic construct
  source 1..75: mol_type = other DNA
aacgctgggttcacccggagaacccgaaacaccggaagcaatgcagcgcgaactgcttcaacgcatcgacaaggt

SEQ ID NO: 553058 - DNA, 75 bp, synthetic construct
  source 1..75: mol_type = other DNA
ccaccgaaagcctgcgtgcggcaacgcacgacgtgctggctggcctgaccgcgcgtgaagcgaaagttctgcgta

SEQ ID NO: 553059 - DNA, 75 bp, synthetic construct
  source 1..75: mol_type = other DNA
ggcaacgcacgacgtgctggctggcctgaccgcgcgtgaagcaaaagttctgcgtatgcgtttcggtatcgatat

SEQ ID NO: 553060 - DNA, 75 bp, synthetic construct
  source 1..75: mol_type = other DNA
tcttcgttccgccggttacaggggaaaatgcagctctttgaagtcgatcctcaaaaatttaaccgtaatagactg

SEQ ID NO: 553061 - DNA, 75 bp, synthetic construct
  source 1..75: mol_type = other DNA
ccgttgctgaagtgcgtcatgcattcagcaaatgtggcggtaacctcggtacagatggttccgtagcctatctgt

SEQ ID NO: 553062 - DNA, 75 bp, synthetic construct
  source 1..75: mol_type = other DNA
atatcgtcgattccgatcagatcgaagacatcatccaaatgatcaatgacatgggcattcaggtgatggaagaag

SEQ ID NO: 553063 - DNA, 75 bp, synthetic construct
  source 1..75: mol_type = other DNA
aagatatcaaccgtcgtatgtccatcggtgaagcgaaagcccgccgtgcgaagaaagagatggttgaagcgaact

SEQ ID NO: 553064 - DNA, 75 bp, synthetic construct
  source 1..75: mol_type = other DNA
gtcattgggcaaagcgtgtttaaactgtttatgagccgtcgtgaagctgcggcatccaggcgcaataaccgtgta

SEQ ID NO: 553065 - DNA, 75 bp, synthetic construct
  source 1..75: mol_type = other DNA
cccgtttgcagccaaatgacacccgtgacgacgtgcaaagtatcgccgcgcaaatctacgaagggctggtaatga

SEQ ID NO: 553066 - DNA, 75 bp, synthetic construct
  source 1..75: mol_type = other DNA
ccgcagagcacactacgttcgtatcgtcggcagatgccccggaacctgagccctctgccacagagacagcatcca

SEQ ID NO: 553067 - DNA, 75 bp, synthetic construct
  source 1..75: mol_type = other DNA
ctgctgtaccgccccaacagcccgctgaagctgcggcatcgccgacacaggatgaaacgccacagccgccggcaa

SEQ ID NO: 553068 - DNA, 75 bp, synthetic construct
  source 1..75: mol_type = other DNA
aagcccggcaccatcgagcgggccagaagaaagtcatggatgcagggaaaagaataccgccattacgctgtagaa

SEQ ID NO: 553069 - DNA, 75 bp, synthetic construct
  source 1..75: mol_type = other DNA
actgtgaaaaacctccactactgtttccatttacagccttgacgtgcgacgaaactccagtttttagtggttcag

SEQ ID NO: 553070 - DNA, 75 bp, synthetic construct
  source 1..75: mol_type = other DNA
cacgaactcgctaaaaaacgccaaagctggcaatggcacgcgcttttcacgaaaagaacaccccgaggcattgct

SEQ ID NO: 553071 - DNA, 75 bp, synthetic construct
  source 1..75: mol_type = other DNA
tcgatgccgggacattccgggcagcaatggagcagatttgccgggtactgccacagtggcaggatgagctgaaac

SEQ ID NO: 553072 - DNA, 75 bp, synthetic construct
  source 1..75: mol_type = other DNA
cctgaaagattccgagaaaaccggtaactggtttgcgctgggtacaccgcgcaacggccagccggtgctgtttgc

SEQ ID NO: 553073 - DNA, 75 bp, synthetic construct
  source 1..75: mol_type = other DNA
caccggactgccgaatcgtaacgcaatgcaggtgaaccgccccggttttcctggagagtgttttatctgtgaact

SEQ ID NO: 553074 - DNA, 75 bp, synthetic construct
  source 1..75: mol_type = other DNA
gacgacgctcacacaaccggaaaaccccgacacggcagaaacctccgcagaacatacggatgccactgcagcacc

SEQ ID NO: 553075 - DNA, 75 bp, synthetic construct
  source 1..75: mol_type = other DNA
ggtgaatgctgtttctgccattgacagcaacgcaaagaatacctctgccgccaccactgacgaccgaaatgtatt

SEQ ID NO: 553076 - DNA, 75 bp, synthetic construct
  source 1..75: mol_type = other DNA
gctgtccggtgaaacgcgggatcgtatccgtaatatctgggccataaccccggtcagtaacggcattaccgttaa

SEQ ID NO: 553077 - DNA, 75 bp, synthetic construct
  source 1..75: mol_type = other DNA
acggtatcacgcatattggtccggcacggcaacaggacggcgattacagttatctggcggatattttgcaaaccg

SEQ ID NO: 553078 - DNA, 75 bp, synthetic construct
  source 1..75: mol_type = other DNA
acggcattacccatatcggcccggcgcgtcaacaggatggcgattacagttatctggccgatgttttacaaaccg

SEQ ID NO: 553079 - DNA, 75 bp, synthetic construct
  source 1..75: mol_type = other DNA
aatcgactatatcaatggttttctcttacgccgcgcccgcgcgcatgggattgccgtaccggaaaacacccgcct

SEQ ID NO: 553080 - DNA, 75 bp, synthetic construct
  source 1..75: mol_type = other DNA
atgagatagaacacaactccataacaaatggtgactcaatcgagctaataaaaaaagtacaaactcaatccgcac

SEQ ID NO: 553081 - DNA, 75 bp, synthetic construct
  source 1..75: mol_type = other DNA
tgaaacagacggttcgatatttaacgaatctctgaccgccaatgatccagattttctggccaccagcgatctgtt

SEQ ID NO: 553082 - DNA, 75 bp, synthetic construct
  source 1..75: mol_type = other DNA
gttccttcaaagctgtcagggagaagctggatacccgtcgcggctctcattccgaactggagacagcggtaaaag

SEQ ID NO: 553083 - DNA, 75 bp, synthetic construct
  source 1..75: mol_type = other DNA
gttcagggctggctgcgcgtaccgcaaccttattgtagtgtgaatctggttgagacagatggttcgatatttaac

SEQ ID NO: 553084 - DNA, 75 bp, synthetic construct
  source 1..75: mol_type = other DNA
tccgagctggagacagcggtaaaagacctgggtaaagcggtgtcctataagggtatgtatggcgatgttgccatc

SEQ ID NO: 553085 - DNA, 75 bp, synthetic construct
  source 1..75: mol_type = other DNA
caacgttctgatattgaagcagctgtggcagccgctaatgaaggtgatggtaaagaagcgaaatcattgctgtct

SEQ ID NO: 553086 - DNA, 75 bp, synthetic construct
  source 1..75: mol_type = other DNA
cgatcagatgactgaacgtgctatcgctggcgctggtaatttatcaactgactgcctgcgcaatccggtaaaact

SEQ ID NO: 553087 - DNA, 75 bp, synthetic construct
  source 1..75: mol_type = other DNA
ctacggaagaagcttcaactcctgtaatagattgggataaggaggaccgaaagttgcatattactgatccatttt

SEQ ID NO: 553088 - DNA, 75 bp, synthetic construct
  source 1..75: mol_type = other DNA
gttgagtatccgtacttcgtacccgcatgctgagagcgaatgggtatttttatcgcgtaagggaaatccgctttc

SEQ ID NO: 553089 - DNA, 75 bp, synthetic construct
  source 1..75: mol_type = other DNA
atggtaactgaacaaataaactcactacggcaggaacgtgaggcgtcagttatcggcgggctgctgttgggcggc

SEQ ID NO: 553090 - DNA, 75 bp, synthetic construct
  source 1..75: mol_type = other DNA
caacggattgcctacgtaatccggtaaaactggatgacgaaggttgggcgcacgtcacccagggaatgagtgccc

SEQ ID NO: 553091 - DNA, 75 bp, synthetic construct
  source 1..75: mol_type = other DNA
actgtttaccagcgatttgacgacaacggcaatatcctcccttgtgaccaggcccgcgcagcgtctgcatgtatt

SEQ ID NO: 553092 - DNA, 75 bp, synthetic construct
  source 1..75: mol_type = other DNA
gctggttcgggttcgatctggcaaggacaccatctacaggggagcagccatttgaaccccctcggaggtgattgt

SEQ ID NO: 553093 - DNA, 75 bp, synthetic construct
  source 1..75: mol_type = other DNA
tatgtgttgatttcggcatatatacatggtattggagagcgtggcacctcaaaaacagatgatttgcttaagaac

SEQ ID NO: 553094 - DNA, 75 bp, synthetic construct
  source 1..75: mol_type = other DNA
gtgatcgccattgatgtcaatgatgagcagttaaaactggcaaccgaaatgggtgcagatttagcgattaactca

SEQ ID NO: 553095 - DNA, 75 bp, synthetic construct
  source 1..75: mol_type = other DNA
acgcttcttgatcctgtaataatggaactgcaagaaatagatctattgcacgacagatataaagaacagcacacc

SEQ ID NO: 553096 - DNA, 75 bp, synthetic construct
  source 1..75: mol_type = other DNA
ggcgcggattattacatcattaataacgcttcttgagcctgtaataaatgagttgcaggaaatagagacattgca

SEQ ID NO: 553097 - DNA, 75 bp, synthetic construct
  source 1..75: mol_type = other DNA
accgcgcacttcttgcaatttctcacagtgaaaatatgttggaaatattgcgcatatgtcttgaaacgcttggag

SEQ ID NO: 553098 - DNA, 75 bp, synthetic construct
  source 1..75: mol_type = other DNA
cgaacagtcacggtactggctgggggggaatgcgcaggcgctaattgcccgacatgcggcaggcatgattgtcag

SEQ ID NO: 553099 - DNA, 75 bp, synthetic construct
  source 1..75: mol_type = other DNA
attgcggaccttggaggcagtgatgcctccgtgttttatgaggcaatcaaccgacaggatgggagcagtacgcct

SEQ ID NO: 553100 - DNA, 75 bp, synthetic construct
  source 1..75: mol_type = other DNA
gaggcagaccgttcgacgggacgttccccgctgccggcctttattccttcagcgctattcagtgaactcaatctg

SEQ ID NO: 553101 - DNA, 75 bp, synthetic construct
  source 1..75: mol_type = other DNA
ctgatggaaaacgcggcgaagcaatttaacaacattggcgcgacgactcctgtcgttccatttcgtattttgctg

SEQ ID NO: 553102 - DNA, 75 bp, synthetic construct
  source 1..75: mol_type = other DNA
gcaccgatttggctcaccgtcttcagttatcccattacccggttctgatcacagaaaccgggctgacccagcagg

SEQ ID NO: 553103 - DNA, 75 bp, synthetic construct
  source 1..75: mol_type = other DNA
tggtcagtgcgctcatgacagcgcttcccggccatgccgccagtcccctgatgacccgcctgcaggaagaactgc

SEQ ID NO: 553104 - DNA, 75 bp, synthetic construct
  source 1..75: mol_type = other DNA
catggtcaagaaggaaaaaaacaaaggtcgcgtaagccttcgttatctgatgtacaaaaccgaccaggttcgtga

SEQ ID NO: 553105 - DNA, 75 bp, synthetic construct
  source 1..75: mol_type = other DNA
caattgaaaaaccactggcctccctgccttactcactttcccgtcacatcctggaacatctgcgcaaactcacca

SEQ ID NO: 553106 - DNA, 75 bp, synthetic construct
  source 1..75: mol_type = other DNA
gggttggcacactgcgccttccctggctcaaagagaaaaacggatggttgctgccgtggggtaatgtcgttacca

SEQ ID NO: 553107 - DNA, 75 bp, synthetic construct
  source 1..75: mol_type = other DNA
cgttgcgcatcactgacgagcaacttcagcgtgtactgtggtcgccgccccgttcgatcatgatggagttgctgc

SEQ ID NO: 553108 - DNA, 75 bp, synthetic construct
  source 1..75: mol_type = other DNA
gccgcccgcctggtcggggcgaagctggatctcgacgaagactccattctactgttgcagatgattccactgcgt

SEQ ID NO: 553109 - DNA, 75 bp, synthetic construct
  source 1..75: mol_type = other DNA
ccgatgccattttgctcagcaaagctaaaaaagatctctcatttgccgagattgccgacggcaccggtctggcag

SEQ ID NO: 553110 - DNA, 75 bp, synthetic construct
  source 1..75: mol_type = other DNA
ctgatggaaaacgcggcgaagcaatttaataacattggggcgacgactccggtcgttccatttcgtattttgctg

SEQ ID NO: 553111 - DNA, 75 bp, synthetic construct
  source 1..75: mol_type = other DNA
agtgtgcttttttgtggctggtggcaagtagcgctttagccgcggatagcacgattactatccgcggctatgtca

SEQ ID NO: 553112 - DNA, 75 bp, synthetic construct
  source 1..75: mol_type = other DNA
atgacacctctagatgtcacgcgttacgccacccacgcaacagcctcattacgcaataaaaccaagcaacaggcg

SEQ ID NO: 553113 - DNA, 75 bp, synthetic construct
  source 1..75: mol_type = other DNA
cgatggtgctgggtaacactcatgcacgcggtctgcgcacctatggctgtattcaggatgcggatgcattgagtg

SEQ ID NO: 553114 - DNA, 75 bp, synthetic construct
  source 1..75: mol_type = other DNA
cagaggccaccggagccgccaacggagaactacgcagacctgagaaatgcagtaaatcgcacttatgcagacatg

SEQ ID NO: 553115 - DNA, 75 bp, synthetic construct
  source 1..75: mol_type = other DNA
cactggaagcgcgtggtctgtaccggagagcggcggaaagatgggcagaagtcataatgcgagtggatggtgata

SEQ ID NO: 553116 - DNA, 75 bp, synthetic construct
  source 1..75: mol_type = other DNA
cgacgaaatcaccgaagcctactacaccaccggccactacagcatctttattaaggtgatgtgccgctcgatcga

SEQ ID NO: 553117 - DNA, 75 bp, synthetic construct
  source 1..75: mol_type = other DNA
atgaaaatacgcagcccccgggaagtgcagcgcttccgtctgaatggccatggtcacagcatggttatcactgac

SEQ ID NO: 553118 - DNA, 75 bp, synthetic construct
  source 1..75: mol_type = other DNA
tttactctgatggctgttacattcgttaccttgctagttataagctcagttatcaatttttttggttatttttgg

SEQ ID NO: 553119 - DNA, 75 bp, synthetic construct
  source 1..75: mol_type = other DNA
cagagggcaccggagccgccggataatttcggagacctgaaaaaggcacgtcgatcgcacttatgccgaaatggg

SEQ ID NO: 553120 - DNA, 75 bp, synthetic construct
  source 1..75: mol_type = other DNA
gccctgacctttacgaataaagcagcggaagaaatgagtacgcgtttaagtgatttcgatccggatgaagatagg

SEQ ID NO: 553121 - DNA, 75 bp, synthetic construct
  source 1..75: mol_type = other DNA
tcaaaaaaaatacgttgctttatttgttgatgaagctcaagacttaaacagagctcagtacgaatttataaaggt

SEQ ID NO: 553122 - DNA, 75 bp, synthetic construct
  source 1..75: mol_type = other DNA
tgctttcgtagctataacacgatctcggcgttggatttttgttacttatccagaaaaaagaatgatgccttgggg

SEQ ID NO: 553123 - DNA, 75 bp, synthetic construct
  source 1..75: mol_type = other DNA
aatggaaaatgcacgcactgcttacgccgaactggcgaaacaatttggtgtaagcccggggacgattcacgttcg

SEQ ID NO: 553124 - DNA, 75 bp, synthetic construct
  source 1..75: mol_type = other DNA
taatgctgttctaagacgttttcttgatacagatatcaaagaaatacgtatttttcccgggatgaaaaaaaacaa

SEQ ID NO: 553125 - DNA, 75 bp, synthetic construct
  source 1..75: mol_type = other DNA
gtaggtgaccctaatcaaatgatttatggttttaatgggtcgtcaaaagactacttttgtgagaattttattaat

SEQ ID NO: 553126 - DNA, 75 bp, synthetic construct
  source 1..75: mol_type = other DNA
gctcagaggtgcattaaaacacggtcggagaacgccaagtcgtcagcaaagaaacggaagcccgttaaaaccgca

SEQ ID NO: 553127 - DNA, 75 bp, synthetic construct
  source 1..75: mol_type = other DNA
ggtgatacttcgttaccggctcccacaccttctgagcacgccgcagcagtgcttaatctggttgatgacggtgtt

SEQ ID NO: 553128 - DNA, 75 bp, synthetic construct
  source 1..75: mol_type = other DNA
ctggtcagtgcgctcatgacagcgcttcccgaccatgccgccagtcccctgatgacccgcctgcaggacgagctg

SEQ ID NO: 553129 - DNA, 75 bp, synthetic construct
  source 1..75: mol_type = other DNA
gaaacggaagcccgttaaaaccgaatgaaatagcgccatcggccaggctgacccggtcggagcgtatgcaaatta

SEQ ID NO: 553130 - DNA, 75 bp, synthetic construct
  source 1..75: mol_type = other DNA
tgggatgaagcgttcaagaaaatggacgatccgtctggtcgcgcggttggcgttcaccagtcggcatataaataa

SEQ ID NO: 553131 - DNA, 75 bp, synthetic construct
  source 1..75: mol_type = other DNA
aaaacgagctacgtcaggcactggaagattccgttaaaagccatctgatgtctgacgtgccttacggcgtgctgc

SEQ ID NO: 553132 - DNA, 75 bp, synthetic construct
  source 1..75: mol_type = other DNA
tgggatgaagcgttcaagaaaatggacgatccgtctggtcgcgcggttggcgttcaccagtcggcgtataagtaa

SEQ ID NO: 553133 - DNA, 75 bp, synthetic construct
  source 1..75: mol_type = other DNA
acaaggcgcaccgctggtacctgcgttccatcatgcgctgctggctcacccaaccgagcgacgaatggtgctcaa

SEQ ID NO: 553134 - DNA, 75 bp, synthetic construct
  source 1..75: mol_type = other DNA
cgtcatattcatatcaccagaacgacggactggcgcattgtgccgaaagttccggtcgttgagcctttgacttta

SEQ ID NO: 553135 - DNA, 75 bp, synthetic construct
  source 1..75: mol_type = other DNA
tgaaatggcaccatcggccagactgacccggtcagaacgaatgcaaattacccgtatccgcgttgaccttgctca

SEQ ID NO: 553136 - DNA, 75 bp, synthetic construct
  source 1..75: mol_type = other DNA
ctggaacatctgcgtaaactcaccagtcacgaacccgtgattggcattatgggtaaaagcggggccggtaaatcc

SEQ ID NO: 553137 - DNA, 75 bp, synthetic construct
  source 1..75: mol_type = other DNA
gagagccgggacagggatgcagagtatgaagccctgtaccgtgacattctgcctgaactggacctggtactgtgg

SEQ ID NO: 553138 - DNA, 75 bp, synthetic construct
  source 1..75: mol_type = other DNA
cgcaacctgcaccgaaaagcaccggacgcgaatactttaactacggctggctggagcgccatttgcgccattttc

SEQ ID NO: 553139 - DNA, 75 bp, synthetic construct
  source 1..75: mol_type = other DNA
gaaccgggtctggtgggtggcaccgagttttccaatgtccgctttaaaggcgatgacggtaaagcggaaaaaacc

SEQ ID NO: 553140 - DNA, 75 bp, synthetic construct
  source 1..75: mol_type = other DNA
gtttataccatcgccgacccgcgtcatcaggtgatcaaacgcgtggcgaagcagctctcgcaggaaggcggctcg

SEQ ID NO: 553141 - DNA, 75 bp, synthetic construct
  source 1..75: mol_type = other DNA
gtttacaccatcgctgacccgcgccaccaggtgattaaacgtgtggcgaagcagctctcgcaggaaggcggctcg

SEQ ID NO: 553142 - DNA, 75 bp, synthetic construct
  source 1..75: mol_type = other DNA
gccagccagaccattagcacgcaggcagacgagctgcagagcaaaagtcaggcactggcaaagagcaacagccag

SEQ ID NO: 553143 - DNA, 75 bp, synthetic construct
  source 1..75: mol_type = other DNA
atgataaaatatatattcgcactcacacttctgctttccggttctgtctgtgccgttcaaattcagggactcgtt

SEQ ID NO: 553144 - DNA, 75 bp, synthetic construct
  source 1..75: mol_type = other DNA
cagacgagctgcagagcaaaagccaggcactggcaaagagcaacagccagcttatcagcctgtccattctgactg

SEQ ID NO: 553145 - DNA, 75 bp, synthetic construct
  source 1..75: mol_type = other DNA
atattcgtcatactgtctggtataccgccagcaatgcagggcgtttttacggcatctgggatagagccagaggac

SEQ ID NO: 553146 - DNA, 75 bp, synthetic construct
  source 1..75: mol_type = other DNA
catcgacgcatcgagtcaggcgatggatgagcttgtaaagcgtctttcagccatcagaaagccccgtgacgaggt

SEQ ID NO: 553147 - DNA, 75 bp, synthetic construct
  source 1..75: mol_type = other DNA
accagcaaaaactgcccgagtgccgcaaacctgaagggatatgccggaatggtcgcggataactatcaccgccgt

SEQ ID NO: 553148 - DNA, 75 bp, synthetic construct
  source 1..75: mol_type = other DNA
atgaacgccaatgaaccgagcaccagttgctgcgtgtgctgcaaggaaatcccgctcgatgccgccttcacgccg

SEQ ID NO: 553149 - DNA, 75 bp, synthetic construct
  source 1..75: mol_type = other DNA
aagaagttcaggctttaaaaaactggttgagtacgcgtacttcttatccacatgctgagagcgagtgggtatttt

SEQ ID NO: 553150 - DNA, 75 bp, synthetic construct
  source 1..75: mol_type = other DNA
ttatacaaagcgggtagcatctataactggcgatgggttggagtaggtgctttctcatcagtccgttgcaatgct

SEQ ID NO: 553151 - DNA, 75 bp, synthetic construct
  source 1..75: mol_type = other DNA
gccaggtgtctatacgttcacattcaacgcactgacgtatggcgggtacgaaatgacgcctgtgaaggtgacaat

SEQ ID NO: 553152 - DNA, 75 bp, synthetic construct
  source 1..75: mol_type = other DNA
gagcttgattttataattgatagtgaatcattgtctgtaggcagaccgtggcctaataaatgtttatgggttgga

SEQ ID NO: 553153 - DNA, 75 bp, synthetic construct
  source 1..75: mol_type = other DNA
acttcacactattcagtctgaacgattgagtacagattgctctttattcaaaagacaaccgtctattgaaagtgc

SEQ ID NO: 553154 - DNA, 75 bp, synthetic construct
  source 1..75: mol_type = other DNA
tcataacggttgtcgtccgccgaaaaaaacgtcgcgtataacgcctcgttttccaggtttgttggagaaagaaaa

SEQ ID NO: 553155 - DNA, 75 bp, synthetic construct
  source 1..75: mol_type = other DNA
ctgcgacgtgtcagtaaacgttatgacgatgtagaagtgatcatcaaatccaccagcaacgatggcctttcagtt

SEQ ID NO: 553156 - DNA, 75 bp, synthetic construct
  source 1..75: mol_type = other DNA
gctctatgccgaagcagaacagaccagtgcactgctgagacaacgacaacaccggatcgaggaactgaaacgtga

SEQ ID NO: 553157 - DNA, 75 bp, synthetic construct
  source 1..75: mol_type = other DNA
caccggaggtacggcttaccgtcagtggttgtccgcgagtgacgccgtgtcggctggatcaggcaacgccgcgca

SEQ ID NO: 553158 - DNA, 75 bp, synthetic construct
  source 1..75: mol_type = other DNA
gaccatgccgttgatggaaccgttacgtcaggcggcagaaaaactggctcaggcgcaggcagatttaagccgctg

SEQ ID NO: 553159 - DNA, 75 bp, synthetic construct
  source 1..75: mol_type = other DNA
acggagccctgccatgaatgggatatggccggtattcagccttctcccgcacaggcacagaacattcgcgaaaaa

SEQ ID NO: 553160 - DNA, 75 bp, synthetic construct
  source 1..75: mol_type = other DNA
cagggtgcattcagcttatgaaaataatcctccagccagaattcagccaaaaatggaatctttattaaataaacc

SEQ ID NO: 553161 - DNA, 75 bp, synthetic construct
  source 1..75: mol_type = other DNA
tatacctgggatattgaagatatgggattaatttatcatcaggttaatacttatattgaagataatgaatttgat

SEQ ID NO: 553162 - DNA, 75 bp, synthetic construct
  source 1..75: mol_type = other DNA
aagctactttcctgccccatccgcccggttgacaaggcaggagagaaagactatcccgaaaattaaggttcttct

SEQ ID NO: 553163 - DNA, 75 bp, synthetic construct
  source 1..75: mol_type = other DNA
gaattttgattcacgctatgtaaaagatgttcgcctgggtacgcgagttgctcaattgatggcgcgtggtggtcg

SEQ ID NO: 553164 - DNA, 75 bp, synthetic construct
  source 1..75: mol_type = other DNA
gcgtcaggttcgatggttctggtgacattaatatcaatactctggtatcgcgcggtcgcgtaacggccttggagg

SEQ ID NO: 553165 - DNA, 75 bp, synthetic construct
  source 1..75: mol_type = other DNA
tgtacgtgatatccgacttggtggcgcatcatcatacaaaccagcaaataatggcacaacatggacacatcaggc

SEQ ID NO: 553166 - DNA, 75 bp, synthetic construct
  source 1..75: mol_type = other DNA
atgaatggtgtaaacgtcgggaaagataactctcgtcactcatttgtttttacaggcaaaggtggtgagtatttt

SEQ ID NO: 553167 - DNA, 75 bp, synthetic construct
  source 1..75: mol_type = other DNA
atgtattccgctttataaatggttcagcaagatcattaaagggtattcaggctggggaaagtaagttcttcacac

SEQ ID NO: 553168 - DNA, 75 bp, synthetic construct
  source 1..75: mol_type = other DNA
gatggttcaagcacatacttcatgttgaccgcctcgggtgacaatcttggaacatggaatagtttaagaccgctt

SEQ ID NO: 553169 - DNA, 75 bp, synthetic construct
  source 1..75: mol_type = other DNA
taaagctgttggctggaactggaatagcggcgtttatgatgcagatatcagtggtgcatcgacattaatcctcca

SEQ ID NO: 553170 - DNA, 75 bp, synthetic construct
  source 1..75: mol_type = other DNA
cgagttgctcattggctggagtggcacaaatggcgctcatgcaccagctttcattcgatccaaaagagatagcac

SEQ ID NO: 553171 - DNA, 75 bp, synthetic construct
  source 1..75: mol_type = other DNA
ggtaaccatccggcggtggcactgcgtactgacggtgaccaggtacagattaacaacgttaacattctcggtcgt

SEQ ID NO: 553172 - DNA, 75 bp, synthetic construct
  source 1..75: mol_type = other DNA
taatatcaatactctggtatcgcgcggtcgcgtaacggccttggaggcgaatgcacagggaacatctgggattca

SEQ ID NO: 553173 - DNA, 75 bp, synthetic construct
  source 1..75: mol_type = other DNA
gcgtcaatgccaaagggaatcaggacacctctggtaatgcggctacagcgaccaagttgcagacagcatgtacta

SEQ ID NO: 553174 - DNA, 75 bp, synthetic construct
  source 1..75: mol_type = other DNA
cccgtacatatccgttcgcggcgtgatactgattctgccaactggtctgaatgggcacaggtctatacgtcaaaa

SEQ ID NO: 553175 - DNA, 75 bp, synthetic construct
  source 1..75: mol_type = other DNA
tggtattatgatcgcaccagtattccagcagttaatgatgatgaccatgttgggtaggtctgatgctggcagtga

SEQ ID NO: 553176 - DNA, 75 bp, synthetic construct
  source 1..75: mol_type = other DNA
gtcccgcaaatgacgctgacccgcagcgatggcgaccgtcatcagtttgccattgctgaccgtggggcttacacc

SEQ ID NO: 553177 - DNA, 75 bp, synthetic construct
  source 1..75: mol_type = other DNA
tgcgatgacggccagcggcaaacccgtcccgcaaatgacgctgacccgcagtgatggtgaccgtcatcagtttgc

SEQ ID NO: 553178 - DNA, 75 bp, synthetic construct
  source 1..75: mol_type = other DNA
agcacccgaaagcaaagccggttagcaaaaagacaaaggccaaaaaagagccggaggcgcgcgagggtgagtata

SEQ ID NO: 553179 - DNA, 75 bp, synthetic construct
  source 1..75: mol_type = other DNA
cttaatcgtacctatgccaatcggagcaatgcagagcgcgcagcaaaaatgcagtgggaacgtctgcagcgtggg

SEQ ID NO: 553180 - DNA, 75 bp, synthetic construct
  source 1..75: mol_type = other DNA
ccggtaccagccttgcaccggcatttatgctgacgctgaacagccaggacattaccagtaattttagtgaccgac

SEQ ID NO: 553181 - DNA, 75 bp, synthetic construct
  source 1..75: mol_type = other DNA
ataccggtaccgcatatcgaccagtcgcaggagtccgacgccgtatttctgacccggctggctgaccgcaacggg

SEQ ID NO: 553182 - DNA, 75 bp, synthetic construct
  source 1..75: mol_type = other DNA
tttaacttagtgatgttaagtttactttctgtcgtcgggctgggcgttattcatggtgttacctatagtaaatgg

SEQ ID NO: 553183 - DNA, 75 bp, synthetic construct
  source 1..75: mol_type = other DNA
ctgcgtatgttggcggtattaatggggtcttcaatcacttgtggcctggcttatccctggctgaaaatgtggatg

SEQ ID NO: 553184 - DNA, 75 bp, synthetic construct
  source 1..75: mol_type = other DNA
gacgacatcgataggtgggttattctttaacttagtggtcttaagtttgctttccgtcatcggactgggtgttat

SEQ ID NO: 553185 - DNA, 75 bp, synthetic construct
  source 1..75: mol_type = other DNA
cattgctgaccgtggggcttacaccggcgtaacagcaaaatggttgcatactaaagacccgaagctgcaaaagca

SEQ ID NO: 553186 - DNA, 75 bp, synthetic construct
  source 1..75: mol_type = other DNA
ccggggcgcgtgtggcccctgcgtatatgctcacgctggacggggaggatatcacgcagaatttcagcgaccggc

SEQ ID NO: 553187 - DNA, 75 bp, synthetic construct
  source 1..75: mol_type = other DNA
cgcaggaatccgacgcggcgtttttgtcccgacttgctgagcgtaatggtgcatccgtgtcggtgaaagccggga

SEQ ID NO: 553188 - DNA, 75 bp, synthetic construct
  source 1..75: mol_type = other DNA
cagtcacctggctgaagggcgggcgctcatggccggatctcgactgctttggcattgtgaacgagatacgccgcg

SEQ ID NO: 553189 - DNA, 75 bp, synthetic construct
  source 1..75: mol_type = other DNA
ggaacatctgaaaggttactggccgaatcaactgagtttctcagaatcatgcggaatggtgatgagaatgctgat

SEQ ID NO: 553190 - DNA, 75 bp, synthetic construct
  source 1..75: mol_type = other DNA
cggcggctaaagaagaggcggaaggcacggtcggtagcgggcgtgaggttgtctccatcgccgccagcaaacaca

SEQ ID NO: 553191 - DNA, 75 bp, synthetic construct
  source 1..75: mol_type = other DNA
ggctttagcggtacggcggttggcgtggtgaaaggcgactggatggcgctggtacaggcggttaaaaacgactcc

SEQ ID NO: 553192 - DNA, 75 bp, synthetic construct
  source 1..75: mol_type = other DNA
tcaggatgcgatggcggtagaaaaactgtctgaaggcattcgtctgttcgccgttgatcaacgcaaactggaaga

SEQ ID NO: 553193 - DNA, 75 bp, synthetic construct
  source 1..75: mol_type = other DNA
aactgcaacctgacgctgctgttttcttttgcacaggcgcgggcctgtgcagaagcaggcgtttttctgatttcg

SEQ ID NO: 553194 - DNA, 75 bp, synthetic construct
  source 1..75: mol_type = other DNA
cggcgatattgagtccattcgccattatcatccccaggatgccaccaccaatccttcgctgttactcaaagctgc

SEQ ID NO: 553195 - DNA, 75 bp, synthetic construct
  source 1..75: mol_type = other DNA
ccactctgaagaattccttcagtcactgagaaccacaaccacctttgcgggcagaaaatacacgaacggtgatat

SEQ ID NO: 553196 - DNA, 75 bp, synthetic construct
  source 1..75: mol_type = other DNA
atgaaacgttctggcggcacacgctatatgtatcttatcgccctgataactgtggcagcagccctcacagcctgt

SEQ ID NO: 553197 - DNA, 75 bp, synthetic construct
  source 1..75: mol_type = other DNA
ccaagaatttttaaactcactccggggcacaactcaatttgcgggtactgattaccgcagcaaagaccttacccc

SEQ ID NO: 553198 - DNA, 75 bp, synthetic construct
  source 1..75: mol_type = other DNA
gccgtgctcaggtgcatgtcgaggcgttgatcgtggaagttgccgaaggcagcaatatcaacttcggcgtgcagt

SEQ ID NO: 553199 - DNA, 75 bp, synthetic construct
  source 1..75: mol_type = other DNA
gtcagcatcgccgtctaagttctaacgacgctattgaactggttagtcatccggtgcgtcgcctgattgcccgtc

SEQ ID NO: 553200 - DNA, 75 bp, synthetic construct
  source 1..75: mol_type = other DNA
ccggtgcgtcgcctgattgcccgtcgggcagcgcgggaactggtggcaggcgcttcaaccaactttggctttggt

SEQ ID NO: 553201 - DNA, 75 bp, synthetic construct
  source 1..75: mol_type = other DNA
tatgacaagttagcagaaaaactggctggagagaatcgaacgtgtacaatcacccccggcctgccaattccaaaa

SEQ ID NO: 553202 - DNA, 75 bp, synthetic construct
  source 1..75: mol_type = other DNA
gctggatgaaaacaacaaacgcaatgtgaatgagatgattcatcactatgttcgtgagaaaaatatcgccgtatt

SEQ ID NO: 553203 - DNA, 75 bp, synthetic construct
  source 1..75: mol_type = other DNA
gtcaatgagatgatccaccgttatgtacgcgggcaaaatattgctgtgctgtgggtgacacacgacaaagatgaa

SEQ ID NO: 553204 - DNA, 75 bp, synthetic construct
  source 1..75: mol_type = other DNA
tgcgcgagcaaaatattgccgtgctgggtaatgactccaacttactgatagtgttttatgttcagataatgcccg

SEQ ID NO: 553205 - DNA, 75 bp, synthetic construct
  source 1..75: mol_type = other DNA
ataaaaatgattattagtttcggtgactgcttgagcttatgcttgctagatagcacagggatatatgaagaaaaa

SEQ ID NO: 553206 - DNA, 75 bp, synthetic construct
  source 1..75: mol_type = other DNA
cccgcgcggcaaatatatgccaggtaaaccagcgtggtatatgtacgatagctgccagagcaaacgcagcgacag

SEQ ID NO: 553207 - DNA, 75 bp, synthetic construct
  source 1..75: mol_type = other DNA
tgaactagaagctaaaaacaaacgcattacagaactggaagcgagggaagttcaattaccgactcgctacgacct

SEQ ID NO: 553208 - DNA, 75 bp, synthetic construct
  source 1..75: mol_type = other DNA
atggcgaccgggtttagcagcctgaataccaaagcggacagccgcttacattccgatatgcggtttttttgtgtc

SEQ ID NO: 553209 - DNA, 75 bp, synthetic construct
  source 1..75: mol_type = other DNA
gtcaaccctgttacgtctcgccaccacgtttgacagcgttgtagtgaggcttcttaaacttgaattgggagcctt

SEQ ID NO: 553210 - DNA, 75 bp, synthetic construct
  source 1..75: mol_type = other DNA
atggcgaccgggtttagcagcctgaataacatagcggacagccgcttacattccgatatgcggtttttttgcgtc

SEQ ID NO: 553211 - DNA, 75 bp, synthetic construct
  source 1..75: mol_type = other DNA
caaacactaaaccagaatccgaaacaacgcccgcgcggctccgttggtgagcgtcgttggctacgccgtcacggg

SEQ ID NO: 553212 - DNA, 75 bp, synthetic construct
  source 1..75: mol_type = other DNA
taggcgattttgcaccaacagtaattatgccaggagatcctctaagggcgaaatttatagccgaaaactatctgc

SEQ ID NO: 553213 - DNA, 75 bp, synthetic construct
  source 1..75: mol_type = other DNA
ccggaagatctatgccggattagcgaacttagccagtggcgctatcaggggatggtagggcgaggcgagcgcatc

SEQ ID NO: 553214 - DNA, 75 bp, synthetic construct
  source 1..75: mol_type = other DNA
agacgagcaatcttggttaatcagtaaagtgactcataatatgagtaatagcggcttcacgacgggcttagagct

SEQ ID NO: 553215 - DNA, 75 bp, synthetic construct
  source 1..75: mol_type = other DNA
tagctgcgcggcacaaactgaagatggcactgggtaaagacctgtctgataaacccgtagagcatatagaccaga

SEQ ID NO: 553216 - DNA, 75 bp, synthetic construct
  source 1..75: mol_type = other DNA
tagcctgtcgtaacaggctggaagccagtgtcgctccgtcactggccggaattaaaatcccgcacatcgaccagt

SEQ ID NO: 553217 - DNA, 75 bp, synthetic construct
  source 1..75: mol_type = other DNA
aatggaccattacgactctgacgcatactgtcagcccggataacggttttacgaccagtttggagcttgaagtga

SEQ ID NO: 553218 - DNA, 75 bp, synthetic construct
  source 1..75: mol_type = other DNA
taccgtcagcccggataacggttttacaaccagtattgaactcgaagtgaagatttatgatcttgaaatggaata

SEQ ID NO: 553219 - DNA, 75 bp, synthetic construct
  source 1..75: mol_type = other DNA
gcatgacaccacgctcggtgcgattgttgaggcgatagcctcccgtaacaggctggaagccagtgtcgctccgtc

SEQ ID NO: 553220 - DNA, 75 bp, synthetic construct
  source 1..75: mol_type = other DNA
atcactactgtgctggataaccgcctgatggggcttacgctgacggataaccggggctttgaagcggaccagctt

SEQ ID NO: 553221 - DNA, 75 bp, synthetic construct
  source 1..75: mol_type = other DNA
ggcgtaattgccagctggttgcatacccgcgaacccgcgaagaaagaaagcaccacggtgaagcgtaagcgcagg

SEQ ID NO: 553222 - DNA, 75 bp, synthetic construct
  source 1..75: mol_type = other DNA
tgaacacactggcgcaccggatcgcctgactattcgggcgcgaagtgctgattttagggaaacgctgaatacccg

SEQ ID NO: 553223 - DNA, 75 bp, synthetic construct
  source 1..75: mol_type = other DNA
ccggtgaggctgacaacgtttttgccctgaccacggtatatgccacgaaagcgcaggccatgcgcgccgctcagg

SEQ ID NO: 553224 - DNA, 75 bp, synthetic construct
  source 1..75: mol_type = other DNA
ggaatggaccattacgactctgacacataccgtcagcccggataacggttttacaaccagtattgaactcgaagt

SEQ ID NO: 553225 - DNA, 75 bp, synthetic construct
  source 1..75: mol_type = other DNA
atctgttattcatccgacagggacagggtaaaagcgccagcggtaaaccactaccggtgatcactatcacacgta

SEQ ID NO: 553226 - DNA, 75 bp, synthetic construct
  source 1..75: mol_type = other DNA
cagtgtcgcgccgtcactggcaggaattaaaatcccgcacatcgaccagtcgcaggagtctgatgcgaaattcct

SEQ ID NO: 553227 - DNA, 75 bp, synthetic construct
  source 1..75: mol_type = other DNA
gagcttaccggggaagagaagattgatattggtgatctgcaaaatctacaacccggcgcgacggttccggtgacg

SEQ ID NO: 553228 - DNA, 75 bp, synthetic construct
  source 1..75: mol_type = other DNA
cgacactgcgacggaattaacctattaccagaacgacgggattttgcattatgtcatccgtaatatgttgaagta

SEQ ID NO: 553229 - DNA, 75 bp, synthetic construct
  source 1..75: mol_type = other DNA
ggtgattgccgaatcgtttgaacgaattcaccgttcgaatttaattggcatgggcatcctgccgctggaatttcc

SEQ ID NO: 553230 - DNA, 75 bp, synthetic construct
  source 1..75: mol_type = other DNA
tatgatgccgcgatgcgctataagcaggaacaaacgccgctggcggtgattgccgggaaagagtatggatcaggc

SEQ ID NO: 553231 - DNA, 75 bp, synthetic construct
  source 1..75: mol_type = other DNA
tggcttcaaccttgtgggatacggctgtaccacttgtattggtaattctggcccgttgcccgatcctatcgaaac

SEQ ID NO: 553232 - DNA, 75 bp, synthetic construct
  source 1..75: mol_type = other DNA
ttgcgttgcccgatgtaccaaaagcatttgccgccagtaacgaactggaagtgaacgccgcgcagaaagatcgcc

SEQ ID NO: 553233 - DNA, 75 bp, synthetic construct
  source 1..75: mol_type = other DNA
gcaacaccagcacctgtggaagatattcacggtgcgcggatcctcgcaatgctgggggattcggttaccactgac

SEQ ID NO: 553234 - DNA, 75 bp, synthetic construct
  source 1..75: mol_type = other DNA
cgtgtaccaacacgtctaaccccagcgtgttgatggctgccgggttgctggcgaaaaaagccgtaactctggggc

SEQ ID NO: 553235 - DNA, 75 bp, synthetic construct
  source 1..75: mol_type = other DNA
ttgtggtgacgcaggccgataaaacggagccctgccatgaatgggatatggccggcattcagccttctcccgcac

SEQ ID NO: 553236 - DNA, 75 bp, synthetic construct
  source 1..75: mol_type = other DNA
ggcgtggtaaccatgaagtgatgatgcgcggcaccttcgccaatattcgcatccgtaatgaaatggtgcctggcg

SEQ ID NO: 553237 - DNA, 75 bp, synthetic construct
  source 1..75: mol_type = other DNA
tgtaccacctgtattggtaactctgggccgctgcccgatcctatcgaaacggcaatcaaaaaaggcgatttaacc

SEQ ID NO: 553238 - DNA, 75 bp, synthetic construct
  source 1..75: mol_type = other DNA
aagttgtgccgtgccgttgtcgtatcgacaccgcgacggaattaacctattaccagaacgacggtattttgcatt

SEQ ID NO: 553239 - DNA, 75 bp, synthetic construct
  source 1..75: mol_type = other DNA
gggggtgacggccagcggtaaaaaaatcccgcagattaccatcacccgcagcgacggcgaccgccatcattttgc

SEQ ID NO: 553240 - DNA, 75 bp, synthetic construct
  source 1..75: mol_type = other DNA
ggctgacaacgtttttgccctgaccacggtatatgccacgaaagcacaggccatgcgcgccgctcaggcgaagtg

SEQ ID NO: 553241 - DNA, 75 bp, synthetic construct
  source 1..75: mol_type = other DNA
tgcacagctttaatgggagcggcttcacgacgggcttagagcttgaggttaaggtttctgatgtggagtatgaaa

SEQ ID NO: 553242 - DNA, 75 bp, synthetic construct
  source 1..75: mol_type = other DNA
tgataacgacgaagtacagcgcaatctgaatgacactaactacaaccgcatgtgggaatacaataaccgcggcgt

SEQ ID NO: 553243 - DNA, 75 bp, synthetic construct
  source 1..75: mol_type = other DNA
cactcaaggggcaaccatttagttataagggaacaggtggtgccatttttgttagcatgttacttattatgatcg

SEQ ID NO: 553244 - DNA, 75 bp, synthetic construct
  source 1..75: mol_type = other DNA
ttatctctatgtcacgttacgcagtttgttcctgaataatctgacactggcaaatggcgctattcgttttcattc

SEQ ID NO: 553245 - DNA, 75 bp, synthetic construct
  source 1..75: mol_type = other DNA
taccgtcagcccggataacggttttacgaccagtttggagcttgaagtgaggattgatgatttcgaaatggaatg

SEQ ID NO: 553246 - DNA, 75 bp, synthetic construct
  source 1..75: mol_type = other DNA
tttaaacagtcgatagatgatgcggaatggaccattacgactctgacgcataccgtcagccccgataacggtttt

SEQ ID NO: 553247 - DNA, 75 bp, synthetic construct
  source 1..75: mol_type = other DNA
atctgttattcattcggcagggacagggcaaaagcgccagcggtaaaccactaccggttatcactatcacacgca

SEQ ID NO: 553248 - DNA, 75 bp, synthetic construct
  source 1..75: mol_type = other DNA
ccgtgaaaagtcgtggcacaagaccactgtcggggaagtggtcaaggaaatagccgcgcgtcacaagctgaagat

SEQ ID NO: 553249 - DNA, 75 bp, synthetic construct
  source 1..75: mol_type = other DNA
gaatggcttcacgacggctgtagatctcgaggttatgctttctggcatagaatatgagtcggaagaaaatggttc

SEQ ID NO: 553250 - DNA, 75 bp, synthetic construct
  source 1..75: mol_type = other DNA
gcaccggggggcgccagatacggtgaccattcgcgcccgtagcgctgattttcgcggaacgctcaattcacgccg

SEQ ID NO: 553251 - DNA, 75 bp, synthetic construct
  source 1..75: mol_type = other DNA
tgcaggacgagctgcgcacggagtctgtccggtctcaggcccgtgaacagtttaccggtgcggtggaccggatat

SEQ ID NO: 553252 - DNA, 75 bp, synthetic construct
  source 1..75: mol_type = other DNA
cccgcgaacccgcgaagaaagaaagcaccacggtgaagcgtaagcgcaggactaagaagcagaagaaagagccgg

SEQ ID NO: 553253 - DNA, 75 bp, synthetic construct
  source 1..75: mol_type = other DNA
tcgtgctggagcgcgaacgcggcaatgtggaagcgggcgaatgggtggaagtagaaccgtttaacgcgttgttcg

SEQ ID NO: 553254 - DNA, 75 bp, synthetic construct
  source 1..75: mol_type = other DNA
acgcggcctgcacttgccggaaaaacatgttacctggcgtggtgaagcaatccctggcagcctgtttgattttgc

SEQ ID NO: 553255 - DNA, 75 bp, synthetic construct
  source 1..75: mol_type = other DNA
gtgacgatggataaaccgttccttaatgcctactcacgcctgttaatcaaaacctgccataaacgcggcgcattt

SEQ ID NO: 553256 - DNA, 75 bp, synthetic construct
  source 1..75: mol_type = other DNA
gctgggcgaaatcgcattctggaaactggcgattaaaccaggcaaaccgtttgcgttcggcaaactctctaatag

SEQ ID NO: 553257 - DNA, 75 bp, synthetic construct
  source 1..75: mol_type = other DNA
agccgtatcatggcgagtggcctgctggcacctgtattcgtattatgaccggcgcgccggtgccggaaggctgtg

SEQ ID NO: 553258 - DNA, 75 bp, synthetic construct
  source 1..75: mol_type = other DNA
cgatgtggtttcgccgctcgatgtccctgggtttgataactcggcaatggacggctacgcggttcgtttagccga

SEQ ID NO: 553259 - DNA, 75 bp, synthetic construct
  source 1..75: mol_type = other DNA
tcccgagtaaagatgaagagcgcaataatcaggttctcaacaaggtaaaagcggataaagcactagaagccagca

SEQ ID NO: 553260 - DNA, 75 bp, synthetic construct
  source 1..75: mol_type = other DNA
actgccgaagcggtagaatttctgactgagctggtgacgcattttacgccacaacgcaataaacttctggcagcg

SEQ ID NO: 553261 - DNA, 75 bp, synthetic construct
  source 1..75: mol_type = other DNA
tattcgcgaaaaaacggaggcggtattccgtctgttccggcccgtacatccggttgtggccgtatcggcccgcac

SEQ ID NO: 553262 - DNA, 75 bp, synthetic construct
  source 1..75: mol_type = other DNA
catgtcacctggcgcggcgaagcaattcctggcagcctgtttgattttgcgctctatttcttccacaactatcag

SEQ ID NO: 553263 - DNA, 75 bp, synthetic construct
  source 1..75: mol_type = other DNA
ctgcggacttagaagatcgccgggtagagattaccgggccggttgagcgcaagatggtgatcaacgcgctcaacg

SEQ ID NO: 553264 - DNA, 75 bp, synthetic construct
  source 1..75: mol_type = other DNA
gcctgatggaacagatcaccacatccgatgagttaattgatttcctgaccctgccaggctaccgcctgttagcgt

SEQ ID NO: 553265 - DNA, 75 bp, synthetic construct
  source 1..75: mol_type = other DNA
cggccggtggcgacacaggttgatgatcttctttcggagattcgtcagcgagcggcaattaacgaacgcgtactg

SEQ ID NO: 553266 - DNA, 75 bp, synthetic construct
  source 1..75: mol_type = other DNA
attctctacggcgataagatcaccccatcaatggcgaaagcgattggcgaaaccgaacgtcgccgcgagaaacag

SEQ ID NO: 553267 - DNA, 75 bp, synthetic construct
  source 1..75: mol_type = other DNA
gtctggatatgccggaagtttcgctggtggcgatcctcgacgctgacaaagaaggcttcctgcgttccgaacgtt

SEQ ID NO: 553268 - DNA, 75 bp, synthetic construct
  source 1..75: mol_type = other DNA
aatggtgtggggtatcactgaattaagccaaccacaggctatgggcctcatgttaccgaagcgcctgcgcggatt

SEQ ID NO: 553269 - DNA, 75 bp, synthetic construct
  source 1..75: mol_type = other DNA
tagctatgcccgtcgatctggaattaataaatataatattaaatgaagcgggaaatccaccgccgcataaagcaa

SEQ ID NO: 553270 - DNA, 75 bp, synthetic construct
  source 1..75: mol_type = other DNA
accgaggcgggtgagatacccgctcatcaacaccgcgtcaccgccgtcacgcttaacttccgggacccggactac

SEQ ID NO: 553271 - DNA, 75 bp, synthetic construct
  source 1..75: mol_type = other DNA
taaatcagatgtgaaaattgagatggtatttctgaacccgaatacaggaatggttgaaaccacttaccctgtttt

SEQ ID NO: 553272 - DNA, 75 bp, synthetic construct
  source 1..75: mol_type = other DNA
acgggtgattttcttaaaatctcatcgaataccgaagagaaggagatcaacaacaacgggatcaacgtaactgtt

SEQ ID NO: 553273 - DNA, 75 bp, synthetic construct
  source 1..75: mol_type = other DNA
taccgcagcttttttccactggatcgatgtttcacattatcgaagtgattaccgcgtcaggggacgttctacggc

SEQ ID NO: 553274 - DNA, 75 bp, synthetic construct
  source 1..75: mol_type = other DNA
agtggtcgatatcctggcattggggcagggcattgccaaaaccaaagcgaaggggagaggtaaatcacgtgcgat

SEQ ID NO: 553275 - DNA, 75 bp, synthetic construct
  source 1..75: mol_type = other DNA
gtatacctgcgtgaggatgacccggtaacggtggctggcctgtatctgccggatatcccagatgccagcgcccaa

SEQ ID NO: 553276 - DNA, 75 bp, synthetic construct
  source 1..75: mol_type = other DNA
tggaaacgagaacgatctattcttctcccgtgccgggaagtggcaaagcgagtcgaagtggtttagctctaagaa

SEQ ID NO: 553277 - DNA, 75 bp, synthetic construct
  source 1..75: mol_type = other DNA
ttcagtccaaatgtgaaaacgatggcctgtttttcaatcgctatttctataaacaagcgaacggaacgaagatgt

SEQ ID NO: 553278 - DNA, 75 bp, synthetic construct
  source 1..75: mol_type = other DNA
gtgtttgatatcggttttagcgaactgctattggtgttcatcatcggcctcgtcgttctggggccgcaacgactg

SEQ ID NO: 553279 - DNA, 75 bp, synthetic construct
  source 1..75: mol_type = other DNA
atgttaaagctagtgaatgtacgccagtacaaccgctaccgctttgggcgttgggagacggtgcgtaagcaccgt

SEQ ID NO: 553280 - DNA, 75 bp, synthetic construct
  source 1..75: mol_type = other DNA
ttgcccgtaaggttgaatgcgaagaggacgggctctactacgcgcgatacttctttaagcagcgcaccggcggaa

SEQ ID NO: 553281 - DNA, 75 bp, synthetic construct
  source 1..75: mol_type = other DNA
agaagccacgccagagccggtggtaaaacctgctgcggatgctgaaccgaaaaccgctgcatcttccccttcatc

SEQ ID NO: 553282 - DNA, 75 bp, synthetic construct
  source 1..75: mol_type = other DNA
ccagagccggtggtaaaacctgctgcggacgctgaaccgaaaaccgctgcaccttccccttcgtcgagtgataaa

SEQ ID NO: 553283 - DNA, 75 bp, synthetic construct
  source 1..75: mol_type = other DNA
aggccagttcgccggaacagaagccagaaaccacgccagagccggtggtaaaacctgctgcggacgctgaaccga

SEQ ID NO: 553284 - DNA, 75 bp, synthetic construct
  source 1..75: mol_type = other DNA
tccatgaaagcatatgacatccatgaagctgacgcgatggttatcgaaaccaaccagggcggtgacatggcagag

SEQ ID NO: 553285 - DNA, 75 bp, synthetic construct
  source 1..75: mol_type = other DNA
acaacctgccagacggctggctatggcctaaaaagcacaatgacgcccatgaagctggactgaaagcacacaggc

SEQ ID NO: 553286 - DNA, 75 bp, synthetic construct
  source 1..75: mol_type = other DNA
aagcaagcgaacggaacgaagatgttaatctcaggccatcatttagctatccgcgacgcactgcaacgcgttgtc

SEQ ID NO: 553287 - DNA, 75 bp, synthetic construct
  source 1..75: mol_type = other DNA
cacagaataattgccgatacgctacaacgagttattaatggtgaaatcaccaggttgataatcaacatcccaccg

SEQ ID NO: 553288 - DNA, 75 bp, synthetic construct
  source 1..75: mol_type = other DNA
gatggtgtggggtatcactgaattgagccaaccccaggcgatgggccttatgttacccaagcgcctacgcggatt

SEQ ID NO: 553289 - DNA, 75 bp, synthetic construct
  source 1..75: mol_type = other DNA
gccacgctacgcaatgccggattcaaaggccgcattgttaaggtgcacgcaagcaaaggtaaattcgcccgtgca

SEQ ID NO: 553290 - DNA, 75 bp, synthetic construct
  source 1..75: mol_type = other DNA
accgcgtcaggggacgttctacggcttacagatgggtatttcgatttggactataacggttttacgtatctcgca

SEQ ID NO: 553291 - DNA, 75 bp, synthetic construct
  source 1..75: mol_type = other DNA
tcgaaggcgctggatctgactgatttgtggcaactttttatcccgttgctgatagccataccgctggtgatgggc

SEQ ID NO: 553292 - DNA, 75 bp, synthetic construct
  source 1..75: mol_type = other DNA
acgccggtggaaatcggcgtctggatcgacggcgcgatgcccagccgcgctgaaacggtaaaaggttacgtgcag

SEQ ID NO: 553293 - DNA, 75 bp, synthetic construct
  source 1..75: mol_type = other DNA
gttcgacgctggcgctgatgggaacggtgatcctgatgctgataatgggttacggcatcagtatggatgtggaaa

SEQ ID NO: 553294 - DNA, 75 bp, synthetic construct
  source 1..75: mol_type = other DNA
gcaacgcattcaatgtcgtaactgcaaaaaagtctggacacccaaacaatatcagaaagaaataacgcctcctga

SEQ ID NO: 553295 - DNA, 75 bp, synthetic construct
  source 1..75: mol_type = other DNA
agaggtgccattattacggcctgggctgatctgtttcgccaacagcaaggtgagatttggtttattgaagaggaa

SEQ ID NO: 553296 - DNA, 75 bp, synthetic construct
  source 1..75: mol_type = other DNA
gacgaacaacaatttcgtgactggttgtcagttcacttatctacgtgggcctctgaaaagggccatttctgcccg

SEQ ID NO: 553297 - DNA, 75 bp, synthetic construct
  source 1..75: mol_type = other DNA
aagatctgcatccagagctggaagtgattggtactaacgccgaagacgcagtgccgcattatctgcgtaagctct

SEQ ID NO: 553298 - DNA, 75 bp, synthetic construct
  source 1..75: mol_type = other DNA
gtgttcaaatatgcgctgtatgagccgggattgctggagccggaaggcgtcagcaaagtgttcttcacctgcgat

SEQ ID NO: 553299 - DNA, 75 bp, synthetic construct
  source 1..75: mol_type = other DNA
gaaacggaagcccgttaaaaccacatgaaattgcaccatcggccagactgacccggtcggaacgattgcaaatca

SEQ ID NO: 553300 - DNA, 75 bp, synthetic construct
  source 1..75: mol_type = other DNA
tcccgcctgtcgcgcaactggcgggcgtgagccagcattatggaaaaaccgttgcgctgaacaatatcactctcg

SEQ ID NO: 553301 - DNA, 75 bp, synthetic construct
  source 1..75: mol_type = other DNA
gccatcgaagcgcgcgatctgaccatgcgttttggttccttcgttgccgttgatcacgtcaatttccgcattcca

SEQ ID NO: 553302 - DNA, 75 bp, synthetic construct
  source 1..75: mol_type = other DNA
gcgcccttagcgtggtgcgggaaaaagagttggggtcgattatcaacctttacgtgacccccaccacccgtagcg

SEQ ID NO: 553303 - DNA, 75 bp, synthetic construct
  source 1..75: mol_type = other DNA
gatctggcacctaccgccactcacgtcggttctgagctttcccaggaagatctggacgatgacgaagatgaagac

SEQ ID NO: 553304 - DNA, 75 bp, synthetic construct
  source 1..75: mol_type = other DNA
ccgtgggacctaccggccgagtgcaggtttgtgacagagttgcgttggtccaagaagcggtcgaagagttacggg

SEQ ID NO: 553305 - DNA, 75 bp, synthetic construct
  source 1..75: mol_type = other DNA
aaatatatgaaattaaatttatatcaagcaatttattatttttcgttctatgttactaaggcattgatgaagcat

SEQ ID NO: 553306 - DNA, 75 bp, synthetic construct
  source 1..75: mol_type = other DNA
agagtcggtgaacgtgttgctgtcgatccggtggtcagctgtggtcattgctatccgtgctcaataggtaagccg

SEQ ID NO: 553307 - DNA, 75 bp, synthetic construct
  source 1..75: mol_type = other DNA
atgctgggtaatatgaatgtttttatagctgtactgggaataattttattttctggctttctggccgcgtatttc

SEQ ID NO: 553308 - DNA, 75 bp, synthetic construct
  source 1..75: mol_type = other DNA
aatgatgtggatatgcgcaacataggatccgcgttcttgaaatgctggcctacaatcgccgcgtggcactgtatc

SEQ ID NO: 553309 - DNA, 75 bp, synthetic construct
  source 1..75: mol_type = other DNA
ccggatcagcaccgaaagccgagtttacccttgtcctgaaaaatgggtagcggagatcgagcaatcaatgagaaa

SEQ ID NO: 553310 - DNA, 75 bp, synthetic construct
  source 1..75: mol_type = other DNA
aggttgccgatcaatatgcagtcatgattgaaccctttaccattgcggcaaatgttacgggtcatggcaaaccga

SEQ ID NO: 553311 - DNA, 75 bp, synthetic construct
  source 1..75: mol_type = other DNA
atgccattctatttcaggaaggagtgtccgttaaactcaggctacctcactgtggcgttcacccttaactggccg

SEQ ID NO: 553312 - DNA, 75 bp, synthetic construct
  source 1..75: mol_type = other DNA
cgcggcaattgcgatgaacaagccgtggtcggaaaaactgcatgatgtttctgaagaggtgcatcgcgccctgca

SEQ ID NO: 553313 - DNA, 75 bp, synthetic construct
  source 1..75: mol_type = other DNA
ccagcggcacgtattgtattgatggggttctccagtgaaccgtctgaagtgattcagcaaggggtaatgactcca

SEQ ID NO: 553314 - DNA, 75 bp, synthetic construct
  source 1..75: mol_type = other DNA
gtgggtgaaggcgtggaaagcgccagagtcggtgaacgtgttgctgtcgatccggtggtcagctgtgggcattgc

SEQ ID NO: 553315 - DNA, 75 bp, synthetic construct
  source 1..75: mol_type = other DNA
gattttccagtgaaccgtcggaagttattcagcagggcattactggtaaagaactttctattttttcctcccgac

SEQ ID NO: 553316 - DNA, 75 bp, synthetic construct
  source 1..75: mol_type = other DNA
tctgtcgctttgccggccatctttcgcacttctacagggtcgcccaacatgcggtgctttgcagccagctcgtgc

SEQ ID NO: 553317 - DNA, 75 bp, synthetic construct
  source 1..75: mol_type = other DNA
tctgtcgctttgctggccatctttcgcacttctacagggtcgcccaacatgcggttctttgcagccagctggtgc

SEQ ID NO: 553318 - DNA, 75 bp, synthetic construct
  source 1..75: mol_type = other DNA
tctgtcgctttgctggccatctttcgcacttctacagggtcgcccaacatgcggtactttgcagccagcttgtgc

SEQ ID NO: 553319 - DNA, 75 bp, synthetic construct
  source 1..75: mol_type = other DNA
ctgagatcattaaacagaacctaaaacatatcgtttcgttaagggaaaatttaagcctgaagcctgataacagct

SEQ ID NO: 553320 - DNA, 75 bp, synthetic construct
  source 1..75: mol_type = other DNA
gatcccgctgggtaatgcgtcggcttcagaaatcgtccgtgtgctggaaagtctgaccagaaacagcagtgaaaa

SEQ ID NO: 553321 - DNA, 75 bp, synthetic construct
  source 1..75: mol_type = other DNA
gattgtcaccgcgccacaggacgtcatgcagtctttgcaaagcgtgattgaacaactggatattcgtcgtgctca

SEQ ID NO: 553322 - DNA, 75 bp, synthetic construct
  source 1..75: mol_type = other DNA
gaccggatatttgacacggcggagagcgtctgtgcgtattttcatgaaaggagatcactcaataacttccatcga

SEQ ID NO: 553323 - DNA, 75 bp, synthetic construct
  source 1..75: mol_type = other DNA
ggtttaccagacaacgagctgatgctgcgtgacgtttgcgcaccgaaattacaacaacttggcgatatcgtcgac

SEQ ID NO: 553324 - DNA, 75 bp, synthetic construct
  source 1..75: mol_type = other DNA
tggcgataaattcgatcgcgaacaagcgatcatcgatgccgccaaagaactgggcgacagtggcgctgacctcta

SEQ ID NO: 553325 - DNA, 75 bp, synthetic construct
  source 1..75: mol_type = other DNA
tctgtcgctttgcaggccatctttcgcacttctacagggtcgcccaacatgcggtcctttgcagccagctagtgc

SEQ ID NO: 553326 - DNA, 75 bp, synthetic construct
  source 1..75: mol_type = other DNA
agatgttcaaagttattccactgtcaccaggccatgcctacgggatgtttatggaacgttttaacgagttatcgg

SEQ ID NO: 553327 - DNA, 75 bp, synthetic construct
  source 1..75: mol_type = other DNA
cagttatgagtacgcccgtgaaatatgccgatctcatcatgctggcaaccgaacgccgcgatctcgggcttgatg

SEQ ID NO: 553328 - DNA, 75 bp, synthetic construct
  source 1..75: mol_type = other DNA
atgcgctggcaacggcgggccaggcgggcgtcgctaatctgctgagtctgattgaaaaagagatgaaagtggcga

SEQ ID NO: 553329 - DNA, 75 bp, synthetic construct
  source 1..75: mol_type = other DNA
cagtggctcgcccagcagtcgctgcgtaccctgaccaacgccagtcgccggggcgggctggatatcaagctgccg

SEQ ID NO: 553330 - DNA, 75 bp, synthetic construct
  source 1..75: mol_type = other DNA
agcgggtactgtttgtggtgatgcaggccgataaaacggagccctgccatgaatgggatatggccggtattcagc

SEQ ID NO: 553331 - DNA, 75 bp, synthetic construct
  source 1..75: mol_type = other DNA
gttaatgagatgatccaccgttatgtgcgcgagcaaaatattgccgtgctgtgggtgacacacgataaagacgaa

SEQ ID NO: 553332 - DNA, 75 bp, synthetic construct
  source 1..75: mol_type = other DNA
gccatcaccggaaaaattgaagctgctggctgacacgatttctgcggtttatctcgatggctacgagggaagaca

SEQ ID NO: 553333 - DNA, 75 bp, synthetic construct
  source 1..75: mol_type = other DNA
gcagaaaatacacgaatagtgatatgccatcaccggaaaaaatgaagctgctggctgacacgatttctgcggttt

SEQ ID NO: 553334 - DNA, 75 bp, synthetic construct
  source 1..75: mol_type = other DNA
cagcaatgcgcaaaataacagaaacaatcaagaagtggcgtatacatcgctcaacagctgagagtttgctggatt

SEQ ID NO: 553335 - DNA, 75 bp, synthetic construct
  source 1..75: mol_type = other DNA
ccgtttgcccgattgaagaagtcgctccggctatcaaacgtccgatgtggttccagctttatgtgctgcgcgatc

SEQ ID NO: 553336 - DNA, 75 bp, synthetic construct
  source 1..75: mol_type = other DNA
aataacttcgatccatccatctcctggaaagaccttgagtggatccgtgatttctgggatggcccgatggtgatc

SEQ ID NO: 553337 - DNA, 75 bp, synthetic construct
  source 1..75: mol_type = other DNA
tgatgggattgtggtttctaaccacggtggccgccagctggacggtgtactctcttccgctcgtgcgttgcccgc

SEQ ID NO: 553338 - DNA, 75 bp, synthetic construct
  source 1..75: mol_type = other DNA
cgcacggttctgcgcgccgtccgtgactcggtggtctctgttgcccgtgcggtatggaactggattttcttctga

SEQ ID NO: 553339 - DNA, 75 bp, synthetic construct
  source 1..75: mol_type = other DNA
gcggctttatgcgtaacgcgctggagcgtgcaaaagcggcaggctgttcaactctggtcttcactgtggatatgc

SEQ ID NO: 553340 - DNA, 75 bp, synthetic construct
  source 1..75: mol_type = other DNA
agccaaagcggcggatgcgcatggcattccgtttactctctcgacggtttccgtttgcccgattgaagaagtcgc

SEQ ID NO: 553341 - DNA, 75 bp, synthetic construct
  source 1..75: mol_type = other DNA
aaatcaatccgctacaaatcaaacaagacggtggcaaagccttaaaactgctggtgctgtggcgtagtgatgaag

SEQ ID NO: 553342 - DNA, 75 bp, synthetic construct
  source 1..75: mol_type = other DNA
tttttctctgacctcgatgagccggtgcatctgtgtgtgacatctccgccgtttccgctccgaatacagcgtggc

SEQ ID NO: 553343 - DNA, 75 bp, synthetic construct
  source 1..75: mol_type = other DNA
tccggagctggaagtgattggcactaacgccgaagacgcggtgccgcattatctgcgtaagctctatttatcgta

SEQ ID NO: 553344 - DNA, 75 bp, synthetic construct
  source 1..75: mol_type = other DNA
tccggagctggaagtgattggtactaatgccgacgacgcggtgccgcattatctgcgtaaactctatttatcgta

SEQ ID NO: 553345 - DNA, 75 bp, synthetic construct
  source 1..75: mol_type = other DNA
tcgcgattaaacctgttgacatgcgccggggcatcgacgcactgacgcagtatatacaggatgaactccggtcga

SEQ ID NO: 553346 - DNA, 75 bp, synthetic construct
  source 1..75: mol_type = other DNA
atgctcagtcctgataatgtcttcatcgcaattaaacctgttgacatgcgccggggcatcgactcactgacgcag

SEQ ID NO: 553347 - DNA, 75 bp, synthetic construct
  source 1..75: mol_type = other DNA
atgtccaagaggcgtatgccaaggccgataagccgttatcgaatgaggagctctacgattcggtggcagagctcg

SEQ ID NO: 553348 - DNA, 75 bp, synthetic construct
  source 1..75: mol_type = other DNA
gcttctccagtgaaccgtctgaagtcattcagcagggaattaccggcaaggaactctctattttttcttcccggt

SEQ ID NO: 553349 - DNA, 75 bp, synthetic construct
  source 1..75: mol_type = other DNA
aacgtttgtacgacactcgctgtattaggtgtgcacgctgacggtggtttcagtgaatatgctgtggttccggca

SEQ ID NO: 553350 - DNA, 75 bp, synthetic construct
  source 1..75: mol_type = other DNA
atgagaaagacctggcttccctggctgatcctgtcgccttccctgctgtttttactgctgtttacctggtttccg

SEQ ID NO: 553351 - DNA, 75 bp, synthetic construct
  source 1..75: mol_type = other DNA
gaagcggtgttcaaatatgcgctgtatgagccgggattactggagccggaaggcgtcagcaaagtgttcttcacc

SEQ ID NO: 553352 - DNA, 75 bp, synthetic construct
  source 1..75: mol_type = other DNA
tagatggcacgttactttcccccgaccatacgctatctccttatgccaaagaaaccctgaaactgctcaccgcgc

SEQ ID NO: 553353 - DNA, 75 bp, synthetic construct
  source 1..75: mol_type = other DNA
ctttaacgagttatcggagttacgtgtcacgaacggtgcaatagtgatccacacccaacgcctgaaatcagatcc

SEQ ID NO: 553354 - DNA, 75 bp, synthetic construct
  source 1..75: mol_type = other DNA
tcacagggatcttcggtcagttagtattaccgacatccattcaccaacttaccggagataatcgatgtcaaaacc

SEQ ID NO: 553355 - DNA, 75 bp, synthetic construct
  source 1..75: mol_type = other DNA
ggaaacatttttattatgacaggataaataaagacaacatcgatattaacgatatcgcggtttccctttcaaata

SEQ ID NO: 553356 - DNA, 75 bp, synthetic construct
  source 1..75: mol_type = other DNA
gttcaatgaggcccttaccatccccctgactgacaacgcgcagttggatctcagcttgcgccaactgctgctgca

SEQ ID NO: 553357 - DNA, 75 bp, synthetic construct
  source 1..75: mol_type = other DNA
tgctggaaagtattgatagcgccagccagaagcaaattgatgagatgtttaatgcctatgctcgcggtgaaccta

SEQ ID NO: 553358 - DNA, 75 bp, synthetic construct
  source 1..75: mol_type = other DNA
aacaagcgatcatcgatgccgctaaagagctgggcgacagtggcgctgacctctacaaagttgaaatgccgcttt

SEQ ID NO: 553359 - DNA, 75 bp, synthetic construct
  source 1..75: mol_type = other DNA
gtgcttcacaacgtctgaatgaccatatcaatatgccatgggtgatcctctcttccggtgtcgacgaaaaactgt

SEQ ID NO: 553360 - DNA, 75 bp, synthetic construct
  source 1..75: mol_type = other DNA
gagcaaaacgcgattgccaaaagttgcgccatgattgtcgccgccgatgagttcattcctggcaacggtattccg

SEQ ID NO: 553361 - DNA, 75 bp, synthetic construct
  source 1..75: mol_type = other DNA
cactggcggcgcaaattcaggacggtgcgactattgctattagcggtaacggcggcggcatggtggaagcggacc

SEQ ID NO: 553362 - DNA, 75 bp, synthetic construct
  source 1..75: mol_type = other DNA
aaagttattccactggctccgagccatgcctacgggatgtttatggagcgctttaacgaattatcggagttacgc

SEQ ID NO: 553363 - DNA, 75 bp, synthetic construct
  source 1..75: mol_type = other DNA
ccaatgtgaaagtctttatggccgatttcgaagattcactggcaccagactggaacaaagtgatcgatgggcaaa

SEQ ID NO: 553364 - DNA, 75 bp, synthetic construct
  source 1..75: mol_type = other DNA
gtttaatgcctatgctcgcggtgaacccaaagacgaactgccgaccggcattgaccccttgacgctaaacgcggt

SEQ ID NO: 553365 - DNA, 75 bp, synthetic construct
  source 1..75: mol_type = other DNA
cgcaggaatttgcttttgaagcgttaatgcatgatgcaacagaagcgtattgccaggacatcccggcgccactga

SEQ ID NO: 553366 - DNA, 75 bp, synthetic construct
  source 1..75: mol_type = other DNA
ttgacgccaaaggcagcaagattgatgtaacgccagatggcttgcatatcgcccagtcaggtcaaatccctaaac

SEQ ID NO: 553367 - DNA, 75 bp, synthetic construct
  source 1..75: mol_type = other DNA
aaagcctgagcatggcgacaattgctcctacggctgcacgtaacccaattccttggcagagaaggttacgcaata

SEQ ID NO: 553368 - DNA, 75 bp, synthetic construct
  source 1..75: mol_type = other DNA
tcagtgggcgcggcaaaaaaaccgtgagagcagtaactggttgcagcttccagcgatgattatcggggcgtttat

SEQ ID NO: 553369 - DNA, 75 bp, synthetic construct
  source 1..75: mol_type = other DNA
gtctcattcgccaacataccgtcacacccatcgcggtgggtgaagtcttcaacagcatctgggactgcaagcaac

SEQ ID NO: 553370 - DNA, 75 bp, synthetic construct
  source 1..75: mol_type = other DNA
atgagtgaaaatgatacaatcccaaagaagtctacaagtcagattaacaaagcggtattctttacatctgctttg

SEQ ID NO: 553371 - DNA, 75 bp, synthetic construct
  source 1..75: mol_type = other DNA
gttattcagccagccatgtcgttagttcaggatgaacttaacaaacagggaacggttagccatataaatgatacc

SEQ ID NO: 553372 - DNA, 75 bp, synthetic construct
  source 1..75: mol_type = other DNA
atcatgattgtgttgtcggaaatcggcgtcaatatcgcgccattgctggcaggtgccggggcattaggtctggct

SEQ ID NO: 553373 - DNA, 75 bp, synthetic construct
  source 1..75: mol_type = other DNA
gggaggagcattgaggattaccgcctgttctggatggaagatccgacgcctgccgagaaccaggaatgttttcgt

SEQ ID NO: 553374 - DNA, 75 bp, synthetic construct
  source 1..75: mol_type = other DNA
ggtaagagcattgaagattaccgcctgttctggatggaagacccgacacctgccgagaatcaggagtgtttccgt

SEQ ID NO: 553375 - DNA, 75 bp, synthetic construct
  source 1..75: mol_type = other DNA
ctgtttcaaataatgatgaagataacatccttttgaaaaaagcatatgaaatggcgaaaatttataatgccagcc

SEQ ID NO: 553376 - DNA, 75 bp, synthetic construct
  source 1..75: mol_type = other DNA
ctttgtccgcagcttattggtcgcgatgcacagcgtatcgaagatatctggcagtttttctataaaggtgcttac

SEQ ID NO: 553377 - DNA, 75 bp, synthetic construct
  source 1..75: mol_type = other DNA
gccaatatgccgctgtatcaactgctgggtggcgcttctcgcgagggcgtgatggtctattgccacaccaccggg

SEQ ID NO: 553378 - DNA, 75 bp, synthetic construct
  source 1..75: mol_type = other DNA
ttgtcacttgccccgggcgtaatttcgttacgcttaaaataaccactgaaagcggactttgtgggctgggagatg

SEQ ID NO: 553379 - DNA, 75 bp, synthetic construct
  source 1..75: mol_type = other DNA
atttgaccaagcgtgaaagccttagcatggcgactattgctcctacggctgcacgtaacccaattccctggcaga

SEQ ID NO: 553380 - DNA, 75 bp, synthetic construct
  source 1..75: mol_type = other DNA
cattgaccgggtgacggtccgcagtcgtacactgacgctgacggatgagaaaggcagaagtcagctgataaaggt

SEQ ID NO: 553381 - DNA, 75 bp, synthetic construct
  source 1..75: mol_type = other DNA
atggacagcagctggcggttgtatcagcccgggacgcttccggtggctgaaggtgaaaagctgatgctgctcggc

SEQ ID NO: 553382 - DNA, 75 bp, synthetic construct
  source 1..75: mol_type = other DNA
aagcagtctgcgggatattgcggtattttcccggcgtgaaatccggctgtcggaaggtgacctggtgcgcttcac

SEQ ID NO: 553383 - DNA, 75 bp, synthetic construct
  source 1..75: mol_type = other DNA
tgcgctgtatggcgaatcccgtctgctggaggcccataaccaggcagttgaggttgtcagccgggaaattgagtc

SEQ ID NO: 553384 - DNA, 75 bp, synthetic construct
  source 1..75: mol_type = other DNA
ggctgccctgaaacacataaacggacaggagcaactgcggcagatggagaaagaactggtgattgacagggagaa

SEQ ID NO: 553385 - DNA, 75 bp, synthetic construct
  source 1..75: mol_type = other DNA
taacgctggcacagggcagcagtgtggtcttttcccgtcaggatgtggtactggaggcactgaaagcgcatccgt

SEQ ID NO: 553386 - DNA, 75 bp, synthetic construct
  source 1..75: mol_type = other DNA
cttgatttgaagtttgacagatcagaatgtattcatgataagaggtacgatccaaatggaaagggtgacaattga

SEQ ID NO: 553387 - DNA, 75 bp, synthetic construct
  source 1..75: mol_type = other DNA
agaaggcggtcaaaattatgatgtgatgggctggaaccaggaacagctgattaatgacatactggaccagggtga

SEQ ID NO: 553388 - DNA, 75 bp, synthetic construct
  source 1..75: mol_type = other DNA
ctgcgttctgcactctatcccattattggcgatcgcatatacggacctataggccatgcggttgatatttttgcc

SEQ ID NO: 553389 - DNA, 75 bp, synthetic construct
  source 1..75: mol_type = other DNA
tgaaatcaagacaatcacacatccccacttcggcgataaaccggtaaaggtgttcgcgataaaggtgaatatcaa

SEQ ID NO: 553390 - DNA, 75 bp, synthetic construct
  source 1..75: mol_type = other DNA
gagctcctccgcgaagaattaaacaaacttcctttaggttcggttaaacaacaagaattcactcatctgatacag

SEQ ID NO: 553391 - DNA, 75 bp, synthetic construct
  source 1..75: mol_type = other DNA
gaatttaatgttgtgagacatcaagcgtttgatagtgaatactacaacatagcattcgatgtcttaccatcccgc

SEQ ID NO: 553392 - DNA, 75 bp, synthetic construct
  source 1..75: mol_type = other DNA
taaccccgacatgagcaaagaacgtgttcttgtcatgaacggccagcgcgtgctgcaaagcgaagaggcaggcaa

SEQ ID NO: 553393 - DNA, 75 bp, synthetic construct
  source 1..75: mol_type = other DNA
ttatgcaccagacggaatgaatgttaatcagtttatggtccgggccggggctgcctgggtatatgagcagtacaa

SEQ ID NO: 553394 - DNA, 75 bp, synthetic construct
  source 1..75: mol_type = other DNA
atgaagaaatatataccagtggtattatttgttttttcatgtcaggtattttctgctgatattcatggacgtgtt

SEQ ID NO: 553395 - DNA, 75 bp, synthetic construct
  source 1..75: mol_type = other DNA
atcgttatggtcgtattctcgggcaggtttatgcaccagacggtatgaatgttaatcagtttatggtccgtgcag

SEQ ID NO: 553396 - DNA, 75 bp, synthetic construct
  source 1..75: mol_type = other DNA
gagtcgtgcggtgctcggtgaacatagtctcgaagatggaatcgatggtttcctgggattgacctggaatcagga

SEQ ID NO: 553397 - DNA, 75 bp, synthetic construct
  source 1..75: mol_type = other DNA
aaataaactcagaaaaggccaacaagctgattgagtctaatgaaaaatctttaatggacgatattcatgaaacgc

SEQ ID NO: 553398 - DNA, 75 bp, synthetic construct
  source 1..75: mol_type = other DNA
aaattaattcagaaaaggttaaccaactgcttgagtctactgaaaaacctttgatggacaatattcacgacacgc

SEQ ID NO: 553399 - DNA, 75 bp, synthetic construct
  source 1..75: mol_type = other DNA
tgttcgatccgggcaacagcctgaaatttatgatgggtgcaacggtgcgcagcctggcgattattggtatcgcag

SEQ ID NO: 553400 - DNA, 75 bp, synthetic construct
  source 1..75: mol_type = other DNA
gacagttttggtccgtatgtccggctgatgagcgtcaccctgaactgaggttccgtcacccggaaaacgagtacg

SEQ ID NO: 553401 - DNA, 75 bp, synthetic construct
  source 1..75: mol_type = other DNA
acgactggctgagctcagacgccgctgtggatgaggtcctgctcatcaacgaatacacctttaccgaaggcggtc

SEQ ID NO: 553402 - DNA, 75 bp, synthetic construct
  source 1..75: mol_type = other DNA
caacaccgatcctgttcttcccgtcctgcagggagaagctcgacagcagaaacgtggtctgtgggcagacagcgc

SEQ ID NO: 553403 - DNA, 75 bp, synthetic construct
  source 1..75: mol_type = other DNA
caacacagatcccgtgctgcctgtccttcaaaacgaagccagacaacaaaaacgtgggctctggtcagatgctga

SEQ ID NO: 553404 - DNA, 75 bp, synthetic construct
  source 1..75: mol_type = other DNA
tggaacgctataacggttattctgcggttgagattgttggggaagccgcaccgggggtcagtaccggtacggcga

SEQ ID NO: 553405 - DNA, 75 bp, synthetic construct
  source 1..75: mol_type = other DNA
gtgcggatcaggctggtaaatattgatgcgccggaaaagaaacaggattatggccggtggtcgacagacatgatg

SEQ ID NO: 553406 - DNA, 75 bp, synthetic construct
  source 1..75: mol_type = other DNA
tcgaacgccagttgctgatggtgctgttggaaaacatcccggaacaggagtcgcgtccaaaacgtgaaaaccaga

SEQ ID NO: 553407 - DNA, 75 bp, synthetic construct
  source 1..75: mol_type = other DNA
tccggccaggtgaataaatccggccaacaggcgatcaccaacgtgccactgaccattctcgacgccatcaacgcc

SEQ ID NO: 553408 - DNA, 75 bp, synthetic construct
  source 1..75: mol_type = other DNA
tggcgaagattctctgtgtaatcgtcggcatttcatttttagtcatgctggttgccattttcttttccaccgcct

SEQ ID NO: 553409 - DNA, 75 bp, synthetic construct
  source 1..75: mol_type = other DNA
ggatctggaaaataataccgtggttgccctggtactggacgccaattattaccgtgatgccgagacgctggagaa

SEQ ID NO: 553410 - DNA, 75 bp, synthetic construct
  source 1..75: mol_type = other DNA
aggcctgtggccagaagagcagttgtggtcttcagaaaagtatctcgattttacgccgaagttatttgaagcggt

SEQ ID NO: 553411 - DNA, 75 bp, synthetic construct
  source 1..75: mol_type = other DNA
cgaagcggcggaagccatccccgatgcccgcgatcgtttgtactatgttgtgcagatgactgcccaggctgcaga

SEQ ID NO: 553412 - DNA, 75 bp, synthetic construct
  source 1..75: mol_type = other DNA
gtgtactcgatattgagggggctgaaatacaggtgccatttgtttgatatggcgaataacatgaggaaatatatt

SEQ ID NO: 553413 - DNA, 75 bp, synthetic construct
  source 1..75: mol_type = other DNA
atcgttatggtcgtattctcgggcaggtttatgcaccagacggaatgaatgttaatcattttatggtccgtgcag

SEQ ID NO: 553414 - DNA, 75 bp, synthetic construct
  source 1..75: mol_type = other DNA
caggtttatgcaccagacggaatgaatgttaatcagtttatggtccgtgcaggcgctgcatgggtttatgagcag

SEQ ID NO: 553415 - DNA, 75 bp, synthetic construct
  source 1..75: mol_type = other DNA
catttcattttcactaatgctggttgctctttttctttccatggactggatgatgttgtcttcgtcggggctgct

SEQ ID NO: 553416 - DNA, 75 bp, synthetic construct
  source 1..75: mol_type = other DNA
ccagtgggcgcggcaaaaaaatcgcgaacgcagcaactggttgcagcttccggcgatgattatcggggcgtttat

SEQ ID NO: 553417 - DNA, 75 bp, synthetic construct
  source 1..75: mol_type = other DNA
gttgatgattacggtctgggatcacccggaactaaccacccccgcagggcaataccgtagcgccagtgataccgg

SEQ ID NO: 553418 - DNA, 75 bp, synthetic construct
  source 1..75: mol_type = other DNA
agtaaccgaacgggcgatgcgcggcgaactcgattttaccgccagcctgcgcagccgtgtggcgacgctgaaagg

SEQ ID NO: 553419 - DNA, 75 bp, synthetic construct
  source 1..75: mol_type = other DNA
aatgtttatccgctgaccccgcgcctgattgatcaattacgcccacgcccgaacgtggcgcgccccaatatgacg

SEQ ID NO: 553420 - DNA, 75 bp, synthetic construct
  source 1..75: mol_type = other DNA
tgccattattggtgtcagtaaccttgataagcggttgcacagtacttccgggcagcaatatgtcgacgatgggta

SEQ ID NO: 553421 - DNA, 75 bp, synthetic construct
  source 1..75: mol_type = other DNA
accatgactggtggtgaggatgctgtagtaggccgtaccttcacctttgtagtagatggtgctccggttaaacaa

SEQ ID NO: 553422 - DNA, 75 bp, synthetic construct
  source 1..75: mol_type = other DNA
cgctctggaaaaagcaaacgcctctgctccgctttgcaataaacctcttattacgccggattccctttcccgctt

SEQ ID NO: 553423 - DNA, 75 bp, synthetic construct
  source 1..75: mol_type = other DNA
attgtgtttaaagatggctccaacggacataaatcgctgtttatgggttatgcgaccccgaaagcattttatgaa

SEQ ID NO: 553424 - DNA, 75 bp, synthetic construct
  source 1..75: mol_type = other DNA
taagcaaagtgaaaggattgagatactggatggttcaagacggcgagcctcagcaatttttgtccgttcaggcct

SEQ ID NO: 553425 - DNA, 75 bp, synthetic construct
  source 1..75: mol_type = other DNA
aaacagatgcagatggaatatcactatgatgatcagggttatccgctggggaaaacgacgaaaagtaacgacaaa

SEQ ID NO: 553426 - DNA, 75 bp, synthetic construct
  source 1..75: mol_type = other DNA
gtgcaggtgatcccgccacacgatcacgatgccttgttagatcagatccaacactacctgatggatcactatcag

SEQ ID NO: 553427 - DNA, 75 bp, synthetic construct
  source 1..75: mol_type = other DNA
tgattgatcaattacgtccacgacccaacgtagcgcgccccaatatgacgctggaaagtgagatcgcgaattacc

SEQ ID NO: 553428 - DNA, 75 bp, synthetic construct
  source 1..75: mol_type = other DNA
ggctatggcctgattgtggctgtgccgattatctctaatcaggtgaatgtacagataggtgcgctggcgaacgtc

SEQ ID NO: 553429 - DNA, 75 bp, synthetic construct
  source 1..75: mol_type = other DNA
gtgctctccaggcagcgagtgctccggaagaattagtcgcccttttccctgtgcagtcggaattaaccttttcgg

SEQ ID NO: 553430 - DNA, 75 bp, synthetic construct
  source 1..75: mol_type = other DNA
cggtacacgagaagctcgcaaaagctgccgaagacggcactcgctgccagatcaaagtagagtattatgttgacg

SEQ ID NO: 553431 - DNA, 75 bp, synthetic construct
  source 1..75: mol_type = other DNA
ttttggcggcccgctggcaagtcaggctgattatcaggacccgtggctgaaacaacggctggaaaataacggctg

SEQ ID NO: 553432 - DNA, 75 bp, synthetic construct
  source 1..75: mol_type = other DNA
ttgtgctgacaacaaactggttgttaaaaacacaagctccgggaaaaccgccgaaattgcaggattaaatggttg

SEQ ID NO: 553433 - DNA, 75 bp, synthetic construct
  source 1..75: mol_type = other DNA
ttttactctgtaccctttcaatcccggccttcagttttgccatcacaattcccggtaatattcacccagagcgat

SEQ ID NO: 553434 - DNA, 75 bp, synthetic construct
  source 1..75: mol_type = other DNA
atgttcaaattatcagaatcacaattaaatcgaatgtttaaaagtgctcctgtattttcggtggaaggtggtaaa

SEQ ID NO: 553435 - DNA, 75 bp, synthetic construct
  source 1..75: mol_type = other DNA
cgggcagattgacacaaccacacgggggcaggtatcgcaggcagataagtatgttgccgggctacaggatgttgc

SEQ ID NO: 553436 - DNA, 75 bp, synthetic construct
  source 1..75: mol_type = other DNA
catatgcgatgcataaggctggtggtagcggaggaagtggcggtgctaaaacacctggcaccggcgctaatgcca

SEQ ID NO: 553437 - DNA, 75 bp, synthetic construct
  source 1..75: mol_type = other DNA
atgcagtatcattccggggggtcaccttcgcgatatccggggcattattaccggggatacgggaggggcgtcgat

SEQ ID NO: 553438 - DNA, 75 bp, synthetic construct
  source 1..75: mol_type = other DNA
ggatgtttgtcagtctgtacccggagttttccacggtgacaccggagctactgacggcggtgtttaaccaggcga

SEQ ID NO: 553439 - DNA, 75 bp, synthetic construct
  source 1..75: mol_type = other DNA
cgctttcaacggcttcatttctaaagttgctatgaacggtggcgatgaagaagtggtaactaaagagtttacctt

SEQ ID NO: 553440 - DNA, 75 bp, synthetic construct
  source 1..75: mol_type = other DNA
ttctgccgcctttacgctggtcgtaccgcaagcgacaacatccatgacggcggttctgctgattggcatggcact

SEQ ID NO: 553441 - DNA, 75 bp, synthetic construct
  source 1..75: mol_type = other DNA
atccctcgcccgcaacccatgcctgacccaccacccgatgaagaaccgattaaattgtcgcatcgtgagcgtaga

SEQ ID NO: 553442 - DNA, 75 bp, synthetic construct
  source 1..75: mol_type = other DNA
cacaaagccttacaggactggtttttatgtcccgggctcatccccttcaatgtacccgggccattataatcgtcg

SEQ ID NO: 553443 - DNA, 75 bp, synthetic construct
  source 1..75: mol_type = other DNA
gcgtagcgcgtggcgactgttgaaagatagtgtgaatgaattacttgaaggtgcaccggtatcgctggatatcgc

SEQ ID NO: 553444 - DNA, 75 bp, synthetic construct
  source 1..75: mol_type = other DNA
atgctggaaaaagactaccagttatccgcatataaaaaattggccgcagccggtgggatgaaaacaccaagtgcc

SEQ ID NO: 553445 - DNA, 75 bp, synthetic construct
  source 1..75: mol_type = other DNA
atcacacatccgcactttggcgataaaccggtaagggtgttcgctcttatggtaaataacagcactgaatgtcaa

SEQ ID NO: 553446 - DNA, 75 bp, synthetic construct
  source 1..75: mol_type = other DNA
atcacacatccgcactttggcgataaaccggtaatggtgttcgctcttatggtaaatatcagcactgaatgtcaa

SEQ ID NO: 553447 - DNA, 75 bp, synthetic construct
  source 1..75: mol_type = other DNA
atgatctggctaacattagtctttgccagcttgcttagcgttgccgggcagttgtgtcagaaacaggcaacctgc

SEQ ID NO: 553448 - DNA, 75 bp, synthetic construct
  source 1..75: mol_type = other DNA
gtggctaacctgcaacttgccgttaaaggtaaatttttcgatgccatgattcgcggagagaaaacggaggagtat

SEQ ID NO: 553449 - DNA, 75 bp, synthetic construct
  source 1..75: mol_type = other DNA
cacaaccggcttaacgaacattgtagaactggcaactaagcacgcggacctgttggctggttatgcagatctgtc

SEQ ID NO: 553450 - DNA, 75 bp, synthetic construct
  source 1..75: mol_type = other DNA
cacgctgaagcacggtgaacatacacggctgattcagccggggcgtgagatgtcggatatgcatctggattacgg

SEQ ID NO: 553451 - DNA, 75 bp, synthetic construct
  source 1..75: mol_type = other DNA
cgggagcaggtcagtccggagggtaagccgctggatacagccatgcagcaggcccgtgacagtctgatgccggta

SEQ ID NO: 553452 - DNA, 75 bp, synthetic construct
  source 1..75: mol_type = other DNA
acgctgacggcatcagacccggcatctgcactggcgctggcccgccagcaccctgagagtggtgttgtgctgcaa

SEQ ID NO: 553453 - DNA, 75 bp, synthetic construct
  source 1..75: mol_type = other DNA
atcacacatccgcactttggcgataaaccggtaaaggtgttcgctcttatggtaaatagcagcactgaatgtcaa

SEQ ID NO: 553454 - DNA, 75 bp, synthetic construct
  source 1..75: mol_type = other DNA
ccggaaaaatggtggcggcagcctttaaccatgacacctcgcgggagctggacccgcaaattcacacgcatcttc

SEQ ID NO: 553455 - DNA, 75 bp, synthetic construct
  source 1..75: mol_type = other DNA
taaaccagcagtattacaccattcacagccctgatgcagcaaacggtgtggtgatgctgcgtgatgcagaaggcc

SEQ ID NO: 553456 - DNA, 75 bp, synthetic construct
  source 1..75: mol_type = other DNA
tctggcatgagccggtaaccatacggcactggtgcggagtggcattgattattggcggcattgtgattcttggga

SEQ ID NO: 553457 - DNA, 75 bp, synthetic construct
  source 1..75: mol_type = other DNA
aatattcagtggccgaaaacgaaactgcgcattgagcgcggagaaatgccggaaacactgctggaaattatgcaa

SEQ ID NO: 553458 - DNA, 75 bp, synthetic construct
  source 1..75: mol_type = other DNA
ttgccattgatgtaccggatatcggcccacaatgggctgcggatcagattttttatcagatcttccctgatcgtt

SEQ ID NO: 553459 - DNA, 75 bp, synthetic construct
  source 1..75: mol_type = other DNA
ccgggttccggttgaggtttgtaataagccagtatcagaaaagtggacgccatcaattcacatgccgcgctgggc

SEQ ID NO: 553460 - DNA, 75 bp, synthetic construct
  source 1..75: mol_type = other DNA
taactatgaagatagcattgcaggtcactacgccgaccatctgttattcattattgtggattccgcacatataag

SEQ ID NO: 553461 - DNA, 75 bp, synthetic construct
  source 1..75: mol_type = other DNA
cgcatgggatcggacgaccgcaagtgcttgctgttattagtaccctttatacgattatgtatcctgattcccgga

SEQ ID NO: 553462 - DNA, 75 bp, synthetic construct
  source 1..75: mol_type = other DNA
atcagatatgccgaaaacaatgcgtttttcaatgcctgatggcagtgaatggacaatgccattacgagtgatagc

SEQ ID NO: 553463 - DNA, 75 bp, synthetic construct
  source 1..75: mol_type = other DNA
tccatctatggtgaagaaagctggaacgctaatccctgggtgtgggtaatcgagtttaagcgcattcaggaataa

SEQ ID NO: 553464 - DNA, 75 bp, synthetic construct
  source 1..75: mol_type = other DNA
gcgcgttgagcggttgaacgatatcagcgaatgcgatgcaagggctgagggcgttccgcctgctggaagtttgct

SEQ ID NO: 553465 - DNA, 75 bp, synthetic construct
  source 1..75: mol_type = other DNA
ttcaaagcacgggcttcagcagggtgctaaacagtacactcaaaacaccaatattattgggatgacataccttga

SEQ ID NO: 553466 - DNA, 75 bp, synthetic construct
  source 1..75: mol_type = other DNA
ccaaggttgcgttccagcgcctgtgggaatccatctacggcgaagaaagctggagtgctaatccctgggtttggg

SEQ ID NO: 553467 - DNA, 75 bp, synthetic construct
  source 1..75: mol_type = other DNA
actcccaatggggacttcgcaatggcaaaggttgcgttccagcgtctgtgggagtccatctacggcgaagaaagc

SEQ ID NO: 553468 - DNA, 75 bp, synthetic construct
  source 1..75: mol_type = other DNA
ccgggccatcctcgaaggaaggaaaacgcagacgcggcggataatgaaaaatcagcctgcggaagttggtccaga

SEQ ID NO: 553469 - DNA, 75 bp, synthetic construct
  source 1..75: mol_type = other DNA
ggaaggcaccaacaagcagcagttgcagaagtgggttgatgactacggcgaggatagcgacttcgtgaaagttcg

SEQ ID NO: 553470 - DNA, 75 bp, synthetic construct
  source 1..75: mol_type = other DNA
gcagacgcattccgcgagatacgcgatcacctgcagaatccagcaacgcgtcaccagccgctgatgttggcccgc

SEQ ID NO: 553471 - DNA, 75 bp, synthetic construct
  source 1..75: mol_type = other DNA
cgcaaatacaaacaccgctggaaaactgcgcagattgacagccggacggtggaaggcactaacaaacagcagttg

SEQ ID NO: 553472 - DNA, 75 bp, synthetic construct
  source 1..75: mol_type = other DNA
gccggattacgcgcgcttgaacaacaggctgactgggtgttagtggaaggcgctggcggctggtttacgccgctt

SEQ ID NO: 553473 - DNA, 75 bp, synthetic construct
  source 1..75: mol_type = other DNA
catttgacggtcatcggcccaggcgttatcgagttgaggatcaatggtcgcccagcttatcgctgtgtgtatcgc

SEQ ID NO: 553474 - DNA, 75 bp, synthetic construct
  source 1..75: mol_type = other DNA
gtgacagatgcagcgttatctcctgaagagcagttaatcgaagatattgcagggttcactcacgatccgcttggc

SEQ ID NO: 553475 - DNA, 75 bp, synthetic construct
  source 1..75: mol_type = other DNA
gcggcagagtacaaagttcgcgtggacggtaaaatcgttatcgaaccgaaggaagatatcaaagagcggcttggg

SEQ ID NO: 553476 - DNA, 75 bp, synthetic construct
  source 1..75: mol_type = other DNA
aagacagcgacttcgttaaaatccgtgtgcgcggcatattccctgatgcatctgaattgcagtttatccctaccg

SEQ ID NO: 553477 - DNA, 75 bp, synthetic construct
  source 1..75: mol_type = other DNA
acggtaaaatcgttatcgaaccgaaggaagatatcaaggagcggcttgggcgttctcctggtaaaggcgatgcgc

SEQ ID NO: 553478 - DNA, 75 bp, synthetic construct
  source 1..75: mol_type = other DNA
catgctccggtgataatcggcgttgacccggcatactccggcgttgatgacgctgtgatatacctgcggcagggg

SEQ ID NO: 553479 - DNA, 75 bp, synthetic construct
  source 1..75: mol_type = other DNA
cagaaatgggttgatgactacggggaagacagcgacttcgttaaaatccgtgtgcgcggcatattccctgatgca

SEQ ID NO: 553480 - DNA, 75 bp, synthetic construct
  source 1..75: mol_type = other DNA
gccctcagtctgacccgccacgaagaggcatggtggataattaatcagtctgatgaatattgttgcacggtaaat

SEQ ID NO: 553481 - DNA, 75 bp, synthetic construct
  source 1..75: mol_type = other DNA
ttacgtaacagcgacgcgctggcgttacagcgcaacagcagcttgcacctggattacgccacggtaaatccttac

SEQ ID NO: 553482 - DNA, 75 bp, synthetic construct
  source 1..75: mol_type = other DNA
ggaatgccggtggtgaccacgaccgtggaggtgcacgataacctgacgggaacaacccgcaaagtaccggcatac

SEQ ID NO: 553483 - DNA, 75 bp, synthetic construct
  source 1..75: mol_type = other DNA
tcttctacggcaatagctttaacaaccagctgctgccggtgaaattaagcgacgcagaagtggatgagctgtttg

SEQ ID NO: 553484 - DNA, 75 bp, synthetic construct
  source 1..75: mol_type = other DNA
cttctggcttattccggaaaccaagaatgtcacgctggaacatatcgaacgtagactgatggctggtgagaaatt

SEQ ID NO: 553485 - DNA, 75 bp, synthetic construct
  source 1..75: mol_type = other DNA
tctgctcgatagcatcggcgcggcaggtacgttctggctctacactgcgctgaacattgcgtttgttggcatcac

SEQ ID NO: 553486 - DNA, 75 bp, synthetic construct
  source 1..75: mol_type = other DNA
tcgcgaccttcattgcggtctttacggtagataaagcaggtcgtaaaccggctctgaaaattggtttcagcgtga

SEQ ID NO: 553487 - DNA, 75 bp, synthetic construct
  source 1..75: mol_type = other DNA
gcacgctgaaccaggagatgacgcaactcaataaagaaacggtcaaaatcactcagcaaaacaggctgaatgcaa

SEQ ID NO: 553488 - DNA, 75 bp, synthetic construct
  source 1..75: mol_type = other DNA
catttccagattcgttaccgtgcaacggcaattgatccgctacgttacttgccgccgcagggtagcaagccaaaa

SEQ ID NO: 553489 - DNA, 75 bp, synthetic construct
  source 1..75: mol_type = other DNA
tggagatatgccaacttaatcaaattcagactcgctggtcactggtcatttatggcgcaggtaacaaagtttccg

SEQ ID NO: 553490 - DNA, 75 bp, synthetic construct
  source 1..75: mol_type = other DNA
aaatgcagatggcactacgctgacgctgcgtattcagggcgaatccaatgatcccttacccgcgttcagcggaac

SEQ ID NO: 553491 - DNA, 75 bp, synthetic construct
  source 1..75: mol_type = other DNA
gcctggagcgaaaacaccggcaagactggaaagccagatcggtactttacgtatgtcgctggtgaatattacgcc

SEQ ID NO: 553492 - DNA, 75 bp, synthetic construct
  source 1..75: mol_type = other DNA
cgctgtgatatacctgcggcaggggctacacagtaaggtgctgtggactggcaacaagactaccgacgatctgat

SEQ ID NO: 553493 - DNA, 75 bp, synthetic construct
  source 1..75: mol_type = other DNA
ctaccgataatggattactggcagagcattatcctaaggcaatagatgaatttagaaaaactaatctgtttaagc

SEQ ID NO: 553494 - DNA, 75 bp, synthetic construct
  source 1..75: mol_type = other DNA
agatttgttccatctaatagaagaagatgtacacaaaataacgaaattaagaagctttaatttcgcaaaaacaag

SEQ ID NO: 553495 - DNA, 75 bp, synthetic construct
  source 1..75: mol_type = other DNA
atacgattatttatctacgaatgtaactcttccatctaattatattgatattagtaataagttaataaaatatgt

SEQ ID NO: 553496 - DNA, 75 bp, synthetic construct
  source 1..75: mol_type = other DNA
agcgagcgattgataatggtttacttgcagaacactatcctaaagcaattgaaaaactacagaaaacaaatttat

SEQ ID NO: 553497 - DNA, 75 bp, synthetic construct
  source 1..75: mol_type = other DNA
gatatagacgtttcaaatgatagaatagctaaaaagttagtgcaagagttgaagctgaacttgtctgctgacagt

SEQ ID NO: 553498 - DNA, 75 bp, synthetic construct
  source 1..75: mol_type = other DNA
gtgtatacttttatatatccagaacagctaccttgtctgcatataacaataaagcattaaaaggcacgctgctgt

SEQ ID NO: 553499 - DNA, 75 bp, synthetic construct
  source 1..75: mol_type = other DNA
tgtattgattattgctttattcatttactatcaagttgaggtgggaaccaaaaaggatttatatctgtttgtatt

SEQ ID NO: 553500 - DNA, 75 bp, synthetic construct
  source 1..75: mol_type = other DNA
gtgttacggatttcctgattagattatgcctcactgttattgtctcatcaccggtaattatatggtcatgggata

SEQ ID NO: 553501 - DNA, 75 bp, synthetic construct
  source 1..75: mol_type = other DNA
gatgcttgccgctgctttcgttatcctttactccggtgtgctcctgtttattctgtattttttgtttttctgccc

SEQ ID NO: 553502 - DNA, 75 bp, synthetic construct
  source 1..75: mol_type = other DNA
gcactggcctcgattgaggcaaaaccaataggtgcattccacattgcagaacagcaagttgacggcacaagtgac

SEQ ID NO: 553503 - DNA, 75 bp, synthetic construct
  source 1..75: mol_type = other DNA
agcggatgcctgaaaagaaccagaacgtgcttatttcggtgaatttcgatagctctctggttgaaccgctaatat

SEQ ID NO: 553504 - DNA, 75 bp, synthetic construct
  source 1..75: mol_type = other DNA
tcgaattattcattaaaaatccgcttgaaaacggacttacccgtggcgaacaaatggaactggcacgaattgcac

SEQ ID NO: 553505 - DNA, 75 bp, synthetic construct
  source 1..75: mol_type = other DNA
tcattggcttgttcaaaatacaaataatagtgatttgaaaaaaatacttttttcatcgagagattcaagggttat

SEQ ID NO: 553506 - DNA, 75 bp, synthetic construct
  source 1..75: mol_type = other DNA
ggaaggcaccaacaagcagcaactgcaaaagtgggtggacgactacggcgaagacagcgacttcgtgaaggttcg

SEQ ID NO: 553507 - DNA, 75 bp, synthetic construct
  source 1..75: mol_type = other DNA
aagagcagctcgttgaggatatcgcctcgttcacgtatgacccgctgggctatgcgctgtacgcgtttccgtggg

SEQ ID NO: 553508 - DNA, 75 bp, synthetic construct
  source 1..75: mol_type = other DNA
cgcatcatcgtcgtattcgacgaagcgtccaacattgccgatctggtgtgggaagtagcagagggtgctctgacg

SEQ ID NO: 553509 - DNA, 75 bp, synthetic construct
  source 1..75: mol_type = other DNA
cagaaatgggttgatgactacggggaagacagcgacttctgtcaacgacggatgaaaagtgatccacttatatct

SEQ ID NO: 553510 - DNA, 75 bp, synthetic construct
  source 1..75: mol_type = other DNA
ttatggactacgagttctcgttgcttaagcgcgatattccgaagaccaataccttctgtaaggtcaccgatagcc

SEQ ID NO: 553511 - DNA, 75 bp, synthetic construct
  source 1..75: mol_type = other DNA
ggctggtagacccggaagcctttggcgtacacggtattgccgatgaatttttgcttgataagcccacgtttgccg

SEQ ID NO: 553512 - DNA, 75 bp, synthetic construct
  source 1..75: mol_type = other DNA
aaaggcggattcaaaaattaataagactccccagagtcattgaaatcacagggagatcaagagctcgaatttacg

SEQ ID NO: 553513 - DNA, 75 bp, synthetic construct
  source 1..75: mol_type = other DNA
tgaagatcaggctcgccatgcacgcattacccgcctgcctggtgaccataatgagcattcgagggagaaaaacgc

SEQ ID NO: 553514 - DNA, 75 bp, synthetic construct
  source 1..75: mol_type = other DNA
atgaagatcaggctcgccacgcacggattacccgcctgcccggtgagcataatgagcattcgagggagaaaaacg

SEQ ID NO: 553515 - DNA, 75 bp, synthetic construct
  source 1..75: mol_type = other DNA
ttgaaagtggttggaaatggaagtatctggtgaagaagcaccgtgaaggtgagcttatcacccggtacatcgaag

SEQ ID NO: 553516 - DNA, 75 bp, synthetic construct
  source 1..75: mol_type = other DNA
gcagaaaacaaagaaaaatatgcgaataaaatgtcttctttgaagcaggatttgcaggccttgctgggtaaggaa

SEQ ID NO: 553517 - DNA, 75 bp, synthetic construct
  source 1..75: mol_type = other DNA
ctacgatgccgggatggtggcgatcgcgtcattcgtcgcggttgtttccggtgcgcttatttctggcggtgttta

SEQ ID NO: 553518 - DNA, 75 bp, synthetic construct
  source 1..75: mol_type = other DNA
tccaggaaactatcgttaaacgtttgcaacaggaatcctggttcgttggcaccagtaactacgatctggcgcgtc

SEQ ID NO: 553519 - DNA, 75 bp, synthetic construct
  source 1..75: mol_type = other DNA
ccgtatggtcaggtggagatgggtaaacgttacgtgcaggcgctgggcggttctgcccgtgtcatcaacctggcg

SEQ ID NO: 553520 - DNA, 75 bp, synthetic construct
  source 1..75: mol_type = other DNA
aaaccgtcgaacaaaatgcagcaatttttgccgaagctgaaggtttactgggttcaaacgagaatgtagatgccg

SEQ ID NO: 553521 - DNA, 75 bp, synthetic construct
  source 1..75: mol_type = other DNA
ccggggctgtcggacgttacttccagcttcgcgatggaacagattaaatacaccacttctttacccatcgaataa

SEQ ID NO: 553522 - DNA, 75 bp, synthetic construct
  source 1..75: mol_type = other DNA
atgacacaattcgcttctcctgttctgccctcgttgctggatacagatgcttataagttgcatatgcagcaagcc

SEQ ID NO: 553523 - DNA, 75 bp, synthetic construct
  source 1..75: mol_type = other DNA
actatctgccatgacaaagcgtttgtccgtgcgctgcgtaaagcgttcgaccttccgcatattaaaaaagccagt

SEQ ID NO: 553524 - DNA, 75 bp, synthetic construct
  source 1..75: mol_type = other DNA
tctggagtacctggcgcagctgccgcaaagcgaagccgtggaaggtttgaaagatattgcgccgattctggcatt

SEQ ID NO: 553525 - DNA, 75 bp, synthetic construct
  source 1..75: mol_type = other DNA
tctggagtatctggcgcagctgccgcaaagcgaagccgtggaaggtttgaaagatatcgcgccgattctggcatt

SEQ ID NO: 553526 - DNA, 75 bp, synthetic construct
  source 1..75: mol_type = other DNA
ccgtggttacgtccccggtatgaatgcggatagtgttcaagcagttatagaccatacccaggctatcagggccca

SEQ ID NO: 553527 - DNA, 75 bp, synthetic construct
  source 1..75: mol_type = other DNA
cagaaaggggaaattcacgctgccgggctggatgtcttcgaacaagagccactgtctgtagattcgccgttgctc

SEQ ID NO: 553528 - DNA, 75 bp, synthetic construct
  source 1..75: mol_type = other DNA
gcctccttgaatatccggatgctgccttgtggcagcatcaacaagagatgtttgaggctattgccgcgtcggaaa

SEQ ID NO: 553529 - DNA, 75 bp, synthetic construct
  source 1..75: mol_type = other DNA
attcagccatcactgctcatcagcgtcgctttgccggtgccgtcgcgccgcaatatctgaatatcaccaccggag

SEQ ID NO: 553530 - DNA, 75 bp, synthetic construct
  source 1..75: mol_type = other DNA
aagcgtctgaaacggctggaggacgacggtatccttatcggcaaagtcgccctgctggatccggaaaaaataggc

SEQ ID NO: 553531 - DNA, 75 bp, synthetic construct
  source 1..75: mol_type = other DNA
gaaaacaagtacgactggctgacctcagacaccgctgtggatgaggcccttctcatcaacgaatataccttcacc

SEQ ID NO: 553532 - DNA, 75 bp, synthetic construct
  source 1..75: mol_type = other DNA
ctgtttgtgctgatcgacggctggtcgctgaccatcggtacgctcaccaccagcattcgcgggctggggctgggc

SEQ ID NO: 553533 - DNA, 75 bp, synthetic construct
  source 1..75: mol_type = other DNA
tacgcgctttattatcgtgctgtcgctgctgcgccaggcgctggggctgcaacaaacgccgccaaaccgcattct

SEQ ID NO: 553534 - DNA, 75 bp, synthetic construct
  source 1..75: mol_type = other DNA
gggggtgaatccattctcggtggcgcgcgcagcatggcaagatctcacttcgggacgggttatttccggtggcag

SEQ ID NO: 553535 - DNA, 75 bp, synthetic construct
  source 1..75: mol_type = other DNA
cgtcgccccactggcatggaaaacgggcaccagctatggctatcgtgatgcctgggcgattggggttaacgctcg

SEQ ID NO: 553536 - DNA, 75 bp, synthetic construct
  source 1..75: mol_type = other DNA
ggattatccgccgtattatggcagatgaagcgcagccgcttccggatggcgctttgccacgcgtcgtaccactgg

SEQ ID NO: 553537 - DNA, 75 bp, synthetic construct
  source 1..75: mol_type = other DNA
gggtataacaacattgttattggtaattcctccacggtaaaagcttccggtttgatcagaaaagtgggcgaagat

SEQ ID NO: 553538 - DNA, 75 bp, synthetic construct
  source 1..75: mol_type = other DNA
agcgatgaaaacgacaaaagaacactggtcagtgcgaatacttatgctgaccagaaagaaaccgacatcaataac

SEQ ID NO: 553539 - DNA, 75 bp, synthetic construct
  source 1..75: mol_type = other DNA
tcaggccgagtccgccacctggcgcggtttctacctgaccggcgcgaaagagctgcgcgaaggggtgcataagtt

SEQ ID NO: 553540 - DNA, 75 bp, synthetic construct
  source 1..75: mol_type = other DNA
cgagtacgaccagatggactcagacgccgctgtggatgaggccattctcgtcaatgcatacatcttcaccgaaac

SEQ ID NO: 553541 - DNA, 75 bp, synthetic construct
  source 1..75: mol_type = other DNA
actcagcgcctgggggctgttcgatttctggaactggctgcaaaacggcgcggggcagaaaaccgtggatatcct

SEQ ID NO: 553542 - DNA, 75 bp, synthetic construct
  source 1..75: mol_type = other DNA
agttcgtcctcaagttagcgggattatcctgaagcgtaatttcaaagaaggtagcgacatcgaagcaggtgtctc

SEQ ID NO: 553543 - DNA, 75 bp, synthetic construct
  source 1..75: mol_type = other DNA
tgtgcgcggggatcgagaaaatctccggacgtaagccgttctatgttggtaaacccagcccgtggatcatccgtg

SEQ ID NO: 553544 - DNA, 75 bp, synthetic construct
  source 1..75: mol_type = other DNA
gctaagttcttattcccggccaagagtcagcaatgataatccttactcagaatctttgttccggactctcaaata

SEQ ID NO: 553545 - DNA, 75 bp, synthetic construct
  source 1..75: mol_type = other DNA
gttgcgccgaatcaagtctggagttgggacatcagctatttgccgtcctgggtcagaggccagcatttttacctc

SEQ ID NO: 553546 - DNA, 75 bp, synthetic construct
  source 1..75: mol_type = other DNA
tacgaaagaatctgggcagtatgcggcagaactgcttcaacgtgctgtatggaatgaaaaatgttcatcccgcaa

SEQ ID NO: 553547 - DNA, 75 bp, synthetic construct
  source 1..75: mol_type = other DNA
cgtactggttgacgacggtctgatcggtatggaagttaccgccattgaaggtaacaaagttatctgtaaagtgct

SEQ ID NO: 553548 - DNA, 75 bp, synthetic construct
  source 1..75: mol_type = other DNA
atgacgcaacttgcaagcctgacggcattcattgaaaacaatctgccggcacgcacacgcattccgttcaccagt

SEQ ID NO: 553549 - DNA, 75 bp, synthetic construct
  source 1..75: mol_type = other DNA
ttcgcgatgcgatgtcctgtatgggcgcggcagtcaatatcatcaccacggatggtccagccgggcgcgccgggt

SEQ ID NO: 553550 - DNA, 75 bp, synthetic construct
  source 1..75: mol_type = other DNA
ggtattaagtatgttactccggatgaacgccatcgcggaattgacgtacaaatactggaagccagaaaaaaagtt

SEQ ID NO: 553551 - DNA, 75 bp, synthetic construct
  source 1..75: mol_type = other DNA
tagcatactcatccttcttttttaccgtagtaacattcttgatggttataaaaagatttagcacaatattagata

SEQ ID NO: 553552 - DNA, 75 bp, synthetic construct
  source 1..75: mol_type = other DNA
cacagaacaacagatgattgcgactctggtcgtagggctgacctttatgttcgccacctttattgcggtgtttac

SEQ ID NO: 553553 - DNA, 75 bp, synthetic construct
  source 1..75: mol_type = other DNA
gtagcccccaaccaggtgtggatctgggatattagttatatcccatcatgggttaaggggcagcatttttatctc

SEQ ID NO: 553554 - DNA, 75 bp, synthetic construct
  source 1..75: mol_type = other DNA
tggctggttttatgcgcattctcagcccggcgtttgtctcccactatgccgggcgtttgctgaacattcaccctt

SEQ ID NO: 553555 - DNA, 75 bp, synthetic construct
  source 1..75: mol_type = other DNA
tgaccgggagttgattcacgagatcgatatgtacgctcccgacgtggttgtactggccggttttatgcgcattct

SEQ ID NO: 553556 - DNA, 75 bp, synthetic construct
  source 1..75: mol_type = other DNA
gacgtcgtagttatggtttctggtgcactggtaccgagcggcactactaacaccgcatctgttcacgtcctgtaa

SEQ ID NO: 553557 - DNA, 75 bp, synthetic construct
  source 1..75: mol_type = other DNA
gatgcacttatcacgtttgtttgtatcgatctcaaaacgcagaaagcattagctctggaaggggaactgcgcgaa

SEQ ID NO: 553558 - DNA, 75 bp, synthetic construct
  source 1..75: mol_type = other DNA
atgcaaacacaaatcaaagttcgtggatatcatctcgacgtctaccaacacgtcaacaacgcccgctaccttgag

SEQ ID NO: 553559 - DNA, 75 bp, synthetic construct
  source 1..75: mol_type = other DNA
cttattacgtttgtttgtattgatcttaaaacgcagaaagcattagctctggaaggggaattgcgcgaaaagctg

SEQ ID NO: 553560 - DNA, 75 bp, synthetic construct
  source 1..75: mol_type = other DNA
cgtggatcatccgcgcggcattaaacaaaatgcaggcgcattcggaagaaacggtgattgtcggcgataacttgc

SEQ ID NO: 553561 - DNA, 75 bp, synthetic construct
  source 1..75: mol_type = other DNA
ctggaaaaaccagtacatggttaatctgcctcccgctcaagagcacaaggaatggctaatcgacccgacaatcag

SEQ ID NO: 553562 - DNA, 75 bp, synthetic construct
  source 1..75: mol_type = other DNA
caagcatcggacacaatggctaatgaacaggcagcgcctgaatcagtggaagaaattccagttaaacataatgag

SEQ ID NO: 553563 - DNA, 75 bp, synthetic construct
  source 1..75: mol_type = other DNA
gcctcaataccgatgaatggccagctattaagacgttatcactgccccgctgggctaaggaatatgcaaatgact

SEQ ID NO: 553564 - DNA, 75 bp, synthetic construct
  source 1..75: mol_type = other DNA
acggcgatggatccgctcgatgctcaggcccagtacagcgaactgttcgaccgtggccgcgccacgtcgttgttg

SEQ ID NO: 553565 - DNA, 75 bp, synthetic construct
  source 1..75: mol_type = other DNA
tctatcatggcaaccatttgcgaacgtactgaccgcgtgatgaacagccgtctcgagttcaacaacgataaccgt

SEQ ID NO: 553566 - DNA, 75 bp, synthetic construct
  source 1..75: mol_type = other DNA
ttgcccgttcaatggacgtggacatctataaccttcatccggcacacgctaaacgcattgaggaaattatcgctg

SEQ ID NO: 553567 - DNA, 75 bp, synthetic construct
  source 1..75: mol_type = other DNA
tttctggttgccagcacaactattgaatgcggacgttatccggttgaaattttcatgatgggcgaagaagcaaaa

SEQ ID NO: 553568 - DNA, 75 bp, synthetic construct
  source 1..75: mol_type = other DNA
atccctgaatttcactggatcatggacgtgaaaactacggcggatattcaacgattcaaaaccgcttattacgac

SEQ ID NO: 553569 - DNA, 75 bp, synthetic construct
  source 1..75: mol_type = other DNA
aaatcctccgtccggcagaagataacttcatggaaaaggtcgatgacctgaacagtgagcagcagtacgaaaata

SEQ ID NO: 553570 - DNA, 75 bp, synthetic construct
  source 1..75: mol_type = other DNA
aaaccaccacatgcgttgcatggtatggcttgttactcaacgtgggaaatcatcgacaaaacagcagattccctg

SEQ ID NO: 553571 - DNA, 75 bp, synthetic construct
  source 1..75: mol_type = other DNA
atgaaaactgaacgaaaaaacgagcattacatggcgctacaacaggcgtttgacgcgccatggcctgggcctgta

SEQ ID NO: 553572 - DNA, 75 bp, synthetic construct
  source 1..75: mol_type = other DNA
tgagcgcctttgaacagatgtgttacgagctgaatttccgttcgtttctggaagatctggaagtgtttgttctgc

SEQ ID NO: 553573 - DNA, 75 bp, synthetic construct
  source 1..75: mol_type = other DNA
atgaattttattaaaagactagtattagcgatatctataatgccaatatttgctcattcagcaatagaaggagta

SEQ ID NO: 553574 - DNA, 75 bp, synthetic construct
  source 1..75: mol_type = other DNA
aactggaagactgctatttcagtcaaaaggatccgtcaacgccagtttcatgccagaaaagttacgacacgcgag

SEQ ID NO: 553575 - DNA, 75 bp, synthetic construct
  source 1..75: mol_type = other DNA
ccatatccgttcgtacagctggccacgctcaaacaacggactgaaaaagcgaccagaacggcaggccgtgtccct

SEQ ID NO: 553576 - DNA, 75 bp, synthetic construct
  source 1..75: mol_type = other DNA
ctggctctaactttatcgatatcctcgaaatgttcgaaaaagatccgcagaccgaagcgatcgtgatgatcggtg

SEQ ID NO: 553577 - DNA, 75 bp, synthetic construct
  source 1..75: mol_type = other DNA
gattatcaccatcactgaaggcatcccgacgctggatatgctgacggtgaaagtgaaactggatgaagcaggcgt

SEQ ID NO: 553578 - DNA, 75 bp, synthetic construct
  source 1..75: mol_type = other DNA
ggcgttatcactccgggtgaatgcaaaattggtatccagccgggtcacattcacaaaccgggtaaagtgggtatc

SEQ ID NO: 553579 - DNA, 75 bp, synthetic construct
  source 1..75: mol_type = other DNA
acagcctgggctattaccaccagcaatccgacaaattacacaacggcgagatggaagttcaggcggcttttggct

SEQ ID NO: 553580 - DNA, 75 bp, synthetic construct
  source 1..75: mol_type = other DNA
caaaatgatgaccgcgcttggagttacccaactcattgcaaaagatgcagaagcggatgatctggccgggctgct

SEQ ID NO: 553581 - DNA, 75 bp, synthetic construct
  source 1..75: mol_type = other DNA
gccctgctccattacgtcccggatctgcgccgcaagatgctgctggccacactgtggaacaccggtgcgcgcatt

SEQ ID NO: 553582 - DNA, 75 bp, synthetic construct
  source 1..75: mol_type = other DNA
atgtgcaatagaagttaaaggaaacaaccctagtaaaaaacttttattttctgacataagaagaaatcttgaata

SEQ ID NO: 553583 - DNA, 75 bp, synthetic construct
  source 1..75: mol_type = other DNA
ctggtgcgctggctgactgcaggcgctgggatcgcctacgtgccgttgatgtgggtgatcaacgagatcaatcgc

SEQ ID NO: 553584 - DNA, 75 bp, synthetic construct
  source 1..75: mol_type = other DNA
gttatcagtcagatccacgtccggtttatgcgctgtatacagaaaaagataaactgccgttgaaggtgcaagtcg

SEQ ID NO: 553585 - DNA, 75 bp, synthetic construct
  source 1..75: mol_type = other DNA
ctgttaccggcacaggtgctgactattactgacagtactccaccagtgttgcctgcaccgttacaggagccggtt

SEQ ID NO: 553586 - DNA, 75 bp, synthetic construct
  source 1..75: mol_type = other DNA
aaggggcgctaagggctggtggatatttgcctaacggctggcagcttgctcctggtcccggcgcaaagctggaca

SEQ ID NO: 553587 - DNA, 75 bp, synthetic construct
  source 1..75: mol_type = other DNA
tcaattctcgtgctgatggtggttcgtcttttgttaagactgaaatacccaaccccgccgattatacctaagcca

SEQ ID NO: 553588 - DNA, 75 bp, synthetic construct
  source 1..75: mol_type = other DNA
tcaggaagtcagcaccagctttgtcaccattgaacaactgctcgctgattttctggctgacgttaaatccatccg

SEQ ID NO: 553589 - DNA, 75 bp, synthetic construct
  source 1..75: mol_type = other DNA
tgtcattggagttaatactaataaaatagagaaaatgaaactgttatttggttctaatatgattgatagtcgatc

SEQ ID NO: 553590 - DNA, 75 bp, synthetic construct
  source 1..75: mol_type = other DNA
cgcgtcgctctctgggattaccggcggaaaaaatccgctccgtataccgtgaaagcgacatcataccgggagaac

SEQ ID NO: 553591 - DNA, 75 bp, synthetic construct
  source 1..75: mol_type = other DNA
agcaacttactcaacaaaatctgacagcctggatgattgacgtcatacgccatgtaatgaatggcacgcaggagc

SEQ ID NO: 553592 - DNA, 75 bp, synthetic construct
  source 1..75: mol_type = other DNA
tctgggatactttgtcatcgggttgcacgctgcggctgcactggcacaccactatttctggaaggacaacacact

SEQ ID NO: 553593 - DNA, 75 bp, synthetic construct
  source 1..75: mol_type = other DNA
cctgtttattgcgctgccagtgattggtttggtgatgatgtataaccggggcaacccgtggtttgcgtttggtat

SEQ ID NO: 553594 - DNA, 75 bp, synthetic construct
  source 1..75: mol_type = other DNA
tcgtcgcttgccaaaaggcttaacgccgcagacgttacgcacgctgtgccagtggattgacgcgcatcaggacta

SEQ ID NO: 553595 - DNA, 75 bp, synthetic construct
  source 1..75: mol_type = other DNA
gcaaaatcgggattatgcctggtgaaatccaccgcccagggcgtattgggattgtttcccgctccggtacattaa

SEQ ID NO: 553596 - DNA, 75 bp, synthetic construct
  source 1..75: mol_type = other DNA
gtacaggtcgcaatgcgaaaatgacaggcgtgactgggggttctaaggattgattgccgaggaagtcggagaaat

SEQ ID NO: 553597 - DNA, 75 bp, synthetic construct
  source 1..75: mol_type = other DNA
gtacaggtcgcaatgcgaaaatgacaggcgtgactggggcttctatggattgattgccgaggaagttggagaaat

SEQ ID NO: 553598 - DNA, 75 bp, synthetic construct
  source 1..75: mol_type = other DNA
gtacaggtcgcaatgcgaaaatgacaggcgtgactggggattctagggattgattgccgaggaagtgggagaaat

SEQ ID NO: 553599 - DNA, 75 bp, synthetic construct
  source 1..75: mol_type = other DNA
aattaataacgccatcagcctgattgccgcgggcaacagcgtcatttttgccccgcatccggcggcgaaaaaagt

SEQ ID NO: 553600 - DNA, 75 bp, synthetic construct
  source 1..75: mol_type = other DNA
caacatcgtctatccgctataaacattcagtagagacgatagattcagagcacgccgatctcattttcaggatgc

SEQ ID NO: 553601 - DNA, 75 bp, synthetic construct
  source 1..75: mol_type = other DNA
gtacaggtcgcaatgcgaaaatgacaggcgtgactgggggttctacggattgattgccgaggaagtaggagaaat

SEQ ID NO: 553602 - DNA, 75 bp, synthetic construct
  source 1..75: mol_type = other DNA
gccctgcatgattcacgtcatgttgatcatgttaccgataagaacggtacgcgcaatgttatccgtacgccggca

SEQ ID NO: 553603 - DNA, 75 bp, synthetic construct
  source 1..75: mol_type = other DNA
gcgggctcttcccccggacgcaggtgtcccagcagaaagtctgtcaggacattgccggtgagagcaatatttttg

SEQ ID NO: 553604 - DNA, 75 bp, synthetic construct
  source 1..75: mol_type = other DNA
tggataagtatccggggaggaaaaggaatatttatcagtgcagatatgcagcctcaggcacaaggaaagatgctg

SEQ ID NO: 553605 - DNA, 75 bp, synthetic construct
  source 1..75: mol_type = other DNA
acaatagattcagagcacgctgatctcattttcaggatgcgccctgtgtggtacaggttggatttgcccctatat

SEQ ID NO: 553606 - DNA, 75 bp, synthetic construct
  source 1..75: mol_type = other DNA
tccagaaactgactgaaagagttgatgaacttgagtcagaattaaagctgttatcaacttcccgaagcgatatcg

SEQ ID NO: 553607 - DNA, 75 bp, synthetic construct
  source 1..75: mol_type = other DNA
ctggtgaacacgggcctgtatccgccaatgtttcattcccgattccatttacacagacaccgggcattgtaattg

SEQ ID NO: 553608 - DNA, 75 bp, synthetic construct
  source 1..75: mol_type = other DNA
cgaaaagcacgccagagatttagcggaacttgccgttagtgaaaccggtatggggcgtgttgaagataaatttgc

SEQ ID NO: 553609 - DNA, 75 bp, synthetic construct
  source 1..75: mol_type = other DNA
caaacaatttttcctacacttttatcgtttgcacacttcacgttcaattagtctgtaaaaacgtcaaaaagagtg

SEQ ID NO: 553610 - DNA, 75 bp, synthetic construct
  source 1..75: mol_type = other DNA
gagacatcaccacgctaaagggagatatttcctcaattaacggaaaagtatcaacgcttcagactgagatgacca

SEQ ID NO: 553611 - DNA, 75 bp, synthetic construct
  source 1..75: mol_type = other DNA
tccagaaactgaccgaaagagttgatgaacttgagtcagaattgaagttgttatcaacttcccgaagcgatatcg

SEQ ID NO: 553612 - DNA, 75 bp, synthetic construct
  source 1..75: mol_type = other DNA
gataaaaatccgggacaggaaagtatgccggtacgtctggccaaaccctacagtggtgatgcttatggttttcat

SEQ ID NO: 553613 - DNA, 75 bp, synthetic construct
  source 1..75: mol_type = other DNA
ctcaagctgcaagagcagaacgacagcctgcaagcgcagattgctgccgcccagactggcggtaatggggcgaaa

SEQ ID NO: 553614 - DNA, 75 bp, synthetic construct
  source 1..75: mol_type = other DNA
tggcctggttaacgacgcctccaaaaatggaaccacggtcatcattacggatgacaacggcgtgatgattaatct

SEQ ID NO: 553615 - DNA, 75 bp, synthetic construct
  source 1..75: mol_type = other DNA
ctcccagcgggcgattacgctgctcaaccaggcgattgttgccgcaggcgggccggaaaacttactggttaccgt

SEQ ID NO: 553616 - DNA, 75 bp, synthetic construct
  source 1..75: mol_type = other DNA
aaggcgcttctttcgataacaacatcatttgtgccgatgaaaaggtactgattgttgttgatagcgtagccgatg

SEQ ID NO: 553617 - DNA, 75 bp, synthetic construct
  source 1..75: mol_type = other DNA
tgcgcgtcgccaacgtggcggatgccattgcgctggcggtgaaactggaaggcggttgccaccacacggcggcaa

SEQ ID NO: 553618 - DNA, 75 bp, synthetic construct
  source 1..75: mol_type = other DNA
tcttaatttatctccattagttttagcccgaacgctggaagattttggcaccatgagtgcgccaataattccgtg

SEQ ID NO: 553619 - DNA, 75 bp, synthetic construct
  source 1..75: mol_type = other DNA
cggcttacatgctgatcttccaattctggcggcagccattgttaccggggcttattttggcgacaaactttcacc

SEQ ID NO: 553620 - DNA, 75 bp, synthetic construct
  source 1..75: mol_type = other DNA
cctgaagctatttccagcaatggccttgttgccgaaggtgtaatgtacgaacgtctggttgttccactgattcac

SEQ ID NO: 553621 - DNA, 75 bp, synthetic construct
  source 1..75: mol_type = other DNA
ttgccggaatgctgtatccgggcgtgaaacagtcagacctcagtgaagagcagaagcagacgataagtacgctgg

SEQ ID NO: 553622 - DNA, 75 bp, synthetic construct
  source 1..75: mol_type = other DNA
tatagcgctggggggatctgtatttagcgatggcgctaatattaagtcccaatctggaactgctctcggggcata

SEQ ID NO: 553623 - DNA, 75 bp, synthetic construct
  source 1..75: mol_type = other DNA
gcgctatatcgacggggttggttcagacaccgaccagatgcgctacctgatggataacgctgtccgtgcacagaa

SEQ ID NO: 553624 - DNA, 75 bp, synthetic construct
  source 1..75: mol_type = other DNA
acagagattatcaatacctccgggaatattgagacgcatcagggcgatattgttgtaaggaccgggcatcttctg

SEQ ID NO: 553625 - DNA, 75 bp, synthetic construct
  source 1..75: mol_type = other DNA
aactcacaaacggcgggcatctgcagggcgaaacgctgacgctggccgcctccggtggcgtgaacaaccgtttcg

SEQ ID NO: 553626 - DNA, 75 bp, synthetic construct
  source 1..75: mol_type = other DNA
tgaccgccggcaacggcaccacggcactgagcggcagcgggattgcgatgaatgccagcggcagcctgcaggcag

SEQ ID NO: 553627 - DNA, 75 bp, synthetic construct
  source 1..75: mol_type = other DNA
gtggtggttttgaggcatgggccgttccgactgaaaagggagccacccggaaatttctgactggcacaacacgcg

SEQ ID NO: 553628 - DNA, 75 bp, synthetic construct
  source 1..75: mol_type = other DNA
cagagcgtgaaaaggcacagcagaaatatgatgcattgcttgaaaaagatattgccagtgataaggaggttattg

SEQ ID NO: 553629 - DNA, 75 bp, synthetic construct
  source 1..75: mol_type = other DNA
cagcgcatcagcagcagtgggagcacagagcgggaagaatgctgttgataataactacctgagcgtgtctgaaaa

SEQ ID NO: 553630 - DNA, 75 bp, synthetic construct
  source 1..75: mol_type = other DNA
gccgatgtgggccacgacctgctgataagcagccagcaggacaccagtaagtacgacagtaaacagaccagcgtg

SEQ ID NO: 553631 - DNA, 75 bp, synthetic construct
  source 1..75: mol_type = other DNA
acaggggcgataaccgcggagatattgtgattgccggaagccagcttaaggccggtggtaacacaagcctggatg

SEQ ID NO: 553632 - DNA, 75 bp, synthetic construct
  source 1..75: mol_type = other DNA
aggaatggtgagttatggtcaggcggtttcctcatggaatcagtatgctgatgccaataatctcaccccggaaca

SEQ ID NO: 553633 - DNA, 75 bp, synthetic construct
  source 1..75: mol_type = other DNA
aagcggaggttttctcagtaagaaaaccacccacaccatcagtgaggacagtgcctcccgtgaagcaggctccct

SEQ ID NO: 553634 - DNA, 75 bp, synthetic construct
  source 1..75: mol_type = other DNA
aactgattgctgccctcacgaatcatggtaccctggccgcagggaaaaccctttccgtcacgtcgcaaaatgcca

SEQ ID NO: 553635 - DNA, 75 bp, synthetic construct
  source 1..75: mol_type = other DNA
gacacagacagcgctgcagcagtatgagccggtggtggttggctctccgcaatggcacgatgaactggcaggtgc

SEQ ID NO: 553636 - DNA, 75 bp, synthetic construct
  source 1..75: mol_type = other DNA
tggataaactgcccctgctgtcaccggaatttgaaaacaataccatcagattttcactggatggccgggaaaaag

SEQ ID NO: 553637 - DNA, 75 bp, synthetic construct
  source 1..75: mol_type = other DNA
ggcacctctccggtaggtcagtaccgtgcggttatcagcgctgccggtgatgtgtctgccagctttgccactgac

SEQ ID NO: 553638 - DNA, 75 bp, synthetic construct
  source 1..75: mol_type = other DNA
cttggcgttaagggcagttcactgctgcaaaatggtacagggcggctgtacagtgcaggcaacctgctgcttgac

SEQ ID NO: 553639 - DNA, 75 bp, synthetic construct
  source 1..75: mol_type = other DNA
gcgtgatacgccggaatacaaaaaggaacaggaaaagtatggcactggcagtgagattcagcgaggtatacaggc

SEQ ID NO: 553640 - DNA, 75 bp, synthetic construct
  source 1..75: mol_type = other DNA
atcggggatatcggcaatatcagctcagtcatcagcggtaaaaccgtatccctggaaagcgccaccggaaacatc

SEQ ID NO: 553641 - DNA, 75 bp, synthetic construct
  source 1..75: mol_type = other DNA
gccgccgctgacacccgacagaccaccgggaagaacagcagcaaaggtggcggcgtgggcgtcagctttggtggt

SEQ ID NO: 553642 - DNA, 75 bp, synthetic construct
  source 1..75: mol_type = other DNA
aggggtcggatgtggtggctgaccgggatgtgtcactggcggcgggtaaccatgttgatgttcttgctgccacca

SEQ ID NO: 553643 - DNA, 75 bp, synthetic construct
  source 1..75: mol_type = other DNA
atggcctgaaagttaccgccactgacctgaccagcaccggcagtattaaaagtggcagcacactcgatatcagcg

SEQ ID NO: 553644 - DNA, 75 bp, synthetic construct
  source 1..75: mol_type = other DNA
gggagaaaggcaacggtaccacctggaccgaaaccacggtggatgcgggtaaaaatgtctccctcacaagcggac

SEQ ID NO: 553645 - DNA, 75 bp, synthetic construct
  source 1..75: mol_type = other DNA
taccgatgaaaaacagtttctgggctcgtcgtacattcttgaccgtcttggcctgaaaccggaaaaagattaccg

SEQ ID NO: 553646 - DNA, 75 bp, synthetic construct
  source 1..75: mol_type = other DNA
gggaaagtcatagggcggcaatccagcgacggaaaagttggttggcgtgttgattatgatcctgaaaaaggcaca

SEQ ID NO: 553647 - DNA, 75 bp, synthetic construct
  source 1..75: mol_type = other DNA
atccgcaacagcgggcttatcaccggtgataacggtttaacgttaaacactgcctccctcagcaatccgggaaaa

SEQ ID NO: 553648 - DNA, 75 bp, synthetic construct
  source 1..75: mol_type = other DNA
cctgaccagcaccggcagtattaaaagtggcagcacactcgatatcagtgcccgcaatgccacactgtccggtga

SEQ ID NO: 553649 - DNA, 75 bp, synthetic construct
  source 1..75: mol_type = other DNA
aaactggccatgatccccaacgacgggcatctgcagtatggagatgcttctgccgatgatcgcgttacctttact

SEQ ID NO: 553650 - DNA, 75 bp, synthetic construct
  source 1..75: mol_type = other DNA
aggttcaagaagggatgaatcgtatagctattggtgaagggccttcttgggggacaacatataaagtacacccgg

SEQ ID NO: 553651 - DNA, 75 bp, synthetic construct
  source 1..75: mol_type = other DNA
gctaatgcaacagagaaacaacgtcaggaatatcttgcgaaactgcgtgacacgcaggcttacaggaatgaaatg

SEQ ID NO: 553652 - DNA, 75 bp, synthetic construct
  source 1..75: mol_type = other DNA
gtttcctgggggatgcggtctttgatacccggtatgtcagtaacgcggtgctgagccggacgggttcacgttatc

SEQ ID NO: 553653 - DNA, 75 bp, synthetic construct
  source 1..75: mol_type = other DNA
atcgccagcggtggtgacaccaccattactgcaggacgggatatcaccgctgttgcgtcatccgttaccgcaacc

SEQ ID NO: 553654 - DNA, 75 bp, synthetic construct
  source 1..75: mol_type = other DNA
ttgagcacatagacagccttttaaaagagagacttgatttatctggtgacgctgatatcgaaaaagaaattaata

SEQ ID NO: 553655 - DNA, 75 bp, synthetic construct
  source 1..75: mol_type = other DNA
agagttcagcgagatgcgcatcaaaatcgccgtcagggcaagcctacggagttttttgttgttcgacctggtaca

SEQ ID NO: 553656 - DNA, 75 bp, synthetic construct
  source 1..75: mol_type = other DNA
atgcagaaagatgtcagtggtgccgcgaatgctgaagtgattaatacctccgggaatatcgaaaccacccgcggt

SEQ ID NO: 553657 - DNA, 75 bp, synthetic construct
  source 1..75: mol_type = other DNA
cacggtactgagcggcagcgggattgcgatgaatgccagcggcagcctgcaggcaggcggggacgtcagcctgac

SEQ ID NO: 553658 - DNA, 75 bp, synthetic construct
  source 1..75: mol_type = other DNA
aggccactgacctgctgctgaacgtggcgaagcttgccggtaatggcactgtgatggcggcgaatcaggcaacgc

SEQ ID NO: 553659 - DNA, 75 bp, synthetic construct
  source 1..75: mol_type = other DNA
cctccactgaaagtggtgtcggggttaatcttggtaacctttatgcccgcgagggcgatatcatactgagcagtt

SEQ ID NO: 553660 - DNA, 75 bp, synthetic construct
  source 1..75: mol_type = other DNA
ttgaaggctgcgcaggataaatatgggcctgttccggcggatgcgacggaagaacagcggcaggcatatctggcg

SEQ ID NO: 553661 - DNA, 75 bp, synthetic construct
  source 1..75: mol_type = other DNA
gaggaccaggcacaataccggatcacacttaaacctttcatttccctgctggataaacagttccgtacacaccgt

SEQ ID NO: 553662 - DNA, 75 bp, synthetic construct
  source 1..75: mol_type = other DNA
atatcaccatcagaaccggacatttactgaatcagcgggagggtataaatgagacaaaatcatacattccggttg

SEQ ID NO: 553663 - DNA, 75 bp, synthetic construct
  source 1..75: mol_type = other DNA
cagtacactttgagcctgagaataaagtatctgtagttacaaattcatctggaaaggttgtaacagttaaatatg

SEQ ID NO: 553664 - DNA, 75 bp, synthetic construct
  source 1..75: mol_type = other DNA
aggtgggaatactgcgggtgtggctaccggagctgctgccgggaagaatgttgttgagaataactatctgagcag

SEQ ID NO: 553665 - DNA, 75 bp, synthetic construct
  source 1..75: mol_type = other DNA
ggagaccgcgcagcacttattgccggcaatgatctcagtctgaatgccattgacagggtaagcagcagacgtcat

SEQ ID NO: 553666 - DNA, 75 bp, synthetic construct
  source 1..75: mol_type = other DNA
aggtactggctggcggtctgaatccggcagtggcacagcttataaaacaggccaccggcgataaccgggaagcaa

SEQ ID NO: 553667 - DNA, 75 bp, synthetic construct
  source 1..75: mol_type = other DNA
atttgagcagaagaaaagcgggctgacggttgccctgtccggtgcggtgggcagtgccatcaataatgctgccac

SEQ ID NO: 553668 - DNA, 75 bp, synthetic construct
  source 1..75: mol_type = other DNA
ggcatcccctcaacctgcgctgatgaataacggaggctcattgctgaccagcggcgatctgacaatcaccgcagg

SEQ ID NO: 553669 - DNA, 75 bp, synthetic construct
  source 1..75: mol_type = other DNA
ccagagacatcagcaatagtgggcagcttcagggggcggataaccgaatcaccgccagttcactgaccaactcag

SEQ ID NO: 553670 - DNA, 75 bp, synthetic construct
  source 1..75: mol_type = other DNA
ggggtaaaacactgaataccgcagggaccacgcagggacagaatctcaccgtgcaggcggacaactgggcgaaca

SEQ ID NO: 553671 - DNA, 75 bp, synthetic construct
  source 1..75: mol_type = other DNA
gccgatgatcgcgttacctttactctctccggagctccggaatatgtcaccagagacaccggtcaggctctgaga

SEQ ID NO: 553672 - DNA, 75 bp, synthetic construct
  source 1..75: mol_type = other DNA
cgaagcgttcctcaacattacggtgaccaaagattcccgcacccgctacagcgaagccgggcattctatcgccac

SEQ ID NO: 553673 - DNA, 75 bp, synthetic construct
  source 1..75: mol_type = other DNA
ggggaacggaccgggcgggctgacggagtaccagaacgtcttctataagcacgattgcattcagggacattatgt

SEQ ID NO: 553674 - DNA, 75 bp, synthetic construct
  source 1..75: mol_type = other DNA
gcgtcgaaacctattttgaagtctacgttaacggtcagtatgtgggtttcagcaagggcagtcgcctgaccgcag

SEQ ID NO: 553675 - DNA, 75 bp, synthetic construct
  source 1..75: mol_type = other DNA
acggtgaccaaagattcccgcacccgctacagcgaagccggacatcctatcgccacttatcagttcccgctgaag

SEQ ID NO: 553676 - DNA, 75 bp, synthetic construct
  source 1..75: mol_type = other DNA
cgactttgccgtagaacagagcgatggtgaagtgttgatcatcagccgcacggttattgccccgccggtgtttga

SEQ ID NO: 553677 - DNA, 75 bp, synthetic construct
  source 1..75: mol_type = other DNA
tggcctcggctccaactcctggggcagcgaggtgctggactcctggcgcgtctggttccgtgacttcagctacgg

SEQ ID NO: 553678 - DNA, 75 bp, synthetic construct
  source 1..75: mol_type = other DNA
gtctcagagttcaaacgcaatataaagaaacaatatcctggctatgacatcgacgttctgatgggagatgggacg

SEQ ID NO: 553679 - DNA, 75 bp, synthetic construct
  source 1..75: mol_type = other DNA
caggcttaacgcaactggtgctgaagctggaaacgctgggctggaaagtggcaattgcctccggtggctttacct

SEQ ID NO: 553680 - DNA, 75 bp, synthetic construct
  source 1..75: mol_type = other DNA
atgcctaacattacctggtgcgacctgcctgaagatgtctctttatggccaggtctgcctctttcattaagtggt

SEQ ID NO: 553681 - DNA, 75 bp, synthetic construct
  source 1..75: mol_type = other DNA
tcacccacgaaaaccgacttgcgccgcgtgcgtactttttttcatatgattctgttgcgcaggcgcgtacctttg

SEQ ID NO: 553682 - DNA, 75 bp, synthetic construct
  source 1..75: mol_type = other DNA
gtacacccgcgtgccgctgatgaatgagtttggtgaatacccgcatccgaagccgcgcatcatctgtgaatatgc

SEQ ID NO: 553683 - DNA, 75 bp, synthetic construct
  source 1..75: mol_type = other DNA
catattaccgtccccgccatgtggcaaatggaaggtcacggcaaactgcaatataccgacgaaggttttccgttc

SEQ ID NO: 553684 - DNA, 75 bp, synthetic construct
  source 1..75: mol_type = other DNA
ttagtcgagtttatggcgaagctcagtgccgaactggcgggggagaatgaaggtatcgatcacaaggtgatagat

SEQ ID NO: 553685 - DNA, 75 bp, synthetic construct
  source 1..75: mol_type = other DNA
atggcccaagtcgtaaggtctgtattgatcgatgtgtttaaggaagcacagcattacggcgaagttccgcctggc

SEQ ID NO: 553686 - DNA, 75 bp, synthetic construct
  source 1..75: mol_type = other DNA
agtggtgatataagactcaacacctataagcagaaagccaaaccagtatccttgctcagggaaagagcaggaatg

SEQ ID NO: 553687 - DNA, 75 bp, synthetic construct
  source 1..75: mol_type = other DNA
gcagggaattgatacgcagaaattgttggggcataaatcaccaagtcagaccgctcgctatcatgacgatcgggg

SEQ ID NO: 553688 - DNA, 75 bp, synthetic construct
  source 1..75: mol_type = other DNA
tgatcgatgtattcaaagaggcccaacactacggtgaagtgccgtctggtcacaaccctgcccttgctactaaac

SEQ ID NO: 553689 - DNA, 75 bp, synthetic construct
  source 1..75: mol_type = other DNA
ttatgccgatgtctttatcgctcattttggccctgcgggggtaaccgcagcaaaactccgcgaactgggtgtcat

SEQ ID NO: 553690 - DNA, 75 bp, synthetic construct
  source 1..75: mol_type = other DNA
agctggctgacgcgcaaactccagtctgcttttgatgcagatgacattgcccaggacacttttttgcgggtaatg

SEQ ID NO: 553691 - DNA, 75 bp, synthetic construct
  source 1..75: mol_type = other DNA
tcgcggaatctgattttgtctgccatttgcggccaggtcgcaacaccgtttcatgccgatgtctttatcgctcat

SEQ ID NO: 553692 - DNA, 75 bp, synthetic construct
  source 1..75: mol_type = other DNA
ttagtcgagtttatggcgaagctcagtgccgaactggcgggggggaatgaaggtgtcgatcacaaggtgatagat

SEQ ID NO: 553693 - DNA, 75 bp, synthetic construct
  source 1..75: mol_type = other DNA
ctcagtgccgaactggcgggggagaatgaaggtgtcgatcacaaggtgatagatgcgttttcacccgcgggctga

SEQ ID NO: 553694 - DNA, 75 bp, synthetic construct
  source 1..75: mol_type = other DNA
cttggtcataaaacacaacaacaaactgatcgttatcatgacgatcgaggcaaggggtggagcaaagtagcgtta

SEQ ID NO: 553695 - DNA, 75 bp, synthetic construct
  source 1..75: mol_type = other DNA
gggagcaaaatcgcaattcctctttctcttcgcctcaatgcgattaactggagtttacgcgatgtagtagcccgc

SEQ ID NO: 553696 - DNA, 75 bp, synthetic construct
  source 1..75: mol_type = other DNA
ctactttgaagtattggcaccaggtgaagaagcattaagcattgacgaatacgcggagtgcttaggatttagagg

SEQ ID NO: 553697 - DNA, 75 bp, synthetic construct
  source 1..75: mol_type = other DNA
ccgcccgggctacgcgcctggcccatgaagcacaactggatgtcgcgccgctggggaaaattccgcatctgcgca

SEQ ID NO: 553698 - DNA, 75 bp, synthetic construct
  source 1..75: mol_type = other DNA
aggccacggcgcgacagaggcggcgcgaccggaacggtcgctgcaagcccggggtttcgcgtcagggatggaagc

SEQ ID NO: 553699 - DNA, 75 bp, synthetic construct
  source 1..75: mol_type = other DNA
ccataaacaggagaggaacggaaagaagaggaagaggaaaagaagaagaacaataacaagcacggtaaccacaga

SEQ ID NO: 553700 - DNA, 75 bp, synthetic construct
  source 1..75: mol_type = other DNA
ggaagcccgccagggcggagacagctccgctggctccgttcacgacagcccgccccgccagggggacgcccggaa

SEQ ID NO: 553701 - DNA, 75 bp, synthetic construct
  source 1..75: mol_type = other DNA
atcaggcagagtgcatcgtaaccctgtggaatggtcagccgatttccgtaactccgccgaactttgttgaactgg

SEQ ID NO: 553702 - DNA, 75 bp, synthetic construct
  source 1..75: mol_type = other DNA
tcatgaacaacgaaactttcgagcaactgtctgctgatgcaaaagcaattggcgacaacgctaaatggttgctgg

SEQ ID NO: 553703 - DNA, 75 bp, synthetic construct
  source 1..75: mol_type = other DNA
gctgtctgctgatgcgaaagcaattggcgacaacgctaaatggctgctggatcaggcagagtgtattgtaactct

SEQ ID NO: 553704 - DNA, 75 bp, synthetic construct
  source 1..75: mol_type = other DNA
tgcccgacgctccattgtggccttagcccccttccggaaagccttcaagcaggttatgtcggaggcagaaccacg

SEQ ID NO: 553705 - DNA, 75 bp, synthetic construct
  source 1..75: mol_type = other DNA
atgaatctgcccatctctcgcaaagcgacaatgaccagtattgagatcgcggaactggtgggtaagcgtcatgat

SEQ ID NO: 553706 - DNA, 75 bp, synthetic construct
  source 1..75: mol_type = other DNA
tggcggaacggggcgtaataacttttcctcaaattgaggaaaagcccaccgcaggccgcccggcgagctattacg

SEQ ID NO: 553707 - DNA, 75 bp, synthetic construct
  source 1..75: mol_type = other DNA
gcagtagcagtagcagtagcagtagcagtagcaggaacaacaacatcatcagtaacagacaaatgacaggtctga

SEQ ID NO: 553708 - DNA, 75 bp, synthetic construct
  source 1..75: mol_type = other DNA
caaatgacaggtctgaaaagacagaagcccacagcagaacgtccgcgtaatgaaaggggcggcgcgtcagcgcgg

SEQ ID NO: 553709 - DNA, 75 bp, synthetic construct
  source 1..75: mol_type = other DNA
tttcagcgccaccggcgcgcggtctttttcctgcacgggcagacggacatttatcctcccgcctgccctgtgtca

SEQ ID NO: 553710 - DNA, 75 bp, synthetic construct
  source 1..75: mol_type = other DNA
tatctcacaatgatatattacctgctcttttaggaagagtgttccatgttacgcctgaaaataatatgtctctca

SEQ ID NO: 553711 - DNA, 75 bp, synthetic construct
  source 1..75: mol_type = other DNA
aaccgtttctttatctcgacacccacgcaggggccgggcgttatcagttaggcagcgaacatgccgagcgtaccg

SEQ ID NO: 553712 - DNA, 75 bp, synthetic construct
  source 1..75: mol_type = other DNA
ggtggaggcggataaatccggttggctggtggcagagaacgacgctcaggcgcttgcagaccaactcagcgcctt

SEQ ID NO: 553713 - DNA, 75 bp, synthetic construct
  source 1..75: mol_type = other DNA
tcggcatcggcccgtgggaacgccgcctgcgcacattgatcgaacagtatcaactggaagggtacgtggagatgc

SEQ ID NO: 553714 - DNA, 75 bp, synthetic construct
  source 1..75: mol_type = other DNA
ggattccaccgccatccagattgaatgtattgatgaaattgccaaactggccggaacgggcgagatggtggcgga

SEQ ID NO: 553715 - DNA, 75 bp, synthetic construct
  source 1..75: mol_type = other DNA
aaatattttacgttatggagcagtgtctcgtcatctaatatttccgtcgatttgcggacaaagcgacaaatctat

SEQ ID NO: 553716 - DNA, 75 bp, synthetic construct
  source 1..75: mol_type = other DNA
cgcgctttacccgacgtccggtcaaggtgccgggtaaaccgctgcagattatctccgttgcccgactgaccgaga

SEQ ID NO: 553717 - DNA, 75 bp, synthetic construct
  source 1..75: mol_type = other DNA
tcgtaccatgacgctgcaggcaacgattcaggatggcgtgatctggttatcggatgataagaataatctggaagt

SEQ ID NO: 553718 - DNA, 75 bp, synthetic construct
  source 1..75: mol_type = other DNA
ggcagatgtggaacgcgtggcggattatatcgccggtcatactgacccgataaccggcctgattgtcggacagcc

SEQ ID NO: 553719 - DNA, 75 bp, synthetic construct
  source 1..75: mol_type = other DNA
ccgaaagtgccggtcgtgcgggaaatgccccggcagggacgaaactgacgtttgtcactccgcaggcggggatca

SEQ ID NO: 553720 - DNA, 75 bp, synthetic construct
  source 1..75: mol_type = other DNA
caatatgaagcgttacggccatgaagcgcgcaacctgatcctctcggccatttgcggcaataacgcacagccatt

SEQ ID NO: 553721 - DNA, 75 bp, synthetic construct
  source 1..75: mol_type = other DNA
tccatcaaagtgccgctgggcggcttcatgtccacgtccgtcagtggcaaaaacgtggcgctgaccaacgccgaa

SEQ ID NO: 553722 - DNA, 75 bp, synthetic construct
  source 1..75: mol_type = other DNA
gaaagagatgctcgatgacgcggatgtcttcctgttgccatcggtaacgggcgcggatggcgatatggaaggtat

SEQ ID NO: 553723 - DNA, 75 bp, synthetic construct
  source 1..75: mol_type = other DNA
taaacataccattcagagcctgatcatcgagtcgctgaaagagaaagataaaccgtttctctatctcgacaccca

SEQ ID NO: 553724 - DNA, 75 bp, synthetic construct
  source 1..75: mol_type = other DNA
gtcgcgcaatttttgtcacgtgaaggaattataattcgcaatttcctcgcccgtctcgatattgacgaatcagca

SEQ ID NO: 553725 - DNA, 75 bp, synthetic construct
  source 1..75: mol_type = other DNA
ggatattggtgcgatgattacggggattggcggttacaacgacggaaacaaaacccttattgacagggtatctta

SEQ ID NO: 553726 - DNA, 75 bp, synthetic construct
  source 1..75: mol_type = other DNA
cgtcgcagggaaaattaccatgaccggcaatcaggttaaattcacacataacaaggcgaccatcagaatgcctgc

SEQ ID NO: 553727 - DNA, 75 bp, synthetic construct
  source 1..75: mol_type = other DNA
cactcgcccgtatatcgaccagttgcgcggggcgttgccttaccacaaagccattcgcggtacgctcatcaccac

SEQ ID NO: 553728 - DNA, 75 bp, synthetic construct
  source 1..75: mol_type = other DNA
caaaattctgcaaattgaactggcggtactgccagacagcgatcgccgtggcatgaccgcttccggcatgattgt

SEQ ID NO: 553729 - DNA, 75 bp, synthetic construct
  source 1..75: mol_type = other DNA
agtctggatatcccgctatagcactggtgtggctgccagaatggtgaaaatactgaatgacagcgatgcggagct

SEQ ID NO: 553730 - DNA, 75 bp, synthetic construct
  source 1..75: mol_type = other DNA
ccagccttacaccagacaaaaacagattgtgggggaaacccgggcaaagctgattcgggatggcggtatgaaccg

SEQ ID NO: 553731 - DNA, 75 bp, synthetic construct
  source 1..75: mol_type = other DNA
ggtccagcaggtctggcaggtcccaaaggtgagcgcggtgaaccgggaccgatggggcctccggggaaagatggc

SEQ ID NO: 553732 - DNA, 75 bp, synthetic construct
  source 1..75: mol_type = other DNA
tggccctcccgggccaaagggcgatacaggcccggcggggccgcagggaccaaaaggagataccggtccacaggg

SEQ ID NO: 553733 - DNA, 75 bp, synthetic construct
  source 1..75: mol_type = other DNA
ccagagggccgaagggtgataaaggcgacccgggaccgcagggggtacagggaccgaaaggtgagacaggtgcaa

SEQ ID NO: 553734 - DNA, 75 bp, synthetic construct
  source 1..75: mol_type = other DNA
tcactggatggagcacaaccaacgattcccggcatgaatatagtccctgatggtgctgtaattctgaatatccgg

SEQ ID NO: 553735 - DNA, 75 bp, synthetic construct
  source 1..75: mol_type = other DNA
tctggtcgatacgcaagtttgcgagtttattcagaacacgccagccttccataacacaccgatgcttctggaagc

SEQ ID NO: 553736 - DNA, 75 bp, synthetic construct
  source 1..75: mol_type = other DNA
gtcagtgatgacccgctgaccagccaggaaaaagggtttattgaaagcaccagtgtgcccattctgcgttacctg

SEQ ID NO: 553737 - DNA, 75 bp, synthetic construct
  source 1..75: mol_type = other DNA
gcgcaggctgacgtcaataatgacctgaacaaattcttcaacaagctgggcttcgagggcaatgccacccgcgca

SEQ ID NO: 553738 - DNA, 75 bp, synthetic construct
  source 1..75: mol_type = other DNA
acgctgatggagctggagcagcgtatgggctatctgcgtcagcaggtatccacgcaactgatgagtcgttatgag

SEQ ID NO: 553739 - DNA, 75 bp, synthetic construct
  source 1..75: mol_type = other DNA
tgtcaggtggcacaggggattgtcggaggattatttcctcagactcaggtgtcacagcagaaggtctgtcaggat

SEQ ID NO: 553740 - DNA, 75 bp, synthetic construct
  source 1..75: mol_type = other DNA
agcctgttgagcagaaaccaggggatgcaactgttagcagcaaaagggcgggtaaatattcaggctcaaagtgac

SEQ ID NO: 553741 - DNA, 75 bp, synthetic construct
  source 1..75: mol_type = other DNA
aaacatcaacatcatgtggaatgcgctttccaaaaacagaatgtttgacggcaacaaagagctgaaagaatttgt

SEQ ID NO: 553742 - DNA, 75 bp, synthetic construct
  source 1..75: mol_type = other DNA
tgtgcgggcgattttaggccaactggtgagcgtggcgatggcggcaaaattgactgccaaagttgtacagcttta

SEQ ID NO: 553743 - DNA, 75 bp, synthetic construct
  source 1..75: mol_type = other DNA
caccttaccaatgacaataccgggcgacgtagaacaagcgatgaaaacgctgcaaacttttccgggtatcgggcg

SEQ ID NO: 553744 - DNA, 75 bp, synthetic construct
  source 1..75: mol_type = other DNA
cgttatggtgtgacgtttaacactgtctataaagccatccgacgaatgcggcgtataaaatatcgtcagtatcaa

SEQ ID NO: 553745 - DNA, 75 bp, synthetic construct
  source 1..75: mol_type = other DNA
cgatcatctgggcagcaggcgtcactgcttctccggctgcacgctggctcaagacggaagctgatcgggctggtc

SEQ ID NO: 553746 - DNA, 75 bp, synthetic construct
  source 1..75: mol_type = other DNA
aaccagaaaccggttgagtgtcgctatcagctggatctggaaccacagtatcggatacaggggagcccgcattat

SEQ ID NO: 553747 - DNA, 75 bp, synthetic construct
  source 1..75: mol_type = other DNA
tgcaaacttttccgggtatcgggcgctggacggcaaattattttgctttgcgtggctggcaggcgaaagatgttt

SEQ ID NO: 553748 - DNA, 75 bp, synthetic construct
  source 1..75: mol_type = other DNA
ttgaccagccttactggatgatgaaggcatcactgcctgcgggattcaataaagtcatcacggatgtcgggccgg

SEQ ID NO: 553749 - DNA, 75 bp, synthetic construct
  source 1..75: mol_type = other DNA
caaagtggcgaaactgcgccaccgcgccagccagaccttacgcggcattcatcgtaaaaatacctggcaggcgct

SEQ ID NO: 553750 - DNA, 75 bp, synthetic construct
  source 1..75: mol_type = other DNA
aattcccgctgtcttcggaaaccttcgtcctcaaccaaatcactgcgtttattgatatgggctttgaggtggaga

SEQ ID NO: 553751 - DNA, 75 bp, synthetic construct
  source 1..75: mol_type = other DNA
gccggaaatgttcaacgatgccggggagttcctgaccctggacgaactgcgccgcgtggatgcgtcggcgtttga

SEQ ID NO: 553752 - DNA, 75 bp, synthetic construct
  source 1..75: mol_type = other DNA
attgatatgggctttgaggtggagattgtcgcgctgcaaaaaggcgacacccagaatacccatgcggcatggacg

SEQ ID NO: 553753 - DNA, 75 bp, synthetic construct
  source 1..75: mol_type = other DNA
aatttccgctgtcgtcagaaaccttcgtcctcaaccaaattaccgcgtttattgatatgggctttgaggtggaga

SEQ ID NO: 553754 - DNA, 75 bp, synthetic construct
  source 1..75: mol_type = other DNA
gaaagcgatgctagacgacgcggatgttttcctgctgccttcggtaacgggcgcggatggcgatatggaaggtat

SEQ ID NO: 553755 - DNA, 75 bp, synthetic construct
  source 1..75: mol_type = other DNA
ccttcttgaagcgatcatgtctttaaccggcacagtcatcattggtgatctggtaaacgacccgaactcaaccgg

SEQ ID NO: 553756 - DNA, 75 bp, synthetic construct
  source 1..75: mol_type = other DNA
ctcacagtggcttgatgccgtgattcagcgtgtcgaaatgtacaacgcatcgcttcccgttccgctttcacctcc

SEQ ID NO: 553757 - DNA, 75 bp, synthetic construct
  source 1..75: mol_type = other DNA
gccttcgatgcactttctgccattctaaactatttgcatttccacacaaaaactatacaccacctcacggctcac

SEQ ID NO: 553758 - DNA, 75 bp, synthetic construct
  source 1..75: mol_type = other DNA
cgatttcggtaaatcaaccgaacggcggtacacgcaagctcccttgctatcaaatcacacgagacggttttgcat

SEQ ID NO: 553759 - DNA, 75 bp, synthetic construct
  source 1..75: mol_type = other DNA
ctcctcatcaacttctcaaggctttaaaaggagcacctaatttaaacaatgctattgtttattttggacagtgtt

SEQ ID NO: 553760 - DNA, 75 bp, synthetic construct
  source 1..75: mol_type = other DNA
ggagcctgcttgccctgagtgtagcggctactctcttcatcgccccgacagaggcaatagccgctaacggactcc

SEQ ID NO: 553761 - DNA, 75 bp, synthetic construct
  source 1..75: mol_type = other DNA
tttggtccagcgggggtaaccgctgcaaaattgcgtgaactgggggtgattcgcggcaaaatcgccacaatcttc

SEQ ID NO: 553762 - DNA, 75 bp, synthetic construct
  source 1..75: mol_type = other DNA
gtaaatatctggtccattaccgtcacactacctctcaagcaaacagaggagaccaggttgaaccgccccggtttt

SEQ ID NO: 553763 - DNA, 75 bp, synthetic construct
  source 1..75: mol_type = other DNA
cagacctatcccctgaaaggtacgctgcaattctccgatgtgaccgttgatgaaagcacgggttccattactctg

SEQ ID NO: 553764 - DNA, 75 bp, synthetic construct
  source 1..75: mol_type = other DNA
tcttgtcactaacgggcaaacgactgaactggcgactgtccagcaacttgatcctatctacgtcgacgttactca

SEQ ID NO: 553765 - DNA, 75 bp, synthetic construct
  source 1..75: mol_type = other DNA
gacacggggccagcaggtccggctgggccggggggcgttcagggaccaaagggggatactggcgctcccggggca

SEQ ID NO: 553766 - DNA, 75 bp, synthetic construct
  source 1..75: mol_type = other DNA
gccgggggaaaccggcagttacagtatggatgttgagccgggtctgtaccgggtgacgctgaacacggaagggta

SEQ ID NO: 553767 - DNA, 75 bp, synthetic construct
  source 1..75: mol_type = other DNA
atcataaaacaacgggcgtgttatacgcccgtttcaatatttaacacatgtagtgattacatattcttgatgatc

SEQ ID NO: 553768 - DNA, 75 bp, synthetic construct
  source 1..75: mol_type = other DNA
agcataacgttagcctgactctagttaacaaacatacaggttctgcgaccaatacttgttttaaccgaatggata

SEQ ID NO: 553769 - DNA, 75 bp, synthetic construct
  source 1..75: mol_type = other DNA
tgcatgtggcgattgaagcctgccgtcagttgaaagagcagggcgtggcatttcgctatcgcatcctcggcattg

SEQ ID NO: 553770 - DNA, 75 bp, synthetic construct
  source 1..75: mol_type = other DNA
gggctgcccgacggaaaaaatcgctgtatcgcgcatgggcgtagacatgacgcgctttagccctcgtccggttaa

SEQ ID NO: 553771 - DNA, 75 bp, synthetic construct
  source 1..75: mol_type = other DNA
gaactggcaactgtccagcagctcgatcctatctacgttgatgtgacccaatccagcaacgattttatgaggctg

SEQ ID NO: 553772 - DNA, 75 bp, synthetic construct
  source 1..75: mol_type = other DNA
atccagcaacgattttatgaggctgaagcagtccgtagagcaaggaaatttgcataaggaaaacgccaccagcaa

SEQ ID NO: 553773 - DNA, 75 bp, synthetic construct
  source 1..75: mol_type = other DNA
gttaccgcgaagatttactggctaaccgtgcgattgttaaacacggtaatttcgcactgttaaccccggatggtc

SEQ ID NO: 553774 - DNA, 75 bp, synthetic construct
  source 1..75: mol_type = other DNA
taatggcgacgggacctggactgcgcagatttctctcggcactacggcgggtgaattagaagttatgccgaagct

SEQ ID NO: 553775 - DNA, 75 bp, synthetic construct
  source 1..75: mol_type = other DNA
aaccgtcactgcagaactgcgggccacgatgatggatgtggcaaactctactctgagcgtgaatgaactctcagg

SEQ ID NO: 553776 - DNA, 75 bp, synthetic construct
  source 1..75: mol_type = other DNA
agggtatgaaatgaaaccagtgactgtgacaattaacgccgttcctgcagatactgaaggcgctgaggagaaata

SEQ ID NO: 553777 - DNA, 75 bp, synthetic construct
  source 1..75: mol_type = other DNA
gatgggacggcgacaacgaatgagcaaggacaggctattttcaccgccacgaccagtgtcgcagcgacatataca

SEQ ID NO: 553778 - DNA, 75 bp, synthetic construct
  source 1..75: mol_type = other DNA
tgacctttaatctgccccggggtgtcaagccgcttactggcgataatgtctgggtgaaagccaacgatgagggga

SEQ ID NO: 553779 - DNA, 75 bp, synthetic construct
  source 1..75: mol_type = other DNA
catggcaacgctatcagtggtctttcgttgtcggcaagtttgacggggaccgcctctgaaggggcgaccgtttcc

SEQ ID NO: 553780 - DNA, 75 bp, synthetic construct
  source 1..75: mol_type = other DNA
ggatttcaccgttccttcttcgctggcgacactgatcaagctggcatggtgtagtgctctgcatcttgagcccta

SEQ ID NO: 553781 - DNA, 75 bp, synthetic construct
  source 1..75: mol_type = other DNA
tgagacgaagcagcatgacggttccgggcaacgtaattatggttgcagtcgttggtcggggcgtttgctggatgg

SEQ ID NO: 553782 - DNA, 75 bp, synthetic construct
  source 1..75: mol_type = other DNA
ttccgatgatacgcctttgtcgggtggatgttctgaaaccaggaaggcttcagacaaaaagtctggtggatccgc

SEQ ID NO: 553783 - DNA, 75 bp, synthetic construct
  source 1..75: mol_type = other DNA
aatgggacggcgacaacgaatgagcaagggcaggctattttcaccgccacgaccactgtcgcagcgacatataca

SEQ ID NO: 553784 - DNA, 75 bp, synthetic construct
  source 1..75: mol_type = other DNA
atgagtgccgagcgcacggcgttaacgcttgacggtcaaagccgtatccaaatgcttgctaacggtaatgagcaa

SEQ ID NO: 553785 - DNA, 75 bp, synthetic construct
  source 1..75: mol_type = other DNA
taccactatcgcagcgacatatacactcacggcgaaagtggaacaggccaacggtcaggtacccatgcctccggg

SEQ ID NO: 553786 - DNA, 75 bp, synthetic construct
  source 1..75: mol_type = other DNA
aatatctctgttcaggttctttttccactcgctgtcacctttacgccagtaatggcagcacgtgcgcagcatgcg

SEQ ID NO: 553787 - DNA, 75 bp, synthetic construct
  source 1..75: mol_type = other DNA
tggatgttctgataccaggaaggcttcagacaaaaagccgggtggagccgctgttctctggatcaagcgtggtga

SEQ ID NO: 553788 - DNA, 75 bp, synthetic construct
  source 1..75: mol_type = other DNA
tggatgttctgataccaggaaggcttcagacaaaaagccgggtgtagccgctgtgctctggctcaagcgtggtga

SEQ ID NO: 553789 - DNA, 75 bp, synthetic construct
  source 1..75: mol_type = other DNA
tggatgttctgataccaggaaggcttcagacaaaaagccgggtgtagccgctgtcctctgggtcaagcgtggtga

SEQ ID NO: 553790 - DNA, 75 bp, synthetic construct
  source 1..75: mol_type = other DNA
aagcagcatgacggttccgggcaacgtaattatggttgcagtcgtgggccggggcgtttgctggatggcaggtga

SEQ ID NO: 553791 - DNA, 75 bp, synthetic construct
  source 1..75: mol_type = other DNA
acctctccgtctgggggatgtatcagcacgccgatattgtcgttaagtgcgtgatgattgggcttattttggcct

SEQ ID NO: 553792 - DNA, 75 bp, synthetic construct
  source 1..75: mol_type = other DNA
cgacatcatctgatgctcgcccttcttccgatgatacgcctttgtcgggtggatgttctgatacccggaaagctt

SEQ ID NO: 553793 - DNA, 75 bp, synthetic construct
  source 1..75: mol_type = other DNA
caaaagatgctaatgacaaccctgtaactggcctcaatccggatgcaccgtcattatcgggcgcagcagctgctg

SEQ ID NO: 553794 - DNA, 75 bp, synthetic construct
  source 1..75: mol_type = other DNA
cagcaccggtcaggcaaacctgcaggtagacgccgctgctcaaaaagtggcaaacggcaaagatgcctttacgct

SEQ ID NO: 553795 - DNA, 75 bp, synthetic construct
  source 1..75: mol_type = other DNA
tggctaatggacagtctgctaaccagataaccctgaccgtcgtggacagctatggtaacccgttgcaggggcaag

SEQ ID NO: 553796 - DNA, 75 bp, synthetic construct
  source 1..75: mol_type = other DNA
tggatgttctgataccaggaaggcttcagacaaaaagccgggtgaagccgctgtcctctggttcaagcgtggtga

SEQ ID NO: 553797 - DNA, 75 bp, synthetic construct
  source 1..75: mol_type = other DNA
atggtgcagtgctctgcatcttgagtcctggcaaggcgatggcctggtccatttttccaggaggacgcctttccg

SEQ ID NO: 553798 - DNA, 75 bp, synthetic construct
  source 1..75: mol_type = other DNA
gtttggcaaggaaaaaggcaggaaacattatcacgtgatattactgctcaacaaagatacctggtgctcgctcgg

SEQ ID NO: 553799 - DNA, 75 bp, synthetic construct
  source 1..75: mol_type = other DNA
ccgaaatggtccatcaaaaaatggctttcgctgcctggagagacgcgcccgctgatcctttgcgaatacgcccac

SEQ ID NO: 553800 - DNA, 75 bp, synthetic construct
  source 1..75: mol_type = other DNA
agcctccctggttggcctggccgccactgatgatcccgccagtctgggtacggaaatgctgacattcagcgccag

SEQ ID NO: 553801 - DNA, 75 bp, synthetic construct
  source 1..75: mol_type = other DNA
cggcgctgttcaccaaaaaagagcagtccgatgacgccaggttctctgatgtgcataaggccgtggaactggtcg

SEQ ID NO: 553802 - DNA, 75 bp, synthetic construct
  source 1..75: mol_type = other DNA
aatcatgcggaaaatatcgacgaagcatggagaattatgaccgcgcagattctggctgcaaaaagcgaggtacag

SEQ ID NO: 553803 - DNA, 75 bp, synthetic construct
  source 1..75: mol_type = other DNA
atgacagtgaaagcaaaacgtttccgtatcggggtggaaggcgccactaccgacggacgcgaaatccagcgtgaa

SEQ ID NO: 553804 - DNA, 75 bp, synthetic construct
  source 1..75: mol_type = other DNA
tgcagcccataacccgctgacaaaccgcaagcagaatcccgccaatctttttaccgctgcagaggaaacggtgat

SEQ ID NO: 553805 - DNA, 75 bp, synthetic construct
  source 1..75: mol_type = other DNA
cgcaagcagaatcctgccaatctctttaccgctgcagaggaaacggtgatcgaactggacgaaatccaggatgac

SEQ ID NO: 553806 - DNA, 75 bp, synthetic construct
  source 1..75: mol_type = other DNA
agcccgtcagtatcggcggaattccagctgagcgccggtcgctaccattacctgaggtgtactggcaatagcgga

SEQ ID NO: 553807 - DNA, 75 bp, synthetic construct
  source 1..75: mol_type = other DNA
agaagcggtgccggaaagctggctggagtgcgatcttcctgacgccgatactgtcgtcgtcccctcaaactggca

SEQ ID NO: 553808 - DNA, 75 bp, synthetic construct
  source 1..75: mol_type = other DNA
tgcagcccaaaacccgctggcaaaccgcaagcagaatcccgctaatctttttaccgctgcagaggaaacggtgat

SEQ ID NO: 553809 - DNA, 75 bp, synthetic construct
  source 1..75: mol_type = other DNA
gcggccgcaggattacattgctcaactggcgcgtgcgggagcagatttcatcactctgcatccggaaaccatcaa

SEQ ID NO: 553810 - DNA, 75 bp, synthetic construct
  source 1..75: mol_type = other DNA
ctggcgcgtgcgggagccgattttatcactctgcatccggaaaccatcaacggccaggcgttccgcctgattgat

SEQ ID NO: 553811 - DNA, 75 bp, synthetic construct
  source 1..75: mol_type = other DNA
actgatgaccctgccagtctgggcactgaaatgctgacattcagcgccagtgaccgaagtgctggaatggcggta

SEQ ID NO: 553812 - DNA, 75 bp, synthetic construct
  source 1..75: mol_type = other DNA
accagatccgcaataaacgcatgacctggcggacgttgttgacgctgctatcggtgcgtaacggcaaacgtctgg

SEQ ID NO: 553813 - DNA, 75 bp, synthetic construct
  source 1..75: mol_type = other DNA
tgctgaagaaatcactgaaggtccgctggcaggcaagatggcgctgtatgccgatgttgagccaacggagtccct

SEQ ID NO: 553814 - DNA, 75 bp, synthetic construct
  source 1..75: mol_type = other DNA
gctacggcaaggtgacggcgctgtttgctgaagaaatcacggagggcccgctggcaggcaagatggcgctgtatg

SEQ ID NO: 553815 - DNA, 75 bp, synthetic construct
  source 1..75: mol_type = other DNA
acgcacagaaaaatccctgtctgagcaggaagaacgcctgtctgagctggagactgctctgcaggagcagcaaac

SEQ ID NO: 553816 - DNA, 75 bp, synthetic construct
  source 1..75: mol_type = other DNA
atgcttactggttatcccgttttgaaagtattctcaacagtgccctggcgcaacaccgtgccgtctcgttaatcc

SEQ ID NO: 553817 - DNA, 75 bp, synthetic construct
  source 1..75: mol_type = other DNA
caaggtaaacagttgattgaactgcctgaactgccgcggccggagagcgccggacaactctggcttacggtacac

SEQ ID NO: 553818 - DNA, 75 bp, synthetic construct
  source 1..75: mol_type = other DNA
cgtgccgtctcgttaatccgggtggatttacgttttcctgagtatatgcctgccaccatcatggatcccgatccg

SEQ ID NO: 553819 - DNA, 75 bp, synthetic construct
  source 1..75: mol_type = other DNA
gcccgaagtttgctgatacgggcaaagcctacctggtcggtctggctgccactgatgaccctgccagtctgggta

SEQ ID NO: 553820 - DNA, 75 bp, synthetic construct
  source 1..75: mol_type = other DNA
ctgctgcacgcggaggaagggagctggctgaatatcgacggtttccatatggggattggcggcgacgactcctgg

SEQ ID NO: 553821 - DNA, 75 bp, synthetic construct
  source 1..75: mol_type = other DNA
ttgctccacgtcctgggaacagcttcagcagtacgtcaccaccctcaacgatccgcgtatcacctatattcacaa

SEQ ID NO: 553822 - DNA, 75 bp, synthetic construct
  source 1..75: mol_type = other DNA
ctgagccgtgaagacagtcgccaggactaccgccagcgcgcgccgggtggtgacgcaccggcaggcaccctgacc

SEQ ID NO: 553823 - DNA, 75 bp, synthetic construct
  source 1..75: mol_type = other DNA
gtgcataaggccgtggagctggtcgccactgagcagcagaacctgagcgcacacaccgaaaaatccctgtctgag

SEQ ID NO: 553824 - DNA, 75 bp, synthetic construct
  source 1..75: mol_type = other DNA
aaattattcacatctatggaagtcagcccgaagtttgctgatacgggcaaagcctatctggtcggcctggctgcc

SEQ ID NO: 553825 - DNA, 75 bp, synthetic construct
  source 1..75: mol_type = other DNA
tttgtttgactatttcagttcccaccgtgatccgtatccaatgaaactggaaacgtttcgtcttatgtgtggttc

SEQ ID NO: 553826 - DNA, 75 bp, synthetic construct
  source 1..75: mol_type = other DNA
ttagttggttgccaacggtccaatcctgagccgatcaaagctcctgacgggaaagacggtgaaggcgacggagag

SEQ ID NO: 553827 - DNA, 75 bp, synthetic construct
  source 1..75: mol_type = other DNA
tcgggcagctggagtctgtttctctcatcggacgatttcgagttattgagcgcggaacgcggcaatcgcgttgtg

SEQ ID NO: 553828 - DNA, 75 bp, synthetic construct
  source 1..75: mol_type = other DNA
aaatgctcctgccggaaccgggggcgctccggcgttttgttcagcaggcggtggagcactggccgcgtctgctgg

SEQ ID NO: 553829 - DNA, 75 bp, synthetic construct
  source 1..75: mol_type = other DNA
tcgattctgttaaagaagcgctgatgaaaactcatcgcgatgatcttatacacaaatcagatgaagaattacgcc

SEQ ID NO: 553830 - DNA, 75 bp, synthetic construct
  source 1..75: mol_type = other DNA
cttgtttgactatttcagttcccaccgtgatccgtatccaatgaaactggaaacgtttcgtcttatgtgcggttc

SEQ ID NO: 553831 - DNA, 75 bp, synthetic construct
  source 1..75: mol_type = other DNA
tatccgacatgctcccggaatgaaaaatgaacaccttaaagatttaacaaaagggaaagacgagaaagatggaat

SEQ ID NO: 553832 - DNA, 75 bp, synthetic construct
  source 1..75: mol_type = other DNA
gagctgcgccagaaacagtacgaatactatcgtgacttgctgttcagcttcccgagaccagaaaccgccagcaac

SEQ ID NO: 553833 - DNA, 75 bp, synthetic construct
  source 1..75: mol_type = other DNA
aaattcgattcctatgcagaacgaaggtacgtggagtactatctgaatagcattgatttagccccctatatttcc

SEQ ID NO: 553834 - DNA, 75 bp, synthetic construct
  source 1..75: mol_type = other DNA
gctgtggtggagccagtgaagggctacgtcaggctggctttgatatcgagcttggattagatattgaccaacaag

SEQ ID NO: 553835 - DNA, 75 bp, synthetic construct
  source 1..75: mol_type = other DNA
aatctaaatcaatatgcgtcgaaatctgcacagccgggtcttgctgtggggaaattgcaggaattgaaattatta

SEQ ID NO: 553836 - DNA, 75 bp, synthetic construct
  source 1..75: mol_type = other DNA
accagatatctatatcagattttggcagatgacaaattctttgaatacaacatgcagcatgctaaaggagcaaaa

SEQ ID NO: 553837 - DNA, 75 bp, synthetic construct
  source 1..75: mol_type = other DNA
caggtaagcatgatgctggctgttctggaatacggaatcgaagacgatgaaatggctgagctgactaagcggctt

SEQ ID NO: 553838 - DNA, 75 bp, synthetic construct
  source 1..75: mol_type = other DNA
catttaacgccctgacgtatggcgggtacgaaatgaagccagtgacggtgaccattaccgcggtggatgccgata

SEQ ID NO: 553839 - DNA, 75 bp, synthetic construct
  source 1..75: mol_type = other DNA
tgggaagtcgactgcgaagctggaggtgaccctgatgtcggcaactaaccccgttggcgggaatatgtgggtcga

SEQ ID NO: 553840 - DNA, 75 bp, synthetic construct
  source 1..75: mol_type = other DNA
cactactgttgcggcgacatatacactctcggcgcaagtgagtcagaacaacggtcaggtatcaacgaaaaccgc

SEQ ID NO: 553841 - DNA, 75 bp, synthetic construct
  source 1..75: mol_type = other DNA
ccccgcctgcaccgacgccagtgattgtcgccaacgcctgcccgaaagtgagtctttgcccgatgccgggcagtg

SEQ ID NO: 553842 - DNA, 75 bp, synthetic construct
  source 1..75: mol_type = other DNA
ccggcctgcactgacgccagtgattgtcgccaacgcctgcccgaaagtgagcctttgcccgatgccgggcagtga

SEQ ID NO: 553843 - DNA, 75 bp, synthetic construct
  source 1..75: mol_type = other DNA
ggttctacggcatcaggctggacggataatggcgacgggacctggactgcgcagatttctctcggcactacggcg

SEQ ID NO: 553844 - DNA, 75 bp, synthetic construct
  source 1..75: mol_type = other DNA
cagatgaccggagaatggctgaaaacaacaggggctgatcagcagtccccggaactgaaccgccccgggaatcct

SEQ ID NO: 553845 - DNA, 75 bp, synthetic construct
  source 1..75: mol_type = other DNA
atgcaattgcatgcggcaggtatacggaccggtgatgcagagcgaatactgtccggcggtgaatactggcaacgt

SEQ ID NO: 553846 - DNA, 75 bp, synthetic construct
  source 1..75: mol_type = other DNA
ggcggaactggctaagcaagtagccagaatgctgacaaaagaaaaagccccgaagaacggcgaattcttcgaggc

SEQ ID NO: 553847 - DNA, 75 bp, synthetic construct
  source 1..75: mol_type = other DNA
tgcctcgaaacgtgtgcagacagaagtagttattagcggagctggtatgagcgccgatcgtacggcgttaacgct

SEQ ID NO: 553848 - DNA, 75 bp, synthetic construct
  source 1..75: mol_type = other DNA
tagtcatacccgcattggtgttggtgcggaatactggcgtgattatttgaaactgagcgccaatggttatatccg

SEQ ID NO: 553849 - DNA, 75 bp, synthetic construct
  source 1..75: mol_type = other DNA
cggcgttcgttcagtattgttgggggcagtttggatatcgaaaattattgtactataagggcttccccggcatgt

SEQ ID NO: 553850 - DNA, 75 bp, synthetic construct
  source 1..75: mol_type = other DNA
caactaaatcctctgataaaaatgaaaaatatcggtgattacactatggtcacaacagaaaccatctgggcgggt

SEQ ID NO: 553851 - DNA, 75 bp, synthetic construct
  source 1..75: mol_type = other DNA
cgggagtcagtgcagtttatggctgtcactgtccaacatgacgcattacgtctgctcctggcaagatcccgtgag

SEQ ID NO: 553852 - DNA, 75 bp, synthetic construct
  source 1..75: mol_type = other DNA
tattaaccgttgctcttcaggcactacgggaaggaaatattcatcactgtgaaaccatgggattcacttacgatg

SEQ ID NO: 553853 - DNA, 75 bp, synthetic construct
  source 1..75: mol_type = other DNA
actcacagctgcgaaggatggaaaactgggaacgaagcctaaagcgtggcgcgatcttgtagtggatggtgaaag

SEQ ID NO: 553854 - DNA, 75 bp, synthetic construct
  source 1..75: mol_type = other DNA
aacccacctaggaacaagtcaggacagaggaagtcgggccgcttacggttacatctacctgatagacagcatgat

SEQ ID NO: 553855 - DNA, 75 bp, synthetic construct
  source 1..75: mol_type = other DNA
tgggtgatgttgcagcgcaggtattgttgctgcaaagccgtgacctggatctggaagccagcgccgctgcgcatc

SEQ ID NO: 553856 - DNA, 75 bp, synthetic construct
  source 1..75: mol_type = other DNA
aacgtaccagcttccgtctggagcgtcgggtcgccgcagtgggtcgtcaaatgggccgcggtaacggctatctgg

SEQ ID NO: 553857 - DNA, 75 bp, synthetic construct
  source 1..75: mol_type = other DNA
tgccaccatcatggatcccgatccggattcagcggtgatttcccgttttttcgaatccctgaaagcaaaaattca

SEQ ID NO: 553858 - DNA, 75 bp, synthetic construct
  source 1..75: mol_type = other DNA
gcaaggcgatggcctggtccatttttccaggtggacgccttcccgtaaaccagcatcgtctgatgctcgcccttc

SEQ ID NO: 553859 - DNA, 75 bp, synthetic construct
  source 1..75: mol_type = other DNA
actggttatcccgttttgacagcctgctcgacagtgccctggcgcagcaccgtgccgtctcgttcatccgggtgg

SEQ ID NO: 553860 - DNA, 75 bp, synthetic construct
  source 1..75: mol_type = other DNA
cgtcaacctggttagatcgctatcaagcgatccaggatgacaggcttaaaagtggtgatataagactcaacacct

SEQ ID NO: 553861 - DNA, 75 bp, synthetic construct
  source 1..75: mol_type = other DNA
gaaaatgggcacgcggtggatcagcggaatctaccggatgtggcgtcgttatatgccgtgatgcaggaacaattt

SEQ ID NO: 553862 - DNA, 75 bp, synthetic construct
  source 1..75: mol_type = other DNA
gaccacgccacacggagagtatcggttgttgcaggagggtgatgattgggtgttgcagtttaatcatcatcagca

SEQ ID NO: 553863 - DNA, 75 bp, synthetic construct
  source 1..75: mol_type = other DNA
cggtctgtatcaatcgttagggatttttattccattgattgtcactaactgtatcgttgtcgggcgcgctgaagc

SEQ ID NO: 553864 - DNA, 75 bp, synthetic construct
  source 1..75: mol_type = other DNA
gtaagtatgcggttaacgcaggactaaatgattttaatcagacggccaaatcctcgacttcactgatgacagaat

SEQ ID NO: 553865 - DNA, 75 bp, synthetic construct
  source 1..75: mol_type = other DNA
cgccagtcaatagccgatgatatgtatggcggttttgctgctgcaatgactctcttcgggcaggaaaacactaaa

SEQ ID NO: 553866 - DNA, 75 bp, synthetic construct
  source 1..75: mol_type = other DNA
tgatggtatcgataacatccctcgtgagggtacatggttgcttgataagggtgaacgagtagttgatcagcgtac

SEQ ID NO: 553867 - DNA, 75 bp, synthetic construct
  source 1..75: mol_type = other DNA
ctgccagtgaataccacgcatctaaaactcaagaccctcaatcagcaatcttaaaattgattgggtttaacctaa

SEQ ID NO: 553868 - DNA, 75 bp, synthetic construct
  source 1..75: mol_type = other DNA
ggcacagctacagaactcagcgtatactcctgcactgggaaccgccacctctgccagtgaataccacgcatctaa

SEQ ID NO: 553869 - DNA, 75 bp, synthetic construct
  source 1..75: mol_type = other DNA
aaaggagcttaccaggcacagttgcagaactctccatacactcctgcactgggaacagccacctctgccagtgaa

SEQ ID NO: 553870 - DNA, 75 bp, synthetic construct
  source 1..75: mol_type = other DNA
gaagcactgacagagtacctggacacccagggttggatcacactgggcgcgtggtatcaaacatttgcgaccgcc

SEQ ID NO: 553871 - DNA, 75 bp, synthetic construct
  source 1..75: mol_type = other DNA
tttattccgctgattgtcactaactgtattgttgtggggcgcgctgaagccttcgctgctaaaaaaggtccggca

SEQ ID NO: 553872 - DNA, 75 bp, synthetic construct
  source 1..75: mol_type = other DNA
cttcgccgccaaaaaaggtccggcgctttcggctcttgatggtttttcgataggcatgggcgcaacctgcgcaat

SEQ ID NO: 553873 - DNA, 75 bp, synthetic construct
  source 1..75: mol_type = other DNA
cggagaaaagcactgacctgtcccgtcaggcgctggtcaccatattcggagatgtggtcgtcaacccgttcagtt

SEQ ID NO: 553874 - DNA, 75 bp, synthetic construct
  source 1..75: mol_type = other DNA
cttcctagggggacgtgatggagccaacacgcttggcagcatggcaaattctgttaaagaaatatttattggagg

SEQ ID NO: 553875 - DNA, 75 bp, synthetic construct
  source 1..75: mol_type = other DNA
ggaagtcgggcagcctacggttatatatacttaattgatagtatgataaggccgcccatcatggtctttggtttt

SEQ ID NO: 553876 - DNA, 75 bp, synthetic construct
  source 1..75: mol_type = other DNA
ataataacaacaccggaagatcatgcttcttttatcagattattaggcgatggttctcgatttggtattaactta

SEQ ID NO: 553877 - DNA, 75 bp, synthetic construct
  source 1..75: mol_type = other DNA
gctggcacgaaggacatgatgctcctagaacggatagccactccagtctacggctattacacataaagataactg

SEQ ID NO: 553878 - DNA, 75 bp, synthetic construct
  source 1..75: mol_type = other DNA
atacgcctttacgtagcagctaaccagcttttcgacttcgccatcgagcgcggagtgatcacgttcaataactga

SEQ ID NO: 553879 - DNA, 75 bp, synthetic construct
  source 1..75: mol_type = other DNA
attattacaacgcccgaagaccaatttagttttatacggttgcttggtgacggaaaacatctaggtgtcagcatt

SEQ ID NO: 553880 - DNA, 75 bp, synthetic construct
  source 1..75: mol_type = other DNA
gttggttaagtaagataaaattgtatgagttaggtcacaaattgagtaaaaatcagtatggtcaatatctcatta

SEQ ID NO: 553881 - DNA, 75 bp, synthetic construct
  source 1..75: mol_type = other DNA
gatatcaggtaaaagatccagaacgatttggtatcgtagagtttgacgctaataaaaaagcactgtctatagaag

SEQ ID NO: 553882 - DNA, 75 bp, synthetic construct
  source 1..75: mol_type = other DNA
caactgtgttgaaggtgaagtctttgccagcaacgtcttttccgaggtgaaaggtcgttttgatatgatcatctc

SEQ ID NO: 553883 - DNA, 75 bp, synthetic construct
  source 1..75: mol_type = other DNA
gcctctattttggtcgtctggaaaaacagccggtatttgatgccgataaattctggggcgaatacagcgtcgatg

SEQ ID NO: 553884 - DNA, 75 bp, synthetic construct
  source 1..75: mol_type = other DNA
atttttgtcgttggcgagaaccgcagcggcgtgcgcagcgccgagcagatgctggcagattatgcgccgttgaat

SEQ ID NO: 553885 - DNA, 75 bp, synthetic construct
  source 1..75: mol_type = other DNA
agatgaagccggtcgcattgcattttgtcagccaaaaactgaaatccctaccggtacgctgaaagaatcagatat

SEQ ID NO: 553886 - DNA, 75 bp, synthetic construct
  source 1..75: mol_type = other DNA
ggaacgtctggtgcgtcagacgctgtttcgcgcaaaccgcctcttactggaggcatataccgaaattcttgaact

SEQ ID NO: 553887 - DNA, 75 bp, synthetic construct
  source 1..75: mol_type = other DNA
tggcttccatgaagtgattgcgcaaaccgggcgcttcaaggtgtatcgcgccattatgacccgccaggcgaagaa

SEQ ID NO: 553888 - DNA, 75 bp, synthetic construct
  source 1..75: mol_type = other DNA
cggggaacaatttattggtgaggattctgtctgcttagttttgggagataatattttttttggtcaaggatttac

SEQ ID NO: 553889 - DNA, 75 bp, synthetic construct
  source 1..75: mol_type = other DNA
acagacacttttgctatgctcgacgccttccgcgccaatgaaaatggcgctgcgccgctgccgttaacggctaat

SEQ ID NO: 553890 - DNA, 75 bp, synthetic construct
  source 1..75: mol_type = other DNA
caacggcattcagaccatgagcggctacgtttacaacctcggtaacgagctggcatccatgcaggggctggttga

SEQ ID NO: 553891 - DNA, 75 bp, synthetic construct
  source 1..75: mol_type = other DNA
atattgctcaaacagggcatgatgcgctggtgtatgccggtggagctttcccgcgactggctggtgaatctgctt

SEQ ID NO: 553892 - DNA, 75 bp, synthetic construct
  source 1..75: mol_type = other DNA
ctgccggtgataccagcaatcttcaggacggtgacaccaccctgcgttatagcgcttgggtcaaaaaagcgacta

SEQ ID NO: 553893 - DNA, 75 bp, synthetic construct
  source 1..75: mol_type = other DNA
gagcttaaaattaaggaatgccatcttgaagataaggaaagattagttaaagaaaaagaaaaagaacgtaattgt

SEQ ID NO: 553894 - DNA, 75 bp, synthetic construct
  source 1..75: mol_type = other DNA
ccactgccgttgacggcaaacagcgactgtaacggctactggcggcggctggccgggctggagctgcaagcgtaa

SEQ ID NO: 553895 - DNA, 75 bp, synthetic construct
  source 1..75: mol_type = other DNA
acggtctttatccgcagcagtgcttatgacgccggcggtgtgccctacagtaaccaggctacggaagtgcttccc

SEQ ID NO: 553896 - DNA, 75 bp, synthetic construct
  source 1..75: mol_type = other DNA
cagtatgaaatacaaaattctcctgatggccttgcgcaagcttttatcataggagagaaatttattgccaatgat

SEQ ID NO: 553897 - DNA, 75 bp, synthetic construct
  source 1..75: mol_type = other DNA
ttgggtatcaggtaaaagatcctgaacgatttggtgtggtagaatttgacaaccaacgaaatgttttatcaatag

SEQ ID NO: 553898 - DNA, 75 bp, synthetic construct
  source 1..75: mol_type = other DNA
acacatggatatgttgatagtcatattattgctcaggctttacgcttgcgtttaaaagatgagaccagtgttatt

SEQ ID NO: 553899 - DNA, 75 bp, synthetic construct
  source 1..75: mol_type = other DNA
agtcagcccgttcctggcgaggaggagactgatatcaccgatgggataaggctgtctgattggtattataaaata

SEQ ID NO: 553900 - DNA, 75 bp, synthetic construct
  source 1..75: mol_type = other DNA
atggggtgtggttacgttcactgtcatgagacaccgcccgtgtacgccttaatcgacgtcaattcgatgtactgc

SEQ ID NO: 553901 - DNA, 75 bp, synthetic construct
  source 1..75: mol_type = other DNA
gcgctgcgtaagctgggctactccggtaacaccaccgatccgaaagagattgaagctgcgtataacgagctgaaa

SEQ ID NO: 553902 - DNA, 75 bp, synthetic construct
  source 1..75: mol_type = other DNA
ggcaaagttctgaaagatttacctaaacccaaccagagtgatgataaaacactgtcaactgacgcagttatcctc

SEQ ID NO: 553903 - DNA, 75 bp, synthetic construct
  source 1..75: mol_type = other DNA
tcagcttctggatatcctcaaaggtatccgtcacgatgatccgcaatatcaagaggttagtcgtcgattgtcatt

SEQ ID NO: 553904 - DNA, 75 bp, synthetic construct
  source 1..75: mol_type = other DNA
atgagacactttatctatcaggacgaaaaatcacataaattctgggcggttgagcaacaggataatgagcttcat

SEQ ID NO: 553905 - DNA, 75 bp, synthetic construct
  source 1..75: mol_type = other DNA
tcaaattctgatcctcggtgtaattggcaagaaaaagcacctggaatacttaagcaaagcctgtcaaaaacatcc

SEQ ID NO: 553906 - DNA, 75 bp, synthetic construct
  source 1..75: mol_type = other DNA
catgccgccgccgggctacttcctgtggccctgggcaaaaaaggaaaagatcgtgattgtgcccgccaggcgctc

SEQ ID NO: 553907 - DNA, 75 bp, synthetic construct
  source 1..75: mol_type = other DNA
atgacctggttaagactggtgataaccgatgatactgctctgagtacagtggaaaaatacgacttcccaccgttg

SEQ ID NO: 553908 - DNA, 75 bp, synthetic construct
  source 1..75: mol_type = other DNA
ctgcaacgtgagccacaacggttgtggtttttcaccttcttccttggtgtcaatgaactggcattgccaatggcg

SEQ ID NO: 553909 - DNA, 75 bp, synthetic construct
  source 1..75: mol_type = other DNA
aaaccttcaccattgaatggcaaggggaaggcccgacatgtcagaccgaaggcacgttgtggggaggcaatcttg

SEQ ID NO: 553910 - DNA, 75 bp, synthetic construct
  source 1..75: mol_type = other DNA
cttaccgacgcggggcatcaggtcaataacgtcgaggttattgcccgtcgttgtgagcgttttgcgggtacggaa

SEQ ID NO: 553911 - DNA, 75 bp, synthetic construct
  source 1..75: mol_type = other DNA
tttttgccgactacgaactgctaccgccgttccgccaactcgaccgtaacagttacgccctgacagaaaccgagc

SEQ ID NO: 553912 - DNA, 75 bp, synthetic construct
  source 1..75: mol_type = other DNA
agctatttcttttctcaaccagataatcaataaagataactacaccggtgagaaatatattctggcaatttttgg

SEQ ID NO: 553913 - DNA, 75 bp, synthetic construct
  source 1..75: mol_type = other DNA
ggatatgttgccggagctgtttaccgctccaccgtgggtaataaataagaaaaagaatgcaatacccgtatttga

SEQ ID NO: 553914 - DNA, 75 bp, synthetic construct
  source 1..75: mol_type = other DNA
gaaaaatacgacttcccatcattgcatcgtaattttcgcgcttatctggcaatgttggtggcgaatcatggggtg

SEQ ID NO: 553915 - DNA, 75 bp, synthetic construct
  source 1..75: mol_type = other DNA
ctgaccggggcaaaagatccggctaaacgtcaaatcccgctgattaaaaccctggtcgcgggcgttaacgtcccg

SEQ ID NO: 553916 - DNA, 75 bp, synthetic construct
  source 1..75: mol_type = other DNA
gtttgagcaggcccagacacagcaagccgctgtacaggtgccaggaattcaaactttaggaacgcaatcgcagta

SEQ ID NO: 553917 - DNA, 75 bp, synthetic construct
  source 1..75: mol_type = other DNA
aagaagagccagtacgtcaaccggcgacattgatcccggaagcccagcctgcgccgcatcaatggcagaaaatgc

SEQ ID NO: 553918 - DNA, 75 bp, synthetic construct
  source 1..75: mol_type = other DNA
gaaagcattcagcgtgtcagccgcccaggtctgcgcatctataaacgtaaagatgagctgccgaaagttatggcg

SEQ ID NO: 553919 - DNA, 75 bp, synthetic construct
  source 1..75: mol_type = other DNA
tgaacgcctgacacgtcagacgctgtatcgcgccaatcgcctgttcatggaggcatataccgaaattctggaact

SEQ ID NO: 553920 - DNA, 75 bp, synthetic construct
  source 1..75: mol_type = other DNA
acagctttaatgctgacaccctgccggaacgtctggtgcgtcagacgctgtttcgcgcaaaccgcctcctgatgg

SEQ ID NO: 553921 - DNA, 75 bp, synthetic construct
  source 1..75: mol_type = other DNA
ggattttaggcaatgacgacaccgcgcgtaaattaaccccgcttatccgcgcctggcctggggaatcccagcata

SEQ ID NO: 553922 - DNA, 75 bp, synthetic construct
  source 1..75: mol_type = other DNA
gcttatgctactttgctggcaatacatgaagataaagagtggcgtaaagcgcttgtcaaactgattaccgccacg

SEQ ID NO: 553923 - DNA, 75 bp, synthetic construct
  source 1..75: mol_type = other DNA
atattctggcaatttttggtagcgccgccatacctgcatttatggcctgcctgcaacgtgatccacgacgtctgt

SEQ ID NO: 553924 - DNA, 75 bp, synthetic construct
  source 1..75: mol_type = other DNA
agtacgtcaaccgacgacattgatcccagaggctcagcctgcaccgcatcaatggcagaaaatgccattctggca

SEQ ID NO: 553925 - DNA, 75 bp, synthetic construct
  source 1..75: mol_type = other DNA
aattaaccccgcttatccgcgcctggccgggtgaatcccagcataaacgcgcggtttacgggctggatgtgttag

SEQ ID NO: 553926 - DNA, 75 bp, synthetic construct
  source 1..75: mol_type = other DNA
accagagcgatgataaaacactggcaactgacgcagttaatctcttcaaacagttgaaaaaagatgttcgtgcta

SEQ ID NO: 553927 - DNA, 75 bp, synthetic construct
  source 1..75: mol_type = other DNA
gattacggtaacgacccgctgccgcgcttacaggattacgctgcgcaaggtgccgaagtgttgcatctggtggat

SEQ ID NO: 553928 - DNA, 75 bp, synthetic construct
  source 1..75: mol_type = other DNA
attcccaaccgcgtggcacaacaactggcgggcaaacagtcgttgctgattggcgttgccacctccagtctggcc

SEQ ID NO: 553929 - DNA, 75 bp, synthetic construct
  source 1..75: mol_type = other DNA
cagtccccgtcccctcaaactggcagatgcacggttacgacgcgcccatctacactaacgtaacctatcccattg

SEQ ID NO: 553930 - DNA, 75 bp, synthetic construct
  source 1..75: mol_type = other DNA
agcgccagatcccgcagatcaaaacgctggtcgctggcgtcaatgttccggtacaggttggcggtggcgtgcgta

SEQ ID NO: 553931 - DNA, 75 bp, synthetic construct
  source 1..75: mol_type = other DNA
atgattattccagcattagatttaatcgacggcaccgtagtgcgtctccatcagggcgattacggcaagcagcgt

SEQ ID NO: 553932 - DNA, 75 bp, synthetic construct
  source 1..75: mol_type = other DNA
ggacgcaggcgttgaacgcgttgtcgtcggctcgacagcggtaaaatccccggaaatcgtcaaaggctggtttac

SEQ ID NO: 553933 - DNA, 75 bp, synthetic construct
  source 1..75: mol_type = other DNA
tgatcgcggaagtttttctggtattcatgctctatctgcgtaatcacaaccccgccacctttgtgttgatcccgg

SEQ ID NO: 553934 - DNA, 75 bp, synthetic construct
  source 1..75: mol_type = other DNA
tgtttggctgttgttaataaatcaactgccaaagccctggtaaaatatgtggctgcgccgctggctctctggctg

SEQ ID NO: 553935 - DNA, 75 bp, synthetic construct
  source 1..75: mol_type = other DNA
catgctctatctgcgtaaccacaaccccgccacctttgtgttgatcccggtatttatcgtggtgaccaaggttat

SEQ ID NO: 553936 - DNA, 75 bp, synthetic construct
  source 1..75: mol_type = other DNA
acggcagatacacttgccgacgcggtgctgattacgaccgctcacgcgtggcagcatcaggggaaaaccttattt

SEQ ID NO: 553937 - DNA, 75 bp, synthetic construct
  source 1..75: mol_type = other DNA
cgggaatgtgaccgccaggagataaacggggaggttgcggtggctgagccgtaccggtataccgggtggttgttg

SEQ ID NO: 553938 - DNA, 75 bp, synthetic construct
  source 1..75: mol_type = other DNA
catgctctatctgcgtaatcacaaccccgccacctttgtgttgatcccggtattcatcgtggtgaccaaggttat

SEQ ID NO: 553939 - DNA, 75 bp, synthetic construct
  source 1..75: mol_type = other DNA
cggtgttcgtggtgtgatcgtcggacgagccctgctggaaggtaagttcaccgttgaggaggccattcaatgctg

SEQ ID NO: 553940 - DNA, 75 bp, synthetic construct
  source 1..75: mol_type = other DNA
gggccgcaagaaaactatcccgaccgccttactgcagcctgttttgaccgctgggatctgccattgtcagacatg

SEQ ID NO: 553941 - DNA, 75 bp, synthetic construct
  source 1..75: mol_type = other DNA
gcgccaggtgttgccaggtattggctgctgcctgtacggcgcttcctgcacctatgataattcgcctgacgaaga

SEQ ID NO: 553942 - DNA, 75 bp, synthetic construct
  source 1..75: mol_type = other DNA
cagaactcccgattcagccagtacgcaaagtatttgcctggtatcaggcagatggtcgttatagcattaaaaata

SEQ ID NO: 553943 - DNA, 75 bp, synthetic construct
  source 1..75: mol_type = other DNA
cgtgtcatgccgctcttcaacggccagccagcagccaccgaagccgcgcagttgacggtcatcgccggagagatg

SEQ ID NO: 553944 - DNA, 75 bp, synthetic construct
  source 1..75: mol_type = other DNA
tgatgtgactgctgatggtcagcaatcctacacgctgacgcttacagcggtagataccgatggcaacgctgtgac

SEQ ID NO: 553945 - DNA, 75 bp, synthetic construct
  source 1..75: mol_type = other DNA
actttgccacgtctaactacggaaaatactgcggttgctactgacaataatgcagaaaaaaatatcgcgtcggtt

SEQ ID NO: 553946 - DNA, 75 bp, synthetic construct
  source 1..75: mol_type = other DNA
aagcgactctacgacagaccatcagcgttgttccccagcgagtgcatctgtttagcgccacgctgcgtgataatc

SEQ ID NO: 553947 - DNA, 75 bp, synthetic construct
  source 1..75: mol_type = other DNA
tacgacttcagtcaggtgccggaactgaatggagctcagttccggcaactctgtgaaacgacagactgggttgat

SEQ ID NO: 553948 - DNA, 75 bp, synthetic construct
  source 1..75: mol_type = other DNA
cggcgtcaagggtgtgattgtgggccgggccctgctggaaggaaaatttactgtgacggaggcgattcaatgctg

SEQ ID NO: 553949 - DNA, 75 bp, synthetic construct
  source 1..75: mol_type = other DNA
taaagtgttcgcctggtaccaggctgatggtcgttatagcgtaaaaaataaattcccggcctttaccggtgaact

SEQ ID NO: 553950 - DNA, 75 bp, synthetic construct
  source 1..75: mol_type = other DNA
atatgccaccgcatcaacacggcagccaccacggcgatacgcgattaattcgccatgcttatggtgaaggcgaaa

SEQ ID NO: 553951 - DNA, 75 bp, synthetic construct
  source 1..75: mol_type = other DNA
tgccagcgatcgttatcgcacgcaattagagaatacagaaattcagtggctggaagcgcaacgccgtcaatctga

SEQ ID NO: 553952 - DNA, 75 bp, synthetic construct
  source 1..75: mol_type = other DNA
gaaatatatactcccgcaatcaggacagaatatcggtagccctggtatatgacacgttatcaaaagaagcccaca

SEQ ID NO: 553953 - DNA, 75 bp, synthetic construct
  source 1..75: mol_type = other DNA
gttttatctggccccagtcaaccgctgagcgccatcctgcacttccccctgcctgggacaccgtggctgatgcgg

SEQ ID NO: 553954 - DNA, 75 bp, synthetic construct
  source 1..75: mol_type = other DNA
atgaatagagccctttcaccaatggtttctgaatttgaaaccattgaacaagaaaacagttacaacgaatggctg

SEQ ID NO: 553955 - DNA, 75 bp, synthetic construct
  source 1..75: mol_type = other DNA
caggtaaaagaactgggtactgctggtgataccggtactgctgttgtcgtttctgaagcgagcggcaatctggtt

SEQ ID NO: 553956 - DNA, 75 bp, synthetic construct
  source 1..75: mol_type = other DNA
tgcattagattcaggggagaacggcggtttatcttccctgaaaggaaaaaatgcttttggcggtcatgcccaagg

SEQ ID NO: 553957 - DNA, 75 bp, synthetic construct
  source 1..75: mol_type = other DNA
gtgatggagcaatacgtcctgccagtcgtcaatgaagccggtctggtacagcgactggttcaggtccgaagccag

SEQ ID NO: 553958 - DNA, 75 bp, synthetic construct
  source 1..75: mol_type = other DNA
gctaaatccgaagtaacgcgattgttcggggcggtaggcagaaatgaaccttgtccctgcgggtcgggagtaaag

SEQ ID NO: 553959 - DNA, 75 bp, synthetic construct
  source 1..75: mol_type = other DNA
tgggtgcaaaaaggtgcacaagcagtaactgaaggggatttcactgcagtagccaattttacacttgcttataaa

SEQ ID NO: 553960 - DNA, 75 bp, synthetic construct
  source 1..75: mol_type = other DNA
caggtagctataacttgaaagaaggtgacaataccatgcattacagtgcctgggtccagaaagcaagtggtgaag

SEQ ID NO: 553961 - DNA, 75 bp, synthetic construct
  source 1..75: mol_type = other DNA
gattttggtcagatctcaaaagcgcatctgaataacaacggtcagtcaattcagaaaccagttgatatcaagctg

SEQ ID NO: 553962 - DNA, 75 bp, synthetic construct
  source 1..75: mol_type = other DNA
tttgatggtgcaagccccagtggcgcaacaaaattaaaagcgggtgataacactctgcattataactcatgggtt

SEQ ID NO: 553963 - DNA, 75 bp, synthetic construct
  source 1..75: mol_type = other DNA
tgcagtacattgaaatgcataagactacactaacggatatcattattaatgacgagcctgttcaggattctgtgt

SEQ ID NO: 553964 - DNA, 75 bp, synthetic construct
  source 1..75: mol_type = other DNA
tcttttgatggtgttgctggctctgcaaccaaactgcaagcaggtgataatatattgcgttacagcacctgggtg

SEQ ID NO: 553965 - DNA, 75 bp, synthetic construct
  source 1..75: mol_type = other DNA
gtgagcgaaattaaagacgttattgttcaggggttgtggaaaaacaactctgcgctggtccagttgctcggcctt

SEQ ID NO: 553966 - DNA, 75 bp, synthetic construct
  source 1..75: mol_type = other DNA
gaaagccactgttatccatcaggctggcaggccaggctagggatgattaacgaatttcataaacaaggttcagct

SEQ ID NO: 553967 - DNA, 75 bp, synthetic construct
  source 1..75: mol_type = other DNA
tcgcgaagatggtccttttgtggtgcgtctggcccgcgaaccgggtaaacgcgaaagccgctacatgcatctttt

SEQ ID NO: 553968 - DNA, 75 bp, synthetic construct
  source 1..75: mol_type = other DNA
aatcgggtcaccaaatatgagcaacgtttttgtaattcagaatttggcgatctgaaactgagcgcagcggaagtg

SEQ ID NO: 553969 - DNA, 75 bp, synthetic construct
  source 1..75: mol_type = other DNA
gacacgttatctaaagaagcccacagtggttgtgggctgtattatgagatatacgaaagcaggcttatcggtctt

SEQ ID NO: 553970 - DNA, 75 bp, synthetic construct
  source 1..75: mol_type = other DNA
aattagaaaaaacagttcgttatcttacacaaactgtgcatccacgtagtgccgacaatattgataatctgaata

SEQ ID NO: 553971 - DNA, 75 bp, synthetic construct
  source 1..75: mol_type = other DNA
gcccttctttcgtagcaatgaaatggggagcgcggtacatgcagcttcgcttaaccgcccagtacagttaatgat

SEQ ID NO: 553972 - DNA, 75 bp, synthetic construct
  source 1..75: mol_type = other DNA
atgattagccaatcgctgaaaaacaagattgttgcggcggcggctggtggggcgatcgctattgcggcggtgatg

SEQ ID NO: 553973 - DNA, 75 bp, synthetic construct
  source 1..75: mol_type = other DNA
atgtttatcttgtgctgcatctggtttgttgtggcgatcccctggatactcatcacttccacgctggacaaagag

SEQ ID NO: 553974 - DNA, 75 bp, synthetic construct
  source 1..75: mol_type = other DNA
tggatgattgatggacgcgggattaacaacgtctgtgatgttttgatgtatctcgaagatgacgatactcgcgat

SEQ ID NO: 553975 - DNA, 75 bp, synthetic construct
  source 1..75: mol_type = other DNA
cgcgcgctggctgaactatcgcctgaaaaaagcaagtttcgatgtgggagccgtcgagcaaagagagtggcgtag

SEQ ID NO: 553976 - DNA, 75 bp, synthetic construct
  source 1..75: mol_type = other DNA
ctccgctaccgaaagctatttaaacacagcatcgttggcgaatgtcgctactgacgcgattggtaacgccgctgc

SEQ ID NO: 553977 - DNA, 75 bp, synthetic construct
  source 1..75: mol_type = other DNA
atgaaaatagaagttttggcgctaataataatgggattgatagtatttggcgttcatgctgtagatctggactgg

SEQ ID NO: 553978 - DNA, 75 bp, synthetic construct
  source 1..75: mol_type = other DNA
tgaagcctttcgccgctggtataacgctgctttgcctgatgttgtgcgtcggctgcacacccgcaccgcctgcgc

SEQ ID NO: 553979 - DNA, 75 bp, synthetic construct
  source 1..75: mol_type = other DNA
tacagcgactccgccattgaaaccgcgctgatgctcaaggcggtattcaagctaccgctgcgtgccttggaaggc

SEQ ID NO: 553980 - DNA, 75 bp, synthetic construct
  source 1..75: mol_type = other DNA
ctcctcggcgtctccttcgttggcgcatttctggttgtcggctcttcttttatcctgccctatttacgtcgggtt

SEQ ID NO: 553981 - DNA, 75 bp, synthetic construct
  source 1..75: mol_type = other DNA
gaagacggaaagcatcaaattcctgacaccattcgcgtgcgcgactatcgcggcaaactgatagtaccgggcttt

SEQ ID NO: 553982 - DNA, 75 bp, synthetic construct
  source 1..75: mol_type = other DNA
tcgcaggtttaatacaagcacttttaaagacacctatcagtatggttctacagctgtcggaagtaactcatacca

SEQ ID NO: 553983 - DNA, 75 bp, synthetic construct
  source 1..75: mol_type = other DNA
tgtttgcgcggtgatgaatcactggtcatcaaaaaagagagtgatattgaaccgttaattgtggtgaaagagtaa

SEQ ID NO: 553984 - DNA, 75 bp, synthetic construct
  source 1..75: mol_type = other DNA
ctacagctgtatcagcaagcgcgccaagacggtcgaaatcaagtaccgcctaccgagccatggcccagtggctca

SEQ ID NO: 553985 - DNA, 75 bp, synthetic construct
  source 1..75: mol_type = other DNA
ttgccgcagtgccgattcgtaccggtcatccgcaaaatgaagtgcgactgatagacgttctgttgcgaccggaag

SEQ ID NO: 553986 - DNA, 75 bp, synthetic construct
  source 1..75: mol_type = other DNA
tggctggatgaaaaagatccgctgcaaaacgcctatgtgcaggccaacggtcaggtgatcaatcaggatccgtat

SEQ ID NO: 553987 - DNA, 75 bp, synthetic construct
  source 1..75: mol_type = other DNA
agtccgcattgcggaacagaacgtgattcattccccgttgccgcaagggcaacagtggacgcgcgagctggagat

SEQ ID NO: 553988 - DNA, 75 bp, synthetic construct
  source 1..75: mol_type = other DNA
gcttagcgtgctggaagcagtcggcgatatcaccgccacggcaatggtttcccgccgccccattcagggggaaga

SEQ ID NO: 553989 - DNA, 75 bp, synthetic construct
  source 1..75: mol_type = other DNA
gcgacggttttcacgaagagttaatcatgtcgtcgctactcggcgtctccttcgttggcgcatttctggttgtcg

SEQ ID NO: 553990 - DNA, 75 bp, synthetic construct
  source 1..75: mol_type = other DNA
tatcgcactcgcagtcgcgaagagttaatcgagcgcatacatcagtttggtgttgccgggctgggcggtgcagga

SEQ ID NO: 553991 - DNA, 75 bp, synthetic construct
  source 1..75: mol_type = other DNA
cgaatggtcgggtaccttctgcccgtaaggtgaatggtaaggcgctttcagctgatataacactgacgccgaaag

SEQ ID NO: 553992 - DNA, 75 bp, synthetic construct
  source 1..75: mol_type = other DNA
acagcggcaaaacgggcagaggatattgcatccgccgtggcgcttgaggatgcgagcacgacgaaaaaggggata

SEQ ID NO: 553993 - DNA, 75 bp, synthetic construct
  source 1..75: mol_type = other DNA
gatccgcgcaccaccaccgaactgataaaccgctgggagcgtctgtgcggcctgccggatgaatgtattccggca

SEQ ID NO: 553994 - DNA, 75 bp, synthetic construct
  source 1..75: mol_type = other DNA
aaatcatctgtgcagacctgtcgctgaacaatgtgacggactcagaagccttcccgggtcttatccggcagactc

SEQ ID NO: 553995 - DNA, 75 bp, synthetic construct
  source 1..75: mol_type = other DNA
cccggtgaatattcagaccgtaaccgtgctgttgcgaatcagcggctgaccgggagtaatgcgcggtggaaatgg

SEQ ID NO: 553996 - DNA, 75 bp, synthetic construct
  source 1..75: mol_type = other DNA
cgggagtaatgcgcggtggaaatggacaacagattataaccgtcgctcgatagcggaaacggcgatgtaccgggt

SEQ ID NO: 553997 - DNA, 75 bp, synthetic construct
  source 1..75: mol_type = other DNA
gactgggcccagaacgaatagcgggagtcaacctactggaatgtttccggcagggagtactcaagttagcgggac

SEQ ID NO: 553998 - DNA, 75 bp, synthetic construct
  source 1..75: mol_type = other DNA
cgaagccactgaacaggccagcgcagcagcgaggtctgcttccgcagcgaagacatccgaaacgaatgcgaaagc

SEQ ID NO: 553999 - DNA, 75 bp, synthetic construct
  source 1..75: mol_type = other DNA
tggctcacacgggcattccattaccgtaaatgctactggtaataccgaaaacaccgtcaaaaacatcgcatttaa

SEQ ID NO: 554000 - DNA, 75 bp, synthetic construct
  source 1..75: mol_type = other DNA
acaggccgcgtcgtcggctcagtcagcgtcttccagcgcaggaacggcatcaacaaaggccactgaagcggaaaa

SEQ ID NO: 554001 - DNA, 75 bp, synthetic construct
  source 1..75: mol_type = other DNA
ctgcaagcgcaggtgcacacgcacatactgtcggtattggtgctcatacgcactccgttgcgattggttcacatg

SEQ ID NO: 554002 - DNA, 75 bp, synthetic construct
  source 1..75: mol_type = other DNA
ctgtttcagcttcctcggcgtcatcttcaaaagatgaggccgctcgccaggcgtcagcggcagcagagagtgcga

SEQ ID NO: 554003 - DNA, 75 bp, synthetic construct
  source 1..75: mol_type = other DNA
atcgtcgctgccatgcaactttccggcagcacagcatcgcttttcgtggtctgacggcattgttcggccatatgg

SEQ ID NO: 554004 - DNA, 75 bp, synthetic construct
  source 1..75: mol_type = other DNA
gctgtggccggatgacgcgctgcatcgtcagttagtgaaggcattgccatcggcagtcagcgaacgtattcaact

SEQ ID NO: 554005 - DNA, 75 bp, synthetic construct
  source 1..75: mol_type = other DNA
agttgaaagccgcattgactcagccgctaaatgcactgcgggaatgggcagcaaaccgtccagaattgcaggcgt

SEQ ID NO: 554006 - DNA, 75 bp, synthetic construct
  source 1..75: mol_type = other DNA
aaaacggtgccaacacctcgtttgttaaccgtattgccgatacctctttgccgctggatgaactggttgccgatc

SEQ ID NO: 554007 - DNA, 75 bp, synthetic construct
  source 1..75: mol_type = other DNA
gcgcggccaatgagagcgatgaagcaccgactccggcagaggaaccacaccagccattcctcgactttgccgagc

SEQ ID NO: 554008 - DNA, 75 bp, synthetic construct
  source 1..75: mol_type = other DNA
agcgttagccaatgcccgcaaactggaagagaaaggtttccgttactcttacgatatgctgggcgaagctgcact

SEQ ID NO: 554009 - DNA, 75 bp, synthetic construct
  source 1..75: mol_type = other DNA
agtgcgtgaagccgttgattttctccactactacgccggacaggtacgtgatgatttcgctaacgaaacgcatcg

SEQ ID NO: 554010 - DNA, 75 bp, synthetic construct
  source 1..75: mol_type = other DNA
tcgtggcatctatgaaggtccgggcatttcaatcaagctgtcggcgctgcatccgcgttacagccgcgcccagta

SEQ ID NO: 554011 - DNA, 75 bp, synthetic construct
  source 1..75: mol_type = other DNA
tggcgagctggcgcaggcaggaacacaacgattgctgccggggccgacgggtgaacgcaacacctggacgctgct

SEQ ID NO: 554012 - DNA, 75 bp, synthetic construct
  source 1..75: mol_type = other DNA
tggcctcgctctcttctgccctgctcaatagtgcactgcaaaaatggcaggccttgccaatgctggaacaaccgg

SEQ ID NO: 554013 - DNA, 75 bp, synthetic construct
  source 1..75: mol_type = other DNA
cagaactactatccgggtcagtatgagttccagtgcctgcacggcatgggagagccactctatgagcaggtcacc

SEQ ID NO: 554014 - DNA, 75 bp, synthetic construct
  source 1..75: mol_type = other DNA
gaagagaaaggtttccgttactcatacgatatgctgggtgaggccgcgctgaccgctgcggacgcacaggcgtat

SEQ ID NO: 554015 - DNA, 75 bp, synthetic construct
  source 1..75: mol_type = other DNA
tccattagggcctgtggtgtgtatcagcccgtggaacttcccgctggcgattttcaccgggcagatcgctgccgc

SEQ ID NO: 554016 - DNA, 75 bp, synthetic construct
  source 1..75: mol_type = other DNA
aaaacggtgctaacacctcgtttgttaaccgtattgctgatacctctttgccactggatgaactggttgccgatc

SEQ ID NO: 554017 - DNA, 75 bp, synthetic construct
  source 1..75: mol_type = other DNA
tacctgcgccgtatcgtgattaaagagcaccgcgatctgcttaaccagttgctggaaaaaccaggaatgccggcc

SEQ ID NO: 554018 - DNA, 75 bp, synthetic construct
  source 1..75: mol_type = other DNA
ccgcagagaacaccatcactttacaggtcggcgagcatgaactgacgtttatcccgaccgtaaaagcctacaacg

SEQ ID NO: 554019 - DNA, 75 bp, synthetic construct
  source 1..75: mol_type = other DNA
tttattgttaatcctgttcagggggagctgtattcaggtcttaataatactgctttggatgatgttctcagtctg

SEQ ID NO: 554020 - DNA, 75 bp, synthetic construct
  source 1..75: mol_type = other DNA
actttttatgatcagccagcttgcaatgccggattacaccttaccaggcatacttcgttttcccggtctggcggc

SEQ ID NO: 554021 - DNA, 75 bp, synthetic construct
  source 1..75: mol_type = other DNA
tctacggtagctattcagcgcaggggctgaatggcatgagccagcagttccatcgttttctgcgcgaacggatta

SEQ ID NO: 554022 - DNA, 75 bp, synthetic construct
  source 1..75: mol_type = other DNA
gtccgcagctgtggcaggtagatcgcctggccgtcacgctaccggtcgccgagcgcgcccgcgaagttatggcct

SEQ ID NO: 554023 - DNA, 75 bp, synthetic construct
  source 1..75: mol_type = other DNA
tcatcctcgaatccatcatcggactggtggtcggtgtcatattagtattggggttaatgtggtttggttttgatg

SEQ ID NO: 554024 - DNA, 75 bp, synthetic construct
  source 1..75: mol_type = other DNA
tcatgccattgaactgattagatgtggctggatcgcagggtacgttagcccaaatgttagctggacctatttatc

SEQ ID NO: 554025 - DNA, 75 bp, synthetic construct
  source 1..75: mol_type = other DNA
cgcagcaaaggccgtccggtgtttcagacagtgcgggaaaacagtgaagatgcccgtgaatggcaaagcggcact

SEQ ID NO: 554026 - DNA, 75 bp, synthetic construct
  source 1..75: mol_type = other DNA
acatcgaaacagacaacaccatcactttacaggtcggtgaacatgaactgacgtttatcccgaccgtaaaagcct

SEQ ID NO: 554027 - DNA, 75 bp, synthetic construct
  source 1..75: mol_type = other DNA
atcttttcattctccttaggcattgttttttgtgtgctgggcagtttattcaaagaagccaataagtttctcagc

SEQ ID NO: 554028 - DNA, 75 bp, synthetic construct
  source 1..75: mol_type = other DNA
ttattcttgaagccattattgggctggtggtgggttgcattctagttttaggattattgtggtttggttttgatg

SEQ ID NO: 554029 - DNA, 75 bp, synthetic construct
  source 1..75: mol_type = other DNA
ggtgaaggtggctccggcggcgcgctggcgattggcgtgggcgataaagtaaatatgctgcaatacagcacctat

SEQ ID NO: 554030 - DNA, 75 bp, synthetic construct
  source 1..75: mol_type = other DNA
tggcgattggcgtgggcgataaagtgaatatgttgcaatacagcacctattccgttatttcgccggaaggttgcg

SEQ ID NO: 554031 - DNA, 75 bp, synthetic construct
  source 1..75: mol_type = other DNA
cgtaccgactatctgcactgttatcggtgaaggtggttctggcggcgcactggcaattggcgtgggcgataaagt

SEQ ID NO: 554032 - DNA, 75 bp, synthetic construct
  source 1..75: mol_type = other DNA
gtgacgaaacgtgtgacagatgttgtgaaggacgaacgacagcatattgccgttgtttcaggtataccaatgagt

SEQ ID NO: 554033 - DNA, 75 bp, synthetic construct
  source 1..75: mol_type = other DNA
atggggatcatcgctccgcgtctgaaagaactgaaactgattgactccatcatcccggaaccgctgggcggcgct

SEQ ID NO: 554034 - DNA, 75 bp, synthetic construct
  source 1..75: mol_type = other DNA
ccgggggcttatccgggcgtgggcgcagaagaacgtggtcagtctgaagccattgcacgcaacctgcgtgaaatg

SEQ ID NO: 554035 - DNA, 75 bp, synthetic construct
  source 1..75: mol_type = other DNA
gatgaagctgagcaaggagacaggagtggggtcatggtatctggagcatgatgccggtactggcgctgaactgct

SEQ ID NO: 554036 - DNA, 75 bp, synthetic construct
  source 1..75: mol_type = other DNA
tgacagatatcacgggggcaaaagcgacgtatcctgtactgcttgatacggtcacagtcaaagttaacgaaagcc

SEQ ID NO: 554037 - DNA, 75 bp, synthetic construct
  source 1..75: mol_type = other DNA
gtcgcagtgggcgtcaggcgcggcagcaaacagtatgctggcatcattcttccttcagacggatgcatcaaatct

SEQ ID NO: 554038 - DNA, 75 bp, synthetic construct
  source 1..75: mol_type = other DNA
ttgattccatggtggaaaaatatcgttctgacctgtcggaattcggaggtcagtgtctcgggggctctccgtcat

SEQ ID NO: 554039 - DNA, 75 bp, synthetic construct
  source 1..75: mol_type = other DNA
ggggacgtgactacgccagtggtggttccgggcgacaatagcagcggtactgttgccagtgaaccggaatattac

SEQ ID NO: 554040 - DNA, 75 bp, synthetic construct
  source 1..75: mol_type = other DNA
tatgccacgcagtatgaagcggtttatggtgcctgtaaaaatctgtccgcacagaatattttctttgtgccgttc

SEQ ID NO: 554041 - DNA, 75 bp, synthetic construct
  source 1..75: mol_type = other DNA
atgagcggtggcgatggacgcggccataacacgggcgcgcatagcacaagtggtaacattaatggtggcccgacc

SEQ ID NO: 554042 - DNA, 75 bp, synthetic construct
  source 1..75: mol_type = other DNA
atgaagaaaacaatgatggcagtcgccctggccctgagtgcactcagtattcagtcagcactggccgctgaatac

SEQ ID NO: 554043 - DNA, 75 bp, synthetic construct
  source 1..75: mol_type = other DNA
ccctggccctgagtgtactcagtattcagtcagcactgggcgctgaatacagtgaaaagacgcagtatctgggtg

SEQ ID NO: 554044 - DNA, 75 bp, synthetic construct
  source 1..75: mol_type = other DNA
ggcagaactggaagttccggtcagttaccggggaaatctgcagatagtgctgcaggtggaggaaaagaatatctg

SEQ ID NO: 554045 - DNA, 75 bp, synthetic construct
  source 1..75: mol_type = other DNA
ctggacagcatcggcctgactttacagcatgacgacgccattgccgcttatgaagcaaaacaacctgcgtttatg

SEQ ID NO: 554046 - DNA, 75 bp, synthetic construct
  source 1..75: mol_type = other DNA
caatggaaaagaatgcaaacaatgtcatcattgaactaaatagtatactatcaaaatcagcaaaaattaatgccg

SEQ ID NO: 554047 - DNA, 75 bp, synthetic construct
  source 1..75: mol_type = other DNA
gcctgctgtttgctgcattcggttttcagtgcgttcaggcaaatgaatacagtgagaaaacccaatatctggggg

SEQ ID NO: 554048 - DNA, 75 bp, synthetic construct
  source 1..75: mol_type = other DNA
agagctgcttaacaaaaaaatgccgtggtatcgtcttctggttcctgatgcaaagcacactagcactgaggcaac

SEQ ID NO: 554049 - DNA, 75 bp, synthetic construct
  source 1..75: mol_type = other DNA
caatcaagcaccaactaaaagcaggaataaatatccccggcgctcaactcaaagttgggaaaccttcacttctta

SEQ ID NO: 554050 - DNA, 75 bp, synthetic construct
  source 1..75: mol_type = other DNA
ctgatggttccgggtggagttcggaaaataacccgtggggtggtggttccggtagcggcattcactggggtggtg

SEQ ID NO: 554051 - DNA, 75 bp, synthetic construct
  source 1..75: mol_type = other DNA
agcgagaaaacgcagtatctgggtgtggtgaacggtcaggtgtcaggtaacagcgtggtgaaggtaacccgcaca

SEQ ID NO: 554052 - DNA, 75 bp, synthetic construct
  source 1..75: mol_type = other DNA
tcttggctctgagtgtactcggtattcaatcagcacttgctactgaatacagagagaaaactcagtatctggggg

SEQ ID NO: 554053 - DNA, 75 bp, synthetic construct
  source 1..75: mol_type = other DNA
agccgcccggcttccggcggactggcaaacatcacggtgaagcaggtgctgccggataacggggaagcccgcatc

SEQ ID NO: 554054 - DNA, 75 bp, synthetic construct
  source 1..75: mol_type = other DNA
caagaggtgaaagcgggagagaaaacttatcgatttaccattgatgccttccgccgccactgcatgatgaatggt

SEQ ID NO: 554055 - DNA, 75 bp, synthetic construct
  source 1..75: mol_type = other DNA
agatatctctgatatagatattaaaaatttagtaagctcattgtgtgcacatataatacttaaggaaaaattcaa

SEQ ID NO: 554056 - DNA, 75 bp, synthetic construct
  source 1..75: mol_type = other DNA
tcccccaagaattacgagatgagatagcaacttattgtttgcaaaactaccagaaagatcaaaggcttgattata

SEQ ID NO: 554057 - DNA, 75 bp, synthetic construct
  source 1..75: mol_type = other DNA
aaggtgcaattatgcaattaacagatacggttggaaatgtgaagaaggctttagaagacagtatcgcagataaag

SEQ ID NO: 554058 - DNA, 75 bp, synthetic construct
  source 1..75: mol_type = other DNA
tcagagtaaggtacaggactttaagaatattaaaggagtgaatctgcaatatcgatatgagtgggattctccggt

SEQ ID NO: 554059 - DNA, 75 bp, synthetic construct
  source 1..75: mol_type = other DNA
gcggagccattattgagttaaaaaacaccgtgaaaaaagtaaaggagtcactagagaacagtatttcattcataa

SEQ ID NO: 554060 - DNA, 75 bp, synthetic construct
  source 1..75: mol_type = other DNA
aactttagatgtaaatttaatcataagtgccatacaacataattggtccatttacgatattcaaatgttttcaga

SEQ ID NO: 554061 - DNA, 75 bp, synthetic construct
  source 1..75: mol_type = other DNA
cgatggcgcttacgatacccggctatgtcacgatgaactgcggcataagaaaatcagcgcgcttatccctccccg

SEQ ID NO: 554062 - DNA, 75 bp, synthetic construct
  source 1..75: mol_type = other DNA
ctgtcacgatgaactgcgacgtaagaaaatcagcgcgcttatcccaccccgaaaaggtgcgggttactggcccgg

SEQ ID NO: 554063 - DNA, 75 bp, synthetic construct
  source 1..75: mol_type = other DNA
agattagatttaacgatgtaataaagattcactaccctcttattttgtgtcaacaagaagtgctttcgataaaag

SEQ ID NO: 554064 - DNA, 75 bp, synthetic construct
  source 1..75: mol_type = other DNA
gaatgcaacataaatgaattattcgatgatgaatgcataacttgggataaaataaagggtaagttatcattaccc

SEQ ID NO: 554065 - DNA, 75 bp, synthetic construct
  source 1..75: mol_type = other DNA
ttccccgggttaatccggcaaacccaccggaaaatcaggtcagccgccgccgatggcgcttacgacacccggcta

SEQ ID NO: 554066 - DNA, 75 bp, synthetic construct
  source 1..75: mol_type = other DNA
tcaaatcccaatattgataatattccaccacatatattaaggagagaaggaaatgaacttcataattacttcctt

SEQ ID NO: 554067 - DNA, 75 bp, synthetic construct
  source 1..75: mol_type = other DNA
cctgatgcaggccattgcggcggaaggtgatgtcaccacacctgtgctggtgaagccgtcggatggagaaggcac

SEQ ID NO: 554068 - DNA, 75 bp, synthetic construct
  source 1..75: mol_type = other DNA
gatccgcgcaccaccactgaactgataaaccgctgggagcgtctgtgcggtctgccggatgaatgtattccggcg

SEQ ID NO: 554069 - DNA, 75 bp, synthetic construct
  source 1..75: mol_type = other DNA
agtgatctggatgcagggagaaaaagatgtcagttcggggagacatgcagaacacaatgcgcttttccttgccat

SEQ ID NO: 554070 - DNA, 75 bp, synthetic construct
  source 1..75: mol_type = other DNA
ctgcaactgacaggcatatcaaaggcggcgacatatacgttgctgattgacagtgtgaaggtggaagtgaacaac

SEQ ID NO: 554071 - DNA, 75 bp, synthetic construct
  source 1..75: mol_type = other DNA
gatggcacacactggcttttgagtttgccggaaacaacagcattcaggtgacgccggtactggatgagaaacggg

SEQ ID NO: 554072 - DNA, 75 bp, synthetic construct
  source 1..75: mol_type = other DNA
ggcgtaatgaccagaagacctggacatctgtggacagggcaagccatttcagttcatgggcacgccgtgggatta

SEQ ID NO: 554073 - DNA, 75 bp, synthetic construct
  source 1..75: mol_type = other DNA
attaatatcctccacgttcctgaaatcctggaggatattaatgtcatcaaaacattagcgaacgataatccctaa

SEQ ID NO: 554074 - DNA, 75 bp, synthetic construct
  source 1..75: mol_type = other DNA
acctctcccggacagttacgataaacccgattcgcgcattcgccagctggcacgccgcagcaccgtaaccccgag

SEQ ID NO: 554075 - DNA, 75 bp, synthetic construct
  source 1..75: mol_type = other DNA
ttcgcgatattcagttgttttcaaaccatctatcatcactctataacttctcaaatcttgcggactacctttctg

SEQ ID NO: 554076 - DNA, 75 bp, synthetic construct
  source 1..75: mol_type = other DNA
gttccctggatttgcggcgataccacctatatctggaaacaacaatatacctctcagtacccggtggtttacggt

SEQ ID NO: 554077 - DNA, 75 bp, synthetic construct
  source 1..75: mol_type = other DNA
ttacttggtgtttcgccagggaaagatttagagcaatctgcagcggcagttaaggatttagtaaattatttcaat

SEQ ID NO: 554078 - DNA, 75 bp, synthetic construct
  source 1..75: mol_type = other DNA
ataggcggtgatggtaatggcggaaaattatgccagcgccctgggccaaatacaaaaaaagtacaattagtccct

SEQ ID NO: 554079 - DNA, 75 bp, synthetic construct
  source 1..75: mol_type = other DNA
ttgacgctggtgggcttttgtaagccgggtcgggcaacggtttatactcatccgcagcgattgattcataattaa

SEQ ID NO: 554080 - DNA, 75 bp, synthetic construct
  source 1..75: mol_type = other DNA
gcatggatgtcgttccttcctgtaatggtcttgaagtacaaattgagctttccagccgccgctttatggggttga

SEQ ID NO: 554081 - DNA, 75 bp, synthetic construct
  source 1..75: mol_type = other DNA
gtggagcaacttaatgacatcggtaaaccggtgcagccgctgccgttcactcagacatttgatctcaacaaactg

SEQ ID NO: 554082 - DNA, 75 bp, synthetic construct
  source 1..75: mol_type = other DNA
gagttcctgcactggatggcaagccgctggcaagcggtgaagtgcctctggatgttggcccgcaaggtaagcagt

SEQ ID NO: 554083 - DNA, 75 bp, synthetic construct
  source 1..75: mol_type = other DNA
caattgcgcagtctgaatggtgaatggttatttacctggtttccggcaccggaagcggtgccggaaagctggctc

SEQ ID NO: 554084 - DNA, 75 bp, synthetic construct
  source 1..75: mol_type = other DNA
gagcgttgtaacctgacattagtgggcttttgtaagccaggcagggcaacggtttatacccatcctcagcgttta

SEQ ID NO: 554085 - DNA, 75 bp, synthetic construct
  source 1..75: mol_type = other DNA
ttttggcgctccagtaatcggtcttattggtggtcgtaagtttattaactcattaatcaaagcaaaggggaaata

SEQ ID NO: 554086 - DNA, 75 bp, synthetic construct
  source 1..75: mol_type = other DNA
attgcgtggaactcattaacagcctgcgcagttcatccatgtttaccaaaatcatgaataccaccccggctactg

SEQ ID NO: 554087 - DNA, 75 bp, synthetic construct
  source 1..75: mol_type = other DNA
acgctcatcgcggtgatcctgttttttgccttttcgtttaccttttcgattagccatgaagaagccgtttctgcc

SEQ ID NO: 554088 - DNA, 75 bp, synthetic construct
  source 1..75: mol_type = other DNA
ggctccaggatggccagacgcggattatctttgatggtgttaactcggcgtttcacctgtggtgtaacggacgct

SEQ ID NO: 554089 - DNA, 75 bp, synthetic construct
  source 1..75: mol_type = other DNA
acactaaaaaagctgcggggtattataactcgcctgataaatattatgacaaagattccggggatatcggttctt

SEQ ID NO: 554090 - DNA, 75 bp, synthetic construct
  source 1..75: mol_type = other DNA
tagttacaggtctatctgtagttttcatctactgtttgctggttccgtcgctgatctctactaaaagcgacattg

SEQ ID NO: 554091 - DNA, 75 bp, synthetic construct
  source 1..75: mol_type = other DNA
accagacaagcgtcagcagcgaagggcagcgccacgacggcatccacgaaagcaacagaggcggcaggcagtgcg

SEQ ID NO: 554092 - DNA, 75 bp, synthetic construct
  source 1..75: mol_type = other DNA
gtctgcttcaaaagatgaggcgaccagacaagcgtcagcagcgaatggcagcgccacgaccgcagcgacgaaggc

SEQ ID NO: 554093 - DNA, 75 bp, synthetic construct
  source 1..75: mol_type = other DNA
tggctggatgaaaaagacccgctgcaaaatgcctacgtgcaggccaacggtcaggtgattaatcaggatccgtat

SEQ ID NO: 554094 - DNA, 75 bp, synthetic construct
  source 1..75: mol_type = other DNA
gaggtgcttgatcagaccagcggtaaatttgccgagcagaaaaacatctatcaacagttgtggtgcttgccgaaa

SEQ ID NO: 554095 - DNA, 75 bp, synthetic construct
  source 1..75: mol_type = other DNA
caaaagatgaggcgaccagacaggcgtcagcagcaaagggcagcgccacgacggcatccacgaaggcgacagagg

SEQ ID NO: 554096 - DNA, 75 bp, synthetic construct
  source 1..75: mol_type = other DNA
gtctgcttcaaaagatgaggcgaccagacaagcgtcagcagcgaatggcagggccacgaccgcaccgacgaaggc

SEQ ID NO: 554097 - DNA, 75 bp, synthetic construct
  source 1..75: mol_type = other DNA
gtctgcttcaaaagatgaggcgaccagacaagcgtcagcagcgaatggcagcgccacgacggcaccgacgaaggc

SEQ ID NO: 554098 - DNA, 75 bp, synthetic construct
  source 1..75: mol_type = other DNA
gcgcagcttcctcggctacggcggcaggaaattccgcgaaggcggcaaaaacgtccgagacgaacgccaaggatt

SEQ ID NO: 554099 - DNA, 75 bp, synthetic construct
  source 1..75: mol_type = other DNA
ttgcaggcgttccctaatggctcgccacgtgcgccagtcgcgggcgcgcttcttatctgggataaaggcggtgaa

SEQ ID NO: 554100 - DNA, 75 bp, synthetic construct
  source 1..75: mol_type = other DNA
acgggcataccatcaccgttaacgctacgggtaacgcagaaaacaccgtaaaaaacatcgcatttaactatattg

SEQ ID NO: 554101 - DNA, 75 bp, synthetic construct
  source 1..75: mol_type = other DNA
aaatattggtgcctgccgtgccttcggtggggccgtaagcacaacgacaggagactggacgaccgcacagtttat

SEQ ID NO: 554102 - DNA, 75 bp, synthetic construct
  source 1..75: mol_type = other DNA
tgcttgcgcggcgatgaatcactggtcatcaaaaaagagagtgatattgaaccgttaattgtggtgaaagagtaa

SEQ ID NO: 554103 - DNA, 75 bp, synthetic construct
  source 1..75: mol_type = other DNA
ttttccggaggcttctgtcttcttccgcgatgtcctgctcacgattcctttttgcttcttttctgcggtatttat

SEQ ID NO: 554104 - DNA, 75 bp, synthetic construct
  source 1..75: mol_type = other DNA
tagacaactcccaaaataaacggaacgcacaagccttcggcgcgcttattggtgcagtcgctggcggtgtaatcg

SEQ ID NO: 554105 - DNA, 75 bp, synthetic construct
  source 1..75: mol_type = other DNA
agttggcggcggagctgtaggcgcggcagcgggttctatggtgaatgataaaaccttagtggaaggtgtttcttt

SEQ ID NO: 554106 - DNA, 75 bp, synthetic construct
  source 1..75: mol_type = other DNA
atcccgtggccatcagataccgttccgtctggctatgccctgatgcaggggcaggcttttgacaaatctgcatac

SEQ ID NO: 554107 - DNA, 75 bp, synthetic construct
  source 1..75: mol_type = other DNA
gcatcagcggaaattttactctgggatgactattttgcacctggctacggcgtgccgaacgacgaaggcatggaa

SEQ ID NO: 554108 - DNA, 75 bp, synthetic construct
  source 1..75: mol_type = other DNA
atggttcgtgcgtcagagcgaagagcagatttcgatggtcattcttgaagctaatgcccatcaactgctgttacc

SEQ ID NO: 554109 - DNA, 75 bp, synthetic construct
  source 1..75: mol_type = other DNA
cgctggcggtgttatcggccacaacgtcgggtctggcagcaattccggaacgacggcaggtgcagttggcggcgg

SEQ ID NO: 554110 - DNA, 75 bp, synthetic construct
  source 1..75: mol_type = other DNA
agcgtatacttaaaaaattttcagactacacatcaactataagtaccatattttcactttttttgatttttatag

SEQ ID NO: 554111 - DNA, 75 bp, synthetic construct
  source 1..75: mol_type = other DNA
ccacgcctgccccgacgccagtgattgtcgccaacgcctgcccgaaagtgagtctttgcccgatgccgggcagtg

SEQ ID NO: 554112 - DNA, 75 bp, synthetic construct
  source 1..75: mol_type = other DNA
tagtgttgttatcactggcggtggccggtctgtttctggcgaagcatgaaaacgccagcctgcgcacctcgctgg

SEQ ID NO: 554113 - DNA, 75 bp, synthetic construct
  source 1..75: mol_type = other DNA
acacttctacagttaccttgcggatggagatgcagtcgacaaattattagctctgacggtataaccctccatctc

SEQ ID NO: 554114 - DNA, 75 bp, synthetic construct
  source 1..75: mol_type = other DNA
gttaatcgtcaatcttgatactcaccgtcccctcgtcctgcttcccggttgcgatcagagtacgctggcgacctg

SEQ ID NO: 554115 - DNA, 75 bp, synthetic construct
  source 1..75: mol_type = other DNA
aaatttgacgataaaaatagagcttttcttacaatgccagattatctagcatttttaataaatttttgggacaaa

SEQ ID NO: 554116 - DNA, 75 bp, synthetic construct
  source 1..75: mol_type = other DNA
ggcgacgcgagtcgaagcacaaggtttccgcccgtatgtcattccggttggcggttctaatgctttaggcgcgct

SEQ ID NO: 554117 - DNA, 75 bp, synthetic construct
  source 1..75: mol_type = other DNA
ttcagttgctctcttccggctttccttttctcgccctggggcgcagccgtctgccacagccctatgcctggtttg

SEQ ID NO: 554118 - DNA, 75 bp, synthetic construct
  source 1..75: mol_type = other DNA
agaaacaacccgtagtctcgaatactttatcagcaaaaacagccatctcctcaacataccgatttctgaactcgg

SEQ ID NO: 554119 - DNA, 75 bp, synthetic construct
  source 1..75: mol_type = other DNA
agagataactcgtagtttggagtactttcttagtaaaaacagtcatctcaccaacataccgatttcagaactcgg

SEQ ID NO: 554120 - DNA, 75 bp, synthetic construct
  source 1..75: mol_type = other DNA
cgcgacgttctgcttactattcctttttgcttcttttctgcggtatttattcaggtgcttaacccgatgaatatt

SEQ ID NO: 554121 - DNA, 75 bp, synthetic construct
  source 1..75: mol_type = other DNA
tttattcaggtacttaacccaatgaatattgcctatcgtaaacgggaagcggataaagtactggcaacccggctc

SEQ ID NO: 554122 - DNA, 75 bp, synthetic construct
  source 1..75: mol_type = other DNA
tgcataggcatggcgattggtgccggaaccgtgctgatgccagtacaaattggcttgaagggaatttgggtattt

SEQ ID NO: 554123 - DNA, 75 bp, synthetic construct
  source 1..75: mol_type = other DNA
ttacccgaaacttgcaaccgcttatccgtcaggcgtgatccctgatatgcgtggctggacgattaagggcaaacc

SEQ ID NO: 554124 - DNA, 75 bp, synthetic construct
  source 1..75: mol_type = other DNA
attgaaatgtgcgacgcgctgaccgatcccaatgcccaactggaagagctggcgactcgcgtcgaagcacaaggc

SEQ ID NO: 554125 - DNA, 75 bp, synthetic construct
  source 1..75: mol_type = other DNA
tggcaatgggcggcaataaattacgtaagctggaatttctcgcggcagatgctctgcgtgaaggtgccgatacgc

SEQ ID NO: 554126 - DNA, 75 bp, synthetic construct
  source 1..75: mol_type = other DNA
ggggttatctagtgatgaggaaattatatcagccctgcaaactatgcttccaactctaaggaaagaatacgagat

SEQ ID NO: 554127 - DNA, 75 bp, synthetic construct
  source 1..75: mol_type = other DNA
gggaatggtgtatcagccggttttaacgctgcgttaggtactggtaccacgtcgagcgcaggcgggcatgctcac

SEQ ID NO: 554128 - DNA, 75 bp, synthetic construct
  source 1..75: mol_type = other DNA
ggtaatggtaatgcgggtagctcagcgtgtgcaggcgctagactaaaagtcattgcgacaaaagaggggtatgaa

SEQ ID NO: 554129 - DNA, 75 bp, synthetic construct
  source 1..75: mol_type = other DNA
aaatagaagaacgcacttttgtattgacaatatccccctggctcgacgggagcaacacaagtctggtggcatcgt

SEQ ID NO: 554130 - DNA, 75 bp, synthetic construct
  source 1..75: mol_type = other DNA
ccggcagaacttcaaccggtcgccttcgagctctctcatgtcctgtctgtcgccatgaagcgagaccccaccagc

SEQ ID NO: 554131 - DNA, 75 bp, synthetic construct
  source 1..75: mol_type = other DNA
acctggctacttaagatatgaaggtgcaggtcttgaaatgatctataacccgaaaacgggacaagttggtcatat

SEQ ID NO: 554132 - DNA, 75 bp, synthetic construct
  source 1..75: mol_type = other DNA
agagaagttttgaatagcaatccaaaaattgagccggatcctagaggcgcacctggctacttaagatatgaaggt

SEQ ID NO: 554133 - DNA, 75 bp, synthetic construct
  source 1..75: mol_type = other DNA
gaacgtcagcaaatcagcatgctggccaccattgcctcaggtattgcgggcgggcttgcaggcaacagtacggcg

SEQ ID NO: 554134 - DNA, 75 bp, synthetic construct
  source 1..75: mol_type = other DNA
ctgatgccgccgctgttttatcgtgcgggaaaaagtacaggacaaaatctgactcacttgcgcggccagtatcgg

SEQ ID NO: 554135 - DNA, 75 bp, synthetic construct
  source 1..75: mol_type = other DNA
gctgggtgaaggtggacgccaactctccggtggcgaactgcgccgtctggctatcgcccgtgcgctattacacga

SEQ ID NO: 554136 - DNA, 75 bp, synthetic construct
  source 1..75: mol_type = other DNA
attgcaggactgtacagctttaactatatgttgcctgccgcaggagtgcgcggtgcggcgatcacccgtaccgcc

SEQ ID NO: 554137 - DNA, 75 bp, synthetic construct
  source 1..75: mol_type = other DNA
caattacttccccactcctccagagattggccgcttgatgtcactcattgttggctcacagtcttcggcagactt

SEQ ID NO: 554138 - DNA, 75 bp, synthetic construct
  source 1..75: mol_type = other DNA
catccaaggctttatctctcatcgagcagtcccgatacagaatgggcacatctcggtttgttgaggcctttattg

SEQ ID NO: 554139 - DNA, 75 bp, synthetic construct
  source 1..75: mol_type = other DNA
atgctgctgattggcgcgctggcggtgatcctgatgctatggatggcctccggtggcgttggtagtaataatcag

SEQ ID NO: 554140 - DNA, 75 bp, synthetic construct
  source 1..75: mol_type = other DNA
atggcattaacactggcaggtctggaaatcgagaaaacaagcggctactggcgtgctaagggtttcaagcagcct

SEQ ID NO: 554141 - DNA, 75 bp, synthetic construct
  source 1..75: mol_type = other DNA
aaggcgcgtactgggatagtgaaattaagcgtgcgcagatggacggccttgaaggttatccggtttatacccgca

SEQ ID NO: 554142 - DNA, 75 bp, synthetic construct
  source 1..75: mol_type = other DNA
cgcctggccaccgatatcggtccggtaattgataacgaagcgaaagccaacattgagcatcatattcagaccatg

SEQ ID NO: 554143 - DNA, 75 bp, synthetic construct
  source 1..75: mol_type = other DNA
gtcgtcgtggatgtactggcctcggcgttcgacagtgcaggccaacgttgttcggcgctgcgcgtgctgtgttta

SEQ ID NO: 554144 - DNA, 75 bp, synthetic construct
  source 1..75: mol_type = other DNA
caaactggattaccgcatccgaaaattcccctgccgcgcgatctttacggtcacgggcgcgacaactcggcaggg

SEQ ID NO: 554145 - DNA, 75 bp, synthetic construct
  source 1..75: mol_type = other DNA
cctgctggaacggctgtatatcgagcgttcgctgagtgtgaataccgctgctgccgggggtaacgccagtttgat

SEQ ID NO: 554146 - DNA, 75 bp, synthetic construct
  source 1..75: mol_type = other DNA
cgggtcagtacgagttccagtgcctgcatggtatgggcgagccactgtatgagcaggtcaccgggaaagttgccg

SEQ ID NO: 554147 - DNA, 75 bp, synthetic construct
  source 1..75: mol_type = other DNA
tgcaaatacatttatttttatcaatgcttccccttcattccgatgacaaaaaaaggcaagatgcactatttgcta

SEQ ID NO: 554148 - DNA, 75 bp, synthetic construct
  source 1..75: mol_type = other DNA
ggctctctgttggcatgacgatgatgtgtattgccggttatgcgatgagcgccgcgccagtggtgtggatcttgt

SEQ ID NO: 554149 - DNA, 75 bp, synthetic construct
  source 1..75: mol_type = other DNA
atagacgccattaagaaaagattttttgagctttggcctaatcatcacaatgatgaatttgaacgctggttattg

SEQ ID NO: 554150 - DNA, 75 bp, synthetic construct
  source 1..75: mol_type = other DNA
atacggcgtacatggtcgaccaggtcgcgacatttgctaaaagcgtagctttcgacgatgcgctaattaaagcgg

SEQ ID NO: 554151 - DNA, 75 bp, synthetic construct
  source 1..75: mol_type = other DNA
gtgaaatggtgctgtttatgggcttcgctaagtctggtaaatcgacggcgatgggggagttttccatcaacgcca

SEQ ID NO: 554152 - DNA, 75 bp, synthetic construct
  source 1..75: mol_type = other DNA
gcttccccttcattccgatgacaaaaaaaggcaagatgcactatttgctaatgcatttagattatatgaaatttt

SEQ ID NO: 554153 - DNA, 75 bp, synthetic construct
  source 1..75: mol_type = other DNA
tgccagcgatcgttatcgtacgcagttagagaatactgaaattcagtggctggaagcgcaacgccgtcaatctga

SEQ ID NO: 554154 - DNA, 75 bp, synthetic construct
  source 1..75: mol_type = other DNA
aagagcagagaatgcagcccggattgcagaagatgccgctgatcctgcttcagtccctccgcttcctgatatctg

SEQ ID NO: 554155 - DNA, 75 bp, synthetic construct
  source 1..75: mol_type = other DNA
ctgcggagccgtataaacaagttttgcagccgcttcccgatgtgtggataccgtttaacgattcactggatatga

SEQ ID NO: 554156 - DNA, 75 bp, synthetic construct
  source 1..75: mol_type = other DNA
gctgcttctgccactgcatcagccaacagtcaaaaagctgcaaaaaccagtgaaaccaacgcaaaggcgagcgag

SEQ ID NO: 554157 - DNA, 75 bp, synthetic construct
  source 1..75: mol_type = other DNA
cacgggcattccattaccgtaaatgctactggtaataccgaaaacaccgtcaaaaacatcgcatttaactatatt

SEQ ID NO: 554158 - DNA, 75 bp, synthetic construct
  source 1..75: mol_type = other DNA
acgacgaaagcgtcagaagccgccacttcagcccgggatgcggcggcctcaaaagaggcagcgaaatcatcagaa

SEQ ID NO: 554159 - DNA, 75 bp, synthetic construct
  source 1..75: mol_type = other DNA
gcgaaactgcggcaaaaaacagtcaggatgcagcggcccaaagcgagagtgccgcagctggttctgcaagtgcgg

SEQ ID NO: 554160 - DNA, 75 bp, synthetic construct
  source 1..75: mol_type = other DNA
aaaagtggcggcaaaatcatcagaaacgagcgctgcctcgagcgccggcagtgcagcttcctcggcaacggcggc

SEQ ID NO: 554161 - DNA, 75 bp, synthetic construct
  source 1..75: mol_type = other DNA
tgccgctgaatccgcggcaacgcgcgccgagacagcagcaaaacgggcagaggatattgcatccgccgtggcgct

SEQ ID NO: 554162 - DNA, 75 bp, synthetic construct
  source 1..75: mol_type = other DNA
ttcggccgaatccgcggcaacgcgcgccgagacagcagcaaaacgggcagaggatattgcatccgccgtggcgct

SEQ ID NO: 554163 - DNA, 75 bp, synthetic construct
  source 1..75: mol_type = other DNA
agctaaagcaagcgaagatgcagccagagagtacgcaagccaggctgcggagccgtataaatatgtcttacagcc

SEQ ID NO: 554164 - DNA, 75 bp, synthetic construct
  source 1..75: mol_type = other DNA
tgccaaagccagtgaaactgcggcaaaaaacagccaggttgcagcagcccaaagcgagagcgcggcagccggttc

SEQ ID NO: 554165 - DNA, 75 bp, synthetic construct
  source 1..75: mol_type = other DNA
agttatacgaggcgtataacaacggatatccaacaacgtatggaaatatcattcacctgaaagggatgacagccg

SEQ ID NO: 554166 - DNA, 75 bp, synthetic construct
  source 1..75: mol_type = other DNA
aagtcggtaaaggcagcctatgaccttgctaacgggaaatataccgctcaggacgctacgacagcacaaaaagga

SEQ ID NO: 554167 - DNA, 75 bp, synthetic construct
  source 1..75: mol_type = other DNA
ctgatgcgtgtaaaaaggcttatgatgcgaataacggtagaaacaacataaaggtaagatacacattaagttatt

SEQ ID NO: 554168 - DNA, 75 bp, synthetic construct
  source 1..75: mol_type = other DNA
atgtaaatatccagtttaaccacgatgtttctcctgctggacttgcggatgaactcactgctataaaaacggcaa

SEQ ID NO: 554169 - DNA, 75 bp, synthetic construct
  source 1..75: mol_type = other DNA
ttcgcgaccgggatgacaaaaagcgtaattttgaaattattgccggcaagtctttttccgttggagcgccagctg

SEQ ID NO: 554170 - DNA, 75 bp, synthetic construct
  source 1..75: mol_type = other DNA
atgcgcgctttgctaccctatctggctctgtataaacgtcataaatggatgttaagccttggtattgtgctggcg

SEQ ID NO: 554171 - DNA, 75 bp, synthetic construct
  source 1..75: mol_type = other DNA
gcatcagatgcgtgtaaacaggcttatgatgcgaataatggtagaaacaacataaagataagatacacattaagt

SEQ ID NO: 554172 - DNA, 75 bp, synthetic construct
  source 1..75: mol_type = other DNA
gtcgcatcaactctgtgtaaaaacgctgagaatcaggtaggtggtaataacataaaggtaagatacacattacga

SEQ ID NO: 554173 - DNA, 75 bp, synthetic construct
  source 1..75: mol_type = other DNA
aacatgccgtgctcttgttgagtgcctaaacaagttaggcgcaaaagtcagtcttgatgacgtgttcccgccgga

SEQ ID NO: 554174 - DNA, 75 bp, synthetic construct
  source 1..75: mol_type = other DNA
ttgcaggcatttcctaacggttcgccgcgtgcaccggtcgcgggtgcgcttcttatctgggataaaggcggtgaa

SEQ ID NO: 554175 - DNA, 75 bp, synthetic construct
  source 1..75: mol_type = other DNA
tggtgatacttacgatatttacgttgcaatcggaaattatgcgactggtgtaaatattcaatgggattataccag

SEQ ID NO: 554176 - DNA, 75 bp, synthetic construct
  source 1..75: mol_type = other DNA
gacccgtctgctgaaagatattctgccggtgggtcacagcctgaatgcttcaacggtgaggaatcatttatgcca

SEQ ID NO: 554177 - DNA, 75 bp, synthetic construct
  source 1..75: mol_type = other DNA
tacagacccggaccgccgttttgaataacgaactgcaggataaatttgtctgctggtatccgggttttcaaagtg

SEQ ID NO: 554178 - DNA, 75 bp, synthetic construct
  source 1..75: mol_type = other DNA
atgcatatttgacttatatggggctggggctttgttacagcctggtcaatataccttatggctcactggcaactg

SEQ ID NO: 554179 - DNA, 75 bp, synthetic construct
  source 1..75: mol_type = other DNA
aacggtgccttcgctgaactccctgacaccaccgacggtcagtcagggggtgagcggtgaagccctgctgaatga

SEQ ID NO: 554180 - DNA, 75 bp, synthetic construct
  source 1..75: mol_type = other DNA
gatattagccgagcaaatgcgttaacgtcagcatatgcaccaacagcagcaatgcagaattacaatcagtacgct

SEQ ID NO: 554181 - DNA, 75 bp, synthetic construct
  source 1..75: mol_type = other DNA
gttgttccgggtataggtaatgtcgccggggctattggtggtgggcttattggtcttgttgggggggcttggatt

SEQ ID NO: 554182 - DNA, 75 bp, synthetic construct
  source 1..75: mol_type = other DNA
ttggtccaattgattacttcaatgttcaggacaagatggctggtcgtgagattgatcgcgggaaacttgcagaga

SEQ ID NO: 554183 - DNA, 75 bp, synthetic construct
  source 1..75: mol_type = other DNA
ttttaaacagtgaaagccagctgccagacagcggcagtgaggaccaggtcgcgacgctgattaccacgttgggaa

SEQ ID NO: 554184 - DNA, 75 bp, synthetic construct
  source 1..75: mol_type = other DNA
cagtatcagcagcagccaaacgtaggtttaatggcgctacaggggctaagaggcgttgctgagattaatcagcag

SEQ ID NO: 554185 - DNA, 75 bp, synthetic construct
  source 1..75: mol_type = other DNA
tcaggcgagagggcaggatattagccgagcaaatgcgttaacgtcagcatatgcaccaacagcagcaatgcagaa

SEQ ID NO: 554186 - DNA, 75 bp, synthetic construct
  source 1..75: mol_type = other DNA
cccatctggacgatcagggacggtaccgggtgaagctggactttgaccgcaacagtactgaacagggttatgcct

SEQ ID NO: 554187 - DNA, 75 bp, synthetic construct
  source 1..75: mol_type = other DNA
cgtggagtcggcactagtgccgacacgctaaaactgaacagtcgggcgacggacgttggcgcagcacaggcaaag

SEQ ID NO: 554188 - DNA, 75 bp, synthetic construct
  source 1..75: mol_type = other DNA
tttgaagaaacgacgctttcggcgatcgccagccgtattgcccaaacgcacggtctgaaactggtgggcaaaatc

SEQ ID NO: 554189 - DNA, 75 bp, synthetic construct
  source 1..75: mol_type = other DNA
aaaagaagactgctgcgccgtttgtcgtcacatttatcttcattggctatgcaagtcataatacaaggtgggaca

SEQ ID NO: 554190 - DNA, 75 bp, synthetic construct
  source 1..75: mol_type = other DNA
ccgaggaaaaagccttcaacatactcgaacgactggaggcgctcgccacagaggaagaaatcgccccggagaaac

SEQ ID NO: 554191 - DNA, 75 bp, synthetic construct
  source 1..75: mol_type = other DNA
ttgaacaacagaacaatcactgtttcaccggaacaacttcgtcggcaggcgcaggagatgcttcgttgtgctgaa

SEQ ID NO: 554192 - DNA, 75 bp, synthetic construct
  source 1..75: mol_type = other DNA
gcagcatcgccgtggaatcggaacccgggattttcacacaattttttgtccagataccctgggacggggagaggt

SEQ ID NO: 554193 - DNA, 75 bp, synthetic construct
  source 1..75: mol_type = other DNA
aaaaaacagaaaacattgcaagaattgcagcgttatttcagtatttcagctatggtgaagggaaaatctctgccg

SEQ ID NO: 554194 - DNA, 75 bp, synthetic construct
  source 1..75: mol_type = other DNA
atgtcattcggtcagccttgtgatgagtttcccctgagtgcgctgcctccactcattcgtgatgccgttattgaa

SEQ ID NO: 554195 - DNA, 75 bp, synthetic construct
  source 1..75: mol_type = other DNA
ctcagacaactggaagcgcttcagaaaaacagaggggaaaaacctgtaagatataaattcatttttaatgatgcc

SEQ ID NO: 554196 - DNA, 75 bp, synthetic construct
  source 1..75: mol_type = other DNA
cattcatgcgcgcgctatttgcaggcaaaacagccgataacgcagatacagccatactggaaagcgccaaagatt

SEQ ID NO: 554197 - DNA, 75 bp, synthetic construct
  source 1..75: mol_type = other DNA
aaaagcacgccgcaaagcgcatacatccgtagcgaatatcaaccgcaaaaaatcaatgcgcattcgcaaaaaacg

SEQ ID NO: 554198 - DNA, 75 bp, synthetic construct
  source 1..75: mol_type = other DNA
gacgacattgaaaccgcgatgatggaagcggttgaatcccgtgcacaaggtgatatgcgcagcctggcagcgtcc

SEQ ID NO: 554199 - DNA, 75 bp, synthetic construct
  source 1..75: mol_type = other DNA
tggccgcagcgatcaaagcggtatccgattccggcgttccctgttatttcattcatggcaaccgtgattttctgc

SEQ ID NO: 554200 - DNA, 75 bp, synthetic construct
  source 1..75: mol_type = other DNA
caggcatttcgcgccaaagtccacaagccgtggctgcaaacgctattcctcgccctgccgttgtttgtgcgcaaa

SEQ ID NO: 554201 - DNA, 75 bp, synthetic construct
  source 1..75: mol_type = other DNA
atgactgtacgtcttgcttcagtttcaattagcaactttcgttcttgtaaggcaacatcggctattttgcgcccc

SEQ ID NO: 554202 - DNA, 75 bp, synthetic construct
  source 1..75: mol_type = other DNA
aaagaagactgctgcgccgtttgtcgtcacgtttatcttcattggctatgcaagtcgtaatacaaggtgggacaa

SEQ ID NO: 554203 - DNA, 75 bp, synthetic construct
  source 1..75: mol_type = other DNA
caaaaaaatacgcttctggtgctgtctcatgaatctcgcgcactccaggaagtaaccctggttgcgaggttatcg

SEQ ID NO: 554204 - DNA, 75 bp, synthetic construct
  source 1..75: mol_type = other DNA
tggcatgacgttattgccggaagaaaaagtgctcgaactttatggtcgtcgggtgttgattatgcatggcgacac

SEQ ID NO: 554205 - DNA, 75 bp, synthetic construct
  source 1..75: mol_type = other DNA
tctactcacagttttgtgcgcagcggctataccactgaaatcgacgtgtcacgcgggccagcgaccagccagtaa

SEQ ID NO: 554206 - DNA, 75 bp, synthetic construct
  source 1..75: mol_type = other DNA
atgaaacctcgtcagcgtcaggccgccattctggagtatctgcaaaagcagggtaaatgctcggttgaagaattg

SEQ ID NO: 554207 - DNA, 75 bp, synthetic construct
  source 1..75: mol_type = other DNA
ttgaaacggccctacgtaccacccgacgctggtcgctggcagattttcattctctgtttgttaatcatcccttta

SEQ ID NO: 554208 - DNA, 75 bp, synthetic construct
  source 1..75: mol_type = other DNA
tttgcagcagtcacttgaaaaggccatagaggcactaggaaacaaggatgctggaaccattgataagttgatctc

SEQ ID NO: 554209 - DNA, 75 bp, synthetic construct
  source 1..75: mol_type = other DNA
taaggcgatgtgtaatgccgcgcgcgaagtgattttgatggctgactcatcgaagtttggtcgtaaaagccccaa

SEQ ID NO: 554210 - DNA, 75 bp, synthetic construct
  source 1..75: mol_type = other DNA
ctgccgttggttttattcatgatggcgactcaataattcttgatgctggcagtaccgtgttgcagatggtgcccc

SEQ ID NO: 554211 - DNA, 75 bp, synthetic construct
  source 1..75: mol_type = other DNA
cgttcaacgaggtttataccgtcagtaaggcaatgtgcaatgccgcgcgcgaagtgattttgatggcggactcat

SEQ ID NO: 554212 - DNA, 75 bp, synthetic construct
  source 1..75: mol_type = other DNA
agaaattgaggctgccacgccgaaggcggtcaaggctgcatacgaccttgcagccggcaaggcgcccgtcagcca

SEQ ID NO: 554213 - DNA, 75 bp, synthetic construct
  source 1..75: mol_type = other DNA
ggtagcggcgagagcatcagcaaaaccacaactggcgacggttttatcgccgttaataaccaggcaaactatggc

SEQ ID NO: 554214 - DNA, 75 bp, synthetic construct
  source 1..75: mol_type = other DNA
gcaatgggaagtcagtctgctattcgaaataatggcattgttaacacaaccgatgctcaggaattaatgatggcg

SEQ ID NO: 554215 - DNA, 75 bp, synthetic construct
  source 1..75: mol_type = other DNA
taaaaatctctcttaggtatgacggaaaagatgctttaaatcatgaaatagatttgaactgcctaggagaatccc

SEQ ID NO: 554216 - DNA, 75 bp, synthetic construct
  source 1..75: mol_type = other DNA
tccaccggcaccgagatcgcaggtaataacgccaccgttactcaggaaggtgaactcacggttagcagcggcggc

SEQ ID NO: 554217 - DNA, 75 bp, synthetic construct
  source 1..75: mol_type = other DNA
agttaacctcacgcaaatacatggagtttgatggtagccaggagaatatttctgggcttaccgtgtctggcgatg

SEQ ID NO: 554218 - DNA, 75 bp, synthetic construct
  source 1..75: mol_type = other DNA
cgatcataaaacgcttatcaacacccacaagaaagagctgattgcagaagctgccgttggttttattcatgatgg

SEQ ID NO: 554219 - DNA, 75 bp, synthetic construct
  source 1..75: mol_type = other DNA
gtccgtaaaagccagcatgtcgcagggtttcagaattatcaggccactatcgatggtaaagagattacaggagta

SEQ ID NO: 554220 - DNA, 75 bp, synthetic construct
  source 1..75: mol_type = other DNA
ttttacgaaaaccgctcgtcggttacagacgttgagaaaatggagttgccaatgagttttaactggttggttgtt

SEQ ID NO: 554221 - DNA, 75 bp, synthetic construct
  source 1..75: mol_type = other DNA
ttgcgatggatgcctctggcaatatttatatcgttggcgaaccgaatcgtttttatcgctttacccctacatcat

SEQ ID NO: 554222 - DNA, 75 bp, synthetic construct
  source 1..75: mol_type = other DNA
atcgcaattacactggatgacacagatggacgctggataaaagagtggtatcccggcaaaggcgatacgctggcg

SEQ ID NO: 554223 - DNA, 75 bp, synthetic construct
  source 1..75: mol_type = other DNA
ggtactggatgatctccaacattccattaagtttacgtattggtatcaccagcggaatcggattatttatcgcct

SEQ ID NO: 554224 - DNA, 75 bp, synthetic construct
  source 1..75: mol_type = other DNA
aatagatttcttggcaacgacgacgccacttcttgcgtttgccggtctgtctgttgggaacagtattgacaaact

SEQ ID NO: 554225 - DNA, 75 bp, synthetic construct
  source 1..75: mol_type = other DNA
aatgggcagcaaaaatcaccagcatcccggcagaaaaaattatccagttggcacgagagatcggttcagcaaaac

SEQ ID NO: 554226 - DNA, 75 bp, synthetic construct
  source 1..75: mol_type = other DNA
aaacagcctaagttattaaaaataagaatgattcttcaacttttggagatggaatcattaagcgtaaaaaggctg

SEQ ID NO: 554227 - DNA, 75 bp, synthetic construct
  source 1..75: mol_type = other DNA
accgacttcccagtggccgccttaagtcttatcgtcgtgtaggttcacattttgccagttgtgccagatggtttg

SEQ ID NO: 554228 - DNA, 75 bp, synthetic construct
  source 1..75: mol_type = other DNA
tgaacgcgattatgccatttatgtgatttcacttaatgaaaagtcagaagtaaaaatcctcaaaaaaataaaaat

SEQ ID NO: 554229 - DNA, 75 bp, synthetic construct
  source 1..75: mol_type = other DNA
aacgtatcagcattattattctttttgccattgtggcagtgtgtgctttcttcgtgcaatcttgcgctcgcaaaa

SEQ ID NO: 554230 - DNA, 75 bp, synthetic construct
  source 1..75: mol_type = other DNA
cgcgatgagttatatgttcggtgccaatgatggcaacagcccggatgatatcgccaatacgaaactggtcgttat

SEQ ID NO: 554231 - DNA, 75 bp, synthetic construct
  source 1..75: mol_type = other DNA
agactgactcttatacctcgttactttacacgggtggcgatgtaatcactgcgcagaatgaaacacaaaatctga

SEQ ID NO: 554232 - DNA, 75 bp, synthetic construct
  source 1..75: mol_type = other DNA
gcattatgctgattacactttgcctgatgtacctgactcgtcggtttctgttgcggccagcaccccgtccagtga

SEQ ID NO: 554233 - DNA, 75 bp, synthetic construct
  source 1..75: mol_type = other DNA
tcggtatgttggccatcgatgaaagtacggcagaaaacgcggggcagattacactggatgcactgtgggttgatg

SEQ ID NO: 554234 - DNA, 75 bp, synthetic construct
  source 1..75: mol_type = other DNA
tgccgggttcccgccgcgaagtgaaaaacgcgcgggaagaaggcgtagagttcaaattcaacgtccagccactgg

SEQ ID NO: 554235 - DNA, 75 bp, synthetic construct
  source 1..75: mol_type = other DNA
cctgtacgagaacagggaagcagtttcaccagtggagcagtctgaactgcctatggctatttctgcgctctggtc

SEQ ID NO: 554236 - DNA, 75 bp, synthetic construct
  source 1..75: mol_type = other DNA
aacaacagcggcaataccaccgtagacggtcagggttcgaccggaactgaaatcgcgggtaataacgcggtggtg

SEQ ID NO: 554237 - DNA, 75 bp, synthetic construct
  source 1..75: mol_type = other DNA
aacggtgctattgcaaacacgacaggagcgataactgtagcggatacggactctgtcggtattcaggttgacggt

SEQ ID NO: 554238 - DNA, 75 bp, synthetic construct
  source 1..75: mol_type = other DNA
ataacaatgtcactctggacggtaagttaacggttgttgctgacagtgaacttactacacgcaattctgctggcg

SEQ ID NO: 554239 - DNA, 75 bp, synthetic construct
  source 1..75: mol_type = other DNA
agtctggaatacggtattgcgcgtctggagggtaatggttcagataccgcaggcgataatggtgtgactggcggt

SEQ ID NO: 554240 - DNA, 75 bp, synthetic construct
  source 1..75: mol_type = other DNA
gtggataacaaaggcggtatgaccgtcaccgatccggattcgattggcattcagatcgacggcgacaaggcggtt

SEQ ID NO: 554241 - DNA, 75 bp, synthetic construct
  source 1..75: mol_type = other DNA
acgcgaccgcgaacaacagcggcaaaaccattgtcgacggcaaagattccaccggtaccgaaatcgcgggcaaca

SEQ ID NO: 554242 - DNA, 75 bp, synthetic construct
  source 1..75: mol_type = other DNA
agccaggagagtgcattgcaggtagatgcattccactggaaagaagacggcatcagtgataaaggtgtgatgcta

SEQ ID NO: 554243 - DNA, 75 bp, synthetic construct
  source 1..75: mol_type = other DNA
cgcaccagaccaacactctgccggaagtatgcggacgtgtctgcccgcaagaccgtctgtgcgaaggttcctgca

SEQ ID NO: 554244 - DNA, 75 bp, synthetic construct
  source 1..75: mol_type = other DNA
ttacccgaaagcgagcagggttatgtgttcgtgctggaggagagcgagacaggcaccgtggcgggtatttgcgcc

SEQ ID NO: 554245 - DNA, 75 bp, synthetic construct
  source 1..75: mol_type = other DNA
atgatggtcatccgtcccgttgagcgtaccgatgtcgcagccttaatgcagcttgcaggtaaaacgggcggtggc

SEQ ID NO: 554246 - DNA, 75 bp, synthetic construct
  source 1..75: mol_type = other DNA
atcgagcatgtatttccgacctatgctgatgagcaatgtactcatgttcttaccgaagaggattttttcagcact

SEQ ID NO: 554247 - DNA, 75 bp, synthetic construct
  source 1..75: mol_type = other DNA
atcccaggaagcgcaagacgttatcggtcaggtacatccgcaaacggcacccgcgcgggcggtgctggaaaaaga

SEQ ID NO: 554248 - DNA, 75 bp, synthetic construct
  source 1..75: mol_type = other DNA
gccgaaacatccgatctatacccactttttatcccaggaagcccaggacgtcatcggtcaggtacatccgcaaac

SEQ ID NO: 554249 - DNA, 75 bp, synthetic construct
  source 1..75: mol_type = other DNA
cgccaatgaaaattatcaccattttcgtgtggtgctggtgcgtgccgatccggctaccgagcgtttgattttaac

SEQ ID NO: 554250 - DNA, 75 bp, synthetic construct
  source 1..75: mol_type = other DNA
aagaggccaaacttcactgccgcatagatggtaacacagaagacacactgattcaggcatacataagcgcggcgc

SEQ ID NO: 554251 - DNA, 75 bp, synthetic construct
  source 1..75: mol_type = other DNA
caagctggaaaaagaggtgatgacgcgccgccgtgaaatcttcaccggcatgggtattgaattcaaactcaatac

SEQ ID NO: 554252 - DNA, 75 bp, synthetic construct
  source 1..75: mol_type = other DNA
caacggcgtaaaagcggttgtcttcgaccgtcacccggaaattggcggattgctgaccttcggtattccggcctt

SEQ ID NO: 554253 - DNA, 75 bp, synthetic construct
  source 1..75: mol_type = other DNA
tcagtgatgcggaattcgctgaaaacccggaacagcgttgcccggtagttctgcttctggacacctcctattcaa

SEQ ID NO: 554254 - DNA, 75 bp, synthetic construct
  source 1..75: mol_type = other DNA
tttattccgcttgccatcgacggtctggcaaaggatgtactcggtagacgctttgcgctggaagggcatccacgg

SEQ ID NO: 554255 - DNA, 75 bp, synthetic construct
  source 1..75: mol_type = other DNA
caatgggtgatgctatcaattcgcccattaaccccattagaagctttaggatatgttattgcaggaggtgctgta

SEQ ID NO: 554256 - DNA, 75 bp, synthetic construct
  source 1..75: mol_type = other DNA
atgagtgaagaaaaaattacacctgatgaagtcagggcacatcttcgccttgatgacttctcaggtgagggcgaa

SEQ ID NO: 554257 - DNA, 75 bp, synthetic construct
  source 1..75: mol_type = other DNA
cgaggcaggctggcagagacaatccgcagcaatcaggccggagaagcactaacagctcgaggtcaggacatccag

SEQ ID NO: 554258 - DNA, 75 bp, synthetic construct
  source 1..75: mol_type = other DNA
tacctaaaaaagatcaagataatgaacattgggtatccatgtcagacctaatggcagggctgatgatggttttta

SEQ ID NO: 554259 - DNA, 75 bp, synthetic construct
  source 1..75: mol_type = other DNA
acagcgcttgattctctcaacgagatagagcaaagccccggcctttcaaaagcagtaggaattcgctcagcgttt

SEQ ID NO: 554260 - DNA, 75 bp, synthetic construct
  source 1..75: mol_type = other DNA
tgaaggaagattacatcgcgttcacacccaaactgagtgtaagtaaccttacaatggcgatcgaacattgcaatg

SEQ ID NO: 554261 - DNA, 75 bp, synthetic construct
  source 1..75: mol_type = other DNA
gcccattatgggcggcagccgcaggctatgactttaattatatggattgcatgtcttataccgccaatgcatacg

SEQ ID NO: 554262 - DNA, 75 bp, synthetic construct
  source 1..75: mol_type = other DNA
atctggtggtgatcagaggaaactatacaacgctgcacagcgaatccaaggaaagatgcagaatcagggcattgc

SEQ ID NO: 554263 - DNA, 75 bp, synthetic construct
  source 1..75: mol_type = other DNA
cagcagtcgattcgtgagattcaggaatacaccaacaattacaaccaacaatataacgttaatgttggtaaatct

SEQ ID NO: 554264 - DNA, 75 bp, synthetic construct
  source 1..75: mol_type = other DNA
gaccagattgaatccgttcgtaaaggcatgggattcattgatgaagagcagcgtaattctatcggcaccttagcg

SEQ ID NO: 554265 - DNA, 75 bp, synthetic construct
  source 1..75: mol_type = other DNA
atgataaaaaaacctgtgattgggatcagcggttgtttgggcggttctgctgttcgttttgatggtggtcacaaa

SEQ ID NO: 554266 - DNA, 75 bp, synthetic construct
  source 1..75: mol_type = other DNA
gttcgcagccgattaacaggaaaagagcagcgccagttatataactcagcacagcgtattcagggcagaatgcag

SEQ ID NO: 554267 - DNA, 75 bp, synthetic construct
  source 1..75: mol_type = other DNA
gcagatggatcagcagaagcgacagcaagagtttcagcaggcttatgctgatgcatatacatctggtgaccgcga

SEQ ID NO: 554268 - DNA, 75 bp, synthetic construct
  source 1..75: mol_type = other DNA
ttcaatgttcaggacaagatggcaggtcgtgagattgaccgaggcaggctggcagagacaatccgcagcaatcag

SEQ ID NO: 554269 - DNA, 75 bp, synthetic construct
  source 1..75: mol_type = other DNA
tcaccattacatttttgaatacccagtaaaatctgcagggttgacgcttggtgggttggggaatgacgtcggttg

SEQ ID NO: 554270 - DNA, 75 bp, synthetic construct
  source 1..75: mol_type = other DNA
atcatcaaagaaccttggcgaatacttcactgaaaacaaacccaaatatataatcagagaaatacaccaagaaac

SEQ ID NO: 554271 - DNA, 75 bp, synthetic construct
  source 1..75: mol_type = other DNA
tgtttctgagaaatgagttgaaagaacataacaaacaattggttgaaccgccccgggaatcctggagactaaact

SEQ ID NO: 554272 - DNA, 75 bp, synthetic construct
  source 1..75: mol_type = other DNA
cgcccggacatcaaagctggtattcgagtgctggccgatgcttacaagcgtggcgactatgttccgccgatcatc

SEQ ID NO: 554273 - DNA, 75 bp, synthetic construct
  source 1..75: mol_type = other DNA
atgctcgcgaaaggtgtggtttatgatacctggccacaggcattaattgccagagaagcagaattccctaccggg

SEQ ID NO: 554274 - DNA, 75 bp, synthetic construct
  source 1..75: mol_type = other DNA
actcaacatactgcttctctgcattaagagccatagaaggctttatatatcaaatacttaatgatgtttgcaatc

SEQ ID NO: 554275 - DNA, 75 bp, synthetic construct
  source 1..75: mol_type = other DNA
atgagaacaggcatggtttgtttcatatgaaaccaggaatagctgacacgaagacaattaacaaattagaatcaa

SEQ ID NO: 554276 - DNA, 75 bp, synthetic construct
  source 1..75: mol_type = other DNA
tttgaatggcccggtacacagtttccgctttgaattcggccctggtgtgcgttacgacaaatataccgacaatgc

SEQ ID NO: 554277 - DNA, 75 bp, synthetic construct
  source 1..75: mol_type = other DNA
tctctgggactatctcaaaggaaaagaacgaatagcaggctatcttcgcccatataacacgtctatgcgttatga

SEQ ID NO: 554278 - DNA, 75 bp, synthetic construct
  source 1..75: mol_type = other DNA
cgccggatcagtttcgacgtttaatctctgagatccttgaacggcatttcctgggcgatcaggacaggatcaaag

SEQ ID NO: 554279 - DNA, 75 bp, synthetic construct
  source 1..75: mol_type = other DNA
tgactgcgggttatggtcgccagtttttgaatggcccggtacacagcttccgctttgaattcggtcctggcgtgc

SEQ ID NO: 554280 - DNA, 75 bp, synthetic construct
  source 1..75: mol_type = other DNA
gttacatggaactctgaacctccagagtctgcaccggaacatgtaaaattatctgccggaccgtgttatgcggtc

SEQ ID NO: 554281 - DNA, 75 bp, synthetic construct
  source 1..75: mol_type = other DNA
ggcgggcgtagccgttttaatttaactgattatgactatttatttggtcaggcaagctggctgacagaccgttat

SEQ ID NO: 554282 - DNA, 75 bp, synthetic construct
  source 1..75: mol_type = other DNA
atgaaggagtcgtccgttaatatttttctgctgattattttgtctttcctttttttatttatatcagcacagggg

SEQ ID NO: 554283 - DNA, 75 bp, synthetic construct
  source 1..75: mol_type = other DNA
atttatcccccggcagcatcagaaacctgtcggaggtaagggtatttctgtacctcttgttctcgagcaacagat

SEQ ID NO: 554284 - DNA, 75 bp, synthetic construct
  source 1..75: mol_type = other DNA
ttccggcctgacaagaggaaatttaaaataattttccgaccgcgcattttttattctttatgcttatttcagcgt

SEQ ID NO: 554285 - DNA, 75 bp, synthetic construct
  source 1..75: mol_type = other DNA
ccggaaaaaaaagacaaccgggagaagctgtattatatctccgtttcatttattccccgacagcagaaagcagtt

SEQ ID NO: 554286 - DNA, 75 bp, synthetic construct
  source 1..75: mol_type = other DNA
agctgtattacatctccgtttcatttattccccgacagcagaaagcagttgtgagggaagaagtttctgtgcctc

SEQ ID NO: 554287 - DNA, 75 bp, synthetic construct
  source 1..75: mol_type = other DNA
ttcacggtttataacgacacagacaacgagtatgtcatcacagcacgggttatcaggtcagatggccagggagag

SEQ ID NO: 554288 - DNA, 75 bp, synthetic construct
  source 1..75: mol_type = other DNA
tggctgattttaattcttcaacaatcactcaaccctcttcacaacaggagcaaagaagtgatgaagagacaaaaa

SEQ ID NO: 554289 - DNA, 75 bp, synthetic construct
  source 1..75: mol_type = other DNA
agagcattgccgggatgtcctggctggttctgctgatcattgctggttggggcggccttgtccgattcctgatgg

SEQ ID NO: 554290 - DNA, 75 bp, synthetic construct
  source 1..75: mol_type = other DNA
cgcctggctgtggtggaaatggttgtcgcggcgggtgcgcgaacaaaagcacagcgacagtcatttaaaccagcg

SEQ ID NO: 554291 - DNA, 75 bp, synthetic construct
  source 1..75: mol_type = other DNA
cactcaatcctcttcacaaaaagagcaaaaaagtgatgaagagacccaaaagaacgtgatgaagctaataaacca

SEQ ID NO: 554292 - DNA, 75 bp, synthetic construct
  source 1..75: mol_type = other DNA
agatggtcgattttaactcttcatctcaatcttcttcacaacaagatcaaaaaagtgatgaagaaaccaaaaaaa

SEQ ID NO: 554293 - DNA, 75 bp, synthetic construct
  source 1..75: mol_type = other DNA
cgtgtttgccgttgttccgtgtcagtggtggcgcattatagggagttattccggcctgacaagaggaaatttaaa

SEQ ID NO: 554294 - DNA, 75 bp, synthetic construct
  source 1..75: mol_type = other DNA
cttaaccattctctgcgcgttttcacctgtgatttcaaagttgaggcgaatgaacgtgattcatttgaaaaattt

SEQ ID NO: 554295 - DNA, 75 bp, synthetic construct
  source 1..75: mol_type = other DNA
agcagcaaagaaagttcgctgaatctggatgcgtacaactggaaagaggacggcatcagcgacaaaggcgtgatg

SEQ ID NO: 554296 - DNA, 75 bp, synthetic construct
  source 1..75: mol_type = other DNA
cgattgcatttagcaacacgaacaaaacggctgataccgacgtgaagcagcagtacctggagttccgtagcgaag

SEQ ID NO: 554297 - DNA, 75 bp, synthetic construct
  source 1..75: mol_type = other DNA
atatcaacaattccggtacgctttataacactggtcatatggacatcagtaattcctcccacaatggggctgtca

SEQ ID NO: 554298 - DNA, 75 bp, synthetic construct
  source 1..75: mol_type = other DNA
tggcgtgacaggatcggggctgattaagcagggcgacagcgtcaatgttgaaggcgtgaacggtaacaacggtaa

SEQ ID NO: 554299 - DNA, 75 bp, synthetic construct
  source 1..75: mol_type = other DNA
ccctgaacaacgatggcaaaactaccgcgattggtgaagcttcggtggtaggtattcttaccggtgatgatatca

SEQ ID NO: 554300 - DNA, 75 bp, synthetic construct
  source 1..75: mol_type = other DNA
cagatgagggcgtgacgaagcagcaagagaaccagctgttcgcggtgggtgcaattaatagtggtatggcaatta

SEQ ID NO: 554301 - DNA, 75 bp, synthetic construct
  source 1..75: mol_type = other DNA
caccagtaccgccggacgatggcggcgacaccccggtaccgccggacgatggcggcgacacaccagtaccaccgg

SEQ ID NO: 554302 - DNA, 75 bp, synthetic construct
  source 1..75: mol_type = other DNA
ttggcgaacaactggatagtttcatcacccggatggtccagtctggtcgttatggttcggccagtgaagtgatgc

SEQ ID NO: 554303 - DNA, 75 bp, synthetic construct
  source 1..75: mol_type = other DNA
ggcgattttcctgaatacgaactgggcttccagttgattcctgaagaagacgaattcaagttcgacttcgatctt

SEQ ID NO: 554304 - DNA, 75 bp, synthetic construct
  source 1..75: mol_type = other DNA
cgtgattgatatgtatggtcgagggaacattggcatgacggcaatagacaactcgacggctgagaatgcaggcaa

SEQ ID NO: 554305 - DNA, 75 bp, synthetic construct
  source 1..75: mol_type = other DNA
cacaaccttgacagcagccgctcgattgcatttagcaacacgaacaaaacggctgataccgacgtgaagcagcag

SEQ ID NO: 554306 - DNA, 75 bp, synthetic construct
  source 1..75: mol_type = other DNA
aaaaccaccgcaattggcgaaggctcagtggtcggtatcctgaccggcgacgatatcaccatcaataataatggt

SEQ ID NO: 554307 - DNA, 75 bp, synthetic construct
  source 1..75: mol_type = other DNA
cggtcaacaattgatcggcagacggtttgtactggaatcaccgctggtcaatgggcgaggtcatatgcgcgtcgg

SEQ ID NO: 554308 - DNA, 75 bp, synthetic construct
  source 1..75: mol_type = other DNA
tgatgcacgccgaagacgcactggcatacagcaatcaggctctggctatgctggaaatctggatggactccctcg

SEQ ID NO: 554309 - DNA, 75 bp, synthetic construct
  source 1..75: mol_type = other DNA
aacgtgtaggcatccgctcaacaagatttgagtcggcaaaatcctatctggattggggcgagaaattagatacac

SEQ ID NO: 554310 - DNA, 75 bp, synthetic construct
  source 1..75: mol_type = other DNA
aactgaaagagcatgaacagtcacgacgtcacccggacgcctcgctgaccgcaaaaggctttgttcaacttagca

SEQ ID NO: 554311 - DNA, 75 bp, synthetic construct
  source 1..75: mol_type = other DNA
aaaacatcgcaagaacgctgtatgcttacgcgactggtaacgaaatttacctgttacatgcatttgtaaaaaaga

SEQ ID NO: 554312 - DNA, 75 bp, synthetic construct
  source 1..75: mol_type = other DNA
cctcattaatgagggtaccaagacttcagtgctgggagtgtttaagtttagagccgtattaaaccttgcaatgct

SEQ ID NO: 554313 - DNA, 75 bp, synthetic construct
  source 1..75: mol_type = other DNA
tcgttatcgacacactggcagaacgcgctggcggacatacaaaatttatcaaccaaagagatgaagattatcttg

SEQ ID NO: 554314 - DNA, 75 bp, synthetic construct
  source 1..75: mol_type = other DNA
aaagatgttcgacttggttcacagcaatattatggagtgaacaactggcaaacatggaatttccagtgcccgtca

SEQ ID NO: 554315 - DNA, 75 bp, synthetic construct
  source 1..75: mol_type = other DNA
ctgactgggcaaagattggatttaaaaatgatgccgacagcgatactgattcatacatgtggtttgaaacaggcg

SEQ ID NO: 554316 - DNA, 75 bp, synthetic construct
  source 1..75: mol_type = other DNA
ggtcgtgcacaaacatttcgcaccattctgaccgtatccagcacggccaccgtggcgcttaccgtggataacacc

SEQ ID NO: 554317 - DNA, 75 bp, synthetic construct
  source 1..75: mol_type = other DNA
gattttaatattgcatgggattcacagaagaacttaatcgttaatggtcgctcgtattctgattacttcaagtac

SEQ ID NO: 554318 - DNA, 75 bp, synthetic construct
  source 1..75: mol_type = other DNA
ccgcagccattaacaatgatccgaatttcagtaccaccattaacaatgtgctggcactaaaagcaccgttgtcga

SEQ ID NO: 554319 - DNA, 75 bp, synthetic construct
  source 1..75: mol_type = other DNA
gcaagttattcccggcaactatggcaattttgattccagatatgtgaaagatgttcgacttggttcacagcaata

SEQ ID NO: 554320 - DNA, 75 bp, synthetic construct
  source 1..75: mol_type = other DNA
atgtttaatgtgattactcacccggccgcactgaatgagttgattgaattaccagataatctacgtggtcgcatg

SEQ ID NO: 554321 - DNA, 75 bp, synthetic construct
  source 1..75: mol_type = other DNA
ccgaatggaggctctgacggctggctgacggaagaggcgctgtggctggtcagcaagaacgctgccgatgctgtg

SEQ ID NO: 554322 - DNA, 75 bp, synthetic construct
  source 1..75: mol_type = other DNA
gtatcagtatgccgggctggcgggtgaactggtgcagaaagccgaccgggcgtcggtggcatttaatctcggcgg

SEQ ID NO: 554323 - DNA, 75 bp, synthetic construct
  source 1..75: mol_type = other DNA
gattacctgcgccatccggctgcggcagttctcctgcttacccaactgatccctccggaaagcctcgactggctc

SEQ ID NO: 554324 - DNA, 75 bp, synthetic construct
  source 1..75: mol_type = other DNA
tttatctgcgcaagagcacagcggattttactcaagatataagaagcgcaaactgtcttcttcttcattatcaga

SEQ ID NO: 554325 - DNA, 75 bp, synthetic construct
  source 1..75: mol_type = other DNA
ccgaatggtggttctgacggctggctgacggaagaggcgctgtggctggtcagcaagaacgctgccgatgctgtc

SEQ ID NO: 554326 - DNA, 75 bp, synthetic construct
  source 1..75: mol_type = other DNA
acgcccacgcgggcggtctgctcgatcacagccttgaagccgcctactatgccgcacggctgcggcagagttatc

SEQ ID NO: 554327 - DNA, 75 bp, synthetic construct
  source 1..75: mol_type = other DNA
aagccacgcagtgaaatgggtgtgacttgtgttggtcgccagaagcaacgcggaaaatcaattccagcttattac

SEQ ID NO: 554328 - DNA, 75 bp, synthetic construct
  source 1..75: mol_type = other DNA
ctgctgcatgcatttgtgaaaaagacgcaaaagacaccaacgaaagctattgaaatcgccaggatgcgcctgaag

SEQ ID NO: 554329 - DNA, 75 bp, synthetic construct
  source 1..75: mol_type = other DNA
ggcgatgctggcgtccggcagcctgcaagtggacaccgaacagttagccagcgacatgctgagttttttccagaa

SEQ ID NO: 554330 - DNA, 75 bp, synthetic construct
  source 1..75: mol_type = other DNA
tatgcctacaaagtggtttacatacggtttatcggcagccatgcgcaatacgataaaattgatgtgcaaacgatt

SEQ ID NO: 554331 - DNA, 75 bp, synthetic construct
  source 1..75: mol_type = other DNA
agtagtgtagcggaaaagctgctgacctctgaaattggtaacatcctcaagcagggtggtaataataaaagggct

SEQ ID NO: 554332 - DNA, 75 bp, synthetic construct
  source 1..75: mol_type = other DNA
gattgggatctttttgagggtgatgtaagagaatttgattggtcgaaaatccctaaagggattgaccttcttgcg

SEQ ID NO: 554333 - DNA, 75 bp, synthetic construct
  source 1..75: mol_type = other DNA
gccatcagcaacggcggcaccggcacgcaggttaacggcgacgaagccaccgtgaacaataacggcaacaccacc

SEQ ID NO: 554334 - DNA, 75 bp, synthetic construct
  source 1..75: mol_type = other DNA
ttagtgtttacgagcactatttcacgcaaactccgcaaattatcaaggttgatacgggttcacaggtcgtcaaca

SEQ ID NO: 554335 - DNA, 75 bp, synthetic construct
  source 1..75: mol_type = other DNA
tgggaaataatacacagtacgacatgatggcgctgcgtaaatccatgacactgactgaatatcagaatctgagtc

SEQ ID NO: 554336 - DNA, 75 bp, synthetic construct
  source 1..75: mol_type = other DNA
aacggaaaatggatctggaataccgatacgggtgtaattagcggcgtgaatcctaatgcactgttaattgatctt

SEQ ID NO: 554337 - DNA, 75 bp, synthetic construct
  source 1..75: mol_type = other DNA
aaggcggtcgtgaacaacgacggtgacagtgccatcagcaacggcggcaccggcacgcaggttaacggcgacgaa

SEQ ID NO: 554338 - DNA, 75 bp, synthetic construct
  source 1..75: mol_type = other DNA
cataatcagattaaattcctgtttgattcacgaggttttccactggcatatattacctgggcatatcttgaggct

SEQ ID NO: 554339 - DNA, 75 bp, synthetic construct
  source 1..75: mol_type = other DNA
atcaggctgacttcagcatcaaagcaatgtgccacgtgccccgggtggcccgcagcggctggtatacgtggtgtc

SEQ ID NO: 554340 - DNA, 75 bp, synthetic construct
  source 1..75: mol_type = other DNA
acagtctcccggcagcgtttgccctttccgaaaataaagacattactctggtcgtctgtggtggcacggtccgcc

SEQ ID NO: 554341 - DNA, 75 bp, synthetic construct
  source 1..75: mol_type = other DNA
ttattattaccgatgatgccgtgtcagatgtggataaactggcattgcagaagacacgggtaaaattaattacgg

SEQ ID NO: 554342 - DNA, 75 bp, synthetic construct
  source 1..75: mol_type = other DNA
atcaatactcagattaggtttgtaaccgacaaaatcagggaacttcagtcagcggtcctgctggggagtgcgccg

SEQ ID NO: 554343 - DNA, 75 bp, synthetic construct
  source 1..75: mol_type = other DNA
agcgaggatttagccgcaggcacgcatgttgaggtgattgcgattgaagggataacgctgatcatccgtgcggtc

SEQ ID NO: 554344 - DNA, 75 bp, synthetic construct
  source 1..75: mol_type = other DNA
tgtttgccatcctgacgctgctcgccgcctggctgtggtggaaatggttgtcgcggcgggtgcgcgaacaaaagc

SEQ ID NO: 554345 - DNA, 75 bp, synthetic construct
  source 1..75: mol_type = other DNA
tggtgcagtcgctatcagcgggggaaccaccagctatacggttcaactggtgaacagtgggaccatcaatgtcgg

SEQ ID NO: 554346 - DNA, 75 bp, synthetic construct
  source 1..75: mol_type = other DNA
cgtggttaacggcgatcgtgcgatcctgaataaccgtggtgatgcggtgatcactaacgggggcgcgggtgtcat

SEQ ID NO: 554347 - DNA, 75 bp, synthetic construct
  source 1..75: mol_type = other DNA
tggaatgctggcaagaggcgatgactcgcaggcaaaaaatgtctccgggggaataatcaatctgacatccattac

SEQ ID NO: 554348 - DNA, 75 bp, synthetic construct
  source 1..75: mol_type = other DNA
ctgacaaatagcggtaatgcggtaacgggcggggaaaacgcgattattcatgtaaccagaaccagtgattctgtt

SEQ ID NO: 554349 - DNA, 75 bp, synthetic construct
  source 1..75: mol_type = other DNA
aatgtcgggattctgatgacagcgccgtaatgagctggactgcagctggcctggttgcagtcgttacaggagccg

SEQ ID NO: 554350 - DNA, 75 bp, synthetic construct
  source 1..75: mol_type = other DNA
acttgatgcgggttataccaacaacgagctgtataccagtctgaacgtcggcactactgcagagctgaacagcgc

SEQ ID NO: 554351 - DNA, 75 bp, synthetic construct
  source 1..75: mol_type = other DNA
gtaatattagtgatgaaacttactggcagaccaattccatatatctgatgggcggcggaatgttagccggttcaa

SEQ ID NO: 554352 - DNA, 75 bp, synthetic construct
  source 1..75: mol_type = other DNA
aactgcgtcacacactggaaggtggctatcaggaacgcaatgcgggtgactttaacctgagcatgaacagcggca

SEQ ID NO: 554353 - DNA, 75 bp, synthetic construct
  source 1..75: mol_type = other DNA
gatgtaggtgacatctcaacaggaatggtgctcagcggagatggcaacagcgtgacgctggcagtagaagatctt

SEQ ID NO: 554354 - DNA, 75 bp, synthetic construct
  source 1..75: mol_type = other DNA
caggacggcgagctggatgtgagcggcggcggtcacggtattgatatcaccggcgacagcgcaacggtggataac

SEQ ID NO: 554355 - DNA, 75 bp, synthetic construct
  source 1..75: mol_type = other DNA
atcaacggcgaactgagcgtaaaccaggggttggaaaacagtggtcacctggatgttgacagcattaacagcaaa

SEQ ID NO: 554356 - DNA, 75 bp, synthetic construct
  source 1..75: mol_type = other DNA
gagtccatcatgtctgccaccctggaaaatgcggagaaggttatcccgacggttgtacaactcagcaatggcttg

SEQ ID NO: 554357 - DNA, 75 bp, synthetic construct
  source 1..75: mol_type = other DNA
actctcaggtgagcaatatgcagattacggaacttcctgtctgtatgccagactgtttgccacagaagcagctcc

SEQ ID NO: 554358 - DNA, 75 bp, synthetic construct
  source 1..75: mol_type = other DNA
attacgaaccgaactcgatcaacgataactggccgcgcgaaacaccgccggggccgaaacgcggcggttttgaat

SEQ ID NO: 554359 - DNA, 75 bp, synthetic construct
  source 1..75: mol_type = other DNA
cgagaatgcggatggcagctataccctgacggcaaaagacggtcgccagacaattgtcaaacagtggaaggtaaa

SEQ ID NO: 554360 - DNA, 75 bp, synthetic construct
  source 1..75: mol_type = other DNA
ccgaaggtgggcaacggtctggcgttcaacgtggtggcaaaaggcgatccgcgcgcggaactgggcaacgacacg

SEQ ID NO: 554361 - DNA, 75 bp, synthetic construct
  source 1..75: mol_type = other DNA
gataccgacgtgaaacagcagaacctggagttccgcagcgaaggggcgaagactttcgaaccgagcgaagggctg

SEQ ID NO: 554362 - DNA, 75 bp, synthetic construct
  source 1..75: mol_type = other DNA
aaccaataccacgccgggtagcgttaccaacgcaggaactgttaccagccagatgctgacggttctgagcggtga

SEQ ID NO: 554363 - DNA, 75 bp, synthetic construct
  source 1..75: mol_type = other DNA
caatgttggcgaaatcgacatctcaaaaaatggtacgggtgtcgctattacgggcgatcgcgagcaggtcgagtt

SEQ ID NO: 554364 - DNA, 75 bp, synthetic construct
  source 1..75: mol_type = other DNA
caaaatccacatcaccaaagaagctggtgtggtagttgatggaaccacgggcaacgatatcaaagtcagtgacgc

SEQ ID NO: 554365 - DNA, 75 bp, synthetic construct
  source 1..75: mol_type = other DNA
gcggcggtcacggtattgatatcaccggtgacagcgcgacggtagataacaagggcaccatgaccgttaccgatc

SEQ ID NO: 554366 - DNA, 75 bp, synthetic construct
  source 1..75: mol_type = other DNA
gacaatgcgtgctcgtggccagaattctcaggttacgaatgcgtcgggtggcgtgataaatctgctttctgtaac

SEQ ID NO: 554367 - DNA, 75 bp, synthetic construct
  source 1..75: mol_type = other DNA
ggagcgtaacgccggagactttaacctgaatatgaacagcggcagcgaaacggcggtggacagcatcgtcgggct

SEQ ID NO: 554368 - DNA, 75 bp, synthetic construct
  source 1..75: mol_type = other DNA
cggcgacaaggccatcgtcaataacgaaggcgagagcaccatcaccaacggcggcaccggtacgcagattaacgg

SEQ ID NO: 554369 - DNA, 75 bp, synthetic construct
  source 1..75: mol_type = other DNA
aaggggtaattacctcaaaagtaatggagcaacatagcgttgttaatatggctgcactcacggggtcaacggatc

SEQ ID NO: 554370 - DNA, 75 bp, synthetic construct
  source 1..75: mol_type = other DNA
acgccaccgcgaataacagtggaaaaaccactgttgatggaaaagattccacgggtaccaaaatcgcgggcaata

SEQ ID NO: 554371 - DNA, 75 bp, synthetic construct
  source 1..75: mol_type = other DNA
aaacggtgctatgttaaccaataaagccgtggtgaataacgaaggtgaatggattcttggcgagagcagtggtgg

SEQ ID NO: 554372 - DNA, 75 bp, synthetic construct
  source 1..75: mol_type = other DNA
gaatattgtccaggggctggaaaacagcgggagcatggatgccgacaagcttactgccaatgccagtgtttacaa

SEQ ID NO: 554373 - DNA, 75 bp, synthetic construct
  source 1..75: mol_type = other DNA
ggaatatcacactttctctgtatgattatgcctcaactaatacgccagcaccggaaccagataacacggccttct

SEQ ID NO: 554374 - DNA, 75 bp, synthetic construct
  source 1..75: mol_type = other DNA
tcggttgataaaggtggcaccttcaacaatctggaaggcggtgtggcaacggtggcgacgaatgcgctgtggaca

SEQ ID NO: 554375 - DNA, 75 bp, synthetic construct
  source 1..75: mol_type = other DNA
aaacgtatcagatgattttatgcatgctgttctcagtaactgcaccacaaaaatagttcttcctgcaccggagaa

SEQ ID NO: 554376 - DNA, 75 bp, synthetic construct
  source 1..75: mol_type = other DNA
ttttatgcatgctgttctcagtaactgcaccacaagaatcgtacttcctgcaccgaaggaattcagttctgaatc

SEQ ID NO: 554377 - DNA, 75 bp, synthetic construct
  source 1..75: mol_type = other DNA
tgttcatgcggtaaaaccagaaccgcactgggcaattccgcaagggcaaagcgcccacgacaccttctgggatta

SEQ ID NO: 554378 - DNA, 75 bp, synthetic construct
  source 1..75: mol_type = other DNA
acattacgctgacaaacgagggtaaaacagaggctgtcggtgaagattcggtggtcggtatcctgaccggcgata

SEQ ID NO: 554379 - DNA, 75 bp, synthetic construct
  source 1..75: mol_type = other DNA
gcgaagagccagcgcacggcgagccttgccgggacaggtggtcagcagtttaacgttgacgacgggcagaagggc

SEQ ID NO: 554380 - DNA, 75 bp, synthetic construct
  source 1..75: mol_type = other DNA
gggcactaacgccgacggcagctcgggtcgattgatggtcaataacgccagcatgaacggcgtggagatcaacac

SEQ ID NO: 554381 - DNA, 75 bp, synthetic construct
  source 1..75: mol_type = other DNA
tgagcgtctatggtggtcgagttgttaataacagtgccatcaccagtaaggtactcgcgcagggacgtattttca

SEQ ID NO: 554382 - DNA, 75 bp, synthetic construct
  source 1..75: mol_type = other DNA
cagtggtgatgcgtcgacgttcattaacaggggggatatttccgtcagtaatggtagttcagaggccaatgcgac

SEQ ID NO: 554383 - DNA, 75 bp, synthetic construct
  source 1..75: mol_type = other DNA
atcattacggccgagggggagacgcttaacctgtcttcatccggtggttctactgatatgatagcgaccgctgaa

SEQ ID NO: 554384 - DNA, 75 bp, synthetic construct
  source 1..75: mol_type = other DNA
atgatggtcatccgtcccgttgagcgcaccgatgtcgcagccttaatgcagcttgcaggtaaaacgggcggcggc

SEQ ID NO: 554385 - DNA, 75 bp, synthetic construct
  source 1..75: mol_type = other DNA
cattgctatggcattgattttcctagtgcatcaccacgaaaaatatttattgaagttaaatctgtagggcaatca

SEQ ID NO: 554386 - DNA, 75 bp, synthetic construct
  source 1..75: mol_type = other DNA
gtttttatccacgcattacgcggattacctgatgatataccgtccgaagatgatgatttattcggtgaacattca

SEQ ID NO: 554387 - DNA, 75 bp, synthetic construct
  source 1..75: mol_type = other DNA
tcgaattgttcattaaaaagccgcttgaaaacgggcttactcgtggggaacaaatggaactggcacgtattgctc

SEQ ID NO: 554388 - DNA, 75 bp, synthetic construct
  source 1..75: mol_type = other DNA
ttatctctcctgtggatttatccttgaagaaggattaccgatggagacgctgaaagccgttgtgaccagcatggc

SEQ ID NO: 554389 - DNA, 75 bp, synthetic construct
  source 1..75: mol_type = other DNA
tcgaacggggtttggtaaatgggtgggtagcatctgatgatggaaatcccaaagacctatactgcataactataa

SEQ ID NO: 554390 - DNA, 75 bp, synthetic construct
  source 1..75: mol_type = other DNA
ggttctgcccgcccgccaggatgttgaagtgaacggctttaacggtggtgttctgaaagatgttcccctctgcat

SEQ ID NO: 554391 - DNA, 75 bp, synthetic construct
  source 1..75: mol_type = other DNA
tcgaattgttcattaaaaatccgcttgaaaacggtcttactcgtggggaacaaatggaactggcacgtattgctc

SEQ ID NO: 554392 - DNA, 75 bp, synthetic construct
  source 1..75: mol_type = other DNA
tcgaattgttcattaaaaaaccgcttgaaaacgggcttactcgtggagaacaaatggaactggcacgtattgctc

SEQ ID NO: 554393 - DNA, 75 bp, synthetic construct
  source 1..75: mol_type = other DNA
tcgaattgttcattaaaaaaccgcttgaaaacggtcttactcgtggtgaacaaatggaactggcacgtattgctc

SEQ ID NO: 554394 - DNA, 75 bp, synthetic construct
  source 1..75: mol_type = other DNA
tcgaattgttcattaaaaacccgcttgaaaacgggcttactcgtggcgaacaaatggaactggcacgtattgctc

SEQ ID NO: 554395 - DNA, 75 bp, synthetic construct
  source 1..75: mol_type = other DNA
tcgaattgttcattaaaaacccgcttgaaaacggccttactcgtggggaacaaatggaactggcacgtattgctc

SEQ ID NO: 554396 - DNA, 75 bp, synthetic construct
  source 1..75: mol_type = other DNA
tcgaattgttcattaaaaatccgcttgaaaacgggcttactcgtggtgaacaaatggaactggcacgtattgctc

SEQ ID NO: 554397 - DNA, 75 bp, synthetic construct
  source 1..75: mol_type = other DNA
accgtgatgcggtaaaagccttccagcagcaactagcagaagtggcgattgccggttttcagccgcagtttaata

SEQ ID NO: 554398 - DNA, 75 bp, synthetic construct
  source 1..75: mol_type = other DNA
tggggcgtattcttcgccattccgttggcaacgctgatcaaagccgtgattcacgcctggcctgatgggcaaata

SEQ ID NO: 554399 - DNA, 75 bp, synthetic construct
  source 1..75: mol_type = other DNA
cgcgatatgccggggatgctcaataagctttctgactttgccgccacgttgccgcgccgctatccggcgttaatg

SEQ ID NO: 554400 - DNA, 75 bp, synthetic construct
  source 1..75: mol_type = other DNA
attgtgctggcctatttgctggaatggccaaccgtgcgcctgcaatctattggctgctcccgccgctgggcgacg

SEQ ID NO: 554401 - DNA, 75 bp, synthetic construct
  source 1..75: mol_type = other DNA
accaaaagcggtcaaggctgcatacgacctagcagccggcaaggcgccaggcagccacactcacccgtggagtca

SEQ ID NO: 554402 - DNA, 75 bp, synthetic construct
  source 1..75: mol_type = other DNA
gggttgagccgtattaaggtccgtgaagctgctatgcgcggtgaaatcccgggtctgaaaaaggctagctggtaa

SEQ ID NO: 554403 - DNA, 75 bp, synthetic construct
  source 1..75: mol_type = other DNA
ccgtattgctcgccttttctcttatgactctgggggcaaatcaggctctcgcgcaccaccggggttacggatatg

SEQ ID NO: 554404 - DNA, 75 bp, synthetic construct
  source 1..75: mol_type = other DNA
gccaagggcaatggtcgcaaccggacctgccactacgaaagtctggtggaaaccgggcagatagctaggcgagac

SEQ ID NO: 554405 - DNA, 75 bp, synthetic construct
  source 1..75: mol_type = other DNA
tccgcgtgaaatcgagttgcgccagaaacaatacgagtattatcgtgatttactgttcagtttcccgaaacctga

SEQ ID NO: 554406 - DNA, 75 bp, synthetic construct
  source 1..75: mol_type = other DNA
ttattctatttctataaaatagcaaaatggggaatatctgaaggtggaactattaaaagactttataatgataac

SEQ ID NO: 554407 - DNA, 75 bp, synthetic construct
  source 1..75: mol_type = other DNA
tggggcgtattcttcgccattccgttggcgacgctgatcaaagccgtgattcatgcctggcccgatgggcaaatc

SEQ ID NO: 554408 - DNA, 75 bp, synthetic construct
  source 1..75: mol_type = other DNA
ctgcaccagcggtagcccgtaaggtgctggaacgtgcgcgcacctgtcacaagcctgtggtggtgtgtttcctcg

SEQ ID NO: 554409 - DNA, 75 bp, synthetic construct
  source 1..75: mol_type = other DNA
ttagatgaaaagatagttgtattctatcctgatgactttgtttattttttcacttttattaatattgagtttatt

SEQ ID NO: 554410 - DNA, 75 bp, synthetic construct
  source 1..75: mol_type = other DNA
tcgaattgttcattaaaaaaccgcttgaaaacggacttactcgtggggaacaaatggaactggcacgtattgctc

SEQ ID NO: 554411 - DNA, 75 bp, synthetic construct
  source 1..75: mol_type = other DNA
ctgccaatgcgctctgtcatgctaaaaatgatggatataatcttcctggcatcacacatttgacgtctggcgaaa

SEQ ID NO: 554412 - DNA, 75 bp, synthetic construct
  source 1..75: mol_type = other DNA
ataaaagaaatgtccggtcatgtcactgcaaacaaccataccttctccacggctaaattcccgagcgaaggcttt

SEQ ID NO: 554413 - DNA, 75 bp, synthetic construct
  source 1..75: mol_type = other DNA
gggctggcgctgcaaacccgcagtgaaggcgttcaggatatcaccctgtctgactggacagataacggtgatggt

SEQ ID NO: 554414 - DNA, 75 bp, synthetic construct
  source 1..75: mol_type = other DNA
agcaagtggcctgatgctggtcgcgcctgaaaagcgtaatccgttgctggcctccagttttggtacgggggagtt

SEQ ID NO: 554415 - DNA, 75 bp, synthetic construct
  source 1..75: mol_type = other DNA
tgagtttatttgcgagcgaattgagttattagacaacaagaaaaacaaagacaatggattaatatctgaattaag

SEQ ID NO: 554416 - DNA, 75 bp, synthetic construct
  source 1..75: mol_type = other DNA
gcttaccaaaatccgcttaaagaccagctggtcactttccagagtaacgatgtcactctaagtggaacagaagtc

SEQ ID NO: 554417 - DNA, 75 bp, synthetic construct
  source 1..75: mol_type = other DNA
tattgtcagtccaatgactggttatgtctcccgccgcgcagtacagcctggtgcacaaattagcccaacgacacc

SEQ ID NO: 554418 - DNA, 75 bp, synthetic construct
  source 1..75: mol_type = other DNA
cgacccgacagatgctcgccaggcgtttgaaaaagccaaaactgcactggcttccagcgttcgccaaacccacca

SEQ ID NO: 554419 - DNA, 75 bp, synthetic construct
  source 1..75: mol_type = other DNA
tttactatcaatcctggctgcacagaaattatcacctcagttaaagaacttattgattcctttggtaacgcattt

SEQ ID NO: 554420 - DNA, 75 bp, synthetic construct
  source 1..75: mol_type = other DNA
cgctgcgcattggtttgtccacgctggtgagcgtcaataccactaaccgtgacggtcaggtactggcaaataaag

SEQ ID NO: 554421 - DNA, 75 bp, synthetic construct
  source 1..75: mol_type = other DNA
tattgtcagtccgatgaccggttatgtctcccgccgcgcggtacagcctggggcgcaaattagcccaacgacgcc

SEQ ID NO: 554422 - DNA, 75 bp, synthetic construct
  source 1..75: mol_type = other DNA
gcgtctgcctgttcgtattgaactggaccagaaacagctggagcaatacccgctgcgtatcggtttatccacgct

SEQ ID NO: 554423 - DNA, 75 bp, synthetic construct
  source 1..75: mol_type = other DNA
agctggcacggattgcgctggcatcgctggaagcagtatcggatgaacgggcagcctatgaattatttatggaga

SEQ ID NO: 554424 - DNA, 75 bp, synthetic construct
  source 1..75: mol_type = other DNA
ttctccgttttccaggcgcagaacgtctggatccgcacactgtacgatcgccatcgttttgtgacacgcggcacg

SEQ ID NO: 554425 - DNA, 75 bp, synthetic construct
  source 1..75: mol_type = other DNA
tggtgccgtttaaagagggcgatgagtacgaatcgaaagatctggcggaactgaaccgtcgactttctgctaccg

SEQ ID NO: 554426 - DNA, 75 bp, synthetic construct
  source 1..75: mol_type = other DNA
tcaaaaccggtaccggtgttggcgtacgctgggaatcgcccgtcgggccaatcaagctcgatttcgccgtaccgg

SEQ ID NO: 554427 - DNA, 75 bp, synthetic construct
  source 1..75: mol_type = other DNA
cgcaatggtgaggagttcttcgaaacacagagccgcaatgtaacccactggatgcggctaccggaaccgccgcag

SEQ ID NO: 554428 - DNA, 75 bp, synthetic construct
  source 1..75: mol_type = other DNA
aaatcatcgagccacggttaggtcaatggcagggaaacagcgatgagaaactgcagacattgaccgaaatgaacc

SEQ ID NO: 554429 - DNA, 75 bp, synthetic construct
  source 1..75: mol_type = other DNA
cagccgaccattgaatttgatctccgaccaccgccaaagaaagggcgacaggttttgatcgccaaagtcacgccc

SEQ ID NO: 554430 - DNA, 75 bp, synthetic construct
  source 1..75: mol_type = other DNA
aggtctgaaagcgctgggttattaccagccgaccattgaatttgatctccgtccaccgccaaagaaagggcggca

SEQ ID NO: 554431 - DNA, 75 bp, synthetic construct
  source 1..75: mol_type = other DNA
ttgaattgttcattaaaaatccgctcgataacgggcttacccgtggtgaacaaatggaactggcacggattgcac

SEQ ID NO: 554432 - DNA, 75 bp, synthetic construct
  source 1..75: mol_type = other DNA
ttcgtgaagcagcagtagcaacgcctcaaaaattgctggcatttcgtatgaaagtcacacctcaggttgtgctgg

SEQ ID NO: 554433 - DNA, 75 bp, synthetic construct
  source 1..75: mol_type = other DNA
cgattttgccgtaccggtcgcggataaagacgaacacgggttacagttttacatcggtctggggccagaattatg

SEQ ID NO: 554434 - DNA, 75 bp, synthetic construct
  source 1..75: mol_type = other DNA
acgaaggtgttgccgctgactggcgtggtttcgccacgcacggaaaacaccatcgaaactggtgttggttactca

SEQ ID NO: 554435 - DNA, 75 bp, synthetic construct
  source 1..75: mol_type = other DNA
tgaaaatttcaaaaagtccttaaccagcattgcgttgcgtaaaggttatttcgatagcgaatttaccaaagcgca

SEQ ID NO: 554436 - DNA, 75 bp, synthetic construct
  source 1..75: mol_type = other DNA
ccgtctgcgtaccgccggtaaagtggcgatcaaactggttgacggcgatgagctgatcggcgttgacctgaccag

SEQ ID NO: 554437 - DNA, 75 bp, synthetic construct
  source 1..75: mol_type = other DNA
tcactcaggaagatgttgttgtcacgctctctcatcaggggtacgtgaaatatcagccgctttctgaatacgaag

SEQ ID NO: 554438 - DNA, 75 bp, synthetic construct
  source 1..75: mol_type = other DNA
atcgctgcgtttgtccgtcaccgtcgcgaagtggtgacccgtcgtaccattttcgaactgcgtaaagcccgcgat

SEQ ID NO: 554439 - DNA, 75 bp, synthetic construct
  source 1..75: mol_type = other DNA
gaccgtctggcgttctccaccgacagctacgtcatcgacccgctgttctttcctggtggcaatatcggcaagctg

SEQ ID NO: 554440 - DNA, 75 bp, synthetic construct
  source 1..75: mol_type = other DNA
ccgtaacctggccgccggcaaaaaggtctttccgttgcgtttgaccttgccacccaccgtggctacgactccgat

SEQ ID NO: 554441 - DNA, 75 bp, synthetic construct
  source 1..75: mol_type = other DNA
tcgggagaaaactgtcgactcgctggttcagcaaaccgcggaagggatcgctatcaagccgctgtataccgaagc

SEQ ID NO: 554442 - DNA, 75 bp, synthetic construct
  source 1..75: mol_type = other DNA
cgtgctcatatccttgaagcattagccgtggcgctggcgaacatcgacccgatcatcgaactgatccgtcatgcg

SEQ ID NO: 554443 - DNA, 75 bp, synthetic construct
  source 1..75: mol_type = other DNA
tctcctggcaaaatggacaggcgctggtcagttgtgatgttaaatcctcatgcagcagttgcgcttcccgcacag

SEQ ID NO: 554444 - DNA, 75 bp, synthetic construct
  source 1..75: mol_type = other DNA
atgaacagtattaattatcaggtactgcgtgaggcagcgcaaaactatcagtcgatgctggcgtggtatgaggct

SEQ ID NO: 554445 - DNA, 75 bp, synthetic construct
  source 1..75: mol_type = other DNA
atcatgatgatcaccgatgccggtacgctggtacgtactcgcgtttcggaaatcagcatcgtaggccgtaacacc

SEQ ID NO: 554446 - DNA, 75 bp, synthetic construct
  source 1..75: mol_type = other DNA
ggtaaacgtaccgcagtggcggaatacccaaccaagtcgcgtgcgacgaaaggggttatctccatcaaggttacc

SEQ ID NO: 554447 - DNA, 75 bp, synthetic construct
  source 1..75: mol_type = other DNA
gccggtacgctggtgcgtacacgtgtttcggaaatcagtgtggttggtcgtaacactcagggcgttatcctcatc

SEQ ID NO: 554448 - DNA, 75 bp, synthetic construct
  source 1..75: mol_type = other DNA
atgaaacggaacgcgaaaattgccctggtgatgatggcgctttcagcaatggcgttggactcaacatctgcattt

SEQ ID NO: 554449 - DNA, 75 bp, synthetic construct
  source 1..75: mol_type = other DNA
agaaggtgaagttgatttggcgctacccgtgaacaatgtcggtgatagcggcgcagaagtggcacaagagacaga

SEQ ID NO: 554450 - DNA, 75 bp, synthetic construct
  source 1..75: mol_type = other DNA
cgtcattcaacataatgcggggggattatgcgcactctcgccggtcggcaatgacggcgaacccgacccgctgcg

SEQ ID NO: 554451 - DNA, 75 bp, synthetic construct
  source 1..75: mol_type = other DNA
gtttacagttacagcaagcagaggcgatgaaatatagtggtcgtcttgaggatcactattttaacaagcgagcgc

SEQ ID NO: 554452 - DNA, 75 bp, synthetic construct
  source 1..75: mol_type = other DNA
cccgcaaaccctctgcgggggatgttggtgcatatacgcaggcagaatgtaactcaaggtttattacaggtattc

SEQ ID NO: 554453 - DNA, 75 bp, synthetic construct
  source 1..75: mol_type = other DNA
tgataaagctgttggctggaactggaatagcggtgtttatgatgcagatatcagtggtgcatcgacattaatcct

SEQ ID NO: 554454 - DNA, 75 bp, synthetic construct
  source 1..75: mol_type = other DNA
cactcatctgggaaaatgccttctttggcgttaacagcgccattgtgcgcatcagtgctgaagcgcctctcttga

SEQ ID NO: 554455 - DNA, 75 bp, synthetic construct
  source 1..75: mol_type = other DNA
tgccaacctcgctaaccagtcagtcacatattccagggcttaccctgaagtgtcggcggtattaaccagtcagac

SEQ ID NO: 554456 - DNA, 75 bp, synthetic construct
  source 1..75: mol_type = other DNA
gcctggctgttaataagaaatacaccttccagatttacatggatgaattgcacgacatgctggaggacgccagcg

SEQ ID NO: 554457 - DNA, 75 bp, synthetic construct
  source 1..75: mol_type = other DNA
agattccgccgtccgcaataatgccaagtaataccgaagacccgaccatgacaggtaagttacggtcgggggctg

SEQ ID NO: 554458 - DNA, 75 bp, synthetic construct
  source 1..75: mol_type = other DNA
gaatataccgctgacgtcgacgcgatgggtacgctgcgcctgctggaggcgatccgcttcctcggtctggaaaag

SEQ ID NO: 554459 - DNA, 75 bp, synthetic construct
  source 1..75: mol_type = other DNA
tcaccggtgtaaccggacaagatggttcttacctggcagagtttctgctggaaaaaggttacgaggtgcatggta

SEQ ID NO: 554460 - DNA, 75 bp, synthetic construct
  source 1..75: mol_type = other DNA
gcgccattagattctacgatccgctgatggagttgcggggatatccccgtggctgccggaatgaggagatcacat

SEQ ID NO: 554461 - DNA, 75 bp, synthetic construct
  source 1..75: mol_type = other DNA
gagccgggttcaaacccgaaaggctacgagttcatcaacgacattaaaggtggtgtaatccctggcgaatacatc

SEQ ID NO: 554462 - DNA, 75 bp, synthetic construct
  source 1..75: mol_type = other DNA
ctcgaccctccgtcttcccgatttgcgcggtgagtttatccgtggatgggacgacgggcgaaaagtggatacagg

SEQ ID NO: 554463 - DNA, 75 bp, synthetic construct
  source 1..75: mol_type = other DNA
gggaacctcggggatagtcggcatgggattcaacaatgaagattccattacagaccttcgtgagggcagctttaa

SEQ ID NO: 554464 - DNA, 75 bp, synthetic construct
  source 1..75: mol_type = other DNA
gtgccaacagcttcattgacagcgaaaggcatcactcagctcagtagtgccactaacagcacgtctgaagtgctg

SEQ ID NO: 554465 - DNA, 75 bp, synthetic construct
  source 1..75: mol_type = other DNA
ttgtcgcgcaggaagccgctcgctgccttgaatgtaactacgtttgcagcaagtgtgtggatgtctgcccgaacc

SEQ ID NO: 554466 - DNA, 75 bp, synthetic construct
  source 1..75: mol_type = other DNA
ttgttgccgctcacggcgtgaaatttgagtatggctgctcacccgatttgaccgttgaacagttaaaaaatcagg

SEQ ID NO: 554467 - DNA, 75 bp, synthetic construct
  source 1..75: mol_type = other DNA
accaaaagcggtcaaggctgcatacgacctggcagccggcaaggcgccagacagccacactcacccgtggagtca

SEQ ID NO: 554468 - DNA, 75 bp, synthetic construct
  source 1..75: mol_type = other DNA
accaaaagcggtcaaggctgcatacgacctcgcagccggcaaggcgcccggcagccacactcacccgtggagtca

SEQ ID NO: 554469 - DNA, 75 bp, synthetic construct
  source 1..75: mol_type = other DNA
accaaaagcggtcaaggctgcatacgaccttgcagccggcaaggcgccagtcagccacactcacccgtggagtca

SEQ ID NO: 554470 - DNA, 75 bp, synthetic construct
  source 1..75: mol_type = other DNA
caaacggaaaacaaccggcagatgccacgctcactgctctggcaggacttgccactgcagcagatcggttgcctt

SEQ ID NO: 554471 - DNA, 75 bp, synthetic construct
  source 1..75: mol_type = other DNA
accaaaagcggtcaaggctgcatacgacctggcagccggcaaggcgccgggcagccacactcacccgtggagtca

SEQ ID NO: 554472 - DNA, 75 bp, synthetic construct
  source 1..75: mol_type = other DNA
accaaaagcggtcaaggctgcatacgacctggcagccggcaaggcgcccgccagccacactcacccgtggagtca

SEQ ID NO: 554473 - DNA, 75 bp, synthetic construct
  source 1..75: mol_type = other DNA
aatgtggcaactgcgcccaattctgcccgtggaacggtaaaccgtacaaagacaaaatcaccgtcttcagcctgt

SEQ ID NO: 554474 - DNA, 75 bp, synthetic construct
  source 1..75: mol_type = other DNA
tgtcagattccgacactggcgctggaaaatgacgagattatgacggagacagcggcgattgcattgatggttgga

SEQ ID NO: 554475 - DNA, 75 bp, synthetic construct
  source 1..75: mol_type = other DNA
attgctggcggagtaacgctggggccaccagcaaaaaccggctacttgtcgcaggaaggtgggatcaccgccgcc

SEQ ID NO: 554476 - DNA, 75 bp, synthetic construct
  source 1..75: mol_type = other DNA
tgtcaggttccgacactggcattggaaaatgacgagattatgacggagacagcggcgattgcattgatggttctc

SEQ ID NO: 554477 - DNA, 75 bp, synthetic construct
  source 1..75: mol_type = other DNA
cgttgacttcacaatcgaagtagaacgttccatgcgtgttctcgatggtgcggtaatggtttactgcgcagttgg

SEQ ID NO: 554478 - DNA, 75 bp, synthetic construct
  source 1..75: mol_type = other DNA
tcgggtagcagaaatggcgatggaagaagacttatcgttgaatgcctttgttaataaggctctggaaaaagaagt

SEQ ID NO: 554479 - DNA, 75 bp, synthetic construct
  source 1..75: mol_type = other DNA
gggtcgctgaaatggcgatggaagaagatttgtcgctgaatgcctttgtcaataaggcgctggaaaaagaagtcg

SEQ ID NO: 554480 - DNA, 75 bp, synthetic construct
  source 1..75: mol_type = other DNA
ctgctgggcgaacaccgctatgctgatgcactggaactcatctatcaacgcaacgccctgccagccatcaccggc

SEQ ID NO: 554481 - DNA, 75 bp, synthetic construct
  source 1..75: mol_type = other DNA
tgtgccacccccgtcggccctgccgctggtccgcacacgcaactcgcgcaaaatatcgtcacttcctggctgact

SEQ ID NO: 554482 - DNA, 75 bp, synthetic construct
  source 1..75: mol_type = other DNA
ctggcccgcacacgcaacttgcgcaaaacatcgtcacctcctggctgactggcggacgcttcatcgaactaaaaa

SEQ ID NO: 554483 - DNA, 75 bp, synthetic construct
  source 1..75: mol_type = other DNA
gctggaaaaaccctgtatcgatgccgaagacgagtgttttaacaccgaatggtctaccgaattcactctgcttaa

SEQ ID NO: 554484 - DNA, 75 bp, synthetic construct
  source 1..75: mol_type = other DNA
gaaagcatccgttcccaccagaacgacaaatactggaacaacgtcaacccagcagaaatttaccaacgcaaaggc

SEQ ID NO: 554485 - DNA, 75 bp, synthetic construct
  source 1..75: mol_type = other DNA
gaattaattcagcacgatattgatttcgtcgccgatcactgtgtgaaatttgagtatggctgctcaccggcgctg

SEQ ID NO: 554486 - DNA, 75 bp, synthetic construct
  source 1..75: mol_type = other DNA
aaacgtatgaaatcaaacctgatgaacaattcctgttccatgcagccgctggcggcgttggcttaattgcttgtc

SEQ ID NO: 554487 - DNA, 75 bp, synthetic construct
  source 1..75: mol_type = other DNA
ggctttaccaccatttgccgatgcgttttagcttaacggtggaacgcggcgagcaggtggcgatcctcgggccaa

SEQ ID NO: 554488 - DNA, 75 bp, synthetic construct
  source 1..75: mol_type = other DNA
ctgtttcaggagaacaacctgttcagccacctgacggtcgcgcaaaacatcgggctggggctaaatccggggttg

SEQ ID NO: 554489 - DNA, 75 bp, synthetic construct
  source 1..75: mol_type = other DNA
aaataataaatatgaaatacttgcaatttacctgaggagtgagaatgagaacggttcaattgaatcgtttgttaa

SEQ ID NO: 554490 - DNA, 75 bp, synthetic construct
  source 1..75: mol_type = other DNA
agcaacaataaccagtcttcttaacgaaatatcccagaaaatacagaataaatgcgaacagaaaacagcagaagg

SEQ ID NO: 554491 - DNA, 75 bp, synthetic construct
  source 1..75: mol_type = other DNA
gctcatcggtaccgtgggaagcgcgcaaaaagcgcagagtgcgctaaaagcgggggcgtggcaggtgattaacta

SEQ ID NO: 554492 - DNA, 75 bp, synthetic construct
  source 1..75: mol_type = other DNA
ggggattgataatttaatggcgcggttacctggcgagctttccggcggtcagcgacagcgcgtggcgttagcgcg

SEQ ID NO: 554493 - DNA, 75 bp, synthetic construct
  source 1..75: mol_type = other DNA
taaatgccccgaaggaagtttctgttcatcgtgaagagatctaccagcgtatccaggctgaaaaatcccagcagt

SEQ ID NO: 554494 - DNA, 75 bp, synthetic construct
  source 1..75: mol_type = other DNA
acaatctctgctgatagccaatccacttatccgatagtattaagcctgaaagatagtaacggtaaggcattaacc

SEQ ID NO: 554495 - DNA, 75 bp, synthetic construct
  source 1..75: mol_type = other DNA
ccagccagcggttcgctgactatcgacggcgttgatcacaccacgacgccgccgtcacgccgtccggtgtcgatg

SEQ ID NO: 554496 - DNA, 75 bp, synthetic construct
  source 1..75: mol_type = other DNA
ctgtttcaggaaaacaacctgttcagtcacctgacggtcgcgcagaacatcgggctggggcttaatccaggattg

SEQ ID NO: 554497 - DNA, 75 bp, synthetic construct
  source 1..75: mol_type = other DNA
ttgtctggtacgcgaacagcccattttattgctcgatgaaccgttttccgcactcgatccggcgctacgtcagga

SEQ ID NO: 554498 - DNA, 75 bp, synthetic construct
  source 1..75: mol_type = other DNA
atggtgaaatcctcggctatatctgggccaatggaattaaccgaagatattcgccgccaggcctggaaaatggat

SEQ ID NO: 554499 - DNA, 75 bp, synthetic construct
  source 1..75: mol_type = other DNA
ctggcaggcagcgcaggtgagcgcgatcatcacgctcaccccactgtttacgctgtttttttcagatcttttatc

SEQ ID NO: 554500 - DNA, 75 bp, synthetic construct
  source 1..75: mol_type = other DNA
atctcggtgcgtttgtcgtggttgcaggcgcgatgtattccgccattggtcatcgtatttggggcggattacgta

SEQ ID NO: 554501 - DNA, 75 bp, synthetic construct
  source 1..75: mol_type = other DNA
ggttgccgccattacgcgtgtttcgtaagccacgctggttgattttgttagcagtggcgaccgccgggctgtttg

SEQ ID NO: 554502 - DNA, 75 bp, synthetic construct
  source 1..75: mol_type = other DNA
ctacaaccgccgtgtgccgctgggcaatgccaacctgattggtcgcgaagaactgcaacacgcccgcgacgccgt

SEQ ID NO: 554503 - DNA, 75 bp, synthetic construct
  source 1..75: mol_type = other DNA
caattgcgctcttccctctggcaaagcctggagtgatagcgcagcttagccactggcagctcgcatgtttaattt

SEQ ID NO: 554504 - DNA, 75 bp, synthetic construct
  source 1..75: mol_type = other DNA
cacctggggagttatctttggggtcggtgcggcgacggtttgggtgagttatggcgtggcgcaaaaggttttatt

SEQ ID NO: 554505 - DNA, 75 bp, synthetic construct
  source 1..75: mol_type = other DNA
cctgagcgccaatatagatatcatcaccgatggcctctcgactctggcgcaaaatattcccactcgattaccaca

SEQ ID NO: 554506 - DNA, 75 bp, synthetic construct
  source 1..75: mol_type = other DNA
ctttcctggcataggcgctggttattataacaagacgctggatgcgataatcacctacgcgccttcatcgctata

SEQ ID NO: 554507 - DNA, 75 bp, synthetic construct
  source 1..75: mol_type = other DNA
gcacgagggaaaattcgcattcgaacctggcagtacagcgactcacaacaggccatttcgatagaggacaacggc

SEQ ID NO: 554508 - DNA, 75 bp, synthetic construct
  source 1..75: mol_type = other DNA
tcgatgaagatgatgaccgccctgcaataatcgaaatattagaaacaaccactacaactgtggaggcgatgatcg

SEQ ID NO: 554509 - DNA, 75 bp, synthetic construct
  source 1..75: mol_type = other DNA
caaactggaagcgagcaacgacatttaccagacctttattgcccactccattgatacacctgagaaatttgaagc

SEQ ID NO: 554510 - DNA, 75 bp, synthetic construct
  source 1..75: mol_type = other DNA
tggcattgatctctcgctgcaaaaaaagatcttcgatccctttttcaccaccaaagcctcaggaaccgggcttgg

SEQ ID NO: 554511 - DNA, 75 bp, synthetic construct
  source 1..75: mol_type = other DNA
aaagaaatcacctttattgaggaccggcagcaggttacattctctcagtttgaagccagccaaaataatgcattg

SEQ ID NO: 554512 - DNA, 75 bp, synthetic construct
  source 1..75: mol_type = other DNA
atcgatactggaaaaactctaactcggtggccagtttttgttgaccacttcaaagcaggaatctcagcgctgaag

SEQ ID NO: 554513 - DNA, 75 bp, synthetic construct
  source 1..75: mol_type = other DNA
actaccttaaaccctcgatagaacgcctcgaaacggccagagaagcgcatctcaccaatgcccgacgtatggacg

SEQ ID NO: 554514 - DNA, 75 bp, synthetic construct
  source 1..75: mol_type = other DNA
aaacaacgccatctggcgcgcgtggcacggcgggaactggcgcaggaatgtgacagcatgaacgaggtactgtct

SEQ ID NO: 554515 - DNA, 75 bp, synthetic construct
  source 1..75: mol_type = other DNA
tggattggaccaacaaaaacatccatccgtccaaagttgttaacgttggcgatgtagtggaagttatggttctgg

SEQ ID NO: 554516 - DNA, 75 bp, synthetic construct
  source 1..75: mol_type = other DNA
atatcgacgaggaacgtcgtcgtatctccctgggtctgaaacagtgcaaagctaacccgtggcagcagttcgcgg

SEQ ID NO: 554517 - DNA, 75 bp, synthetic construct
  source 1..75: mol_type = other DNA
taacagttgcaaaacagcaggcgattaattttgttgctgttgttttgtgctgcgttataagctatttttcgttca

SEQ ID NO: 554518 - DNA, 75 bp, synthetic construct
  source 1..75: mol_type = other DNA
aaggattccaccggtacagaaatcaacggcaataacggaaacgttattcaggacggcgatctggatgtcagcggc

SEQ ID NO: 554519 - DNA, 75 bp, synthetic construct
  source 1..75: mol_type = other DNA
ggttctggctctcgcatttatggtgttgtttaaatataaacacaacagtaacccgacaacatccggtcatttcgc

SEQ ID NO: 554520 - DNA, 75 bp, synthetic construct
  source 1..75: mol_type = other DNA
aacaattgcaccacgctctctccagattcaggtgatatcgcccatacactaaaatcacgttatgccatgcaagaa

SEQ ID NO: 554521 - DNA, 75 bp, synthetic construct
  source 1..75: mol_type = other DNA
taataacgggaaagtgattcaggacggcgatctggatgtcagcggcggcggtcacggtattgatatcaccggcga

SEQ ID NO: 554522 - DNA, 75 bp, synthetic construct
  source 1..75: mol_type = other DNA
atgatgtcggctggcggggtctttaataatcaaactgacggggcgattatgagaggtgctgcgctgacaggtact

SEQ ID NO: 554523 - DNA, 75 bp, synthetic construct
  source 1..75: mol_type = other DNA
tatcaccggcgacagcgcaacggtggataacaagggcaccatgaccgtcaccgatccggagtccatcggtatcca

SEQ ID NO: 554524 - DNA, 75 bp, synthetic construct
  source 1..75: mol_type = other DNA
ctccctgggtctgaaacagtgcaaagctaacccgtggcagcagtttgcggaaacccacaacaagggtgaccgtgt

SEQ ID NO: 554525 - DNA, 75 bp, synthetic construct
  source 1..75: mol_type = other DNA
ggattgtgcgagatgtacttcgtgattatggttactatttgcccggaaatgggatatctgtggaggagcaaaaat

SEQ ID NO: 554526 - DNA, 75 bp, synthetic construct
  source 1..75: mol_type = other DNA
aacacggcagcggaagccatccgtgccctgtcgctgcagatgccgggattccgccgtcagatgaacgaaggctgg

SEQ ID NO: 554527 - DNA, 75 bp, synthetic construct
  source 1..75: mol_type = other DNA
tgctctctatcgcggcgttacgccggtgcactttgatagcgctaatgacggcgtagcagctgccagcgaagcggt

SEQ ID NO: 554528 - DNA, 75 bp, synthetic construct
  source 1..75: mol_type = other DNA
aaggagtcgagtttgggactgtaacggaaaaagacggtgtctatagcgcgacagtaacttcaaaacgagctggta

SEQ ID NO: 554529 - DNA, 75 bp, synthetic construct
  source 1..75: mol_type = other DNA
ctgtacatcctaatcttgggaaacctgatgccaaaattgccagggaatatccagatggtgtatttaagaaaatta

SEQ ID NO: 554530 - DNA, 75 bp, synthetic construct
  source 1..75: mol_type = other DNA
taggtatcgaaaatagccctaaaatgtttgctcttgcagcctcaaatatgatcctccgcggagatggtaaagcaa

SEQ ID NO: 554531 - DNA, 75 bp, synthetic construct
  source 1..75: mol_type = other DNA
acgtctggctcaggtctatgcgcttgtgtcatccgcccatcgtacagtctccagctgtgaggcgtcgatttatct

SEQ ID NO: 554532 - DNA, 75 bp, synthetic construct
  source 1..75: mol_type = other DNA
caaagccgactagcaaattacgaagcaaactttcgtacccctgggctagaggagtgcagaaaaattgtttccacc

SEQ ID NO: 554533 - DNA, 75 bp, synthetic construct
  source 1..75: mol_type = other DNA
ggcactgcgtgacgccacccgtggtggagtgaacgcggtagttcatgagttcgcggcagcctgcggttgtggtat

SEQ ID NO: 554534 - DNA, 75 bp, synthetic construct
  source 1..75: mol_type = other DNA
cagatactcccggataccccatggcgagaggcgttaatcggccttgcacacatcgcggttcaacgcgatcgttaa

SEQ ID NO: 554535 - DNA, 75 bp, synthetic construct
  source 1..75: mol_type = other DNA
agacaaagccatcgcagcgttacaggtgctcccggacaccccgtggagagaagcacttatcggcctcgcgcacat

SEQ ID NO: 554536 - DNA, 75 bp, synthetic construct
  source 1..75: mol_type = other DNA
agacaaagccatcgcagcattacaggtgctcccggacaccccttggcgagaagcactcatcggcctcgcgcacat

SEQ ID NO: 554537 - DNA, 75 bp, synthetic construct
  source 1..75: mol_type = other DNA
gtctggcgcgcgacgcaggttgtgatgcgaaaattgtcgccaaggttgaacgtgcagaagccgtttgcagccagg

SEQ ID NO: 554538 - DNA, 75 bp, synthetic construct
  source 1..75: mol_type = other DNA
ctgaaaggcgttaccgcaatcattaccatgaccgaatccggccgtaccgcgctgatgacctctcgtatcagctct

SEQ ID NO: 554539 - DNA, 75 bp, synthetic construct
  source 1..75: mol_type = other DNA
cgaatggtacgggaacaactgccgaggctgacggcacggtgtccagttatacgttagatctgtttggtcgtaatc

SEQ ID NO: 554540 - DNA, 75 bp, synthetic construct
  source 1..75: mol_type = other DNA
cacggttgatcgtgatggatgaaccaaccgcttcgctgacccatcaggaagtgcaagggttattacaggtggtgc

SEQ ID NO: 554541 - DNA, 75 bp, synthetic construct
  source 1..75: mol_type = other DNA
taaatcgacgttgattaaaattatgtccggtgtttatcgcccggatgagggagcggaaattacgcttggtgggaa

SEQ ID NO: 554542 - DNA, 75 bp, synthetic construct
  source 1..75: mol_type = other DNA
caacccgatgccaacccgtgcagaagttatggacgtggcaaacgccgtgctggatggtactgatgccgtgatgct

SEQ ID NO: 554543 - DNA, 75 bp, synthetic construct
  source 1..75: mol_type = other DNA
gatgcgggcattattgatgcaatggccgaaaatatgcgcagtcggatgctgaccatgggcgattcggtggtgaaa

SEQ ID NO: 554544 - DNA, 75 bp, synthetic construct
  source 1..75: mol_type = other DNA
ctgtttgtgggcatcctgctactgatggcgttcgtggtactgcctatcgcctggcagcagggcatctacttaatc

SEQ ID NO: 554545 - DNA, 75 bp, synthetic construct
  source 1..75: mol_type = other DNA
tggtccgaagaagaggtcctggccacggtcgaagactatttcgacatgctgcgtgccgaggcggctggggagccg

SEQ ID NO: 554546 - DNA, 75 bp, synthetic construct
  source 1..75: mol_type = other DNA
tggcgccgcgcgggctaactttttcccgactatttcgctgactgccagtgccggtgttggcagtgacgcattatc

SEQ ID NO: 554547 - DNA, 75 bp, synthetic construct
  source 1..75: mol_type = other DNA
tgtcaacgccgaacaacaaacggtcgatattggcctgcgtcgttatcaggccggcgttggcgattatctgactgt

SEQ ID NO: 554548 - DNA, 75 bp, synthetic construct
  source 1..75: mol_type = other DNA
aacaggaagaccaggcgcgtcttgagctggcgcagctggtggcggaaggcgaccgcctggcgttttccaccgaca

SEQ ID NO: 554549 - DNA, 75 bp, synthetic construct
  source 1..75: mol_type = other DNA
aatggctggcgattgggccacgactgttgattctcgatagcccgacagtcggtgttgatatcgccaacaaagcag

SEQ ID NO: 554550 - DNA, 75 bp, synthetic construct
  source 1..75: mol_type = other DNA
attgttgagcggggcgatggttgcagcgggattatcgccagcctgatcgaaatgtatcccgaaggtaacgagctg

SEQ ID NO: 554551 - DNA, 75 bp, synthetic construct
  source 1..75: mol_type = other DNA
tggcgttattttgccagcaacgacgccagccaggccgaactggcggcagaagctttgcataatgcgttaacagcg

SEQ ID NO: 554552 - DNA, 75 bp, synthetic construct
  source 1..75: mol_type = other DNA
gtgctgatcacgccttcgcatcatcggattcatcacctgaatgaaaagcaatacgcagacactaattacggcggt

SEQ ID NO: 554553 - DNA, 75 bp, synthetic construct
  source 1..75: mol_type = other DNA
aagctgcaggcggtgaagtgtgcatgacgcgcgccgatcatcagtcaggtacagaacgcctggcggaagttgtcg

SEQ ID NO: 554554 - DNA, 75 bp, synthetic construct
  source 1..75: mol_type = other DNA
cggcgaaaaaatccacgttgctgtagcccaggaagtaccgggaacgggcgtcgatactcccgaagatctcgaacg

SEQ ID NO: 554555 - DNA, 75 bp, synthetic construct
  source 1..75: mol_type = other DNA
ttcgtcaggttgctgataatctcgcccagcgtgaagtaggcatggcaacccttgctgtacctatccacagtgcgg

SEQ ID NO: 554556 - DNA, 75 bp, synthetic construct
  source 1..75: mol_type = other DNA
cgctgcgagacattcccggcgtgaaggcgctgcgcgatgccacccgtggtggggtgaatgcggtggttcatgagt

SEQ ID NO: 554557 - DNA, 75 bp, synthetic construct
  source 1..75: mol_type = other DNA
ggctgatcggtgtcgatgctattcgtggggctgcaatgcgagtaatcggtaacaaatttggtagcacgaaggagt

SEQ ID NO: 554558 - DNA, 75 bp, synthetic construct
  source 1..75: mol_type = other DNA
gttaaacctgctgtgcgcggcgtttgcgaactgctgggactggacgcccttaactttgccaacgaaggcaaactg

SEQ ID NO: 554559 - DNA, 75 bp, synthetic construct
  source 1..75: mol_type = other DNA
tcatggcaatgttgcctatggcgtaaaaaatagtcgattatcctgtaatccgatgcgcgaaagtaatctgccttt

SEQ ID NO: 554560 - DNA, 75 bp, synthetic construct
  source 1..75: mol_type = other DNA
gtgctgatcacgccttctcaccatcgcatccatcatttgaatgaaaaacaatatgccgataccaattacggtggc

SEQ ID NO: 554561 - DNA, 75 bp, synthetic construct
  source 1..75: mol_type = other DNA
aaaacactcgaaattctactctgtggcgctctgacgctgacttttgcatccgctcttgagtatgtcggatggcct

SEQ ID NO: 554562 - DNA, 75 bp, synthetic construct
  source 1..75: mol_type = other DNA
tgaaaaccaccaatggcggggtaggctcgtctttcttggtcagccacaacgaactcgaattctccaaggaggcgg

SEQ ID NO: 554563 - DNA, 75 bp, synthetic construct
  source 1..75: mol_type = other DNA
atggcaaacccggaacaactggaagagcagcgtgaagagacacgtctgattattgaagaattactggaagatggc

SEQ ID NO: 554564 - DNA, 75 bp, synthetic construct
  source 1..75: mol_type = other DNA
tgctgcgacatcctcagcgagtgcgcgttgaatgccgatctgatcgatgcccaggttgaacaactgatgacgctg

SEQ ID NO: 554565 - DNA, 75 bp, synthetic construct
  source 1..75: mol_type = other DNA
acattgaagccatgactgacgatacttatttcaacattgacttcttcgttgctcctgaagtcctgatggaaggcg

SEQ ID NO: 554566 - DNA, 75 bp, synthetic construct
  source 1..75: mol_type = other DNA
cgatgggcgtgcccggttcgctcagcaaccgtccgccggttgcgcctaatcagatcaccaacggtgcgacgcctg

SEQ ID NO: 554567 - DNA, 75 bp, synthetic construct
  source 1..75: mol_type = other DNA
acgccttaacgtggcggtggtgctcaatcaaaacgccccggcgatgaaaaactggaagccggagcagaccgcaca

SEQ ID NO: 554568 - DNA, 75 bp, synthetic construct
  source 1..75: mol_type = other DNA
ctgaacaatgccgccgggatcgacgtccagcgcggtgacaatctcaccttatcgctgcttaactttgtcccgcag

SEQ ID NO: 554569 - DNA, 75 bp, synthetic construct
  source 1..75: mol_type = other DNA
gatgctgctaaagcccccgccgtggtgaatatcatttctgtttcgtcatcccggactcactcgtcaattaagatt

SEQ ID NO: 554570 - DNA, 75 bp, synthetic construct
  source 1..75: mol_type = other DNA
attggcgcggagtactggcgcgactatcttaaattaagcagtaacggctatttgcgactgaccaactggcgcagc

SEQ ID NO: 554571 - DNA, 75 bp, synthetic construct
  source 1..75: mol_type = other DNA
ataccactaaccgtgacggtcaggtactggcaaataaagtacgttccacaccggtcgcggtaagcaccgcgcgtg

SEQ ID NO: 554572 - DNA, 75 bp, synthetic construct
  source 1..75: mol_type = other DNA
tttcggggggaagaagataaaaggtttgctttcttttccatcggtgttcagggggcggatatgaagacgctggca

SEQ ID NO: 554573 - DNA, 75 bp, synthetic construct
  source 1..75: mol_type = other DNA
ccctttaccagcgccgctaattttttcccgcccatcctgtttgcccagggcgatacaccaatgggcgccgccatt

SEQ ID NO: 554574 - DNA, 75 bp, synthetic construct
  source 1..75: mol_type = other DNA
tggatatggttgaggagcggaaacgtgaatatcgtgccaatggtatttcctattatcgtccgtggattttcctga

SEQ ID NO: 554575 - DNA, 75 bp, synthetic construct
  source 1..75: mol_type = other DNA
actcagccgcgaagaagtggtgcgcctgagcgaaaacatggcgcggctttccggtgtcaaaaccagcatggcgcg

SEQ ID NO: 554576 - DNA, 75 bp, synthetic construct
  source 1..75: mol_type = other DNA
atgttaaaactgactgatatcacctggctttatcaccatttgccgatgcgttttagcttaacggtggaacgcggc

SEQ ID NO: 554577 - DNA, 75 bp, synthetic construct
  source 1..75: mol_type = other DNA
gacagcctgccttcgcagagttccggcctcgaagtgaaactcgagttcctgcaaaaactggccatgagcgacacc

SEQ ID NO: 554578 - DNA, 75 bp, synthetic construct
  source 1..75: mol_type = other DNA
cgcagcgtccagcatattcagcatcccggctttgcggtgaaacgcctcaacgtggcggtggtgctcaatcaaaac

SEQ ID NO: 554579 - DNA, 75 bp, synthetic construct
  source 1..75: mol_type = other DNA
ggtgacaaaacctaccgagcggctttggtagaaccacccgcccgtgaagtgcttgtgcggcactgttgcaaatag

SEQ ID NO: 554580 - DNA, 75 bp, synthetic construct
  source 1..75: mol_type = other DNA
ggggattgataatttaatggcacggttaccaggtgagctttccggcggtcaacggcagcgcgtcgcgttagcgcg

SEQ ID NO: 554581 - DNA, 75 bp, synthetic construct
  source 1..75: mol_type = other DNA
gtggtggttgccgacgggcgcatcgcctggcaggggaagacaaatgagttattgagcggtaaggcgagtgcttcg

SEQ ID NO: 554582 - DNA, 75 bp, synthetic construct
  source 1..75: mol_type = other DNA
aaaactggccatgagcgacaccgatcgcgttgccgaagttctcagacaatggatcaccagcaatgagcgaattga

SEQ ID NO: 554583 - DNA, 75 bp, synthetic construct
  source 1..75: mol_type = other DNA
cgaagagagcgtgctggacagcgacaccaatcaggtggcgatgggcgtgcccggttcgctcagcaaccgcccgcc

SEQ ID NO: 554584 - DNA, 75 bp, synthetic construct
  source 1..75: mol_type = other DNA
ccaggtgaacgccattgtgcatctggtgtccggcagtattccggggctacaggccagcaaagtcagcgtcgtcga

SEQ ID NO: 554585 - DNA, 75 bp, synthetic construct
  source 1..75: mol_type = other DNA
atcacaccagaaccggaagccgtcagcgaaccgtggattgccatgccggaagaggagcgcaaaaacgtcgatctg

SEQ ID NO: 554586 - DNA, 75 bp, synthetic construct
  source 1..75: mol_type = other DNA
cccgtaaacgcgatcagatcctcaaagacattcaggacaaaacccgcgccagcgtggcgaacgtgctggattcgc

SEQ ID NO: 554587 - DNA, 75 bp, synthetic construct
  source 1..75: mol_type = other DNA
caaccgtccgccggttgcggcgaatcaaatgaccaacggtacggaagaaaatcgctcgccggaagcgttatccaa

SEQ ID NO: 554588 - DNA, 75 bp, synthetic construct
  source 1..75: mol_type = other DNA
atttctcgcgaactggtacgccgtgaacatgcagcatggtcactggctactttcggcgatgtcggtccagttggt

SEQ ID NO: 554589 - DNA, 75 bp, synthetic construct
  source 1..75: mol_type = other DNA
acggtcctgtatcactcgatcgcctgcaccagatacgcgaaatactcagcaaagcagcagcacaaagcgatggcg

SEQ ID NO: 554590 - DNA, 75 bp, synthetic construct
  source 1..75: mol_type = other DNA
gggagatgttggtgcatacacgcaggcagaatgtaactcaaggtttattacaggtattcgccttggcggtctgtc

SEQ ID NO: 554591 - DNA, 75 bp, synthetic construct
  source 1..75: mol_type = other DNA
ataccggtgcgttctttacgctttgctattcaccgctgaaagccatcatccaggggacgccgaaagcattgtggc

SEQ ID NO: 554592 - DNA, 75 bp, synthetic construct
  source 1..75: mol_type = other DNA
gtcggcaatgattgcaacagtggttgtcgtactggtggtgacatttgcgaacgtcttcaccatcattcaacctgt

SEQ ID NO: 554593 - DNA, 75 bp, synthetic construct
  source 1..75: mol_type = other DNA
ctgaagcgtcattgtcgctgggcgtatggtttgcgcgtattactggactttcgatgttcctcgcctataccggtg

SEQ ID NO: 554594 - DNA, 75 bp, synthetic construct
  source 1..75: mol_type = other DNA
gaaaatgcgcgcggcgctggaacagttgaaagggctggaaaatctctctggcgatctgtacgagaagatcaccaa

SEQ ID NO: 554595 - DNA, 75 bp, synthetic construct
  source 1..75: mol_type = other DNA
cgaacccgccgccctggaactggtgcaaagccgcctgcaaatcctctttcctggtgtcaaaaaggcagaacagta

SEQ ID NO: 554596 - DNA, 75 bp, synthetic construct
  source 1..75: mol_type = other DNA
cggcagatccgcgttatctggcggccagctggcaggcgggccataccggcagtggcctgcattatcgccgttatc

SEQ ID NO: 554597 - DNA, 75 bp, synthetic construct
  source 1..75: mol_type = other DNA
tggtagcggtcgcctgaaggatcgtaaagcactggtgacaggggggcgattccggaatcggtcgcgctgccgcca

SEQ ID NO: 554598 - DNA, 75 bp, synthetic construct
  source 1..75: mol_type = other DNA
aaagcactggtgacagggggcgattccggaatcggtcgcgctgccgccattgcttacgcgcgtgaaggggctgac

SEQ ID NO: 554599 - DNA, 75 bp, synthetic construct
  source 1..75: mol_type = other DNA
aaactagtccttccagtttccgcgatggacatcaggaaagtacaaaaagtttggaatactattaaaagcggcgga

SEQ ID NO: 554600 - DNA, 75 bp, synthetic construct
  source 1..75: mol_type = other DNA
gtcggcaatgattgcgacggtggttgtcgtactggtggtgacatttgcgaacgtcttcaccatcattcaacctgt

SEQ ID NO: 554601 - DNA, 75 bp, synthetic construct
  source 1..75: mol_type = other DNA
cagcaaagcctttaagcataaatttggttatgcgccgtcagctgtgctgaagaatacggacaggtcgagtgtgta

SEQ ID NO: 554602 - DNA, 75 bp, synthetic construct
  source 1..75: mol_type = other DNA
aaagccaatggatattcactcttatcactgtgaaggtttagtctgggaacagtactggatggaatttacccccac

SEQ ID NO: 554603 - DNA, 75 bp, synthetic construct
  source 1..75: mol_type = other DNA
cgcctgacggcgcatctgacggtaataaggcaatcactgaaacagagcatggtgcggtgaaggcgatgttcaggg

SEQ ID NO: 554604 - DNA, 75 bp, synthetic construct
  source 1..75: mol_type = other DNA
gaccgcattaaatacggcagccagcgattttgcgcaaatgcagtcgctgtctggcgacgctcaccatgacgcagt

SEQ ID NO: 554605 - DNA, 75 bp, synthetic construct
  source 1..75: mol_type = other DNA
agagatggcagcaagtgaaaaagcgtatgcggatgcgcaatttctcactgagagcgtcatggcgctatttaatcc

SEQ ID NO: 554606 - DNA, 75 bp, synthetic construct
  source 1..75: mol_type = other DNA
ctgcgccgcgttattccggcaatgggtgggattgatttctcgccgatgatcctcgttctgctgctgtatgtcatc

SEQ ID NO: 554607 - DNA, 75 bp, synthetic construct
  source 1..75: mol_type = other DNA
aaagggattaataaaatagcccgtattactgcggtaggtggtatagcagtaatgtgtcttaatttagtattactg

SEQ ID NO: 554608 - DNA, 75 bp, synthetic construct
  source 1..75: mol_type = other DNA
ggtggttggtctgctggcagtggcatggatgattctggtcaccgtcgttgcttcaaaggggattaataaaattgc

SEQ ID NO: 554609 - DNA, 75 bp, synthetic construct
  source 1..75: mol_type = other DNA
atgacgcttccttacctgttccttgcactggctttcccgttctttaaagcacgtcaggatctcgacagaccgttt

SEQ ID NO: 554610 - DNA, 75 bp, synthetic construct
  source 1..75: mol_type = other DNA
gcgatgcatttggaggcttcctaactacatattctaagttgctattagggattatggggctattagtagtttctt

SEQ ID NO: 554611 - DNA, 75 bp, synthetic construct
  source 1..75: mol_type = other DNA
cggcagatccgcgttatctcgccgccagttggcagtcaggtcataccggtagtggcctgcactatcgccgttttc

SEQ ID NO: 554612 - DNA, 75 bp, synthetic construct
  source 1..75: mol_type = other DNA
tgcaattcctgctatgggatgcgcaacgccgtgccggtatcactgacgagcagattacccatgcgatgattgaaa

SEQ ID NO: 554613 - DNA, 75 bp, synthetic construct
  source 1..75: mol_type = other DNA
tacgctcgtcgaagtgtatgacgatggatgtatttctaatattccaaacagggctgtaatgcgccggggccagac

SEQ ID NO: 554614 - DNA, 75 bp, synthetic construct
  source 1..75: mol_type = other DNA
gaagttgtacacaccacgttaagtcatcgccgctttcccggagctcctgttcagcaagcagacaaattgacctaa

SEQ ID NO: 554615 - DNA, 75 bp, synthetic construct
  source 1..75: mol_type = other DNA
tcaggaacaaccctctttcgtagcagaaacccgtgcggctgacaaaaatacagatgctgttttaccgtggctggc

SEQ ID NO: 554616 - DNA, 75 bp, synthetic construct
  source 1..75: mol_type = other DNA
aggcgatcagtcagatcgacggcctgaaaacaacacagctaccatcacccgtaatggctgtactcacggcacttg

SEQ ID NO: 554617 - DNA, 75 bp, synthetic construct
  source 1..75: mol_type = other DNA
cgttataccgtctgggctggcctgatggcgggggttggtctgactctgctgtacctggcgctgttccgtctgggt

SEQ ID NO: 554618 - DNA, 75 bp, synthetic construct
  source 1..75: mol_type = other DNA
caattacgtcgcttagcctgtagtgtgtcgcaacgggataatacaacagccacatttgacttcagcgcctgggta

SEQ ID NO: 554619 - DNA, 75 bp, synthetic construct
  source 1..75: mol_type = other DNA
tcaggaacaaccctctttcgtagcagaaacccgtgcggctgacaaaaatacagacgttattttaccgtggctggc

SEQ ID NO: 554620 - DNA, 75 bp, synthetic construct
  source 1..75: mol_type = other DNA
acgcccggataacagcgcgattattgcggcacgggaagcccgtaaagcacaagccagagcaaaactggcagaatt

SEQ ID NO: 554621 - DNA, 75 bp, synthetic construct
  source 1..75: mol_type = other DNA
gctattgcccgtgccaaagcacgcaagctggaacagcaacaggctaacgcagaaccagaagaacaggttgatccg

SEQ ID NO: 554622 - DNA, 75 bp, synthetic construct
  source 1..75: mol_type = other DNA
gaaaaaataaaatctgggatttcaacggcggcatccatccaccggagatgaaaacccagtccaacggtacgcccc

SEQ ID NO: 554623 - DNA, 75 bp, synthetic construct
  source 1..75: mol_type = other DNA
aaccgttgcaagccctcgaagcaccggtcgaaccgtggtttaaaccgctggcgtatgccttaattttgttgcggg

SEQ ID NO: 554624 - DNA, 75 bp, synthetic construct
  source 1..75: mol_type = other DNA
cgaccagatggacgtgctggatatcctgaacgatgacggcgggatgaagccgatcgctgaatggccgaaggtctg

SEQ ID NO: 554625 - DNA, 75 bp, synthetic construct
  source 1..75: mol_type = other DNA
ttgaagccgctatcgcccgcgccaaagcacgcaaactggaacaacagcaagccagcgcagaagcggaagaacaga

SEQ ID NO: 554626 - DNA, 75 bp, synthetic construct
  source 1..75: mol_type = other DNA
gaaagatattgctgtcgtttttccgcccgaagttgtacacaccacgttaagtcatgccgctttcccggagttcct

SEQ ID NO: 554627 - DNA, 75 bp, synthetic construct
  source 1..75: mol_type = other DNA
tgctggcccatttttacgccgtagcgaactgggatatcccggacggttttctctgcccgccagtgccaggtcggg

SEQ ID NO: 554628 - DNA, 75 bp, synthetic construct
  source 1..75: mol_type = other DNA
gtaaaaaaagagatggcccaggggcaaaagcagagtcgctttattgcctggacctttatgaacgacgagcagcgc

SEQ ID NO: 554629 - DNA, 75 bp, synthetic construct
  source 1..75: mol_type = other DNA
agcagcagcgcgtgccggcagcgaacgcaaacggcgtaacctggggctggacagagataacgcgctgaactttgg

SEQ ID NO: 554630 - DNA, 75 bp, synthetic construct
  source 1..75: mol_type = other DNA
aaagaaagcagctattttattaggcgcgaatgttgaaattgctagccgtagcttcaataatgttgatattgttga

SEQ ID NO: 554631 - DNA, 75 bp, synthetic construct
  source 1..75: mol_type = other DNA
tcatcctatagatctctttattgctgaaaaattattgcaagaagctaataaaatttcttataatcctgaagatga

SEQ ID NO: 554632 - DNA, 75 bp, synthetic construct
  source 1..75: mol_type = other DNA
acatttaatgaaataaattctctaataggaattaattacgttggtgcagttaatatagctatctctgcaaaaaaa

SEQ ID NO: 554633 - DNA, 75 bp, synthetic construct
  source 1..75: mol_type = other DNA
gcagtgaaggcgctcaacaaggcgctgttggcacatttttatgctgtggcgagctgggatatccctgacggtttt

SEQ ID NO: 554634 - DNA, 75 bp, synthetic construct
  source 1..75: mol_type = other DNA
tgtcgcaacgggataacaaaacagctacatttgacttcagcgcctgtactttagagtggcaaaacttcatcgctc

SEQ ID NO: 554635 - DNA, 75 bp, synthetic construct
  source 1..75: mol_type = other DNA
gatcagatcgtccaggaaggcggtctggaatatgctactgatgtaataatacaccttcaacagattgatatttaa

SEQ ID NO: 554636 - DNA, 75 bp, synthetic construct
  source 1..75: mol_type = other DNA
aaaagcagagccgcttcattgcctggacctttatgaacgacgaacagcgtcgtcgttttgccaatcgtcagcgtt

SEQ ID NO: 554637 - DNA, 75 bp, synthetic construct
  source 1..75: mol_type = other DNA
ccggggcttaaccgcgccattcgtctgcgtcggcaaaaagagagcggtgctatttttaacggcattatccacaaa

SEQ ID NO: 554638 - DNA, 75 bp, synthetic construct
  source 1..75: mol_type = other DNA
ccggggcttaaccgcgccatccgcctgcgtcggcaaaaagagaatagtgctatttttaacggcattatccataaa

SEQ ID NO: 554639 - DNA, 75 bp, synthetic construct
  source 1..75: mol_type = other DNA
gataatgagcgaaaatatggtttttatgatgcaaatgttggtgttgttgagttttcagatacagaaaagtttaag

SEQ ID NO: 554640 - DNA, 75 bp, synthetic construct
  source 1..75: mol_type = other DNA
tctaaaaaaccaagcaagtattttggaaaaacttcgggctgaagcatctccagcagttcaagataatatatctga

SEQ ID NO: 554641 - DNA, 75 bp, synthetic construct
  source 1..75: mol_type = other DNA
ggtaacgcagccgattatcgggccactgcgccgcgttattccggcaatggggcccattgacagcgcctcactgct

SEQ ID NO: 554642 - DNA, 75 bp, synthetic construct
  source 1..75: mol_type = other DNA
ataagcgaaagagaagtttcagaatatgaatgccagttattatatttaaccaacccaatagatgtaatgaatata

SEQ ID NO: 554643 - DNA, 75 bp, synthetic construct
  source 1..75: mol_type = other DNA
gacatatctgcgaaattacgttaagttatgtttatccggatacacaccagcgaatgcgcatttcaaagatatctt

SEQ ID NO: 554644 - DNA, 75 bp, synthetic construct
  source 1..75: mol_type = other DNA
attgataaagaacaagtattgagtaaagaacaacgaaaagttatatttaggagatatgaagatctctatgttaag

SEQ ID NO: 554645 - DNA, 75 bp, synthetic construct
  source 1..75: mol_type = other DNA
gccacgcggtcgctcaatgacgctaaaaatattcttattgctgattgtgaaaatgggggggggttatgcgtgatg

SEQ ID NO: 554646 - DNA, 75 bp, synthetic construct
  source 1..75: mol_type = other DNA
cagaacaacgaaaagttatatttaggagatatgaagatctctatgttaagctaatgcactattctgtttttacag

SEQ ID NO: 554647 - DNA, 75 bp, synthetic construct
  source 1..75: mol_type = other DNA
ctgggtaagtcagggtcgcagcccaattgaatatgtgctgatccagcttgccgatccgctactgcgtccgattcg

SEQ ID NO: 554648 - DNA, 75 bp, synthetic construct
  source 1..75: mol_type = other DNA
taaccttcctgccgatcatctggattgccggtttgctgattctgctgaaaactatcggcctgctgatcttctggg

SEQ ID NO: 554649 - DNA, 75 bp, synthetic construct
  source 1..75: mol_type = other DNA
atgaaccgtttcatcattgctgacgcgagtaaatgtattggttgccgtacctgtgaagtggcgtgcgtggtttct

SEQ ID NO: 554650 - DNA, 75 bp, synthetic construct
  source 1..75: mol_type = other DNA
gaacaacggcgtcacattacaaaacatagaaaactctttaaaagattcttcatgccattatgtcttaaatggcta

SEQ ID NO: 554651 - DNA, 75 bp, synthetic construct
  source 1..75: mol_type = other DNA
gaaagattactataattcattaggtgagctgggtgagtgccggattgatagagaggccagaaacttcaaaggatt

SEQ ID NO: 554652 - DNA, 75 bp, synthetic construct
  source 1..75: mol_type = other DNA
attcatccatgctgatagcatcgacattttgccgaagcgaccatcatgccaaccgttattacgcacgccgccgtt

SEQ ID NO: 554653 - DNA, 75 bp, synthetic construct
  source 1..75: mol_type = other DNA
gtactcattggtttacagtcaaaggaggtgaaaaaggtattgcagttttccctaatggagttggcaattttaata

SEQ ID NO: 554654 - DNA, 75 bp, synthetic construct
  source 1..75: mol_type = other DNA
attgttgaaaaacactgtatcacaaattgaatattatcagcagcatgggaataataaattattacagtccaggga

SEQ ID NO: 554655 - DNA, 75 bp, synthetic construct
  source 1..75: mol_type = other DNA
ccaaagctgagtgatatggaagttagaaaaagaagtaaatatgctgttgcttgtgttaatgatgatgacctgtat

SEQ ID NO: 554656 - DNA, 75 bp, synthetic construct
  source 1..75: mol_type = other DNA
tacactccctattgaaaataagatacattatctgatgtcagatattcataaacaatttaaagataatgttcagtc

SEQ ID NO: 554657 - DNA, 75 bp, synthetic construct
  source 1..75: mol_type = other DNA
tgtgatgaattatgcatatactagaggaatattaaatttcagcgatcaagatcgaatttcatttctgaaagaaat

SEQ ID NO: 554658 - DNA, 75 bp, synthetic construct
  source 1..75: mol_type = other DNA
gtggttcgtgttacagatcctaacttcggatatgctgatttttcatctctggaacaatcattagcatttattgag

SEQ ID NO: 554659 - DNA, 75 bp, synthetic construct
  source 1..75: mol_type = other DNA
taaatgacattatagacagcagaaacatatcagccccccatgaactggcaaatattcttacccgcgaaaaaatac

SEQ ID NO: 554660 - DNA, 75 bp, synthetic construct
  source 1..75: mol_type = other DNA
gttgcaagagaaaattatcctttggttgaagtaataaataaaaatgctgaggttgttacaggcaataaaaatgtt

SEQ ID NO: 554661 - DNA, 75 bp, synthetic construct
  source 1..75: mol_type = other DNA
tcaaggaagaattttatctaagatagctaatgtaattaagtttcctgtcatcgatacagcattaaatttatggtc

SEQ ID NO: 554662 - DNA, 75 bp, synthetic construct
  source 1..75: mol_type = other DNA
atgcatcaacgttcggagtagataccactactattttagataaattatacaataaattattcggtatcgaagaga

SEQ ID NO: 554663 - DNA, 75 bp, synthetic construct
  source 1..75: mol_type = other DNA
agcaggaagcgatgctgcgggaagtaatgccatcagcacgtacggaatgcccggttattagggtgatgaaagatt

SEQ ID NO: 554664 - DNA, 75 bp, synthetic construct
  source 1..75: mol_type = other DNA
gtttatcgatgctgaacacgcgctggacccagtctatgcacgtaaactgggcgtcgatattgataatctgctgtg

SEQ ID NO: 554665 - DNA, 75 bp, synthetic construct
  source 1..75: mol_type = other DNA
aagcgttggcggcagcactgggccagattgagaaacaatttggtaaaggctccatcatgcgcttgggtgaagacc

SEQ ID NO: 554666 - DNA, 75 bp, synthetic construct
  source 1..75: mol_type = other DNA
caaaaaaaacggtcctcatcagagaaccgtattagttattcgatcaaattagcggatgaaaaatatccgccatga

SEQ ID NO: 554667 - DNA, 75 bp, synthetic construct
  source 1..75: mol_type = other DNA
tgctggcccggcgtacgctgctcgcaggtatgcgtgaacccaatatcgccaacgtcaaagaggcgcaggagagcc

SEQ ID NO: 554668 - DNA, 75 bp, synthetic construct
  source 1..75: mol_type = other DNA
cgaccatcgcagatggtgtgatgagcttgatagcagtttcccctattttgcggaagggaactcttgccctgaatg

SEQ ID NO: 554669 - DNA, 75 bp, synthetic construct
  source 1..75: mol_type = other DNA
aggtaggttaactccattaacttacgatgcaattcgaacattttataaggaaaaaattgatccggcattcattgc

SEQ ID NO: 554670 - DNA, 75 bp, synthetic construct
  source 1..75: mol_type = other DNA
gaagatgcctgtagctacagattttattttcagtgctggcacattacgcagtaaaggcgaagccgtaacccgtaa

SEQ ID NO: 554671 - DNA, 75 bp, synthetic construct
  source 1..75: mol_type = other DNA
tatcgccgccaatttacgcccggcacaactcactgattcgggtatgagtagtcatggttccccgattgttggtcc

SEQ ID NO: 554672 - DNA, 75 bp, synthetic construct
  source 1..75: mol_type = other DNA
aacaggcttagtggacggtatagagcaggttaatggcctggatacacaggcgatagcagcactccaggaagcaat

SEQ ID NO: 554673 - DNA, 75 bp, synthetic construct
  source 1..75: mol_type = other DNA
cgcaaggacaccagcctgcgttatttatcgtcgcgtatagaactgctggaagaacgcgcccgctggcagcaacgc

SEQ ID NO: 554674 - DNA, 75 bp, synthetic construct
  source 1..75: mol_type = other DNA
catctgctggaacagtgctcgcgacatgaaaacaaagccattcgcgccactgcacaaggcattctgtacgacatt

SEQ ID NO: 554675 - DNA, 75 bp, synthetic construct
  source 1..75: mol_type = other DNA
gcgctctactatgtattacatcgggtatggtcaggatgtgcaggatgatttagcagaggagttttctttagaatg

SEQ ID NO: 554676 - DNA, 75 bp, synthetic construct
  source 1..75: mol_type = other DNA
cacctggacatcccccgaagaggccgccggatggatgacccgcgttgtcggcgagcagaccatcagcgtggcaca

SEQ ID NO: 554677 - DNA, 75 bp, synthetic construct
  source 1..75: mol_type = other DNA
aattatttcagatgatcctgtctgatgcaaaaaactatgctgagttaatccggctggcaaaagaaacagaagact

SEQ ID NO: 554678 - DNA, 75 bp, synthetic construct
  source 1..75: mol_type = other DNA
gctacgaccgcttatgtaagagctgccatatccgcattggttggttcatcaccagaagctcttgataccctgaat

SEQ ID NO: 554679 - DNA, 75 bp, synthetic construct
  source 1..75: mol_type = other DNA
ggtatcgcttatgctactgctgattctgttataactgttggaaaccctgctaatcctaaagcaggaaataatagc

SEQ ID NO: 554680 - DNA, 75 bp, synthetic construct
  source 1..75: mol_type = other DNA
aggagtcaacattagcagaacgttgtagcatggactatatgggttatgctggctattcatcattagcagatgatt

SEQ ID NO: 554681 - DNA, 75 bp, synthetic construct
  source 1..75: mol_type = other DNA
tggaactggagaaaatgtgatccgattattaataatgcatatgttattagctaccatacccgtagcatggatatg

SEQ ID NO: 554682 - DNA, 75 bp, synthetic construct
  source 1..75: mol_type = other DNA
ttaaagcagcaaaaatattttatccagaatatggaaccgtaaaaaaactctcttttgaagtagacaatgaactct

SEQ ID NO: 554683 - DNA, 75 bp, synthetic construct
  source 1..75: mol_type = other DNA
ctaaacgctacgccgagattgccacgcaggcaattatgaattcactgggatataaaatgggggatgagctgattc

SEQ ID NO: 554684 - DNA, 75 bp, synthetic construct
  source 1..75: mol_type = other DNA
aatatttctacaggccaaagaaatctgctcatggttttataaaaggaaagagcatcattactaatgctgggatgc

SEQ ID NO: 554685 - DNA, 75 bp, synthetic construct
  source 1..75: mol_type = other DNA
tcgtcgcctttctcgccccggcagccgacaaatatcaatacaagcaacagggggcgatcagcgactggatgtatt

SEQ ID NO: 554686 - DNA, 75 bp, synthetic construct
  source 1..75: mol_type = other DNA
ctgctattactcaggaaatgatagatgtatccgaccgcatcgatctcacgataggcattgaaatttccgactctg

SEQ ID NO: 554687 - DNA, 75 bp, synthetic construct
  source 1..75: mol_type = other DNA
atgatctggttgataaaagaattcgactctcaggggatcgcagtccggtttattgacgacgggatcagtaccgac

SEQ ID NO: 554688 - DNA, 75 bp, synthetic construct
  source 1..75: mol_type = other DNA
aacgtgcgcttgatctgcaaggtgatgccctgttcgcagagattatccgtggcgtcgcgacaggtatgaaattgc

SEQ ID NO: 554689 - DNA, 75 bp, synthetic construct
  source 1..75: mol_type = other DNA
cacggcgacggcagataaaaacagcctcgataccgggacgctcggcttcagcgatattcacaacgaagcggatta

SEQ ID NO: 554690 - DNA, 75 bp, synthetic construct
  source 1..75: mol_type = other DNA
gggggatgcggcttttgatacccggtatgtcagtaacgtcatactgaatcaaacgggctcacgttatatcaacgg

SEQ ID NO: 554691 - DNA, 75 bp, synthetic construct
  source 1..75: mol_type = other DNA
atctcctcgatatcaccagtgttgatgcacagaatcagcagcaggtgaaaaacgccatgattaactatttcatgg

SEQ ID NO: 554692 - DNA, 75 bp, synthetic construct
  source 1..75: mol_type = other DNA
tttggttttggcccaagttggggttggagtgcaactgaaattaaaggcgttgacgttaatggcacttcaacaagt

SEQ ID NO: 554693 - DNA, 75 bp, synthetic construct
  source 1..75: mol_type = other DNA
gggcggcaatatggcaggcgcgctggcaggtgcttcagcgccggagctggcgaacatcatcggtcatcacgcggg

SEQ ID NO: 554694 - DNA, 75 bp, synthetic construct
  source 1..75: mol_type = other DNA
tggggcttatcagtgacattggcagtcaggtggcggatatcgcgcggacgcagggggaactgaatgcgttgaagg

SEQ ID NO: 554695 - DNA, 75 bp, synthetic construct
  source 1..75: mol_type = other DNA
gggcggtgcagcagcggcaatgcagggtaataatgttgctgccggtgcagcaggcgccgcaacaggagaattggc

SEQ ID NO: 554696 - DNA, 75 bp, synthetic construct
  source 1..75: mol_type = other DNA
gctaatgacagtatcagcccgatatttgacaaggagaaggagcagaggcgtctgcagacagtggggcttatcagt

SEQ ID NO: 554697 - DNA, 75 bp, synthetic construct
  source 1..75: mol_type = other DNA
gcagcatcaacgcacagaatgacctcctgctcgacagcacaggcagtatcgacaacctgaatgccggactgataa

SEQ ID NO: 554698 - DNA, 75 bp, synthetic construct
  source 1..75: mol_type = other DNA
caacaacaacccggactaacccctcatccattcagggaatgggaaatgctctggttgatattcccctttcccttc

SEQ ID NO: 554699 - DNA, 75 bp, synthetic construct
  source 1..75: mol_type = other DNA
acagtgcgctgatttatgcggggaataacctgaagctgtttacagaccgtctgcataaccagcatggtgatatcc

SEQ ID NO: 554700 - DNA, 75 bp, synthetic construct
  source 1..75: mol_type = other DNA
gcacaggcaggcaggaactcggttgagaataattatcttagcgtgtctgaaaagacagagcttgagatagcaaaa

SEQ ID NO: 554701 - DNA, 75 bp, synthetic construct
  source 1..75: mol_type = other DNA
attccgtttttaaaacgcagaaatatatatatattaaaaatactgacaatcgttggtttagttttggcaattttt

SEQ ID NO: 554702 - DNA, 75 bp, synthetic construct
  source 1..75: mol_type = other DNA
aatggcggtactggagggaaaatctgtcacgtttaacgggcaacaactgacgctggaaagtctgtcacagatccg

SEQ ID NO: 554703 - DNA, 75 bp, synthetic construct
  source 1..75: mol_type = other DNA
ccatggaaaacttatctgagatccggcagggacggcaggagtgggagcgccgccttgcggctctgattacacgac

SEQ ID NO: 554704 - DNA, 75 bp, synthetic construct
  source 1..75: mol_type = other DNA
ttgatgagaaaattaaaaacaacgggaaacaattgtagcgtattgctgaaattttcaacgagaaatgttatgagt

SEQ ID NO: 554705 - DNA, 75 bp, synthetic construct
  source 1..75: mol_type = other DNA
tccgtttcccgaaaactctgtcagagcagaaccgtattatcggactgccacttgatgaagccatccccgcagctg

SEQ ID NO: 554706 - DNA, 75 bp, synthetic construct
  source 1..75: mol_type = other DNA
gcagggcttggtgatgccctccccgtttcggcgctgccgccagacggcacctggccgatgggcaccactcgctgg

SEQ ID NO: 554707 - DNA, 75 bp, synthetic construct
  source 1..75: mol_type = other DNA
gatgtacggccatgtttatgtggcgcagatttctctcggcgcgcagctgaaccagacggtgaaagcaattcagga

SEQ ID NO: 554708 - DNA, 75 bp, synthetic construct
  source 1..75: mol_type = other DNA
tagtagcgctggcaaattcgcgaataaagcagcagaagctggactggttgtttttgatgcagttccaggtttaga

SEQ ID NO: 554709 - DNA, 75 bp, synthetic construct
  source 1..75: mol_type = other DNA
gctatcttacaagggttaaaaacggtattttctaaatttacaccagatcgtatccttgtccatggagatacagca

SEQ ID NO: 554710 - DNA, 75 bp, synthetic construct
  source 1..75: mol_type = other DNA
ctgcaaatcgatctcaatgagccggacctctttctcgacagcgactctctgagccagcttcccaaagatctcctt

SEQ ID NO: 554711 - DNA, 75 bp, synthetic construct
  source 1..75: mol_type = other DNA
tttgccgcgatacgcgaacgcctggctgtagccgatgtcccggcccctttccgcggtaatgccattgcactgatt

SEQ ID NO: 554712 - DNA, 75 bp, synthetic construct
  source 1..75: mol_type = other DNA
taatctgatttacctgcgcaccctggcgtttattctggtgattgctgtggttgtgcagttcaccgagatggtggt

SEQ ID NO: 554713 - DNA, 75 bp, synthetic construct
  source 1..75: mol_type = other DNA
gcccaccgctgtacggtttgttatacccattgatttctctggctcaggcctttcgtgtaatcggacatgatgtag

SEQ ID NO: 554714 - DNA, 75 bp, synthetic construct
  source 1..75: mol_type = other DNA
gttcaggaaaatctcggaatatggccgcccaatcgcggagcttacgggccggttgagaaagtgactttgccagcg

SEQ ID NO: 554715 - DNA, 75 bp, synthetic construct
  source 1..75: mol_type = other DNA
cctgttgcctgtgtcgcgactttactgcttggtttgctcgcgggatttttcaacggtgtcctggtcgcgtggcta

SEQ ID NO: 554716 - DNA, 75 bp, synthetic construct
  source 1..75: mol_type = other DNA
gcttcgcagattggttttatccccaaccagaccggtaccgggctggagatgaaagcaattgcagcctgcgtgctg

SEQ ID NO: 554717 - DNA, 75 bp, synthetic construct
  source 1..75: mol_type = other DNA
tttacagggcgctcgtcaactgggtgttcgtacggaagccattcgcattgtggcattttcgttgaacggctgcat

SEQ ID NO: 554718 - DNA, 75 bp, synthetic construct
  source 1..75: mol_type = other DNA
caacagcggtaccctgctgggaacctccgggcttggcgtcaagggcagttcactgctgcaaaatggtacagggcg

SEQ ID NO: 554719 - DNA, 75 bp, synthetic construct
  source 1..75: mol_type = other DNA
atacccgcgactttacccagagcggccgcactggcgcgaagggcaaagtggatatcatggccagtgggaaactga

SEQ ID NO: 554720 - DNA, 75 bp, synthetic construct
  source 1..75: mol_type = other DNA
atgggcgcgacgctggtaatgcttacgcgcaatattgatgtttcagtgggttcgattaccggaatgtgcgcggtg

SEQ ID NO: 554721 - DNA, 75 bp, synthetic construct
  source 1..75: mol_type = other DNA
taatcttggtaacctttatgcccgtgagggcgatatcatactgagcagttccggaaaactggtcctgaagaacag

SEQ ID NO: 554722 - DNA, 75 bp, synthetic construct
  source 1..75: mol_type = other DNA
gcggcacctgaaattaacacgccggcagagaaaaatatcagcccgggaatggctcaactggcgccggatggcaca

SEQ ID NO: 554723 - DNA, 75 bp, synthetic construct
  source 1..75: mol_type = other DNA
gtgccacaaacgacgggcaattacagggaaatgccaccaccatcacggcaggacaactcacaaacggcgggcatc

SEQ ID NO: 554724 - DNA, 75 bp, synthetic construct
  source 1..75: mol_type = other DNA
aattctggtggcatttatggcctggctgctggcaaagacggcgtttggacgcagtttttatgccacgggcgataa

SEQ ID NO: 554725 - DNA, 75 bp, synthetic construct
  source 1..75: mol_type = other DNA
cagcgcgcaaatcctgatcctgctggcaatgggcgcgacgctggtaatgcttacgcgcaatattgatgtttcagt

SEQ ID NO: 554726 - DNA, 75 bp, synthetic construct
  source 1..75: mol_type = other DNA
ggtgaactgactgccggacagaacgccatgctcagtgcacagcacctgaaccagacttccggggccgtgaatgca

SEQ ID NO: 554727 - DNA, 75 bp, synthetic construct
  source 1..75: mol_type = other DNA
aggggcaggtggtggccaccggtgatgtcacactgaaactgattgctgccctcacgaatcatggtaccctggccg

SEQ ID NO: 554728 - DNA, 75 bp, synthetic construct
  source 1..75: mol_type = other DNA
tcgataaatggtggttttggcgttggtgcagtggggctttctacgggtaaagatggtgttagtttcacttttggt

SEQ ID NO: 554729 - DNA, 75 bp, synthetic construct
  source 1..75: mol_type = other DNA
aatgtctgcaggaaggttcacgggaatgtcgccagcaccagggacagggcccggctccacaataccagcgccggc

SEQ ID NO: 554730 - DNA, 75 bp, synthetic construct
  source 1..75: mol_type = other DNA
aattcatcattatttgatgagattcgtgcggaacatgaacagcaggcaattcattgcgtactggttgatgaatgc

SEQ ID NO: 554731 - DNA, 75 bp, synthetic construct
  source 1..75: mol_type = other DNA
gcggcccgcgatatcgtgactgtcgccagtgacacgttgacaacacagggacagataaccgccgggcagaatctc

SEQ ID NO: 554732 - DNA, 75 bp, synthetic construct
  source 1..75: mol_type = other DNA
gccggtaatgacctgaacatgaacgcgatacaggccggagaacgtcgtcgctatggcgggtccgggtggtatgaa

SEQ ID NO: 554733 - DNA, 75 bp, synthetic construct
  source 1..75: mol_type = other DNA
gggaccaccggaaaggaaacggtctggcggcttgcctcaggctcactccccaaagcgtggtttactgagccatgg

SEQ ID NO: 554734 - DNA, 75 bp, synthetic construct
  source 1..75: mol_type = other DNA
ggccctgtatggaatgacgcgctgccggatacgctgaaggatatcccgggtgcgctgtcgctgtacggggcaagt

SEQ ID NO: 554735 - DNA, 75 bp, synthetic construct
  source 1..75: mol_type = other DNA
gcgaaccgggatatcagcattaccggtgacagtgtggtggttgacccggggcatgaccgtcgtactgtggacgaa

SEQ ID NO: 554736 - DNA, 75 bp, synthetic construct
  source 1..75: mol_type = other DNA
taatgatatcaacattgccgcaaacctgataagtgggagcgtaagcttccggggaactcatattgacgcgttttt

SEQ ID NO: 554737 - DNA, 75 bp, synthetic construct
  source 1..75: mol_type = other DNA
ggtccgacaaactggttgaattaaaaaccatctgtttttgtggccgcaaagcaagcatggtgctgcgtcttgatc

SEQ ID NO: 554738 - DNA, 75 bp, synthetic construct
  source 1..75: mol_type = other DNA
gtcagcttataaccgtggctgaagaatctgttttctgtttgggtgattttattttgcccttcaatgggaccgcta

SEQ ID NO: 554739 - DNA, 75 bp, synthetic construct
  source 1..75: mol_type = other DNA
gcgcgaggggactgaaatcgatcttggtgctgatccgcatagttgtgatgatggtatccatgctgccgcaactgg

SEQ ID NO: 554740 - DNA, 75 bp, synthetic construct
  source 1..75: mol_type = other DNA
gcgagcaggtaaaagagtcaagcgaagaacccgtctggctggcgccccgacaaatgccgcaactggcaccgctgt

SEQ ID NO: 554741 - DNA, 75 bp, synthetic construct
  source 1..75: mol_type = other DNA
gccctttattatcattctggcggcgtggggagcagataaactctggcctctgccgctgcatgaagtcaatcccgc

SEQ ID NO: 554742 - DNA, 75 bp, synthetic construct
  source 1..75: mol_type = other DNA
gcttgatcctcaccccaaaacgtttggcggcaaaattcgccagctctggcgcgcgttgcaactggaatggcatct

SEQ ID NO: 554743 - DNA, 75 bp, synthetic construct
  source 1..75: mol_type = other DNA
cacgctcactatgcaggttgctcgtctgcttgatcctcaccccaaaacatttggtggcaaaattctccagctctg

SEQ ID NO: 554744 - DNA, 75 bp, synthetic construct
  source 1..75: mol_type = other DNA
tctgcatttaacggaaaaaggcgattatcaattgctggtaatggatgaagtggggcaggtagcgacagtgagatt

SEQ ID NO: 554745 - DNA, 75 bp, synthetic construct
  source 1..75: mol_type = other DNA
aggtcaataatatcttactgtcacgcagtgcaaatctgccggaagatccgcgcccgaactccgtcactcgtggtg

SEQ ID NO: 554746 - DNA, 75 bp, synthetic construct
  source 1..75: mol_type = other DNA
aaagcggagaacaccttcgtctcgcaacgctggaaagtgtctggattcagggcaaactgcgtatgtgggggcgct

SEQ ID NO: 554747 - DNA, 75 bp, synthetic construct
  source 1..75: mol_type = other DNA
gccagcgcgtgatgattgcgatggccattgcctgtcggccaaaactgctgattgccgatgaaccaaccactgcgc

SEQ ID NO: 554748 - DNA, 75 bp, synthetic construct
  source 1..75: mol_type = other DNA
gatgatctttcaggacccgatgaccagcctcaacccgtgttacaccgtaggtttccagattatggaagcaattaa

SEQ ID NO: 554749 - DNA, 75 bp, synthetic construct
  source 1..75: mol_type = other DNA
ctactgaggtgtctttaccggtgcaaaccagcggtggggcgggggaacgttggtggtttctgaatggtgagccgt

SEQ ID NO: 554750 - DNA, 75 bp, synthetic construct
  source 1..75: mol_type = other DNA
taatctgctggcctggcgggcaatcattgtcggaaggcgacagtaactgccgccgtcgccttgcgacctggttgc

SEQ ID NO: 554751 - DNA, 75 bp, synthetic construct
  source 1..75: mol_type = other DNA
gcatccaaaaaattgacgaaaacagccatcaatgaagccctgcgcagaatgaaaaaagcgggaatagagaaagct

SEQ ID NO: 554752 - DNA, 75 bp, synthetic construct
  source 1..75: mol_type = other DNA
gggagtaaacccactttcagtcgtgcgtgctgcctggcaggatctcacttccgggcgtgttatttctggtggcag

SEQ ID NO: 554753 - DNA, 75 bp, synthetic construct
  source 1..75: mol_type = other DNA
ttggcgcggatattttacgcctgaaagatgaaattcattttctggaagaggaacaaaccgaaatattgcacgttg

SEQ ID NO: 554754 - DNA, 75 bp, synthetic construct
  source 1..75: mol_type = other DNA
gtgcttgtcgggaaactccccgtcgcaggcatagttttttcagagctgccgctggagcaactggcctcccggctt

SEQ ID NO: 554755 - DNA, 75 bp, synthetic construct
  source 1..75: mol_type = other DNA
cgctatttattgtggctgaatactggtcgcatgaagtcgataaactgcaaacgtatattgatcaggtggaaggca

SEQ ID NO: 554756 - DNA, 75 bp, synthetic construct
  source 1..75: mol_type = other DNA
attggcgctgaaggtgagctgtgtgttagcgtcggggataaagtgctgcgcggtcagccactcactcgcggtcgc

SEQ ID NO: 554757 - DNA, 75 bp, synthetic construct
  source 1..75: mol_type = other DNA
tgttaatgacaattaacccagggcaaccaggccagacatttattcataaaagtctggagaaaatccgtaatacca

SEQ ID NO: 554758 - DNA, 75 bp, synthetic construct
  source 1..75: mol_type = other DNA
gctggcaaatcctgagcgacatattgatgatgtaatcaataccggggcggagatgatttctgtacattatgaatc

SEQ ID NO: 554759 - DNA, 75 bp, synthetic construct
  source 1..75: mol_type = other DNA
agagcgcatggaggtttccggcacagtaacgattgccgaccgcatggcgaaggcccgccgtcgcgtgaaagagct

SEQ ID NO: 554760 - DNA, 75 bp, synthetic construct
  source 1..75: mol_type = other DNA
ggccggacaaggtgaagaaccttgagcttatcggtaagcacgtcgacgtcaatgcgttcaaagagcgcctggagg

SEQ ID NO: 554761 - DNA, 75 bp, synthetic construct
  source 1..75: mol_type = other DNA
acatgccgacgtcgtgttgatcagtggttgcgtgttgcagagttcattttgtattcacctatgagagaagcgttc

SEQ ID NO: 554762 - DNA, 75 bp, synthetic construct
  source 1..75: mol_type = other DNA
taatgacattgcggtgctgctggacgtggtagtcaatcacaaaatgggcgcggatgaaaaagaagctattcgcgt

SEQ ID NO: 554763 - DNA, 75 bp, synthetic construct
  source 1..75: mol_type = other DNA
cggtaagctctggcctgaactggccgagcgcgccgacggttttaatgatattggtatcaatatggtctggttgcc

SEQ ID NO: 554764 - DNA, 75 bp, synthetic construct
  source 1..75: mol_type = other DNA
tgaattcaggcttaaaccggtaaaaatacgagataatgttttgatggcaacggcctcatatgaaggaaataaggt

SEQ ID NO: 554765 - DNA, 75 bp, synthetic construct
  source 1..75: mol_type = other DNA
ccatgcaccgcgtcatccgtatactcaggcattgctgcgcgcgctgccggaatttgcccaggacaaagaacgtct

SEQ ID NO: 554766 - DNA, 75 bp, synthetic construct
  source 1..75: mol_type = other DNA
gaaaaatggctgaattgctgaatgattcacaccctgagtggtgttatcggacgtgttgcagtcgggttgatgtat

SEQ ID NO: 554767 - DNA, 75 bp, synthetic construct
  source 1..75: mol_type = other DNA
gaattgctaattggttggctgttgctgaatatgcgctatacatccctatgcgagaatcgtttgctcaaaaaatgt

SEQ ID NO: 554768 - DNA, 75 bp, synthetic construct
  source 1..75: mol_type = other DNA
ggcggacaacctatgagctgcacctgattccggctccgaactactcagccgccacagtacaacccacttttcact

SEQ ID NO: 554769 - DNA, 75 bp, synthetic construct
  source 1..75: mol_type = other DNA
gaaaaaagcaggaatagagaagccagagctggaagcatttttacgtgagatgatcaacgggaagcaaaagagctg

SEQ ID NO: 554770 - DNA, 75 bp, synthetic construct
  source 1..75: mol_type = other DNA
tgcacacccagagtggtgttttagcacatgcgaaaagcgaattgctaattggttagccgttgctgaatatgccct

SEQ ID NO: 554771 - DNA, 75 bp, synthetic construct
  source 1..75: mol_type = other DNA
aaagcggggaacaccttcgtctcaccacgctggaaagagtctggattcagggaaaactgcgcatgtgggggcgct

SEQ ID NO: 554772 - DNA, 75 bp, synthetic construct
  source 1..75: mol_type = other DNA
tctgaaatctttaaatgcttttggactggatttagcaaggttactaagtatcaaaattcacaaattagcgatgga

SEQ ID NO: 554773 - DNA, 75 bp, synthetic construct
  source 1..75: mol_type = other DNA
gatggcggtattaaacagcaggcgattgtccagttattgctggaacacggagccagcccgcatatgaccgataaa

SEQ ID NO: 554774 - DNA, 75 bp, synthetic construct
  source 1..75: mol_type = other DNA
tgacgttccggtggcaatatcttcagaattgtactgtaccaggcgcaacacgttacgacctttacgggaaacctg

SEQ ID NO: 554775 - DNA, 75 bp, synthetic construct
  source 1..75: mol_type = other DNA
atgtccattatttcggttgaaggtaaatcactaggggcagagctggctgtgtggggcgtcccgcataactacgca

SEQ ID NO: 554776 - DNA, 75 bp, synthetic construct
  source 1..75: mol_type = other DNA
gtgatttacccaacgaatactggaaaaagcggagaacaccttcgtctcactacgctggaaagtgtctggattcag

SEQ ID NO: 554777 - DNA, 75 bp, synthetic construct
  source 1..75: mol_type = other DNA
ccaccgccgtgaaaaccatggcgacggttttgagcgcatctgtaaagccctggcaaccctggcccagcgtgatga

SEQ ID NO: 554778 - DNA, 75 bp, synthetic construct
  source 1..75: mol_type = other DNA
tatgaagggagggggatgactaagcgcaaaatggctgaattgctgaatgattcacaccctgagtggtgttacgcc

SEQ ID NO: 554779 - DNA, 75 bp, synthetic construct
  source 1..75: mol_type = other DNA
tcggtcatcacgcgggtattgatgacaatacagcggcaaaagccattgcccatgccattctcggtggtgtgacag

SEQ ID NO: 554780 - DNA, 75 bp, synthetic construct
  source 1..75: mol_type = other DNA
gctggcaggaggggaccaccggaaaggaaacggtctggcggcttgcctcaggttcactccccaaagcatggttta

SEQ ID NO: 554781 - DNA, 75 bp, synthetic construct
  source 1..75: mol_type = other DNA
cacgattcgtcagaacagtgtcaccaacagtggcacgctcaccgggatcgccgcgctgacgcttgccgcccgtat

SEQ ID NO: 554782 - DNA, 75 bp, synthetic construct
  source 1..75: mol_type = other DNA
ggtcgtatattggcggcggtaagacgggaaatatgtttaaccagttgctgacctctaaaaagctaacaaaaacgg

SEQ ID NO: 554783 - DNA, 75 bp, synthetic construct
  source 1..75: mol_type = other DNA
tggggactgggagcaagtgcgaatgctggtatcagttatctggctgatggtactgtagatccggcaaacgcagcc

SEQ ID NO: 554784 - DNA, 75 bp, synthetic construct
  source 1..75: mol_type = other DNA
tcagtattaccgcgggcaaacaggctcatatcagcggttcggatgtgattgcgaaccgggatatcagcattaccg

SEQ ID NO: 554785 - DNA, 75 bp, synthetic construct
  source 1..75: mol_type = other DNA
ggtaaatccacacgtttttgtttggccttatggcgaagcgaatggcatagcgatagaggaattaaaaaaactcgg

SEQ ID NO: 554786 - DNA, 75 bp, synthetic construct
  source 1..75: mol_type = other DNA
aaccgaaacggaatatcgcagtcgtattcgagttgatgcagccaaaataacggcaaaactgggtgagaatacagg

SEQ ID NO: 554787 - DNA, 75 bp, synthetic construct
  source 1..75: mol_type = other DNA
ggttgaagctggagactgggacagcacattgtggatgattggcggccctgtcttcttctcgctgttagcgatggc

SEQ ID NO: 554788 - DNA, 75 bp, synthetic construct
  source 1..75: mol_type = other DNA
gtttcgaaaaaactgacgaaaaccgcagttaatgaggttttacgcagaatgaagaaatccgggctggataaaccg

SEQ ID NO: 554789 - DNA, 75 bp, synthetic construct
  source 1..75: mol_type = other DNA
cactttagaacttagtgcgcgcgtaaaagccattcgcggtccacatattaaaactgcacgaaatatttttgcact

SEQ ID NO: 554790 - DNA, 75 bp, synthetic construct
  source 1..75: mol_type = other DNA
gtggccggctgtatgggctcccgtcggcagttggtcgatactccagcggataaacaagtgaaatttggcgatgag

SEQ ID NO: 554791 - DNA, 75 bp, synthetic construct
  source 1..75: mol_type = other DNA
gcagggagaaggtgtcatctgagatggagaggttctttccagaaaatgatgaggatgaaaaaagaattaagagtt

SEQ ID NO: 554792 - DNA, 75 bp, synthetic construct
  source 1..75: mol_type = other DNA
ttacacgtaactactataactcttcaaatacagcactagaattctttgatatgtttacatttaagggtgttacag

SEQ ID NO: 554793 - DNA, 75 bp, synthetic construct
  source 1..75: mol_type = other DNA
agacaacgttgtgtcggtcggctcagggtcagcacagcgtcgcatcgtcaatatggcggcaggtgaaatctcaac

SEQ ID NO: 554794 - DNA, 75 bp, synthetic construct
  source 1..75: mol_type = other DNA
atacatctcttgctgttggggacaccgcccttgccgatggtgaaaaaactattgcgttaggaaatacggctcaag

SEQ ID NO: 554795 - DNA, 75 bp, synthetic construct
  source 1..75: mol_type = other DNA
cttggaggatatcatgatgatcctgataatgttataaactctgacgggacgcttaaagctcccacatattatcta

SEQ ID NO: 554796 - DNA, 75 bp, synthetic construct
  source 1..75: mol_type = other DNA
cagcactgccgtaggttttgaagctcaggcgcaaagaaagtggtcaacggctattggcgctcaaactgtggccgg

SEQ ID NO: 554797 - DNA, 75 bp, synthetic construct
  source 1..75: mol_type = other DNA
aaagtatgctttacgtactatcagctttaccacgtccgaaggatgggatctcaaggtttgggatgctatcaatgt

SEQ ID NO: 554798 - DNA, 75 bp, synthetic construct
  source 1..75: mol_type = other DNA
atgatcaccgacaaactgttgatgttctccgaagcacaggcggtaactgataccgcggcttcaactgacgtaatc

SEQ ID NO: 554799 - DNA, 75 bp, synthetic construct
  source 1..75: mol_type = other DNA
agcttccagtcagagagatcaccccacaccatatccttaaaattcttcaggaaactgccaaacgaggagcaccga

SEQ ID NO: 554800 - DNA, 75 bp, synthetic construct
  source 1..75: mol_type = other DNA
tcgggaagctattaagctgttttgataacagtcgtggctcataccaggttaactattgcatgtggctcatgtggt

SEQ ID NO: 554801 - DNA, 75 bp, synthetic construct
  source 1..75: mol_type = other DNA
gtcgctgcaaacccggggtttcgcgtcagggatggaagcccgccagggcggagacagcttcgctggctccgttca

SEQ ID NO: 554802 - DNA, 75 bp, synthetic construct
  source 1..75: mol_type = other DNA
gaattcactgcgggtatcagtcttgatgttgatgccaatacgccgtatccgatccgctcaaaagtaactggttaa

SEQ ID NO: 554803 - DNA, 75 bp, synthetic construct
  source 1..75: mol_type = other DNA
caaaggctaccctgacagcaggtacccgccgaaagagttgcgtcgctatgcgcatgacaactggcaactggttga

SEQ ID NO: 554804 - DNA, 75 bp, synthetic construct
  source 1..75: mol_type = other DNA
cggtgatcatgctaatgcctcaaaagaatattcaatggcgctgggagcaagtagcgttgcatctgcggctaacgc

SEQ ID NO: 554805 - DNA, 75 bp, synthetic construct
  source 1..75: mol_type = other DNA
aacgcatctggctgacgtgctggtaagcaagcagtaccatgaagcaaacaatatgaccgatgcgctggcggcgct

SEQ ID NO: 554806 - DNA, 75 bp, synthetic construct
  source 1..75: mol_type = other DNA
ctgaccttcctgatgcgtcatgcgcgtaatgatttttctcgctgggatgcggcacaaagcctgctggcaacctat

SEQ ID NO: 554807 - DNA, 75 bp, synthetic construct
  source 1..75: mol_type = other DNA
aaaggggggcatccggtcaattcggtactgaatgttacccaggcggaacagacatttgtttttgataatgtctac

SEQ ID NO: 554808 - DNA, 75 bp, synthetic construct
  source 1..75: mol_type = other DNA
tggaaatgcttaccggcctgaacagccggaacccacaagtagcttcgcgcctgattgaaccgctgattcgcctga

SEQ ID NO: 554809 - DNA, 75 bp, synthetic construct
  source 1..75: mol_type = other DNA
ttggttctcgcgcggtaaaccgtatcaacaacgtgcgcaccatgcgcggattgcagtttgcggaagacgccagcc

SEQ ID NO: 554810 - DNA, 75 bp, synthetic construct
  source 1..75: mol_type = other DNA
agcaagggcagccgctgtctctgccggtgcatgtggctgacgctttccgcgcggtgctgctcgatgagaagattg

SEQ ID NO: 554811 - DNA, 75 bp, synthetic construct
  source 1..75: mol_type = other DNA
ccgcttcgtctcaacggcgaagacctcaaactggtttctgttcatattaatgatgagccgtggaccgcctggaaa

SEQ ID NO: 554812 - DNA, 75 bp, synthetic construct
  source 1..75: mol_type = other DNA
ttctatagccctgggtaatgcaagccaggcatcgggctactccagccttgcaataggtgagttaagtgagaccgg

SEQ ID NO: 554813 - DNA, 75 bp, synthetic construct
  source 1..75: mol_type = other DNA
atcaccaacgtcaccgctggcaacctgactgccggtagcactgacgccgttaacggctcccagctcaaaaccacc

SEQ ID NO: 554814 - DNA, 75 bp, synthetic construct
  source 1..75: mol_type = other DNA
gcgctggaacagttgaaagggctggaaaatctctctggcgatctgtacgagaagatcaccaaagcactggcttga

SEQ ID NO: 554815 - DNA, 75 bp, synthetic construct
  source 1..75: mol_type = other DNA
ttccagccggtgcctgcgctgctgtgcgaattctctgcgccagtgaaactggaatataagtggagcgatcagcaa

SEQ ID NO: 554816 - DNA, 75 bp, synthetic construct
  source 1..75: mol_type = other DNA
agcgccatgatggcagcgcggcaacctgcgacgactttgtgcaggcgatggaagatgcgtcgaatgtcgatctct

SEQ ID NO: 554817 - DNA, 75 bp, synthetic construct
  source 1..75: mol_type = other DNA
gatcttgataacgccctgtggaccattccggcagcgcggatgaaagcccgcagagaacatgttattcccctcccc

SEQ ID NO: 554818 - DNA, 75 bp, synthetic construct
  source 1..75: mol_type = other DNA
gcttctagcttcattggtgacgtagtaaacatgggtacaggtaatgcatggtctggttctacagctgtgaataac

SEQ ID NO: 554819 - DNA, 75 bp, synthetic construct
  source 1..75: mol_type = other DNA
gtaagaggccccggaacgttatcgtttgtcacgaacggtgcaatagtgatccacacccaacgcctgaaatcagat

SEQ ID NO: 554820 - DNA, 75 bp, synthetic construct
  source 1..75: mol_type = other DNA
tttaattatatcgagtgtgattacaatcgctggcgtcgtcacagtgcctgtggcggtctcagcccggaacaattt

SEQ ID NO: 554821 - DNA, 75 bp, synthetic construct
  source 1..75: mol_type = other DNA
gtttaattatatcgaatgtgattacaatcggtggcggcggcacagttggtgtggcggcctcagtccggaacaatt

SEQ ID NO: 554822 - DNA, 75 bp, synthetic construct
  source 1..75: mol_type = other DNA
gcatcacgtacttacgtacgtgatgaaggctggctgtatctggcagtggtcattgacctgtggtcacgtgctgtt

SEQ ID NO: 554823 - DNA, 75 bp, synthetic construct
  source 1..75: mol_type = other DNA
taaagtaactgaaaacggtttaaccccggggtataactttgcattacctgcaattactggtttacgtctaactaa

SEQ ID NO: 554824 - DNA, 75 bp, synthetic construct
  source 1..75: mol_type = other DNA
cgggtaacgctaaaacactggaacagtacgaattaacaaagaattctgacgttatctggttgtggtccgaagacg

SEQ ID NO: 554825 - DNA, 75 bp, synthetic construct
  source 1..75: mol_type = other DNA
tacggcagacgaacagcaacaacaggccgaatcacaaaaggccgcattgctttccgaagctgaatcagtcatcca

SEQ ID NO: 554826 - DNA, 75 bp, synthetic construct
  source 1..75: mol_type = other DNA
attgtttacgacgaaaataatattattgttgccataaccaaagatgcctcaacgcttaatcccgaaggctttagt

SEQ ID NO: 554827 - DNA, 75 bp, synthetic construct
  source 1..75: mol_type = other DNA
ctgaatcaaccgaaccagattatgcaggtgcacacatcgtaatgcgtactgatattaacactacttcatatatta

SEQ ID NO: 554828 - DNA, 75 bp, synthetic construct
  source 1..75: mol_type = other DNA
ggaccgtgttgaaggtgcagcgctggagttttatgaggcagcagccagaaggagcatcagacaggtcttcctgga

SEQ ID NO: 554829 - DNA, 75 bp, synthetic construct
  source 1..75: mol_type = other DNA
gagttttatgagtcagcagccagaaggagcatcagacaggtcttcctggatgttgctgccgggttatgtgaaggg

SEQ ID NO: 554830 - DNA, 75 bp, synthetic construct
  source 1..75: mol_type = other DNA
gtggcggcaagcctgcgccgtcagggactgagggcaaaggcctcccggaagttcagcccggtcagctaccgcgca

SEQ ID NO: 554831 - DNA, 75 bp, synthetic construct
  source 1..75: mol_type = other DNA
attatatcgaatgtgattacattcgctggcggcggcacagttggtgtggcggtctcactcaggaacaatttgaaa

SEQ ID NO: 554832 - DNA, 75 bp, synthetic construct
  source 1..75: mol_type = other DNA
attatatcgaatgtgattacattcgttggcggcggcacagttggtgtggcggtctcattccggaacaatttgaaa

SEQ ID NO: 554833 - DNA, 75 bp, synthetic construct
  source 1..75: mol_type = other DNA
attatatcgaatgtgattacattcgatggcggcggcacagttggtgtggcggtctcagtccggaacaatttgaaa

SEQ ID NO: 554834 - DNA, 75 bp, synthetic construct
  source 1..75: mol_type = other DNA
atggctacaatcctcacccctgacagcgatttactcgatctattgaccgcccccttcaatgccaccacggatttc

SEQ ID NO: 554835 - DNA, 75 bp, synthetic construct
  source 1..75: mol_type = other DNA
gtgccgcgtgctccgggtggcccgcagcggctgggatacgtggtgtcagcggcggacaaggataagacgcgtcag

SEQ ID NO: 554836 - DNA, 75 bp, synthetic construct
  source 1..75: mol_type = other DNA
attatatcgaatgtgattacattcggtggcggcggcacagttggtgtggcggtctcaatccggaacaatttgaaa

SEQ ID NO: 554837 - DNA, 75 bp, synthetic construct
  source 1..75: mol_type = other DNA
cttcaaatctagtaattaaccgcttaggcaatatcactagtggtaacgtagtagaaatgtcatggaccacttcac

SEQ ID NO: 554838 - DNA, 75 bp, synthetic construct
  source 1..75: mol_type = other DNA
gtgattacaatcgctggcgtcgtcacagttggtgtggcggtctcagcccggaacaatttgaaaacaagaacctcg

SEQ ID NO: 554839 - DNA, 75 bp, synthetic construct
  source 1..75: mol_type = other DNA
atggagaacactttatcagccgggaaataatgcgggcaacggtgtttaattatatcgaatgtgattacaatcggt

SEQ ID NO: 554840 - DNA, 75 bp, synthetic construct
  source 1..75: mol_type = other DNA
tgtggcggcgtaagagcccccggcatgttatcgttcacacggaccgtatgaggtcagtactgttcagcaaattat

SEQ ID NO: 554841 - DNA, 75 bp, synthetic construct
  source 1..75: mol_type = other DNA
tctgcgtggaagtatgagcgcaaaaggttgctgctacgataatgcctgcgtggaaagcttctttcattcgctgaa

SEQ ID NO: 554842 - DNA, 75 bp, synthetic construct
  source 1..75: mol_type = other DNA
gtatgagcgcaaaaggttgctgctacgataatgcctgcgtggaaagcttctttcattcgctgaaagtggaatgta

SEQ ID NO: 554843 - DNA, 75 bp, synthetic construct
  source 1..75: mol_type = other DNA
tatgaccttgctaacgggaaatataccgcacaggacgccaccacagcgcgaaaaggccttgtccagctcagtagt

SEQ ID NO: 554844 - DNA, 75 bp, synthetic construct
  source 1..75: mol_type = other DNA
tgcgtctttgacagaaaagggatttgtacgtctgtatagcggtgtggaaagcaatgatgaaacagtcgctgcaac

SEQ ID NO: 554845 - DNA, 75 bp, synthetic construct
  source 1..75: mol_type = other DNA
gaatggtgcaactggggaacgatgtaaacagcgtgtcagaaaatgttgcggcgacattgaaagcggtaaaaattg

SEQ ID NO: 554846 - DNA, 75 bp, synthetic construct
  source 1..75: mol_type = other DNA
cttgttaaagctcttttcagcagtgaagtaaaaatatcgacagtcaatgcactgaggatatttaattcatctttt

SEQ ID NO: 554847 - DNA, 75 bp, synthetic construct
  source 1..75: mol_type = other DNA
attggttttaaaaatgatgccgacagcgatactgattcatacatgtggtttgaaacaggcgacaacggcaatgaa

SEQ ID NO: 554848 - DNA, 75 bp, synthetic construct
  source 1..75: mol_type = other DNA
gattacgttgatgacaaaattgcagaacatgaacagtcacgacgtcacccggacgcctcgctgaccgcaaaaggt

SEQ ID NO: 554849 - DNA, 75 bp, synthetic construct
  source 1..75: mol_type = other DNA
aaaccattatcaccgatacgggtgcaaaaaaattagcgcaggcaaccgcgccagatgggaaacctgtccgcctga

SEQ ID NO: 554850 - DNA, 75 bp, synthetic construct
  source 1..75: mol_type = other DNA
agcagaacgtaaccgtcgccgcggtttccataatattcaggtgttgtacaaccgtttacagcacacattgtcatt

SEQ ID NO: 554851 - DNA, 75 bp, synthetic construct
  source 1..75: mol_type = other DNA
tgtcacttgagaagactcttgatgcagtcctggcatatgaacgcctccattcgggtgaaaaagaggccgataaaa

SEQ ID NO: 554852 - DNA, 75 bp, synthetic construct
  source 1..75: mol_type = other DNA
gcacggtgaatgcgctgcgaattttcaatgatgccttcggtcttattttccgtcgttcagaagattttcttcatt

SEQ ID NO: 554853 - DNA, 75 bp, synthetic construct
  source 1..75: mol_type = other DNA
ttatggtaattttgactcacgttatgtgagagatgtccgacttggtacacgtgttgttcagactatgcaaaaagg

SEQ ID NO: 554854 - DNA, 75 bp, synthetic construct
  source 1..75: mol_type = other DNA
cttttcagcagtgaagtaaaaatatcgacagtcaatgcactgaggatatttaattcatcttttggtgctattttt

SEQ ID NO: 554855 - DNA, 75 bp, synthetic construct
  source 1..75: mol_type = other DNA
aatttggcatctacatgattaataactcaaggacagccaatggcaccgatggtcaggcgtacatggataataacg

SEQ ID NO: 554856 - DNA, 75 bp, synthetic construct
  source 1..75: mol_type = other DNA
aaagaatggcgataccttgtccggtgggcttacttttgcaaacgactcaatccttgcctggattcgaaatactga

SEQ ID NO: 554857 - DNA, 75 bp, synthetic construct
  source 1..75: mol_type = other DNA
acgacccgaattttgcgaccaccatgactaaagcgcttgcgggtaagcaaccgaaagatgccaccctgacggcgc

SEQ ID NO: 554858 - DNA, 75 bp, synthetic construct
  source 1..75: mol_type = other DNA
ggtgggcttacttttgaaaatgactcaatccttgcctggattcgaaatactgactgggcgaagattggatttaaa

SEQ ID NO: 554859 - DNA, 75 bp, synthetic construct
  source 1..75: mol_type = other DNA
ctgtcaggtaagcagccactggatgagacgctgactcatttgagcggaaaggatgttgccggccttctcgcatac

SEQ ID NO: 554860 - DNA, 75 bp, synthetic construct
  source 1..75: mol_type = other DNA
ttaccaatcaagctataaagaaaacatagaaaatatctgtcaatcatttggcggtattatgtatgtccacgccgg

SEQ ID NO: 554861 - DNA, 75 bp, synthetic construct
  source 1..75: mol_type = other DNA
gcgaccattgctgccgttatcgaatacctcggtttgcaggaaacggtaaacagggccaggaacgcggtgcaaaag

SEQ ID NO: 554862 - DNA, 75 bp, synthetic construct
  source 1..75: mol_type = other DNA
attttctgttaacggtcagatacagcccagcaactgggggaattttgattcacgctatgtaaaagatgttcgcct

SEQ ID NO: 554863 - DNA, 75 bp, synthetic construct
  source 1..75: mol_type = other DNA
ccgtcggggatggcggtggtaaattgcctgtcccggatgccggacagaccgggcttatccatgaagtctggcgac

SEQ ID NO: 554864 - DNA, 75 bp, synthetic construct
  source 1..75: mol_type = other DNA
tagtaccggcatgtggattcatatgcgtgaccagaatgttattttgggacgcaatgcggtatccaccgatggtgc

SEQ ID NO: 554865 - DNA, 75 bp, synthetic construct
  source 1..75: mol_type = other DNA
atgagcacaaaattcaaaaccgttatcaccactgccggtgcagcaaagctggcagcggcaaccgcaccgggaggg

SEQ ID NO: 554866 - DNA, 75 bp, synthetic construct
  source 1..75: mol_type = other DNA
ctcgctatccagctctaatacatccacgaagaatattacctttaatttatggggtgcttccacccgtccagtggt

SEQ ID NO: 554867 - DNA, 75 bp, synthetic construct
  source 1..75: mol_type = other DNA
aatcattggtgaagtagatggcgatgatgaagccatcttcagaccaatacaaaaatacatcaatggcacatggta

SEQ ID NO: 554868 - DNA, 75 bp, synthetic construct
  source 1..75: mol_type = other DNA
tggtttccacaatattcaggtactgtacaatcgcttgcagtacacattgtcattacgctcagaggataaatcatg

SEQ ID NO: 554869 - DNA, 75 bp, synthetic construct
  source 1..75: mol_type = other DNA
aaagaagggattgccgcgcgctacggtaaagaagccgccgcaaatgaagtgggttatcgcatcagcgcgcaactg

SEQ ID NO: 554870 - DNA, 75 bp, synthetic construct
  source 1..75: mol_type = other DNA
cgcacagtcggggatcagttccgatatcggcaccacgccgggcgcgcgtttgccgtatggcgatgagccagatcc

SEQ ID NO: 554871 - DNA, 75 bp, synthetic construct
  source 1..75: mol_type = other DNA
caccaaacctgacctttatctacgatcctgaaatcactcctgatgatctgctactggaagtagcaaaaaacatct

SEQ ID NO: 554872 - DNA, 75 bp, synthetic construct
  source 1..75: mol_type = other DNA
tgcaacaacgttgccagcaaattgtcaccagcccagtgcttagcccggagcagaagcgccattttctggcactgg

SEQ ID NO: 554873 - DNA, 75 bp, synthetic construct
  source 1..75: mol_type = other DNA
ctgttacaactcactgccgctggcgggtggtggcagcacgctggtacgccttaacctgaaagccattgccgagcg

SEQ ID NO: 554874 - DNA, 75 bp, synthetic construct
  source 1..75: mol_type = other DNA
ccccgcatcatgcttattattattccggcatcagcgacattctgacgctcgacgaaaccatcaaacgtaacccgc

SEQ ID NO: 554875 - DNA, 75 bp, synthetic construct
  source 1..75: mol_type = other DNA
atccggcgctggcggcagaaattctgacgctgccttcggtaaatgaaatggcggaactgttcgatatcatcgacc

SEQ ID NO: 554876 - DNA, 75 bp, synthetic construct
  source 1..75: mol_type = other DNA
cctgaaagaaggtttaaccgtgttccgcgatcaggagttcagctctgacctgggttcccgtgccgttaaccgcat

SEQ ID NO: 554877 - DNA, 75 bp, synthetic construct
  source 1..75: mol_type = other DNA
cgccacattacgtactatctcgatcgcccggacgtgctggcgcgttttacgactaaaattattgccgataaaacc

SEQ ID NO: 554878 - DNA, 75 bp, synthetic construct
  source 1..75: mol_type = other DNA
tggcatgtatgggctggcggaagcggttaacttgctgtgtaagaaagaagggattgccgcgcgggtaatgactcc

SEQ ID NO: 554879 - DNA, 75 bp, synthetic construct
  source 1..75: mol_type = other DNA
ctcggcggcggttgctgcgcagttaccatgtcgtgatgcgctgatgcaggagtacgacgacaaatggcatcagga

SEQ ID NO: 554880 - DNA, 75 bp, synthetic construct
  source 1..75: mol_type = other DNA
tatggtcattgagatgaacaacttctacaccctgaccgtttacgagaagggcgcggaagtgattcgtatgatcca

SEQ ID NO: 554881 - DNA, 75 bp, synthetic construct
  source 1..75: mol_type = other DNA
ccactaacaccaccaatatcaccaacctgactgacgctgttaacggtctcggtgacgactccctgctgtggaaca

SEQ ID NO: 554882 - DNA, 75 bp, synthetic construct
  source 1..75: mol_type = other DNA
actcggctcagatacaaaagccaatgccattgatagcctggcatttggaagactggctttagcgaatgccgatgg

SEQ ID NO: 554883 - DNA, 75 bp, synthetic construct
  source 1..75: mol_type = other DNA
gcgttgggtaataaaagtcagtcaagcggcgaaaacagtattgcgcttgggcaagaaagcgttgccggtactgaa

SEQ ID NO: 554884 - DNA, 75 bp, synthetic construct
  source 1..75: mol_type = other DNA
atgaacaaaatttttaaagttatctggaactctgcaacggggagttacagcgtcgccagcgaaacggcaaaaagc

SEQ ID NO: 554885 - DNA, 75 bp, synthetic construct
  source 1..75: mol_type = other DNA
tgagttgctccatgtgttcggtaatgactccaacttattgatagtgttttatgttcagataatgcccgatgactt

SEQ ID NO: 554886 - DNA, 75 bp, synthetic construct
  source 1..75: mol_type = other DNA
actttcatgcgactattgtttttcatgagttgctccatgtgttcggtaatgactccaacttattgatagtgtttt

SEQ ID NO: 554887 - DNA, 75 bp, synthetic construct
  source 1..75: mol_type = other DNA
atgcgccctacgtccctcaacttggtattacatcagtcatcaacgtcgaactcaatgtcagatacagatatcgag

SEQ ID NO: 554888 - DNA, 75 bp, synthetic construct
  source 1..75: mol_type = other DNA
gccgtagatagtctcaatgatgatgccctgctgtggaatggcaccgcgttcagcgccgctcacggcaccgacgtc

SEQ ID NO: 554889 - DNA, 75 bp, synthetic construct
  source 1..75: mol_type = other DNA
cattcgggagactggcaaaggcgtcaggaactaattccattgccgcaggtagagagagtgctgctagtggtgaag

SEQ ID NO: 554890 - DNA, 75 bp, synthetic construct
  source 1..75: mol_type = other DNA
gctctgggtaatggtagccagtcgagaggcttaaacaccattgccttaggcacagccagtaatgcaactggtgat

SEQ ID NO: 554891 - DNA, 75 bp, synthetic construct
  source 1..75: mol_type = other DNA
acaacagctcagcgacaaattgtcaatatggcagcaggtgatatcagcactaccagtactgatgccatcaatgga

SEQ ID NO: 554892 - DNA, 75 bp, synthetic construct
  source 1..75: mol_type = other DNA
gatgccgttaacggctctcagctgaaaaccaccaacgatgctgtggcgacgaataccaccaatatcgccaataac

SEQ ID NO: 554893 - DNA, 75 bp, synthetic construct
  source 1..75: mol_type = other DNA
atatcaccaacctgacggattccgttggtgaccttcaggctgatgccctgctctggaacgaaactaaaaaggcat

SEQ ID NO: 554894 - DNA, 75 bp, synthetic construct
  source 1..75: mol_type = other DNA
cgggtataccgtcaggtgacctgccgcctgtgttacagggtgcgctggataaattcacccgggacatcacggcca

SEQ ID NO: 554895 - DNA, 75 bp, synthetic construct
  source 1..75: mol_type = other DNA
ttccggaccgtgatttaccgtccgctgacgcagtctgccatgcgcatcattgtggagatgaagcttgcacaggtc

SEQ ID NO: 554896 - DNA, 75 bp, synthetic construct
  source 1..75: mol_type = other DNA
cgcagggggtattcctgctgaccggccccagcggcaccggtaaaaccgaaactgcgctcacactggccgacaccc

SEQ ID NO: 554897 - DNA, 75 bp, synthetic construct
  source 1..75: mol_type = other DNA
ataatacaccgtccgacagtctgtgttgtgagctggttctgccggccggaactctcaggcttaaaggtaaactga

SEQ ID NO: 554898 - DNA, 75 bp, synthetic construct
  source 1..75: mol_type = other DNA
tctgtttcctccggctctacaaaaataatgtccatcatttttaatggacactatcgtatgaaacaccggacctgg

SEQ ID NO: 554899 - DNA, 75 bp, synthetic construct
  source 1..75: mol_type = other DNA
aaacaccggacctggatcactgaagctttacgtcttcactttgaagaacatttaccccgggttgtggccgggcgt

SEQ ID NO: 554900 - DNA, 75 bp, synthetic construct
  source 1..75: mol_type = other DNA
ggcatggagtgacgaggatggcattgttctggtatttgatgcacaggcagagggagagtcgtcatgcgcagtttc

SEQ ID NO: 554901 - DNA, 75 bp, synthetic construct
  source 1..75: mol_type = other DNA
agctcttaaaggtgcgacattaaccacactggtgtcacttattacgatgcctctcgtggcaatgatgacaggtat

SEQ ID NO: 554902 - DNA, 75 bp, synthetic construct
  source 1..75: mol_type = other DNA
tgcttttatatatttcaaatgtgcatattccttacatcattgcacaaccaataaaaatgctgggcgcaataactg

SEQ ID NO: 554903 - DNA, 75 bp, synthetic construct
  source 1..75: mol_type = other DNA
gtatcgccgaaggcaacgtgccggacagcctgaaaacggtgcatatccgcacactggacctcggtctgttacagg

SEQ ID NO: 554904 - DNA, 75 bp, synthetic construct
  source 1..75: mol_type = other DNA
ctggcagtctctgctggcacatctggacaccttaccccgctcggtccgcgaacgtccgcagctttctgaacccct

SEQ ID NO: 554905 - DNA, 75 bp, synthetic construct
  source 1..75: mol_type = other DNA
tgcctgctgccggatacgggcgcccggaatgtggagagtctgctgaaccagcaactgctgccggtactgagccgg

SEQ ID NO: 554906 - DNA, 75 bp, synthetic construct
  source 1..75: mol_type = other DNA
aggaaccagagcagataaatacaccgtccgacagtctgtgttgtgagctggttctgccggccggaactctcaggc

SEQ ID NO: 554907 - DNA, 75 bp, synthetic construct
  source 1..75: mol_type = other DNA
atgacggtcagatattatatcagttctgctgatttaaccgcagaaaagttcgccacagcgatccgaaatcactgg

SEQ ID NO: 554908 - DNA, 75 bp, synthetic construct
  source 1..75: mol_type = other DNA
cggcgtaccgcgatgaccgcaggcaagcgacgggaacttcatgctctggaagaaaatctggccatcatcagcaac

SEQ ID NO: 554909 - DNA, 75 bp, synthetic construct
  source 1..75: mol_type = other DNA
cgacgcacggcgatgacggcgggtaagcgccgggaactccatgcactggaagaaaatttagccataatcagtcac

SEQ ID NO: 554910 - DNA, 75 bp, synthetic construct
  source 1..75: mol_type = other DNA
ggcgctgaaagtgctggaactgacggcgggtaaactggcggccttttatgattccccgaccggattccgtcatgg

SEQ ID NO: 554911 - DNA, 75 bp, synthetic construct
  source 1..75: mol_type = other DNA
attccccgaccggattccgtcatggcccgaaatcgctggtcgataacgaaacgctggtggtggtatttgtctcca

SEQ ID NO: 554912 - DNA, 75 bp, synthetic construct
  source 1..75: mol_type = other DNA
ttgatttcacgtttgaatggaaaggtctgaagaaattatgcgtggcagtctcctttcggtcaataatagcagaac

SEQ ID NO: 554913 - DNA, 75 bp, synthetic construct
  source 1..75: mol_type = other DNA
ggcctgctgccttccggaaaaaatatgccggcactgcttcccgtgacgttaacgccggagccggataataaaatc

SEQ ID NO: 554914 - DNA, 75 bp, synthetic construct
  source 1..75: mol_type = other DNA
acaccgtccgacagtctgtgctgtgagctggttctgccggccggaactctcaggctgaaaggtgaactgacaccg

SEQ ID NO: 554915 - DNA, 75 bp, synthetic construct
  source 1..75: mol_type = other DNA
caggctgaaagatgaactgacaccggcgttattacagacacttatccgcgaaatggttttaacggcctggcctca

SEQ ID NO: 554916 - DNA, 75 bp, synthetic construct
  source 1..75: mol_type = other DNA
agctggttctgccgaccggaactctcaggcttaaaggtaaactgacgccggcgttattacagacacttatccgcg

SEQ ID NO: 554917 - DNA, 75 bp, synthetic construct
  source 1..75: mol_type = other DNA
ctgcccgcagggatgtcggagcgggaacttgatgcccgtctttacgggagagcctccacagtacctgtcgtactt

SEQ ID NO: 554918 - DNA, 75 bp, synthetic construct
  source 1..75: mol_type = other DNA
gtgcaactggcccgggctctgttcccgaggcgatacccttcagccccgacagtgactcagcctgtgaaaacagag

SEQ ID NO: 554919 - DNA, 75 bp, synthetic construct
  source 1..75: mol_type = other DNA
tagctcttaaaggtgcaacgttaaccacactggtgtcacttattacgatgcctctcgtagcaatgatgacaggta

SEQ ID NO: 554920 - DNA, 75 bp, synthetic construct
  source 1..75: mol_type = other DNA
gaggctcagatggagcgcaaagagtctgcatttaatcaggccgagtttaataaactacttcttgaatgcgttgta

SEQ ID NO: 554921 - DNA, 75 bp, synthetic construct
  source 1..75: mol_type = other DNA
gaagctcagatggagcgtaaagaatcagcatttaatcaggcagagtttaataaacttcttcttgaatgtgttgta

SEQ ID NO: 554922 - DNA, 75 bp, synthetic construct
  source 1..75: mol_type = other DNA
tctcgaattagggcttcgtgtatatgagactcagatggagcgtaaagagtctgcatttaatcagactgagtttaa

SEQ ID NO: 554923 - DNA, 75 bp, synthetic construct
  source 1..75: mol_type = other DNA
ttttaggtattgagtctctcagtcctcatgtatccggaaacccgaagtttgaatatgccagtatggttgacgggt

SEQ ID NO: 554924 - DNA, 75 bp, synthetic construct
  source 1..75: mol_type = other DNA
tatttacgctgcacaagcatcggacggcgataactgggccgatgactctccgctttgccatgaaatcctggcgaa

SEQ ID NO: 554925 - DNA, 75 bp, synthetic construct
  source 1..75: mol_type = other DNA
gctcgatggatcaatccaccaaagatatggctaaacgtttttatattctgttgtatctgttcctgagcagaacat

SEQ ID NO: 554926 - DNA, 75 bp, synthetic construct
  source 1..75: mol_type = other DNA
gaggctcagatggagcgtaaagagtcagcgttcaatctggctgagtttaataaggtgcttcttgaatgtgcggta

SEQ ID NO: 554927 - DNA, 75 bp, synthetic construct
  source 1..75: mol_type = other DNA
gtaatgatgtctatgataaagtaaatgcgatagttgaacagcgtcgtcaggagggcgcaagagataaagatataa

SEQ ID NO: 554928 - DNA, 75 bp, synthetic construct
  source 1..75: mol_type = other DNA
gccgatgactctccgctttgccatgaaattctggcgaaaaaattattacccgttgttcgttattacagctatatc

SEQ ID NO: 554929 - DNA, 75 bp, synthetic construct
  source 1..75: mol_type = other DNA
gaggctcagatggagcgtaaagagtctgcatttaatcagactgagtttaataaattacttcttgaatgtgttgta

SEQ ID NO: 554930 - DNA, 75 bp, synthetic construct
  source 1..75: mol_type = other DNA
gtaatgatgtctatgataaagtaaatgcgatagttgaaaagcgtcgtcaggagggagcaagagataaagatataa

SEQ ID NO: 554931 - DNA, 75 bp, synthetic construct
  source 1..75: mol_type = other DNA
tcttgaactggggcttcgcgtacatcaggctcagatggagcgtaaagaatctgcatttaatcagactgagtttaa

SEQ ID NO: 554932 - DNA, 75 bp, synthetic construct
  source 1..75: mol_type = other DNA
tgatccgcgcgtgtgggatgtggcaagcatgatggattttgctgtgccggtggtggcgtgtctgctggtctggct

SEQ ID NO: 554933 - DNA, 75 bp, synthetic construct
  source 1..75: mol_type = other DNA
gatgcagcaggcgaaggtgattctggccgatgaacccatcgcctcgctggacccggaatcagcgcgcatcgtgat

SEQ ID NO: 554934 - DNA, 75 bp, synthetic construct
  source 1..75: mol_type = other DNA
caaatccacccttttacgtcacttaagcggcctgattgtcggcgataaaaagccagaatgccgcgtcgaactgct

SEQ ID NO: 554935 - DNA, 75 bp, synthetic construct
  source 1..75: mol_type = other DNA
acggcagcagccaacagtttgataacgaacgttttgaccatctctaccgcagcattaatcgcatcgaagagaacg

SEQ ID NO: 554936 - DNA, 75 bp, synthetic construct
  source 1..75: mol_type = other DNA
gcttatgcccttattttactgcgagaaaacggtgtaccttcggtattttaccccgatctgtacggcgctcattac

SEQ ID NO: 554937 - DNA, 75 bp, synthetic construct
  source 1..75: mol_type = other DNA
cgaacagctcgatgagttaatcctcgcccgccagcgcttcgcccacggtgtacagacgttatttttcgatcatcc

SEQ ID NO: 554938 - DNA, 75 bp, synthetic construct
  source 1..75: mol_type = other DNA
aaaccatgctgtttgatgcgccgctgcagatgaaattccatgaagcatcgcgcatggggcgcgactacgacatga

SEQ ID NO: 554939 - DNA, 75 bp, synthetic construct
  source 1..75: mol_type = other DNA
atgatgaatatagatgttgatataacaccaattcttcacgcactttgcgctgttgtcgcacaagttctggtcggt

SEQ ID NO: 554940 - DNA, 75 bp, synthetic construct
  source 1..75: mol_type = other DNA
gctggttgggtgcattaccggtgactgggcttatggtgcagccattgcctgtacgttttttgttgcccgcgaata

SEQ ID NO: 554941 - DNA, 75 bp, synthetic construct
  source 1..75: mol_type = other DNA
tgatccacgcgtgtgggatgtgggaagtctgttggatttttctttcccaattatcggatgcttattggtatggat

SEQ ID NO: 554942 - DNA, 75 bp, synthetic construct
  source 1..75: mol_type = other DNA
ttaacatgccgtggtggggcggttttgatccgcgcgcgtgggatgtggcaagcctgatggattttgctgtgccgg

SEQ ID NO: 554943 - DNA, 75 bp, synthetic construct
  source 1..75: mol_type = other DNA
tgatccgcgcgcgtgggatgtggcaagccttatggattttgctgtaccgatggtggcgtgtctgctggtctggct

SEQ ID NO: 554944 - DNA, 75 bp, synthetic construct
  source 1..75: mol_type = other DNA
tgaatatgccgtggtggggcggttttgatcctcgtgcatgggatgtggcaagcctgatggattttgctgtgccgg

SEQ ID NO: 554945 - DNA, 75 bp, synthetic construct
  source 1..75: mol_type = other DNA
ttgttgctattaccagagatgcttcaacgcttaatcctgaaggttttagcgttgttgaggttcctgatataacag

SEQ ID NO: 554946 - DNA, 75 bp, synthetic construct
  source 1..75: mol_type = other DNA
agcgttattcagccactggaacgcgctgtcaggctgaatatggcgacggatgaggaacgcacacgactggagtca

SEQ ID NO: 554947 - DNA, 75 bp, synthetic construct
  source 1..75: mol_type = other DNA
gactttgcagttagtgcgtacaatatattgggtggtgtatctgttaaagctactgttacgggtattaaaccagag

SEQ ID NO: 554948 - DNA, 75 bp, synthetic construct
  source 1..75: mol_type = other DNA
aaactttcagccagacacaataaagattgtttacgatgcaaataatattattgtcgccatcactaaagatgcctc

SEQ ID NO: 554949 - DNA, 75 bp, synthetic construct
  source 1..75: mol_type = other DNA
gttatctggctttactctgaggacgaaaaaaactggtatgaggaagtgaaaaactttcagccagacacaataaag

SEQ ID NO: 554950 - DNA, 75 bp, synthetic construct
  source 1..75: mol_type = other DNA
gtggatgtttaaggatggagctgtggttaaacggatttatacggcagacgaacagcaacaacaggccgaatcaca

SEQ ID NO: 554951 - DNA, 75 bp, synthetic construct
  source 1..75: mol_type = other DNA
gaagcatgggaacgctacagtgttctggtcagccgtgtggatacggcaaatcctgaatggccacaaaaaccagag

SEQ ID NO: 554952 - DNA, 75 bp, synthetic construct
  source 1..75: mol_type = other DNA
gagtcatgggaacgctacagcgttctggtcagccgtgtggatacagcaaatcccgaatggccacaaaagcctgaa

SEQ ID NO: 554953 - DNA, 75 bp, synthetic construct
  source 1..75: mol_type = other DNA
tcaggggcatgctgatggaagatacagcaaacttctgactaggctgaataatagcgatctgctgcttctggatga

SEQ ID NO: 554954 - DNA, 75 bp, synthetic construct
  source 1..75: mol_type = other DNA
taactttcaggacgacaccataaagattgtatacgacgaaaataatattattgtcgccatcaccaaagatgcctc

SEQ ID NO: 554955 - DNA, 75 bp, synthetic construct
  source 1..75: mol_type = other DNA
gtgcggtacttagagatactttctatacacaggaaagcggctttaatttctccctagacttgaacaagtacaaac

SEQ ID NO: 554956 - DNA, 75 bp, synthetic construct
  source 1..75: mol_type = other DNA
gtggttaagcggatttatacagcagacgaacagcaacaacaggccgaatcacaaaaggtcgcgttgctttctgaa

SEQ ID NO: 554957 - DNA, 75 bp, synthetic construct
  source 1..75: mol_type = other DNA
gaactttcagtcagacacaataaagattgtttacgatgaaaataatattattgtcgctatcaccagagatgcttc

SEQ ID NO: 554958 - DNA, 75 bp, synthetic construct
  source 1..75: mol_type = other DNA
atgcagcatttaaaaaatattacggcgggtaatccaaaaacggttgaacaatatcaattgacaaaggactttgat

SEQ ID NO: 554959 - DNA, 75 bp, synthetic construct
  source 1..75: mol_type = other DNA
atgcagcatttaaaaaatattactgcgggtaatccaaaaactgttgcccaatatcagctaacaaagaattttgat

SEQ ID NO: 554960 - DNA, 75 bp, synthetic construct
  source 1..75: mol_type = other DNA
atgcagcatttgataaatataacggcaggtaatccaaaaacggttggacaatatcaattgacaaaggactttgat

SEQ ID NO: 554961 - DNA, 75 bp, synthetic construct
  source 1..75: mol_type = other DNA
attgcttacgatgagaacaacatcatcgttgctgtcagtaaagacgtttcaactattaatcctgaagggctaagc

SEQ ID NO: 554962 - DNA, 75 bp, synthetic construct
  source 1..75: mol_type = other DNA
agctatcagaccagatggattaagtgttgttgaagtgccggatattactgctaaccgacgggcggacatttcagg

SEQ ID NO: 554963 - DNA, 75 bp, synthetic construct
  source 1..75: mol_type = other DNA
aacagacagagcaacgcaaggccacgctgctcagtgaagcagataccatcatccggcttctggagcggtcggtaa

SEQ ID NO: 554964 - DNA, 75 bp, synthetic construct
  source 1..75: mol_type = other DNA
acgaacagcagcaactggcagaatcacaaaaggcaactttgctttccgaagcagaatccgtgattttgccgctgg

SEQ ID NO: 554965 - DNA, 75 bp, synthetic construct
  source 1..75: mol_type = other DNA
ccaaccggcgtgctgatgactcaggtaaatggatgtttaaggatggtgccgtgattaagcggatttatacggcag

SEQ ID NO: 554966 - DNA, 75 bp, synthetic construct
  source 1..75: mol_type = other DNA
gaggcatgggaacgctacagtgttctggtcagtcgtgtggttcctgcaaatcctgaatggccggaaatgccgcaa

SEQ ID NO: 554967 - DNA, 75 bp, synthetic construct
  source 1..75: mol_type = other DNA
aggaattgcggcagcaggcagaaaaccggaaagccagacttcttgcagatgctgaatccgtgattttgccgctgg

SEQ ID NO: 554968 - DNA, 75 bp, synthetic construct
  source 1..75: mol_type = other DNA
cgctggatgggacgtgatttactgctgaaatacgttggccatagccataccttccaggccattgaaaaaggcatt

SEQ ID NO: 554969 - DNA, 75 bp, synthetic construct
  source 1..75: mol_type = other DNA
tccgtacaatattcaaaattacgcttacggattaaccgctattgctttctggccctatacccttatttcggcatt

SEQ ID NO: 554970 - DNA, 75 bp, synthetic construct
  source 1..75: mol_type = other DNA
tgtcactgctgctgcgtgctggtgcattgatcgcgccaattcagattgttgaagaacgtaccattggcccgactc

SEQ ID NO: 554971 - DNA, 75 bp, synthetic construct
  source 1..75: mol_type = other DNA
gcgcaaccaaaacagttcaggtggatgattcctcacaatcagcgcacttcccgttacaggtcagagcattgacgg

SEQ ID NO: 554972 - DNA, 75 bp, synthetic construct
  source 1..75: mol_type = other DNA
aacgtcgagggtcaccgccagcttcagcggggcagccgacagtaccggatattataaaaaccaggggaccgcgca

SEQ ID NO: 554973 - DNA, 75 bp, synthetic construct
  source 1..75: mol_type = other DNA
cagagcattgacggtaaatggcggagccactcagggaaccattcagggaaccattcaggcagtgattagcatcac

SEQ ID NO: 554974 - DNA, 75 bp, synthetic construct
  source 1..75: mol_type = other DNA
gaagcaagtaccgatggttatcttcgtggttattatatctactatcgcaaatctggtgctgcaaactggacaatg

SEQ ID NO: 554975 - DNA, 75 bp, synthetic construct
  source 1..75: mol_type = other DNA
atgacggtcagatattatatcagttctgctgatttaaccgcagagaagtttgcgacagcgattcgaaatcactgg

SEQ ID NO: 554976 - DNA, 75 bp, synthetic construct
  source 1..75: mol_type = other DNA
ctgatttaaccgcagagaagttcgccacagcaatccgaaaccactggcacgtggagaataagctgcactggcgtc

SEQ ID NO: 554977 - DNA, 75 bp, synthetic construct
  source 1..75: mol_type = other DNA
tattggcggcaatgttggcgctcgcaagtgcgacgatacaggcagccgatgtcaccatcacggttaacggtaagg

SEQ ID NO: 554978 - DNA, 75 bp, synthetic construct
  source 1..75: mol_type = other DNA
atgacggtcagatattatatcagttctgttgatttaaccgcagagaagttcgccacagcaatccgaaaccactgg

SEQ ID NO: 554979 - DNA, 75 bp, synthetic construct
  source 1..75: mol_type = other DNA
gccacccttacacccgtcagtatgatcttgatctgctggctgaacttcgccgtgacaaccaggcaatgcgcgtaa

SEQ ID NO: 554980 - DNA, 75 bp, synthetic construct
  source 1..75: mol_type = other DNA
aatcagcgcacttcccgttacaggtcagagcattaacggtaaatggcggaaccactcaggcagtgattagcatca

SEQ ID NO: 554981 - DNA, 75 bp, synthetic construct
  source 1..75: mol_type = other DNA
ttctttcagtctgatgtctgccggggcggcatcggcctggcatgatgttgcgcttgagttgactaattgtccggt

SEQ ID NO: 554982 - DNA, 75 bp, synthetic construct
  source 1..75: mol_type = other DNA
cacattgaatactggcgcaaccaaaacagttcaggtggatgattcctcacaatcagcgcacttcccgttacaggt

SEQ ID NO: 554983 - DNA, 75 bp, synthetic construct
  source 1..75: mol_type = other DNA
tgatctcgatgatcgtctgaatgagacaattgaaaatgcagttaatgaaagtaatgaatacaccaatacgcaaat

SEQ ID NO: 554984 - DNA, 75 bp, synthetic construct
  source 1..75: mol_type = other DNA
aagagggcgctattcttgcgcgcttcgactccactgacacccagctgcgcgctcgtgaagcattaatgggcgtta

SEQ ID NO: 554985 - DNA, 75 bp, synthetic construct
  source 1..75: mol_type = other DNA
tagcttcattctaactggtgttatcaataactggtataatgttaaagatgatagctcgcaatatttctttagtga

SEQ ID NO: 554986 - DNA, 75 bp, synthetic construct
  source 1..75: mol_type = other DNA
aaagcactggacaggaaaacatcgaacctggttagctaatcaatcatttagtcagccatctcaacagattgcttt

SEQ ID NO: 554987 - DNA, 75 bp, synthetic construct
  source 1..75: mol_type = other DNA
ggtattcaggacactgcgcgtgcgaaagagattctgggtgcgacggcaacgctggaattccgtctggtaaacacc

SEQ ID NO: 554988 - DNA, 75 bp, synthetic construct
  source 1..75: mol_type = other DNA
gtggatatggacactgcgctgggcaaactccaggaacaaaatatcgacagcctgcgcagcgacttgcgcgaaaaa

SEQ ID NO: 554989 - DNA, 75 bp, synthetic construct
  source 1..75: mol_type = other DNA
taaagaagagttgagcaacggacgtactgttcaacaggcaattgatgaaggttatcgtggcgcattcagtctatc

SEQ ID NO: 554990 - DNA, 75 bp, synthetic construct
  source 1..75: mol_type = other DNA
gttaccgaactctgacagcaaaagggaaaaaatcacaagtagccattacggcggtggctcgtgagttgactggat

SEQ ID NO: 554991 - DNA, 75 bp, synthetic construct
  source 1..75: mol_type = other DNA
tgggtacgttacgatcacggcagttgaagcccctgatgcaatgtatgatggcgtagatccgggtatctggtcgcc

SEQ ID NO: 554992 - DNA, 75 bp, synthetic construct
  source 1..75: mol_type = other DNA
gcggtggctcgtgagttgactggatttatgtgggatattgcatttgctgcccaatcatcattcagtcagcagaag

SEQ ID NO: 554993 - DNA, 75 bp, synthetic construct
  source 1..75: mol_type = other DNA
aatgccaggttattgccccttcccgcataccaaaatcaccgacagacagaatcaaaaatgatcatcgggacgcaa

SEQ ID NO: 554994 - DNA, 75 bp, synthetic construct
  source 1..75: mol_type = other DNA
cagcagctaaacgagacagcagagttgcccgacagcgaattctgagcatgctattgcgaacagacaaacgttatg

SEQ ID NO: 554995 - DNA, 75 bp, synthetic construct
  source 1..75: mol_type = other DNA
atagaatcaattctacaggcttgcggcggtattctttacgtgcacgcagggcaagtatgtataacagtagatcgt

SEQ ID NO: 554996 - DNA, 75 bp, synthetic construct
  source 1..75: mol_type = other DNA
cgtcccggaatgtgttacccgccgtcaggcagtgattaatcaggtccgcaccctgctgaaaaacaacacacacga

SEQ ID NO: 554997 - DNA, 75 bp, synthetic construct
  source 1..75: mol_type = other DNA
aacgagggatccctttctggcaagcggaaaacggggtctggctgacatcaacagttgcggttgagtttcttgagt

SEQ ID NO: 554998 - DNA, 75 bp, synthetic construct
  source 1..75: mol_type = other DNA
ttcctttgccgaaaaaacaccgccacagtttctctaccacggtacggcaagccgtttccttgacgagataaaaaa

SEQ ID NO: 554999 - DNA, 75 bp, synthetic construct
  source 1..75: mol_type = other DNA
tgcagtgccgttactacaggcaatgcgcattagtggagaagtgctgagtaatgagtatgcccgtcgtcagttagc

SEQ ID NO: 555000 - DNA, 75 bp, synthetic construct
  source 1..75: mol_type = other DNA
tgaagcccggatgaatgcatcgacagggggaatgttgcagcgtcggcggcacgcacatcgtcgcgtggcggcggc

SEQ ID NO: 555001 - DNA, 75 bp, synthetic construct
  source 1..75: mol_type = other DNA
ggtaggtgcattcgcgcggttcaggggcattcgacttcgcaggtcgccatttcctttgccgaaaaaacaccgcca

SEQ ID NO: 555002 - DNA, 75 bp, synthetic construct
  source 1..75: mol_type = other DNA
atggcaaagtacaacgaaaaagagctggcggatacgagcaagtttttaagttttatcctccgacacaaaccggag

SEQ ID NO: 555003 - DNA, 75 bp, synthetic construct
  source 1..75: mol_type = other DNA
gcctgccgatcgtggggcgtatatcgcgtgggctgaataccgcacgttatgcccgcacgctgagcatccttaatg

SEQ ID NO: 555004 - DNA, 75 bp, synthetic construct
  source 1..75: mol_type = other DNA
gatggacgccgcgcaactgacagaagaaggctactacagcgtcttcggtaagagcggcgcgcgtatcgagatccc

SEQ ID NO: 555005 - DNA, 75 bp, synthetic construct
  source 1..75: mol_type = other DNA
gataaaaccgccgttgatacttaccgttatctgaacttcaaccagctttctcagtataccgagaaagcggatagg

SEQ ID NO: 555006 - DNA, 75 bp, synthetic construct
  source 1..75: mol_type = other DNA
tgaagattgacgatatcaataaggcctgcgatcgctggaaaaaagataccgaacaactgcggcgcaatggggtga

SEQ ID NO: 555007 - DNA, 75 bp, synthetic construct
  source 1..75: mol_type = other DNA
tgaatacccagaagaactcgattcctgcgctggaaaaggaagtgaaagcgcttgaggtaatgactccaacttatt

SEQ ID NO: 555008 - DNA, 75 bp, synthetic construct
  source 1..75: mol_type = other DNA
agtgccgattcagcagaaacgagatttcgatatcaacgaacaacggcgacagacttttctgcaatcacaaaaact

SEQ ID NO: 555009 - DNA, 75 bp, synthetic construct
  source 1..75: mol_type = other DNA
agtggtgccgaaaatcatcgaacagtttgatcatctcggacacgcgctgcctgcctccacccgcacgctcatcgc

SEQ ID NO: 555010 - DNA, 75 bp, synthetic construct
  source 1..75: mol_type = other DNA
atggtaaacgattttgacagcagctttggctaccgcaatctgcgcatccataagtctgccatttgtgaacctttg

SEQ ID NO: 555011 - DNA, 75 bp, synthetic construct
  source 1..75: mol_type = other DNA
aaaatggcctgaagacgaacagcctttgtgttgagatcactgaaaccgtgatcgagcgaattaatgaacatttct

SEQ ID NO: 555012 - DNA, 75 bp, synthetic construct
  source 1..75: mol_type = other DNA
aaagaaaatggcctgaaggcgaacagcctctgtgttgagatcactgaaaccgtgatcgagcgaattaatgaacat

SEQ ID NO: 555013 - DNA, 75 bp, synthetic construct
  source 1..75: mol_type = other DNA
attttcaggcgacagcaaaggtgctgaaattcccggaagtgcaaattcaggaaatcattagtaactgtgcgagag

SEQ ID NO: 555014 - DNA, 75 bp, synthetic construct
  source 1..75: mol_type = other DNA
gttgctggcgcacaggagaagactgcgctgctcagaataggcaatgactggtgcattccgaagggaataacgcca

SEQ ID NO: 555015 - DNA, 75 bp, synthetic construct
  source 1..75: mol_type = other DNA
cggcgaacagagcggcgagctggaaaccatgcttgaacaggccgcggtcaaccaggaacgggaatttgataccca

SEQ ID NO: 555016 - DNA, 75 bp, synthetic construct
  source 1..75: mol_type = other DNA
tgtggctctgggcgcttttggtgcacatgttttaagtaaaacaatgggagccgttgagatgggctggatccagac

SEQ ID NO: 555017 - DNA, 75 bp, synthetic construct
  source 1..75: mol_type = other DNA
ttgccgccattagcggtttcatttttgtggctctgggcgcttttggtgcacatgttttaagtaaaacaatgggag

SEQ ID NO: 555018 - DNA, 75 bp, synthetic construct
  source 1..75: mol_type = other DNA
ctgcctctggtcccggaagccgcaaaggtcagcgatccctttctgctcgacgtgatccttgatgaagaaacgctg

SEQ ID NO: 555019 - DNA, 75 bp, synthetic construct
  source 1..75: mol_type = other DNA
acttcttcgataacctgttacccgatagcccgattgtacgtgaccggatcgttaaacgttatcatgccaaatcca

SEQ ID NO: 555020 - DNA, 75 bp, synthetic construct
  source 1..75: mol_type = other DNA
gcagcccaatgcgacgctcgatctcagccaaagcgttgataatgagtattactgtctgctgctggcgaaagaact

SEQ ID NO: 555021 - DNA, 75 bp, synthetic construct
  source 1..75: mol_type = other DNA
tcgataaaatttatccgcgacattttttggcgacagcaaaggtgctgagattcccggaagtgcagatgcatgaaa

SEQ ID NO: 555022 - DNA, 75 bp, synthetic construct
  source 1..75: mol_type = other DNA
aactctgtactgtggtttatgggcgacgatattccacatgtgccgaacaaacgcggcggcggtctgtgtctcggc

SEQ ID NO: 555023 - DNA, 75 bp, synthetic construct
  source 1..75: mol_type = other DNA
tttgtgcgcctgtactctttaaggaatttctcaaggataaacgcacagggcgcgaatctgtttgactcatgctcg

SEQ ID NO: 555024 - DNA, 75 bp, synthetic construct
  source 1..75: mol_type = other DNA
atgtttttggtgtaagacaatatacatgaaaaaaaattattttgaagggttgacgtgtaagacactgctatttta

SEQ ID NO: 555025 - DNA, 75 bp, synthetic construct
  source 1..75: mol_type = other DNA
gacctttaccgtaggagaactggacgatgtttcgcaatatctctcctgttctctgatgtcgccgctttcgcacag

SEQ ID NO: 555026 - DNA, 75 bp, synthetic construct
  source 1..75: mol_type = other DNA
accagcgaacaggaagcgcgtcagcaatctcctgatggctgcgtgatggtattcgctgcccgtattcgccagggg

SEQ ID NO: 555027 - DNA, 75 bp, synthetic construct
  source 1..75: mol_type = other DNA
atcagtctggttcagttcgttgccatacctgcaatgagcgcttttccctgtactctttaaggaattgctcaaggg

SEQ ID NO: 555028 - DNA, 75 bp, synthetic construct
  source 1..75: mol_type = other DNA
atggcacataaaacaaaggcgaccgtagagggccgccagtggcataacactaaacttgagcatatccagaatacc

SEQ ID NO: 555029 - DNA, 75 bp, synthetic construct
  source 1..75: mol_type = other DNA
cagcgaacaggaagcccgtcagcaatccccggctggctgcgtgatggtatttactgcccgcatccgtcaggggga

SEQ ID NO: 555030 - DNA, 75 bp, synthetic construct
  source 1..75: mol_type = other DNA
tataattttcctattctcacaccagaagaagagatgcagaggattattgatttttatctccacattaaagttttt

SEQ ID NO: 555031 - DNA, 75 bp, synthetic construct
  source 1..75: mol_type = other DNA
cgtcatatcaaagatcttgtttcttttggatggttgaagattgaggaaagggcaggtagcacaaatgcttatatt

SEQ ID NO: 555032 - DNA, 75 bp, synthetic construct
  source 1..75: mol_type = other DNA
ttgtcggccctgcgcttcaccggcgagtttccgaaaaagctgaccctggtcggcgtaattccggaatcgctggag

SEQ ID NO: 555033 - DNA, 75 bp, synthetic construct
  source 1..75: mol_type = other DNA
tcctttcgctgccggtcaccaatccggatgtaccacacgcagggcgtcgtgccctgctatttggccgcaggagtg

SEQ ID NO: 555034 - DNA, 75 bp, synthetic construct
  source 1..75: mol_type = other DNA
tgtactttcaccaggcatttttaccgcctcaacattgttcataacttcatgcggaacccttgccgcaactgtttg

SEQ ID NO: 555035 - DNA, 75 bp, synthetic construct
  source 1..75: mol_type = other DNA
acggcacaaccgcgcgtgattaccattgaggccagcagcgaacaggaagcacgccagcaatccccggctggttgc

SEQ ID NO: 555036 - DNA, 75 bp, synthetic construct
  source 1..75: mol_type = other DNA
tagctgagcgtgccgctgaggggattgcgcccaaacccctggatgcaaaccaaatggccgcacttgtagagctgc

SEQ ID NO: 555037 - DNA, 75 bp, synthetic construct
  source 1..75: mol_type = other DNA
tgaagccgctgaacaagcgaaacgtgaagctgcggaaaaagacaaagtgagcaatcaacaagacgatatgactaa

SEQ ID NO: 555038 - DNA, 75 bp, synthetic construct
  source 1..75: mol_type = other DNA
gcggttaaaggctctcaggttatcaaagcgatgatgaaactgggtgcaatggcaaccatcaaccaggtcatcgac

SEQ ID NO: 555039 - DNA, 75 bp, synthetic construct
  source 1..75: mol_type = other DNA
atcaagctgaacaaagaaccgatcatcgaatacctgaactctaacatcgtcctgctgaagtggatgatcgcggaa

SEQ ID NO: 555040 - DNA, 75 bp, synthetic construct
  source 1..75: mol_type = other DNA
tgccggatctgaaagttgagcaggcctttgagctgaccgatgcgtccgccgagcgttctgccgctggttgtacta

SEQ ID NO: 555041 - DNA, 75 bp, synthetic construct
  source 1..75: mol_type = other DNA
acgcggtggcggtctgtgtctcggcggcaaaattgcaccaatcttctttaacacgatggaagatgccggcgcact

SEQ ID NO: 555042 - DNA, 75 bp, synthetic construct
  source 1..75: mol_type = other DNA
ccagctcgttggtaacaacaaaatccagccatcaacttgctgccttactcagtgcgcgaattaatggtagcgttg

SEQ ID NO: 555043 - DNA, 75 bp, synthetic construct
  source 1..75: mol_type = other DNA
cgcttacaaacattcaccgcctatgaacgcctgacgaccgccctgacggttgcccaggtctgcggcgtccagcgg

SEQ ID NO: 555044 - DNA, 75 bp, synthetic construct
  source 1..75: mol_type = other DNA
agaatggcgtgttaaagctgttgattgaacggatgcgcccggaagaaaaacaaatggctctggagttattgcagg

SEQ ID NO: 555045 - DNA, 75 bp, synthetic construct
  source 1..75: mol_type = other DNA
ctatccgcgtgaccgcgttcttcgccggttggttaaaatcgatactgattttcagtgtgacagaattatccggaa

SEQ ID NO: 555046 - DNA, 75 bp, synthetic construct
  source 1..75: mol_type = other DNA
cggttggttaaaatcgataatgattttcagtgtgacagaattatccagcaattagatttgatgactgatgatgaa

SEQ ID NO: 555047 - DNA, 75 bp, synthetic construct
  source 1..75: mol_type = other DNA
ctatccgcgtgaccgtgttcttcgtcggttggttaaaatcgataatgattttcagtgtgacagaattatccagca

SEQ ID NO: 555048 - DNA, 75 bp, synthetic construct
  source 1..75: mol_type = other DNA
gggggaatgttgcagcgtcggcgacacgcacatcgtcgcgtggcggcggcagatctggcgctgttcactcgccaa

SEQ ID NO: 555049 - DNA, 75 bp, synthetic construct
  source 1..75: mol_type = other DNA
ggcgtttactggctggcgggtttgctggggcttctggtgctggggcaacggctactcaaaaatcctgcgatgcgc

SEQ ID NO: 555050 - DNA, 75 bp, synthetic construct
  source 1..75: mol_type = other DNA
tctgttgcaggccatgctctatccgctggttctgctggtggtggcaacgggcgtagtcactattttgctgacggc

SEQ ID NO: 555051 - DNA, 75 bp, synthetic construct
  source 1..75: mol_type = other DNA
taaaaaacttgataaaatagactctggtacagttaaaaaccttaaaagactacctggatacgatacgctcagagc

SEQ ID NO: 555052 - DNA, 75 bp, synthetic construct
  source 1..75: mol_type = other DNA
aatgttgtcgtatgggccaattgccatggggaatggtcgtcttacaataaatgaggcatgtggatttgaaatcct

SEQ ID NO: 555053 - DNA, 75 bp, synthetic construct
  source 1..75: mol_type = other DNA
atgcacttccgagtcacaggtgaatggaatggagacccattcgacaggattatcgaagcagaggacatcaacgac

SEQ ID NO: 555054 - DNA, 75 bp, synthetic construct
  source 1..75: mol_type = other DNA
gatgtcttcaacattctgttgcaggtactggatgatgggcgtctgactgacgggcaagggagaacggtcgacttc

SEQ ID NO: 555055 - DNA, 75 bp, synthetic construct
  source 1..75: mol_type = other DNA
gaacaggcgaaaatcgctattgaacaggctcgccgtgtgggggacctggcgcggatgtctgaactgcaatacggc

SEQ ID NO: 555056 - DNA, 75 bp, synthetic construct
  source 1..75: mol_type = other DNA
cacaggatctggtgcgcgttcttaatctttgcgacaagctggcgcaaaaacgtggtgataactttatctcgtcag

SEQ ID NO: 555057 - DNA, 75 bp, synthetic construct
  source 1..75: mol_type = other DNA
ggcgtttactggctggtaggtttgctgggacttctggtgctcgggcaacggctactcaaaaatcctgctatgcga

SEQ ID NO: 555058 - DNA, 75 bp, synthetic construct
  source 1..75: mol_type = other DNA
atgcacttccgagtcacaggtgaatggaatggagaaccattcaacagagttatcgaagccgagaacatcaacgac

SEQ ID NO: 555059 - DNA, 75 bp, synthetic construct
  source 1..75: mol_type = other DNA
tggcggaagaaaacaaatggactgataacgcggaaccgactgaagattccagcgattatcacgtcactacttctc

SEQ ID NO: 555060 - DNA, 75 bp, synthetic construct
  source 1..75: mol_type = other DNA
gtcggggagataaaattggcctgacattgattcgtctgagtattgcgattgtttttatgtggattgggttattaa

SEQ ID NO: 555061 - DNA, 75 bp, synthetic construct
  source 1..75: mol_type = other DNA
ggtttccgacgctttcgcgttcgtttcggatgtcttcgctgcggaagctgacctcgctgctgccgtggcctgctc

SEQ ID NO: 555062 - DNA, 75 bp, synthetic construct
  source 1..75: mol_type = other DNA
tggctgaggcctgcccggcacttgttgacgcggcactggcagatgatgcagccgctgtttttgagcctgccgcag

SEQ ID NO: 555063 - DNA, 75 bp, synthetic construct
  source 1..75: mol_type = other DNA
tcgccgctgcctgttgtgcgcgcaaagcgcagccgtctgcgcgcgtggaaaaacccatcaactgaccgatttact

SEQ ID NO: 555064 - DNA, 75 bp, synthetic construct
  source 1..75: mol_type = other DNA
cccgccgcgactattcactgccgcctcgcagctgcctgttgtgcgagcaaagcgcagccgtctgcgcgcgtggaa

SEQ ID NO: 555065 - DNA, 75 bp, synthetic construct
  source 1..75: mol_type = other DNA
tcgggcatccggtacgctggttacccggtctggagatacaaaactatgccgacgcgtcactgtttgctgatgagt

SEQ ID NO: 555066 - DNA, 75 bp, synthetic construct
  source 1..75: mol_type = other DNA
ctccagggaaagcaatcataggttggcacaaatcacgcaatatgcccgccaactggctagctcgccttctattat

SEQ ID NO: 555067 - DNA, 75 bp, synthetic construct
  source 1..75: mol_type = other DNA
tcggatgtcttcgctgcggaagcagacctcgctgctgcactggcctgttcagtggcttcgccagccttcgttgtg

SEQ ID NO: 555068 - DNA, 75 bp, synthetic construct
  source 1..75: mol_type = other DNA
gaggccgccgcatcccgggctgaggtggcagcttctgacgctttcgtggtcgcggtggatgcagaagtggcggct

SEQ ID NO: 555069 - DNA, 75 bp, synthetic construct
  source 1..75: mol_type = other DNA
tttttgagcctgccgcagccgaggcgctctgtcccgctgccgtttcagaagacctggcgtttgtctcagacgtct

SEQ ID NO: 555070 - DNA, 75 bp, synthetic construct
  source 1..75: mol_type = other DNA
gcagcattcgtttctgacgttttcgcggcaccggcactggtggccgccgcgctttttgaggactctgcagcggca

SEQ ID NO: 555071 - DNA, 75 bp, synthetic construct
  source 1..75: mol_type = other DNA
taaacttccgggttatgtcgttaagatttttgaagaaaagatcgataatgaattaaaaattagaacaagaatgat

SEQ ID NO: 555072 - DNA, 75 bp, synthetic construct
  source 1..75: mol_type = other DNA
agcgtctgtgtggttgcggaaagcatgatggccgtgaacacggggagttgcttacagcacaactgcgactgggac

SEQ ID NO: 555073 - DNA, 75 bp, synthetic construct
  source 1..75: mol_type = other DNA
cggcatcctgccggaagagtggggcggtgaaagccagttcgtacacgtatctgcgaaagcgggtaccggtatcga

SEQ ID NO: 555074 - DNA, 75 bp, synthetic construct
  source 1..75: mol_type = other DNA
aaaatggaggccaaattggtgttgccagaaagtttggctttacgtcatcactgattggtgcctggtatcgcttcg

SEQ ID NO: 555075 - DNA, 75 bp, synthetic construct
  source 1..75: mol_type = other DNA
agcgtctgtgtggttgcggaaagcatgatggccgtgaacacgtgcagtcgcttacagcacagctgcgactgggac

SEQ ID NO: 555076 - DNA, 75 bp, synthetic construct
  source 1..75: mol_type = other DNA
cttacagcacaactgcgactggggccggcagacatcctggagtcagatgagaatggtattatcccggagcaggac

SEQ ID NO: 555077 - DNA, 75 bp, synthetic construct
  source 1..75: mol_type = other DNA
tggatgcggataaaaagcagatacagtgcatggtaagaccgctgcaaatcctacgtgctgacgggaggtgggaaa

SEQ ID NO: 555078 - DNA, 75 bp, synthetic construct
  source 1..75: mol_type = other DNA
tttcaggcgccagcaaaggtgctgaaattaccggaagtgcaaattcatgacatcgttagtcactttgcgagaatg

SEQ ID NO: 555079 - DNA, 75 bp, synthetic construct
  source 1..75: mol_type = other DNA
attttcaggcgtcagcaaaggtgctgaaattcccggaagtgcaaattcaggaaatcatgagtaactgtgcgagag

SEQ ID NO: 555080 - DNA, 75 bp, synthetic construct
  source 1..75: mol_type = other DNA
attttcaggcgacagcaaaggtgctgaaattcccggaagtgcaaattcaggaaatcatgagtaactgtgcgagat

SEQ ID NO: 555081 - DNA, 75 bp, synthetic construct
  source 1..75: mol_type = other DNA
tttcaggcgccagcaaaggtgctgaaattaccggaagtgcagattcatgatatcgttagtcactctgcgagaatg

SEQ ID NO: 555082 - DNA, 75 bp, synthetic construct
  source 1..75: mol_type = other DNA
tttcaggcgccagcaaaggtgctgaaattaccggaagtgcacattcatgaaatcgttagtcactttgcgagaatg

SEQ ID NO: 555083 - DNA, 75 bp, synthetic construct
  source 1..75: mol_type = other DNA
tttcaggcgccagcaaaggtgctgaaattaccggaagtgcatattcatgacatcgttagtcactgtgcgagaatg

SEQ ID NO: 555084 - DNA, 75 bp, synthetic construct
  source 1..75: mol_type = other DNA
acagactttaattgaccacctgaatcagaaaaattcggggccggacaaattgacgctgcagcgtaaaacgcgcag

SEQ ID NO: 555085 - DNA, 75 bp, synthetic construct
  source 1..75: mol_type = other DNA
agagtctgtgcggttgcggaaagcatgatgaccgtgaaaacggacagtctcttacagcacaattgcgactgggcc

SEQ ID NO: 555086 - DNA, 75 bp, synthetic construct
  source 1..75: mol_type = other DNA
cggaagtgcagatgcatgaaatcctaagtgactttgccagaatgattccggcagcactggataacgtgaagactt

SEQ ID NO: 555087 - DNA, 75 bp, synthetic construct
  source 1..75: mol_type = other DNA
atgaacatactaaaaaaacttatgcagcgtctgtgcggttgcggaaagcatgatgaccgtgaaaacggggagttt

SEQ ID NO: 555088 - DNA, 75 bp, synthetic construct
  source 1..75: mol_type = other DNA
tttacttcaatgcgtgcacgtggtgcgcaggcaacggacatcgtagtcctggttgttgctgccgacgacggcgtg

SEQ ID NO: 555089 - DNA, 75 bp, synthetic construct
  source 1..75: mol_type = other DNA
ccggtattctgtactcccaaaaagctggctgaagtctccagggagatcatcgtatccggcgcacaggaaatagcc

SEQ ID NO: 555090 - DNA, 75 bp, synthetic construct
  source 1..75: mol_type = other DNA
actgcgtctggggccggcagacatcctggagtccgatgagaatggtattattccggagcaggacagggtaatcac

SEQ ID NO: 555091 - DNA, 75 bp, synthetic construct
  source 1..75: mol_type = other DNA
gtgcattccgaaaggaataacgccgacgacgcacatcattaaattaccgattggggaaatcaggcagcccaatgc

SEQ ID NO: 555092 - DNA, 75 bp, synthetic construct
  source 1..75: mol_type = other DNA
atgcagcgtctgtgcggttgcggaaagcatgatgaccgtgaaaacggggagttacttacagcacagctgcgactg

SEQ ID NO: 555093 - DNA, 75 bp, synthetic construct
  source 1..75: mol_type = other DNA
atgaacatactaaaaaaacttatgcagcgtctgtgtggttgcggaaagcatgatggccgtgaacacgtgcagtcg

SEQ ID NO: 555094 - DNA, 75 bp, synthetic construct
  source 1..75: mol_type = other DNA
gcattgattatggcgctgaaaaatcctggcaaatacaccagtgtttccgcctttgcgccgattgtgaatccgtgc

SEQ ID NO: 555095 - DNA, 75 bp, synthetic construct
  source 1..75: mol_type = other DNA
tgcggataaaaagcagatacagtgcgtggtaagaccgctgcaaattctgcgtgctgacgggaggtgggaaaatat

SEQ ID NO: 555096 - DNA, 75 bp, synthetic construct
  source 1..75: mol_type = other DNA
tgaatcagatggaggcccaggcatcgcgcggatcatggctttttttgatggggtccagcgaggcgctgaaagatc

SEQ ID NO: 555097 - DNA, 75 bp, synthetic construct
  source 1..75: mol_type = other DNA
cctgcgggagaggaaatcttctgtgatgaacatggccgggtacgggtgaagtttcactgggaccgttatcacggg

SEQ ID NO: 555098 - DNA, 75 bp, synthetic construct
  source 1..75: mol_type = other DNA
gtatcttccagcagcaggatatccggacgatatcggccacattactgaacgagaacggcgtcacagagtggacgc

SEQ ID NO: 555099 - DNA, 75 bp, synthetic construct
  source 1..75: mol_type = other DNA
attatccgggaaggttcaaggacgagcagcacggcaaggatttcacgctgtaccagatggacagcctgcgcagtg

SEQ ID NO: 555100 - DNA, 75 bp, synthetic construct
  source 1..75: mol_type = other DNA
tctgactgttaccgttatatcagctttcacgctgagttcttcccctgggatcgtacacccttctgttgaaaaagc

SEQ ID NO: 555101 - DNA, 75 bp, synthetic construct
  source 1..75: mol_type = other DNA
taccactgcgggggagatttgtaatgccattatcatgttctgtacaccatggataattcatcgcattggtgccaa

SEQ ID NO: 555102 - DNA, 75 bp, synthetic construct
  source 1..75: mol_type = other DNA
cccgcaggagaggaaatcttctgcgacgaacacgggcgggtacgggtgaagtttcactgggacaggtataactcg

SEQ ID NO: 555103 - DNA, 75 bp, synthetic construct
  source 1..75: mol_type = other DNA
gcgcttcacggcagccaggggagaggaaccacgctgggaaatcagttagaggtgataccggcggaccggacgtgg

SEQ ID NO: 555104 - DNA, 75 bp, synthetic construct
  source 1..75: mol_type = other DNA
gaggtgattgttgattttctgaacggggacccggaccagccgctggtcatgggccggacgtaccatgaggacaac

SEQ ID NO: 555105 - DNA, 75 bp, synthetic construct
  source 1..75: mol_type = other DNA
acgaacatggccgggtacgggtgaagtttcactgggacaggtataacccggcaacggaggcgagttcgtgctggg

SEQ ID NO: 555106 - DNA, 75 bp, synthetic construct
  source 1..75: mol_type = other DNA
gggatgctgctggagaagaaggcgacgctgaccatctggcagggcgtcatcccgctgcgttatgttaccggcgtg

SEQ ID NO: 555107 - DNA, 75 bp, synthetic construct
  source 1..75: mol_type = other DNA
agcccggagcagacgctcacgctgtgcgatgatgtggcgggcctgccggtgtacggggagataccgtttaacccg

SEQ ID NO: 555108 - DNA, 75 bp, synthetic construct
  source 1..75: mol_type = other DNA
cagaagataacggtggtgaagggccagacggttcaggtcggtacaaaaaaagaggggggccacgaccagagtatc

SEQ ID NO: 555109 - DNA, 75 bp, synthetic construct
  source 1..75: mol_type = other DNA
ctatggctatgctcggagtctcagttccggcatctgctcaaatttatgaatccatcttcacagataccaatggta

SEQ ID NO: 555110 - DNA, 75 bp, synthetic construct
  source 1..75: mol_type = other DNA
gcagcagggtgagaacctgaacggacagcttgaacagtatgagatatttgattatccgggaaggtacaaggatga

SEQ ID NO: 555111 - DNA, 75 bp, synthetic construct
  source 1..75: mol_type = other DNA
ataagacgacggggaaccatgtcagcctggtggagggaaagcacagcctggtggtgaagggggacctggcgagga

SEQ ID NO: 555112 - DNA, 75 bp, synthetic construct
  source 1..75: mol_type = other DNA
cgacggtgctgaagacactgggggatgagaagagtggtgatggcagtgattccggagaagaaaatgaagactctg

SEQ ID NO: 555113 - DNA, 75 bp, synthetic construct
  source 1..75: mol_type = other DNA
caccaacgatccgctgttgcaggggcgtttgttctcttataccgatacacaaatcagtcgtcttggcggaccaaa

SEQ ID NO: 555114 - DNA, 75 bp, synthetic construct
  source 1..75: mol_type = other DNA
ggtccaacgctgctggaagattttattctgcgcgagaaaatcacccactttgaccatgagcgcatcccggaacgt

SEQ ID NO: 555115 - DNA, 75 bp, synthetic construct
  source 1..75: mol_type = other DNA
gcagatgataaaagtttagcggctgagcaaaatgatagtaatgcatcgtccgatcagaatgattacaacgatgag

SEQ ID NO: 555116 - DNA, 75 bp, synthetic construct
  source 1..75: mol_type = other DNA
caccattaaccggtgggacgttatggtgcgtcactattgcattgtcattagcgacgtttatgcaaatgttggatt

SEQ ID NO: 555117 - DNA, 75 bp, synthetic construct
  source 1..75: mol_type = other DNA
gaaactatggggtataatgcgatatgggccgggcttgcctatgcgccaatcggcataatgccactattaatatcg

SEQ ID NO: 555118 - DNA, 75 bp, synthetic construct
  source 1..75: mol_type = other DNA
ggattctttaggggctaatcgtccggcggtggatttaaaaactgccgtgagcatgttccgccagcgcaaaatgtg

SEQ ID NO: 555119 - DNA, 75 bp, synthetic construct
  source 1..75: mol_type = other DNA
gagaacaatggctggcagatgcgttatcacctgcgtattgagccgccgttatggcggtgcgggctgcggcagaac

SEQ ID NO: 555120 - DNA, 75 bp, synthetic construct
  source 1..75: mol_type = other DNA
gctggaagcaggtccgtccattccagttgaaatccttggcttgtccggtgttccggcagcgggtgacgaagttac

SEQ ID NO: 555121 - DNA, 75 bp, synthetic construct
  source 1..75: mol_type = other DNA
ctgtgcgtaacgggatggcgagcggtgcggtcatcgaatctttcctcgataaaggtcgtggtccggttgcaactg

SEQ ID NO: 555122 - DNA, 75 bp, synthetic construct
  source 1..75: mol_type = other DNA
gccggggttcggtaacctggcgataccgcgcatcggccaggaagtgattgtagacttcctgaacggcgacccgga

SEQ ID NO: 555123 - DNA, 75 bp, synthetic construct
  source 1..75: mol_type = other DNA
cactgatgctggtacgaccatggagccatcgaaacattttggtgatatggctctatttgcccagccagtggagga

SEQ ID NO: 555124 - DNA, 75 bp, synthetic construct
  source 1..75: mol_type = other DNA
accggacgacggacgtgaagcatgaccacacggagaccatcggtaacaaccagaaaatcaccgtggggctgggcc

SEQ ID NO: 555125 - DNA, 75 bp, synthetic construct
  source 1..75: mol_type = other DNA
tgacgaaattgtgccgatcaacaaaaagtacaatatcgaaactttccttgctgcggtgcgccgttatctggagaa

SEQ ID NO: 555126 - DNA, 75 bp, synthetic construct
  source 1..75: mol_type = other DNA
ggaacattaggggcatggggtggagaaggttttttaagtgtatcaaaaacggtgccagcccttggtgttctagta

SEQ ID NO: 555127 - DNA, 75 bp, synthetic construct
  source 1..75: mol_type = other DNA
acggtggcccatgaccggagcatcacggtgcgcaacgaccagacgctgaaggtgacgaacgaccggcgggtgaac

SEQ ID NO: 555128 - DNA, 75 bp, synthetic construct
  source 1..75: mol_type = other DNA
tgcgcagataagcgtggcgtcggtggagacgcaggattatacgttcaaaacgccggggtggccggggtactacag

SEQ ID NO: 555129 - DNA, 75 bp, synthetic construct
  source 1..75: mol_type = other DNA
ggataagcctgaaggtgggtggctcgtttgtggtcatccattcagggggcgtggacatcgtcgggccgaaaatca

SEQ ID NO: 555130 - DNA, 75 bp, synthetic construct
  source 1..75: mol_type = other DNA
gcataaccagtttactgttatcccggcagaccgtacctggcgtccacagccaatgatgaagccaaaggtagatgg

SEQ ID NO: 555131 - DNA, 75 bp, synthetic construct
  source 1..75: mol_type = other DNA
aatcggcacgatgaggagggtgacagctacgctttcacgctctacgacatggcaggcgagatggttgcccgctgt

SEQ ID NO: 555132 - DNA, 75 bp, synthetic construct
  source 1..75: mol_type = other DNA
tttggcctgtcaaaacgtcgcgtcacgctttccacttccggtgtagttccggcgctggataaactgggcgatatg

SEQ ID NO: 555133 - DNA, 75 bp, synthetic construct
  source 1..75: mol_type = other DNA
caggtgatgtcattgaccgtactaaacgtactctgcgtaaacggatgcagggtgaagctatcgacattaaaacgg

SEQ ID NO: 555134 - DNA, 75 bp, synthetic construct
  source 1..75: mol_type = other DNA
cggcggttctgaaagcgctggcagatgataaaagtttagcggctgagcaaaatgatagtaatgcatcgtccgatc

SEQ ID NO: 555135 - DNA, 75 bp, synthetic construct
  source 1..75: mol_type = other DNA
ggggtatacagagcgtttttttgtatctagcaaacatgaaattaaagtgaagttgctatttgcgaatgatgattt

SEQ ID NO: 555136 - DNA, 75 bp, synthetic construct
  source 1..75: mol_type = other DNA
aagcgggtaccggtatcgatgaactgctggacgctatcctgctgcaggcggaagttctggagctgaaagcggtac

SEQ ID NO: 555137 - DNA, 75 bp, synthetic construct
  source 1..75: mol_type = other DNA
ctgtcttttctggctgcggcggaacttccgtatcttccagcagcaggatatccggacgatatcggccacattact

SEQ ID NO: 555138 - DNA, 75 bp, synthetic construct
  source 1..75: mol_type = other DNA
cctgcgtattgagccgccgttatggcggggggggggggggggggggcggcctgtcttttctggctgcggcggaac

SEQ ID NO: 555139 - DNA, 75 bp, synthetic construct
  source 1..75: mol_type = other DNA
aacatggatacggaagtgctcaacgaccggacgacggacgtgaagcatgaccacacggaaaccattggtaacgac

SEQ ID NO: 555140 - DNA, 75 bp, synthetic construct
  source 1..75: mol_type = other DNA
acggtggcgaatgaccggcgcataacggtacgcaacgaccagacgctgaaggtgacgaacgaccggacggtgagc

SEQ ID NO: 555141 - DNA, 75 bp, synthetic construct
  source 1..75: mol_type = other DNA
gggccaggaggtgattgttgattttctgaacggggacccggaccagccgctggtcatgggccggacgtaccatga

SEQ ID NO: 555142 - DNA, 75 bp, synthetic construct
  source 1..75: mol_type = other DNA
tggacacggaggtgcttaacgaccggcggacggacgtgaagcatgaccatacggagaccatcggtaacgaccaga

SEQ ID NO: 555143 - DNA, 75 bp, synthetic construct
  source 1..75: mol_type = other DNA
aatattcaccactgacagcgagcagacaatagacgtcagattgttgcatttgaatatcgatatgatatggggagg

SEQ ID NO: 555144 - DNA, 75 bp, synthetic construct
  source 1..75: mol_type = other DNA
cgttccagcagcaggacattcagacgatatcagcgcagcttcttgaagagaacggggtgacggcgtggatgccgc

SEQ ID NO: 555145 - DNA, 75 bp, synthetic construct
  source 1..75: mol_type = other DNA
ccaggggagaggaaccacgctgggaaatcagttagaggtgataccggcggaccggacgtggcgtccacggctgca

SEQ ID NO: 555146 - DNA, 75 bp, synthetic construct
  source 1..75: mol_type = other DNA
cgcagcatatgctggtggtcagtgctatgggtgccaatgcccactcgccgtttttctataaccgcgtcaaagggg

SEQ ID NO: 555147 - DNA, 75 bp, synthetic construct
  source 1..75: mol_type = other DNA
aaacgaccgtaaagtgacggtggaagggaagcaggagcataagacgacggggaaccatatcagtctggtggaggg

SEQ ID NO: 555148 - DNA, 75 bp, synthetic construct
  source 1..75: mol_type = other DNA
gcaatcacccggtggattttctccttaacgagcaaccgaacgactgtcagacgccttaccagttcaagcgcacga

SEQ ID NO: 555149 - DNA, 75 bp, synthetic construct
  source 1..75: mol_type = other DNA
gtgaggcgcgagaatggctgagcaatcatccggtggattttctgctgaacgagcagccgaacgactgccagacac

SEQ ID NO: 555150 - DNA, 75 bp, synthetic construct
  source 1..75: mol_type = other DNA
gttatcacgtcaggcgaatggctggacggcgtgaaaggcaaacaggcattagccgcactggaacgctacaaaggg

SEQ ID NO: 555151 - DNA, 75 bp, synthetic construct
  source 1..75: mol_type = other DNA
acggcgtgaagggcaaacaggcattagccgcactggaacgctacaaaggggccagaaacgccggaaaaacgccca

SEQ ID NO: 555152 - DNA, 75 bp, synthetic construct
  source 1..75: mol_type = other DNA
gcgtaaaggtggtgacgaattcagccaggcatggaagcaggaagtgaagatcagcaaagacggcaaggaaggtga

SEQ ID NO: 555153 - DNA, 75 bp, synthetic construct
  source 1..75: mol_type = other DNA
cgtgagggtatgccgccgcgtgaaggtggtgatgagttcagccaggcatggaagcagactgtggaaattaaaggt

SEQ ID NO: 555154 - DNA, 75 bp, synthetic construct
  source 1..75: mol_type = other DNA
cttttgcagtaccgcttctgcggtaacttatcctctgccaaccgacgggagtcgcctggttggtcagaatcaggt

SEQ ID NO: 555155 - DNA, 75 bp, synthetic construct
  source 1..75: mol_type = other DNA
gaagtccataacccgctgtctaccaccgaagcccagtttgaaggtcaggaaattgtgccaattaccctgacgaag

SEQ ID NO: 555156 - DNA, 75 bp, synthetic construct
  source 1..75: mol_type = other DNA
gccgttttcttgacgagataaaaaaacaagggctgattgcaggggagcgccattacgtgcatctctctgctgatg

SEQ ID NO: 555157 - DNA, 75 bp, synthetic construct
  source 1..75: mol_type = other DNA
ctggcatctggtgaccgtgaaccgaaactcatcgaaattcgacagattgcaaaagctacaggaaggaatccggtt

SEQ ID NO: 555158 - DNA, 75 bp, synthetic construct
  source 1..75: mol_type = other DNA
gcttccggctgtcgttccggctggcccggataacccgatgggactgtatgcactgtatatcggtcgcctgtacgc

SEQ ID NO: 555159 - DNA, 75 bp, synthetic construct
  source 1..75: mol_type = other DNA
agcgtacagaccgtgaccggtcagccagatgttgatcaggcggttctggaccaggctattcaaaaccgttccggg

SEQ ID NO: 555160 - DNA, 75 bp, synthetic construct
  source 1..75: mol_type = other DNA
cgccggggtgtgttgtaccggaacgcacaggcgcacacaaataccgctataccatcaccgaaccctatacaggaa

SEQ ID NO: 555161 - DNA, 75 bp, synthetic construct
  source 1..75: mol_type = other DNA
gggcggtgtgagcttgtgggatcttgcggttgcgtatccggtcacctctcacctgacagttcgtggtaaaatagc

SEQ ID NO: 555162 - DNA, 75 bp, synthetic construct
  source 1..75: mol_type = other DNA
aaggattactcatcttatccttatcaaaccgttaaaatgggcggtgtgagcttgtgggatcttgcggttgcgtat

SEQ ID NO: 555163 - DNA, 75 bp, synthetic construct
  source 1..75: mol_type = other DNA
atgaaattacttattctgggcaaccacacttgcggcaatcgtggcgacagcgccatcctgcgcggcttacttgat

SEQ ID NO: 555164 - DNA, 75 bp, synthetic construct
  source 1..75: mol_type = other DNA
ctaccaaatggtattgaggcatatttttctaagcattacccaaatgtgtatgatgactttgatattccattttaa

SEQ ID NO: 555165 - DNA, 75 bp, synthetic construct
  source 1..75: mol_type = other DNA
gtgatgaactctgggagaaaatggctcctctcatcccggagcatagaactcaacacccgctgggtacgcaccgca

SEQ ID NO: 555166 - DNA, 75 bp, synthetic construct
  source 1..75: mol_type = other DNA
ttgcgaacagttggactctattgactggtcgtggctgtcgatggatggttgtataaccaaatcaccgctggcagg

SEQ ID NO: 555167 - DNA, 75 bp, synthetic construct
  source 1..75: mol_type = other DNA
gcctgtacctggtatccggtatcaggtggagtttgtacagcgcggacctgttacgggccacacctggcgaacgct

SEQ ID NO: 555168 - DNA, 75 bp, synthetic construct
  source 1..75: mol_type = other DNA
tcccgtacctggtacccgttatctggttgagtttgattcagccgatttattacgcgccacccctaccgaacgtta

SEQ ID NO: 555169 - DNA, 75 bp, synthetic construct
  source 1..75: mol_type = other DNA
taagcgaatgatgatccgccactgcctgttaaacggtaatgcttatgcggttattcagtgggggcgtgatggttt

SEQ ID NO: 555170 - DNA, 75 bp, synthetic construct
  source 1..75: mol_type = other DNA
cgtcaccgacactggcaagttgcgtaatatcgccatcgcccagggattcactgacttcgtgcgcctgctgtcagg

SEQ ID NO: 555171 - DNA, 75 bp, synthetic construct
  source 1..75: mol_type = other DNA
cagtacgtcaaaaaccgcgagcatttccacatcgccatggacgaacttaatgacgtggagattggcaaaattctt

SEQ ID NO: 555172 - DNA, 75 bp, synthetic construct
  source 1..75: mol_type = other DNA
ctcgctgattgatgacggttatcaggtactggcgctctccacctgtaccagtgtcgatcgttacaatcgtgacga

SEQ ID NO: 555173 - DNA, 75 bp, synthetic construct
  source 1..75: mol_type = other DNA
accactccagtagagcgtcctgtcactctggatgggatgacggtggatgcgatacctcaagttcatccagttact

SEQ ID NO: 555174 - DNA, 75 bp, synthetic construct
  source 1..75: mol_type = other DNA
tcttcaatatggccagagagaacgctgacggtaaaaaatgtatccaggatgcgcagtcgggtagcgaaacatctc

SEQ ID NO: 555175 - DNA, 75 bp, synthetic construct
  source 1..75: mol_type = other DNA
ataaaaaaagaatatcaagaatatcttaaaaaccctaaagccttatctgctaaacctagtaacgccaagcaaaaa

SEQ ID NO: 555176 - DNA, 75 bp, synthetic construct
  source 1..75: mol_type = other DNA
tgtctaggtttctacgaacccatggctgtgagcgtgaagcggaaaacttatgatgagaccatgattaaggaagta

SEQ ID NO: 555177 - DNA, 75 bp, synthetic construct
  source 1..75: mol_type = other DNA
tagccacatgtcaaaacgggtgcaaccaatgaaaagtggaaaatattctaagaactgttttgtaaaccatgccag

SEQ ID NO: 555178 - DNA, 75 bp, synthetic construct
  source 1..75: mol_type = other DNA
tagtcacatgtcgaaacggatttcaccgatgaaaagtggaaaatatacgaaaagctgctttgttaatcatgccag

SEQ ID NO: 555179 - DNA, 75 bp, synthetic construct
  source 1..75: mol_type = other DNA
cgtgaccggtaatacgctgaccctgaaagcaaatcgcgtgcgttatacccccgtttattacttcaatgactggca

SEQ ID NO: 555180 - DNA, 75 bp, synthetic construct
  source 1..75: mol_type = other DNA
atggctgattttggttcaactaaatacaacgtcagttttgaagaatggcatgaactgttaatggaatatgcagag

SEQ ID NO: 555181 - DNA, 75 bp, synthetic construct
  source 1..75: mol_type = other DNA
attgttcatgcacgtggatcagcagctcacggttatttccagccatataaaaaaagcttaagcgatatcaccaaa

SEQ ID NO: 555182 - DNA, 75 bp, synthetic construct
  source 1..75: mol_type = other DNA
cgtatattcgtgagcgcgttgttgaccagctggcgcatattgatctcactctggcccaggcggtggcgaaaaatc

SEQ ID NO: 555183 - DNA, 75 bp, synthetic construct
  source 1..75: mol_type = other DNA
atgaatatgcaaatttttattggaccaacagccacagttgccgcggtctgccttgctgcatattttgctttacga

SEQ ID NO: 555184 - DNA, 75 bp, synthetic construct
  source 1..75: mol_type = other DNA
aagaatttcattagatatatttttgattttgacgatgaaaaacacatcatgctttatgattatcaatcgcacaca

SEQ ID NO: 555185 - DNA, 75 bp, synthetic construct
  source 1..75: mol_type = other DNA
acagcgtcagttttgaagaatggcatgaactgttaatggaatatgcagagttacgtggtggcagtgctgctgatg

SEQ ID NO: 555186 - DNA, 75 bp, synthetic construct
  source 1..75: mol_type = other DNA
aacactggacgcctgatgtacagccttgcagggcaatgtaaggctaattggtggtacgaaaacaaccaggtgcat

SEQ ID NO: 555187 - DNA, 75 bp, synthetic construct
  source 1..75: mol_type = other DNA
attacaattaccattaaaggttgcctatgaagaaaataaaggaagatactctggtcaatcaggaggaggctggcc

SEQ ID NO: 555188 - DNA, 75 bp, synthetic construct
  source 1..75: mol_type = other DNA
aaaaataccagtatgttgatcaacaaacaggagaaattaaagaccgaactttgaatataccacactacttttgtg

SEQ ID NO: 555189 - DNA, 75 bp, synthetic construct
  source 1..75: mol_type = other DNA
cattacatctcttgtttatactgctctccctctcacagatgcacacattacaccaccggaagacgtgaaattcgc

SEQ ID NO: 555190 - DNA, 75 bp, synthetic construct
  source 1..75: mol_type = other DNA
ctggggaaaccaggccagctccaccatcttcgacagcagccagtcagccacgccagtgatcgcctttttaccggc

SEQ ID NO: 555191 - DNA, 75 bp, synthetic construct
  source 1..75: mol_type = other DNA
aacgctgaacgtcaatagcgcggcggacggctacgtcaataccaacttgaccgccaatggcagcgtcggctggca

SEQ ID NO: 555192 - DNA, 75 bp, synthetic construct
  source 1..75: mol_type = other DNA
cgcaaaagccatctgactctctatccaggcaatgtcgctgtcattgagccagaggtgaagcagatggttaccgtc

SEQ ID NO: 555193 - DNA, 75 bp, synthetic construct
  source 1..75: mol_type = other DNA
cgttgatcacaatgccgccatgattgaagaattgcgcgcagatcctgattatgcaaacgcttatcttgctaatgc

SEQ ID NO: 555194 - DNA, 75 bp, synthetic construct
  source 1..75: mol_type = other DNA
ccgttgatcacaatgccgccatgattgaagaattgcgcgcagatcctgattatgcaaacgcttatcttgctaata

SEQ ID NO: 555195 - DNA, 75 bp, synthetic construct
  source 1..75: mol_type = other DNA
atgagcgaccgtgacacgggtgctgcggctgaaccgcgcgcgccggttgtgaccatcatgggtcacgttgaccac

SEQ ID NO: 555196 - DNA, 75 bp, synthetic construct
  source 1..75: mol_type = other DNA
tacctgatccttctgagaaagaagacgaatctaatgaagttttgagtgtttccgaaatcatccttgaagaagaaa

SEQ ID NO: 555197 - DNA, 75 bp, synthetic construct
  source 1..75: mol_type = other DNA
tatcttgagaaacaggcttttcacgatctgataatatctctaagagaaaaaagtgaaatatacgattcaatacca

SEQ ID NO: 555198 - DNA, 75 bp, synthetic construct
  source 1..75: mol_type = other DNA
tcgcgaacggctttacttacatcatggaagtgatgccgaaaggcaagcgcgaggtcatggctaaccgctggcagt

SEQ ID NO: 555199 - DNA, 75 bp, synthetic construct
  source 1..75: mol_type = other DNA
gatggcaccctgctattcgcattgtcattggctgctttaactgcttttggcgttgcggccagcgtttcagacgtg

SEQ ID NO: 555200 - DNA, 75 bp, synthetic construct
  source 1..75: mol_type = other DNA
acctggttcgttgggcaggcggcgcatatcgggcgctttatggtgcattgtgcgctgatgcttctcttcagtgcc

SEQ ID NO: 555201 - DNA, 75 bp, synthetic construct
  source 1..75: mol_type = other DNA
ccgaggagctgacagcgttgttgacggcggctggttttcctgaagatgtgatcggtaactttgtggcggcggtat

SEQ ID NO: 555202 - DNA, 75 bp, synthetic construct
  source 1..75: mol_type = other DNA
gtgctggttcaacttatcagcaattaaaaaatgcagataagtcggtcagtgtaggtagaggctcattttcaagcg

SEQ ID NO: 555203 - DNA, 75 bp, synthetic construct
  source 1..75: mol_type = other DNA
agcggatgagtctgaagtaatcccggtgctttatgtggcgttcacccgggcaacccgtgaattactggtgacctg

SEQ ID NO: 555204 - DNA, 75 bp, synthetic construct
  source 1..75: mol_type = other DNA
tgcaacccgtctggcaggcgttcgcggagatgccgccgtgctgctggcggcacaggctatccgcgcggtggcgct

SEQ ID NO: 555205 - DNA, 75 bp, synthetic construct
  source 1..75: mol_type = other DNA
cgcgtgggtggaagaagtcccgccgccgacggaccaaccggaagaaattctcgaagaacttggcgaaatcgagaa

SEQ ID NO: 555206 - DNA, 75 bp, synthetic construct
  source 1..75: mol_type = other DNA
catcctgcgcggcttacttgatgccatcaacatcctcaatccacacgccgaagtggacgtgatgagtcgctatcc

SEQ ID NO: 555207 - DNA, 75 bp, synthetic construct
  source 1..75: mol_type = other DNA
gccgtcagtcgtgagcgtcagacgggaatgcagatggtgcaatctgtgcttgaacgcatcggggaggtgaaatga

SEQ ID NO: 555208 - DNA, 75 bp, synthetic construct
  source 1..75: mol_type = other DNA
atgaaattacttattctgggcaaccacacttgcggcaatcgcggcgacagcgccatcttgcgcggcttacttgat

SEQ ID NO: 555209 - DNA, 75 bp, synthetic construct
  source 1..75: mol_type = other DNA
ggagtttaaggaagatctcgctgaatctcttgccctctttacgcgcagagaaataacagcccctcagctttttga

SEQ ID NO: 555210 - DNA, 75 bp, synthetic construct
  source 1..75: mol_type = other DNA
gaaacgcagcaatatcaccactgcaaaagtggaacatggcgtcgataccgcgtggctggtcgatcaccacaccga

SEQ ID NO: 555211 - DNA, 75 bp, synthetic construct
  source 1..75: mol_type = other DNA
ggatcgttttttgtcgatctctacggcgtgccacagtttgaacatgcgctttgcacgtttatggcgaaaaagccg

SEQ ID NO: 555212 - DNA, 75 bp, synthetic construct
  source 1..75: mol_type = other DNA
ggcgtatcggcagtatcggcaagctgtactggtttatgccgccaagtgccaacctcgcgctgcgggagctgggga

SEQ ID NO: 555213 - DNA, 75 bp, synthetic construct
  source 1..75: mol_type = other DNA
tttgttcattctggtgcaacggatgagtctgaagtgattccggtgctttatgtggcgttcacacgggcaacccgc

SEQ ID NO: 555214 - DNA, 75 bp, synthetic construct
  source 1..75: mol_type = other DNA
atgcctagcggtaaaccatcaattcaggcccgtgatcagaggatccttaacgctctgaaagaggcggttccagcg

SEQ ID NO: 555215 - DNA, 75 bp, synthetic construct
  source 1..75: mol_type = other DNA
atggcttttgtatcatcaacaggaactccgacccaagaaggagataaaggtattctgtatgattttaatgacgga

SEQ ID NO: 555216 - DNA, 75 bp, synthetic construct
  source 1..75: mol_type = other DNA
atatgatgctgtactggtggatgaggggcatgattttgacagtcgctggctggctctgattgcccgtctgtttga

SEQ ID NO: 555217 - DNA, 75 bp, synthetic construct
  source 1..75: mol_type = other DNA
ccggcagagttttcagtgaaacaactgaaagaggttatgacacaacgcgggataccgtttgccacctgctttgac

SEQ ID NO: 555218 - DNA, 75 bp, synthetic construct
  source 1..75: mol_type = other DNA
aggttcgtcgttatgcctgtgatacggttaatgccttacctgcaaacccgtgcttacggcagaatgacggtcagt

SEQ ID NO: 555219 - DNA, 75 bp, synthetic construct
  source 1..75: mol_type = other DNA
attaagctagatcatgatctattgctaccagagttttttcttgttttgatacaaaatgaaaaaatccgtgattta

SEQ ID NO: 555220 - DNA, 75 bp, synthetic construct
  source 1..75: mol_type = other DNA
gacgtaaggatgtggtgcatttactgacataccagagcagtaaggggctggagttcccgtatgtggcggttatca

SEQ ID NO: 555221 - DNA, 75 bp, synthetic construct
  source 1..75: mol_type = other DNA
ctcgttcagccacaggcgggtggtgaagagggcacagagccggaaatcctgcgttgtgcttctgaacgtgatgaa

SEQ ID NO: 555222 - DNA, 75 bp, synthetic construct
  source 1..75: mol_type = other DNA
agtggtggtcgataaagatcagctggttaccagccggacaccggacgatctgcccgcgtttaaccgcgaggcgtt

SEQ ID NO: 555223 - DNA, 75 bp, synthetic construct
  source 1..75: mol_type = other DNA
tcactgatgaatttgaggattcagaatttacttcacccgcagatgcatttcgtaaagccggacacgaagttgtca

SEQ ID NO: 555224 - DNA, 75 bp, synthetic construct
  source 1..75: mol_type = other DNA
ctgtaaatctgatgaatttggcgtgttgaaaatcagctcggtgacttctggagtattcaaaccagaagaaaataa

SEQ ID NO: 555225 - DNA, 75 bp, synthetic construct
  source 1..75: mol_type = other DNA
acgcagcaatatcaccaccgcaaaagtcgaacatggcgtcgatactgcgtggctggtcgatcaccacacagaaga

SEQ ID NO: 555226 - DNA, 75 bp, synthetic construct
  source 1..75: mol_type = other DNA
atgagcgagaaaattgccgttgtctatatcggcccaaaacccgtgaaaaaggacaccattaccggaagtcgcacg

SEQ ID NO: 555227 - DNA, 75 bp, synthetic construct
  source 1..75: mol_type = other DNA
atgttaccaacgcgtaaagaagcttcattacgtatcatgtttcttggtaagactaatttgccgaccgatcgtgaa

SEQ ID NO: 555228 - DNA, 75 bp, synthetic construct
  source 1..75: mol_type = other DNA
accgacggttatctcctcttgttgagttgcaaaacagcgggaaagctaatttttctgcagggaaaaataaaaatt

SEQ ID NO: 555229 - DNA, 75 bp, synthetic construct
  source 1..75: mol_type = other DNA
cttgtaaatgaaattactcaacttgagatagatcttgagcaactgaaatcagcatggattcatcaaagtgaactg

SEQ ID NO: 555230 - DNA, 75 bp, synthetic construct
  source 1..75: mol_type = other DNA
atgaatccggcattgcttgccacgctcggaacgcttgcggaaaccgcgtctctgaaaacggatattttaccgccg

SEQ ID NO: 555231 - DNA, 75 bp, synthetic construct
  source 1..75: mol_type = other DNA
ttgcggaggaatgcaccagatgatttttattattttctcaacaataaatacaatatgaatgacattatggaaagt

SEQ ID NO: 555232 - DNA, 75 bp, synthetic construct
  source 1..75: mol_type = other DNA
atgaagctttttgctggtaacgccaccccggaactagcacaacgtattgccaaccgcctgtacacttcactcggc

SEQ ID NO: 555233 - DNA, 75 bp, synthetic construct
  source 1..75: mol_type = other DNA
agagggctggctgctttttttgcagggagttttgccgggttgttattatctgttggcgcagagacatcgcgtgcg

SEQ ID NO: 555234 - DNA, 75 bp, synthetic construct
  source 1..75: mol_type = other DNA
tattctcccggcccctgcgggtctgtcaaaaaattcacgcatcagcctgaaaacgcgaacgctgctggggcgtac

SEQ ID NO: 555235 - DNA, 75 bp, synthetic construct
  source 1..75: mol_type = other DNA
acgtattgccaaccgcctgtacacttcactcggcgacgccgctgtaggtcgctttagcgacggcgaagtcagtgt

SEQ ID NO: 555236 - DNA, 75 bp, synthetic construct
  source 1..75: mol_type = other DNA
agattctttccaccaatggacgcatgcttgaggttcttctcgtgcgtgatatgaagctttttgctggtaacgcca

SEQ ID NO: 555237 - DNA, 75 bp, synthetic construct
  source 1..75: mol_type = other DNA
ctgttatcccctactttggctatgcgcgccaggaccgtcgcgtccgttccgctcgtgtaccaatcactgcgaaag

SEQ ID NO: 555238 - DNA, 75 bp, synthetic construct
  source 1..75: mol_type = other DNA
gattactatgattaacatcagagattctatatttccttacaatgtggctgatgcattatattgtgatgtagatgc

SEQ ID NO: 555239 - DNA, 75 bp, synthetic construct
  source 1..75: mol_type = other DNA
agaaagagtcagtcataatccatacagtgttattctgcttgatgaaattgaaaaagcacatccggatgttctgga

SEQ ID NO: 555240 - DNA, 75 bp, synthetic construct
  source 1..75: mol_type = other DNA
tcatgggaagagcgaacttaattccgttcactccgttgcataccagaacactcagggatatcgcaattattaaaa

SEQ ID NO: 555241 - DNA, 75 bp, synthetic construct
  source 1..75: mol_type = other DNA
aaaaataaaagaaatcactcttccattttttaatgaccattttggagcagcttttatgggacgagttaacctggt

SEQ ID NO: 555242 - DNA, 75 bp, synthetic construct
  source 1..75: mol_type = other DNA
gcgtgccgcagtttgaacacgcgctttgcactttcatggcgaaaaagccgctatttatgattggtcacagcgttg

SEQ ID NO: 555243 - DNA, 75 bp, synthetic construct
  source 1..75: mol_type = other DNA
aatcgaaatggtttaagtcttatataaacaatcagtgcttgggaactaatattaataacctggtaatgactccaa

SEQ ID NO: 555244 - DNA, 75 bp, synthetic construct
  source 1..75: mol_type = other DNA
gggcaacgatatgctatgtctgcgatagcatcacaaatccttatttgccgggcagatcttaaagatccggtaaaa

SEQ ID NO: 555245 - DNA, 75 bp, synthetic construct
  source 1..75: mol_type = other DNA
aattgattctaaagataagaaagcaacaaaaaaaataagaatatcagtaagaaaggataatgttatattacgaaa

SEQ ID NO: 555246 - DNA, 75 bp, synthetic construct
  source 1..75: mol_type = other DNA
aggcattatgttgtgatgtcgatgcagcagagaaggtacttatatctttttcctgtaaagaggagagttctattt

SEQ ID NO: 555247 - DNA, 75 bp, synthetic construct
  source 1..75: mol_type = other DNA
tgatgttgtttctgggtggacaggtgttccactgggtgtatgccttgatggtgaacaacaaaaagcatccggtct

SEQ ID NO: 555248 - DNA, 75 bp, synthetic construct
  source 1..75: mol_type = other DNA
agaaggacggtgcattagcccggcgttttcagatagtaaaagtgacagagcctaatcaggatgtcactgcaggga

SEQ ID NO: 555249 - DNA, 75 bp, synthetic construct
  source 1..75: mol_type = other DNA
ttaataaattaacaccagaatgcagaattactctcgattctgcgattaattatgcaatttcaagatcacacaatg

SEQ ID NO: 555250 - DNA, 75 bp, synthetic construct
  source 1..75: mol_type = other DNA
ctcagggatatcgcaatcatcaaaattgataagatctgtcagcgttttgaacaggcatctggtcagatgtataaa

SEQ ID NO: 555251 - DNA, 75 bp, synthetic construct
  source 1..75: mol_type = other DNA
ttgcgctaacggtagggaagctgcgtgttgagctggaagcagcagagaacaaccttattgatagtgaatgccatg

SEQ ID NO: 555252 - DNA, 75 bp, synthetic construct
  source 1..75: mol_type = other DNA
tatggaaaatactcggcttaagtcaggtatagccggtctgatacacctcggtattcgatatgcagatgttgatgt

SEQ ID NO: 555253 - DNA, 75 bp, synthetic construct
  source 1..75: mol_type = other DNA
agcggattgctgacatggaggcgcgggaggttgtactgccgcgtgcgcacgatgttcacccattagggccgcagt

SEQ ID NO: 555254 - DNA, 75 bp, synthetic construct
  source 1..75: mol_type = other DNA
caggtcacactggtggacctaccaggcacctactctctaaccactatctcatcgcagacctcactggatgagcaa

SEQ ID NO: 555255 - DNA, 75 bp, synthetic construct
  source 1..75: mol_type = other DNA
agtgattatcatcgtcagcattttcctgagcgccttcaacagcttctcgctgagcgggaaaatcgtcgataacat

SEQ ID NO: 555256 - DNA, 75 bp, synthetic construct
  source 1..75: mol_type = other DNA
tcaggcacagacttcaaccgaatgtgggaacaatggaaatctatccgcgccgctggcattcgcatcaaaggagag

SEQ ID NO: 555257 - DNA, 75 bp, synthetic construct
  source 1..75: mol_type = other DNA
ggagaacgaggaaattgcgttaacggtagggaagttgcgcgttgagcttgaggcagaaaaacagcgggcaaagga

SEQ ID NO: 555258 - DNA, 75 bp, synthetic construct
  source 1..75: mol_type = other DNA
aggctattggtgtaccggttaagtggactaatggcgatgcagaaaagcgcatgaccggcgctgactggctgacag

SEQ ID NO: 555259 - DNA, 75 bp, synthetic construct
  source 1..75: mol_type = other DNA
tgcgtgaaaaggcagagaaagcaactaaaggaaactacatcgtagggcatacatctgttaaccagcacggcaatt

SEQ ID NO: 555260 - DNA, 75 bp, synthetic construct
  source 1..75: mol_type = other DNA
ttttcacgatgattaccaaacggtaatggcatacaaagtttctgaagtcatcgctgcaatccgcgccgctggtat

SEQ ID NO: 555261 - DNA, 75 bp, synthetic construct
  source 1..75: mol_type = other DNA
caaagagcttacgcctgagattatgcgcaaccatttagctgtattcgagagatatggaatagccccaaacgatag

SEQ ID NO: 555262 - DNA, 75 bp, synthetic construct
  source 1..75: mol_type = other DNA
atgagcgacaagtcatgatacctaaagaaaatggcagttggctttacctgattgacctagaacacgcattacgcg

SEQ ID NO: 555263 - DNA, 75 bp, synthetic construct
  source 1..75: mol_type = other DNA
aaggcttcgttctgcgtgctggtaaagtgattatcatcgtcagcattttcctgagcgctttcaacagcttctcgc

SEQ ID NO: 555264 - DNA, 75 bp, synthetic construct
  source 1..75: mol_type = other DNA
cgattacgcactgcaagctgccggaactgtagacgaattggttgcggcgttggaatccgcagagaagcgcattgc

SEQ ID NO: 555265 - DNA, 75 bp, synthetic construct
  source 1..75: mol_type = other DNA
gaaaacggccggcttgttgccgatacgctacgccacttagctgataacgaaatcgactctgattattttgctatc

SEQ ID NO: 555266 - DNA, 75 bp, synthetic construct
  source 1..75: mol_type = other DNA
tgattaccaaacggtaatggcatacaaagtttctgaagtcatcgatgcaatccgcgctactggcattcgcatcaa

SEQ ID NO: 555267 - DNA, 75 bp, synthetic construct
  source 1..75: mol_type = other DNA
aatatggctacgttatcgaacgcggtaataagtttgtcggcgcagtctccatcgattcgcttaaaaccgcgttaa

SEQ ID NO: 555268 - DNA, 75 bp, synthetic construct
  source 1..75: mol_type = other DNA
ttaacgattttatgaagcacttttcgccagatatcgcgctggcattgttggatgaatgggaaagaaaccagcaat

SEQ ID NO: 555269 - DNA, 75 bp, synthetic construct
  source 1..75: mol_type = other DNA
atagcagagttagaaagtggttctcaggcacaaaagttagttgaagcaatcattgttgcgatagaaaacgaacag

SEQ ID NO: 555270 - DNA, 75 bp, synthetic construct
  source 1..75: mol_type = other DNA
caaccctgaagtagtgcaggcgttgctggatgaacgggaaagaaaccagcaatacatgaaacgccgggaccagga

SEQ ID NO: 555271 - DNA, 75 bp, synthetic construct
  source 1..75: mol_type = other DNA
tgaacccaattgaagccagcaaaggcgacggtgaaatgggcaccggggcgatgggcgtgatggatcaaaaattcg

SEQ ID NO: 555272 - DNA, 75 bp, synthetic construct
  source 1..75: mol_type = other DNA
aagccgacgcactggcgaaagtgatgccgtccgacatcccgctgaaacatcgccgctggctgggtctgcaaatgt

SEQ ID NO: 555273 - DNA, 75 bp, synthetic construct
  source 1..75: mol_type = other DNA
tgcgtgagatagcaaaacaggcaacacagggagaatgggtcgcatttatttcgccgggcaaatacggcacgtacg

SEQ ID NO: 555274 - DNA, 75 bp, synthetic construct
  source 1..75: mol_type = other DNA
tgcgtgaggcggcacagaacgcgaaaaatttaggtgggattaagaattacaagcgaggcgagcaagctgttgccg

SEQ ID NO: 555275 - DNA, 75 bp, synthetic construct
  source 1..75: mol_type = other DNA
ccggttaagtggactaatggcgatgcagaaaagcgcatgactggcgctgactggctgacagcgattgagatgtac

SEQ ID NO: 555276 - DNA, 75 bp, synthetic construct
  source 1..75: mol_type = other DNA
cgtatacggtgctgaaggattcgtagtgaaagatattcatttcgaaggccttcagcgtgtcgccgttggtgcggc

SEQ ID NO: 555277 - DNA, 75 bp, synthetic construct
  source 1..75: mol_type = other DNA
actgatctctcatttccaactgcgtgacgaagtgccgtggtggaacgtggtaggcgatcgtaaataccagaaaca

SEQ ID NO: 555278 - DNA, 75 bp, synthetic construct
  source 1..75: mol_type = other DNA
acaaaaacaggcgaactatactatcaaaaagacataatattacagagacttaaatcgataaaatacgatctggac

SEQ ID NO: 555279 - DNA, 75 bp, synthetic construct
  source 1..75: mol_type = other DNA
acaggacggagcgaaagacctgtgtaaatctaatgatgccgtagggggtaacgccatggcggttgccagcctcga

SEQ ID NO: 555280 - DNA, 75 bp, synthetic construct
  source 1..75: mol_type = other DNA
tggcgtgcaacaggataactggttaggtacgggttatgctgtaggtatcaacggtactaaaaatgattaccagac

SEQ ID NO: 555281 - DNA, 75 bp, synthetic construct
  source 1..75: mol_type = other DNA
tgtcaacctgaccggtaaagtgaccattcctggatcggataacgaatactacaaagtgacgttagacacggcgac

SEQ ID NO: 555282 - DNA, 75 bp, synthetic construct
  source 1..75: mol_type = other DNA
ttacctgatatattccgccaaaaaattgccgggatgtttacgatgggattcagaacccgggtgacaccacaggtt

SEQ ID NO: 555283 - DNA, 75 bp, synthetic construct
  source 1..75: mol_type = other DNA
attccggtgggacggaaaaaccggcaccctgattttgtcattattgacccagaaaacgggctggtatttctagag

SEQ ID NO: 555284 - DNA, 75 bp, synthetic construct
  source 1..75: mol_type = other DNA
cttcacgactggagagcttcctgaatgatgactgccttgtctggttcgatattccggtgggacggaaaaaccggc

SEQ ID NO: 555285 - DNA, 75 bp, synthetic construct
  source 1..75: mol_type = other DNA
atggcaaaactgataaatgtatcggtctctaccgaggagcggatgacgcccggggagaggcgggtggcagcacgg

SEQ ID NO: 555286 - DNA, 75 bp, synthetic construct
  source 1..75: mol_type = other DNA
gtgctttatgtggcgttcacccggactacccgcgaattactggtgacctgttaccgtgaaaacagtatcagccgc

SEQ ID NO: 555287 - DNA, 75 bp, synthetic construct
  source 1..75: mol_type = other DNA
tgccggtcaattaccgtaatccgaaacgcattctgcactttgcttatgcattctcccgcgagtattttgaaaaac

SEQ ID NO: 555288 - DNA, 75 bp, synthetic construct
  source 1..75: mol_type = other DNA
gtgagcgaaattaactgtcaggcactgcgagaggcggcagagaaagcaactaaaggaagctacatcgtagggcat

SEQ ID NO: 555289 - DNA, 75 bp, synthetic construct
  source 1..75: mol_type = other DNA
attacgcgtcgctgacattcgcatcaaaggagagttatatggcgttaacacaccacgaactctgtcagattgcgt

SEQ ID NO: 555290 - DNA, 75 bp, synthetic construct
  source 1..75: mol_type = other DNA
cgcgatcaggagaacgaggatattgcgctaacggtagggaagctgcgcgttgagcttgaagcagaaaaacagcgg

SEQ ID NO: 555291 - DNA, 75 bp, synthetic construct
  source 1..75: mol_type = other DNA
aaattcctgctggcggttctctggtcgagtacgttgacgatatgcgcgagaagctggaagccgcagagaagcgca

SEQ ID NO: 555292 - DNA, 75 bp, synthetic construct
  source 1..75: mol_type = other DNA
tgcgtgaggcggcggaacgtgcaattccagcaatggaacgcctgtcaatattgccagctgatgatgatttgttaa

SEQ ID NO: 555293 - DNA, 75 bp, synthetic construct
  source 1..75: mol_type = other DNA
tgttgagctggaaggcaaagacagcaaaatagccaatcttaccgccgaacgcgatgctcttcgtgaaggtgagat

SEQ ID NO: 555294 - DNA, 75 bp, synthetic construct
  source 1..75: mol_type = other DNA
tatttgcatggaggcggttttattctcggcaatctcgatacccacgatcgcatcatgcgcctgctggcaagctac

SEQ ID NO: 555295 - DNA, 75 bp, synthetic construct
  source 1..75: mol_type = other DNA
ttgtggctacgtgacaaacaaattgattgcggaaaagttgccgctgttctgttgtggtatgggctttacggatta

SEQ ID NO: 555296 - DNA, 75 bp, synthetic construct
  source 1..75: mol_type = other DNA
gtttaataatgatctcactcgaaatgtgccgccctgttatatcgccggagcggagttcgatccgctgctggatga

SEQ ID NO: 555297 - DNA, 75 bp, synthetic construct
  source 1..75: mol_type = other DNA
tggaacgctgacgctccagaaatggaaaccagagcttacgcggttccgacaaaatatggacaggtgaaagcacgg

SEQ ID NO: 555298 - DNA, 75 bp, synthetic construct
  source 1..75: mol_type = other DNA
tgctggaacttatttctcctgaaatgaaggccgttgttaatactctccagcccgatttaccgccctggcccgcag

SEQ ID NO: 555299 - DNA, 75 bp, synthetic construct
  source 1..75: mol_type = other DNA
tacttcaatacgaagcttgagaacgtgaaggtggtgaaggttaacccggtcatgcacgacatcaagaatcccgtt

SEQ ID NO: 555300 - DNA, 75 bp, synthetic construct
  source 1..75: mol_type = other DNA
tacgagaagcataaccaccttgagcaggtggagctgcgctacgagaaaatcacctggacttataaggacggtaac

SEQ ID NO: 555301 - DNA, 75 bp, synthetic construct
  source 1..75: mol_type = other DNA
taacgcgtaaagagggcgattacctgccgcgttacgctgccaatatgttgccgctgcgccatcagaccgggaact

SEQ ID NO: 555302 - DNA, 75 bp, synthetic construct
  source 1..75: mol_type = other DNA
tgaaggacgatggcggcgcggacatcaaagggtctgtggacgttcaggatcgtgaaggcagcatcgaagtggtgg

SEQ ID NO: 555303 - DNA, 75 bp, synthetic construct
  source 1..75: mol_type = other DNA
gtgaccaccgggcagaccctgaagtctgctgagtttaagtggtacaaaatcaatgatgccggtcaggaggtggag

SEQ ID NO: 555304 - DNA, 75 bp, synthetic construct
  source 1..75: mol_type = other DNA
agcgtccttcgcctgataactgcggcagacaggaaactgtctgcctttttgttgtgtgctttgtccagtgccgca

SEQ ID NO: 555305 - DNA, 75 bp, synthetic construct
  source 1..75: mol_type = other DNA
tcagtcagcgagtttcgctgcgcggcagcgtggcgtggcagaaagggagtgatgattttgcccagacggcagggt

SEQ ID NO: 555306 - DNA, 75 bp, synthetic construct
  source 1..75: mol_type = other DNA
aagcggagaatattattccttatgtttcttcactgtgggtgggggaagacggtgtttttgaaaccgggcaaaatc

SEQ ID NO: 555307 - DNA, 75 bp, synthetic construct
  source 1..75: mol_type = other DNA
gactcacgaaggcgaatataagccggaagcccggacatggcaaattgctaataatacctatggtttttccaatgg

SEQ ID NO: 555308 - DNA, 75 bp, synthetic construct
  source 1..75: mol_type = other DNA
atgagcacgatttctacggatttaattgcacggatctacgcagcctccgaattgccgttgagcaacgacgagctt

SEQ ID NO: 555309 - DNA, 75 bp, synthetic construct
  source 1..75: mol_type = other DNA
gagtggatgcttggggcggttggtggctacagtgataatcagggcgagagccgctcgaatatgaccggaactcgc

SEQ ID NO: 555310 - DNA, 75 bp, synthetic construct
  source 1..75: mol_type = other DNA
atcagtgacgatgcggtgaagcaacggggtgaaataaaagtgggagtcacgggcaatatcagtcagcgagtgtcc

SEQ ID NO: 555311 - DNA, 75 bp, synthetic construct
  source 1..75: mol_type = other DNA
ctgctgagtttaagtggtacaaaatcaatgatgccggtcaggaagtggagtatttcaatacgaagcttgagaacg

SEQ ID NO: 555312 - DNA, 75 bp, synthetic construct
  source 1..75: mol_type = other DNA
cgaacaaaaacgaatcgtatctcttctcgataaattcgacaccctgactaactccatcaccgaaggtcttccgcg

SEQ ID NO: 555313 - DNA, 75 bp, synthetic construct
  source 1..75: mol_type = other DNA
tatttgtttctgattttgtcgatttttcgatatatgttgatgcgcctgaagacttacttcaaacatggtatatca

SEQ ID NO: 555314 - DNA, 75 bp, synthetic construct
  source 1..75: mol_type = other DNA
gacttacttcagacgtggtatatcaaccgttttctgaaattccgcgaaggggcttttaccgacccggattcctat

SEQ ID NO: 555315 - DNA, 75 bp, synthetic construct
  source 1..75: mol_type = other DNA
ggattagtaattattctcaaaaaaaaatcccaatcccctgcccggacaacccggaaaagtccctcgccatccagt

SEQ ID NO: 555316 - DNA, 75 bp, synthetic construct
  source 1..75: mol_type = other DNA
cgataaattcgacacccttaccaactccatcaccgaaggtcttccgcgtgaaatcgagttacgccagaaacaata

SEQ ID NO: 555317 - DNA, 75 bp, synthetic construct
  source 1..75: mol_type = other DNA
gaatattacttaaacaatatcaatcttacgccgtacatatcaggagcagcccagccaaagctaaataagaaaaac

SEQ ID NO: 555318 - DNA, 75 bp, synthetic construct
  source 1..75: mol_type = other DNA
atttatggcaatggcgctgaaatctatggttatgctgatagctacaggattggtcaagatgctgtaaccatatcc

SEQ ID NO: 555319 - DNA, 75 bp, synthetic construct
  source 1..75: mol_type = other DNA
aagaatccattcgttatatcaaagacttgtcacatggaatgcagcgcatagaaattcgttgcggtaactgtgatg

SEQ ID NO: 555320 - DNA, 75 bp, synthetic construct
  source 1..75: mol_type = other DNA
aactgaaaaaaaatttgtccgagatgcagttttacgtgacgcagaatcatgggacagaaccgccatttacgggtc

SEQ ID NO: 555321 - DNA, 75 bp, synthetic construct
  source 1..75: mol_type = other DNA
gttacgccagaaacaatacgagtactatcgtgatttactgttcagtttcccaaaacctgaaacagtcagtaatta

SEQ ID NO: 555322 - DNA, 75 bp, synthetic construct
  source 1..75: mol_type = other DNA
tgagtcatcaggttgaaaatatacctgtaccaatcccctgcccggataatccggaaaaatccctcgccatccagt

SEQ ID NO: 555323 - DNA, 75 bp, synthetic construct
  source 1..75: mol_type = other DNA
accaataataaggctgaaagttgtaattcctaagcatagttggcttttaccaagatatttattccactatttgtc

SEQ ID NO: 555324 - DNA, 75 bp, synthetic construct
  source 1..75: mol_type = other DNA
gtttttatgtggattgggttattaaagtttgtcccttacgaggcagacagcattacaccattcgtcgcgaacagt

SEQ ID NO: 555325 - DNA, 75 bp, synthetic construct
  source 1..75: mol_type = other DNA
tttgccgcctcttttgaagccgacgcatcccgggctgaggtggcagcttctgacgctttcgtggtcgcggtggat

SEQ ID NO: 555326 - DNA, 75 bp, synthetic construct
  source 1..75: mol_type = other DNA
ctgccgattttccggcggcggtggcactgactgaggcctgcccggcacttattgatgcggcactggcggacgacg

SEQ ID NO: 555327 - DNA, 75 bp, synthetic construct
  source 1..75: mol_type = other DNA
taccgttgctaatttgaaccaaccagcaccaccgctgaatgacattgttgttgagttaagcgtaccaatatcttt

SEQ ID NO: 555328 - DNA, 75 bp, synthetic construct
  source 1..75: mol_type = other DNA
gtgcttttgctctgtgctgccgctgccgcactgccagcagcctctgtcgccttcgtggatgccgtcgtggcgctg

SEQ ID NO: 555329 - DNA, 75 bp, synthetic construct
  source 1..75: mol_type = other DNA
gcagcattcgtttctgacgttttcgcggcactggcactggtagctgccgcgctttttgaggactctgcagcggca

SEQ ID NO: 555330 - DNA, 75 bp, synthetic construct
  source 1..75: mol_type = other DNA
tttgctgctgtctcggcgcgcgttgctgcggattctgccgtactcttgctctgtgctgccgccgtcgcactgcca

SEQ ID NO: 555331 - DNA, 75 bp, synthetic construct
  source 1..75: mol_type = other DNA
cagccgtttttgaggattctgcgctggtttccgacgctttcgcgttcgtttcggatgtcttcgctgcggaagcag

SEQ ID NO: 555332 - DNA, 75 bp, synthetic construct
  source 1..75: mol_type = other DNA
acctcgctgctgcgctggcctgttcagtggcttcgccagccttcgttgtggctgttgaagcagacgatgcggcac

SEQ ID NO: 555333 - DNA, 75 bp, synthetic construct
  source 1..75: mol_type = other DNA
cgggctgaggtggcagcttctgacgccttcgtggtcgcggcggatgcagaagtggctgctgattgttgtgacgct

SEQ ID NO: 555334 - DNA, 75 bp, synthetic construct
  source 1..75: mol_type = other DNA
gctttttgatgactctgcagcagcagcactttttgatgcctcagaggcttttgctgatgccgttcctgcgctgga

SEQ ID NO: 555335 - DNA, 75 bp, synthetic construct
  source 1..75: mol_type = other DNA
ctgcgttcgtttctgatgattttgccgcctcttttgaagccgacgcatcccgtgctgaagtggctgcttctgacg

SEQ ID NO: 555336 - DNA, 75 bp, synthetic construct
  source 1..75: mol_type = other DNA
atttacagctggaaaaaacagccaccgcaggtacttcctgctcaccggacggacttgtaggccgcgacagtaaag

SEQ ID NO: 555337 - DNA, 75 bp, synthetic construct
  source 1..75: mol_type = other DNA
tggaatgcgggcgctccagaaatggcaaccagagcttacatggttccaacaaaatatgggcaggtggaaacacgt

SEQ ID NO: 555338 - DNA, 75 bp, synthetic construct
  source 1..75: mol_type = other DNA
tagtaaagcatttggttatttaggaaatgctattgatctggctgatattcttgttgaacttaaaaatgcattgac

SEQ ID NO: 555339 - DNA, 75 bp, synthetic construct
  source 1..75: mol_type = other DNA
ctgaaccgccgtcagattagtgccctgattggtttggctccgtttaacagggactccggatttatgcgcggtcgc

SEQ ID NO: 555340 - DNA, 75 bp, synthetic construct
  source 1..75: mol_type = other DNA
acccggaagactataaacagtatctgactcacgaaggcgaatacaaaccagaagcaagggcatggcaatcggcca

SEQ ID NO: 555341 - DNA, 75 bp, synthetic construct
  source 1..75: mol_type = other DNA
cgttttatcccgaaaggcgctctggaaacagaaggatacggtgaatttcttcccctgtttgagaaaggagataag

SEQ ID NO: 555342 - DNA, 75 bp, synthetic construct
  source 1..75: mol_type = other DNA
gattatgaattatacatgaaaacaaatatgggcagcacaaaaaatggtgccagggttccccacgttcgtaataga

SEQ ID NO: 555343 - DNA, 75 bp, synthetic construct
  source 1..75: mol_type = other DNA
agcagacgcagatgatgccgatgacgccgccgaactggcggacgatgcagctgccatttttgaggattctgcact

SEQ ID NO: 555344 - DNA, 75 bp, synthetic construct
  source 1..75: mol_type = other DNA
cgccgccgaactggctgacgatgcggcagccgtttttgaggattctgcgctggtttccgacgctttcgcgttcgt

SEQ ID NO: 555345 - DNA, 75 bp, synthetic construct
  source 1..75: mol_type = other DNA
tctcggacgtttttgccgccttcacggaatttcctgccgccattgccgaggaggctgcactgctggcgcttgtgg

SEQ ID NO: 555346 - DNA, 75 bp, synthetic construct
  source 1..75: mol_type = other DNA
attaatcgccaggatatcgcggaaaaactcgaaatgtcgatcggtgcggtgaatcagtatgtttattttgagcgg

SEQ ID NO: 555347 - DNA, 75 bp, synthetic construct
  source 1..75: mol_type = other DNA
tttctgccgattttccggcggcggtggcactggctgaggcctcctccgctttaactgacgcctcacgggacgatg

SEQ ID NO: 555348 - DNA, 75 bp, synthetic construct
  source 1..75: mol_type = other DNA
cgcagccgaggcgctctgtcccgctgccgtttcagaagacctggcgtttgtctcagacgtctttgccgccttcgc

SEQ ID NO: 555349 - DNA, 75 bp, synthetic construct
  source 1..75: mol_type = other DNA
actcattgagatgctgaatgaacaccacattcacggtctgatgtatgtggatgatgcgatggtttatgagcaccc

SEQ ID NO: 555350 - DNA, 75 bp, synthetic construct
  source 1..75: mol_type = other DNA
gcaaaaaccgtgctggaagcggacccaatgcccgttaataaagccctgcaactcattgagatgctgaatgaacac

SEQ ID NO: 555351 - DNA, 75 bp, synthetic construct
  source 1..75: mol_type = other DNA
cgaattggagagcagcatgtaaaaatgatagctatgcatgactggtggttagccgtgactgcaaaactttttggt

SEQ ID NO: 555352 - DNA, 75 bp, synthetic construct
  source 1..75: mol_type = other DNA
gtgtggttggcgctgttacccagatggggctgaaattccgagccaaagcggttgtgcttactgtcgggactttcc

SEQ ID NO: 555353 - DNA, 75 bp, synthetic construct
  source 1..75: mol_type = other DNA
atgttttatccggatccttttgacgtcatcatcattggcgggggtcatgcaggcaccgaggccgcgatggccgcg

SEQ ID NO: 555354 - DNA, 75 bp, synthetic construct
  source 1..75: mol_type = other DNA
cctgctgcccggctgggaaaacagcgtgtacagattagccgtaccggcatccttcgcgcctcctttgccgcgccc

SEQ ID NO: 555355 - DNA, 75 bp, synthetic construct
  source 1..75: mol_type = other DNA
cgaaccagagaaagcagacaaaaagacgatgaaagactaagagtcaaaatcggttgaagacgaagatattattcg

SEQ ID NO: 555356 - DNA, 75 bp, synthetic construct
  source 1..75: mol_type = other DNA
cgaaccagagaaagcagacaaaaagacgattaaagacttagagtcaaaatcggttgaagacgaagatattattcg

SEQ ID NO: 555357 - DNA, 75 bp, synthetic construct
  source 1..75: mol_type = other DNA
cgaaccagagaaagcagacaaaaagacgataaaagactgagagtcaaaatcggttgaagacgaagatattattcg

SEQ ID NO: 555358 - DNA, 75 bp, synthetic construct
  source 1..75: mol_type = other DNA
cgtataatggcgaaaaatatttagaggaacaactggattcattgctgcttcaaagttatcaggattttgtagtgt

SEQ ID NO: 555359 - DNA, 75 bp, synthetic construct
  source 1..75: mol_type = other DNA
cgaaccagagaaagcagacaagaagacgataaaagactaagagtcaaaatcggttgaagacgaagatattattcg

SEQ ID NO: 555360 - DNA, 75 bp, synthetic construct
  source 1..75: mol_type = other DNA
cgaaccagagaaagcagacaacaagacgatcaaagactcagagtcaaaatcggttgaagacgaagatattattcg

SEQ ID NO: 555361 - DNA, 75 bp, synthetic construct
  source 1..75: mol_type = other DNA
tatcgtatgtttacctcgcgtgcggaatatcgcctgatgctgcgcgaagataacgccgacctgcgtctgactgaa

SEQ ID NO: 555362 - DNA, 75 bp, synthetic construct
  source 1..75: mol_type = other DNA
cgcaatcgctggtttacgcgaacaaattcctcacgatgctcgcgtattgattacctacggcggcggcagcgtgaa

SEQ ID NO: 555363 - DNA, 75 bp, synthetic construct
  source 1..75: mol_type = other DNA
gcgtaccgcaggactgggcaacacatatgctgggacacgaactgactgcgatgcacggtctggatcacgcgcaaa

SEQ ID NO: 555364 - DNA, 75 bp, synthetic construct
  source 1..75: mol_type = other DNA
gagattaaaagtgccatcccaatgggctgcgtgctgacgctgccagcgaccggttcagaatccaacgcaggtgcg

SEQ ID NO: 555365 - DNA, 75 bp, synthetic construct
  source 1..75: mol_type = other DNA
cagtaccgacagccccgccaccgatgcggtgcgctttcgtcctcatcccggtatgggctttccggtcagcgagtt

SEQ ID NO: 555366 - DNA, 75 bp, synthetic construct
  source 1..75: mol_type = other DNA
caaccattgcgaaatactgatgtaaaagaacagattgaaaaagagaaattacgcaagatatcacttgaagcagat

SEQ ID NO: 555367 - DNA, 75 bp, synthetic construct
  source 1..75: mol_type = other DNA
cgccgcgtcaggtggctaacggtgtagtggacgcctttgtacacaccgtggaacagtatgttaccaaaccggttg

SEQ ID NO: 555368 - DNA, 75 bp, synthetic construct
  source 1..75: mol_type = other DNA
cgcgacctgaaaccgacgctggagagcaagtttatccaggggctgttctttgccggtcaaattaatggcactacc

SEQ ID NO: 555369 - DNA, 75 bp, synthetic construct
  source 1..75: mol_type = other DNA
ggttacgaagaagctgcagcgcaaggtttgctggccggtcttaacgccgctcgcctgtctgctgacaaagaaggc

SEQ ID NO: 555370 - DNA, 75 bp, synthetic construct
  source 1..75: mol_type = other DNA
tcacaaacctgcttctatcggccaggcttcgcgtatttccggcatcacgcctgctgctatctccattctgctggt

SEQ ID NO: 555371 - DNA, 75 bp, synthetic construct
  source 1..75: mol_type = other DNA
tgctggaatttggcggtattgagccaaacccggcttatgaaacgctgatgaacgccgtgaaactggttcgcgaac

SEQ ID NO: 555372 - DNA, 75 bp, synthetic construct
  source 1..75: mol_type = other DNA
cgcgacctgaaaccgacgctggaaagcaagtttatccaggggctgttctttgctggtcagattaacggcactacc

SEQ ID NO: 555373 - DNA, 75 bp, synthetic construct
  source 1..75: mol_type = other DNA
gtgcactttaggaaccaaagaaccgtaccgtatgtttacctcacgcgcagaatatcgactgatgctgcgtgaaga

SEQ ID NO: 555374 - DNA, 75 bp, synthetic construct
  source 1..75: mol_type = other DNA
tgttacgtcgtttgtgcgaagcaagcgaacctgaaaaaacagataccagtgctgcagagaaccaaaaagcggctg

SEQ ID NO: 555375 - DNA, 75 bp, synthetic construct
  source 1..75: mol_type = other DNA
tataaaaaggcaacaacctgcatcgaaaataatgaaatttggctagatcgccaagcttcatcttgggatgatgct

SEQ ID NO: 555376 - DNA, 75 bp, synthetic construct
  source 1..75: mol_type = other DNA
aaatcggtagctggtttgcaccgttgtttccagatgcgctggtggtaagtgtcggtggtgctgagccgagcggta

SEQ ID NO: 555377 - DNA, 75 bp, synthetic construct
  source 1..75: mol_type = other DNA
atgccatcatgcccgacgtttattgaaacggtacgctactggcagaaacagagtggagtaggggctaacgccatg

SEQ ID NO: 555378 - DNA, 75 bp, synthetic construct
  source 1..75: mol_type = other DNA
aacggtgcggcaacgcaggccaacgccgacgcggtggtgaaggtgatgctcgatcctaaagagttcaacaccttt

SEQ ID NO: 555379 - DNA, 75 bp, synthetic construct
  source 1..75: mol_type = other DNA
gaccaagattgaccgcttaggaagggataacattgatgtacagaagaccgtcacaatgttacttggtatgggtgt

SEQ ID NO: 555380 - DNA, 75 bp, synthetic construct
  source 1..75: mol_type = other DNA
gtgtatcagttgatgacctcaccacacaaaaccaagtagaagctgttaaacgtgctggttatgaagtcaaacctt

SEQ ID NO: 555381 - DNA, 75 bp, synthetic construct
  source 1..75: mol_type = other DNA
caagcttgtggctcaccttgatagcaagagctatgaaagctctctgacgcaaactgaactcttcgccgtaaagcg

SEQ ID NO: 555382 - DNA, 75 bp, synthetic construct
  source 1..75: mol_type = other DNA
tgagtcatcaggttgaaaatatacctgtaccaatcccttgcccggataatccggaaaaatcccttgccatccagt

SEQ ID NO: 555383 - DNA, 75 bp, synthetic construct
  source 1..75: mol_type = other DNA
gacgaggcctccccaaaaaaggcgatgtactaataactactgaggcaccttgtggtttcgtagctcaagttaaca

SEQ ID NO: 555384 - DNA, 75 bp, synthetic construct
  source 1..75: mol_type = other DNA
acgccacggcgctaatcggtttctctcaaggcgcgattatggcgctggagagcattaaagccgaaccgggccttg

SEQ ID NO: 555385 - DNA, 75 bp, synthetic construct
  source 1..75: mol_type = other DNA
aaataggtagctggtttgcaccgctgtttcctgatgcgctggtggtgagtgtcggtggcgcggagccgagcggta

SEQ ID NO: 555386 - DNA, 75 bp, synthetic construct
  source 1..75: mol_type = other DNA
gacgcatcttgggaaaataaaatcaggtaaagcgcatctggaactcccaaacggtgcggtcatttattttatcgg

SEQ ID NO: 555387 - DNA, 75 bp, synthetic construct
  source 1..75: mol_type = other DNA
aaaaacagaagcaagcaaattgataaaagagtatgaaaaacaagaatatatagaacattacaactatattttgct

SEQ ID NO: 555388 - DNA, 75 bp, synthetic construct
  source 1..75: mol_type = other DNA
gaagagaagcaactctctgataaccaggatttacataaaaaatacttcctggaattaatggacatcattaataag

SEQ ID NO: 555389 - DNA, 75 bp, synthetic construct
  source 1..75: mol_type = other DNA
catttcgcggcatcggtaaaacctttccgggcgttaaggcgctgacggatatcagttttgactgctatgccggtc

SEQ ID NO: 555390 - DNA, 75 bp, synthetic construct
  source 1..75: mol_type = other DNA
gatgaaagtcattttgctcgatgaacctacgcgcggtattgatgttggcgccaaacatgaaatttacaacgtgat

SEQ ID NO: 555391 - DNA, 75 bp, synthetic construct
  source 1..75: mol_type = other DNA
cattacagtgttttaaattaggtattgaagcgctaaataagttctctcacgatatcaggttacgtattggttttg

SEQ ID NO: 555392 - DNA, 75 bp, synthetic construct
  source 1..75: mol_type = other DNA
gatattggcagttattgtagtaacacattcattggtaggtttagtgttgttgataaaaatgttcatattggctat

SEQ ID NO: 555393 - DNA, 75 bp, synthetic construct
  source 1..75: mol_type = other DNA
gaagagaagcagctctctgataaccaggatttacatgaaaaatacttcctggaattaatggacatccttaataaa

SEQ ID NO: 555394 - DNA, 75 bp, synthetic construct
  source 1..75: mol_type = other DNA
tgacgctgcaacgtaaaacacgcagcacccttaacattcctggtaccggtggaaaaagcaaatcggtacaaatcg

SEQ ID NO: 555395 - DNA, 75 bp, synthetic construct
  source 1..75: mol_type = other DNA
aagtatattggtttttttgtcgatgagtatcaggataccggttattttactcatcaggttttcaagttcatacca

SEQ ID NO: 555396 - DNA, 75 bp, synthetic construct
  source 1..75: mol_type = other DNA
gaccgggtgaccgcagcggttcaccttaccttgcaacccgcccgcagaagcccggctacgatggaggcacggcac

SEQ ID NO: 555397 - DNA, 75 bp, synthetic construct
  source 1..75: mol_type = other DNA
gagagcaacgctgatcagcacattcgctctctgaacatcaaaacgccgggcgctgagcagttgatcatgaatctc

SEQ ID NO: 555398 - DNA, 75 bp, synthetic construct
  source 1..75: mol_type = other DNA
atattgacccggacacgccgctgaaatatctctccattggtcagtggcagatggttgaaatcgccaaagcgctgg

SEQ ID NO: 555399 - DNA, 75 bp, synthetic construct
  source 1..75: mol_type = other DNA
gggtttggcttgttaatgaaaaagaaagggattcggatagaaccccttaagaaccattttactgagtgcggcatt

SEQ ID NO: 555400 - DNA, 75 bp, synthetic construct
  source 1..75: mol_type = other DNA
cggaagaacatcctctgcatggcggcaccggtattgctcatactcgctgggcgacccatggtgaaccttcagaag

SEQ ID NO: 555401 - DNA, 75 bp, synthetic construct
  source 1..75: mol_type = other DNA
ggcgaaagctgcgaaacgcgctcgccagaaagaacaggctactatcgaccttcagaactacatcaaggcgcagca

SEQ ID NO: 555402 - DNA, 75 bp, synthetic construct
  source 1..75: mol_type = other DNA
gtgctgtagtgctcaccaaagaacaatacttccgccttcctctacgcgatgaaaccgtagatgagcatgctcaag

SEQ ID NO: 555403 - DNA, 75 bp, synthetic construct
  source 1..75: mol_type = other DNA
caggttgatttaagcgagctgggaccgaacgccgacgaactgctgttgaaggttgagcatattcagatcctcgcc

SEQ ID NO: 555404 - DNA, 75 bp, synthetic construct
  source 1..75: mol_type = other DNA
cgaagtgattgcccatctggtgaactgggagctgaaacaaggcgggactctgcgtgaggccgttctgcgtgctat

SEQ ID NO: 555405 - DNA, 75 bp, synthetic construct
  source 1..75: mol_type = other DNA
gcgacccacggtgaaccttcagaagtgaatgcgcatccgcatgtttctgagcacattgtggtggtgcataacggc

SEQ ID NO: 555406 - DNA, 75 bp, synthetic construct
  source 1..75: mol_type = other DNA
tgcagcagctggcggacagtttgcctaaacaagccaccagcgaagacgacgacagtgatgattcaatcacgcagc

SEQ ID NO: 555407 - DNA, 75 bp, synthetic construct
  source 1..75: mol_type = other DNA
cactgaagcatgcggtttacccggatcgccgtgacggcgcgctgaagtcgtcaattgcaaaatgggtgcttggta

SEQ ID NO: 555408 - DNA, 75 bp, synthetic construct
  source 1..75: mol_type = other DNA
gctgggaggctcttcagcgtaacctgactacaacagaaggccgtctcggcatgacatttacccagatggcaaatg

SEQ ID NO: 555409 - DNA, 75 bp, synthetic construct
  source 1..75: mol_type = other DNA
ccgggaaggagctgaagattgatgttgccagttatggcgcggatagctgggaggctcttcagcgtaacctgacta

SEQ ID NO: 555410 - DNA, 75 bp, synthetic construct
  source 1..75: mol_type = other DNA
tacaacctggtatcaatgtttatcattgacgtcatgtttccgggccagtgcggcaatactgccttcttcttcaag

SEQ ID NO: 555411 - DNA, 75 bp, synthetic construct
  source 1..75: mol_type = other DNA
atgctgaatgctcagacggttgccgaggcaggtaaaaccggtaagaaactgaaagcggttaaaccgccgaaagag

SEQ ID NO: 555412 - DNA, 75 bp, synthetic construct
  source 1..75: mol_type = other DNA
tatgactcgtttgcgtcgcctcggtaaagtacagatgctggcccaggccgcggaagaacatcctttgcatggcgg

SEQ ID NO: 555413 - DNA, 75 bp, synthetic construct
  source 1..75: mol_type = other DNA
tacgagtcggcttatttccagtggttgtggctggaagatgcccggcgcagcggcgttattccgcgcgatgccgat

SEQ ID NO: 555414 - DNA, 75 bp, synthetic construct
  source 1..75: mol_type = other DNA
gattgccgctggcgaaagctatgtgcgtaaaccgatctactcgcgcgaaggcggaaacgtcaccattttcgacgg

SEQ ID NO: 555415 - DNA, 75 bp, synthetic construct
  source 1..75: mol_type = other DNA
gctgtatccgctggagtggatgatgcgtgacgataacggcccgctgctgcgcaagcgtcgtgagcaatgggtgga

SEQ ID NO: 555416 - DNA, 75 bp, synthetic construct
  source 1..75: mol_type = other DNA
ggttaaagatgaagagatcctgacgcaactggcgatcccgccgttgtactgggatgtgatcgccgaaagctggcg

SEQ ID NO: 555417 - DNA, 75 bp, synthetic construct
  source 1..75: mol_type = other DNA
cgacaacggtttcgactttcatattatcgataatgagatctattgggatgagagtcgagcctatcgctttactct

SEQ ID NO: 555418 - DNA, 75 bp, synthetic construct
  source 1..75: mol_type = other DNA
atgatgcgtgacgataacggtccgctgctgcgcaagcgtcgcgagcaatgggtggagccgttatggaaaagtatc

SEQ ID NO: 555419 - DNA, 75 bp, synthetic construct
  source 1..75: mol_type = other DNA
gggccggtttcactgtttaaagggctggatgagatgcagcaaatggtgatgaatcaggctttcagcaccagtgat

SEQ ID NO: 555420 - DNA, 75 bp, synthetic construct
  source 1..75: mol_type = other DNA
gacgctggtccctccttccgcgctgcctggattgatcgtagcattaattctcgggcttgccggcggcgtcagtct

SEQ ID NO: 555421 - DNA, 75 bp, synthetic construct
  source 1..75: mol_type = other DNA
gtattaaactgacttctacagaaattcgtaaatactccatcattattcgtctggagcgtgaaagattttttatag

SEQ ID NO: 555422 - DNA, 75 bp, synthetic construct
  source 1..75: mol_type = other DNA
caattgaaaaaccgctctcctccctgccttattcgctttcccgtcacatcctggaacatctgcgcaaactcacca

SEQ ID NO: 555423 - DNA, 75 bp, synthetic construct
  source 1..75: mol_type = other DNA
ttttccatcctcatttttcactgcccattgcgcattacggacagatggaaatgaccgatattctcagcggtgcaa

SEQ ID NO: 555424 - DNA, 75 bp, synthetic construct
  source 1..75: mol_type = other DNA
tcaccggatggagtggactattttagcctcagccggaactatcggcgcgctgtttggtacacctgttgcggcagc

SEQ ID NO: 555425 - DNA, 75 bp, synthetic construct
  source 1..75: mol_type = other DNA
gtcgctcacgagacttttatgaagtttttgcaggaaaagtttttaccggccgcattgtcagaaaaagaggcggct

SEQ ID NO: 555426 - DNA, 75 bp, synthetic construct
  source 1..75: mol_type = other DNA
tgaaacaaaaacaggatgaaacacatccggtacataacccagtgacccggtggttcataccatcttcaacgaaag

SEQ ID NO: 555427 - DNA, 75 bp, synthetic construct
  source 1..75: mol_type = other DNA
acgggaggccgtgaggtcgccgcagagcggttaaagctgggggcttaccctgaactgtcgctgaaagctgctagg

SEQ ID NO: 555428 - DNA, 75 bp, synthetic construct
  source 1..75: mol_type = other DNA
taccgcggatatgactctgccggtctggccgttgttgatgcagaaggtcatatgccccgcctgcgtcgcctcggt

SEQ ID NO: 555429 - DNA, 75 bp, synthetic construct
  source 1..75: mol_type = other DNA
aatgccggagaaaacaagccagggggctactcgtaacggggattctgaacttgaagtcaccaatgccattttcgg

SEQ ID NO: 555430 - DNA, 75 bp, synthetic construct
  source 1..75: mol_type = other DNA
acgcaaacgggaccagtacagtcgttgatgtggtgctgatgcgcaaacatccggcagagatggctgagaaaatcc

SEQ ID NO: 555431 - DNA, 75 bp, synthetic construct
  source 1..75: mol_type = other DNA
ccggcagagatggctgagaaaatccccctggtggatgaaggcactcttgaatcggcaaatgtgctttggccaacg

SEQ ID NO: 555432 - DNA, 75 bp, synthetic construct
  source 1..75: mol_type = other DNA
agcttgccagttacctgattacacattctggtaactatcgttataacagcacggaatcaggtgatgctgccaact

SEQ ID NO: 555433 - DNA, 75 bp, synthetic construct
  source 1..75: mol_type = other DNA
atggtcatacattactgttgatcactaaaccttctttgcaggcgaccgcgttattgcagcatttaaaacaatcgc

SEQ ID NO: 555434 - DNA, 75 bp, synthetic construct
  source 1..75: mol_type = other DNA
cggtgatcatggacacccgtaacccggataccctgctggcggcacgttccggtagcccgctggtgattggcctcg

SEQ ID NO: 555435 - DNA, 75 bp, synthetic construct
  source 1..75: mol_type = other DNA
ggagaaaccgcggatacactggctggcctgcgcctgtcgaaagagctgggatatctcggctcgctggcgatctgt

SEQ ID NO: 555436 - DNA, 75 bp, synthetic construct
  source 1..75: mol_type = other DNA
agggtgatattgcggaaatcactcgccgttcagtaaacatcttcgataaatctggcacggaagttaaacgccagg

SEQ ID NO: 555437 - DNA, 75 bp, synthetic construct
  source 1..75: mol_type = other DNA
aggccgcgacggatatcaaacgcctgcgcccgctggtggaggatgcaataaataaaggcattctggatgttgatc

SEQ ID NO: 555438 - DNA, 75 bp, synthetic construct
  source 1..75: mol_type = other DNA
ggaagagattgccgccagaaacgagaaacaagaagagttatcatcaatacagggtgatgccaccagcatagctca

SEQ ID NO: 555439 - DNA, 75 bp, synthetic construct
  source 1..75: mol_type = other DNA
gccgggtacaccggggagggcggcattggtggttctgtctccgaatattacacaccaaagccgatcgctgaaggt

SEQ ID NO: 555440 - DNA, 75 bp, synthetic construct
  source 1..75: mol_type = other DNA
catcttcaccgatgaaaaaacgcagcaccagaagctcaagcgcattatctgcaatgctcttaaccttgaaccttc

SEQ ID NO: 555441 - DNA, 75 bp, synthetic construct
  source 1..75: mol_type = other DNA
acggatatgaaatggtaattcgtggcctgagtgtggatcagctcataaaggtagcggggtttattaaacagctat

SEQ ID NO: 555442 - DNA, 75 bp, synthetic construct
  source 1..75: mol_type = other DNA
tacaccggaatctccactggcagatgcggtggcaaacgtcttaaccatgacgttgctgaaaaaagcgcagttgaa

SEQ ID NO: 555443 - DNA, 75 bp, synthetic construct
  source 1..75: mol_type = other DNA
gcaattcgttctaccgcccgttcgttatgtgcgttcctatgcgcctgcgcagcaaagcgttgcggcaggtagcga

SEQ ID NO: 555444 - DNA, 75 bp, synthetic construct
  source 1..75: mol_type = other DNA
tggatggttttctgaaaggtaaatgcatcccacgagatttaaaggttaacgaaacaaacgctgaatatcttgtcc

SEQ ID NO: 555445 - DNA, 75 bp, synthetic construct
  source 1..75: mol_type = other DNA
ctgttatgcagaaaatcagtggcggcgtctccatcgccgggattaacgacatcatttcctgtgacgatttctacc

SEQ ID NO: 555446 - DNA, 75 bp, synthetic construct
  source 1..75: mol_type = other DNA
tggcgtgtaggccaatactacgattgtgccggtgatatcgttcgcattaagtcgctggacttcgacagccaccgc

SEQ ID NO: 555447 - DNA, 75 bp, synthetic construct
  source 1..75: mol_type = other DNA
ggccgcgcgtcgccgtatcttgtcggagtattcagataccggcaccgaaaaatcagagaagtatccgtactttga

SEQ ID NO: 555448 - DNA, 75 bp, synthetic construct
  source 1..75: mol_type = other DNA
atgaaacaaatgacactaattgagatggatggttttctgaaaggtaaatgcatcccaagtgatttaaaggttgac

SEQ ID NO: 555449 - DNA, 75 bp, synthetic construct
  source 1..75: mol_type = other DNA
accttgaggctaaatgcgcgaagatggctgcagaaaatacctcgcttaagcaatctgagaaggaatttaatgact

SEQ ID NO: 555450 - DNA, 75 bp, synthetic construct
  source 1..75: mol_type = other DNA
tcgtgatttacagtgttccattgatcctcaaaattaccttttcattcttgtttgcgcaaataacgcatggcaaaa

SEQ ID NO: 555451 - DNA, 75 bp, synthetic construct
  source 1..75: mol_type = other DNA
ggtgcaacgaaaaaggggtcagcgcccgtcagcagcttagcgttcagcaacaaaatggtatctggacattagttc

SEQ ID NO: 555452 - DNA, 75 bp, synthetic construct
  source 1..75: mol_type = other DNA
atgataaagcaactggtagcacctctggttttctccactctgatactggctggttgccagactccacaaggcaaa

SEQ ID NO: 555453 - DNA, 75 bp, synthetic construct
  source 1..75: mol_type = other DNA
cacgatggtcgccactggcgacgaataccagaaccaatgcgactgttagatgatgctgtggagcgctcatcatga

SEQ ID NO: 555454 - DNA, 75 bp, synthetic construct
  source 1..75: mol_type = other DNA
atctggataccgcgttgaatcatattttcccactacctaccggtgacattttctctaaccgtatggtctggtttg

SEQ ID NO: 555455 - DNA, 75 bp, synthetic construct
  source 1..75: mol_type = other DNA
ggtgcaaatgcgcctgttagcgccggaacaatggggtatgccgctgcctttaacgcaaggctccacgccagtcat

SEQ ID NO: 555456 - DNA, 75 bp, synthetic construct
  source 1..75: mol_type = other DNA
attctgctcgaactggacctggtactgtggctgattaaagccgatgaccgtgccctgtctgtggatgagtatttc

SEQ ID NO: 555457 - DNA, 75 bp, synthetic construct
  source 1..75: mol_type = other DNA
gggaggtcaccccggtcagtgatgttcacgccggcacccgggaagcgcagcgcttccgtctgagtggccatggtc

SEQ ID NO: 555458 - DNA, 75 bp, synthetic construct
  source 1..75: mol_type = other DNA
tagcgcatctgcaaagttatatcgaccgtttccgtgccaaagccaccaaagcgaagcaggcccagagccgcatta

SEQ ID NO: 555459 - DNA, 75 bp, synthetic construct
  source 1..75: mol_type = other DNA
gcacgcacggttctgcgcgccgtccgtgactcggtggtctctgttgcccgcgcggtatggaactggattttcttc

SEQ ID NO: 555460 - DNA, 75 bp, synthetic construct
  source 1..75: mol_type = other DNA
cgtacggccctgcgcgctgttcgtgacaccgtggtctctgttgcccgcgcggtatggaaccggattttcttctga

SEQ ID NO: 555461 - DNA, 75 bp, synthetic construct
  source 1..75: mol_type = other DNA
ccgtgattggcattatgggtaaaagcggggccggtaaatcctcactctgtaatgcactgtttcagggggaggtca

SEQ ID NO: 555462 - DNA, 75 bp, synthetic construct
  source 1..75: mol_type = other DNA
ttgccgtatcggcccgcaccggctgggaactggatacgctggtcagtgcgctcatgacagcgcttcccgaccatg

SEQ ID NO: 555463 - DNA, 75 bp, synthetic construct
  source 1..75: mol_type = other DNA
gcctctgttgcacgcacggttctgcgtgccgtccgtgacacggtggtctctgttgcccgcgcggtatggaactgg

SEQ ID NO: 555464 - DNA, 75 bp, synthetic construct
  source 1..75: mol_type = other DNA
tattcagccttctcccgcacaggaacagaacattcgtgagaaaacggaggcggtattccgtctgttccggcccgt

SEQ ID NO: 555465 - DNA, 75 bp, synthetic construct
  source 1..75: mol_type = other DNA
cagaaacacgggattacgaggccatcaggcagattcacgcccagccggaggtgtattacaacacgctacaggtgc

SEQ ID NO: 555466 - DNA, 75 bp, synthetic construct
  source 1..75: mol_type = other DNA
tgaattcggtagggagaatgctttaaaacctctcttcaatcatggtaaaggaagaacggatgagtttcttattag

SEQ ID NO: 555467 - DNA, 75 bp, synthetic construct
  source 1..75: mol_type = other DNA
aaagccgatgtttttcatattggagctaaactaataacaactaaaatacaaaaaattgctaattatattgattct

SEQ ID NO: 555468 - DNA, 75 bp, synthetic construct
  source 1..75: mol_type = other DNA
aatgtttatatcaaggcaaacctaaaagaagggaacttggtaaagcggtaaaagttaaagatactaaaaaaggac

SEQ ID NO: 555469 - DNA, 75 bp, synthetic construct
  source 1..75: mol_type = other DNA
gaccggatatttgacacggtggagagcgtctgtgttgcctctgttgcccgcgcggtatggaactggattttcttc

SEQ ID NO: 555470 - DNA, 75 bp, synthetic construct
  source 1..75: mol_type = other DNA
tttcccgtcacatcctggaacatctgcgcaaactcacccgtcacgaacccgtgattggcattatgggtaaaagcg

SEQ ID NO: 555471 - DNA, 75 bp, synthetic construct
  source 1..75: mol_type = other DNA
tttcagggggaggtcacaccggtcagtgatgttcacgccggcacccgggaagtgcagcgcttccgtctgagtggc

SEQ ID NO: 555472 - DNA, 75 bp, synthetic construct
  source 1..75: mol_type = other DNA
agggtcttcctgatcgcgagacaataataatcattctcattcgcacttgtccaacactttttgcaaaaaatgcat

SEQ ID NO: 555473 - DNA, 75 bp, synthetic construct
  source 1..75: mol_type = other DNA
ggagcgactcgccgatcgtcccggcatcaagcaactcgtcgcctgtattgatggagacgtcgtgggccatctcac

SEQ ID NO: 555474 - DNA, 75 bp, synthetic construct
  source 1..75: mol_type = other DNA
atcaagcagttagtcgcctgtattgatggaatcgtcgtaggccatctcaccattgacgtgcaacaacgcccacgc

SEQ ID NO: 555475 - DNA, 75 bp, synthetic construct
  source 1..75: mol_type = other DNA
accaccttgacctcgacatgcgccaggcactgactgaagcgttgatcgagtttgaaggcgcgctggttgtcgttt

SEQ ID NO: 555476 - DNA, 75 bp, synthetic construct
  source 1..75: mol_type = other DNA
caggcccgtgaacagtttaccggtgcggtggaccggatatttgacacggcggagagcgtctgtattgcctctgtt

SEQ ID NO: 555477 - DNA, 75 bp, synthetic construct
  source 1..75: mol_type = other DNA
ctgaaaggccaggacgccgagcagtacaaccagcgcccgcctgccactggcggcgatggtcaatcaactcaacat

SEQ ID NO: 555478 - DNA, 75 bp, synthetic construct
  source 1..75: mol_type = other DNA
aacagaccgccgaagcggtggataagttgcgctctgagttcgacgagatgaaagcgcagctttctacccaggacg

SEQ ID NO: 555479 - DNA, 75 bp, synthetic construct
  source 1..75: mol_type = other DNA
gaaaaaccgctctcctccctgccttactcactttcccgtcacatcctggaacatctgcgcaaaatcacccgtcac

SEQ ID NO: 555480 - DNA, 75 bp, synthetic construct
  source 1..75: mol_type = other DNA
cagaatattcgcgaaaaaacggaggcggtattccgtctgttccggcccgtacatccggttgtggccgtatcggcc

SEQ ID NO: 555481 - DNA, 75 bp, synthetic construct
  source 1..75: mol_type = other DNA
gggaggtcacaccggtcagtgatgttcacgccggcacccgggaagtgcggcgcttccgtctgagtggccacggtc

SEQ ID NO: 555482 - DNA, 75 bp, synthetic construct
  source 1..75: mol_type = other DNA
tcacgccggcacccgggaagtgcagcgcttccgtctgagtggccatggtcacagcatggttatcactgacctgcc

SEQ ID NO: 555483 - DNA, 75 bp, synthetic construct
  source 1..75: mol_type = other DNA
atgaactctttttttgaacaatatcaccctgtctttgaagttgtctgccgtatcctggggaacggctggcgcgtg

SEQ ID NO: 555484 - DNA, 75 bp, synthetic construct
  source 1..75: mol_type = other DNA
tgctgtcaggataccgacgaagaccggactaccgtgctgtacttgcaggactgtgctcagcaggcagggcaggag

SEQ ID NO: 555485 - DNA, 75 bp, synthetic construct
  source 1..75: mol_type = other DNA
cagaatattcgcgaaaaaacggaggcgttattccgtctgttccggcccgtacatccggttgttgccgtatcggcc

SEQ ID NO: 555486 - DNA, 75 bp, synthetic construct
  source 1..75: mol_type = other DNA
cgtatcggcccgcaccggctgggaactggatacgctggtcagtgcgctcatgacagcgcttcccgaccatgccgc

SEQ ID NO: 555487 - DNA, 75 bp, synthetic construct
  source 1..75: mol_type = other DNA
cgcaggccgacaaaacagagccctgccatgaatgggatatggcaggtattcagccttctcccgcacaggaacaga

SEQ ID NO: 555488 - DNA, 75 bp, synthetic construct
  source 1..75: mol_type = other DNA
gggggaggtcaccccggtcagtgatgttcacgccggcacccgggaagtgcagcgcttccgtctgaatggccatgg

SEQ ID NO: 555489 - DNA, 75 bp, synthetic construct
  source 1..75: mol_type = other DNA
ccagagccgtaaagcagaactgaccgcctgcctgcaacaacaagccagcgccaaatccagactggaagagtgcga

SEQ ID NO: 555490 - DNA, 75 bp, synthetic construct
  source 1..75: mol_type = other DNA
gtgacgcaggccgataaaacggagccctgccatgaatgggatatggccggtattaagccttctcccgcacaggca

SEQ ID NO: 555491 - DNA, 75 bp, synthetic construct
  source 1..75: mol_type = other DNA
atcagcaggtgctgtttgtggtgacgcaggccgacaaaacggagccctgccatgaatgggatatggccggcattc

SEQ ID NO: 555492 - DNA, 75 bp, synthetic construct
  source 1..75: mol_type = other DNA
ggcgcagcaacaggcgatgtatgaaagccagcaggaacgcgtggcgcatctgcaaagttatatcgaccgtttccg

SEQ ID NO: 555493 - DNA, 75 bp, synthetic construct
  source 1..75: mol_type = other DNA
cgctacgtaaagaaatcgcccgtctggaaaaagagatggaaaagctgaatgcacaactggcacaggcagaagaaa

SEQ ID NO: 555494 - DNA, 75 bp, synthetic construct
  source 1..75: mol_type = other DNA
ccaaatccggcctggaagagtgcgaaatggcatggctggaagcccaggagcagcttgagcagatgctgctggaag

SEQ ID NO: 555495 - DNA, 75 bp, synthetic construct
  source 1..75: mol_type = other DNA
cgacagttacgatatcgtcagcggtcgcaaaagtcatctgactctctatccaggcaatgtcgctgtcattgagcc

SEQ ID NO: 555496 - DNA, 75 bp, synthetic construct
  source 1..75: mol_type = other DNA
aacgatggtcagatcagcgccaaaatcaacgggcggattttcccgcttaacggcaagcgtaactatctcccgctc

SEQ ID NO: 555497 - DNA, 75 bp, synthetic construct
  source 1..75: mol_type = other DNA
gtgacgcaggccgataaaacggagccctgccacgaatgggatgtggccggcattcagccttctcccgcacaggca

SEQ ID NO: 555498 - DNA, 75 bp, synthetic construct
  source 1..75: mol_type = other DNA
gtgacattctgcctgaactggacctggtactgtggctgattaaagccgatgaccgtgccctgtctgtggatgagt

SEQ ID NO: 555499 - DNA, 75 bp, synthetic construct
  source 1..75: mol_type = other DNA
ctggatacactggtcagtgcgctcatgacagcacttcccgaccatgccgccagccccctgatgacccgcctgcag

SEQ ID NO: 555500 - DNA, 75 bp, synthetic construct
  source 1..75: mol_type = other DNA
aaaacctgcgaagtggcactggaactcaaccaggcgcgcggtgccgtctgggtcggtgatgtggtctgcagcggc

SEQ ID NO: 555501 - DNA, 75 bp, synthetic construct
  source 1..75: mol_type = other DNA
caattaaccgatgcgctagcgcaagtcaccgatccgatcgacattgtgttttgttgtctcggtaccacgcggcgg

SEQ ID NO: 555502 - DNA, 75 bp, synthetic construct
  source 1..75: mol_type = other DNA
gtcgtgaggcagaagaatcggctaaacgcgaggcgcaacaaaaagctgaacgtgaggccgcagaacaagctaagc

SEQ ID NO: 555503 - DNA, 75 bp, synthetic construct
  source 1..75: mol_type = other DNA
gtatgctttctccagaactgaaacaagaaatcatcggtctggcggaagttcgtgacgtgttcaaatcaccgaaat

SEQ ID NO: 555504 - DNA, 75 bp, synthetic construct
  source 1..75: mol_type = other DNA
cgggccagggggaaacaccagataacgtcaatgtctgacattgtcagggacctttcgcgtctgggctggacagat

SEQ ID NO: 555505 - DNA, 75 bp, synthetic construct
  source 1..75: mol_type = other DNA
ccggtaactggaaatccattgatgcgagagacgtggcgcgggtcatgctggcagaggcgatgcggcctgagcatg

SEQ ID NO: 555506 - DNA, 75 bp, synthetic construct
  source 1..75: mol_type = other DNA
aaagttaacgccattgctgcgccgacgcgacgtccgttgggcgatatgcccggggtgtttaatccccatgatccg

SEQ ID NO: 555507 - DNA, 75 bp, synthetic construct
  source 1..75: mol_type = other DNA
actacattcgttcaacgaaagttgcctctggcgaagcgggcggcattacccagcacattggtgcataccacgttg

SEQ ID NO: 555508 - DNA, 75 bp, synthetic construct
  source 1..75: mol_type = other DNA
tctggttggctttaacgttcgtgccgatgcatctgcgcgtaaagtgattgaggctgaaagcctggatctgcgtta

SEQ ID NO: 555509 - DNA, 75 bp, synthetic construct
  source 1..75: mol_type = other DNA
agcgtaaagctgaagaagaagcgcgtcgtaaactcgaagaagaagcacgtcgcgttgctgaagaagcacgtcgta

SEQ ID NO: 555510 - DNA, 75 bp, synthetic construct
  source 1..75: mol_type = other DNA
cggcatcctgccggaagagtggggcggtgaaagccagttcgtacatgtgtctgcgaaagcgggtactggtatcga

SEQ ID NO: 555511 - DNA, 75 bp, synthetic construct
  source 1..75: mol_type = other DNA
acatgctcgccaggcagaagacgaaagcgatcgtgaagtcgaaggcggccgtggccgtggtcgtaacgcgaaagc

SEQ ID NO: 555512 - DNA, 75 bp, synthetic construct
  source 1..75: mol_type = other DNA
atgccgcagaccatcgaagcaatccagcacgcgaaagcggcgcaggttccggtggtggttgcagtgaacaagatc

SEQ ID NO: 555513 - DNA, 75 bp, synthetic construct
  source 1..75: mol_type = other DNA
gtaagagacctttcgcgtctggggtggacgaatgagcgtattggtacagaattgggaatggacaaggatgaagta

SEQ ID NO: 555514 - DNA, 75 bp, synthetic construct
  source 1..75: mol_type = other DNA
cggaacccgccagcacttcgatcgtgaaaatggtgatattcgccaggcggttgaactggtagcggaaagccaggg

SEQ ID NO: 555515 - DNA, 75 bp, synthetic construct
  source 1..75: mol_type = other DNA
tgaattcgcgcaggaagagccgccagcgtccgacaccgggaagaatttcttttcccgtatcaaggaaatgctgac

SEQ ID NO: 555516 - DNA, 75 bp, synthetic construct
  source 1..75: mol_type = other DNA
tcgcagtcgaaggcgcaacctgtgatggccgcgtgctggaacgtcagcacattatcgaaatggccgagcagtacg

SEQ ID NO: 555517 - DNA, 75 bp, synthetic construct
  source 1..75: mol_type = other DNA
acctcagtttaataattactctatacatattcgaatggagaagggaaggttagtcattattggaagcgtagatag

SEQ ID NO: 555518 - DNA, 75 bp, synthetic construct
  source 1..75: mol_type = other DNA
tgaaaagaaaatcctgtcggatgctttagataatgtagatatggcgcgagagtatgaacaacagttacagcaaaa

SEQ ID NO: 555519 - DNA, 75 bp, synthetic construct
  source 1..75: mol_type = other DNA
tggggagtgtggatagtcgttcctggagtagtccgtatcatgtttgtacgttatccaggaagcggaatcccgttg

SEQ ID NO: 555520 - DNA, 75 bp, synthetic construct
  source 1..75: mol_type = other DNA
aggatgaagtactgcggctgaagcagattagcgggctgacagagctgtttcaggaagaggacttcagtccggcat

SEQ ID NO: 555521 - DNA, 75 bp, synthetic construct
  source 1..75: mol_type = other DNA
tccttttgcacaggagcctgtggactgtgtgctgtgggtgaaagcagatgaagtggtggctaacgattataatcc

SEQ ID NO: 555522 - DNA, 75 bp, synthetic construct
  source 1..75: mol_type = other DNA
ctgcataagatcagcccttttgcacgggaaccagtggactgtgtgctgtgggtaaaagcagatgaggtggtggcc

SEQ ID NO: 555523 - DNA, 75 bp, synthetic construct
  source 1..75: mol_type = other DNA
aaatgatggagttttgtgccaaaagcaccgttaacccgctggcctcacgcaagcacgatcaggcttgtttcttca

SEQ ID NO: 555524 - DNA, 75 bp, synthetic construct
  source 1..75: mol_type = other DNA
atgggggattctgtgacagcggagatactgggtaacatgattcgtcagtatttcagtcaggtacgaactgaagaa

SEQ ID NO: 555525 - DNA, 75 bp, synthetic construct
  source 1..75: mol_type = other DNA
gtggactgtgtactgtgggtggaagcggatgaggtggtggccaatgattataatcccaatgtcatggcaccaggt

SEQ ID NO: 555526 - DNA, 75 bp, synthetic construct
  source 1..75: mol_type = other DNA
gaagctgcggaaaaagacaaagtgagcaatcaacaagacgatatgactaaaaacgcccaggctgaaaaagcccgc

SEQ ID NO: 555527 - DNA, 75 bp, synthetic construct
  source 1..75: mol_type = other DNA
acgtaaccaactgattattaccggagtgtatgcgcacatcggttgtatgaccactgcgaccgacgcgtttatgcg

SEQ ID NO: 555528 - DNA, 75 bp, synthetic construct
  source 1..75: mol_type = other DNA
tgatacggtgctggtgaagtggcgctacagcgcgtttcatcgctctccgctggaacaaatgctcaaagagagtgg

SEQ ID NO: 555529 - DNA, 75 bp, synthetic construct
  source 1..75: mol_type = other DNA
gcgatgaagatcgggcgctgttgaatgatatgtgggggccgggcctgacccgttcgccggaacagcaaaaggtgg

SEQ ID NO: 555530 - DNA, 75 bp, synthetic construct
  source 1..75: mol_type = other DNA
cgtgccagggggaaacaccagataacgtcaatgtctgaaattgtcagggacctttcccgactgggctggaccgat

SEQ ID NO: 555531 - DNA, 75 bp, synthetic construct
  source 1..75: mol_type = other DNA
atggctattccaaaattacaggcttacgcactgccggagtctcacgatattccgcagaataaagtcgactgggcc

SEQ ID NO: 555532 - DNA, 75 bp, synthetic construct
  source 1..75: mol_type = other DNA
aggttatcctgccgttgctggacgagtccgatgaaccgttcgatgacgacaacctgatcgactacggtctggatt

SEQ ID NO: 555533 - DNA, 75 bp, synthetic construct
  source 1..75: mol_type = other DNA
gaaagggacaggcctcacgtattgctgcgaccatccgacataaccgggccaggggtaaacatcagatcacctcaa

SEQ ID NO: 555534 - DNA, 75 bp, synthetic construct
  source 1..75: mol_type = other DNA
caccgagatcctggtcaaagtgggcgacaaagttgaagccgaacagtcgctgatcactgtagaaggcgacaaagc

SEQ ID NO: 555535 - DNA, 75 bp, synthetic construct
  source 1..75: mol_type = other DNA
atcccgcatgttactcacttcgacaaaaccgatatcaccgagctggaagcgttccgtaaacagcagaacgaagaa

SEQ ID NO: 555536 - DNA, 75 bp, synthetic construct
  source 1..75: mol_type = other DNA
tacgaggcggatggatagaagggaatgccttgagtgatgatggcgtaccgctagtgcaggcattcgtcgcttgga

SEQ ID NO: 555537 - DNA, 75 bp, synthetic construct
  source 1..75: mol_type = other DNA
aggcgacaaagcttctatggaagttccggcgccgtttgcaggcgtcgtgaaggaactgaaagtcaacgttggcga

SEQ ID NO: 555538 - DNA, 75 bp, synthetic construct
  source 1..75: mol_type = other DNA
tgcgaccattcgacataaccgggccagggggaaacaccagataacctcaatgtctgatattgtcagagacctgtc

SEQ ID NO: 555539 - DNA, 75 bp, synthetic construct
  source 1..75: mol_type = other DNA
cgtgccagggggaaacaccagataacgtcaatgtctgaaattgtcagggacctttcccgcctgggctggacagat

SEQ ID NO: 555540 - DNA, 75 bp, synthetic construct
  source 1..75: mol_type = other DNA
ctggagcataattttactgatgcctggagcggctttgtgcgcggctatggctatgataatcgtaccaattatgac

SEQ ID NO: 555541 - DNA, 75 bp, synthetic construct
  source 1..75: mol_type = other DNA
cttcaatgtctgaaattgtcagggacctgtcacggctgggctggacagatgatcgaattggaacagaggctgggc

SEQ ID NO: 555542 - DNA, 75 bp, synthetic construct
  source 1..75: mol_type = other DNA
cttcaatgtctgaaattgtcagggacctctcacgcctgggctggacagatgatcgaattggaacagaggctgggc

SEQ ID NO: 555543 - DNA, 75 bp, synthetic construct
  source 1..75: mol_type = other DNA
gaacgcattggcactgagttgggtatggatcaggatgaagtactgagacttaaacaaattagcgggctaactgag

SEQ ID NO: 555544 - DNA, 75 bp, synthetic construct
  source 1..75: mol_type = other DNA
acgtctgggctggacggatgaacgcattggtacagagctggggatggaccaggatgaagtgctgagactgaaaca

SEQ ID NO: 555545 - DNA, 75 bp, synthetic construct
  source 1..75: mol_type = other DNA
agtcggcgattttacttttgaaggcgcaggacgcagcgacgataattctcagtttggtcgtcatggtacctggca

SEQ ID NO: 555546 - DNA, 75 bp, synthetic construct
  source 1..75: mol_type = other DNA
cttcaatgtctgaaattgtcagggacctatcacgactgggctggacagatgatcgaattggaacagaggctgggc

SEQ ID NO: 555547 - DNA, 75 bp, synthetic construct
  source 1..75: mol_type = other DNA
cgggccagggggaaacaccagataacgtcaatgtctgaaattgtcagggacctttcccgcctgggctggactgat

SEQ ID NO: 555548 - DNA, 75 bp, synthetic construct
  source 1..75: mol_type = other DNA
cgggccagggggaaacaccagataacgtcaatgtctgaaattgtcagggacctttcccgtctgggctggaccgat

SEQ ID NO: 555549 - DNA, 75 bp, synthetic construct
  source 1..75: mol_type = other DNA
cttcaatgtctgaaattgtcagggacctttcacggctgggctggacagatgagcgaattggaacagaggctgggc

SEQ ID NO: 555550 - DNA, 75 bp, synthetic construct
  source 1..75: mol_type = other DNA
cttcaatgtctgaaattgtcagggacctttcacgcctgggctggacagatgaccgaattggaacagaggctgggc

SEQ ID NO: 555551 - DNA, 75 bp, synthetic construct
  source 1..75: mol_type = other DNA
cttcaatgtctgaaattgtcagggacctttcacgactgggctggacagatgaacgaattggaacagaggctgggc

SEQ ID NO: 555552 - DNA, 75 bp, synthetic construct
  source 1..75: mol_type = other DNA
cattcacgctgaagcctacgctgcaggcgaactgaaacacggtccgctggcgctgattgatgccgatatgccggt

SEQ ID NO: 555553 - DNA, 75 bp, synthetic construct
  source 1..75: mol_type = other DNA
ctggatgcctccattgaacatgacatcgtgcatggtctgcaggcgctaccgagccgtattgagcagatgctgtct

SEQ ID NO: 555554 - DNA, 75 bp, synthetic construct
  source 1..75: mol_type = other DNA
tatcacgtcgcgctgatcaaaggcaccgacgttgaccagccgcgtaacctggcaaaatcggttacggttgagtaa

SEQ ID NO: 555555 - DNA, 75 bp, synthetic construct
  source 1..75: mol_type = other DNA
ctacattgcgctatttacctccatcaatgtagagatagcgcttaaaaacctgctgcaaaagcctgttttttacca

SEQ ID NO: 555556 - DNA, 75 bp, synthetic construct
  source 1..75: mol_type = other DNA
gcaggcatgtattgataatcagcgtattgggttatggggtacatcgctgggagggggtcatgtgttcagtgcagc

SEQ ID NO: 555557 - DNA, 75 bp, synthetic construct
  source 1..75: mol_type = other DNA
aacgttccgggttcttctctggtgcgcgaatccgatctggcgctgatgaccaacgccggtacggaaatcggcgtg

SEQ ID NO: 555558 - DNA, 75 bp, synthetic construct
  source 1..75: mol_type = other DNA
acgataaatcctgtaaaattggttagtgcaagtagataccatgcagttaaccatacagccaatgctgatgattat

SEQ ID NO: 555559 - DNA, 75 bp, synthetic construct
  source 1..75: mol_type = other DNA
attaagtatgctgaacgacttctcggagagataaaaaaccaaatcagtgataactcattcgatttttcaaaatac

SEQ ID NO: 555560 - DNA, 75 bp, synthetic construct
  source 1..75: mol_type = other DNA
tcttgaactggcggatacggtgagtgagctgcgccccatcaaacatgcgtttgatgccggtgtaaaagcgcagat

SEQ ID NO: 555561 - DNA, 75 bp, synthetic construct
  source 1..75: mol_type = other DNA
ttaccttggttcactggcaatctgtaacgttccgggttcttcgctggtacgcgaatccgatctggcgctaatgac

SEQ ID NO: 555562 - DNA, 75 bp, synthetic construct
  source 1..75: mol_type = other DNA
tcagttgtatgtctttgccgatcaggatgctggttttgtgagcagtgataacatgcacatcatcgagatgccaca

SEQ ID NO: 555563 - DNA, 75 bp, synthetic construct
  source 1..75: mol_type = other DNA
cgcaacgtgatgtagcagaaatccttcttgaaggtttacgtcgtcttgaataccgcggatatgactctgccggtc

SEQ ID NO: 555564 - DNA, 75 bp, synthetic construct
  source 1..75: mol_type = other DNA
tgtgcgactctggcagtgagtttattactttctatgctggtacaacgaatcgacagaaacagattagtgagttaa

SEQ ID NO: 555565 - DNA, 75 bp, synthetic construct
  source 1..75: mol_type = other DNA
gctggtactcaccatcaaaagtattaccgccaccggtcccggcgctaaaaccgccgcctggcatgcgagaaaagc

SEQ ID NO: 555566 - DNA, 75 bp, synthetic construct
  source 1..75: mol_type = other DNA
gctggcaggattagtctactggggctgtacggtagtcgtcttacacttcgacgcctatggtgaaaaaatggcggc

SEQ ID NO: 555567 - DNA, 75 bp, synthetic construct
  source 1..75: mol_type = other DNA
ttgcgattctgggtcgccactatcccagcgcgggcggtgttgcgcacttcgtcggtatggcgttcggctcgcggc

SEQ ID NO: 555568 - DNA, 75 bp, synthetic construct
  source 1..75: mol_type = other DNA
tactggcaatggtcggctggaaaagtctctatgcgctgatcatgctggcggggttatggctgtttctgccaaaac

SEQ ID NO: 555569 - DNA, 75 bp, synthetic construct
  source 1..75: mol_type = other DNA
agagatgtttgtgggggttacacgggtactgagtgatgatgaatcgaaggtattcttcgagaaaatcaaagcccg

SEQ ID NO: 555570 - DNA, 75 bp, synthetic construct
  source 1..75: mol_type = other DNA
atgaaacatcctttgattctcttatgccatggattttgcggtatccggaatgttctgctgccttcctttgcgaat

SEQ ID NO: 555571 - DNA, 75 bp, synthetic construct
  source 1..75: mol_type = other DNA
ataacctgcgagggatagcctgtttaatggtggtgatgattcacactaccagttggtatgtgacgaatgcccata

SEQ ID NO: 555572 - DNA, 75 bp, synthetic construct
  source 1..75: mol_type = other DNA
atgcatgccattatgatatttatgaaggcgcgttttttgaacgtgtagtagctgtgcagacacaatggtttaaac

SEQ ID NO: 555573 - DNA, 75 bp, synthetic construct
  source 1..75: mol_type = other DNA
ggcggagatgattcaggcagactgggcgaaagtgggcgtgcaggccaaaattgtcacctacgaatggggtgagta

SEQ ID NO: 555574 - DNA, 75 bp, synthetic construct
  source 1..75: mol_type = other DNA
ttgaaccggtacgcaaagaagtcaaaggctatgtggttgatccattaggcaaacatcacttcgaaaatgtctcta

SEQ ID NO: 555575 - DNA, 75 bp, synthetic construct
  source 1..75: mol_type = other DNA
ctgctggagccgcatggcgttgagtttcaggtaatggcaacgggctttacctgggatacgcagaatcgcgagtcg

SEQ ID NO: 555576 - DNA, 75 bp, synthetic construct
  source 1..75: mol_type = other DNA
aaagaactgacgggaacggtcactttccgccatttgctgcgcttctcgcaaaaagggcaattcgttctgcctcct

SEQ ID NO: 555577 - DNA, 75 bp, synthetic construct
  source 1..75: mol_type = other DNA
gctgatcccctaccgcggcaagcccgccgcggatgcgccgcgctacaaagcaatcggcaactccatggccgtccc

SEQ ID NO: 555578 - DNA, 75 bp, synthetic construct
  source 1..75: mol_type = other DNA
cggttgtcttcatcatgaaagccgttgctgcggcacttgagcagatgcctcgcttcaacagttctctgtcggaag

SEQ ID NO: 555579 - DNA, 75 bp, synthetic construct
  source 1..75: mol_type = other DNA
tctggctgatgatttgatgctcacctctaaatactggacacgctccgctaaagaagtggaacaatcagcacgaga

SEQ ID NO: 555580 - DNA, 75 bp, synthetic construct
  source 1..75: mol_type = other DNA
atgttagagctaaacgtggcacgcctctcgaacgttgtcaccttcgaagttaaccgaccatcattagagaaagca

SEQ ID NO: 555581 - DNA, 75 bp, synthetic construct
  source 1..75: mol_type = other DNA
atcgaatcagacaccggacgattgagcgaatttatcgacttcaaatcaaaggcatcctccgctgagtttagcaag

SEQ ID NO: 555582 - DNA, 75 bp, synthetic construct
  source 1..75: mol_type = other DNA
gtgaaccggcaaaaactgctcaacaaagtaacattccggtgaccgttgaacgccagttgtatcggctgatcccgg

SEQ ID NO: 555583 - DNA, 75 bp, synthetic construct
  source 1..75: mol_type = other DNA
gtttaaccgcccagcaatccagtatcgaacgtgcactggccatgaactggctggcgaaatatatggcagcgatgc

SEQ ID NO: 555584 - DNA, 75 bp, synthetic construct
  source 1..75: mol_type = other DNA
gtgccacttaccttttaccggatcccggagagctgaatcgccggataaagatccgccttcgtgtggatgaaccca

SEQ ID NO: 555585 - DNA, 75 bp, synthetic construct
  source 1..75: mol_type = other DNA
aagcagctccggcagcgactggcggtggtatccctggcatgctgccgtggccgaaggtggacttcagcaagtttg

SEQ ID NO: 555586 - DNA, 75 bp, synthetic construct
  source 1..75: mol_type = other DNA
gcgtgaaagaagttaacgttccggatatcggcggtgacgaagttgaagtcaccgaagtgatggtgaaagtgggcg

SEQ ID NO: 555587 - DNA, 75 bp, synthetic construct
  source 1..75: mol_type = other DNA
ctcagtttggaaaactctggatggccgggataaatggattgaagatctcgacctgctggtggacggttccccggt

SEQ ID NO: 555588 - DNA, 75 bp, synthetic construct
  source 1..75: mol_type = other DNA
ttcctgaccaatataaaggcgctggcactgcaacaactacacctgataatagtcattctctctttaacacgatta

SEQ ID NO: 555589 - DNA, 75 bp, synthetic construct
  source 1..75: mol_type = other DNA
tgataaaccagaagccatttacattcatgaaggatgctactgtctttgaagatccaaagacaaacaaaccgtggg

SEQ ID NO: 555590 - DNA, 75 bp, synthetic construct
  source 1..75: mol_type = other DNA
accgatggggtacttcaaattaaccccgtatcgttagtaacagcttcgcgctaccaaagtgataagtcagaagca

SEQ ID NO: 555591 - DNA, 75 bp, synthetic construct
  source 1..75: mol_type = other DNA
gacagatgggccacaaagggccggaaatgatattccgcaactacggtaaatacctggctgaatatgacggtaaaa

SEQ ID NO: 555592 - DNA, 75 bp, synthetic construct
  source 1..75: mol_type = other DNA
ttcaggtgatggcaacgggctttacctgggatacacaaaaccgcgagtctgataccgccgcctgccgcgaagtct

SEQ ID NO: 555593 - DNA, 75 bp, synthetic construct
  source 1..75: mol_type = other DNA
caccgcggcatttggtacggcaacacgcgcagttggtcacggaaaaaaagtgggcgtcgtgcagtttattaaagg

SEQ ID NO: 555594 - DNA, 75 bp, synthetic construct
  source 1..75: mol_type = other DNA
tgattcctcgctggatatggttttgctcgatgagctgacgtatatggtggcgtatgactatttgccactggaaga

SEQ ID NO: 555595 - DNA, 75 bp, synthetic construct
  source 1..75: mol_type = other DNA
attttgacgtcatggataaccactatgttcccaatctgacgattgggccaatggtgctgaaatccttgcgtaact

SEQ ID NO: 555596 - DNA, 75 bp, synthetic construct
  source 1..75: mol_type = other DNA
caaggggctaggaaatacctggatcagatgaaagatgttagggaacgtgccgcaaaatcctacagtgaagctgaa

SEQ ID NO: 555597 - DNA, 75 bp, synthetic construct
  source 1..75: mol_type = other DNA
ttaaagctccttgatgtgtcaagctctatcagtgcaatgcaccgcctctctgtagctgaacaatataaagctatt

SEQ ID NO: 555598 - DNA, 75 bp, synthetic construct
  source 1..75: mol_type = other DNA
gtgccagtggttttgaggctcttaggagttttgatacctacctgaaagagcagggtaccaccttggtgctggttc

SEQ ID NO: 555599 - DNA, 75 bp, synthetic construct
  source 1..75: mol_type = other DNA
gcatggcccgcgagatagctgagagatctgcctacattcttcattcttgccccgcttgttcgctgccagccaaac

SEQ ID NO: 555600 - DNA, 75 bp, synthetic construct
  source 1..75: mol_type = other DNA
gcgaagtacgtcgtcgtatcgacgagtctggctttgacattcgactggaagtggacggtggcgtgaaggtgaaca

SEQ ID NO: 555601 - DNA, 75 bp, synthetic construct
  source 1..75: mol_type = other DNA
taatggcaacttataatggaagtgcttttatagagaaccagattctttcattacagcaacaaaaatataaagatt

SEQ ID NO: 555602 - DNA, 75 bp, synthetic construct
  source 1..75: mol_type = other DNA
gtctggttttcacactaaccccacgttatggcgtcagtctcattcatctggatgccagcgctgaatgcctgccgg

SEQ ID NO: 555603 - DNA, 75 bp, synthetic construct
  source 1..75: mol_type = other DNA
gtctggttatcacactaatccgacgttatggcgtcagtctcattcatctggatgccagcgctgaatgcctgccgg

SEQ ID NO: 555604 - DNA, 75 bp, synthetic construct
  source 1..75: mol_type = other DNA
tctgcggcttaaacgcctggggctgtcaaaaacgttccgtcgtctggttgtcacacttaaccgacgttatggcgt

SEQ ID NO: 555605 - DNA, 75 bp, synthetic construct
  source 1..75: mol_type = other DNA
gttatcacactttctcccgccaacactgaacttgcctttgccgccgggatcacgccggtaggggtcagcagttat

SEQ ID NO: 555606 - DNA, 75 bp, synthetic construct
  source 1..75: mol_type = other DNA
ggattctggtgattgtctttttggtaggcgtcctgctgaacgtgattaaagatctcaagcgcgtcgaccataaga

SEQ ID NO: 555607 - DNA, 75 bp, synthetic construct
  source 1..75: mol_type = other DNA
gtctggttctcacactaaacctacgttatggcgtcagtctcattcatctggatgccagcgctgaatgcctgccgg

SEQ ID NO: 555608 - DNA, 75 bp, synthetic construct
  source 1..75: mol_type = other DNA
atgaaactgcccctgacgccggaagccgacagcattaacgtgcaggcactgaacatggggcgcattgtcgttgac

SEQ ID NO: 555609 - DNA, 75 bp, synthetic construct
  source 1..75: mol_type = other DNA
gtgggcggtcacctgctgcggatgttgattaacgaaccgaaagttaacgccatagccgcgccgacgcgacgtccg

SEQ ID NO: 555610 - DNA, 75 bp, synthetic construct
  source 1..75: mol_type = other DNA
tctgaccggacctcagcagactgcacgccaccatttgctgcccttaccggcatacgctgcagtaccgcacatatc

SEQ ID NO: 555611 - DNA, 75 bp, synthetic construct
  source 1..75: mol_type = other DNA
tctgcggcttaaacgcctggggctgtcaaaaacgttccgtcgtctggttctcacactcaacctacgttatggcgt

SEQ ID NO: 555612 - DNA, 75 bp, synthetic construct
  source 1..75: mol_type = other DNA
tctgcggcttaaacgcctggggctgtcaaaaacgttccgtcgtctggttttcacactgaaccgacgttatggcgt

SEQ ID NO: 555613 - DNA, 75 bp, synthetic construct
  source 1..75: mol_type = other DNA
ccctgacgctggaagccgacagtattaacgtgcaggcgctgaacatggggcgcattgtcgttgacattgatggtg

SEQ ID NO: 555614 - DNA, 75 bp, synthetic construct
  source 1..75: mol_type = other DNA
tccgactaccctccacaagcgcaaaagattgagcaggtttccacctggcaggggatgaatctggaacgcattgtg

SEQ ID NO: 555615 - DNA, 75 bp, synthetic construct
  source 1..75: mol_type = other DNA
tgacgtcgatggtgttaatctcactgaactgattaacaaagtcgctgaaaacggttattcactccgggtggtaga

SEQ ID NO: 555616 - DNA, 75 bp, synthetic construct
  source 1..75: mol_type = other DNA
tgacgtcgatggtgttaatctcactgaactgattaacaaagtcactgaaaacggttattcactccgggtggtgga

SEQ ID NO: 555617 - DNA, 75 bp, synthetic construct
  source 1..75: mol_type = other DNA
tgacgtcgatggtgttaatctcattgaactgattaacaaagtctctgaaaacggttattcactccgggtggtcga

SEQ ID NO: 555618 - DNA, 75 bp, synthetic construct
  source 1..75: mol_type = other DNA
caaccctttcccgcatacgctgcagtaccgcacatatcacggaaacggacaacgcctggttgtactcgctgtcac

SEQ ID NO: 555619 - DNA, 75 bp, synthetic construct
  source 1..75: mol_type = other DNA
tgacgtcgatggtgttaatctcagtgaactgattaacaaagtccctgaaaacggttattcactccgggtggtaga

SEQ ID NO: 555620 - DNA, 75 bp, synthetic construct
  source 1..75: mol_type = other DNA
tgacgtcgatggtgttaatctcagtgaactgattaacaaagtcactgaaaacggttattcactccgggtggtcga

SEQ ID NO: 555621 - DNA, 75 bp, synthetic construct
  source 1..75: mol_type = other DNA
gggtgatgctggcagaggcgatgcggcccgagcatgaaggcgtgactattttaacttcttcagaattacgcaaaa

SEQ ID NO: 555622 - DNA, 75 bp, synthetic construct
  source 1..75: mol_type = other DNA
gggtcatgctggcagaagcgatgcggccagagcatgaaggcgtgaccattttaagctcttcagaattacgcaaaa

SEQ ID NO: 555623 - DNA, 75 bp, synthetic construct
  source 1..75: mol_type = other DNA
gtatgcgcaactgaaagcgcaatatgctgataaaccgaaaaaacgtgttttcttacaattcggcattaatccgcc

SEQ ID NO: 555624 - DNA, 75 bp, synthetic construct
  source 1..75: mol_type = other DNA
tgacgtcgatggtgttaatctcaatgaactgattaacaaagtcgctgaaaacggttattcactccgggtggtcga

SEQ ID NO: 555625 - DNA, 75 bp, synthetic construct
  source 1..75: mol_type = other DNA
tgacgtcgatggtgttaatctcaatgaactgattaacaaagtccctgaaaacggttattcactccgggtggtgga

SEQ ID NO: 555626 - DNA, 75 bp, synthetic construct
  source 1..75: mol_type = other DNA
ttgttgtctcggcaccacgcggcgagaagcggggagcaaagaggcgtttattcatgccgattacacgctggtagt

SEQ ID NO: 555627 - DNA, 75 bp, synthetic construct
  source 1..75: mol_type = other DNA
tatcctcgaagccgtttggggatttttctccgcctatgcattggtgtttattgtcagtatgctggcgattatcgc

SEQ ID NO: 555628 - DNA, 75 bp, synthetic construct
  source 1..75: mol_type = other DNA
atgatgatttcagccgcgctgtactggaggctgaagttcagatgtgcggcgagttgcgtgactacctacgggtaa

SEQ ID NO: 555629 - DNA, 75 bp, synthetic construct
  source 1..75: mol_type = other DNA
ccagttggtctggtgtggtaatgactccaacttattgatagtgttttatgttcagataatgcccgatgactttgt

SEQ ID NO: 555630 - DNA, 75 bp, synthetic construct
  source 1..75: mol_type = other DNA
gatgctcggttacgacgcccccatttataccaacgtgacctaccccattacggtgaatccgccgtttgttcccgc

SEQ ID NO: 555631 - DNA, 75 bp, synthetic construct
  source 1..75: mol_type = other DNA
ggtcgccagcggcaccgcgcctctcggcggcgaaattattgatgagcgtggcggttatgccgatcgcgtcacgct

SEQ ID NO: 555632 - DNA, 75 bp, synthetic construct
  source 1..75: mol_type = other DNA
gttactcgctcacatttaatattgatgaaagctggctacaggaaggccagacgcgaattatttttgatggcgtta

SEQ ID NO: 555633 - DNA, 75 bp, synthetic construct
  source 1..75: mol_type = other DNA
ggggattggcggcgacgactcctggagtccgtcagtttcgacggaattccagttgagcgccggtcactaccatta

SEQ ID NO: 555634 - DNA, 75 bp, synthetic construct
  source 1..75: mol_type = other DNA
cggtgctgattacgactgtccacgcctggctgcatcaggggaaaaccttatttatcagccgcaaaacctaccgta

SEQ ID NO: 555635 - DNA, 75 bp, synthetic construct
  source 1..75: mol_type = other DNA
tcatgcaggacaaagatattgaggagaattatcacgctcagtttatggagcaggcgctgcaacaagcaggctttg

SEQ ID NO: 555636 - DNA, 75 bp, synthetic construct
  source 1..75: mol_type = other DNA
tactcttcagattacagttctctcgatccgcaggaatacgaagatgacgccgtattccgtagctatatcgacgat

SEQ ID NO: 555637 - DNA, 75 bp, synthetic construct
  source 1..75: mol_type = other DNA
ttttggcgatacgccgaacgatcgccagttctgcatgaacggtctggtctttgccgaccgcacgccgcatccggc

SEQ ID NO: 555638 - DNA, 75 bp, synthetic construct
  source 1..75: mol_type = other DNA
tttcatttgtggtgcaacgggcgctgggtcggttacggccaggacagccgtttgccgtctgaatttgacctgagc

SEQ ID NO: 555639 - DNA, 75 bp, synthetic construct
  source 1..75: mol_type = other DNA
gcacaccgccgacggcacgctgattgaagcagaagcctgcgatgtcggtttccgcgaggtgcggattgaaaatgg

SEQ ID NO: 555640 - DNA, 75 bp, synthetic construct
  source 1..75: mol_type = other DNA
ctgcgttttctaacggcttcgttaacggctatctgaccatggatacgctgggcgcaatggtgtttggtatcgtta

SEQ ID NO: 555641 - DNA, 75 bp, synthetic construct
  source 1..75: mol_type = other DNA
gctgctggataccgtgggcaacttccttgcgccgctgaaaattatcgcgctggtcatcctgtctgttgccgcgat

SEQ ID NO: 555642 - DNA, 75 bp, synthetic construct
  source 1..75: mol_type = other DNA
gatgcatcgagcatatcggatcagtcacttaatttgttacctcgaatggaaactgacatcaccattcgctcatca

SEQ ID NO: 555643 - DNA, 75 bp, synthetic construct
  source 1..75: mol_type = other DNA
atgccatcggccatagctttgcgactatcgctattggcggcttctcgacacatgatgccagtatcggttatttcg

SEQ ID NO: 555644 - DNA, 75 bp, synthetic construct
  source 1..75: mol_type = other DNA
cccgctgaaagataacaaaatgcgcccgcgaattgcggaaacggcgaaaaccctgtggttgatttatgtcttgct

SEQ ID NO: 555645 - DNA, 75 bp, synthetic construct
  source 1..75: mol_type = other DNA
gcttgatgtccatgtttcggttgaccgcgttaatggttataagcaaagtctgtctgagcataatattgcagtgcg

SEQ ID NO: 555646 - DNA, 75 bp, synthetic construct
  source 1..75: mol_type = other DNA
ggtgtcagaggagaagggccattacctggtggtggatggttttcatcgtcagttactgggcagggaagcaggcac

SEQ ID NO: 555647 - DNA, 75 bp, synthetic construct
  source 1..75: mol_type = other DNA
attccgtcatagcgataacgaaattctacactggtcggtggcgctggacggcaatcctctggcgaacggcgaaac

SEQ ID NO: 555648 - DNA, 75 bp, synthetic construct
  source 1..75: mol_type = other DNA
gcctttttacacgccggagaaaaccgcctcgcggtgatggtgctgcgctggagtgacggcagttatctggaagat

SEQ ID NO: 555649 - DNA, 75 bp, synthetic construct
  source 1..75: mol_type = other DNA
tcagtacttcagccaggaacgaccagaagaagaggccatacaggcccttaatcacctgcgcagggtgcttcatga

SEQ ID NO: 555650 - DNA, 75 bp, synthetic construct
  source 1..75: mol_type = other DNA
cctgtagcctgcattaatccggagagaaagggacaggccgcacgtatgccgcgaccattcgacataaccgggcca

SEQ ID NO: 555651 - DNA, 75 bp, synthetic construct
  source 1..75: mol_type = other DNA
aagaggttagtcgtcgattgtcattactggaattgaagctgcgacaagctggattgagtaccgattttttacgcg

SEQ ID NO: 555652 - DNA, 75 bp, synthetic construct
  source 1..75: mol_type = other DNA
gcgctcaaactaatcagacaactttatccgcaggtgcagtgggttcagtcgtttgcagatgagcgttgtggctgt

SEQ ID NO: 555653 - DNA, 75 bp, synthetic construct
  source 1..75: mol_type = other DNA
ggaaatcctgtcgtggggaacagaaagcaagttacatcccgtatcatcagcacgcctgaacttattcactataac

SEQ ID NO: 555654 - DNA, 75 bp, synthetic construct
  source 1..75: mol_type = other DNA
ggttatggctcccgtgagttgcgggttgagacaataagttgctggctggccagactggttatcgtcaataaacat

SEQ ID NO: 555655 - DNA, 75 bp, synthetic construct
  source 1..75: mol_type = other DNA
ccatgctctgctgtcaggtgatggggaacgacgtggcaatcaacatggggggcgcttccggtaactttgaactga

SEQ ID NO: 555656 - DNA, 75 bp, synthetic construct
  source 1..75: mol_type = other DNA
gtatgccgagaaactccgaatcaagggcaatcagttacgcgctcaagctaatcagacagctttatccgcaggtac

SEQ ID NO: 555657 - DNA, 75 bp, synthetic construct
  source 1..75: mol_type = other DNA
ttcagtcctttgcagacgaacgctgcggacgtgctggcgtggtatatcaggcgtcgaattttgattttataggca

SEQ ID NO: 555658 - DNA, 75 bp, synthetic construct
  source 1..75: mol_type = other DNA
aaaacggttattcactccgcgtggtggatgctcccgaacagcagacaaccgactctccaccaccgtttactgccc

SEQ ID NO: 555659 - DNA, 75 bp, synthetic construct
  source 1..75: mol_type = other DNA
tgcccccctccgctgccctgagcggtatacgctgcagcaccgcacatatcacggaaacagacaacgcctggttgt

SEQ ID NO: 555660 - DNA, 75 bp, synthetic construct
  source 1..75: mol_type = other DNA
acggcaaaagacaacgtctggctgtactcgctgtcgcatcagacgaatgacaccggcgaaacagaatggattcat

SEQ ID NO: 555661 - DNA, 75 bp, synthetic construct
  source 1..75: mol_type = other DNA
tcgtctggttgtcactcttagccggggttatggcgtccgtctcattcatctggttgccagcgccgaatttctgcc

SEQ ID NO: 555662 - DNA, 75 bp, synthetic construct
  source 1..75: mol_type = other DNA
tcgtctggttgtcactcttagccggtgttatggcgtccgtctcattcatctggttgccagcgccgtatttctgcc

SEQ ID NO: 555663 - DNA, 75 bp, synthetic construct
  source 1..75: mol_type = other DNA
tcgtctggttgtcactcttagccggagttatggcgtccgtctcattcatctggttgccagcgccggatttctgcc

SEQ ID NO: 555664 - DNA, 75 bp, synthetic construct
  source 1..75: mol_type = other DNA
cggggctgaacactcatccggaatatgcgcgtcgcgttgcggatgaactttcggtaattacctgcgcgccgtttg

SEQ ID NO: 555665 - DNA, 75 bp, synthetic construct
  source 1..75: mol_type = other DNA
taatgggcgatggtcgtaagtatgactgggttgtctctctgcgttctgtcgaaaccatcgactttatgaccgcac

SEQ ID NO: 555666 - DNA, 75 bp, synthetic construct
  source 1..75: mol_type = other DNA
gaaaccatcgactttatgaccgcacactgggcgcatctgccgtacgatttcctcggtcgcgtttccaaccgcatt

SEQ ID NO: 555667 - DNA, 75 bp, synthetic construct
  source 1..75: mol_type = other DNA
atgctaccgccagcgcctatttggatgcactggcacagcaactgcgtacccgctacaaggtgaatgcgctcagta

SEQ ID NO: 555668 - DNA, 75 bp, synthetic construct
  source 1..75: mol_type = other DNA
catgcgctgcatgctatctggcaacgcgtacttgatagacaagacattgatagcaatgcctcctttttcgccctc

SEQ ID NO: 555669 - DNA, 75 bp, synthetic construct
  source 1..75: mol_type = other DNA
gcatatcttcgggagggaacaccaacttgtatcgtgccgctgtcacaatatcacacagatactgaagccgagaac

SEQ ID NO: 555670 - DNA, 75 bp, synthetic construct
  source 1..75: mol_type = other DNA
gggctatcttagcgaagccgagtttgacagctgggtacgaccagaacagatggtcggcagcatgaaatccgggcg

SEQ ID NO: 555671 - DNA, 75 bp, synthetic construct
  source 1..75: mol_type = other DNA
ccttaaaagctgcagcccttgcgctgggctatcttagcgaagccgagtttgacagctgggtacgaccagaacaga

SEQ ID NO: 555672 - DNA, 75 bp, synthetic construct
  source 1..75: mol_type = other DNA
gacagctgggtacggccagaacagatggtcggcagtatgaaagccgggcgtaatctgcaacatacaggtgcagcc

SEQ ID NO: 555673 - DNA, 75 bp, synthetic construct
  source 1..75: mol_type = other DNA
tcagtacactcaactggttgcgcgccgcgtgcgtgagctgggtgtttactgcgaactgtgggcgtgggatgtgac

SEQ ID NO: 555674 - DNA, 75 bp, synthetic construct
  source 1..75: mol_type = other DNA
gaacaacaacccgcaacatccgatttccaaaccagatgattgaacaaattaacatcgctcttgatctgaaaggtt

SEQ ID NO: 555675 - DNA, 75 bp, synthetic construct
  source 1..75: mol_type = other DNA
ctcactgattcatgcgctggcgctaaccaagcgcgcagcggcaaaagttaatgaagatttaggcttgctgtccga

SEQ ID NO: 555676 - DNA, 75 bp, synthetic construct
  source 1..75: mol_type = other DNA
cacacttacccgacgttatggcgtcagtctcattcatctggatgccagcgctgaatgcctgccgggtttacccac

SEQ ID NO: 555677 - DNA, 75 bp, synthetic construct
  source 1..75: mol_type = other DNA
gaattcgaccaacagtcaacctgcacaccaccaccgtttacggcccttgccggcatacgctgcagtaccgcacat

SEQ ID NO: 555678 - DNA, 75 bp, synthetic construct
  source 1..75: mol_type = other DNA
catacgctgcagtaccgcacatatcacggaaacagacaacgcctggttgtactcgctgtcacaccagaccagtga

SEQ ID NO: 555679 - DNA, 75 bp, synthetic construct
  source 1..75: mol_type = other DNA
ctccgccatttgcaacccttgccggcatacgctgcagtaccgcacatatcacggaaacggacaactgtcagcgcc

SEQ ID NO: 555680 - DNA, 75 bp, synthetic construct
  source 1..75: mol_type = other DNA
ctactcccttcgtgttgttgatgaatctgaccggaccgcaactgacagcatgccaccctccgctgccctgagcgg

SEQ ID NO: 555681 - DNA, 75 bp, synthetic construct
  source 1..75: mol_type = other DNA
gacgtcgatggtgttaatcttgctgaactgattaacgtggcctgcgacaatggctactcccttcgtgttgttgat

SEQ ID NO: 555682 - DNA, 75 bp, synthetic construct
  source 1..75: mol_type = other DNA
gtaccgatgcatggtcgtatccggttctgcggcttaaacgactgggcctgtccagaacgttccgtcgtctggttg

SEQ ID NO: 555683 - DNA, 75 bp, synthetic construct
  source 1..75: mol_type = other DNA
cgctgcagcaccgcacatatcacggaaacagacaacgcctggctgtactcactgtcgcatcagaccagtgacgtt

SEQ ID NO: 555684 - DNA, 75 bp, synthetic construct
  source 1..75: mol_type = other DNA
caacccttgccggcatacgttgcagtaccgcacatatcacggaaacggacaacgcctggttgtactcgctgtcac

SEQ ID NO: 555685 - DNA, 75 bp, synthetic construct
  source 1..75: mol_type = other DNA
caacccttgcctgcatacggtgcagtaccgcacatatcacggaaacggacaacgcctggttgtactcgctgtcac

SEQ ID NO: 555686 - DNA, 75 bp, synthetic construct
  source 1..75: mol_type = other DNA
cgttatggcgtcagtctcattcatctggatgccagtgccggatgtctgccgggtttacccactttcgactggtaa

SEQ ID NO: 555687 - DNA, 75 bp, synthetic construct
  source 1..75: mol_type = other DNA
caactgactgacgcgctggcgcaggtcaccgatcccatcgacattgtgttttgttgtctcggcaccacgcggcga

SEQ ID NO: 555688 - DNA, 75 bp, synthetic construct
  source 1..75: mol_type = other DNA
atgaaactgactctgacgctggaagcagacagcgttaacgtggtctgcgacaatggccactcccttcgtgttgtt

SEQ ID NO: 555689 - DNA, 75 bp, synthetic construct
  source 1..75: mol_type = other DNA
atgatgaaactggccctgacactggaagccgacagcgttaacgtacaggcactgaacatggggcgaattgtcgtt

SEQ ID NO: 555690 - DNA, 75 bp, synthetic construct
  source 1..75: mol_type = other DNA
atctgtcagtgcgaagccctgtggacgccggcgaaaattatcgacgatgctgtagcccgtatccgcgagcaggta

SEQ ID NO: 555691 - DNA, 75 bp, synthetic construct
  source 1..75: mol_type = other DNA
cctcggtcgcgtttccaaccgcattatcaatgaagtgaacggtatttcccgcgtggtgtatgacatcagcggcaa

SEQ ID NO: 555692 - DNA, 75 bp, synthetic construct
  source 1..75: mol_type = other DNA
aaatcatcgggcgcgttttcgttgaagtattcgatgaagaagcgctgaaactggaagacgtgaagtggctggcgc

SEQ ID NO: 555693 - DNA, 75 bp, synthetic construct
  source 1..75: mol_type = other DNA
gcatgccaccctccgctgccctgagcggtatacgctgcagcaccgcacatatcacggaaacagacaacgcctggt

SEQ ID NO: 555694 - DNA, 75 bp, synthetic construct
  source 1..75: mol_type = other DNA
caacctgcacactaccaccgtttgcaacccttgccggcatacgctgcagtaccgcacatatcacggaaaaggata

SEQ ID NO: 555695 - DNA, 75 bp, synthetic construct
  source 1..75: mol_type = other DNA
gtactcgctgtcacaccagaccagtgacttcggtgaatcagaatggattcattttaccggcagcggctatctgtt

SEQ ID NO: 555696 - DNA, 75 bp, synthetic construct
  source 1..75: mol_type = other DNA
tttaccgggtccggttatctgttacgtactgatgcgtggtcgtacccggttctgcgacttaaacgcctgggcctg

SEQ ID NO: 555697 - DNA, 75 bp, synthetic construct
  source 1..75: mol_type = other DNA
tttacaggtagcggatatctgttacgtaccgatgcgtggtcatacccggttctgcggcttaagcgcctgggcctg

SEQ ID NO: 555698 - DNA, 75 bp, synthetic construct
  source 1..75: mol_type = other DNA
actgaacatggggcgaattgtcgttgacattgatggtgttaatctcgctgaactgattaacatggtctgcgataa

SEQ ID NO: 555699 - DNA, 75 bp, synthetic construct
  source 1..75: mol_type = other DNA
gcccggaaagtactactgaagaaaacagcccgcgtgcgccgcagtatgtttttgaagcaggcgtaccggtattcg

SEQ ID NO: 555700 - DNA, 75 bp, synthetic construct
  source 1..75: mol_type = other DNA
tttacaggtagcggatatctgttacgtaccgatgcgtggtcgtacccggttctgcggcttaaacgcctgggcctg

SEQ ID NO: 555701 - DNA, 75 bp, synthetic construct
  source 1..75: mol_type = other DNA
cggtcactcccttcgtgttgttgatgaatctgaccgagcctcaacagactgcacgccaccatttgctgccctgac

SEQ ID NO: 555702 - DNA, 75 bp, synthetic construct
  source 1..75: mol_type = other DNA
cgtcttgccggtctgtatggtgtgaaacgaaccctcgatttaccacacgccgaaccgcttccgcgtatatgctaa

SEQ ID NO: 555703 - DNA, 75 bp, synthetic construct
  source 1..75: mol_type = other DNA
gtaaaggtgttcgtcttgccggtctgtatggcgtgaaacgaaccctcgatctaccgcacgccgaaccgcttccgc

SEQ ID NO: 555704 - DNA, 75 bp, synthetic construct
  source 1..75: mol_type = other DNA
agcgctgcgtgatgccacccgtggtggtgtgaacgcggtagttcatgagttcgcggcagcctgcggttgtggtat

SEQ ID NO: 555705 - DNA, 75 bp, synthetic construct
  source 1..75: mol_type = other DNA
aattgctggggacgccgttttcatctgcgacgagtgtgtggatgcgtgcaacaacgttatccgggaagaggactt

SEQ ID NO: 555706 - DNA, 75 bp, synthetic construct
  source 1..75: mol_type = other DNA
tgaactttcagaagcggcactgcctgttaaacctgccgtgcgcggcgtttgcgaactgctgggactggacgccct

SEQ ID NO: 555707 - DNA, 75 bp, synthetic construct
  source 1..75: mol_type = other DNA
ttatctctcctgtggttttatccttgaagaagggttgccgatggagacgctaaaagcggtcgtcaccagcatggc

SEQ ID NO: 555708 - DNA, 75 bp, synthetic construct
  source 1..75: mol_type = other DNA
tcagatattgaaatcacgccaagtggctattcttgctgccgatggcgtttgtggggacgctattgataatattat

SEQ ID NO: 555709 - DNA, 75 bp, synthetic construct
  source 1..75: mol_type = other DNA
tctctgatatgggatgaagctcaattgctgacaggctgcgacccagattttcatcgccgtgagttgtgggagtcc

SEQ ID NO: 555710 - DNA, 75 bp, synthetic construct
  source 1..75: mol_type = other DNA
aactcaccgatattattcgccagtatttcagccaggaaaaaaatgaggaggagaccattcaggcgctgaatcacc

SEQ ID NO: 555711 - DNA, 75 bp, synthetic construct
  source 1..75: mol_type = other DNA
attaatcaacagcctgtttatggaagcctttgccaatccgtggctggcggaacaggaagaccaggcacgtcttga

SEQ ID NO: 555712 - DNA, 75 bp, synthetic construct
  source 1..75: mol_type = other DNA
tgaactttcagaagcggcactgcctgttaaacctgccgtgcgtggcgtttgcgaattgctgggactggacgccct

SEQ ID NO: 555713 - DNA, 75 bp, synthetic construct
  source 1..75: mol_type = other DNA
gtgaaaccgaacaggtagcattttgtcctggtaacatcgttccaggtatagacttttctgatgacccactacttc

SEQ ID NO: 555714 - DNA, 75 bp, synthetic construct
  source 1..75: mol_type = other DNA
gtgaggtgaacgttcgcggcgtgcatccgccactccaccttcattttgatttgcctgccggtgatgaaaccggca

SEQ ID NO: 555715 - DNA, 75 bp, synthetic construct
  source 1..75: mol_type = other DNA
cgattccagcgaagcgaaaccggggatggactcactggcacctgaagacggatctcatcgtccagcggctgaacc

SEQ ID NO: 555716 - DNA, 75 bp, synthetic construct
  source 1..75: mol_type = other DNA
acctgatggaagcctacaaacaccttaaaccgattgcgctggcgggagacgcgcgtaagtttaaagcaacaatca

SEQ ID NO: 555717 - DNA, 75 bp, synthetic construct
  source 1..75: mol_type = other DNA
ccgaaaacgaacaggcagctttccatcctggtcatattgtccccggtctggatttcaccaacgatccgctgttgc

SEQ ID NO: 555718 - DNA, 75 bp, synthetic construct
  source 1..75: mol_type = other DNA
taattgaagcccgtaagcacattggcctgactgaaataaaaggcgctaaacacaaccctgaaatcgttcagttct

SEQ ID NO: 555719 - DNA, 75 bp, synthetic construct
  source 1..75: mol_type = other DNA
ttattgaagcccgtaaaaatattggagtcaccgaaataaaaggagcgaaacacaatcctgagatcgtccagttct

SEQ ID NO: 555720 - DNA, 75 bp, synthetic construct
  source 1..75: mol_type = other DNA
aggatgcgcataaattccccgattttgttcatgcggtaaaaccagaaccgcactgggcaattccacaagggcaaa

SEQ ID NO: 555721 - DNA, 75 bp, synthetic construct
  source 1..75: mol_type = other DNA
ccttggtctgtttgtgcataaagacggggcgaagctggtagccaaccagggagatattgagattcaggctcagca

SEQ ID NO: 555722 - DNA, 75 bp, synthetic construct
  source 1..75: mol_type = other DNA
ccttcctgacggcaggtgacgctgaaagcccggagaccggggcatattttgcccgtctgcgtcacgaacgcattc

SEQ ID NO: 555723 - DNA, 75 bp, synthetic construct
  source 1..75: mol_type = other DNA
gctgaagccggcgtcatttactttccagaccccggagtctgacggaacaccggccctgccgctcaggacggtatt

SEQ ID NO: 555724 - DNA, 75 bp, synthetic construct
  source 1..75: mol_type = other DNA
gacttcctgtcagatccgaacaaaattaccccggtgttcgtgcgtttctctaccgttcagggtggcgcaggttcg

SEQ ID NO: 555725 - DNA, 75 bp, synthetic construct
  source 1..75: mol_type = other DNA
ccgaatttccatgaaattccgattaaccgcccgacctgcccttaccataatttccagcgtgacggcatgcatcgt

SEQ ID NO: 555726 - DNA, 75 bp, synthetic construct
  source 1..75: mol_type = other DNA
atgaaaaaccgtaaagcaatacgacttcttttacagcgacctgtgtgtatggtgtcgctggttatcagcaaccat

SEQ ID NO: 555727 - DNA, 75 bp, synthetic construct
  source 1..75: mol_type = other DNA
tggtaatgcgctggtggatgaactggacattttgccgaaggaaaaagccagaacggcgtggcgcaagataattgc

SEQ ID NO: 555728 - DNA, 75 bp, synthetic construct
  source 1..75: mol_type = other DNA
atgcagagtatgaagccctgtaccgtgacattctgcctcgaactggacctggtactgtggctgattaaagccgat

SEQ ID NO: 555729 - DNA, 75 bp, synthetic construct
  source 1..75: mol_type = other DNA
gtgcggatttgagcataatactgaacaccacgccggatcatctcaatcgtgtattatctgctcttgaacgtaagc

SEQ ID NO: 555730 - DNA, 75 bp, synthetic construct
  source 1..75: mol_type = other DNA
atcaaccattatcggtcttgaaggatgtaggtgtagagcttctaaaatcctacaccaaaaagaaatttggtcttt

SEQ ID NO: 555731 - DNA, 75 bp, synthetic construct
  source 1..75: mol_type = other DNA
cctggtgtacccgtctgttttaccgtcccggagaaatcagtctgtacagactgagtacaggcaatggcatctggc

SEQ ID NO: 555732 - DNA, 75 bp, synthetic construct
  source 1..75: mol_type = other DNA
ctgagtacaggcaatagcatctggccatccgtctgtgaccggaacggttacgcgtacggctgtccggaatttcag

SEQ ID NO: 555733 - DNA, 75 bp, synthetic construct
  source 1..75: mol_type = other DNA
ttactttgacaaggagctggcctggtacactgatcgcatgagcaaaagcgagccagccccgattacaccgccgaa

SEQ ID NO: 555734 - DNA, 75 bp, synthetic construct
  source 1..75: mol_type = other DNA
tttttctttgggtacagtatcaatgatgaaaacataaaggcaattctctctgatatagatgaaatcatcgctccc

SEQ ID NO: 555735 - DNA, 75 bp, synthetic construct
  source 1..75: mol_type = other DNA
acagtaatatgcaaaccagtacagtaaccattctaatggccacctacaatggcgaggccttcatcaaaaatcaga

SEQ ID NO: 555736 - DNA, 75 bp, synthetic construct
  source 1..75: mol_type = other DNA
gcacaggtgagattgatttttgtggtatatcacataatcatgctacgagattgaaagatttcttatttttcaatg

SEQ ID NO: 555737 - DNA, 75 bp, synthetic construct
  source 1..75: mol_type = other DNA
ggttacataagtaaccactttcttgaaattggggatcctaagaaactaggacttgtaattggtattaatggaatt

SEQ ID NO: 555738 - DNA, 75 bp, synthetic construct
  source 1..75: mol_type = other DNA
atttggtttcctttagtccagaatgtgaaggtacaggttcacaccagaaagagattttgattggtgttggtgaaa

SEQ ID NO: 555739 - DNA, 75 bp, synthetic construct
  source 1..75: mol_type = other DNA
atctcgttatcctgaacagtatttcaatggaaaaagctctaaagatatatatatcaagcatgagattgcaacatt

SEQ ID NO: 555740 - DNA, 75 bp, synthetic construct
  source 1..75: mol_type = other DNA
ctgagtacaggcaatgacatctggccatccgtctgtgaccggaacggttacgcgtacggctgtccggaatttcag

SEQ ID NO: 555741 - DNA, 75 bp, synthetic construct
  source 1..75: mol_type = other DNA
ctgtccttcggtgtctatcctgacgtctcccttgcagaagccagaaccaaacgcgacgatgcaaggaaaattatc

SEQ ID NO: 555742 - DNA, 75 bp, synthetic construct
  source 1..75: mol_type = other DNA
agggcaaccggtcatggttttcgtcacaccatgagcaccattctgcacgaacagggctttaattcttcctggatt

SEQ ID NO: 555743 - DNA, 75 bp, synthetic construct
  source 1..75: mol_type = other DNA
agtggtaagttaagttacacctctgttgtaaagcacgggaaggctattaaagttattgatacttcagagcttatt

SEQ ID NO: 555744 - DNA, 75 bp, synthetic construct
  source 1..75: mol_type = other DNA
gagcccgctactggcggcttaaataccggatagcaggaaaagagaaaaaactggccctcggcgtctatcccgacg

SEQ ID NO: 555745 - DNA, 75 bp, synthetic construct
  source 1..75: mol_type = other DNA
cagtatctcgatggtcgccgtgaaatgatgcaatggtatgctgactacattgattcacttcctgagcagacatga

SEQ ID NO: 555746 - DNA, 75 bp, synthetic construct
  source 1..75: mol_type = other DNA
gaagctcgctgagtatcatggtagtcctgttactcgtatggcaacaaatctgttacttctgacaggcctcagaac

SEQ ID NO: 555747 - DNA, 75 bp, synthetic construct
  source 1..75: mol_type = other DNA
aaccgtgttccccctggcgttgatgaagccgcctatgtcaaagcaggcttcctggctgctgtcgccaaaggtgaa

SEQ ID NO: 555748 - DNA, 75 bp, synthetic construct
  source 1..75: mol_type = other DNA
caacgatgtggctatcaacatgggaggagcttccggaaactttgaactgaacgtttatcgtccgatgatcatcca

SEQ ID NO: 555749 - DNA, 75 bp, synthetic construct
  source 1..75: mol_type = other DNA
tggccatccgtctgtgaccggaacggttacgcatacggctgtccggaatttcagccgaatatcattcatccctga

SEQ ID NO: 555750 - DNA, 75 bp, synthetic construct
  source 1..75: mol_type = other DNA
tcatcgatactgtaaaatatgatgtaaaaagtgacgcaggatctacaggtgttaacagcgttggtttacatgatt

SEQ ID NO: 555751 - DNA, 75 bp, synthetic construct
  source 1..75: mol_type = other DNA
gctgttaaggctcgagatgagcatattgattcccttcgtcaggctatgcagcttctggagcacaagcgcgagcct

SEQ ID NO: 555752 - DNA, 75 bp, synthetic construct
  source 1..75: mol_type = other DNA
atgctgaaaaacgcccgtgaaggcatcgagccagatcagcctggtgttgttggcccgatcaaacagattgaagct

SEQ ID NO: 555753 - DNA, 75 bp, synthetic construct
  source 1..75: mol_type = other DNA
cagacttatcaggtgctgccagctccgggcgcggccccggctgaaccgctgccgccgggggagccaacgctttaa

SEQ ID NO: 555754 - DNA, 75 bp, synthetic construct
  source 1..75: mol_type = other DNA
acacctcgcgtaaagagttgatcgaccagttgcgcaccgttgccgctacgccccctgctgaaccggtaccaaaaa

SEQ ID NO: 555755 - DNA, 75 bp, synthetic construct
  source 1..75: mol_type = other DNA
cagacttatcaggtgctgcctgctccgggcgcgaccccggctgaaccgttaccgccgggggagccaacgctttaa

SEQ ID NO: 555756 - DNA, 75 bp, synthetic construct
  source 1..75: mol_type = other DNA
cgctggaagcaggtttactggtgaccgcactggacgggctgttctggtctggcagtcagcgtattgcggctgatg

SEQ ID NO: 555757 - DNA, 75 bp, synthetic construct
  source 1..75: mol_type = other DNA
tgaaagcgccccgtgaacggctgaagtatgcactggaggcgggtttactggtgactgcactggacggcctgttct

SEQ ID NO: 555758 - DNA, 75 bp, synthetic construct
  source 1..75: mol_type = other DNA
atgcggtggatcctgttcatcctcatctgcctgctgggcgcacctgcccacgcggtgtccatacccggcgtaaca

SEQ ID NO: 555759 - DNA, 75 bp, synthetic construct
  source 1..75: mol_type = other DNA
ttggcatggttagtgcgcgggcgttacgaattgcttcaggtagtgaaagcgtgggcataatgtcgggagataaca

SEQ ID NO: 555760 - DNA, 75 bp, synthetic construct
  source 1..75: mol_type = other DNA
ttcggtgacgtccaggcggcgttgatatttgataaaacactgcccgttaacagcccgtccggtatgagtgacagt

SEQ ID NO: 555761 - DNA, 75 bp, synthetic construct
  source 1..75: mol_type = other DNA
acctgtgtcggtttttctgcaagtcgcaaggatgccctgcaagttgtactgaagggcgttccttacagtgaagtt

SEQ ID NO: 555762 - DNA, 75 bp, synthetic construct
  source 1..75: mol_type = other DNA
caccatcgctttccaacaaagtttgtttctcaacgcctttgccctgattgaatttttcaaagccgtactacgcct

SEQ ID NO: 555763 - DNA, 75 bp, synthetic construct
  source 1..75: mol_type = other DNA
cactgccgctgtatcgcaaaatgggccagtgggcgcggcaaaaaaatcgcgaacgcagcaactggctgcagcttc

SEQ ID NO: 555764 - DNA, 75 bp, synthetic construct
  source 1..75: mol_type = other DNA
atgaacgcaaacgcaaaatatcctgcctgggtgtttgagttatatgccagatacttcgaactactggcaccaggt

SEQ ID NO: 555765 - DNA, 75 bp, synthetic construct
  source 1..75: mol_type = other DNA
atggcagagaaatttatcaaacacacaggcctggttgttccattggatgccgccaatgtcgacactgatgccatt

SEQ ID NO: 555766 - DNA, 75 bp, synthetic construct
  source 1..75: mol_type = other DNA
cgattgccggtcgctgtggcagcaatatcgacctggtcagccatcatgaagaggtgctggatcagaccagcggta

SEQ ID NO: 555767 - DNA, 75 bp, synthetic construct
  source 1..75: mol_type = other DNA
cgcaccatcgttacctgctggataccgatttcactgttaatgatgaactggtgaaaacaggttacgcagtgaaac

SEQ ID NO: 555768 - DNA, 75 bp, synthetic construct
  source 1..75: mol_type = other DNA
ggtggtcgaaaacggttgctataccctgaaagacaccttcgatgacaccaccatcctgggctggatgatccagac

SEQ ID NO: 555769 - DNA, 75 bp, synthetic construct
  source 1..75: mol_type = other DNA
gtgaaaaccggctacgcggtgaaaccaattgccggtcgctgtggtagcaatatcgacctcgtcagccatcatgaa

SEQ ID NO: 555770 - DNA, 75 bp, synthetic construct
  source 1..75: mol_type = other DNA
ggtggtcgaaaacggctgctatacccttaaagacacgtttgatgacaccaccattctgggctggatgatccagac

SEQ ID NO: 555771 - DNA, 75 bp, synthetic construct
  source 1..75: mol_type = other DNA
tgctggtctttgaaccgctttggacggtgatccctggcaacaaagcgattctgccaattctctggtcgctgttcc

SEQ ID NO: 555772 - DNA, 75 bp, synthetic construct
  source 1..75: mol_type = other DNA
tcatatatagaacttataccacctgctgagatcagtgaagatatagtgaacatgtacaattttttggtggagaaa

SEQ ID NO: 555773 - DNA, 75 bp, synthetic construct
  source 1..75: mol_type = other DNA
tgcgcagggtactgcatgaggtcagcccttttgcactggagcctgtggactgtgtgctgtgggtgaaggcggatg

SEQ ID NO: 555774 - DNA, 75 bp, synthetic construct
  source 1..75: mol_type = other DNA
ctggacagcatcggcctgaccttgcagcacgacgacgccattgcgtcttatgaagagaagcaaccggaatttatg

SEQ ID NO: 555775 - DNA, 75 bp, synthetic construct
  source 1..75: mol_type = other DNA
ggttgcggagtgcgtgattaataaattatgtccgtcgcatactgttgtcctttttgcatatccggatgagtctgg

SEQ ID NO: 555776 - DNA, 75 bp, synthetic construct
  source 1..75: mol_type = other DNA
gtagttcccgccagttaacgactaaacagaccggtgatgcgtgggaagcctccgcgcgtcgctggctggaaggca

SEQ ID NO: 555777 - DNA, 75 bp, synthetic construct
  source 1..75: mol_type = other DNA
attttttatgccttagcaaagaaaaaaggacttgatgtatcaaagttagatggcctccatgcaataaaacagtcc

SEQ ID NO: 555778 - DNA, 75 bp, synthetic construct
  source 1..75: mol_type = other DNA
ctggacagcatcggcctgaccctgcagcacgacgacgctattgcgtcttatgaagagaagcaaccggcgtttatg

SEQ ID NO: 555779 - DNA, 75 bp, synthetic construct
  source 1..75: mol_type = other DNA
tcgaatggtaatcagtaatacaatgattcaagtatatgataacaatggtacgttacgtgtgcgtatgggactatg

SEQ ID NO: 555780 - DNA, 75 bp, synthetic construct
  source 1..75: mol_type = other DNA
gtaacgttcgcgggtactatgtctattataaactcagtacagcccaaaactggacaattgcaggtcaaacaccac

SEQ ID NO: 555781 - DNA, 75 bp, synthetic construct
  source 1..75: mol_type = other DNA
acaaaagaactagctaaaatatatgcgggtccgaaatggacagataaattcttaggtaagggtgttgtatcaatc

SEQ ID NO: 555782 - DNA, 75 bp, synthetic construct
  source 1..75: mol_type = other DNA
tcggccttacgagtaacagactaacgttaacgggattagtgccgacatataactttgcattaccttccgtaactg

SEQ ID NO: 555783 - DNA, 75 bp, synthetic construct
  source 1..75: mol_type = other DNA
atgtcagccaaagcaactaaagccgaagtaaacgcctcttatagtctaagtgtgaatgctaacggcacggtggca

SEQ ID NO: 555784 - DNA, 75 bp, synthetic construct
  source 1..75: mol_type = other DNA
ctggcgttaaattgaaaaatgctacttccggtctattaattacaaatgagactgattttaatattatatgggata

SEQ ID NO: 555785 - DNA, 75 bp, synthetic construct
  source 1..75: mol_type = other DNA
ctaataccatttggggtatgggcttagatcctgcattaattgatctcgatagcttccgtacaacagcacagtact

SEQ ID NO: 555786 - DNA, 75 bp, synthetic construct
  source 1..75: mol_type = other DNA
agttactttaggtagtttattgtcaaaatatgaagtacgtgcaccagttatgctaattactcgcggtactggcac

SEQ ID NO: 555787 - DNA, 75 bp, synthetic construct
  source 1..75: mol_type = other DNA
aaaacaaacaatgtggattagtacaaggcgtatcattcactggtggttttggtaatttatttgcttcatggacac

SEQ ID NO: 555788 - DNA, 75 bp, synthetic construct
  source 1..75: mol_type = other DNA
tagcttcgtattaacgggcgtaatcaataactggtataatgtcaaagacgatagctcacagtatttcttcagtga

SEQ ID NO: 555789 - DNA, 75 bp, synthetic construct
  source 1..75: mol_type = other DNA
gtgctctaataactgccgtgatggttgtagctgccgtatatacgggtggggcaacattaacagtagcgacatatt

SEQ ID NO: 555790 - DNA, 75 bp, synthetic construct
  source 1..75: mol_type = other DNA
tcatttctaataaaccagaatttgatagctttgcattagctgatggcgaatatcaagttaaagttggattctatg

SEQ ID NO: 555791 - DNA, 75 bp, synthetic construct
  source 1..75: mol_type = other DNA
ctcattttctgattacttcaagtactacaccattaatatctataacggtagtgatttaatcgatacattctatac

SEQ ID NO: 555792 - DNA, 75 bp, synthetic construct
  source 1..75: mol_type = other DNA
ccaattggtaaagtcgctggcgtactgctggcaacggtttgctacctggctgtagggccgttgttcgccacgccg

SEQ ID NO: 555793 - DNA, 75 bp, synthetic construct
  source 1..75: mol_type = other DNA
cagaagccgcagaggaaaaaacgggtgtgcagttatcctgcccggtggtgcgtggcgaacgcgttattgactatg

SEQ ID NO: 555794 - DNA, 75 bp, synthetic construct
  source 1..75: mol_type = other DNA
actcagggcgcgcagcttggcggtgtcggggtccgctggaatatttggaccggcgagacgcactacgacgcctgg

SEQ ID NO: 555795 - DNA, 75 bp, synthetic construct
  source 1..75: mol_type = other DNA
cttactggacgatgagctggcctataagatgatgagccaggcgaataacccttatggggacggcaaaaccagcca

SEQ ID NO: 555796 - DNA, 75 bp, synthetic construct
  source 1..75: mol_type = other DNA
ggcggaacacttacgagcttcacctgattccggcgcccagctattcagttgcgcccgccgccgtccctttccact

SEQ ID NO: 555797 - DNA, 75 bp, synthetic construct
  source 1..75: mol_type = other DNA
gggctgtgagcggtgcctatcaggccggcggacgctttactgcattctatcgccttggggggggggatgcagtac

SEQ ID NO: 555798 - DNA, 75 bp, synthetic construct
  source 1..75: mol_type = other DNA
gtctggtcaatggtaatttaggtgcatacgaaactgatacaggtgattttaatattgcgtgggatagtcagaaga

SEQ ID NO: 555799 - DNA, 75 bp, synthetic construct
  source 1..75: mol_type = other DNA
atggtactacctacatcaaaacatccatgattcaggcggcaagtatcggtactggttacatcgcagatgcagcga

SEQ ID NO: 555800 - DNA, 75 bp, synthetic construct
  source 1..75: mol_type = other DNA
cacagcacaatcacaggcagttacacagctacgtagtgatgtgaacgggcagattgccacggttaaccagcagat

SEQ ID NO: 555801 - DNA, 75 bp, synthetic construct
  source 1..75: mol_type = other DNA
attgccaataagaataccagtactgttatcagtgcatcagaggcacgtaccaatgataaaatcactgccagtgag

SEQ ID NO: 555802 - DNA, 75 bp, synthetic construct
  source 1..75: mol_type = other DNA
tacgttacaagaactacgaaaaacggcccgatccctccagccaggcagtgatgttttgcctgatggacgtttcgg

SEQ ID NO: 555803 - DNA, 75 bp, synthetic construct
  source 1..75: mol_type = other DNA
ggtcagggtcaagccagccaagacggtgaaggtcaggatgaatttgtcttccagatttcgaaagacgaatatctc

SEQ ID NO: 555804 - DNA, 75 bp, synthetic construct
  source 1..75: mol_type = other DNA
tcatgggattatccggttcgggtaaatctacaatggtacgtcttctcaatcgcctgattgaacccacccgtggac

SEQ ID NO: 555805 - DNA, 75 bp, synthetic construct
  source 1..75: mol_type = other DNA
aagataccgcggtaatggagaagtttaatattccccgacagatgctttttgatgtgcaaatgccgggcactgttc

SEQ ID NO: 555806 - DNA, 75 bp, synthetic construct
  source 1..75: mol_type = other DNA
cgagatttccaccagcgactactccaccttaatatcgtcagtgagaatggacgctggcggcttgacggaaaacgc

SEQ ID NO: 555807 - DNA, 75 bp, synthetic construct
  source 1..75: mol_type = other DNA
tgttaagtcaggtggaacatatgaggatatagtcgatgagtatcgtaaccagcttggtgttgaagcccgagctct

SEQ ID NO: 555808 - DNA, 75 bp, synthetic construct
  source 1..75: mol_type = other DNA
cgttaattcaggatgccaaagcacaggatctttcaccggaagatttgctcaacaaaaaagcgtcttgcgtgccac

SEQ ID NO: 555809 - DNA, 75 bp, synthetic construct
  source 1..75: mol_type = other DNA
aggagttaaccaaacatactgatgtaatcctgaaaaaatcgtatgaagtgatgcatggggaattggggaatgcgg

SEQ ID NO: 555810 - DNA, 75 bp, synthetic construct
  source 1..75: mol_type = other DNA
gatcctgaaaaaatcgtatgaagtgatgcatggggaattggggaatgaagattcgatccagagctggtcgaatgc

SEQ ID NO: 555811 - DNA, 75 bp, synthetic construct
  source 1..75: mol_type = other DNA
agctaaacctgactttgtagcgttaaaaacattgttccgccactggcaacagggaatgcataacgtcgcgtggaa

SEQ ID NO: 555812 - DNA, 75 bp, synthetic construct
  source 1..75: mol_type = other DNA
acgaactggtgacacaggcaaaatcgcgcgggattcgtatcattctcgatatggtgtttaaccatacctctaccc

SEQ ID NO: 555813 - DNA, 75 bp, synthetic construct
  source 1..75: mol_type = other DNA
ttcccaatgaccttcgcattgcacagcacgtttaaccaatcctcaagttctttggcttcccttctgggctttagc

SEQ ID NO: 555814 - DNA, 75 bp, synthetic construct
  source 1..75: mol_type = other DNA
tcctttccggcgatccgacaggttacggggcggcgacctcgcggtttttcactatttatgaaaatttttcaggga

SEQ ID NO: 555815 - DNA, 75 bp, synthetic construct
  source 1..75: mol_type = other DNA
ttttaacccgcatgtcaccgttagcgccgcgcattgggcaatactggctgcaactgcccgccacatttggccccc

SEQ ID NO: 555816 - DNA, 75 bp, synthetic construct
  source 1..75: mol_type = other DNA
gattaccaggatctgctgccaaacagccctgtattgtggtgctatcgccgtgaatggaaggggcaaaccttgttg

SEQ ID NO: 555817 - DNA, 75 bp, synthetic construct
  source 1..75: mol_type = other DNA
atggagcgaagaggctgcggtaatggataagtttaatatcccccgtcatatgctgtttgatgtgcaaatgcctgg

SEQ ID NO: 555818 - DNA, 75 bp, synthetic construct
  source 1..75: mol_type = other DNA
gggaacaaacctcaggtgccattactgcgcttctgaaccttgcccccaaaacagccaggcggctggatcatgacg

SEQ ID NO: 555819 - DNA, 75 bp, synthetic construct
  source 1..75: mol_type = other DNA
tttgcgtcaggcggggatccgcatcgttatgctcaccggggataaccagcttaccgctgaagcagtcgcacggaa

SEQ ID NO: 555820 - DNA, 75 bp, synthetic construct
  source 1..75: mol_type = other DNA
tatgctgcgcaaagcgttcccagcgaaagccttatggctgacaggggcgatggtggcagtgtctggtgtgattgt

SEQ ID NO: 555821 - DNA, 75 bp, synthetic construct
  source 1..75: mol_type = other DNA
gtcatgctgaccggggataaccagcttaccgctgaagcggtggcgcataagctcggaatagaagaggttgaagcc

SEQ ID NO: 555822 - DNA, 75 bp, synthetic construct
  source 1..75: mol_type = other DNA
aaggcgctaccgttatctatgtggcgacagacgggcagcttgccggcctgatcgctatttctgatcctctgaaag

SEQ ID NO: 555823 - DNA, 75 bp, synthetic construct
  source 1..75: mol_type = other DNA
ggttgttgctggcgtttccggttctgatactcgaaatgggttctcatctgtttcccgctttgaggaatacagtac

SEQ ID NO: 555824 - DNA, 75 bp, synthetic construct
  source 1..75: mol_type = other DNA
gctttcgtgacgcaatggccagcctgtcggcagcggtaaatattatcaccaccgagggcgacgccggacaatgcg

SEQ ID NO: 555825 - DNA, 63 bp, synthetic construct
  source 1..63: mol_type = other DNA
atgaaaatgaaacaacagtatcagacccgctacgaatggctccacgaaagctaccagaaatgg

SEQ ID NO: 555826 - DNA, 75 bp, synthetic construct
  source 1..75: mol_type = other DNA
ttgcaggagaatacgtagaaaatgctagtggggcgaagctggagcgcatagagcttatgcgactcttgtctgaag

SEQ ID NO: 555827 - DNA, 75 bp, synthetic construct
  source 1..75: mol_type = other DNA
aaagccttatggctgacgggggcgatggtggcagtgtctggtgtgattgtcggcgggctggcgctgttggtttga

SEQ ID NO: 555828 - DNA, 75 bp, synthetic construct
  source 1..75: mol_type = other DNA
caaagcgttcccggcgaaagccttatggctgacgggggcgatggtggcagtgtctggtgtgattgtcggcgggct

SEQ ID NO: 555829 - DNA, 75 bp, synthetic construct
  source 1..75: mol_type = other DNA
gtttgccgtcgttagttatgctgcgcaaagcgtttccggcgaaggcattatggctgacgggagcgatggtggcgg

SEQ ID NO: 555830 - DNA, 75 bp, synthetic construct
  source 1..75: mol_type = other DNA
ctaccacgattacagcatcgaatatgaaacgattaaaatcggcggagggaatatccttcaaccaacggagcgttc

SEQ ID NO: 555831 - DNA, 75 bp, synthetic construct
  source 1..75: mol_type = other DNA
ggaataaaatggaaaataaaattgattacttaaaatttggagtgaatgaagtattaccttatctttttaaaggaa

SEQ ID NO: 555832 - DNA, 75 bp, synthetic construct
  source 1..75: mol_type = other DNA
gtattaccttatctttttaaaggaaacaagaaagttttttcactttgtgtattaattagtttggcattacaaaaa

SEQ ID NO: 555833 - DNA, 75 bp, synthetic construct
  source 1..75: mol_type = other DNA
tgaaggattttactgcgcgctactgcgatgcctggcatgaacagtataaaagctggccgttaagtgaggagctgt

SEQ ID NO: 555834 - DNA, 75 bp, synthetic construct
  source 1..75: mol_type = other DNA
gaaatcaagtcattgataataatgagttgcaggcttgtgaacctcaagcgatatatcagacaaactccatatcaa

SEQ ID NO: 555835 - DNA, 75 bp, synthetic construct
  source 1..75: mol_type = other DNA
attcaggaatacgtcggagaatcttattttagctatcttgcaaacctgcccgatttagttgttttgatggatgaa

SEQ ID NO: 555836 - DNA, 75 bp, synthetic construct
  source 1..75: mol_type = other DNA
gtaaaacgggtgatctttttggcagcgaaaccgctccacacattaatatcttcaatatttctaaaatcaacgcgc

SEQ ID NO: 555837 - DNA, 75 bp, synthetic construct
  source 1..75: mol_type = other DNA
ctgtacttaactgcctgtatctggcggccgggctgtgggactggctggagaagcatttacctgtttttaaggcgt

SEQ ID NO: 555838 - DNA, 75 bp, synthetic construct
  source 1..75: mol_type = other DNA
gtgaaactgcttaatctggaacaagcaggcaaaccggttgcagacgcagcttccatgcagcgttacagcaccgag

SEQ ID NO: 555839 - DNA, 75 bp, synthetic construct
  source 1..75: mol_type = other DNA
gaacgctgcgcaaaatcgtgcctccaccactatggacgtacaaagtgcagctgatgacaccggtttaccaatgct

SEQ ID NO: 555840 - DNA, 75 bp, synthetic construct
  source 1..75: mol_type = other DNA
gtggatacagtttattatggcggcgtggatggtcatcagtgcgctgctggggctgggattctggtcgctggtggt

SEQ ID NO: 555841 - DNA, 75 bp, synthetic construct
  source 1..75: mol_type = other DNA
atttggtcaattgcattctgcgcaaccagctccattctcttctgtctgtacgccagtcggccgaaaaaacggtga

SEQ ID NO: 555842 - DNA, 75 bp, synthetic construct
  source 1..75: mol_type = other DNA
tgcaccgctgatggcaccgatagttggcggctgggtgctggtgtggctgagctggcattacatcttctggatcct

SEQ ID NO: 555843 - DNA, 75 bp, synthetic construct
  source 1..75: mol_type = other DNA
atgaaaaacttaagatggattttttacccggctcgccaaagtatgtttttcagggtattcctgaactggcacaaa

SEQ ID NO: 555844 - DNA, 75 bp, synthetic construct
  source 1..75: mol_type = other DNA
tatcgagacagaaaacaaggtgataggtagcgtagagttcagcaagccaacctacgtcaccgccggaccagtcac

SEQ ID NO: 555845 - DNA, 75 bp, synthetic construct
  source 1..75: mol_type = other DNA
gaacgttgaccaccgcattgtcatttaacacgaaatcattcaccagcaacctcattagcgacattcttgataaag

SEQ ID NO: 555846 - DNA, 75 bp, synthetic construct
  source 1..75: mol_type = other DNA
cagaaatacacatccgcaggctcaggtgtttctgctttggtcaacggtgccgctggcatggctacaagtgcgtta

SEQ ID NO: 555847 - DNA, 75 bp, synthetic construct
  source 1..75: mol_type = other DNA
aaaacgccttgattaccagggtatttatactccggatcaggttgagcgtgtcgccgaatctgtggtcagtgtgga

SEQ ID NO: 555848 - DNA, 75 bp, synthetic construct
  source 1..75: mol_type = other DNA
gacggtaacgctcgagtgtcagcgttgcgggaagccgtttactcatcaggtctacacaacgtattgttttagtcc

SEQ ID NO: 555849 - DNA, 75 bp, synthetic construct
  source 1..75: mol_type = other DNA
gaaacgccttgattaccagggtatctatactcctgatcaggttgagcgcgtcgccgaatccgtagtcagtgtgga

SEQ ID NO: 555850 - DNA, 75 bp, synthetic construct
  source 1..75: mol_type = other DNA
ggaagcggcaccgcttgcggagcttcatgccccggcaggaatgattttgccggtgacctccggtgattatgcaat

SEQ ID NO: 555851 - DNA, 75 bp, synthetic construct
  source 1..75: mol_type = other DNA
tggataaatccgttactgacgcggcgaatgcagcgcaaaatcgtgcttccaccaccatggacgtacaaagtgctg

SEQ ID NO: 555852 - DNA, 75 bp, synthetic construct
  source 1..75: mol_type = other DNA
cgatgaacatgccgatatgctttataaacttgccggacaaatggtgagccatttgtgcagttatcagccgcagga

SEQ ID NO: 555853 - DNA, 75 bp, synthetic construct
  source 1..75: mol_type = other DNA
gtgacggttgaagatattctggaagagattgtcggcgatttcactacgtcgatgtcgccaacacttgccgaagag

SEQ ID NO: 555854 - DNA, 75 bp, synthetic construct
  source 1..75: mol_type = other DNA
cagacttctttgccaaagatattacctaccacgattacagcatcgaatatgaaacgattaaaatcggcggaggga

SEQ ID NO: 555855 - DNA, 75 bp, synthetic construct
  source 1..75: mol_type = other DNA
gttcatcgatccgaaaggtcatacgctgactcaaagccaaaacgacgcactggtatctgtcttccaggcagcgtt

SEQ ID NO: 555856 - DNA, 75 bp, synthetic construct
  source 1..75: mol_type = other DNA
atcattgacgcttctgactttggtgcaccaacgagaagacgcagggttgtggttataggttttattcctgaagag

SEQ ID NO: 555857 - DNA, 75 bp, synthetic construct
  source 1..75: mol_type = other DNA
atataataaaacctaaattttttgttatggaaaatgttgaaggcttaatggatgagaaaaacgtatatgaattaa

SEQ ID NO: 555858 - DNA, 75 bp, synthetic construct
  source 1..75: mol_type = other DNA
aaatactgtcagggatgctataagtgatcttcctgctccgctggagaaatcaaagaacaatgatataactgattt

SEQ ID NO: 555859 - DNA, 75 bp, synthetic construct
  source 1..75: mol_type = other DNA
ttctggtacatgaacatcattctgcaatacgaatccaacgccagttcgctatcgttggggcgcttcgaccagtat

SEQ ID NO: 555860 - DNA, 75 bp, synthetic construct
  source 1..75: mol_type = other DNA
ttaatccaccacaacggaaagctcttttttccgcatggcttggatatgtatttgatggctttgattttatgatga

SEQ ID NO: 555861 - DNA, 75 bp, synthetic construct
  source 1..75: mol_type = other DNA
cagttaccctgccaatcaaagccaatgctaatggttggtatattggtggaaaccttgtgtttggtgggttaattg

SEQ ID NO: 555862 - DNA, 75 bp, synthetic construct
  source 1..75: mol_type = other DNA
accaggcacaacagccagaatagcgacaaaaggcgacctgatgatagtgatgttcagacaggagaaaacaaaatg

SEQ ID NO: 555863 - DNA, 75 bp, synthetic construct
  source 1..75: mol_type = other DNA
ctggtgtcgatccagctgatattgttctcgactacgcaggttttcgaaccctcgactctatcgtacgcacgcgca

SEQ ID NO: 555864 - DNA, 75 bp, synthetic construct
  source 1..75: mol_type = other DNA
ttaccggaaatcgattattccccggtatctggtaactggcgctcccttccttctggcctgatgtataggctcagc

SEQ ID NO: 555865 - DNA, 75 bp, synthetic construct
  source 1..75: mol_type = other DNA
gcattgagagcgacacgctgattacccctgctgccagagatgaaatccagcggcgtaatctcactgttatccatg

SEQ ID NO: 555866 - DNA, 75 bp, synthetic construct
  source 1..75: mol_type = other DNA
attgcctgtggtcgggttgacgatgtaaacctcagcttccaagaaaaacttttcgcttggttcgcaggttgtttg

SEQ ID NO: 555867 - DNA, 75 bp, synthetic construct
  source 1..75: mol_type = other DNA
cttacggagcggaatcagggctgctcaaaagcattcttatgtacaaagcattcaccggcgctctgggcgacggcg

SEQ ID NO: 555868 - DNA, 75 bp, synthetic construct
  source 1..75: mol_type = other DNA
actgttacgccactactgcaaagaagtggaaaaataccagaacccgcgcggcggttacttcacgccgggatcgta

SEQ ID NO: 555869 - DNA, 75 bp, synthetic construct
  source 1..75: mol_type = other DNA
atcattactggcggcggttcaaacagcgatctgtttatgcaaatttttgccgacgtgttcaatcttccggcaaga

SEQ ID NO: 555870 - DNA, 75 bp, synthetic construct
  source 1..75: mol_type = other DNA
actggcgacacatttcccggccgggctgccggttgtgtgtaccaccagtgataaaccggtagaagcactaggtgc

SEQ ID NO: 555871 - DNA, 75 bp, synthetic construct
  source 1..75: mol_type = other DNA
cgcaaaggtatgtggacggtgagctggctgcgtgacatgttaggcgagtcgttaattcaggatgccagggcgtag

SEQ ID NO: 555872 - DNA, 75 bp, synthetic construct
  source 1..75: mol_type = other DNA
ggactttgccggccatgactttaattttctgctggagctatgccgcgcggaaatctcagtgctgtgctgcgggga

SEQ ID NO: 555873 - DNA, 75 bp, synthetic construct
  source 1..75: mol_type = other DNA
gttattatctttctgaggaaacctatattgcccggttgcgtaaagaacttaatttggcgctttacagtcgttttc

SEQ ID NO: 555874 - DNA, 75 bp, synthetic construct
  source 1..75: mol_type = other DNA
ggtgcatacattgatgcggatgaatctcacctgggcacaggttggcggtattttaaaatatactcgtccggcgtg

SEQ ID NO: 555875 - DNA, 75 bp, synthetic construct
  source 1..75: mol_type = other DNA
tgctgaacgtgaaattcactccggcgaccctggaaggtgaagcgggattacgcaaactggccgacttcttacggg

SEQ ID NO: 555876 - DNA, 75 bp, synthetic construct
  source 1..75: mol_type = other DNA
attatgtcgccggaaatggacccttactggctgctgaaagagttggaccagttcccgacgcgtccgcaggaccgc

SEQ ID NO: 555877 - DNA, 75 bp, synthetic construct
  source 1..75: mol_type = other DNA
ctgggccaggacgcacaagggccaacggcggtactgaagtcagtcagtaagctcgataatacgctgctgtctaac

SEQ ID NO: 555878 - DNA, 75 bp, synthetic construct
  source 1..75: mol_type = other DNA
tattacagccgatgcacacgccagatgccgatactgcagaacatcctgacgacgatttatgggcatcattatgtt

SEQ ID NO: 555879 - DNA, 75 bp, synthetic construct
  source 1..75: mol_type = other DNA
tttgagaaatacggtaacgatatcgacgaggtgggtaatgactccaacttattggtagtgttttatgttcagata

SEQ ID NO: 555880 - DNA, 75 bp, synthetic construct
  source 1..75: mol_type = other DNA
caacgatgaagtggtggtgcctgcgttcctcaaccgtggagtttcgctggaagatgcgcgcgactattcagtggt

SEQ ID NO: 555881 - DNA, 75 bp, synthetic construct
  source 1..75: mol_type = other DNA
tcgcggtgactggcagcttctgatgcataactatgaagaagcgtcaccacaaccatgcgccatgacattacggcc

SEQ ID NO: 555882 - DNA, 75 bp, synthetic construct
  source 1..75: mol_type = other DNA
ctatcagtatatcattcaggcagatttaacaaatgatgtatggagttacgcagatacccgatttgccgtaaaaaa

SEQ ID NO: 555883 - DNA, 75 bp, synthetic construct
  source 1..75: mol_type = other DNA
aaaaaactatctcaggaggatgtcttttcgttgcccctgtggcaggcatatcgtccgaaaaaaatttatcagtag

SEQ ID NO: 555884 - DNA, 75 bp, synthetic construct
  source 1..75: mol_type = other DNA
aatataaagaaattgatgatgagttttctgacggggacctcatttttggtattgccattatcataaaagaaatac

SEQ ID NO: 555885 - DNA, 75 bp, synthetic construct
  source 1..75: mol_type = other DNA
agcgcgttcgcaatgaattgcgcttccgtgaattaaccgtgttacgcgttgagcgtatcagcgccggttttcagc

SEQ ID NO: 555886 - DNA, 75 bp, synthetic construct
  source 1..75: mol_type = other DNA
ggcatagagcttgagtcgttgttagaaaaactcaatagccgcatcgaagctctttacgatcgtgagcatacacta

SEQ ID NO: 555887 - DNA, 75 bp, synthetic construct
  source 1..75: mol_type = other DNA
ataatgaacagaagcaagagaaagtagcaagcagtgagcccatcgagaacaagactattccacattcaccaacta

SEQ ID NO: 555888 - DNA, 75 bp, synthetic construct
  source 1..75: mol_type = other DNA
ggcctgatagctatttcggatcccgtgaaagcaaccacgccggatgcacttaaagcgttgcgtcaggcggggatc

SEQ ID NO: 555889 - DNA, 75 bp, synthetic construct
  source 1..75: mol_type = other DNA
caaaaaagcagtgataacccgactgaaagcgtctggtcatgtggttgcgatggcgggggacggtgtaaatgatgc

SEQ ID NO: 555890 - DNA, 75 bp, synthetic construct
  source 1..75: mol_type = other DNA
tcaggcggggatccgcatcgttatgctcaccggggataaccagcttaccgctgaagcagtcgcacggaaactggg

SEQ ID NO: 555891 - DNA, 75 bp, synthetic construct
  source 1..75: mol_type = other DNA
aatataaagaaattgataatgattttttcgatggtgagctcatttttggcgttgcaattatcataaaagaaatcc

SEQ ID NO: 555892 - DNA, 75 bp, synthetic construct
  source 1..75: mol_type = other DNA
caggcggagaaagagatttctgcaggtgtgtggacatgtccgatgcatccggagatacgccgtagtggtcccgga

SEQ ID NO: 555893 - DNA, 75 bp, synthetic construct
  source 1..75: mol_type = other DNA
caaccacgccggatgcacttaaagcgttgcgtcaggcggggatccgcatcgttatgctcaccggggataaccagc

SEQ ID NO: 555894 - DNA, 75 bp, synthetic construct
  source 1..75: mol_type = other DNA
atgaataactccccccgctacccgcagcgcgttcgcaatgatctgcgcttccgtgaactgactgtattgcacgtt

SEQ ID NO: 555895 - DNA, 75 bp, synthetic construct
  source 1..75: mol_type = other DNA
tccacaattccgtttgccgcagtcggtgctggatgcggaaatcacccgtatcgaaaaaatgggtgtgactattaa

SEQ ID NO: 555896 - DNA, 75 bp, synthetic construct
  source 1..75: mol_type = other DNA
agtgcttcgctggcagacgcaagagctcgcggcagctatatggggtttagccgtctgggtctggcgattggcggc

SEQ ID NO: 555897 - DNA, 75 bp, synthetic construct
  source 1..75: mol_type = other DNA
atgcgtggttgttaccggcatggaaactctccaccgtacgcacgcccgttcgcgaaggcatgacccgcgtgatgc

SEQ ID NO: 555898 - DNA, 75 bp, synthetic construct
  source 1..75: mol_type = other DNA
aagggacatcatgagtggcccacaattgctttccctgcctggttctttttaacgtcctccggcaacattacctgt

SEQ ID NO: 555899 - DNA, 75 bp, synthetic construct
  source 1..75: mol_type = other DNA
atgccgcaacaaaattatctggatgaactcactccggcttttacgccgttactggcgattaaagaagcctctcgc

SEQ ID NO: 555900 - DNA, 75 bp, synthetic construct
  source 1..75: mol_type = other DNA
agattgccgtcgacttcctgcaacgtgcacgacaggcgcaaggcgatatcagcattccacaaagcgcattaatta

SEQ ID NO: 555901 - DNA, 75 bp, synthetic construct
  source 1..75: mol_type = other DNA
atgacccgcgtgatgcgtgacaagcgttttgtcacctatgtcctgacgctggcgggttactacatgctggctgta

SEQ ID NO: 555902 - DNA, 75 bp, synthetic construct
  source 1..75: mol_type = other DNA
atgtcgcgcgtgtcgcaggcgaggaacctgggtaaatatttcctcctcattgataacatgctggttgtgctgggg

SEQ ID NO: 555903 - DNA, 75 bp, synthetic construct
  source 1..75: mol_type = other DNA
atgccggcactgcgccgccgcctggaaacgttgagtaaacttgccgttaaaccgcaagttaccgcgctggttagc

SEQ ID NO: 555904 - DNA, 75 bp, synthetic construct
  source 1..75: mol_type = other DNA
ggtgcggtcattggcgcattgttggggagctggctgttgcaatacgactttcgcctggtctgcgccacaggggca

SEQ ID NO: 555905 - DNA, 75 bp, synthetic construct
  source 1..75: mol_type = other DNA
ggcgcattgttggggagctggctgttgcaatacgactttcgcctggtctgcgccacaggagccgttttgtttgtg

SEQ ID NO: 555906 - DNA, 75 bp, synthetic construct
  source 1..75: mol_type = other DNA
ggcgattggcggcgctattggttacatcggtggcggttggctgtttgacctgggcaaatcggcgcaccagccaga

SEQ ID NO: 555907 - DNA, 75 bp, synthetic construct
  source 1..75: mol_type = other DNA
tatttccggcgaaatgctgaaaacagcctggcgaggaaacgtccgtcgcttgctggcgcttaaccgcgacattat

SEQ ID NO: 555908 - DNA, 75 bp, synthetic construct
  source 1..75: mol_type = other DNA
agactatggagcccggtatgaccgtgtctcatgtcgcgcgcctgcatggcatcaatgcaaaccagatattcaaat

SEQ ID NO: 555909 - DNA, 75 bp, synthetic construct
  source 1..75: mol_type = other DNA
gcagtggtggtcagattatcttgatgcaaacagtgacgggtatgtctcggcttaccagtatgcccgccgcctaaa

SEQ ID NO: 555910 - DNA, 75 bp, synthetic construct
  source 1..75: mol_type = other DNA
gaccaccgcaaccgacgcatttatgcgcgatattaaaccgtttatggtggcggatgcgctggccgatttcagccg

SEQ ID NO: 555911 - DNA, 75 bp, synthetic construct
  source 1..75: mol_type = other DNA
ggcgttgcgcgggctttctctggcggctatctggcgggcgtcactggcgcaacgggacctggtttgccgcaacgt

SEQ ID NO: 555912 - DNA, 75 bp, synthetic construct
  source 1..75: mol_type = other DNA
ttttgccattggtcggtgtctggtgttatctactggatggcatgtttataggcgcaacgcgtgcggctgaaatgc

SEQ ID NO: 555913 - DNA, 75 bp, synthetic construct
  source 1..75: mol_type = other DNA
tcgctactacggcaggctgctgacaaaatacgcgctcaagctgtcgttgctgttcttcgtgcgctccagcgaact

SEQ ID NO: 555914 - DNA, 75 bp, synthetic construct
  source 1..75: mol_type = other DNA
ctggcctttggcccctacccggagatctcgctgttgcagcccccccgcctgcgcgaagctgcacgcaataacatt

SEQ ID NO: 555915 - DNA, 75 bp, synthetic construct
  source 1..75: mol_type = other DNA
tcccggaagaacgcgagcagatcgaaaatgtgcgcttctcttatcgtggctcgaaaatgaaaattcagcatatcg

SEQ ID NO: 555916 - DNA, 75 bp, synthetic construct
  source 1..75: mol_type = other DNA
aaatgtgcgcttctcttaccgggggtcgaaaatgaaaattcaacatatcgtgccgctgtcggatcaggcaattgc

SEQ ID NO: 555917 - DNA, 75 bp, synthetic construct
  source 1..75: mol_type = other DNA
accccgcgctgtatctggatggtgaatttgctgcgccagagactaatcattacccggccctgtcgctggacaggc

SEQ ID NO: 555918 - DNA, 75 bp, synthetic construct
  source 1..75: mol_type = other DNA
aaacgtgcgcttctctcatcgcggcacgaaaatgaaaacacagcacatcgttccgttgtccgatcaggctattgc

SEQ ID NO: 555919 - DNA, 75 bp, synthetic construct
  source 1..75: mol_type = other DNA
agcaagttggtatttctgttgagcgccttggggatgtattaaatacaccggtagagaaaaagtcaggcagaaata

SEQ ID NO: 555920 - DNA, 75 bp, synthetic construct
  source 1..75: mol_type = other DNA
atgagcaaaatcagggtgttgtctgtcgatgattcggcactgatgcgccagatcatgacggaaatcatcaacagc

SEQ ID NO: 555921 - DNA, 75 bp, synthetic construct
  source 1..75: mol_type = other DNA
ccaatgcccgttgtgatggtttcttccttgaccggcaaaggatcagaagtcacgctgcgcgcgctggagctgggg

SEQ ID NO: 555922 - DNA, 75 bp, synthetic construct
  source 1..75: mol_type = other DNA
agccgctacctttgccggtgcaccttcgctgacggtcgatgcggttattgtcccttgcggcaatatcgcggatat

SEQ ID NO: 555923 - DNA, 75 bp, synthetic construct
  source 1..75: mol_type = other DNA
catttcccggatgaaatgtggtttatcgaacagaaaactctcgaaactcatcaggttgtcgagtttgaattgtcc

SEQ ID NO: 555924 - DNA, 75 bp, synthetic construct
  source 1..75: mol_type = other DNA
cgatcttgttggctgccgcattattcgcaagatgacgctggctcgcttcctcgatgccgttaattttaaagacgg

SEQ ID NO: 555925 - DNA, 75 bp, synthetic construct
  source 1..75: mol_type = other DNA
cactgttaatcacccagcatatgccgcctggctttacccgttcttttgccgaccgcctgaataagctgtgtcaaa

SEQ ID NO: 555926 - DNA, 75 bp, synthetic construct
  source 1..75: mol_type = other DNA
gaacgaccttatctacacattgatccaggcgccattaaaacacatggggacaaatatttttgccgtgatcattct

SEQ ID NO: 555927 - DNA, 75 bp, synthetic construct
  source 1..75: mol_type = other DNA
gaaaaagcacaagctatttttactccggtaatgaatggttctgtaaatatcatgtcaattatgattgctttcctg

SEQ ID NO: 555928 - DNA, 75 bp, synthetic construct
  source 1..75: mol_type = other DNA
aaaccgttttttctgaggctaatctggagaatctctcctgggccgctcaacatggcactacctggggcgcgccat

SEQ ID NO: 555929 - DNA, 75 bp, synthetic construct
  source 1..75: mol_type = other DNA
cggacgaccagctgaatatcaccccgcctccggacgtcaacggtctgaaaaaggatccatccttaagtttgtacg

SEQ ID NO: 555930 - DNA, 75 bp, synthetic construct
  source 1..75: mol_type = other DNA
tcagcctcaaaagaaagccgggggagaaaacaccggaatccggtgctgatacagcccgtgttgtccgccgtaagc

SEQ ID NO: 555931 - DNA, 75 bp, synthetic construct
  source 1..75: mol_type = other DNA
acccctgctcctggtgtggtgcgccgaaagaaggtcgtggtggtctcgtccccgccggcctggaaggcaaagaaa

SEQ ID NO: 555932 - DNA, 75 bp, synthetic construct
  source 1..75: mol_type = other DNA
ctggtgccgcctgccagaaagcaatgaatgagagggatgctgtagggctggctctggcaacaggtacagtggcac

SEQ ID NO: 555933 - DNA, 75 bp, synthetic construct
  source 1..75: mol_type = other DNA
ggatttataaagaagattaaattcaacatattaagtcagattcataaagaactgctgatctctgtaccgttatct

SEQ ID NO: 555934 - DNA, 75 bp, synthetic construct
  source 1..75: mol_type = other DNA
atgaatctggatgagcaagatgcacaaactattagctcatatataagggcatcaagaccagattacaaaggcccg

SEQ ID NO: 555935 - DNA, 75 bp, synthetic construct
  source 1..75: mol_type = other DNA
gtgaaggggacgtacaaggtaatcgctgatcttcaccgtcagctatggggaatgttgaaggggcaaacacaatga

SEQ ID NO: 555936 - DNA, 75 bp, synthetic construct
  source 1..75: mol_type = other DNA
tcagtacagaagagtcaaaggataagataagaaaaaaaatggaatataaagcttcaactgattcttatgctaatt

SEQ ID NO: 555937 - DNA, 75 bp, synthetic construct
  source 1..75: mol_type = other DNA
gcttccgaagaagataaactttatatccgccagaactgtcttatattacggtctttttatcgccgggaaaaaggt

SEQ ID NO: 555938 - DNA, 75 bp, synthetic construct
  source 1..75: mol_type = other DNA
atgaagaatattcgatacattgacaaaaaggatgttgaaaacctgatagaaaataagacatctgatgatgttatt

SEQ ID NO: 555939 - DNA, 75 bp, synthetic construct
  source 1..75: mol_type = other DNA
atgggcgttacggcaggcctgacgctacccattttcgatagtggtcgtcttaacgccaatctcgatatcgcaaaa

SEQ ID NO: 555940 - DNA, 75 bp, synthetic construct
  source 1..75: mol_type = other DNA
tattttcctggcgaatccatcgagcatctcaaaacaaaagccaaagaaactgacaagtggggatgtaataatata

SEQ ID NO: 555941 - DNA, 75 bp, synthetic construct
  source 1..75: mol_type = other DNA
atttaatttgaaaccaaagatatattattcgcatcacgacaaacccaaaaagaaaaaggaaaagaaaaagccaaa

SEQ ID NO: 555942 - DNA, 75 bp, synthetic construct
  source 1..75: mol_type = other DNA
tggatctttggcttgtccttctccgttggtggcacttacgtcactggcgaggccagtacatgggtcgtttaccta

SEQ ID NO: 555943 - DNA, 75 bp, synthetic construct
  source 1..75: mol_type = other DNA
taatccttttgatcccagctacgaatcgtactttgaagcacggctaaaggctacgatgctggaatccatacgggg

SEQ ID NO: 555944 - DNA, 75 bp, synthetic construct
  source 1..75: mol_type = other DNA
ggtgcggatcaggctggtaaatattgatgcaccggaaggtaatgactctaacttattgatagtgttttatgttca

SEQ ID NO: 555945 - DNA, 75 bp, synthetic construct
  source 1..75: mol_type = other DNA
aatgatattgaagaaaaatatctacaaacatattcaaacaatgttcacaaagaagttttatgtggcagcatttct

SEQ ID NO: 555946 - DNA, 75 bp, synthetic construct
  source 1..75: mol_type = other DNA
aaaatataatgataatctatcgggaaaatgttgatttcagcatgtatgatagaaaactatcagatatttatcatg

SEQ ID NO: 555947 - DNA, 75 bp, synthetic construct
  source 1..75: mol_type = other DNA
atgctttcaccgataaggacaactttccataactcagcaaatatagtgcagagttcaccctgtcaaacggtttct

SEQ ID NO: 555948 - DNA, 75 bp, synthetic construct
  source 1..75: mol_type = other DNA
gtgctcggtaaacgtattcgcgacctgcactttaaagaacgctatgacgttgttatctcgcgcctgaaccgtgct

SEQ ID NO: 555949 - DNA, 75 bp, synthetic construct
  source 1..75: mol_type = other DNA
cattcggggaggggtgtatctatcttgatatggatatgatacttacaggtaagcttggtacaatatatgctcctg

SEQ ID NO: 555950 - DNA, 75 bp, synthetic construct
  source 1..75: mol_type = other DNA
cgtcgtaatgatagtgtaaatattgaaaatagtgcaataattgttaaccgtagtaatcatcctgctctacttgag

SEQ ID NO: 555951 - DNA, 75 bp, synthetic construct
  source 1..75: mol_type = other DNA
ggaaaaattgggatggatagacgccagatatggcaaaatcgtgatcatcaatataaatgcactcaggcagttata

SEQ ID NO: 555952 - DNA, 75 bp, synthetic construct
  source 1..75: mol_type = other DNA
caatggtggaagaagcggcacgcaacgccgaagccgcctctcagagcgcagcggtggcaaagaaatccgaaactg

SEQ ID NO: 555953 - DNA, 75 bp, synthetic construct
  source 1..75: mol_type = other DNA
ttttgcaacaggtgactggatagaagtaaccaccccgcaattcgagtatggtgcttgtgcaacttcctttatcat

SEQ ID NO: 555954 - DNA, 75 bp, synthetic construct
  source 1..75: mol_type = other DNA
agccagcgagatagaagcaacgtcagccgcaacaagagcagagaatgcagcccggattgcagaagatgccgctga

SEQ ID NO: 555955 - DNA, 75 bp, synthetic construct
  source 1..75: mol_type = other DNA
gcacgagtcttcacgcaccaatggcggcgcgctgatcaggactatcaatattcgcgttgagaaccctaacctgca

SEQ ID NO: 555956 - DNA, 75 bp, synthetic construct
  source 1..75: mol_type = other DNA
tgatggtcttttttgccgttgcaagggaagggctggagtcggtctttttcctgctggcggcatttcaacaagatg

SEQ ID NO: 555957 - DNA, 75 bp, synthetic construct
  source 1..75: mol_type = other DNA
ctggagcaggcggtcgatagcgcattgcagcgtggaaatcatcatggctgggcgctggtgatgatggtctttttt

SEQ ID NO: 555958 - DNA, 75 bp, synthetic construct
  source 1..75: mol_type = other DNA
gtctatccgttggtgatgttcctgcgcattatcaccccccaattactggcggtgctcttctggagtatcggttaa

SEQ ID NO: 555959 - DNA, 75 bp, synthetic construct
  source 1..75: mol_type = other DNA
ttacctgaccatgtgcgggatgctggctggctccatgaccgatcctccggcgctggcgtttgctaataatcttca

SEQ ID NO: 555960 - DNA, 75 bp, synthetic construct
  source 1..75: mol_type = other DNA
tcaggtttctgttgctgatttgaataaaggcgtaatcatccagtccggtaacgatgcttgtattgcgctggctga

SEQ ID NO: 555961 - DNA, 75 bp, synthetic construct
  source 1..75: mol_type = other DNA
ttctgattatctccgtgcttatggcaatcggcattatgcgaattatccacgaactgaaggatatcgaattatttt

SEQ ID NO: 555962 - DNA, 75 bp, synthetic construct
  source 1..75: mol_type = other DNA
ggtgcgctaatcaggacgattaacatccgtgttgagaaccctaatttgcataatttagccattaaagatgtgccg

SEQ ID NO: 555963 - DNA, 75 bp, synthetic construct
  source 1..75: mol_type = other DNA
cagcgctgggggcagggcagcagattttgcgcgacctgggtacaccaatggaaatggtcgatcagatggggatga

SEQ ID NO: 555964 - DNA, 75 bp, synthetic construct
  source 1..75: mol_type = other DNA
cactatgtctttaccgggtaaggccccgttaaacgtgaccaatgacagtaatgcagcagcggttcatatagatct

SEQ ID NO: 555965 - DNA, 75 bp, synthetic construct
  source 1..75: mol_type = other DNA
tgaaaaagcgccgctaacccgccatctggtgccagtggtgacgccggaatcgattgtcattccgcctgcgccagt

SEQ ID NO: 555966 - DNA, 75 bp, synthetic construct
  source 1..75: mol_type = other DNA
gtggggcagcgaatacctgtaacgcttggtaatattgcgccgttgtcgctaaggccgttccagcctgggcggatt

SEQ ID NO: 555967 - DNA, 75 bp, synthetic construct
  source 1..75: mol_type = other DNA
cgccgagcgtggatgcgcgtgcatggattttaatggattacgccagcggtaaagtgctggcagaaggcaatgcgg

SEQ ID NO: 555968 - DNA, 75 bp, synthetic construct
  source 1..75: mol_type = other DNA
gagtacgccattcataaagagaaagagttcaccttcaacaaaattcgtcagcctaaccgtaaccgtctgctgtgg

SEQ ID NO: 555969 - DNA, 75 bp, synthetic construct
  source 1..75: mol_type = other DNA
caggaagacaccggagcagcgctttacgcaggaacacagtctgttcttccggttgctgaaccgtcgatatgaaaa

SEQ ID NO: 555970 - DNA, 75 bp, synthetic construct
  source 1..75: mol_type = other DNA
ttcttattatttccgtgctctgcgcgattggcatcgtaagaattgttgattccgtaaaagatatcgaatcattat

SEQ ID NO: 555971 - DNA, 75 bp, synthetic construct
  source 1..75: mol_type = other DNA
aatagataatatcgataacttgtataaaaaaatgttaaataagaaaatgttaaataagaaaatgaagcttaaata

SEQ ID NO: 555972 - DNA, 75 bp, synthetic construct
  source 1..75: mol_type = other DNA
ttatccccttatctagtgcggcaatcaatgcggtgagtattccagactatttcgcctgggcgggattgcactggt

SEQ ID NO: 555973 - DNA, 75 bp, synthetic construct
  source 1..75: mol_type = other DNA
agcgaaaaaattattaatcacaataccgcagcaggaatgtttatgggaaccgccgcactggctggcggtattttt

SEQ ID NO: 555974 - DNA, 75 bp, synthetic construct
  source 1..75: mol_type = other DNA
gcctggcgaaggttgcgggtgtttcgcttgttcttttactcgccgcctgtagttcggactcacgttataagcgtc

SEQ ID NO: 555975 - DNA, 75 bp, synthetic construct
  source 1..75: mol_type = other DNA
gcgatagctccagaacgctgaaggtggatatcaacaccgtcattctcactttaaaaaacgactcaccacgtaaag

SEQ ID NO: 555976 - DNA, 75 bp, synthetic construct
  source 1..75: mol_type = other DNA
ttcgcctggggcgggattgcactggtgattcagttactcgtttttgctggtgtcagactttatatgcccgcatta

SEQ ID NO: 555977 - DNA, 75 bp, synthetic construct
  source 1..75: mol_type = other DNA
cacgccccactacaaaacctgtgtcgcgaaactggaatctttaatgaccgggccgcgtaaaaaacgtctgttcaa

SEQ ID NO: 555978 - DNA, 75 bp, synthetic construct
  source 1..75: mol_type = other DNA
cattagactctttaatattagacagccattaacagtattgctatcagcttttaatcaattcaatccagatgagtt

SEQ ID NO: 555979 - DNA, 75 bp, synthetic construct
  source 1..75: mol_type = other DNA
cggattattaaaagaaccgtgcacaacgccatgaaagccgccgtagagcgtcataaaaggaggtttaactgcaaa

SEQ ID NO: 555980 - DNA, 75 bp, synthetic construct
  source 1..75: mol_type = other DNA
gggcgtcggttatccgcagctttctgcagtgatcgaatgtgccgatgccgcgcacggtctgggtgggatgatcgt

SEQ ID NO: 555981 - DNA, 75 bp, synthetic construct
  source 1..75: mol_type = other DNA
gttaaagttggcattggcccaggttctgtttgtacaactcgcgtcaaaacaggcgtcggttatccgcagctttct

SEQ ID NO: 555982 - DNA, 75 bp, synthetic construct
  source 1..75: mol_type = other DNA
atttcgaaaaaactaaacagattctcgacctgaacccggcattaaacttcgtttgtattgatgtggcgaatggtt

SEQ ID NO: 555983 - DNA, 75 bp, synthetic construct
  source 1..75: mol_type = other DNA
atgcggtcgttatttcctcgccacggttggcaagctattaactgaaaaagcgccgcttacccgccatctggtgcc

SEQ ID NO: 555984 - DNA, 75 bp, synthetic construct
  source 1..75: mol_type = other DNA
tccggttatctagatgtacgtaatagtgctggtactcttatttggtcggcggcaagtgctgcaacaatgccacgt

SEQ ID NO: 555985 - DNA, 75 bp, synthetic construct
  source 1..75: mol_type = other DNA
tctggttatctagatgtacgtaatagtgctggtactcttatatggtcggcggcaagtgctgcaacaatgccgcgt

SEQ ID NO: 555986 - DNA, 75 bp, synthetic construct
  source 1..75: mol_type = other DNA
cagaggtgaaaacgtattttgccttgcagaatgatggctctttcaccagtgatatcatcatgctagaagcacata

SEQ ID NO: 555987 - DNA, 75 bp, synthetic construct
  source 1..75: mol_type = other DNA
tgtctgatgtttgggaaacagcaatgtattccatagggattatattattgatacttactggtattgctcaatatg

SEQ ID NO: 555988 - DNA, 75 bp, synthetic construct
  source 1..75: mol_type = other DNA
caggtaacgtaacagatgacggtactgtaggtggttattccggtatcatgattcgtcgtaatagtgctacatcat

SEQ ID NO: 555989 - DNA, 75 bp, synthetic construct
  source 1..75: mol_type = other DNA
ttactttacagtacgttaacaaaaaccaaatgacctacgctcaggcgatggggtcagcacaagtacagattgctc

SEQ ID NO: 555990 - DNA, 75 bp, synthetic construct
  source 1..75: mol_type = other DNA
ggctggcgttttgggccagcagtatgcatcagccgatgctttaccgtttgcagcaggtgagcagccgccgcttgt

SEQ ID NO: 555991 - DNA, 75 bp, synthetic construct
  source 1..75: mol_type = other DNA
gcatcagccgatgctctatcgtttacagcaggtcagcagccgccgcttgctgtcgaatctggtgagcgagtttcg

SEQ ID NO: 555992 - DNA, 75 bp, synthetic construct
  source 1..75: mol_type = other DNA
tcgaacagaagactctcgaaacccatgaggtcgtcgagtttgagctgtcgagtgtgttcgatctgatgggcgtgc

SEQ ID NO: 555993 - DNA, 75 bp, synthetic construct
  source 1..75: mol_type = other DNA
cagtacattcacaattacgacatattttcagcgtcatggggaattggtatttttgttactataatagtactgagc

SEQ ID NO: 555994 - DNA, 75 bp, synthetic construct
  source 1..75: mol_type = other DNA
aacccgctgcgtttggcttctcgctgtgggtagatgcgataaaattccagtgtcggttacctaattttgatctcg

SEQ ID NO: 555995 - DNA, 75 bp, synthetic construct
  source 1..75: mol_type = other DNA
gtcaacgaaccatgcgcccgtggaccgtggttgtgctgtccgactatggccgtgatcgcatggcatttcagtgct

SEQ ID NO: 555996 - DNA, 75 bp, synthetic construct
  source 1..75: mol_type = other DNA
tcagcgccgggaacgtttattagaaaaataaataaaaccagcgttgtgtttgaaactcacgggcattacgaaaaa

SEQ ID NO: 555997 - DNA, 75 bp, synthetic construct
  source 1..75: mol_type = other DNA
tctgcgcgaaaaccgcaatggacgatgcatggctgaaacgggttattgaccaggaagatgctgacggccgctttg

SEQ ID NO: 555998 - DNA, 75 bp, synthetic construct
  source 1..75: mol_type = other DNA
cgataaaggtcgcaagttcttcgctgatatgcaccgtaaagatctgcatgatgatgcagagtggatggcaaaaca

SEQ ID NO: 555999 - DNA, 75 bp, synthetic construct
  source 1..75: mol_type = other DNA
aattcaggggtatattgcagatatgttccactcactacagctttcattcctggtttctatgctctgttttgtcta

SEQ ID NO: 556000 - DNA, 75 bp, synthetic construct
  source 1..75: mol_type = other DNA
aaaacgttggtcgtcatccgcactgtgccgtcacaaatgtactacacgccgcagtggttcaaacgcatggaacgc

SEQ ID NO: 556001 - DNA, 75 bp, synthetic construct
  source 1..75: mol_type = other DNA
gacataaaagataaaactcatgatgatattatttttgaatcatgggatattctcagggaatatccaaaacaatta

SEQ ID NO: 556002 - DNA, 75 bp, synthetic construct
  source 1..75: mol_type = other DNA
cacaactactgcacaaaacaattcaagcgttatattaaaaattgaaattgacaataaaacactagtatttacagg

SEQ ID NO: 556003 - DNA, 75 bp, synthetic construct
  source 1..75: mol_type = other DNA
atggaacgatttgagtcctgctttgaagcagcgctttttgctattggtgaatggcaaataaaagtataccatgag

SEQ ID NO: 556004 - DNA, 75 bp, synthetic construct
  source 1..75: mol_type = other DNA
atgacaaacatgatctcatatcagggacttgttcgcaccttccctaagctctctatagcgcttaatggcattgta

SEQ ID NO: 556005 - DNA, 75 bp, synthetic construct
  source 1..75: mol_type = other DNA
gaatcctcgtaagggtctcaatgcatttaccaccagcttgctgcaacctgggatatcgccctcaggatcaataat

SEQ ID NO: 556006 - DNA, 75 bp, synthetic construct
  source 1..75: mol_type = other DNA
tccttatgacacgttttaatccggaaaaagtcctaattctctattccgttataggggcgctgtttctggcatatg

SEQ ID NO: 556007 - DNA, 75 bp, synthetic construct
  source 1..75: mol_type = other DNA
tggagcaaatgctgaaagagagcggacgtaaccaactgattatcaccggggtgtacgcgcatattggctgcatga

SEQ ID NO: 556008 - DNA, 75 bp, synthetic construct
  source 1..75: mol_type = other DNA
cactgttggaaggggcattgtgggacggtgagctgttcgagaacgttggcggaaaacgctacctgcgtatgctgg

SEQ ID NO: 556009 - DNA, 75 bp, synthetic construct
  source 1..75: mol_type = other DNA
tttgccaacgacccaattcatgagcgagacatatttacaacatcggtatttgccatgttgatgtcagcaccgtca

SEQ ID NO: 556010 - DNA, 75 bp, synthetic construct
  source 1..75: mol_type = other DNA
ttttcgagaatgggtgaaaaaatggtttctgttccccatatggtgaatgacttcatttccagaagtgctttgttt

SEQ ID NO: 556011 - DNA, 75 bp, synthetic construct
  source 1..75: mol_type = other DNA
cggtccgtaaaccgggcaaactgccgcgtgaaaccatcagtgaaacttacgacctggaatacggcaccgatcagc

SEQ ID NO: 556012 - DNA, 75 bp, synthetic construct
  source 1..75: mol_type = other DNA
atgattacattcaaaccaacgcgaaacatcgacctgatagaagcagtcggaaatcaccctgacattattgccgga

SEQ ID NO: 556013 - DNA, 75 bp, synthetic construct
  source 1..75: mol_type = other DNA
tacgtgaaaccgagcgcaaatctattggccttatccaccaggataacagcaccgatgcgatggaagagatcaaga

SEQ ID NO: 556014 - DNA, 75 bp, synthetic construct
  source 1..75: mol_type = other DNA
ctggtggcgctccgtcaggaactggaagcctttattgaacaaaccacacccgttctgcctgccagtgaagaggag

SEQ ID NO: 556015 - DNA, 75 bp, synthetic construct
  source 1..75: mol_type = other DNA
ttagtgatcatcacaattacactcaagcaattgctaaagaagcagaatgtgaggaggaagtaattagaactttag

SEQ ID NO: 556016 - DNA, 75 bp, synthetic construct
  source 1..75: mol_type = other DNA
caccgttcagtgcgtcacatcgttcgctgcacgcaaattccgccacgggctgaaccgccccgggaatcctggaga

SEQ ID NO: 556017 - DNA, 75 bp, synthetic construct
  source 1..75: mol_type = other DNA
acatcgacctgatagaagccgtgggaaatcaccctgacattatcgccgggagcaacaacggtgatggatacgact

SEQ ID NO: 556018 - DNA, 75 bp, synthetic construct
  source 1..75: mol_type = other DNA
cgaagccggcgagggcgatgatgagaacgatgccgttatgcccgacgacacgggagaaatttccgggactgaata

SEQ ID NO: 556019 - DNA, 75 bp, synthetic construct
  source 1..75: mol_type = other DNA
caccgttcagtgcgtcacatcgttcgccgcacgcaaattccgccacggtcagatgtactgcgcaatgattggcct

SEQ ID NO: 556020 - DNA, 75 bp, synthetic construct
  source 1..75: mol_type = other DNA
ggcattgtttactatcaggagattcagccgctgacattcgattgccacgccatgtacctgccagagattcgcgga

SEQ ID NO: 556021 - DNA, 75 bp, synthetic construct
  source 1..75: mol_type = other DNA
agatgtactgcgcaatgattggccttaagcgtgtcggaaccatcaagaaatacttcaaaggcgtggatgacgtga

SEQ ID NO: 556022 - DNA, 75 bp, synthetic construct
  source 1..75: mol_type = other DNA
tcatgccggggatgcactgacagccggaacgctggccgcacccgttggtacggtgacagacagtgccatccaccg

SEQ ID NO: 556023 - DNA, 75 bp, synthetic construct
  source 1..75: mol_type = other DNA
gagtgctttgttctctcaaaataaaatccttgtagggaagagggggaaaactacattaatagctatcgctggttt

SEQ ID NO: 556024 - DNA, 75 bp, synthetic construct
  source 1..75: mol_type = other DNA
gcaatgatggagatatatctctttctgcagtcgaagatgctgtgaagataactacctggtatgttaatgagtaca

SEQ ID NO: 556025 - DNA, 75 bp, synthetic construct
  source 1..75: mol_type = other DNA
cgaattttataacaaggtggagtcagatatggggttactcggcaccttatcagattttagagactatgcctctaa

SEQ ID NO: 556026 - DNA, 75 bp, synthetic construct
  source 1..75: mol_type = other DNA
aggcgctgggcgcaaaaccacagattaatgctgaagaagaaattcgccgcagcgtcgattttctaaaaagctatc

SEQ ID NO: 556027 - DNA, 75 bp, synthetic construct
  source 1..75: mol_type = other DNA
gtctggctgatgttctcgctgggagccgggctgtggctggtacacggtggctggctaccagaatggctaagcggc

SEQ ID NO: 556028 - DNA, 75 bp, synthetic construct
  source 1..75: mol_type = other DNA
aagagtacggttgataaactgctgatgaagccattatatcaactggaagaggatttatttgaaaaatacacccac

SEQ ID NO: 556029 - DNA, 75 bp, synthetic construct
  source 1..75: mol_type = other DNA
atgacgggcgctacagcgttatgtaaattttttaatgaatttgctggtttaaaaatcaacaaaaacaacatgctg

SEQ ID NO: 556030 - DNA, 75 bp, synthetic construct
  source 1..75: mol_type = other DNA
tgttcttagcttcaataaactaatgcaactcgagaccaatcgagaaattatcagaacagcaaaaaataagctcga

SEQ ID NO: 556031 - DNA, 75 bp, synthetic construct
  source 1..75: mol_type = other DNA
atcctcttgcaggtgatggataacggtacgctgaccgataacaacggacgcaaagcggacttccgtaacgtggta

SEQ ID NO: 556032 - DNA, 75 bp, synthetic construct
  source 1..75: mol_type = other DNA
gatgagctttattggtggataaaaaatcattgtaatcgccttgttgtaccttacattactaaaaatactgtgctc

SEQ ID NO: 556033 - DNA, 75 bp, synthetic construct
  source 1..75: mol_type = other DNA
attgctatgattggcgacacctttaaaagtttcttaagagaaaagggggaagataacaacagcatcaaccttata

SEQ ID NO: 556034 - DNA, 75 bp, synthetic construct
  source 1..75: mol_type = other DNA
ttatccttcctgtttcatggtctgatgatttaaaaatatggattcttggtgtcggtggaatgtttttcccatata

SEQ ID NO: 556035 - DNA, 75 bp, synthetic construct
  source 1..75: mol_type = other DNA
ttccgcaaaagctggccattatgcgtcgtcaggtcgtcagtcatgaaaaagaggctcaggtcacggtttcaaccg

SEQ ID NO: 556036 - DNA, 75 bp, synthetic construct
  source 1..75: mol_type = other DNA
agatcctttccgatatggtgttgacaagttttctgcgtaaaaagaaagccgtcagtgacattccggggcgagttg

SEQ ID NO: 556037 - DNA, 75 bp, synthetic construct
  source 1..75: mol_type = other DNA
acctgcagaaagaatgaaagctaggctacagcatcgtgttcctttatcccggcaggctatttacattctggaaaa

SEQ ID NO: 556038 - DNA, 75 bp, synthetic construct
  source 1..75: mol_type = other DNA
cagagcggcaggaaaaagaagagcagtagcagtagcagtagcagtagcagtagcagtagcagtagcaggaacaac

SEQ ID NO: 556039 - DNA, 75 bp, synthetic construct
  source 1..75: mol_type = other DNA
gcttaatatgctgttctgtgtgctggtgatacgcgcacgcggtaacgtcacaaaaattctttcattacggaggta

SEQ ID NO: 556040 - DNA, 75 bp, synthetic construct
  source 1..75: mol_type = other DNA
atggccttactcacggataccaaagcccgtcatatcaaacccaatgacaaaccgatttcgcatggtggtgtcact

SEQ ID NO: 556041 - DNA, 75 bp, synthetic construct
  source 1..75: mol_type = other DNA
aaaaggcgtaatgctggattgggaacttaccctgaggtcagtattgccgaagctgcacgtactgcccggataatg

SEQ ID NO: 556042 - DNA, 75 bp, synthetic construct
  source 1..75: mol_type = other DNA
cagagcctgattgaggcgatgacagacccagacgttcatgccgtgctgatcgcctcggcgaccgatacccatgcg

SEQ ID NO: 556043 - DNA, 75 bp, synthetic construct
  source 1..75: mol_type = other DNA
tgcagcggcgatgatggtgaacgtgcgctgtacctcgcggataaagcgctggaatcactgcgttgccagcgtgag

SEQ ID NO: 556044 - DNA, 75 bp, synthetic construct
  source 1..75: mol_type = other DNA
attgaaagtctgattagacttataaaggtaatactgaagtggtttactgaatttggccacctgaacagaggtgat

SEQ ID NO: 556045 - DNA, 75 bp, synthetic construct
  source 1..75: mol_type = other DNA
cagagcggcaggaaaaagaagagcagtagcagtagcagtagcagtagcaggaacaacaacatcatcagtaacaga

SEQ ID NO: 556046 - DNA, 75 bp, synthetic construct
  source 1..75: mol_type = other DNA
aagagccggtgtcggtgtatgcccagggcagcaatctggtggatccggcgattggcgaagcgggagatatcgaca

SEQ ID NO: 556047 - DNA, 75 bp, synthetic construct
  source 1..75: mol_type = other DNA
ggaatcactgctgatcatctcccgcgatccgtctccaccgcctgcggagtacgtgcgtgtttccggcggcatgtt

SEQ ID NO: 556048 - DNA, 75 bp, synthetic construct
  source 1..75: mol_type = other DNA
gagcagagagagaaatatgaagacccggccagaattggggcatttctggaaaccctgatcaccgaaacctgccgg

SEQ ID NO: 556049 - DNA, 75 bp, synthetic construct
  source 1..75: mol_type = other DNA
gttgcggtcacccgtgcccgtaaaaccctggtactgaacagtctgatgcgccagctggcagaagaggctggcaga

SEQ ID NO: 556050 - DNA, 75 bp, synthetic construct
  source 1..75: mol_type = other DNA
tggcctttctcacggaaaactgctgcggcggccaggtgtgcaacctgtcttgcaccacggaagccgggaaggtgt

SEQ ID NO: 556051 - DNA, 75 bp, synthetic construct
  source 1..75: mol_type = other DNA
ccctggcggccatcgctcaagaatcgcgcctcgcggtgttccggcttctcgtccaggccggccccgccggcatgg

SEQ ID NO: 556052 - DNA, 75 bp, synthetic construct
  source 1..75: mol_type = other DNA
ttattcctttatcacacttatcgggtgaggaactcctggcccacctgcgctttaaccgggttaccgatgaaaaag

SEQ ID NO: 556053 - DNA, 75 bp, synthetic construct
  source 1..75: mol_type = other DNA
gctaccagtacactgaatcagatggtatggatctgacttatttccttgaatatcaggcgggtgtcattaaacgtg

SEQ ID NO: 556054 - DNA, 75 bp, synthetic construct
  source 1..75: mol_type = other DNA
gcgctgttttactggtatatgctgaaatcgggctacgatgtctttaaatatatttccatcagccgtttgcttcat

SEQ ID NO: 556055 - DNA, 75 bp, synthetic construct
  source 1..75: mol_type = other DNA
atccgtgcctgcattctgcattttatgctggcccatgaacatccatttcgcgatggcaacgggcgcaccagtcgg

SEQ ID NO: 556056 - DNA, 75 bp, synthetic construct
  source 1..75: mol_type = other DNA
cccgtctggcgcgcaacgcggcgatccaacgaattaattattgcaatgaagcgggtgaacaggccggattcaaca

SEQ ID NO: 556057 - DNA, 75 bp, synthetic construct
  source 1..75: mol_type = other DNA
gcagtaccgcatcaaaaaaggagaaaacgtcgatgtggcgtggacgcttacccgtctggcgcgcaacgcggcgat

SEQ ID NO: 556058 - DNA, 75 bp, synthetic construct
  source 1..75: mol_type = other DNA
cagttacagcagccggatgatgttcaccgctttaccctgctgcgctcattccgccgggatgaatggagccgctgg

SEQ ID NO: 556059 - DNA, 75 bp, synthetic construct
  source 1..75: mol_type = other DNA
cgggtggcaacagcacatggttttcgttcaacattcagggactggtgtagtgaacagggatttggcggaaagggc

SEQ ID NO: 556060 - DNA, 75 bp, synthetic construct
  source 1..75: mol_type = other DNA
gccacggcacatggttttcgctcaacattcagggactggtgtagtgaacaggggtattcgcgggatctggcggaa

SEQ ID NO: 556061 - DNA, 75 bp, synthetic construct
  source 1..75: mol_type = other DNA
gttgattggcgcagaggtcgccagtatgcgcgactatgtggcccatcaacacgccatcacccttgtcgccggaac

SEQ ID NO: 556062 - DNA, 75 bp, synthetic construct
  source 1..75: mol_type = other DNA
acgaccgactggcgtgaagaaaatacgccagtggtgatggcaggaatggtcggcagcaatgtcggctggaaagtt

SEQ ID NO: 556063 - DNA, 75 bp, synthetic construct
  source 1..75: mol_type = other DNA
agggtggcagtttgttgatggttacaaagtaacgctttcctatggaactggtttccttgctccttcgcttggtca

SEQ ID NO: 556064 - DNA, 75 bp, synthetic construct
  source 1..75: mol_type = other DNA
aaagcaatcgctggcgaaggtgacgtcaattcctctggtcagtccggttgagttttcgacatcatcgtggcggcg

SEQ ID NO: 556065 - DNA, 75 bp, synthetic construct
  source 1..75: mol_type = other DNA
cgccgatttgagtggggcaacaaaaggtcagcttgaagcctggcaggagaatgccatgttcgatacagggcgtta

SEQ ID NO: 556066 - DNA, 75 bp, synthetic construct
  source 1..75: mol_type = other DNA
gcgcgagctctggctccttcctctctttatgttatgcccggaacccattgcaaatgggtgcaggccgatagccag

SEQ ID NO: 556067 - DNA, 75 bp, synthetic construct
  source 1..75: mol_type = other DNA
tgaccctaacacgctggttggtttgccgcttattgcgctctgtcagatgttgcgtcgggaaggaaaaaatccgct

SEQ ID NO: 556068 - DNA, 75 bp, synthetic construct
  source 1..75: mol_type = other DNA
aaatctctttcgaatgtgccgccccggaggtcgacgaaaccccgcatagcgatgaatcaccgcgccagctggtgc

SEQ ID NO: 556069 - DNA, 75 bp, synthetic construct
  source 1..75: mol_type = other DNA
ctttgccgattttgtacgtgatggcaaaagcaaacaaaacccgcccacaagcgggttttttgtgccacttatctc

SEQ ID NO: 556070 - DNA, 75 bp, synthetic construct
  source 1..75: mol_type = other DNA
agttttcgacatcatcatggcgacgggcagttctgtctcttgaagaacatcataaagcctggttgttgtggtgtt

SEQ ID NO: 556071 - DNA, 75 bp, synthetic construct
  source 1..75: mol_type = other DNA
tgcaatgaaacacatttttcaccggctggataatgaggctttattgttcgtgacgagaacacgtttaaaacaaaa

SEQ ID NO: 556072 - DNA, 75 bp, synthetic construct
  source 1..75: mol_type = other DNA
ccaactggtgcttcgactggcgcaagaaaaagcgcaatccttagcatcacgttatccagaccatttaattattgg

SEQ ID NO: 556073 - DNA, 75 bp, synthetic construct
  source 1..75: mol_type = other DNA
tggctggcggcgcaggcagtaaaagcagaactttttggtggggaaggttatgaatacaggagctggcattactgg

SEQ ID NO: 556074 - DNA, 75 bp, synthetic construct
  source 1..75: mol_type = other DNA
tcgaagcactgaagctcatcgacgttgaatatgaagtgcttaagccggtaatgtcgattgacgaggcaatggcgg

SEQ ID NO: 556075 - DNA, 75 bp, synthetic construct
  source 1..75: mol_type = other DNA
ctgacggcagtgaagatggatttccgcgccaacacgggcccttacggcaaccactcactcaccgtaccgtgtaac

SEQ ID NO: 556076 - DNA, 75 bp, synthetic construct
  source 1..75: mol_type = other DNA
ccggaaccgtcaccgcttgaccgccgtatgttcggcaaaaaaatgcgtcacgtcggcgatcgcgttgctgcggtg

SEQ ID NO: 556077 - DNA, 75 bp, synthetic construct
  source 1..75: mol_type = other DNA
ttaccgggtgtcgttcacattattactcacctgaactgcccggatatttattataccccgggaggtcagagcgca

SEQ ID NO: 556078 - DNA, 75 bp, synthetic construct
  source 1..75: mol_type = other DNA
ttttgccggttctgacgcaattatctttaacggtaatatcgtcaacgcatccctgcttattgccgcacagttaga

SEQ ID NO: 556079 - DNA, 75 bp, synthetic construct
  source 1..75: mol_type = other DNA
gcgatgctggctggcagcagtattatcaggttattgagctcgcggtagcgcggaaaaacaatcctcaggcaacaa

SEQ ID NO: 556080 - DNA, 75 bp, synthetic construct
  source 1..75: mol_type = other DNA
tgaataccagacactggcatcattggtgggagtgacacaaaaaactggtccgagacatttactgaacgctgggtt

SEQ ID NO: 556081 - DNA, 75 bp, synthetic construct
  source 1..75: mol_type = other DNA
gagttggtggcgtttctggcggcgaaaggtaaatttattccctgcgaagaagggttctcaaccgatacaagtaaa

SEQ ID NO: 556082 - DNA, 75 bp, synthetic construct
  source 1..75: mol_type = other DNA
atggactctattcacggtcatgaagtgttaaatatgatgattgaatcaggcgagcaatatacgcatgccagtctg

SEQ ID NO: 556083 - DNA, 75 bp, synthetic construct
  source 1..75: mol_type = other DNA
aaaggcgaagttagtttcggggatattgcccataaaggcgaaaccggcaccggctttggttcactggtgggaact

SEQ ID NO: 556084 - DNA, 75 bp, synthetic construct
  source 1..75: mol_type = other DNA
cggatattggtactggtctggatactgtagtgacgaaactggcagcagaagtgctgcactgcccaccgcaggacg

SEQ ID NO: 556085 - DNA, 75 bp, synthetic construct
  source 1..75: mol_type = other DNA
tggctggcggcgcaggcagtaaaagcagaactttttggtggggaaggttatgaataccaggagctggcattactg

SEQ ID NO: 556086 - DNA, 75 bp, synthetic construct
  source 1..75: mol_type = other DNA
cgaaagacctcaacgatgttatgagtcatctccccggtgtaaatatctctcaaactggtggaatggggacgagtt

SEQ ID NO: 556087 - DNA, 75 bp, synthetic construct
  source 1..75: mol_type = other DNA
aatttggctctttacagtcgttttccattaacgtggattatggaagctgccgacgatatctcttattgtgtggct

SEQ ID NO: 556088 - DNA, 75 bp, synthetic construct
  source 1..75: mol_type = other DNA
tacccattcaatggaagttcagcaggtggggcgctatatcgccaaagagattttaagtcgtctgaaagaacttaa

SEQ ID NO: 556089 - DNA, 75 bp, synthetic construct
  source 1..75: mol_type = other DNA
tacccactcgatggaagtccagcaggtggggcgctacatcgccaaagaaattttaagccgtctgaaagagcttaa

SEQ ID NO: 556090 - DNA, 75 bp, synthetic construct
  source 1..75: mol_type = other DNA
tggttggtccgctgatcgacgttatgggctctgcgggtgaagacctgaaacgccagcaggcgcaggttgagcagg

SEQ ID NO: 556091 - DNA, 75 bp, synthetic construct
  source 1..75: mol_type = other DNA
gcagttcaaccgccaggccgatggcactatggaaccgcttccgaagccgtctgttgataccggtatggggctgga

SEQ ID NO: 556092 - DNA, 75 bp, synthetic construct
  source 1..75: mol_type = other DNA
gcacctgatgcacgctgcgctgcgccaggttctgggtactcatgtatcgcagaaaggttcactggttaacgacaa

SEQ ID NO: 556093 - DNA, 75 bp, synthetic construct
  source 1..75: mol_type = other DNA
aaatgcttcaagcgcaaatcgttttggtctggtgagaggaggtggattaagcaaatactctcgcttctggcgtgc

SEQ ID NO: 556094 - DNA, 75 bp, synthetic construct
  source 1..75: mol_type = other DNA
atggaagggtcgccagtggagataaaggaaatcaagcgcatcaccaactatgccatgagtgtagctggtggacaa

SEQ ID NO: 556095 - DNA, 75 bp, synthetic construct
  source 1..75: mol_type = other DNA
caggactccacccttgctggaaaactgtgccagatggcgattaatgaactgcgtcaggagagcggcaacgaatca

SEQ ID NO: 556096 - DNA, 75 bp, synthetic construct
  source 1..75: mol_type = other DNA
gaaaatgcctgggaaaaatcacgctcaaatagtttaagccgcagtacggaagatcagttttttatgtatttacgg

SEQ ID NO: 556097 - DNA, 75 bp, synthetic construct
  source 1..75: mol_type = other DNA
gcgaaagaacgacaaaaagcgtctctcgcaagaaggagtgccactcataaagcgtttcatgccgtcattcagctt

SEQ ID NO: 556098 - DNA, 75 bp, synthetic construct
  source 1..75: mol_type = other DNA
tgtgtcatgccatcgcgcaaccatacccagcggcaaggcccgtactgtatctatggtggcgctggtggggcagcc

SEQ ID NO: 556099 - DNA, 75 bp, synthetic construct
  source 1..75: mol_type = other DNA
gccaaaactgcgccgattctctgtgccggaattaccacattctcaccattacgaacctggaatgttggcccaggc

SEQ ID NO: 556100 - DNA, 75 bp, synthetic construct
  source 1..75: mol_type = other DNA
agttttcgacatcatcttggcggcgggctgttctgtctcttgaagaacatcataaagcctggttgttgtggtgtt

SEQ ID NO: 556101 - DNA, 75 bp, synthetic construct
  source 1..75: mol_type = other DNA
atggcagcagtaacaacctcccgcaggccgtcgccgctgcagcgacgggtactgattgtgctggccgccctcgat

SEQ ID NO: 556102 - DNA, 75 bp, synthetic construct
  source 1..75: mol_type = other DNA
acgttctattgagttaaataccaaaacagcggaaggcaaagaggtaatggaaaagctgatccgcgaagctgatat

SEQ ID NO: 556103 - DNA, 75 bp, synthetic construct
  source 1..75: mol_type = other DNA
gagcctgttttgaagggcgctggcactggcagccagcgacaccccggaaaatcagggaatatgcccctcaggaca

SEQ ID NO: 556104 - DNA, 75 bp, synthetic construct
  source 1..75: mol_type = other DNA
cggcccgtccctttgtctcttttacactggaaaattcagaaaccgtggcagatgcgctgacccgtgcagcccggc

SEQ ID NO: 556105 - DNA, 75 bp, synthetic construct
  source 1..75: mol_type = other DNA
ttcgggattgacctccgccagcgtgttatccggctcagcaacggcaggtttatggaagagccgtgcatctggttc

SEQ ID NO: 556106 - DNA, 75 bp, synthetic construct
  source 1..75: mol_type = other DNA
gccggaatgctggctacagcgcgttttctccggagtattgctgatgattgccacgttgattctggtgacgctatg

SEQ ID NO: 556107 - DNA, 75 bp, synthetic construct
  source 1..75: mol_type = other DNA
cgtgtacgccagctttttgctgtcggataagatgctgctgatactgtttgcgctggtcctggtggggctggcatt

SEQ ID NO: 556108 - DNA, 75 bp, synthetic construct
  source 1..75: mol_type = other DNA
tgctgtgcaggtgctggccgcgacgtccctgacggtggtgatgctgagtgcgttgattaacgtctgcgccttctg

SEQ ID NO: 556109 - DNA, 75 bp, synthetic construct
  source 1..75: mol_type = other DNA
gataaggtcactggaaaaatagtaacgctggataatccaccgatcccgggaaaacaatcgctggcgaaaggttca

SEQ ID NO: 556110 - DNA, 75 bp, synthetic construct
  source 1..75: mol_type = other DNA
tgccgggccatgaaattgtagggcgcgtggtagccgttggtgatcaggtagaaaaacatgcgccgggcgatctgg

SEQ ID NO: 556111 - DNA, 75 bp, synthetic construct
  source 1..75: mol_type = other DNA
tcgttttctgcttgccagcccgctgctgggtggtttattgacgatggcgagcgcggtgctggtactgtatccggc

SEQ ID NO: 556112 - DNA, 75 bp, synthetic construct
  source 1..75: mol_type = other DNA
acgatatgggttgcctgggtattgaagccttgctggctgccggttatgaaattagtgctatttttacccatgccg

SEQ ID NO: 556113 - DNA, 75 bp, synthetic construct
  source 1..75: mol_type = other DNA
tgaaaatctgctggatgcagtgattggtctgccggaaaaactgttttacggtaccggtattccggctgcgattct

SEQ ID NO: 556114 - DNA, 75 bp, synthetic construct
  source 1..75: mol_type = other DNA
gtacggggattccggctgcgattctgattttcaaaaagcagaaagtggatgacaaggtgctgtttatcgacgcca

SEQ ID NO: 556115 - DNA, 75 bp, synthetic construct
  source 1..75: mol_type = other DNA
gaactgggcgagatgctgctggcgagcttacgaaaaacatccgctgcgccatcatttcccaccgtttgcgggctt

SEQ ID NO: 556116 - DNA, 75 bp, synthetic construct
  source 1..75: mol_type = other DNA
accgcccgacgccgtacccgggtactcatcctcggggtgaatggctttattggcaaccatctgacagaacgcctg

SEQ ID NO: 556117 - DNA, 75 bp, synthetic construct
  source 1..75: mol_type = other DNA
acagttacttgaccgggttatctgggcatatggcgaaaaagaaggattacaatttactctctttcgcccgtttaa

SEQ ID NO: 556118 - DNA, 75 bp, synthetic construct
  source 1..75: mol_type = other DNA
atagctgatttccgcgcccttccctttgccgataacactttccctgtcgtcgttttcgatccgccgcacctcgag

SEQ ID NO: 556119 - DNA, 75 bp, synthetic construct
  source 1..75: mol_type = other DNA
atgaacgacaaaatcaatcaggacactatcaacaaagccctgtgggccgcgtgcgataccttccgtggcaccatc

SEQ ID NO: 556120 - DNA, 75 bp, synthetic construct
  source 1..75: mol_type = other DNA
gtgatggcgataacgtcgataaatacgcctatcttgccagcctgaaagagattcaggacaacgattacaacctta

SEQ ID NO: 556121 - DNA, 75 bp, synthetic construct
  source 1..75: mol_type = other DNA
agtgctgatacctataaagactttatccttacaatgctgttccttaagtacatttcagatgtctggcaggatcac

SEQ ID NO: 556122 - DNA, 75 bp, synthetic construct
  source 1..75: mol_type = other DNA
gggacctgtcacgcctgggctggacggatgaacgcattggtacagagctggggatggaccaggatgaagtgctga

SEQ ID NO: 556123 - DNA, 75 bp, synthetic construct
  source 1..75: mol_type = other DNA
gcgatatttagcgatatcagaaaggaagagcacacattgtgtgatggacgacgcctgattatcagtcctgatctg

SEQ ID NO: 556124 - DNA, 75 bp, synthetic construct
  source 1..75: mol_type = other DNA
cggataacgttaaccatccgctgtgggtagaacgcatagcccaactgtcacctgatgtgattttctctttttatt

SEQ ID NO: 556125 - DNA, 75 bp, synthetic construct
  source 1..75: mol_type = other DNA
atatcggcgttgcggggttgacgctgatggtgcctttcctcgcagcgtacatcggttattccattgcagaacgtt

SEQ ID NO: 556126 - DNA, 75 bp, synthetic construct
  source 1..75: mol_type = other DNA
catcgctgccgtgggtatttgtatcccgccgctgccgatccgctgcgtgtcattccttccatcatggtcggttca

SEQ ID NO: 556127 - DNA, 75 bp, synthetic construct
  source 1..75: mol_type = other DNA
gatccgaatctgaaaaaactgtttgatatcggcgttgcgggtttgacgctgatggtgcctttcctcgccgcttac

SEQ ID NO: 556128 - DNA, 75 bp, synthetic construct
  source 1..75: mol_type = other DNA
gccctgacctgatagcagattttcgtgcattaccatttgcagacgcatcgtttccggttgttgtattcgaccctc

SEQ ID NO: 556129 - DNA, 75 bp, synthetic construct
  source 1..75: mol_type = other DNA
gtgagtgcgtcggctaccattctcgacatgtgctgtggcagtcgcatgttctggtttgataagaatgacgaacgg

SEQ ID NO: 556130 - DNA, 75 bp, synthetic construct
  source 1..75: mol_type = other DNA
cgcagaagagcgcgaaaccggcaaagcggcactggtgatgggctgtgttggcgttactgaaggggcgattccttt

SEQ ID NO: 556131 - DNA, 75 bp, synthetic construct
  source 1..75: mol_type = other DNA
gatccgtggccgggtgccttcagctatgttggtaatcaaaaatttaccgtctggtcgtcacgcgtgcattctcat

SEQ ID NO: 556132 - DNA, 75 bp, synthetic construct
  source 1..75: mol_type = other DNA
cggatgacgttaaccatccgctgtgggtggaacgcattgcccaactatcaccagatgtgattttctctttttatt

SEQ ID NO: 556133 - DNA, 75 bp, synthetic construct
  source 1..75: mol_type = other DNA
tgatttctgtttcaccgctgttgattgcctgtggttatggcacgctggaaatcgtcaccggacaggcgggcgacg

SEQ ID NO: 556134 - DNA, 75 bp, synthetic construct
  source 1..75: mol_type = other DNA
actgtggccacacggcgttctcatattcaaatggaacgagacgcagatccctgttagccagattttggcacttac

SEQ ID NO: 556135 - DNA, 75 bp, synthetic construct
  source 1..75: mol_type = other DNA
cggataacgttaatcatccgctgtgggtggaacgcattgcccaactatcaccagaggtgattttctctttttatt

SEQ ID NO: 556136 - DNA, 75 bp, synthetic construct
  source 1..75: mol_type = other DNA
cgctgcctggactgggaaccgaaaattgatatgcaggaaaccatcgacgaaacgctggatttcttcctgcgcacc

SEQ ID NO: 556137 - DNA, 75 bp, synthetic construct
  source 1..75: mol_type = other DNA
gtgctgttccgtggctccagcgaaggcaaaattaggcagaaactgattgatgaaaatctgctggatgcggtgatt

SEQ ID NO: 556138 - DNA, 75 bp, synthetic construct
  source 1..75: mol_type = other DNA
cctaatctaaatcactcttcttatataaaaggttttatatatgataccttaaactccttaattgccattataaaa

SEQ ID NO: 556139 - DNA, 75 bp, synthetic construct
  source 1..75: mol_type = other DNA
tggttgggttaaaaccgctggcgcatcggctggttgatagcctctcaggcggtgaacgtcagcgggcgtggatcg

SEQ ID NO: 556140 - DNA, 75 bp, synthetic construct
  source 1..75: mol_type = other DNA
accgtgcgtgaactggtggcgattggtcgttacccgtggcatggcgcactggggcgctttggtgcggcagatcgc

SEQ ID NO: 556141 - DNA, 75 bp, synthetic construct
  source 1..75: mol_type = other DNA
tgttatgggagacgggaagaacggtatcactattgatacgcaatccatacccgcagatatcagtggtatcgaaga

SEQ ID NO: 556142 - DNA, 75 bp, synthetic construct
  source 1..75: mol_type = other DNA
acataagagcctgtcattatgttcactcatcacctcaagcaaatttaaatatctcttcaaaattttttcaattaa

SEQ ID NO: 556143 - DNA, 75 bp, synthetic construct
  source 1..75: mol_type = other DNA
accgtggcacgctatcacattaggtcagcaagtgctcactatcatgagtgaacgcttgccgattgaacgtattca

SEQ ID NO: 556144 - DNA, 75 bp, synthetic construct
  source 1..75: mol_type = other DNA
gataaattttaccgccatgctaactgtcctgatgtcgctgatgatgagccgttgacaatggaacagtcttgtatg

SEQ ID NO: 556145 - DNA, 75 bp, synthetic construct
  source 1..75: mol_type = other DNA
gctatgaagggggcattaaatggatacccactgtaatggttggcgttgctaaaacagctatcgctagaaccaaaa

SEQ ID NO: 556146 - DNA, 75 bp, synthetic construct
  source 1..75: mol_type = other DNA
gccattgagaaaaaaggcaaagaaagcgaagaagctgtgatgttagataatttgaaaaccttgtttgggggtggc

SEQ ID NO: 556147 - DNA, 75 bp, synthetic construct
  source 1..75: mol_type = other DNA
gctgggtgatattggttttgctaacaccaccttcagtgatgctgactttggcgcactgggtattttgttagggat

SEQ ID NO: 556148 - DNA, 75 bp, synthetic construct
  source 1..75: mol_type = other DNA
gccaagttgggcgttattactcgcaaaccaaaacctcaagaagtgcaagaccccgtattcatcgattttgccaaa

SEQ ID NO: 556149 - DNA, 75 bp, synthetic construct
  source 1..75: mol_type = other DNA
tcttatctgagaatgctcgacaactgtccaagtggattgaaatgcatccacatagattttatcgccatgctaact

SEQ ID NO: 556150 - DNA, 75 bp, synthetic construct
  source 1..75: mol_type = other DNA
gctgccggctgttatcaccatccggcgggcggtcagcctgcggcccgctataaaaatatcgtccggcgtcagctg

SEQ ID NO: 556151 - DNA, 75 bp, synthetic construct
  source 1..75: mol_type = other DNA
ggccgatgcttgggcaaaatcatcattttaatcacgctgccccccaaaccattccttacgctattgaacgttatc

SEQ ID NO: 556152 - DNA, 75 bp, synthetic construct
  source 1..75: mol_type = other DNA
atgatcgatctctatttcgccccgacaccaaatggtcacaaaattacgctgtttctcgaagaagcagggctggat

SEQ ID NO: 556153 - DNA, 75 bp, synthetic construct
  source 1..75: mol_type = other DNA
tgtactgaacaagcggctggaaaactcgccctggctgggaggcgagaactacagcattgcggatattgcctgctg

SEQ ID NO: 556154 - DNA, 75 bp, synthetic construct
  source 1..75: mol_type = other DNA
caaggatattttgcaccgaaacacgtcgccgccaaatacaaagaatggcttgttcgtttgcttggcccttatcgt

SEQ ID NO: 556155 - DNA, 75 bp, synthetic construct
  source 1..75: mol_type = other DNA
ttttaatcacgcagcccccaaaccattccttacgctattgaacgttatcaggttgaaactcagcgtctttaccat

SEQ ID NO: 556156 - DNA, 75 bp, synthetic construct
  source 1..75: mol_type = other DNA
cagcgaattgaactcgcaatgtatccggcagtaaaaaactggtatgaacgaatccgctcacgtcctgctaccggg

SEQ ID NO: 556157 - DNA, 75 bp, synthetic construct
  source 1..75: mol_type = other DNA
tttatctttgatgaagttcaactgccggaagaccgcttgcaacgctatccgctactcgaagaaatggcggtttac

SEQ ID NO: 556158 - DNA, 75 bp, synthetic construct
  source 1..75: mol_type = other DNA
gacgtggcgtccacggctgcaaagcaaaccgaaggtggacgggccacagagcgccattgtcaccggtcctgcggg

SEQ ID NO: 556159 - DNA, 75 bp, synthetic construct
  source 1..75: mol_type = other DNA
cgatagtgacggggccagcgggagaggagattttctgcgacgaacatggtcgggtacgggtgaagtttcactggg

SEQ ID NO: 556160 - DNA, 75 bp, synthetic construct
  source 1..75: mol_type = other DNA
attcaaaggtatttcagacaagctggttccgaatgccagacctgctctcgattgcccggtcgtcttcccttacgc

SEQ ID NO: 556161 - DNA, 75 bp, synthetic construct
  source 1..75: mol_type = other DNA
acttctcaacattatcttatgtattggccggtttcatcggcagcaagtttggtaataaagagcactcgactgaag

SEQ ID NO: 556162 - DNA, 75 bp, synthetic construct
  source 1..75: mol_type = other DNA
ctcgctgaaggcaacgcgttttaacgcgtcgaaaattgaccgaatcatcggcctggcgatgaatagtctggatcc

SEQ ID NO: 556163 - DNA, 75 bp, synthetic construct
  source 1..75: mol_type = other DNA
ggttcgccacctgatgaccggcagctttgcccccattggcgcagcattgtttggcttcctttacgcgccgctggt

SEQ ID NO: 556164 - DNA, 75 bp, synthetic construct
  source 1..75: mol_type = other DNA
gaaaaaagctgcacggcaaaatatgaaatggcatgaacagttgatctcccatttcgcagagatcttcttcccgtt

SEQ ID NO: 556165 - DNA, 75 bp, synthetic construct
  source 1..75: mol_type = other DNA
tatgaagcaaggctatgagaacgtggcaaaagtgattacgcctgaaactactgcgttactgtgcgcaaccgacac

SEQ ID NO: 556166 - DNA, 75 bp, synthetic construct
  source 1..75: mol_type = other DNA
actgaaacaggacgcgcttctgcttgagcagtggcagcgtcagggagtgcctttacgttacagcctgggttatta

SEQ ID NO: 556167 - DNA, 75 bp, synthetic construct
  source 1..75: mol_type = other DNA
agctgttttgccgtgcagggatacggtgaaagccgccctgtggccccgaatgacacggcggaaggccgtgcgcgt

SEQ ID NO: 556168 - DNA, 75 bp, synthetic construct
  source 1..75: mol_type = other DNA
gacacccgggcccctgttgtactggtgtgtggtgacatgccggaagcgttgtttcaggacggtcctctgcgtaaa

SEQ ID NO: 556169 - DNA, 75 bp, synthetic construct
  source 1..75: mol_type = other DNA
aaggcaagatgaatctcaacgtgcaacaggcgggcggcagtgtgctggtggtttcccagtttaccctcgccgcag

SEQ ID NO: 556170 - DNA, 75 bp, synthetic construct
  source 1..75: mol_type = other DNA
atatacgcatcgaaaacgctaacgctgtctccgggttgacctggggattcccgtcgatgacccattttctcggtt

SEQ ID NO: 556171 - DNA, 75 bp, synthetic construct
  source 1..75: mol_type = other DNA
tgctgggattcaataattgataaaaagagttatgaaactctgattttttttaaaaaagggacctgggagcagatg

SEQ ID NO: 556172 - DNA, 75 bp, synthetic construct
  source 1..75: mol_type = other DNA
cgtaatatcagttatctcggcgtgccgcatagtgacgtgacaaccggtaagcgacgtcacgaagcctacctggcg

SEQ ID NO: 556173 - DNA, 75 bp, synthetic construct
  source 1..75: mol_type = other DNA
ttgtttggcttcctgtacgccccgctggtgatcaccggtgtacaccagaccacgcttgctattgatttgcagatg

SEQ ID NO: 556174 - DNA, 75 bp, synthetic construct
  source 1..75: mol_type = other DNA
caggattgctgtgcggcctgaacggcgtcatggcaaacggcattggtgttggtggtctgccgggcattctctcga

SEQ ID NO: 556175 - DNA, 75 bp, synthetic construct
  source 1..75: mol_type = other DNA
cgtcagtctggtccgactggctctgttcccgtacctgtttgcagttttcccgaaaaccggggcagacagtgccgg

SEQ ID NO: 556176 - DNA, 75 bp, synthetic construct
  source 1..75: mol_type = other DNA
agttcggtttgtcgccagcagatgctttgagaaaggtagctgaggtgaacgagaatgggcgcatttatcgctttc

SEQ ID NO: 556177 - DNA, 75 bp, synthetic construct
  source 1..75: mol_type = other DNA
atggtcaatttgagccaaatacaaactcaaaatgacgcaaaaaaaatgctaaaaggatcatgcgacgatggttca

SEQ ID NO: 556178 - DNA, 75 bp, synthetic construct
  source 1..75: mol_type = other DNA
ttggatgttcactctttttatttatcaggtttcattatttggacaactgcgttggtggaaaaaaagaaaggatat

SEQ ID NO: 556179 - DNA, 75 bp, synthetic construct
  source 1..75: mol_type = other DNA
atttggccacctgaacagaggtgatatgctcacctcagaacaacacaggtgccataatgaaaaaaagaaatttca

SEQ ID NO: 556180 - DNA, 75 bp, synthetic construct
  source 1..75: mol_type = other DNA
agcctggatgaatacctcaaagcctggtttgccctgcaccttctcgaagcgatgttccaaccttctgattccggt

SEQ ID NO: 556181 - DNA, 75 bp, synthetic construct
  source 1..75: mol_type = other DNA
ggcggacgcttcatcgaactaaaaaccgtccaaattcttgaccgcctggagctggaaaagccctgtatcgatgcc

SEQ ID NO: 556182 - DNA, 75 bp, synthetic construct
  source 1..75: mol_type = other DNA
aagaacgcttcaccgctttacagtcaggggaggtggatttgctctcccgtaatacgacctggacttcatctcgcg

SEQ ID NO: 556183 - DNA, 75 bp, synthetic construct
  source 1..75: mol_type = other DNA
gtattgatgttgatgtttgtcgtggcgtcgccgccgctgtatttggcgatgacacaaaagtgaaatacaccccgc

SEQ ID NO: 556184 - DNA, 75 bp, synthetic construct
  source 1..75: mol_type = other DNA
atatctcactatccattaacggatttgtgacagaaaccattgtctttttttatatttgcttaaatctttttttgc

SEQ ID NO: 556185 - DNA, 75 bp, synthetic construct
  source 1..75: mol_type = other DNA
gatcttaacgttgatgttactgacattgtgttcggtacaggtaatttcacaaatgacaaaactggagagtattat

SEQ ID NO: 556186 - DNA, 75 bp, synthetic construct
  source 1..75: mol_type = other DNA
atgagatattttaccgaattaatctgtcaactctacaggttaacagaacaccataaactgaccgctgcaacgttt

SEQ ID NO: 556187 - DNA, 75 bp, synthetic construct
  source 1..75: mol_type = other DNA
atatgctcttctcgatagcctaagtaaacaaggattattgcagtataccaaaactcatatgaaagcattcagaat

SEQ ID NO: 556188 - DNA, 75 bp, synthetic construct
  source 1..75: mol_type = other DNA
ccagtggtacctcagttggatgctaaaattactacagtatcgggtgataaaatgaagatgtgtaagggggttact

SEQ ID NO: 556189 - DNA, 75 bp, synthetic construct
  source 1..75: mol_type = other DNA
taagtactggcctgctgccgtgggtgctggcgcagtggggaatgggggatgcggacgatttcctggactctcagg

SEQ ID NO: 556190 - DNA, 75 bp, synthetic construct
  source 1..75: mol_type = other DNA
atggcctgtttgccttccggcagttcattaacgctgctgctttttgttctcttcagcaccaccatttcggcagtc

SEQ ID NO: 556191 - DNA, 75 bp, synthetic construct
  source 1..75: mol_type = other DNA
gtaggtcacaccttgctggctgaattttccccgcgccgccatcgcggtattttgctgggcgcattcagcgtggtg

SEQ ID NO: 556192 - DNA, 75 bp, synthetic construct
  source 1..75: mol_type = other DNA
ctattttggcccccatgttttactgggcgatgaagtggcaacctcgagccataaacacatcaaaaccttgttctc

SEQ ID NO: 556193 - DNA, 75 bp, synthetic construct
  source 1..75: mol_type = other DNA
ttgccaccgccatgagtcggttgggggcggcggtaagtactggcctgctgccgtgggtgctggcgcagtggggaa

SEQ ID NO: 556194 - DNA, 75 bp, synthetic construct
  source 1..75: mol_type = other DNA
tggtgggcattttgcctgcggaaagttttcctactgacattcgctcgctgggcgtcggttttgccaccgccatga

SEQ ID NO: 556195 - DNA, 75 bp, synthetic construct
  source 1..75: mol_type = other DNA
acggcatcttcctctccaacggtcctggcgacccggccccgtgcgattacgccattaccgccatccagaaattcc

SEQ ID NO: 556196 - DNA, 75 bp, synthetic construct
  source 1..75: mol_type = other DNA
gcagatttgcattgatttacgtcatcattgtgaatcaatatgcaaataaagtgagtgaatattctctggagggtg

SEQ ID NO: 556197 - DNA, 75 bp, synthetic construct
  source 1..75: mol_type = other DNA
gtcgagctggaaagcctgctgctggcggacgtgactgaaaccgtatggcctgccgaagttggcatggtctacggc

SEQ ID NO: 556198 - DNA, 75 bp, synthetic construct
  source 1..75: mol_type = other DNA
cactgataaaccggcattcagcttccaggggcaccctgaagccagcccggggccgcacgacgcagctatgttgtt

SEQ ID NO: 556199 - DNA, 75 bp, synthetic construct
  source 1..75: mol_type = other DNA
acctgccgctgattgccagcaacttccgtaataccgaagatctctcttcatacttgaaacgccataacatcgtgg

SEQ ID NO: 556200 - DNA, 75 bp, synthetic construct
  source 1..75: mol_type = other DNA
gccaagcgcaacatcctgcgtatgctggtggatagaggttgtcgcctgaccatcgttccggcgcaaacttctgcg

SEQ ID NO: 556201 - DNA, 75 bp, synthetic construct
  source 1..75: mol_type = other DNA
gctgattacgctcgcttcgttcttacaattttttgccaccacgccagagcatcttattggactgcgcattttgat

SEQ ID NO: 556202 - DNA, 75 bp, synthetic construct
  source 1..75: mol_type = other DNA
tcgatgcgctcgccagaatgggctgtcagctcatcgttacgcccaatatccatagtgaagtgatccgccgtgcgg

SEQ ID NO: 556203 - DNA, 75 bp, synthetic construct
  source 1..75: mol_type = other DNA
ccgcgttaattataagaacggcggtattttttatcgttctgctcgtgacggttacggattcgaggctgactggtc

SEQ ID NO: 556204 - DNA, 75 bp, synthetic construct
  source 1..75: mol_type = other DNA
aacccttagatatactataggagtaactgccggatcttcatttaggttttcaggcctcatgaccaatagctatga

SEQ ID NO: 556205 - DNA, 75 bp, synthetic construct
  source 1..75: mol_type = other DNA
gatttctcatatggatatgatgaagatattaaggagtttatcaaagataaaacttatccttacggtaactggtga

SEQ ID NO: 556206 - DNA, 75 bp, synthetic construct
  source 1..75: mol_type = other DNA
tgaatggaaatttctctttatttatccaaaggctctgcctgcgctggccacccaggcgttgatggtggacgggga

SEQ ID NO: 556207 - DNA, 75 bp, synthetic construct
  source 1..75: mol_type = other DNA
atgcctgctgctggatgaaccgacctcggcgctggatatcgctcatcaggttgacgtgttggcgctggtgcatcg

SEQ ID NO: 556208 - DNA, 75 bp, synthetic construct
  source 1..75: mol_type = other DNA
ggcgttttgcagaagctcacgctatcgtgcatcgctattttggtccccatgttttactgggcgatgaagtggcaa

SEQ ID NO: 556209 - DNA, 75 bp, synthetic construct
  source 1..75: mol_type = other DNA
tttaacagcgtcttctttgtctgcctcgtaatcccatggtttgtgatttatacctggctgccaactatcgcccag

SEQ ID NO: 556210 - DNA, 75 bp, synthetic construct
  source 1..75: mol_type = other DNA
gctggcgcagtgggggatgccggtcactttattgcttctggcggcagtgttgttggttggttttgttgtgacctg

SEQ ID NO: 556211 - DNA, 75 bp, synthetic construct
  source 1..75: mol_type = other DNA
tatctgctggattgaacgtggttattaatacaaatattgaatctagtcatggtcaaggaactgttgcagagattg

SEQ ID NO: 556212 - DNA, 75 bp, synthetic construct
  source 1..75: mol_type = other DNA
aattcgcaaaatcaaagagcaggctcttatgcggcttgagaattatcgtcgctatggctattactcatggtttga

SEQ ID NO: 556213 - DNA, 75 bp, synthetic construct
  source 1..75: mol_type = other DNA
tccgagtcataggtggtacaaataaacaacgcttagatttcatacgtgccataactaacaaaaaaggtctaattg

SEQ ID NO: 556214 - DNA, 75 bp, synthetic construct
  source 1..75: mol_type = other DNA
ccaaagttgggatgccggactgcgctataacggcgaactgattaaatcacaactgattaccagctacagccatag

SEQ ID NO: 556215 - DNA, 75 bp, synthetic construct
  source 1..75: mol_type = other DNA
cagggaaagtatggcctgcacatttcgcaccattgcagaggaattacttacccatatggctcgtcgatggacaac

SEQ ID NO: 556216 - DNA, 75 bp, synthetic construct
  source 1..75: mol_type = other DNA
atactttcagtaccattctccatgaccatgatttcagctctgcctggattgaactccagcttgcccatgttgata

SEQ ID NO: 556217 - DNA, 75 bp, synthetic construct
  source 1..75: mol_type = other DNA
attaaacgacgtcgcttttcgtggacgagtggttatcggcgaaggagaaattgaccatgcgccgatgctgtggat

SEQ ID NO: 556218 - DNA, 75 bp, synthetic construct
  source 1..75: mol_type = other DNA
atgtggattttgattttctggctttcatcgccctttaatgtctcttccggtgatgcccgtcagcccacactggca

SEQ ID NO: 556219 - DNA, 75 bp, synthetic construct
  source 1..75: mol_type = other DNA
aaaaagcctgtcgggatgccttcaccgcgctgaaaaaagaaaacgtgggagaattcgctctccggggagtctgcg

SEQ ID NO: 556220 - DNA, 75 bp, synthetic construct
  source 1..75: mol_type = other DNA
ctaaaagtctttgatttacgtgaaagcatggcgaatggcggcggcccggcgtgcctgcggttgcgggtggtattg

SEQ ID NO: 556221 - DNA, 75 bp, synthetic construct
  source 1..75: mol_type = other DNA
ctactgtctgtactgcacgccgttcggctgtacggtgcgcacgtcggtgaaggtcagccatttccgcccggatct

SEQ ID NO: 556222 - DNA, 75 bp, synthetic construct
  source 1..75: mol_type = other DNA
aatccgcgctcggccaaccagcacagcaagatccgttttaaaaacgccgatgccatcggctttccggcaggcgat

SEQ ID NO: 556223 - DNA, 75 bp, synthetic construct
  source 1..75: mol_type = other DNA
ccattcccgatcgtcaagatcattgccggaggatggcatcagcgtcttcttgcccagaaaggaaaagctgcttca

SEQ ID NO: 556224 - DNA, 75 bp, synthetic construct
  source 1..75: mol_type = other DNA
agtagtcatgcactttgtgacgcatggtggttctgttatgacatggggacaaatgaataggcttgatgatcctga

SEQ ID NO: 556225 - DNA, 75 bp, synthetic construct
  source 1..75: mol_type = other DNA
ggtatagcactgggtgttggttcctctttcttagaagaggcgtttggaggtctcatccgtaaggaagggatacct

SEQ ID NO: 556226 - DNA, 75 bp, synthetic construct
  source 1..75: mol_type = other DNA
gcgtggctatccggaagatatccccgatgagcaggaaaacgatttggggagtaaagatattccgtcatggcgaag

SEQ ID NO: 556227 - DNA, 75 bp, synthetic construct
  source 1..75: mol_type = other DNA
aaccgctttatgggactggtgtcccggcgaaaactgagatatgccgatgataaaccctggactacggcatcgccg

SEQ ID NO: 556228 - DNA, 75 bp, synthetic construct
  source 1..75: mol_type = other DNA
aaacgggtgaagatgttctgtccgcagccattcatcgtattgagtgggtctttgatacattctcttctgtttgcc

SEQ ID NO: 556229 - DNA, 75 bp, synthetic construct
  source 1..75: mol_type = other DNA
cgtattttcccttttaccggtatgccatgacctttgaagagtttgttccagcattttcttcctggtttgccggta

SEQ ID NO: 556230 - DNA, 75 bp, synthetic construct
  source 1..75: mol_type = other DNA
tctggagccggaaacctgggccaggatgtgtgagcgggtgtcgggtgctgccagcggagcgctttatgccaatga

SEQ ID NO: 556231 - DNA, 75 bp, synthetic construct
  source 1..75: mol_type = other DNA
cagaaccggggattcccggatgatatcccggatgaacaggaaaatgatctgggctgccgggatgttccctcctgg

SEQ ID NO: 556232 - DNA, 75 bp, synthetic construct
  source 1..75: mol_type = other DNA
tatctggatatataacgccagaacccgtgccatctacaatcccctgtatgacctgatgtaccgtgccggcgtgtc

SEQ ID NO: 556233 - DNA, 75 bp, synthetic construct
  source 1..75: mol_type = other DNA
cttcaatgtctgaaattgtcagggacctctcacgtctgggctggacagatgaacgaattggaacagaggctgggc

SEQ ID NO: 556234 - DNA, 75 bp, synthetic construct
  source 1..75: mol_type = other DNA
cttcaatgtctgaaattgtcagggacctgtcacgcctgggctggacagatgatcgaattggaacagaggctgggc

SEQ ID NO: 556235 - DNA, 75 bp, synthetic construct
  source 1..75: mol_type = other DNA
ggtgtggcacgcaggaaaaaacgtcgtttctctgtactgttcattgactgggaggctcagtatcagtgcacaatt

SEQ ID NO: 556236 - DNA, 75 bp, synthetic construct
  source 1..75: mol_type = other DNA
ccttttttccgttctaccggtatgcgatgacttttgaggagttcgtgccagactttgcttcctggttcgcaggga

SEQ ID NO: 556237 - DNA, 75 bp, synthetic construct
  source 1..75: mol_type = other DNA
ttgaatattgtaagaaaaatccgcagaaaaatttgtatacctttaaagataaattggcaaatgtcctgccgaatt

SEQ ID NO: 556238 - DNA, 75 bp, synthetic construct
  source 1..75: mol_type = other DNA
gcagatatcgcccgaagaaaaaaacggcgtttctccgtgttgtttattgactgggaggctcagtactcatgtact

SEQ ID NO: 556239 - DNA, 75 bp, synthetic construct
  source 1..75: mol_type = other DNA
atggcgcatatgtctggacgctgtggcgaccctataaatgctgcccgcgtcgtgggcagacctttctcggcagca

SEQ ID NO: 556240 - DNA, 75 bp, synthetic construct
  source 1..75: mol_type = other DNA
aaaagggtctggagtacattcctaacattgaccgaatgatccgtgagaaagaatgtcgggagctaaccactcttg

SEQ ID NO: 556241 - DNA, 75 bp, synthetic construct
  source 1..75: mol_type = other DNA
gacgcaaacaatgagaattacattcagcatccctttccccaaaaaagcggactgcgccatgcttactcattctgg

SEQ ID NO: 556242 - DNA, 75 bp, synthetic construct
  source 1..75: mol_type = other DNA
cgcccggtcagccgatccttgtggggcatcacagcgaacgccgcgcccgtcgtgatgcgcagcgtattgaaaatg

SEQ ID NO: 556243 - DNA, 75 bp, synthetic construct
  source 1..75: mol_type = other DNA
gtttttgattgatgatgcgaaagatatccaggaagagtgggtgaaagaggttaaatgcgtcggcgtgactgcggg

SEQ ID NO: 556244 - DNA, 75 bp, synthetic construct
  source 1..75: mol_type = other DNA
gcttcccgaaaattgtcgggccgcgcaaagatgatatctgctacgccactaccaaccgtcaggaagcggtacgcg

SEQ ID NO: 556245 - DNA, 75 bp, synthetic construct
  source 1..75: mol_type = other DNA
agattagcgaagtaccggacggcgcgatcctgattttctccgcacacggtgtttctcaggcggtacgtaacgaag

SEQ ID NO: 556246 - DNA, 75 bp, synthetic construct
  source 1..75: mol_type = other DNA
gagcacagcgtgatgccgcgcaaaaaaatgcagtgtcggagcggaaggcggcgcaaaccagggaaccacaaaaaa

SEQ ID NO: 556247 - DNA, 75 bp, synthetic construct
  source 1..75: mol_type = other DNA
ctaattgtgttctgcatacaggaattgattcagattttgttcttagtaaactgggttttacagaaaaagatattc

SEQ ID NO: 556248 - DNA, 75 bp, synthetic construct
  source 1..75: mol_type = other DNA
agcacccgaacttatatcgttctgtattattatgatgcggcaaataaagaaattcgctgtgaggtgtcgtatccg

SEQ ID NO: 556249 - DNA, 75 bp, synthetic construct
  source 1..75: mol_type = other DNA
ctctcacttgccggagagattgaggatgaagacagcacgctcgctgaacgtcaggaagcacgggcggagcggttt

SEQ ID NO: 556250 - DNA, 75 bp, synthetic construct
  source 1..75: mol_type = other DNA
ggggaaggtttccgggaaatgacaaaggcacagtgggccgccctgccccgggactgtaaggccgtgcgcagtgtg

SEQ ID NO: 556251 - DNA, 75 bp, synthetic construct
  source 1..75: mol_type = other DNA
ggcgggctgaatcgctggatctgaatatggcaaaactcatcagcagtcatgaccatatcagcgcctgtttcccgc

SEQ ID NO: 556252 - DNA, 75 bp, synthetic construct
  source 1..75: mol_type = other DNA
ccgctacgtggtcgatagcctgcgcgagcgtggggctatctttattgagcagatcagcgaagtgccggacggcgc

SEQ ID NO: 556253 - DNA, 75 bp, synthetic construct
  source 1..75: mol_type = other DNA
tggtgaaaaatatatcatttcactggaagaaacgacggcggggaaaattgatagtgaagcgcaaaagcactatga

SEQ ID NO: 556254 - DNA, 75 bp, synthetic construct
  source 1..75: mol_type = other DNA
cccctggctctactgctttactccggcaaaacccgtctggctttttgatgaagtggaggatgcagacctggtact

SEQ ID NO: 556255 - DNA, 75 bp, synthetic construct
  source 1..75: mol_type = other DNA
cccgtcgtgatgcgcagcgtattgaaaacggcatgaaacgtgccgtgatgctctttgaacgtgcggaatactggg

SEQ ID NO: 556256 - DNA, 75 bp, synthetic construct
  source 1..75: mol_type = other DNA
acggtggttcactggctgtgtctgctgatgatcctctttatgcgacattcagacaggggagacatcgataaacat

SEQ ID NO: 556257 - DNA, 75 bp, synthetic construct
  source 1..75: mol_type = other DNA
gcccgcatttctgcccgcttacagcaggatgccgataaagcgacgttgcgagctctttgttaccaggagctggca

SEQ ID NO: 556258 - DNA, 75 bp, synthetic construct
  source 1..75: mol_type = other DNA
atctaatggcgggatcgcgagcaggtgaacttgcttttacgccattacgtatgcatgggtttatcagaacactag

SEQ ID NO: 556259 - DNA, 75 bp, synthetic construct
  source 1..75: mol_type = other DNA
aagacagcacgcttgctgaacgtcaggaagcacgggcggagcggtttaccggatacagcgggaagcgggccagtg

SEQ ID NO: 556260 - DNA, 75 bp, synthetic construct
  source 1..75: mol_type = other DNA
cacgctgtcggtggatgacacttcggatgttatcgatgcgctgcgtaaacgctttccgaagattgtcgggccgcg

SEQ ID NO: 556261 - DNA, 75 bp, synthetic construct
  source 1..75: mol_type = other DNA
cagaatgtggtggcacgtttgcaacagctgggcggtggtgaagccattacgctggaaggacgtgaagaaaacatt

SEQ ID NO: 556262 - DNA, 75 bp, synthetic construct
  source 1..75: mol_type = other DNA
ttacccggacacaggattttgagccgggcgggcagatttgcagccggggcgagtggctgaccatcattcgcgtga

SEQ ID NO: 556263 - DNA, 75 bp, synthetic construct
  source 1..75: mol_type = other DNA
gctgtcgccagagaggccgcgaagcgcccgcctgttgtcaactatccgggagaaggcttccgggaaatgacaaag

SEQ ID NO: 556264 - DNA, 75 bp, synthetic construct
  source 1..75: mol_type = other DNA
cacggggcataccgctaccgccgcacaatggacaataatttccgcctggtgaatgtgtatatcaccgacatgaaa

SEQ ID NO: 556265 - DNA, 75 bp, synthetic construct
  source 1..75: mol_type = other DNA
acattaatctctctgtgccttcgcgtaactttgtggcactggtcgggcataccggcagtggcaaaagcaccctcg

SEQ ID NO: 556266 - DNA, 75 bp, synthetic construct
  source 1..75: mol_type = other DNA
ctgaccacgcaacaggcgatgctgcaacaggctgtggtggcgggtgaacgcgtgttcgaactgatggatgggccg

SEQ ID NO: 556267 - DNA, 75 bp, synthetic construct
  source 1..75: mol_type = other DNA
tcccgcgtcactaatgatactgaagtgatccgcgacctctacgttaccgtagtggcaacggtcctgcgtagcgcc

SEQ ID NO: 556268 - DNA, 75 bp, synthetic construct
  source 1..75: mol_type = other DNA
ccagaacggcgcagatattccggggaaagataccttcaccaaaaatattggtgcctgccgcgcatatagctcatg

SEQ ID NO: 556269 - DNA, 75 bp, synthetic construct
  source 1..75: mol_type = other DNA
atgcgtagttttagccaactctggccaactctcaaacgcttgttagcgtacggttcaccgtggcggaaaccgctg

SEQ ID NO: 556270 - DNA, 75 bp, synthetic construct
  source 1..75: mol_type = other DNA
gtgctggcggataccttcctcgccaacgtgacgctggggcgtgatatctccgaagaacgcgtctggcaggcgctg

SEQ ID NO: 556271 - DNA, 75 bp, synthetic construct
  source 1..75: mol_type = other DNA
cgcgcaatctccattgcaccggatttcgactatgcgctggtgcagatcgacggtcaggccgtgattctggcgaaa

SEQ ID NO: 556272 - DNA, 75 bp, synthetic construct
  source 1..75: mol_type = other DNA
atgaatgataattttttaacggataaagtccttactggagagaatgttctgcgtgcagcaattgctcgtattgag

SEQ ID NO: 556273 - DNA, 75 bp, synthetic construct
  source 1..75: mol_type = other DNA
cattgtatgactggaaaacaaatgatatatggacgtataactcaagaacccgcgccatctacaatcccctgtacg

SEQ ID NO: 556274 - DNA, 75 bp, synthetic construct
  source 1..75: mol_type = other DNA
gacggcacaaaaagggatagtccagctcagtagtgccaccaacagcacgtctgaaacactggccgcgacatcgaa

SEQ ID NO: 556275 - DNA, 75 bp, synthetic construct
  source 1..75: mol_type = other DNA
taaaaaaacatcgttgttatcagtcaaagcattttatgactgcgcgcgaacgtgaattttttcgtgaactttgcc

SEQ ID NO: 556276 - DNA, 75 bp, synthetic construct
  source 1..75: mol_type = other DNA
tttggcgtaagcaacgttaacggcccaatctcgctggtgatctggaccactacgccgtggactctgcctgcgaac

SEQ ID NO: 556277 - DNA, 75 bp, synthetic construct
  source 1..75: mol_type = other DNA
atgccagcacgacgcgaaaaggccttgtccagctcagtagcgccaccaacagcacgtctgaagcgcaggctgcaa

SEQ ID NO: 556278 - DNA, 75 bp, synthetic construct
  source 1..75: mol_type = other DNA
cttcaatgtctgaaattgtcagggacctatcacgtctgggctggacagatgaccgaattggaacagaggctgggc

SEQ ID NO: 556279 - DNA, 75 bp, synthetic construct
  source 1..75: mol_type = other DNA
cttcaatgtctgaaattgtcagggacctttcacgcctgggctggacagatgagcgaattggaacagaggctgggc

SEQ ID NO: 556280 - DNA, 75 bp, synthetic construct
  source 1..75: mol_type = other DNA
gtctattacgaaagtaaaaccttcagttgcatatcgtcaactaaaggaaggtgctgatttacttaatactagtaa

SEQ ID NO: 556281 - DNA, 75 bp, synthetic construct
  source 1..75: mol_type = other DNA
agggttatcaacacttttttgctctgctgggggctgccagcgccgtcacaacaggccacccggaagcccgtaaac

SEQ ID NO: 556282 - DNA, 75 bp, synthetic construct
  source 1..75: mol_type = other DNA
tgctgcattgcctggtgatcccgcgtatcccgttagcgccaggcctggctccggcagttgccgcaggcctgctgg

SEQ ID NO: 556283 - DNA, 75 bp, synthetic construct
  source 1..75: mol_type = other DNA
gccgggaattaaacctgtctaactcttcagtgcttggggcctgtcagaaactccaggaggctgttggcttaccga

SEQ ID NO: 556284 - DNA, 75 bp, synthetic construct
  source 1..75: mol_type = other DNA
tccgtgtgaattataaaaatggtggcatttcctacaggtcggctcgtgatggttatgggtttgaattaggttggt

SEQ ID NO: 556285 - DNA, 75 bp, synthetic construct
  source 1..75: mol_type = other DNA
tccgtattttacggggaatgatgtcgccagcctggcaactctgacaaaagtcgggcgggatattcttgcgaaatc

SEQ ID NO: 556286 - DNA, 75 bp, synthetic construct
  source 1..75: mol_type = other DNA
tgatgcactgaacacgctgaacgagctggcggcggcgttgggcaacgacccgaattttgcgaccaccatgactaa

SEQ ID NO: 556287 - DNA, 75 bp, synthetic construct
  source 1..75: mol_type = other DNA
agtcgtcagtctgctactcgaatggcgtaacgtagccatttttctggccccacacgtagtcaggctttccacgta

SEQ ID NO: 556288 - DNA, 75 bp, synthetic construct
  source 1..75: mol_type = other DNA
caccgccgccgagttccgcgccaagtgccgcgaatacgcggcgacccaggttgacggtcagcgcaaagactttat

SEQ ID NO: 556289 - DNA, 75 bp, synthetic construct
  source 1..75: mol_type = other DNA
ataaatgctggtagctgtcctgccgtacaattccgtgtgaattataaaaatggtggcatttcctacaggtcggct

SEQ ID NO: 556290 - DNA, 75 bp, synthetic construct
  source 1..75: mol_type = other DNA
ctgtaagacactcataaagaatgatttctggtgccggaccctctccttcagtccgaacaaaccccggcactatga

SEQ ID NO: 556291 - DNA, 75 bp, synthetic construct
  source 1..75: mol_type = other DNA
ggtgccggaccctctcctttagtccgaacaaaccccggcactatgaacgttatctactgcgaatgaaagaaagga

SEQ ID NO: 556292 - DNA, 75 bp, synthetic construct
  source 1..75: mol_type = other DNA
gactgtggctttaccatgttctggagccggaaacctgggccaggatgtgtgagcgggtgtcgggtgctgccagcg

SEQ ID NO: 556293 - DNA, 75 bp, synthetic construct
  source 1..75: mol_type = other DNA
aacgtcgattctcagtattattcattgactgggaagctcagtaccagtgcacaattgcacacattctgaagatga

SEQ ID NO: 556294 - DNA, 75 bp, synthetic construct
  source 1..75: mol_type = other DNA
agcattccgtttgtggtgcgaaccgtgcagccggtactggaagaattagggccggaatacgaagaagcggcagaa

SEQ ID NO: 556295 - DNA, 75 bp, synthetic construct
  source 1..75: mol_type = other DNA
ctgggttgcgctgcctctgaccaccgtaaacggtgtttcccagtatcagccggaatgggtgtgctgggagaccgg

SEQ ID NO: 556296 - DNA, 75 bp, synthetic construct
  source 1..75: mol_type = other DNA
tcacctgaagggttttattacaccatgtatccgttgtatgactggaaagcccgtgatatctggatatataacgcc

SEQ ID NO: 556297 - DNA, 75 bp, synthetic construct
  source 1..75: mol_type = other DNA
gcgcatggttacgctggataaaccgcgcctgagtgccgcgattgaggaagcaacacagctgggcgtgaaggtttt

SEQ ID NO: 556298 - DNA, 75 bp, synthetic construct
  source 1..75: mol_type = other DNA
gcggggatatgcaggccgagctgattgacttttgccaggctaaaggggattacacggaaaatcggcagattgcag

SEQ ID NO: 556299 - DNA, 75 bp, synthetic construct
  source 1..75: mol_type = other DNA
agaacccatgccatctacaatcccctgtatgacctgatgtaccgtgccggtgtgtcgttacgcaacatgcgtgtc

SEQ ID NO: 556300 - DNA, 75 bp, synthetic construct
  source 1..75: mol_type = other DNA
ggcgtggcacaggacgtccctccttatgttattgcgcagggtaaccacgcaacgccgtttggtgtcaacatcgaa

SEQ ID NO: 556301 - DNA, 75 bp, synthetic construct
  source 1..75: mol_type = other DNA
cagccaccggaagaggccattacagacatgacgtattttcccttttaccggtatgccatggcgtttgaagaattt

SEQ ID NO: 556302 - DNA, 75 bp, synthetic construct
  source 1..75: mol_type = other DNA
tggcggtcaccgcgatgcgccaggcattaaacgacgtcgcttttcgtggtcgagtggttatcggtgagggggaaa

SEQ ID NO: 556303 - DNA, 75 bp, synthetic construct
  source 1..75: mol_type = other DNA
ttggtgagtttggcgcggtgatatttatcgccgggaacatcgcctggaagacggaagtgacgtcgctgatgattt

SEQ ID NO: 556304 - DNA, 75 bp, synthetic construct
  source 1..75: mol_type = other DNA
tcaggaatccatactctacagaaaaactttattgggaaaaacacctgatgaactcttcgctctcgtcataaaaca

SEQ ID NO: 556305 - DNA, 75 bp, synthetic construct
  source 1..75: mol_type = other DNA
tcaggagcagccagtggagcgctgtatgcaaatgaaagtggtgcttattttgcgcttcgaaaacgtatatcaaag

SEQ ID NO: 556306 - DNA, 75 bp, synthetic construct
  source 1..75: mol_type = other DNA
acagataacaaaaccagttcaccatacatggcagagttatgcaatgtttctgctggagtcaatgcctgagaaaac

SEQ ID NO: 556307 - DNA, 75 bp, synthetic construct
  source 1..75: mol_type = other DNA
tggttgtttgagacattttcttctgtctgtttgtctttttccggaggaaaagactctactgtgctgctccatctt

SEQ ID NO: 556308 - DNA, 75 bp, synthetic construct
  source 1..75: mol_type = other DNA
tatgtagcccgcaggaaaagacgtcgtttctctgtactgttcattgactgggaagctcagtaccagtgcacaatt

SEQ ID NO: 556309 - DNA, 75 bp, synthetic construct
  source 1..75: mol_type = other DNA
gaacaggagaatgacctggggagccgggatattccgtcctggcgacgtatctgtaagacactcataaagaatgat

SEQ ID NO: 556310 - DNA, 75 bp, synthetic construct
  source 1..75: mol_type = other DNA
ccggcgctggtggcgggtgtggcgctgtcatttacccgcagcctcggtgagtttggcgcggtgatttttatcgcc

SEQ ID NO: 556311 - DNA, 75 bp, synthetic construct
  source 1..75: mol_type = other DNA
atgtttgcagtttcttcacgacgcgtgttgccgggctttaccctgagcctcggcaccagtctgctgtttgtgtgc

SEQ ID NO: 556312 - DNA, 75 bp, synthetic construct
  source 1..75: mol_type = other DNA
aagcggtgcctattttgccctgcgtaaacgtatatcaaaaccagcccatcatacctggcgcagctatgcgatgtt

SEQ ID NO: 556313 - DNA, 75 bp, synthetic construct
  source 1..75: mol_type = other DNA
agttccagcctgaatggatatgctgggagtcgggagtggaatgggtccgtcagccacctgattatgctgtcactg

SEQ ID NO: 556314 - DNA, 75 bp, synthetic construct
  source 1..75: mol_type = other DNA
tgcagccggtgctggaagagttaggcccggaatatgaagaagcggcggaaacgctcggcgcaacgcgctggcaga

SEQ ID NO: 556315 - DNA, 75 bp, synthetic construct
  source 1..75: mol_type = other DNA
tcaacgtactggcgggctggatatggtcccggcggcgattgttcacggttttattcttagtctgttagtgccgat

SEQ ID NO: 556316 - DNA, 75 bp, synthetic construct
  source 1..75: mol_type = other DNA
ccttctggactggcgacctgttcaacaaggcaaggcccagaggtgaacgggtagaaatagacgtcagccacaagg

SEQ ID NO: 556317 - DNA, 75 bp, synthetic construct
  source 1..75: mol_type = other DNA
tgatgaagcattctggatcaacaatttccttgagctgcgtaaagtcgccgcaggcatggcaacccatgaagggct

SEQ ID NO: 556318 - DNA, 75 bp, synthetic construct
  source 1..75: mol_type = other DNA
gcaggctggcgggcaggtgcgtaaaggtgagaaagccaccctggcggtggtttataaggactggacgaaacaggc

SEQ ID NO: 556319 - DNA, 75 bp, synthetic construct
  source 1..75: mol_type = other DNA
cgtattgcgatggcgctggagtcgctaaaactgtgcggcgtggtggtgattggttttgtcattggccttagtggt

SEQ ID NO: 556320 - DNA, 75 bp, synthetic construct
  source 1..75: mol_type = other DNA
tcagcgtacaggtggtctggagatggtcccggcggcgattgttcacggttttattcttagcctgctggtgcccat

SEQ ID NO: 556321 - DNA, 75 bp, synthetic construct
  source 1..75: mol_type = other DNA
ttccgcacgatagagacgcgccagctacgcgggatggagtttgaagaacaggccaaagtgatcgaagacctgacc

SEQ ID NO: 556322 - DNA, 75 bp, synthetic construct
  source 1..75: mol_type = other DNA
cctacgccccccgcccgcttggcgatcgtgaagtctggataggctacgacgccaacggcggcagtggcaacggtg

SEQ ID NO: 556323 - DNA, 75 bp, synthetic construct
  source 1..75: mol_type = other DNA
gactgagcaacatgattcgtcagtacttcagccaggaacgaccagatgaagaggccatacaggccctgaaccacc

SEQ ID NO: 556324 - DNA, 75 bp, synthetic construct
  source 1..75: mol_type = other DNA
accattgaagacgcggtaaaactcggcttcaacctggtgaaaattgaaaccatcaagatggaaaactccccggag

SEQ ID NO: 556325 - DNA, 75 bp, synthetic construct
  source 1..75: mol_type = other DNA
ggtacgaaaaccgccaccaccgcaaccgcatgatcctgaagtcgcgtcagattggtgcgacctggtattttgcgc

SEQ ID NO: 556326 - DNA, 75 bp, synthetic construct
  source 1..75: mol_type = other DNA
ggtacgaaaaccgtcaccaccgcaaccgtatgatcctgaagtcgcgtcagattggtgcgacctggtattttgcgc

SEQ ID NO: 556327 - DNA, 75 bp, synthetic construct
  source 1..75: mol_type = other DNA
gggtatccccgcgttgcgggatcgtattgttcagcgggccatgctgatggcgatggagccgatatgggagagtga

SEQ ID NO: 556328 - DNA, 75 bp, synthetic construct
  source 1..75: mol_type = other DNA
tcgatcgatattgtactgccaaaggctcaatgtctttccgccaggtggcaaagctgttgcaggccaaagagaccg

SEQ ID NO: 556329 - DNA, 75 bp, synthetic construct
  source 1..75: mol_type = other DNA
atgtccatactctttctgcttgtgactgtattaccggtcactctgaccgtgttcatcatcatttctttcttctgt

SEQ ID NO: 556330 - DNA, 75 bp, synthetic construct
  source 1..75: mol_type = other DNA
tttaactacacccagcgttatccgcgtagcttcgcgcagtggaagccggaatgtattggtgttgatagcggctgt

SEQ ID NO: 556331 - DNA, 75 bp, synthetic construct
  source 1..75: mol_type = other DNA
gggtaaaaaccttatcgatgcataccgcctggcgggttacgaggggacgggaaacgtagcaagtgccgcagcttc

SEQ ID NO: 556332 - DNA, 75 bp, synthetic construct
  source 1..75: mol_type = other DNA
atgagcagaccggactggggggcgttgcagcaggaatatattgctgaatacacccgctccggtgtatccccggtg

SEQ ID NO: 556333 - DNA, 75 bp, synthetic construct
  source 1..75: mol_type = other DNA
atcattaccagaaacgctataccgcagacctggatttactggtgagtcagttgatggccatcgtgcaggctgatc

SEQ ID NO: 556334 - DNA, 75 bp, synthetic construct
  source 1..75: mol_type = other DNA
cgcctggcaggatacgagtcagaggggaatgcggcctacgtcactgccagccagctcctaagaaatcctaaggtt

SEQ ID NO: 556335 - DNA, 75 bp, synthetic construct
  source 1..75: mol_type = other DNA
gtgcgacagctaacagcaacgccagccgtatgcttagaaatgccagggtttatcgtgccattagctacttccgca

SEQ ID NO: 556336 - DNA, 75 bp, synthetic construct
  source 1..75: mol_type = other DNA
gctggttgctcaggggaaaaaactggccacagcttaccgtgacgcaggatattcagatttaggtcaggggctgta

SEQ ID NO: 556337 - DNA, 75 bp, synthetic construct
  source 1..75: mol_type = other DNA
aagataatccgcagcgcacattaaaagaacagaacattttcgcggtactgaagcagttaggattcagttctgacc

SEQ ID NO: 556338 - DNA, 75 bp, synthetic construct
  source 1..75: mol_type = other DNA
catggtacgtcagactgtgaaaattttgttcccggaaattctatcattgtcgaaactattaaaactatttcaaag

SEQ ID NO: 556339 - DNA, 75 bp, synthetic construct
  source 1..75: mol_type = other DNA
ttgaaaacctcaaaaaaggcgtgggtggtgagaataacgaaataattatccacaactctctgccgatgccgggag

SEQ ID NO: 556340 - DNA, 75 bp, synthetic construct
  source 1..75: mol_type = other DNA
gtgatggtgaggcagccttcagtctgaatacgctcgtcgggtgcggtgttgatggctatgacgaatggccggact

SEQ ID NO: 556341 - DNA, 75 bp, synthetic construct
  source 1..75: mol_type = other DNA
actgatatgcagcaagtaaatcatgagtcactggtacaggcgatggttggtcgcgatctcggtgatatctacggc

SEQ ID NO: 556342 - DNA, 75 bp, synthetic construct
  source 1..75: mol_type = other DNA
gcgttattcgtgaactgcgaaaagaggggcgggtgatcttatacgtttctcaccgtatggaagaaatatttgccc

SEQ ID NO: 556343 - DNA, 75 bp, synthetic construct
  source 1..75: mol_type = other DNA
ttacaacttaaacatcttggtatggatattgacccggacacgccgctgaaatatctctccattggtcagtggcag

SEQ ID NO: 556344 - DNA, 75 bp, synthetic construct
  source 1..75: mol_type = other DNA
gagtgttgagctgaaaaccatcaaccagaccatcgacctgaaatcagatcagactgtgatcctgagcggattcca

SEQ ID NO: 556345 - DNA, 75 bp, synthetic construct
  source 1..75: mol_type = other DNA
ccagacgtaaacatgtgctcggcggttgtgtaatcaacaacggttgggaagaaaacaatgccgatcaccacattc

SEQ ID NO: 556346 - DNA, 75 bp, synthetic construct
  source 1..75: mol_type = other DNA
ctgccggtcaggtttatatcgaccaaaggccgatcgatatccgtaaaccgggccacgctattgctgctggcatga

SEQ ID NO: 556347 - DNA, 75 bp, synthetic construct
  source 1..75: mol_type = other DNA
taacgccatctacatcatgctggatatgtgcagctcggcggcatttatcattctgccgattctgattggctttac

SEQ ID NO: 556348 - DNA, 75 bp, synthetic construct
  source 1..75: mol_type = other DNA
aaagcaattatagataaagcgattaaaaatgatgaaagattaagcttatcatttagtgtaagttatataccaggt

SEQ ID NO: 556349 - DNA, 75 bp, synthetic construct
  source 1..75: mol_type = other DNA
aaatgcagatgagcgacaagtcatgatacctaaagaaaatggctgttggctttacctgattgacctagaacacgc

SEQ ID NO: 556350 - DNA, 75 bp, synthetic construct
  source 1..75: mol_type = other DNA
tattggcggcgtgatgaaagtggggttaagcaaagaagaaattgaattactgggtcgtgaagggcataacgtgac

SEQ ID NO: 556351 - DNA, 75 bp, synthetic construct
  source 1..75: mol_type = other DNA
tgattagccacgccggctggctcgccgggttactgtttggcggtctctattcagttatcgtcattaccggtattc

SEQ ID NO: 556352 - DNA, 75 bp, synthetic construct
  source 1..75: mol_type = other DNA
cggggtggtaaataaggtctacgctgcctttactcaggcggcgggtattagcgaatccagcaaatcggaagccgc

SEQ ID NO: 556353 - DNA, 75 bp, synthetic construct
  source 1..75: mol_type = other DNA
caggagtttttcgcatgggtagaagatcccctcaagccgttaccttctttcattcgccgccgcattgctttttac

SEQ ID NO: 556354 - DNA, 75 bp, synthetic construct
  source 1..75: mol_type = other DNA
atgactggcacgcggcgctctatatgcccgctttctgcgccattctggtggcattattcgcctttgcgatgatgc

SEQ ID NO: 556355 - DNA, 75 bp, synthetic construct
  source 1..75: mol_type = other DNA
cagaaagaacgtggcggcattgtgtcagtgtggaactgtgcgcacaacgtcggtggtggtattccgccgctgctg

SEQ ID NO: 556356 - DNA, 75 bp, synthetic construct
  source 1..75: mol_type = other DNA
cgctggaagtctgccgccgtgccggtgttgatattcgcattattgtgaaatcccgacagataggcgcgacctggt

SEQ ID NO: 556357 - DNA, 75 bp, synthetic construct
  source 1..75: mol_type = other DNA
ctgttgttcctctgcggttggttccaggggatgggatggccgccgtgtggtcgtactatggtgcactggtggtcg

SEQ ID NO: 556358 - DNA, 75 bp, synthetic construct
  source 1..75: mol_type = other DNA
tatggattttcgaaattcataatgggttcggtatcggatcgctcgaatccgcgcgttttcctccccgcaggtttg

SEQ ID NO: 556359 - DNA, 75 bp, synthetic construct
  source 1..75: mol_type = other DNA
tttggttcgtaagaactttgcgcttgctatgccttacctggtcgagcagggattctcacgcggtgatttaggttt

SEQ ID NO: 556360 - DNA, 75 bp, synthetic construct
  source 1..75: mol_type = other DNA
acaacgcatcacacagacctgtcatatcccggtacgaattagcgccgatgcctggacctatctgaacggtactgg

SEQ ID NO: 556361 - DNA, 75 bp, synthetic construct
  source 1..75: mol_type = other DNA
attccagcaatcaaaccggaaaaccagtaagcaaggtgtaataaccccctccttctttggacttgggggtggcat

SEQ ID NO: 556362 - DNA, 75 bp, synthetic construct
  source 1..75: mol_type = other DNA
atggaatggttcctctggcgtcagtaggcagtcagccagtaaaagtctcttctggcggtacatcactccctgagc

SEQ ID NO: 556363 - DNA, 75 bp, synthetic construct
  source 1..75: mol_type = other DNA
ctgagcgaagttcacgagacggtagagacgcagagtgatcgcaaatatgccgaatacctttacaccgaagcggct

SEQ ID NO: 556364 - DNA, 75 bp, synthetic construct
  source 1..75: mol_type = other DNA
gcgacgtgcgccgcagcgtgtcaacctattgtagtaaagaacgcgtgaatgcgtggcgggagcgtcgcgagcgta

SEQ ID NO: 556365 - DNA, 75 bp, synthetic construct
  source 1..75: mol_type = other DNA
ttctccccatccttattggctttactgctgctcgtgaatttggtggaaatccttatcttggcgcgacattaggag

SEQ ID NO: 556366 - DNA, 75 bp, synthetic construct
  source 1..75: mol_type = other DNA
cccggcagaaaaaagccagtatgaaggaagtcgatcgttatggtcggccctggatgatgacatcatcaccacgga

SEQ ID NO: 556367 - DNA, 75 bp, synthetic construct
  source 1..75: mol_type = other DNA
cgtcgccagtcaggccgcgaagcgtccgccggtagtcaactatccgggggaaggtttccgggaaatgacaaaggc

SEQ ID NO: 556368 - DNA, 75 bp, synthetic construct
  source 1..75: mol_type = other DNA
acaatggacaataatttccgcctggtgaatgtgtatatctccgacatgaaaatcacggaaatcccacagaaataa

SEQ ID NO: 556369 - DNA, 75 bp, synthetic construct
  source 1..75: mol_type = other DNA
ccattcgttcaggtaataatgcctggtattctgtcgcatcagaaatgccaaaaggacagatagaagtccggcgaa

SEQ ID NO: 556370 - DNA, 75 bp, synthetic construct
  source 1..75: mol_type = other DNA
gtttcccgctggatacgtatccgcgcccggcagaaaaaagccagtatgaaggaagtcgatcgttatggtcggccc

SEQ ID NO: 556371 - DNA, 75 bp, synthetic construct
  source 1..75: mol_type = other DNA
gccgcacaatggacaataatttccgcctggtgaatgtgtatatcaccgacatgaaaatcacggaaatcccacaga

SEQ ID NO: 556372 - DNA, 75 bp, synthetic construct
  source 1..75: mol_type = other DNA
ggccgtttggctacttcctgacgctgtttgccgtttgggccgcaatcaacgctttcaacatggttgatggtattg

SEQ ID NO: 556373 - DNA, 75 bp, synthetic construct
  source 1..75: mol_type = other DNA
gttggggggatttcggtttacgcagggatttgcttcacgttcggaattgtcgattactatattccgcatgcatct

SEQ ID NO: 556374 - DNA, 75 bp, synthetic construct
  source 1..75: mol_type = other DNA
gaaagttgctcgctttattaagcgcgtaaaacgcagactgcgtagaaatcgtggtggcagccccaatttaaccaa

SEQ ID NO: 556375 - DNA, 75 bp, synthetic construct
  source 1..75: mol_type = other DNA
tggcaaagccataaaagcgaaacatactggcggagaggtaaactaccagccgcacgaatcactttctctgctgac

SEQ ID NO: 556376 - DNA, 75 bp, synthetic construct
  source 1..75: mol_type = other DNA
ctattatcgaacatcatgctgaatgagtccgatcaatacctgcatgagcgctacctgagcgggaaagccagaaaa

SEQ ID NO: 556377 - DNA, 75 bp, synthetic construct
  source 1..75: mol_type = other DNA
cgtgggttttatttggtaaaaccaatcacggcaagctcagcggcgaaatactgtaccggttggtggggcaaggca

SEQ ID NO: 556378 - DNA, 75 bp, synthetic construct
  source 1..75: mol_type = other DNA
actttcatacatttttgatgatgtttctggtatcgttagttcttattagtgcaaaaataaagtcgaatggcctgt

SEQ ID NO: 556379 - DNA, 75 bp, synthetic construct
  source 1..75: mol_type = other DNA
agccggcgtggcaactgctgggataatgcggtggccgaatcgttcttcagttcactgaaaaaagagcgcatcagg

SEQ ID NO: 556380 - DNA, 75 bp, synthetic construct
  source 1..75: mol_type = other DNA
cgtccagtgggcaaacaacatcatcattggccacggtaatattggtgcgggtgttgactggcagaagcagagcac

SEQ ID NO: 556381 - DNA, 75 bp, synthetic construct
  source 1..75: mol_type = other DNA
tcggaccagggcagccagtacggcagcgacgactggcagcgcttctgccgggccaataacctggccccgagcatg

SEQ ID NO: 556382 - DNA, 75 bp, synthetic construct
  source 1..75: mol_type = other DNA
aacgagtgccggttgggaattcatcgaaggctatcgttttatcgcttcttatggcacgtcgtacaaggcacctaa

SEQ ID NO: 556383 - DNA, 75 bp, synthetic construct
  source 1..75: mol_type = other DNA
atggctacatacggcggtcagtttacgcttactcttactctactccgcacctggcagggctggctgtatctggcg

SEQ ID NO: 556384 - DNA, 75 bp, synthetic construct
  source 1..75: mol_type = other DNA
actttcgtacatttttgatgatatttctggtatcgttagttcttattagtgcaaaaataaagtcgaatggcctgt

SEQ ID NO: 556385 - DNA, 75 bp, synthetic construct
  source 1..75: mol_type = other DNA
actttcctacatttttgatgctgtttctggtatcgttagttcttattagtgcaaaaataaagtcgaatggcctgt

SEQ ID NO: 556386 - DNA, 75 bp, synthetic construct
  source 1..75: mol_type = other DNA
actttcttacatttttgatgatttttctggtatcgttagttcttattagtgcaaaaataaagtcgaatggcctgt

SEQ ID NO: 556387 - DNA, 75 bp, synthetic construct
  source 1..75: mol_type = other DNA
tcggggaaacctgcggtaaaaaccgggtgggccgcatcatgcaactgaaccggattaaagctgtacgcggctata

SEQ ID NO: 556388 - DNA, 75 bp, synthetic construct
  source 1..75: mol_type = other DNA
actttcgtacatttttgatggtgtttctggtatcgttagttcttattagtgcaaaaataaagtcgaatggcctgt

SEQ ID NO: 556389 - DNA, 75 bp, synthetic construct
  source 1..75: mol_type = other DNA
actttcgtacatttttgatgctctttctggtatcgttagttcttattagtgcaaaaataaagtcgaatggcctgt

SEQ ID NO: 556390 - DNA, 75 bp, synthetic construct
  source 1..75: mol_type = other DNA
gccgctacaaagtctttatgggtgatgcgggcagtacgctgattggttttaccgttatctggatcctgctcgaaa

SEQ ID NO: 556391 - DNA, 75 bp, synthetic construct
  source 1..75: mol_type = other DNA
ccattctgaatgttgaaactgtagcccgttcccgattgtttaccatcgaaagcgtggatctggagttcagcaacg

SEQ ID NO: 556392 - DNA, 75 bp, synthetic construct
  source 1..75: mol_type = other DNA
taaagatctaaataaggccgttgagtactacaaactagcaggaaatgctcgcaacggcagtgcttaccataatct

SEQ ID NO: 556393 - DNA, 75 bp, synthetic construct
  source 1..75: mol_type = other DNA
tgatgccgggtatgttaaagcaacttcagttcttggggcgtattacctatatggtaaaggcgttaaaaagaatta

SEQ ID NO: 556394 - DNA, 75 bp, synthetic construct
  source 1..75: mol_type = other DNA
aaaccgcgaactcaaagaagaagtgggatttggcgcaagggatctgacttttttgaagaaactcagcatggcacc

SEQ ID NO: 556395 - DNA, 75 bp, synthetic construct
  source 1..75: mol_type = other DNA
atgattgtgccgattgtggacgatcacctgattttgatccgcgaatacgcggtgggaactgaatcctacgaatta

SEQ ID NO: 556396 - DNA, 75 bp, synthetic construct
  source 1..75: mol_type = other DNA
ttgaagagcctgactttaatgaagcgcgcaatgttagcgcgctgttcctcgtacgcgagtggctgaagggccagg

SEQ ID NO: 556397 - DNA, 75 bp, synthetic construct
  source 1..75: mol_type = other DNA
tctaggacagttatattatgttggcgcaggcgtgccaaaaagctacaaaaaggcaatagagtattataaaaaagg

SEQ ID NO: 556398 - DNA, 75 bp, synthetic construct
  source 1..75: mol_type = other DNA
atggaagggagcgttaaagcgggcaggcattagcaacttccgcttccatgatctgaggcatacctgggcaagctg

SEQ ID NO: 556399 - DNA, 75 bp, synthetic construct
  source 1..75: mol_type = other DNA
gccgttccaacgttacagaccttgagtggtcacaggtcgatctggataagaaaatggcatggatgcaccctgatg

SEQ ID NO: 556400 - DNA, 75 bp, synthetic construct
  source 1..75: mol_type = other DNA
tactacaaacttgcgggggatgctcgtgaaggtagagcctacaacaatcttggtgctatttatcaaaaggggatg

SEQ ID NO: 556401 - DNA, 75 bp, synthetic construct
  source 1..75: mol_type = other DNA
tgatgccgggtatgttaaagctagctaccttcttggtgcgtattaccaatatggtaaaggtgtacaaaagagtta

SEQ ID NO: 556402 - DNA, 75 bp, synthetic construct
  source 1..75: mol_type = other DNA
ggccgactcgccaggaaacattgcacaccacgctgattgtggcggcggttaccgcagtaatgtcacttatcctgt

SEQ ID NO: 556403 - DNA, 75 bp, synthetic construct
  source 1..75: mol_type = other DNA
gaacatggataagactaaaatcacccatgttaatgacggctttatctttctggggcacaggatcattcgcaaacg

SEQ ID NO: 556404 - DNA, 75 bp, synthetic construct
  source 1..75: mol_type = other DNA
ggtgtcttggctatacttcacctgatggtggaattaacgaaaacaacaactggtgtcacatcccgcaggcaaaag

SEQ ID NO: 556405 - DNA, 75 bp, synthetic construct
  source 1..75: mol_type = other DNA
aacattgcttatcgtgagcagattggtgcggagccacgtaaccgtggcaagccggtagatgatatgttgctggta

SEQ ID NO: 556406 - DNA, 75 bp, synthetic construct
  source 1..75: mol_type = other DNA
gagaaagccagaaacttcgccgcatcgctgacagcactgttatcaggcaactacagtgaaagcaaagtcgatatg

SEQ ID NO: 556407 - DNA, 75 bp, synthetic construct
  source 1..75: mol_type = other DNA
gaccgtttggttacttcctgacgctatttgccgtctgggcggccattaatgccttcaacatggttgatggcattg

SEQ ID NO: 556408 - DNA, 75 bp, synthetic construct
  source 1..75: mol_type = other DNA
ttttcattggcgcgctggatgaccgttttgatatcagcgtaaaaatccgtgccaccatacaggccgctgttggca

SEQ ID NO: 556409 - DNA, 75 bp, synthetic construct
  source 1..75: mol_type = other DNA
ccttctttttactgcgtctgctttcgctgtttggccgccgcagctggcgaattctggcatcgctggtggtgctct

SEQ ID NO: 556410 - DNA, 75 bp, synthetic construct
  source 1..75: mol_type = other DNA
gttgcctatggtaataccggaacgcaagcgcagccagataacgatggttttttaagtaaaacgctttatggcgcg

SEQ ID NO: 556411 - DNA, 75 bp, synthetic construct
  source 1..75: mol_type = other DNA
gggagcatatgacgctggaagggatggcaaaactctattgccgtgggcttgatgaccagtggccggaagaagcca

SEQ ID NO: 556412 - DNA, 75 bp, synthetic construct
  source 1..75: mol_type = other DNA
tacttcaaacctccagaatgaggctacagctaaagaagaaatatcacatcacgtcactgaacaacaggagtggcc

SEQ ID NO: 556413 - DNA, 75 bp, synthetic construct
  source 1..75: mol_type = other DNA
ggaggagtgtcggggtgtgctcgaaggcagtctgaaactcaggctgaacatggataagactaaaatcacccatgt

SEQ ID NO: 556414 - DNA, 75 bp, synthetic construct
  source 1..75: mol_type = other DNA
cggcctgagcgcagtgtccaccacgcgatccgcacggtgaaattacagctcacggactgtggtgaaacccgggga

SEQ ID NO: 556415 - DNA, 75 bp, synthetic construct
  source 1..75: mol_type = other DNA
aaatcattggttttgacggcatgaaagaagcgcgtgatgccgttgacagtgaaaaaacgtttgcggccgtgattc

SEQ ID NO: 556416 - DNA, 75 bp, synthetic construct
  source 1..75: mol_type = other DNA
gcttccgtgattatccacgacgtcgccagaaataatcattatcgcgttaacgaacacttcgatacccagtggaat

SEQ ID NO: 556417 - DNA, 75 bp, synthetic construct
  source 1..75: mol_type = other DNA
tttatatagagcagggattgtatcaggtttctggtatttctccgttgctggtcattgatggtcagcagcggctga

SEQ ID NO: 556418 - DNA, 75 bp, synthetic construct
  source 1..75: mol_type = other DNA
gttattcgatcatcttcgcgatgaagttatgcgcctggacgcagggatcacgcaggaagtattgaagctctatat

SEQ ID NO: 556419 - DNA, 75 bp, synthetic construct
  source 1..75: mol_type = other DNA
ggtcattgatggtcaacaacggctgacgaccgcaatgttgctgattgaggctttatcgcgccatcttggcgaaga

SEQ ID NO: 556420 - DNA, 75 bp, synthetic construct
  source 1..75: mol_type = other DNA
tattgtccggagtaacggatacagaatgtggatgtggtcgtcggggatgcgttgaagcggtttcatctggtcggg

SEQ ID NO: 556421 - DNA, 75 bp, synthetic construct
  source 1..75: mol_type = other DNA
aaaacgtgctgggattatcgccgaaaaccgatatccgcttaatttctgcgatggtggcgttttcgatgtttgaag

SEQ ID NO: 556422 - DNA, 75 bp, synthetic construct
  source 1..75: mol_type = other DNA
ctgaagaggttttagctgtttatcgggggcagccagaaaacaaaaccagttacagcctgagtgattatccttttc

SEQ ID NO: 556423 - DNA, 75 bp, synthetic construct
  source 1..75: mol_type = other DNA
agtactgtattgtactccatgctgatgttctcaggatttgttgattacattcaggcagtagccgatccaaatgaa

SEQ ID NO: 556424 - DNA, 75 bp, synthetic construct
  source 1..75: mol_type = other DNA
atggcctattcaaagcgaaagttaatattattatggtaattctagatccatacaccaccacaccaatctatcaga

SEQ ID NO: 556425 - DNA, 75 bp, synthetic construct
  source 1..75: mol_type = other DNA
tttcccccgtggacaaaatgccattcactggactgatgcattcattgacctaaacctaaatagtgtagtatacca

SEQ ID NO: 556426 - DNA, 75 bp, synthetic construct
  source 1..75: mol_type = other DNA
cgaccgcaatgttgctgattgaggctttatcgcgccatcttggcgaagacgaagtttttgatggcttttcagcaa

SEQ ID NO: 556427 - DNA, 75 bp, synthetic construct
  source 1..75: mol_type = other DNA
atccgtatcaaaccccggagcttctggttttacctgttacacacggagacacagattacctctcatggctcaacg

SEQ ID NO: 556428 - DNA, 75 bp, synthetic construct
  source 1..75: mol_type = other DNA
tgttctcaggatttgttgattacattcaggcagtagccgatccaaatgaaaaaacgaatgaaatgacagtttacg

SEQ ID NO: 556429 - DNA, 75 bp, synthetic construct
  source 1..75: mol_type = other DNA
aataccatacatgataaaaaacaaaagcacatcggaagtgactaataatgttcaagaaatgtataaagagttttt

SEQ ID NO: 556430 - DNA, 75 bp, synthetic construct
  source 1..75: mol_type = other DNA
taaatctgaactgctccccagtagaagtatctcagaggctggatctttactggaagggtgaaacaacacagattt

SEQ ID NO: 556431 - DNA, 75 bp, synthetic construct
  source 1..75: mol_type = other DNA
ccatacaaatttcccggaaataaaccataattcatcagggataaaaaacggaattgaagtcagaaaaagacgaac

SEQ ID NO: 556432 - DNA, 75 bp, synthetic construct
  source 1..75: mol_type = other DNA
cgagccagggggaaacaccagataacgtcaatgtctgaaattgtcagggacctttcccgtctgggctggacagat

SEQ ID NO: 556433 - DNA, 75 bp, synthetic construct
  source 1..75: mol_type = other DNA
tgacgctgcttaacgccatcgacgcccccacggaaaaagtggccgcacagcttatcggtcgccagatcgccggac

SEQ ID NO: 556434 - DNA, 75 bp, synthetic construct
  source 1..75: mol_type = other DNA
gcgtcagcgctgacatgcccccgctgagctgttccgtcatccccgtcacaccgtggacttacgggctgggacgat

SEQ ID NO: 556435 - DNA, 75 bp, synthetic construct
  source 1..75: mol_type = other DNA
cagggcaggcaatactgcctgaagagagttttctctggttgaaaactgacgaacttgcgactttctttacctgga

SEQ ID NO: 556436 - DNA, 75 bp, synthetic construct
  source 1..75: mol_type = other DNA
cggcctatgtgtacgtcctgtgttgtattgcggcgctggctggattgatgtttggttattcaacggcggtgatta

SEQ ID NO: 556437 - DNA, 75 bp, synthetic construct
  source 1..75: mol_type = other DNA
aaagttgcaataaagagtttatttattgggagcacagtggaggctatccaggaggaaaggataaagagccaatta

SEQ ID NO: 556438 - DNA, 75 bp, synthetic construct
  source 1..75: mol_type = other DNA
cgattggttatgagctgattgttatctccgcctgcgttttaggtggcgtttctctgaaaggtggcatcggaaaaa

SEQ ID NO: 556439 - DNA, 75 bp, synthetic construct
  source 1..75: mol_type = other DNA
gggggtgatcaatatgcccgcttttatggatgctgcaaaccttaaaaaatatataaatcaagatgttatggatgt

SEQ ID NO: 556440 - DNA, 75 bp, synthetic construct
  source 1..75: mol_type = other DNA
aaagtaattatgtaattaatgcttctgccgaattcaaaaacatgaacattgatgatgctattaaaaaccttttgg

SEQ ID NO: 556441 - DNA, 75 bp, synthetic construct
  source 1..75: mol_type = other DNA
cagaccatttttatcgcggtatgtaatgtggtgggcagttttatcggcatgatcctgttcgaccgctatggccgt

SEQ ID NO: 556442 - DNA, 75 bp, synthetic construct
  source 1..75: mol_type = other DNA
attgccgccaactcagtatatcaatcttactatagaaatgatgagtactttagtctgttaggtcaagttaatcaa

SEQ ID NO: 556443 - DNA, 75 bp, synthetic construct
  source 1..75: mol_type = other DNA
acctcggcggctggcgcaccgtcttttgggttgcctcggtgttaatggcactgatggcgctggcattatggcgtg

SEQ ID NO: 556444 - DNA, 75 bp, synthetic construct
  source 1..75: mol_type = other DNA
ggtctgtttggccttgcaggagccgctggggcgctgggcgcacgtccggcaggtggttttgccgataagggtcaa

SEQ ID NO: 556445 - DNA, 75 bp, synthetic construct
  source 1..75: mol_type = other DNA
atgatgatcctcggtacggcattaaccggtttattctcagtcgtggcacaaattctggttccactggcagcgacg

SEQ ID NO: 556446 - DNA, 75 bp, synthetic construct
  source 1..75: mol_type = other DNA
gcggtggtaaacgaatggctgaaaaccaatccgcaactgggcgttgctactgaaaaagtgaccgatccgcaatac

SEQ ID NO: 556447 - DNA, 75 bp, synthetic construct
  source 1..75: mol_type = other DNA
ccttacattttcccgctttcgactaatggtaagcgtccggttcgtacggacagtctgtgtgaggtgtactggcaa

SEQ ID NO: 556448 - DNA, 75 bp, synthetic construct
  source 1..75: mol_type = other DNA
aattctggttccgctggcagcgacgctggcttcaccggacaaacgcggcaaagtggttggcaccattatgagcgg

SEQ ID NO: 556449 - DNA, 75 bp, synthetic construct
  source 1..75: mol_type = other DNA
ttccgtgcttttaatcctgagtttaaagttttcacggcgcgagatttacgccggacctgtaaaacgctgatgggg

SEQ ID NO: 556450 - DNA, 75 bp, synthetic construct
  source 1..75: mol_type = other DNA
cgcccttacagatcaaaacgatcttgtctggcattatccaacgtgatgcggtggtccatgcaaaccgagtccgtt

SEQ ID NO: 556451 - DNA, 75 bp, synthetic construct
  source 1..75: mol_type = other DNA
atgaacacaagtgtagggattacttttgggctggaggcaaatccggtgtcagtgataccgaaacagtcatctgct

SEQ ID NO: 556452 - DNA, 75 bp, synthetic construct
  source 1..75: mol_type = other DNA
gagcgttgggcgctcgtccggcgggcggttttgccgataagggcaaatcgcaccacaccacaactttcggtctgc

SEQ ID NO: 556453 - DNA, 75 bp, synthetic construct
  source 1..75: mol_type = other DNA
ggggggttattagagatgtgagagattctaatgacaaccaacttattcctgatttacgtaaggcagtaaaattat

SEQ ID NO: 556454 - DNA, 75 bp, synthetic construct
  source 1..75: mol_type = other DNA
ggagcagttcgctcaggcaactaacgttgggccactgatgcagcacctaatccgcttctgtgtttatgctggcgg

SEQ ID NO: 556455 - DNA, 75 bp, synthetic construct
  source 1..75: mol_type = other DNA
ccaacccgcaactgggcgttgcgactgaaaaagtgaccgatccgcaatacttcggcaccggcctgggtatcgctg

SEQ ID NO: 556456 - DNA, 75 bp, synthetic construct
  source 1..75: mol_type = other DNA
ttgaaagtgagatagactcgattaatgatgaaatattaagcaattcagttaagaaaaaaatagcggaattagaaa

SEQ ID NO: 556457 - DNA, 75 bp, synthetic construct
  source 1..75: mol_type = other DNA
aatggacaatgccgcagaggactggcaaacggcaatgatccgctttattatcgagttcggtgaccgcttggatgg

SEQ ID NO: 556458 - DNA, 75 bp, synthetic construct
  source 1..75: mol_type = other DNA
ttatggccgtgaacgttccgaccacatggattaattctggcatgagtgagtttgacagccggttgtttgctgcca

SEQ ID NO: 556459 - DNA, 75 bp, synthetic construct
  source 1..75: mol_type = other DNA
ggcatttaccatccgtgatggtcgcctgtttaccctgcgtgagcgcgagctgcctgcattccgactctaccgtat

SEQ ID NO: 556460 - DNA, 75 bp, synthetic construct
  source 1..75: mol_type = other DNA
gcagttggcggatgaaattgaaaatatctacagcgatctggaacagcttagccgcgtgattatggaagggcatca

SEQ ID NO: 556461 - DNA, 75 bp, synthetic construct
  source 1..75: mol_type = other DNA
cgagatcctgcgagatatcgaatccctgttgccacataacgagtctctgttccagaaggtgaacttcctgatgca

SEQ ID NO: 556462 - DNA, 75 bp, synthetic construct
  source 1..75: mol_type = other DNA
cagaactgaagtggagcttcggctacccaggtgcgattatctttatgatcctcgcgggcttggcaccgtatctgt

SEQ ID NO: 556463 - DNA, 75 bp, synthetic construct
  source 1..75: mol_type = other DNA
gagcagaaccgcatcatcaaaattttctcggtggtatccgtcgtgttcctgccgccaacgctggttgcctccagc

SEQ ID NO: 556464 - DNA, 75 bp, synthetic construct
  source 1..75: mol_type = other DNA
tacgtccggataataaagccctgctggaaaaactgaataacgcactggcagcgattaaagcagatggtacgtatc

SEQ ID NO: 556465 - DNA, 75 bp, synthetic construct
  source 1..75: mol_type = other DNA
gatggatacccagcgtgcgctgaacttcctggtgcgtaaggcgcgtttaccgggcgggcaactggagcaggcgcg

SEQ ID NO: 556466 - DNA, 75 bp, synthetic construct
  source 1..75: mol_type = other DNA
gcgtgcccgtagccagtcgatggtagacggtaacgcctacgagctgctgctggatctgttcgaaaccaaaatcga

SEQ ID NO: 556467 - DNA, 75 bp, synthetic construct
  source 1..75: mol_type = other DNA
gagcagaaccgcatcattaaaatcttctcggtggtatccgtggtgttcctgccaccgacgctggtcgcttccagc

SEQ ID NO: 556468 - DNA, 75 bp, synthetic construct
  source 1..75: mol_type = other DNA
tgcagaaaaatgcaagaagcttcatcacgcgtgaataattccggggatggcatgtcagagggagaggaccgtgcg

SEQ ID NO: 556469 - DNA, 75 bp, synthetic construct
  source 1..75: mol_type = other DNA
ggattggtgtcatgtggattggcgtgttgctagccgctgcgttgtgcctggggctgggtatattcattaatgaaa

SEQ ID NO: 556470 - DNA, 75 bp, synthetic construct
  source 1..75: mol_type = other DNA
cgagccagggggaaacaccagataacgtcaatgtctgaaattgtcagggacctttcccgactgggctggactgat

SEQ ID NO: 556471 - DNA, 75 bp, synthetic construct
  source 1..75: mol_type = other DNA
ttgcgcaagagcaggaacaaaaacttatcagtgcgcttgctgataccagagagcacccgtcccccgatggtgaaa

SEQ ID NO: 556472 - DNA, 75 bp, synthetic construct
  source 1..75: mol_type = other DNA
tcagaagaatttgccatcatattccgcaaggagttaacttcaaatattgtcaatcgcctcgttgcagatatttct

SEQ ID NO: 556473 - DNA, 75 bp, synthetic construct
  source 1..75: mol_type = other DNA
tcaggggaattgaaggtcatgtgatggtggaagatgacttcagtgaggtttacagaaagataaaagaaatttcac

SEQ ID NO: 556474 - DNA, 75 bp, synthetic construct
  source 1..75: mol_type = other DNA
tcaggaaccggtaaacgggctgactttcaactggtccgggatgtggacttttggcgcggtgatgattgccattat

SEQ ID NO: 556475 - DNA, 75 bp, synthetic construct
  source 1..75: mol_type = other DNA
gataaaaaagcccccgtgcatatgcgtaccgccgcgcaggggctgatcacgctctgctgccagggcttcggcagt

SEQ ID NO: 556476 - DNA, 75 bp, synthetic construct
  source 1..75: mol_type = other DNA
gatatctcaccgacgaacatcccgctgctgattaccgccggaagttctgctctgcttggtgtgtttgcgtttttc

SEQ ID NO: 556477 - DNA, 75 bp, synthetic construct
  source 1..75: mol_type = other DNA
atgatctgcgtagaagtgttgcgactggatgcgctgaataccttgatgctccagagcgcctaatagagttactgt

SEQ ID NO: 556478 - DNA, 75 bp, synthetic construct
  source 1..75: mol_type = other DNA
ctgattgactataactccggcaaagtgctcgccgaacagaacgcagatgtccgccgcgatcctgccagcctgacc

SEQ ID NO: 556479 - DNA, 75 bp, synthetic construct
  source 1..75: mol_type = other DNA
gctttgctgtcagggcttcggcagtttgctcggttaccgtcttggcggcgtaatgatggagaaaatgttcgcgta

SEQ ID NO: 556480 - DNA, 75 bp, synthetic construct
  source 1..75: mol_type = other DNA
gagaaaactggagaagaaattttcatactgcaacggattaaatctgactcaccgtagtttactttcggttgttaa

SEQ ID NO: 556481 - DNA, 75 bp, synthetic construct
  source 1..75: mol_type = other DNA
tggacagatgggccgtgggttgtgcgaaagcggctcaggaagacatcctcaaggcttacgaagcatacgatttcc

SEQ ID NO: 556482 - DNA, 75 bp, synthetic construct
  source 1..75: mol_type = other DNA
ttccgttgttgacgtgcgtccggaatttgccggccacgctgcggacatgtatctggaaggttctgaccaacaccg

SEQ ID NO: 556483 - DNA, 75 bp, synthetic construct
  source 1..75: mol_type = other DNA
tcactcggttaacaagattttgaaagacattatcgtgaagtccaaagggctttccggttatgactcgccgtatgt

SEQ ID NO: 556484 - DNA, 75 bp, synthetic construct
  source 1..75: mol_type = other DNA
cccgcgcacgtaatcatattcatgttctggaagagaacatggcgctgttgatggaacaggcaatcgccaacgaag

SEQ ID NO: 556485 - DNA, 75 bp, synthetic construct
  source 1..75: mol_type = other DNA
aacagcactatcttgggccgcttaacggaccggagctgctggtggtgctaccggaagcgaaagcggtgggatcgg

SEQ ID NO: 556486 - DNA, 75 bp, synthetic construct
  source 1..75: mol_type = other DNA
ctgcgtattcagcgtttggggcaggaacagcactatcttggaccgcttaacggacctgagctgctggtggtgcta

SEQ ID NO: 556487 - DNA, 75 bp, synthetic construct
  source 1..75: mol_type = other DNA
acgaagtggtacagcgtctgatgcgcttctgttccgttgagatgggttccttctacctcgacatcatcaaagacc

SEQ ID NO: 556488 - DNA, 75 bp, synthetic construct
  source 1..75: mol_type = other DNA
ggcggaagcggaagttgagtattacgacaaaacttctccgtccatcgacgttgctttccaggcggtcgatcagga

SEQ ID NO: 556489 - DNA, 75 bp, synthetic construct
  source 1..75: mol_type = other DNA
tcacgattgaagatattgaatatgagtttcagatttctgacgaattccggggagcgagggaacagttcagggaaa

SEQ ID NO: 556490 - DNA, 75 bp, synthetic construct
  source 1..75: mol_type = other DNA
gaacaaactgggcgcggatattctgcgtctgtgggtggcatcaaccgactacaccggcgaaatggctgtttctga

SEQ ID NO: 556491 - DNA, 75 bp, synthetic construct
  source 1..75: mol_type = other DNA
gtatgcagaaccggaactggcggcgaaattgaccgcgctgggcgatgaattacgatttgtcctgttgacctccgg

SEQ ID NO: 556492 - DNA, 75 bp, synthetic construct
  source 1..75: mol_type = other DNA
ctgttcgtgcataaagacactgaagagctgcatccgcgtaccctcgaactgatggaggaagtggcgaaacgcgtt

SEQ ID NO: 556493 - DNA, 75 bp, synthetic construct
  source 1..75: mol_type = other DNA
acgctgcgcaccggtcgcgtgaaaagcggtcgtttcgctaaaggttcgggcatcaaaggcaacgaatttaaactc

SEQ ID NO: 556494 - DNA, 75 bp, synthetic construct
  source 1..75: mol_type = other DNA
agtaccgactgtaccaggccgcagaccgcccgactgagaaaatcgcagcgcagatgctgggcagtaccattgctg

SEQ ID NO: 556495 - DNA, 75 bp, synthetic construct
  source 1..75: mol_type = other DNA
tggcaatacctattccctggttgaaacggacagctgtgcggcgctgcgctgggatctgctttccgtctgggcgaa

SEQ ID NO: 556496 - DNA, 75 bp, synthetic construct
  source 1..75: mol_type = other DNA
gcgtattggttttaacggtaaaagccgcgcaaaaaccactgatccagaagctaacccgaacggcgaagatgtgaa

SEQ ID NO: 556497 - DNA, 75 bp, synthetic construct
  source 1..75: mol_type = other DNA
aggcgcaaaagtttttgcgtaattacgccatttcgatggcaaaagccaatggcgtatttacagcacaacagtttt

SEQ ID NO: 556498 - DNA, 75 bp, synthetic construct
  source 1..75: mol_type = other DNA
gaacgcgggcagcgaagaggagttcttccagcgtattcaggcattcagcaacgaatctttcgcgctggatatgct

SEQ ID NO: 556499 - DNA, 75 bp, synthetic construct
  source 1..75: mol_type = other DNA
gtccggtaacgagtacaagctggtagaaacggattccggttcgtatctgccttactccctgctggttgtctgggc

SEQ ID NO: 556500 - DNA, 75 bp, synthetic construct
  source 1..75: mol_type = other DNA
ggttccagtggggggtattcagcccagtaatgcgtttacatggcaaccgcgacccgcaggttttgcctgaacaac

SEQ ID NO: 556501 - DNA, 75 bp, synthetic construct
  source 1..75: mol_type = other DNA
aagagttactagaagttgcacgtggctacaagcagcgtaatttgcctatttcggtgattgtcatcgatttcttcc

SEQ ID NO: 556502 - DNA, 75 bp, synthetic construct
  source 1..75: mol_type = other DNA
cagtgctggaagtcggtaatatctatccgcgtatgtacgccaaaacgttcttcgatggcatgcaggcagccggag

SEQ ID NO: 556503 - DNA, 75 bp, synthetic construct
  source 1..75: mol_type = other DNA
ccctgaccgaaccgcgcagcattgccctgcgtaaagccctgctggaaagcacggaatttctgaatttcaccacct

SEQ ID NO: 556504 - DNA, 75 bp, synthetic construct
  source 1..75: mol_type = other DNA
aaagtcacccgaacggcgaagacgtcaacatcggctggcatgaaatcgccaaaaagtggggagaacagcccggca

SEQ ID NO: 556505 - DNA, 75 bp, synthetic construct
  source 1..75: mol_type = other DNA
agagacgcaaacgcaatccacggtgccggataaaaacgatcgcgccactggcgatggtccatcccaggtgaatta

SEQ ID NO: 556506 - DNA, 75 bp, synthetic construct
  source 1..75: mol_type = other DNA
ccggccgcacggcttacgtcccgccgtttatgccgggcaaacgtatgatcgtcaccacgctgccgaacctgcaca

SEQ ID NO: 556507 - DNA, 75 bp, synthetic construct
  source 1..75: mol_type = other DNA
ttcggcaccggtctgggcatcgctgtacgtccggataacaaagctctgctggagaaactgaataacgcactggca

SEQ ID NO: 556508 - DNA, 75 bp, synthetic construct
  source 1..75: mol_type = other DNA
tgatttccgggatggacatcacaccggaacgtagcaaacaggtcgcctttaccaccccctattacgaaaactcag

SEQ ID NO: 556509 - DNA, 75 bp, synthetic construct
  source 1..75: mol_type = other DNA
tattgatggcgtatttggcgacacagcggtggtaaatgagtggctgaaaacaaacccgcaactgggtgtcgctac

SEQ ID NO: 556510 - DNA, 75 bp, synthetic construct
  source 1..75: mol_type = other DNA
tgtgggtcaggatggggcctggtttacattatctctatgaagcgattaatccagcggaattacgggagcatatag

SEQ ID NO: 556511 - DNA, 75 bp, synthetic construct
  source 1..75: mol_type = other DNA
atgcctggaacggaaaaaataccgcatatcagtttaactatgaaggttgagaacgacctgaaacatcagcttagt

SEQ ID NO: 556512 - DNA, 75 bp, synthetic construct
  source 1..75: mol_type = other DNA
gcggaattacgggagcatatagaaaactatcatctgttactcgctgcgttaaaagcaaaagacaaagagggatgc

SEQ ID NO: 556513 - DNA, 75 bp, synthetic construct
  source 1..75: mol_type = other DNA
ccaatccgcaactgggcgttgcgactgaaaaagtgaccgatccgcaatacttcggcaccggtctgggtatcgctg

SEQ ID NO: 556514 - DNA, 75 bp, synthetic construct
  source 1..75: mol_type = other DNA
cgtcgagcatgacgaactgtatgcagcgttcgacaaaatcaccctcgcagccgatccggtagcaccggagggagg

SEQ ID NO: 556515 - DNA, 75 bp, synthetic construct
  source 1..75: mol_type = other DNA
cgtaaacagtacgaaaacaaatacctgcgtaacgaaggttatgcggttgagtatccggaactgtacgccgcgttt

SEQ ID NO: 556516 - DNA, 75 bp, synthetic construct
  source 1..75: mol_type = other DNA
atgcaggcagaatgtacttttactaatcacgcgttcgacagcctgatcccgtcactgaaattcagaaaatatgac

SEQ ID NO: 556517 - DNA, 75 bp, synthetic construct
  source 1..75: mol_type = other DNA
ggcaaacgcattgggatggaaaacggtacgacgcaccagaaatatattcaggatcagcacccggaagtgaaaact

SEQ ID NO: 556518 - DNA, 75 bp, synthetic construct
  source 1..75: mol_type = other DNA
ctgaataacgcgctggcagcaattaaagctgacggtacatatcagaaaatcaatgaccagtggttcccgcagtaa

SEQ ID NO: 556519 - DNA, 75 bp, synthetic construct
  source 1..75: mol_type = other DNA
cgtgccagggggaaacaccagataacgtcaatgtctgaaattgtcagggacctttcccgtctgggctggactgat

SEQ ID NO: 556520 - DNA, 75 bp, synthetic construct
  source 1..75: mol_type = other DNA
ggcagttcggcaaggagatgggcttctctccccgactatgtcgcagactaaaggtaaggtggaacggatggtgca

SEQ ID NO: 556521 - DNA, 75 bp, synthetic construct
  source 1..75: mol_type = other DNA
cctgctgttgcttcactcctggatgaataccgggattatattcgtcaacgcattcattcgttctctctcggttcc

SEQ ID NO: 556522 - DNA, 75 bp, synthetic construct
  source 1..75: mol_type = other DNA
accttgagacgccgccgtctcgcgatgaactggtcaaactcattgcagatatgggcatttccgtacgggctttgc

SEQ ID NO: 556523 - DNA, 75 bp, synthetic construct
  source 1..75: mol_type = other DNA
cgtgccagggggaaacaccagataacgtcaatgtctgaaattgtcagggacctttcccggctgggctggacagat

SEQ ID NO: 556524 - DNA, 75 bp, synthetic construct
  source 1..75: mol_type = other DNA
aaggcgacctgaaacgtatgggcgagttgatggcggaatctcatgcctctatgcgcgatgattcgaaatcaccgt

SEQ ID NO: 556525 - DNA, 75 bp, synthetic construct
  source 1..75: mol_type = other DNA
gtgaatttgattggtgaacacaccgactacaacgacggtttcgttctgccctgcgcgattgattatcaaaccgtg

SEQ ID NO: 556526 - DNA, 75 bp, synthetic construct
  source 1..75: mol_type = other DNA
ctcactggggaccaaagcagtttccatgccgaaaggtgtggctgtcgtcatcatcaacagtaacttcaaacgtac

SEQ ID NO: 556527 - DNA, 75 bp, synthetic construct
  source 1..75: mol_type = other DNA
cgaaagcatcaggggattacgtcctccgcgccccccattccccctgagcaacaacgtaatcgcgagctggaaaag

SEQ ID NO: 556528 - DNA, 75 bp, synthetic construct
  source 1..75: mol_type = other DNA
ggcagcctgagttcacagataaaacactctccaggaaacccggggcggttcatgagagttgggtacgccagctca

SEQ ID NO: 556529 - DNA, 75 bp, synthetic construct
  source 1..75: mol_type = other DNA
aggaagcagaaaaccagtttgttggctgtaactgtgggatcatggatcagctgatttccgcgctcggcaaaaaag

SEQ ID NO: 556530 - DNA, 75 bp, synthetic construct
  source 1..75: mol_type = other DNA
atgagccggttaccgcttaccaagcagggaatgagtagccgggcgattgccagagaactggggatctcccgcaat

SEQ ID NO: 556531 - DNA, 75 bp, synthetic construct
  source 1..75: mol_type = other DNA
atgaacaagaaaaccaaacgtactttcacccctgagttcaggctggaatgtgcacggctgattgttgataagggc

SEQ ID NO: 556532 - DNA, 75 bp, synthetic construct
  source 1..75: mol_type = other DNA
agatgcgcaaaaaggcgcattctccaaggaagatggcgagaaagtggttgatgaagcgggtaagcggttgatgaa

SEQ ID NO: 556533 - DNA, 75 bp, synthetic construct
  source 1..75: mol_type = other DNA
cgcgccagggggaaacaccagataacgtcaatgtctgaaattgtcagggacctttcccgtctgggctggaccgat

SEQ ID NO: 556534 - DNA, 75 bp, synthetic construct
  source 1..75: mol_type = other DNA
cgggccagggggaaacaccagataacgtcaatgtctgaaattgtcagggacctttcccggctgggctggactgat

SEQ ID NO: 556535 - DNA, 75 bp, synthetic construct
  source 1..75: mol_type = other DNA
gttgtagatgaaattcaacaactgggtggcctggcatttgcgtggcgctgtgatattacgtccgaacaggaatta

SEQ ID NO: 556536 - DNA, 75 bp, synthetic construct
  source 1..75: mol_type = other DNA
tattaacgccgatgcagcaaatcatgttgttgatgagattcaacaactgggggggcaggcatttgcgtggcgctg

SEQ ID NO: 556537 - DNA, 75 bp, synthetic construct
  source 1..75: mol_type = other DNA
atttaaacctgattatctggatggtttagtcatgcatgtggaaaaaggcaaagtttatctggatggggaattcgt

SEQ ID NO: 556538 - DNA, 75 bp, synthetic construct
  source 1..75: mol_type = other DNA
cgcgccagggggaaacaccagataacgtcaatgtctgaaattgtcagggacctttcccgcctgggctggactgat

SEQ ID NO: 556539 - DNA, 75 bp, synthetic construct
  source 1..75: mol_type = other DNA
cgggccagggggaaacaccagataacgtcaatgtctgaaattgtcagggacctttcccgtctgggctggacggat

SEQ ID NO: 556540 - DNA, 75 bp, synthetic construct
  source 1..75: mol_type = other DNA
acccggcgcaccgcttccgcgcattcggaggcacgccgggccactggatcgagtggggtcgtttaatgctgcaca

SEQ ID NO: 556541 - DNA, 75 bp, synthetic construct
  source 1..75: mol_type = other DNA
gatcacggtatcaaagccatgaacggcgcactgcgtgataaaaaatatggcggctggtatgcctgcgtgaatgac

SEQ ID NO: 556542 - DNA, 75 bp, synthetic construct
  source 1..75: mol_type = other DNA
ccaccgtgcgcgatgcctgggcacccgatggcgcggacgggattgtttataccgttgactgggaaggaaaaccgg

SEQ ID NO: 556543 - DNA, 75 bp, synthetic construct
  source 1..75: mol_type = other DNA
gaatgtgttttcttttttccatctgtcacaacttgttgcgccagaaatggaaaaaaatggcggtggcgttattct

SEQ ID NO: 556544 - DNA, 75 bp, synthetic construct
  source 1..75: mol_type = other DNA
atcctgatcccatgcctgctgtgggttgctgtttatggattaggtaaacgttacctccaaagaacaccaaactag

SEQ ID NO: 556545 - DNA, 75 bp, synthetic construct
  source 1..75: mol_type = other DNA
aaagtttctttccagccaacaaactgttgagcttgtgcatgaattgaccaacacccagaatttgggtgttgaccc

SEQ ID NO: 556546 - DNA, 75 bp, synthetic construct
  source 1..75: mol_type = other DNA
atgtcgctcaatttcacggtaattgtctggttgcgcttgtctataggtggagtttacgagttagctttttgccgc

SEQ ID NO: 556547 - DNA, 75 bp, synthetic construct
  source 1..75: mol_type = other DNA
cagcaggatatgaccgaaaccgccagagtggtgtttaatgaattaagcgtcaccgaaccggcgaccgccggggaa

SEQ ID NO: 556548 - DNA, 75 bp, synthetic construct
  source 1..75: mol_type = other DNA
ttaaccggaaaagggaaaaagacatgctaaaacagcaggatatgacagaagccgccagagtggtgtttaatgaat

SEQ ID NO: 556549 - DNA, 75 bp, synthetic construct
  source 1..75: mol_type = other DNA
taaatgtgcaggtggttattaataccggtctttcagcttgctggctttttcgacaagagctattggtgtgtcacg

SEQ ID NO: 556550 - DNA, 75 bp, synthetic construct
  source 1..75: mol_type = other DNA
tgcgtaagaacgtcgagccgtatgaggaactgggtcttgcagaagataaatttactgacgaccagctcatcgact

SEQ ID NO: 556551 - DNA, 75 bp, synthetic construct
  source 1..75: mol_type = other DNA
cgatgcgcagaaaagcgcgttcacgaaagaggacggtgagaaggtagttgatgaaaaaggtaaccggctgaacta

SEQ ID NO: 556552 - DNA, 75 bp, synthetic construct
  source 1..75: mol_type = other DNA
taactcagcttgtcatagctgggctgatgagtgttagcggcacctgtcagtcatttgcttatgtgttgatgagaa

SEQ ID NO: 556553 - DNA, 75 bp, synthetic construct
  source 1..75: mol_type = other DNA
gaattgctcaacaagctggaacggcagctcaataaactgcagcacaaaggcgaagctcgtcgtgccgcaacatcg

SEQ ID NO: 556554 - DNA, 75 bp, synthetic construct
  source 1..75: mol_type = other DNA
atgctgaaacagcaggatatgacagaaactgccagagcagtgtttaatgaattaagtgccaccgaaccggcgaca

SEQ ID NO: 556555 - DNA, 75 bp, synthetic construct
  source 1..75: mol_type = other DNA
gtagataaacgatttcttcaatgcggtaatgagatttatagtgcaattaaagacttacaacgcaaagcgcctgat

SEQ ID NO: 556556 - DNA, 75 bp, synthetic construct
  source 1..75: mol_type = other DNA
atgctaaaacagcaggatatgacagaaaccgccagagtggtgtttaatgaattaagtgccaccgaaccggcgaca

SEQ ID NO: 556557 - DNA, 75 bp, synthetic construct
  source 1..75: mol_type = other DNA
tgaactggaggcagaacgttttgcgcagaccgttaaggagattagtcacatccttacatgctcaattgatgacgg

SEQ ID NO: 556558 - DNA, 75 bp, synthetic construct
  source 1..75: mol_type = other DNA
acctttcacgcgaatgctgtcagttaatactgacccagcttgttatggcgggtctggcagactatcagttcggtt

SEQ ID NO: 556559 - DNA, 75 bp, synthetic construct
  source 1..75: mol_type = other DNA
atgaatacacgaatgtcgttactcgaacatttatcaccccactatgacttatcttccatgttcagctatgagttg

SEQ ID NO: 556560 - DNA, 75 bp, synthetic construct
  source 1..75: mol_type = other DNA
cgttagcgggcctttagccaacagtacgcttcagggggaaatatttctccagcgcgaggggcatatccaacaaca

SEQ ID NO: 556561 - DNA, 75 bp, synthetic construct
  source 1..75: mol_type = other DNA
gtcttcgagttcgctttctaaaaccgtttttgtgatgattccttatcacctgacttactatcaatattctcaatc

SEQ ID NO: 556562 - DNA, 75 bp, synthetic construct
  source 1..75: mol_type = other DNA
cagcatttatgttcttttatctgagggaatttatctgtctgctgtgtcggaatatctcagttatacagaaatcag

SEQ ID NO: 556563 - DNA, 75 bp, synthetic construct
  source 1..75: mol_type = other DNA
tggcgtgtgccgccgatgcgcggcgtatcgtcagccactacgaacgacgctggctgatagaggaatatcacaagg

SEQ ID NO: 556564 - DNA, 75 bp, synthetic construct
  source 1..75: mol_type = other DNA
ataagcaatctgcatatttacccaactgcaattaataatataagtaacgccataattttaagcattgtatactct

SEQ ID NO: 556565 - DNA, 75 bp, synthetic construct
  source 1..75: mol_type = other DNA
gcacaccagatttacttaatgacaatttgtatcataaacagttttatcgcgtattagatatattgagtgaaggcc

SEQ ID NO: 556566 - DNA, 75 bp, synthetic construct
  source 1..75: mol_type = other DNA
taactcgctcgcgcagaccaacacgcgggttacgctcactgcacaatacaagaaagggcaatcagaaacaaacgc

SEQ ID NO: 556567 - DNA, 75 bp, synthetic construct
  source 1..75: mol_type = other DNA
gtcgcgcaacgtgggaaacacagacaacaacgcatcgcctgacctttgaaattcgcgtatataacgccgatgggc

SEQ ID NO: 556568 - DNA, 75 bp, synthetic construct
  source 1..75: mol_type = other DNA
cattatcaaccaaaattgatcagcttacagtaacagttaacgggaacaccacggcgatcgagacgacatcgaaag

SEQ ID NO: 556569 - DNA, 75 bp, synthetic construct
  source 1..75: mol_type = other DNA
agacaatcaccgatctggaatcatccacggctgaatccatcaataaccttgaggcgaaagtagacggcgatatct

SEQ ID NO: 556570 - DNA, 75 bp, synthetic construct
  source 1..75: mol_type = other DNA
acaattcaaccgttatgatgatgattgacgtaaaaccatcatcatcaacgatatggacgcctgttaaagccgttt

SEQ ID NO: 556571 - DNA, 75 bp, synthetic construct
  source 1..75: mol_type = other DNA
agagaaattgctcgcttcttgcaggctgaaacgattggtgaacgtgttgcagggcaaacatctggtaatcagttt

SEQ ID NO: 556572 - DNA, 75 bp, synthetic construct
  source 1..75: mol_type = other DNA
atgttgtgatggaggagtaccgccgctggcgcaacgagtcctggcgatacgacggaagtgataagtacccgtggt

SEQ ID NO: 556573 - DNA, 75 bp, synthetic construct
  source 1..75: mol_type = other DNA
cgtgccagggggaaacaccagataacgtcaatgtctgaaattgtcagggacctttcccgactgggctggacggat

SEQ ID NO: 556574 - DNA, 75 bp, synthetic construct
  source 1..75: mol_type = other DNA
gtacgaactacgatccccggcaataacctgttctggattgcgccactaataaaccaggtggatccggtgatgcgt

SEQ ID NO: 556575 - DNA, 75 bp, synthetic construct
  source 1..75: mol_type = other DNA
ggatcaccggctggcggaaatggcaatggggaagttttatgataaaattcctgcaggcgtctggaaatatgttaa

SEQ ID NO: 556576 - DNA, 75 bp, synthetic construct
  source 1..75: mol_type = other DNA
gactacgccgctgtacatctaaggaaactctggaaaggataatagaaaaaaataaatattccctgacggatgacg

SEQ ID NO: 556577 - DNA, 75 bp, synthetic construct
  source 1..75: mol_type = other DNA
atgacgaaacaggaatggattttacgactacggcgctgtacatcgaaggaaaccctggaaagggtaatagaaaaa

SEQ ID NO: 556578 - DNA, 75 bp, synthetic construct
  source 1..75: mol_type = other DNA
tgataacccggtcgccggcattcaaggccagccgggccgaacagttaaaaatggccgtcgggctggaaaccatcc

SEQ ID NO: 556579 - DNA, 75 bp, synthetic construct
  source 1..75: mol_type = other DNA
ttgaaatactggggctcagcgatgcagctgacatgctttccgtgatggttaatggtaaaagattaaaggatattt

SEQ ID NO: 556580 - DNA, 75 bp, synthetic construct
  source 1..75: mol_type = other DNA
ctgctgcactggggagtgattatacgatttcaccagatattattgttgaaagagaacctgaatgtgatcaagtta

SEQ ID NO: 556581 - DNA, 75 bp, synthetic construct
  source 1..75: mol_type = other DNA
ttttttgttcgtgctggcgcttttctgcgggatgtgaacttcacgaccaaactcggtggaatgacagtatcagct

SEQ ID NO: 556582 - DNA, 75 bp, synthetic construct
  source 1..75: mol_type = other DNA
gcagcaatacgacagaacaatattctggctggttttttccgtcctgccagacagtttgaaccggtcgagggttat

SEQ ID NO: 556583 - DNA, 75 bp, synthetic construct
  source 1..75: mol_type = other DNA
gttccttcgaattcacttccagcgagcatttcccgtggtcacagcctgtcatgtaccacatctgcgtcgaactac

SEQ ID NO: 556584 - DNA, 75 bp, synthetic construct
  source 1..75: mol_type = other DNA
atccgcaacggaaccgtattcgccgtgtctactgaatctgcaaaacctgttctgtgtcgaatcactagcgtagca

SEQ ID NO: 556585 - DNA, 75 bp, synthetic construct
  source 1..75: mol_type = other DNA
gcctgatggctcaagccgccccacgctgtcgctgagtgcactgctgaaacagtatggtatccgcctgacggctaa

SEQ ID NO: 556586 - DNA, 75 bp, synthetic construct
  source 1..75: mol_type = other DNA
atgccattgatgctcctgctgatgcgcctgatggctcaagccgccccacgctgtcgctgagtgcactgctgaaac

SEQ ID NO: 556587 - DNA, 75 bp, synthetic construct
  source 1..75: mol_type = other DNA
acgtttgaatggaaaggactgaaaaaattatgcgtggcagtctcctttcgctcaataatagcagagcaaaagaaa

SEQ ID NO: 556588 - DNA, 75 bp, synthetic construct
  source 1..75: mol_type = other DNA
caatgtcataacgtcatacaattggaacggtagcgatcaaggttgggcaatagttaaagatggctgggctacatt

SEQ ID NO: 556589 - DNA, 75 bp, synthetic construct
  source 1..75: mol_type = other DNA
gttgatgatggcgctttgtacgtgctttctcaatactgcgatcagttggttgatgatggctatggtggccttgaa

SEQ ID NO: 556590 - DNA, 75 bp, synthetic construct
  source 1..75: mol_type = other DNA
taccatttcagcgtcacccctttcgactctgctgatggcacacgccattatagggtatggacggccgtgccaagt

SEQ ID NO: 556591 - DNA, 75 bp, synthetic construct
  source 1..75: mol_type = other DNA
agattcaatctgtcaatgcaacacccctttcaattatctctttcggtgttttgtgtcaacgacggatgaaaagtg

SEQ ID NO: 556592 - DNA, 75 bp, synthetic construct
  source 1..75: mol_type = other DNA
cccctgagttcaggctggaatgtgcacagctgattgttgataagggctactcatatcgacaggccagtgaagcga

SEQ ID NO: 556593 - DNA, 75 bp, synthetic construct
  source 1..75: mol_type = other DNA
acaacgtaatcgcgagctggaaaagcgggttcgccgcctggaggaacgaaatacgatattaaaaaagctaccgca

SEQ ID NO: 556594 - DNA, 75 bp, synthetic construct
  source 1..75: mol_type = other DNA
atttaccatgttatcttcaatggtaatgtttatcagaatgcctgtgggttggttctgaagattgcccgcgtggca

SEQ ID NO: 556595 - DNA, 75 bp, synthetic construct
  source 1..75: mol_type = other DNA
aatactcctctgaccacggcgataacgacccacgccgatgaattagccgctgtgctatttacctccggaaccgag

SEQ ID NO: 556596 - DNA, 75 bp, synthetic construct
  source 1..75: mol_type = other DNA
gtgacagccactcagttgtcagcctctgttctgctctggaaatacaccgcagcagttaccagtactggcgaaaac

SEQ ID NO: 556597 - DNA, 75 bp, synthetic construct
  source 1..75: mol_type = other DNA
gtaaatgcctcaataagcaatcttgacaagaaaactgacgccagcgtaaaccgtcttgatcaggcaattgcagac

SEQ ID NO: 556598 - DNA, 75 bp, synthetic construct
  source 1..75: mol_type = other DNA
ttgattctgaatatatcgcggctggtgacaccatcagattacttgataacgatggtaaatttaaaaaacaccaga

SEQ ID NO: 556599 - DNA, 75 bp, synthetic construct
  source 1..75: mol_type = other DNA
ttgcacagcaaatacagtcaaccaactataaagccggttcggctggctggatgattaataaaaacggtagcgcgg

SEQ ID NO: 556600 - DNA, 75 bp, synthetic construct
  source 1..75: mol_type = other DNA
acagaggattttgacgaaatcactgattacgttacaaaggatgtaatggaatcagagcaattcaaggagatgatt

SEQ ID NO: 556601 - DNA, 75 bp, synthetic construct
  source 1..75: mol_type = other DNA
gtcgagctacatgggaaacacagacgacaacgcatcgcctgacctttgagatccgcgcatataacgcagaaggcc

SEQ ID NO: 556602 - DNA, 75 bp, synthetic construct
  source 1..75: mol_type = other DNA
gcgagataatcgacgataatttatcttatcctcacaccgctgtagcaggcgcggtaattgaccacgatcagtata

SEQ ID NO: 556603 - DNA, 75 bp, synthetic construct
  source 1..75: mol_type = other DNA
tgacaaacatcactgacgaattgaggactgacactgacagcttaatcacagaaacaggtgaaataaaagctgaca

SEQ ID NO: 556604 - DNA, 75 bp, synthetic construct
  source 1..75: mol_type = other DNA
gcacgtattcaggtttatggctaggtggatttaaaaaagcgtacaccaataaccctgcgtggctattccggtatc

SEQ ID NO: 556605 - DNA, 75 bp, synthetic construct
  source 1..75: mol_type = other DNA
aatgacacgcctatcactgacgcaaacggaaacacatcaattcctgggattagtatagcctggcgcaacggcacg

SEQ ID NO: 556606 - DNA, 75 bp, synthetic construct
  source 1..75: mol_type = other DNA
gaaaccagtgcaagaactgaagccatcagcggcgtgaatacctcaatttccacgcttgacggcaaagttacaagc

SEQ ID NO: 556607 - DNA, 75 bp, synthetic construct
  source 1..75: mol_type = other DNA
cggcgcaatgtatgtgcgcgaagcgtttattaaagacggttcaatcgacaatgcaaaaataggcaatgtcataac

SEQ ID NO: 556608 - DNA, 75 bp, synthetic construct
  source 1..75: mol_type = other DNA
aagatagagcaggcgaaagcaagtctgcaaaacgcctcgattgcacttatcaacaactcaatagcgcaaagcaag

SEQ ID NO: 556609 - DNA, 75 bp, synthetic construct
  source 1..75: mol_type = other DNA
actacgtgatgaaggatgtcatggagtcagaacagtttaaggacatgattggcgatattaaagatcttggcgacc

SEQ ID NO: 556610 - DNA, 75 bp, synthetic construct
  source 1..75: mol_type = other DNA
ttcaaacgctattatcagtttggttttaccggcacccctattttcccggaaaacgccttaggctcagaaacaacc

SEQ ID NO: 556611 - DNA, 75 bp, synthetic construct
  source 1..75: mol_type = other DNA
tatcggtgatattaacgatgagagtattgatacctcagagatgaacccaggctcccgtgagtttctggaatctgc

SEQ ID NO: 556612 - DNA, 75 bp, synthetic construct
  source 1..75: mol_type = other DNA
aaatttaaacgtttttatcagtttggtttcacaggcacaccgatttttgccggtaaaaatgcgctgggcgcggaa

SEQ ID NO: 556613 - DNA, 75 bp, synthetic construct
  source 1..75: mol_type = other DNA
gctatagccctgttcacagcctcgacagaggaatcgctggaaaaacaccgggaaggggtgaaagaggcgatgatg

SEQ ID NO: 556614 - DNA, 75 bp, synthetic construct
  source 1..75: mol_type = other DNA
gattcaggattatcgctctgcctataacgatattcgtgactggcagcgccgcgagaaagaagctgagaaaaaaga

SEQ ID NO: 556615 - DNA, 75 bp, synthetic construct
  source 1..75: mol_type = other DNA
ttcaaacgctattatcagtttggttttaccggtacccctattttcccggaaaacgcctcaggctcagaaacgacc

SEQ ID NO: 556616 - DNA, 75 bp, synthetic construct
  source 1..75: mol_type = other DNA
gcggcacgtcctggcgggaacagacgcaaaaccacaggcacacagggtaatcagccaccagcgggaggcgatgac

SEQ ID NO: 556617 - DNA, 75 bp, synthetic construct
  source 1..75: mol_type = other DNA
aaaaccacaggcacacagggtaatcagccaccagctggaggcgatgacccctacggtgacaatattcctttctga

SEQ ID NO: 556618 - DNA, 75 bp, synthetic construct
  source 1..75: mol_type = other DNA
atgacgctggcgcgtatggcggtcccccttccgtgcagccaggcagatgacggaacggctacgttatggctatcg

SEQ ID NO: 556619 - DNA, 75 bp, synthetic construct
  source 1..75: mol_type = other DNA
tccagaagctgaataacctgatgaagggggatgcagatttagccgtctaccagaaacaggtcgtctttatttttg

SEQ ID NO: 556620 - DNA, 75 bp, synthetic construct
  source 1..75: mol_type = other DNA
agttgcaggttatccagcaatttgaacagacgggaacgcatgcgaatcgctatgacgtcacgatactggtcaatg

SEQ ID NO: 556621 - DNA, 75 bp, synthetic construct
  source 1..75: mol_type = other DNA
acttcctggctaaacatcaaaaaggcgatgttgccagcgtatccggcacgatgcaggtcagccagtggaccggac

SEQ ID NO: 556622 - DNA, 75 bp, synthetic construct
  source 1..75: mol_type = other DNA
tgttatcactgtttattctatttaccttcagccctgtagcctcagcggctgatgcatgcaaaaccgtattatgtc

SEQ ID NO: 556623 - DNA, 75 bp, synthetic construct
  source 1..75: mol_type = other DNA
cagtgacagcagcctggacaaaacccgtaaaatccatatcgactatatctgtgatttcacgtttgatgacggtcg

SEQ ID NO: 556624 - DNA, 75 bp, synthetic construct
  source 1..75: mol_type = other DNA
ggctttatggcagtagtttcagaactggaacaacggttccctgaccctgccagtattgaaagtgaaaaagagaag

SEQ ID NO: 556625 - DNA, 75 bp, synthetic construct
  source 1..75: mol_type = other DNA
tcagcgagtgaaaaatcaggatattgaccttctcatcgtggtgggaatgttcttaaccggctttgatgccccgac

SEQ ID NO: 556626 - DNA, 75 bp, synthetic construct
  source 1..75: mol_type = other DNA
ctttaccgctacctttttccagaaacataccctgcttaatgttctggtgaactacagcgtgtttgacagtagtca

SEQ ID NO: 556627 - DNA, 75 bp, synthetic construct
  source 1..75: mol_type = other DNA
ctttaaggccgcacgactggcaaccgagctggactttattgataaagtcttcttcgtggtcgacaggaaagacct

SEQ ID NO: 556628 - DNA, 75 bp, synthetic construct
  source 1..75: mol_type = other DNA
aaacgcactgggggcagaaaccaccgccagcgtcttcgggcgtgaattacattcttacgtcattactgatgcgat

SEQ ID NO: 556629 - DNA, 75 bp, synthetic construct
  source 1..75: mol_type = other DNA
tatggaaaatcaacagctcctataaagcgaaaaactggtccactcccgaaagcggtggctttatctggcacacca

SEQ ID NO: 556630 - DNA, 75 bp, synthetic construct
  source 1..75: mol_type = other DNA
aatttcagtactgatagcaaggattttcagaactactatcgggacctggctcagcgggttaaaaatcaggatgtt

SEQ ID NO: 556631 - DNA, 75 bp, synthetic construct
  source 1..75: mol_type = other DNA
gccagcgtatttggtcgtgaattgcattcatatgttattaccgatgcgattcgagatgaaaaagtgcttaaattc

SEQ ID NO: 556632 - DNA, 75 bp, synthetic construct
  source 1..75: mol_type = other DNA
accccctgcgtatccaggaaataacgcaatacattctcaataacttccgccagaaaacgcatcgtaccttcccgg

SEQ ID NO: 556633 - DNA, 75 bp, synthetic construct
  source 1..75: mol_type = other DNA
tgctacaggaagaagcggagaagaaatctggcagctataaacgccttcgggtggcaaccatcttctcctttgctg

SEQ ID NO: 556634 - DNA, 75 bp, synthetic construct
  source 1..75: mol_type = other DNA
aaagcttattacacgacgtttaaaatgctacaggaagaagcggagaagaaatctggcagctataaacgccttcgg

SEQ ID NO: 556635 - DNA, 75 bp, synthetic construct
  source 1..75: mol_type = other DNA
gcaggttatcgcagacagcgtaatcagtgcgcgaacggtgcgaccgggcggcaaaaaaggtcaacagggtcaggc

SEQ ID NO: 556636 - DNA, 75 bp, synthetic construct
  source 1..75: mol_type = other DNA
ttgcacaagcccttaattctagccttgatagtatggcttcgggtcagatagctcaatattcttcaatgataagtg

SEQ ID NO: 556637 - DNA, 75 bp, synthetic construct
  source 1..75: mol_type = other DNA
cttagcatgtacgcggttgatgctgttgccgctattgcagaggtgagaggctggaatgcctgccgcgcggctatg

SEQ ID NO: 556638 - DNA, 63 bp, synthetic construct
  source 1..63: mol_type = other DNA
tcgtggcgattatggcgctggttgctgcgtccatcatcgaaccgggtctttacttcgcgatga

SEQ ID NO: 556639 - DNA, 75 bp, synthetic construct
  source 1..75: mol_type = other DNA
gcaggttatcgcagacagcgtaatcagtgcgcgaacggtgcgaccaggcggcaaaaaaggccagcagaaccaggc

SEQ ID NO: 556640 - DNA, 75 bp, synthetic construct
  source 1..75: mol_type = other DNA
ggcggctggcaaatgacccgcagttaaagaccaccagcaagggtacacaaatggcgatggtaagtatggcagtac

SEQ ID NO: 556641 - DNA, 75 bp, synthetic construct
  source 1..75: mol_type = other DNA
ggcagagattgaccgctttggtaatcctggtcgcggtcctatagcgaaattgtcggggagcggtgcgcgcgcctg

SEQ ID NO: 556642 - DNA, 75 bp, synthetic construct
  source 1..75: mol_type = other DNA
ggcgcaggtggaaaaaattggagtcaaagctgccgaggagatcgggcaactcgtcgccgtcgcgcgtgaagaact

SEQ ID NO: 556643 - DNA, 75 bp, synthetic construct
  source 1..75: mol_type = other DNA
aaagcagcggaagaaatcgggcagcttgtcaccgttgcacgcgaagaactccagcggcgcaaggccaaagagcag

SEQ ID NO: 556644 - DNA, 75 bp, synthetic construct
  source 1..75: mol_type = other DNA
gcacatcacaattcatcattgcgtcaatgcaaggcgagatcaaacgccgccagcgacgcaaggccaaagagcagg

SEQ ID NO: 556645 - DNA, 75 bp, synthetic construct
  source 1..75: mol_type = other DNA
gggacctgtccgtatcctgccgacctttaccgcgccgaccccgtctggaaaaaagatatggaatcggccttacag

SEQ ID NO: 556646 - DNA, 75 bp, synthetic construct
  source 1..75: mol_type = other DNA
cgttgccatactgaaccgcaaatcagcgacgggctgtgctttcggtgatttttatgttgctgcccgcgataccgc

SEQ ID NO: 556647 - DNA, 75 bp, synthetic construct
  source 1..75: mol_type = other DNA
cggtgaccattatctgaaaatactgtatatcccctcagaacatgttattgccggtttttattacaacagcggaga

SEQ ID NO: 556648 - DNA, 75 bp, synthetic construct
  source 1..75: mol_type = other DNA
gcttgatgaactcagaactgtttacggtctgagaacaggagagttttttgaaatgctgattacagaaaaatatct

SEQ ID NO: 556649 - DNA, 75 bp, synthetic construct
  source 1..75: mol_type = other DNA
cagcaggggcaggctactgatgcactgaacagggcaaagcaacagacaggccagcacgatgatccgtacggggac

SEQ ID NO: 556650 - DNA, 75 bp, synthetic construct
  source 1..75: mol_type = other DNA
atgacagcacagatagcggcttacggacggctggtggctgacccgcagttaaagaccaccagcaagggcacacaa

SEQ ID NO: 556651 - DNA, 75 bp, synthetic construct
  source 1..75: mol_type = other DNA
cggaacggctacgttatggctatcggtgatggcatttggtaagcaggccgacttcctggctaaacatcaaaaagg

SEQ ID NO: 556652 - DNA, 75 bp, synthetic construct
  source 1..75: mol_type = other DNA
acgagtaacagaagccggagaagtccggcttttttatgccccaaaaaaagcccggagggtcttatcgggcttttg

SEQ ID NO: 556653 - DNA, 75 bp, synthetic construct
  source 1..75: mol_type = other DNA
gtgatggcatttggcagacaggccgaagcactggaaaggcaccgcaagggtgaactcctgagcgtggcgggtaac

SEQ ID NO: 556654 - DNA, 75 bp, synthetic construct
  source 1..75: mol_type = other DNA
aaagaccaccagcaaagggacacaaatggcgatggcgagtatggcgattcctcttccgtgcagccaggcagatga

SEQ ID NO: 556655 - DNA, 75 bp, synthetic construct
  source 1..75: mol_type = other DNA
gctggacacacctgtggcacaacgatgagctcgacggtagtcgctggcataaacagcagcacagcttcctgagtc

SEQ ID NO: 556656 - DNA, 75 bp, synthetic construct
  source 1..75: mol_type = other DNA
cactgacgcactgaacagggcaaaacaacagacaagccagcacgatgacccgtacggggacgggataccgtttta

SEQ ID NO: 556657 - DNA, 75 bp, synthetic construct
  source 1..75: mol_type = other DNA
atgaaatccatcattttatcgatggttgccgcaagtgctatcgcactctctgcccccgtatatgcgtctgatccg

SEQ ID NO: 556658 - DNA, 75 bp, synthetic construct
  source 1..75: mol_type = other DNA
ggcggtcggtggacgacccgcagacaaaacagaccagcaagggcacccccatgacgttggcgcgtatggcggtat

SEQ ID NO: 556659 - DNA, 75 bp, synthetic construct
  source 1..75: mol_type = other DNA
cgtactggcaacacgattactgtgactggtgcgggcgaggcgaagaactggacactgtgcttgcgcaatattgtg

SEQ ID NO: 556660 - DNA, 75 bp, synthetic construct
  source 1..75: mol_type = other DNA
gctggtgcgcgtttggtttgctctccagccatagccgtttacatggcagcaaatcttatcgtgtgccgtgggcct

SEQ ID NO: 556661 - DNA, 75 bp, synthetic construct
  source 1..75: mol_type = other DNA
taaaaatatcaagtttatttcttggtatcacgttgatactttacatcatggcaaagtttggttttcatgttaaag

SEQ ID NO: 556662 - DNA, 75 bp, synthetic construct
  source 1..75: mol_type = other DNA
gcaggacaatatcgactgcgaatcggggattatctttgacaacgatgaagataaaacggattcggcagcactgtt

SEQ ID NO: 556663 - DNA, 75 bp, synthetic construct
  source 1..75: mol_type = other DNA
agttcttgatcgctgtccatcaccgaaaaaaattggcttttacaccattggcgataaaagcatttacctgtatga

SEQ ID NO: 556664 - DNA, 75 bp, synthetic construct
  source 1..75: mol_type = other DNA
gcaccactgaagaagcaatcaggcgaacgcaggaatacaacgatcagcttgagcgccagcaggctcagcttgcgc

SEQ ID NO: 556665 - DNA, 75 bp, synthetic construct
  source 1..75: mol_type = other DNA
tttttggtgtaagcttcatcgcctctgcgttcgctgtggcggtcgtactggcggccttttactatggattccttg

SEQ ID NO: 556666 - DNA, 75 bp, synthetic construct
  source 1..75: mol_type = other DNA
tccatttaacataataatcgtaatatgcactaaggaacacatagaacgccttgagttgatgtatcaggggaaaag

SEQ ID NO: 556667 - DNA, 75 bp, synthetic construct
  source 1..75: mol_type = other DNA
ataaaacggattcggcagcactgttgccctgtatcgaacaggcccgggaggatgtccgtactctgcgtcatctgc

SEQ ID NO: 556668 - DNA, 75 bp, synthetic construct
  source 1..75: mol_type = other DNA
atgcctgccgggtttacccactttcgactggtaaccagtaacaacatgaaatcattaaccacggaaacagctctg

SEQ ID NO: 556669 - DNA, 75 bp, synthetic construct
  source 1..75: mol_type = other DNA
atgcctgccgggtttacccactttccactggtaaccagcaacaacatgaaatcattaaccacggaaactgctctg

SEQ ID NO: 556670 - DNA, 75 bp, synthetic construct
  source 1..75: mol_type = other DNA
ataaaacggattcagcagcactgctgccctgcattaaacaggccagggaagatatccgtaccctgcgtcatctgc

SEQ ID NO: 556671 - DNA, 75 bp, synthetic construct
  source 1..75: mol_type = other DNA
atgaaatcattaactacggaaacagcgctggatattctgattacgtggctgcaggacaatatcgaccgcgaatcg

SEQ ID NO: 556672 - DNA, 75 bp, synthetic construct
  source 1..75: mol_type = other DNA
ataaaacagattcggcagcactgctgccctgcattgaacaggcgagggaggatatccataccctgcgccaactgc

SEQ ID NO: 556673 - DNA, 75 bp, synthetic construct
  source 1..75: mol_type = other DNA
cgcgatgatttccgaagcggcagctgcggcgcaaagcacgcttggcgcactgggtactgtagggactgaagaact

SEQ ID NO: 556674 - DNA, 75 bp, synthetic construct
  source 1..75: mol_type = other DNA
ggatgcgctgacaacgctctggcagaaactcaccggaagacagactgcttcacccgttccggtcgtgaatattcc

SEQ ID NO: 556675 - DNA, 75 bp, synthetic construct
  source 1..75: mol_type = other DNA
aggcgcacaggatggcgcacgttacacccacatcatccgtaacatacaggctgacggtctcgctgattttgccgg

SEQ ID NO: 556676 - DNA, 75 bp, synthetic construct
  source 1..75: mol_type = other DNA
cgctggggtgggtcattcagaacattgtgctggggccgctgacactgcttcttgatggcctcggcacagtgctga

SEQ ID NO: 556677 - DNA, 75 bp, synthetic construct
  source 1..75: mol_type = other DNA
accgaggatttgcgcgggctggttcagacggtgagcgcgtgggtgacccggatgcgcgaatgggtcggagagcat

SEQ ID NO: 556678 - DNA, 75 bp, synthetic construct
  source 1..75: mol_type = other DNA
ggagtccgtcaaaaaagaaaccgcgccacaaacgcaggctgcggtattttccggtgagatacacgtgcatctgca

SEQ ID NO: 556679 - DNA, 75 bp, synthetic construct
  source 1..75: mol_type = other DNA
agacggtatcgcctccacctgtggtgaacgttctgatgccagcagtgaatgttcctgcgccagtggtgagtgtgg

SEQ ID NO: 556680 - DNA, 75 bp, synthetic construct
  source 1..75: mol_type = other DNA
tccacggtgtttgactggtttacccggttactcacgcctgttcaggccagcaacgaatctcttgaacggtgtacg

SEQ ID NO: 556681 - DNA, 75 bp, synthetic construct
  source 1..75: mol_type = other DNA
aaccgcccggcgtatgggtgatgttctgcgggataaccttggcggtgatgccgatcgcctgtctggtgtcttctc

SEQ ID NO: 556682 - DNA, 75 bp, synthetic construct
  source 1..75: mol_type = other DNA
atccggctctgaaaccatgacgctgcttgtcagcatggcgcagcaggggaaattcgccctggataaaaccggcga

SEQ ID NO: 556683 - DNA, 75 bp, synthetic construct
  source 1..75: mol_type = other DNA
gtttccatatttcctggacaggtttgtcttttgaggaacgactttcaggttctcaggctcctgcactatatgcac

SEQ ID NO: 556684 - DNA, 75 bp, synthetic construct
  source 1..75: mol_type = other DNA
cttgccagaatggtgggggaggctgtacgggaagaaattcgcagacaatccgccgggatgaacagcttccgcgat

SEQ ID NO: 556685 - DNA, 75 bp, synthetic construct
  source 1..75: mol_type = other DNA
gtggaatgaaccgactgttgcacccgggcttccgcttatgccagcgttttcgcctgtgtctccggcggtttcccc

SEQ ID NO: 556686 - DNA, 75 bp, synthetic construct
  source 1..75: mol_type = other DNA
atgcctgccgggtttacccactttctactggtaaccagaaacaacatgaaatcattaaccacggaaaccgctctg

SEQ ID NO: 556687 - DNA, 75 bp, synthetic construct
  source 1..75: mol_type = other DNA
gtgaacagggagccgcccggtttttgtctgctctcgaaaactggaatcgcccgcgctctggcctggtatctccct

SEQ ID NO: 556688 - DNA, 75 bp, synthetic construct
  source 1..75: mol_type = other DNA
ttctggattttgccatcaatgatgacggggaacgtccggagctaacgaaaataatggacgactattttcgcaagc

SEQ ID NO: 556689 - DNA, 75 bp, synthetic construct
  source 1..75: mol_type = other DNA
ccgacgttcggggagtcctgcgcacagtgggtgtttgacctggtggcggccctgtttggctcctatgatgcgcag

SEQ ID NO: 556690 - DNA, 75 bp, synthetic construct
  source 1..75: mol_type = other DNA
gctcagcgctctggtaaatctgaactggaagcattcgaagtagctctcgaaaacgtgcgcccgactgtagaagtt

SEQ ID NO: 556691 - DNA, 75 bp, synthetic construct
  source 1..75: mol_type = other DNA
ataaagggatgtatcgtgcacacggacaggaaatttttccagggcatggggatcatggtgacattaccgtcgggc

SEQ ID NO: 556692 - DNA, 75 bp, synthetic construct
  source 1..75: mol_type = other DNA
ggaaaccataccgagcaacacctcgaaatggtagaccattctgatgatgccaacaaaatggtggctggtaactct

SEQ ID NO: 556693 - DNA, 75 bp, synthetic construct
  source 1..75: mol_type = other DNA
atgacacaacagacacacaccattgctgaatccaataactttatcgtccttgataaatacaccaaagttctggat

SEQ ID NO: 556694 - DNA, 75 bp, synthetic construct
  source 1..75: mol_type = other DNA
ttattcagcaaacgaacctggatgatttgccggataaagccagcatcattgacgcgttttttacctttgctcaac

SEQ ID NO: 556695 - DNA, 75 bp, synthetic construct
  source 1..75: mol_type = other DNA
ggcagtgagcagcgtggatgccgcgaaagcctattacgcgacgtttaaacggttacaagaggaagccgctaataa

SEQ ID NO: 556696 - DNA, 75 bp, synthetic construct
  source 1..75: mol_type = other DNA
acggcgcatctgacggtaataaggcaatcagtgaaacagagcatgatgcggtgaaagcgatgttcagggggatac

SEQ ID NO: 556697 - DNA, 75 bp, synthetic construct
  source 1..75: mol_type = other DNA
gcaaaactatgatgaatttgccacgctgaaagccctgcagaaggttgatattagtgacccggaagcggtagaaac

SEQ ID NO: 556698 - DNA, 75 bp, synthetic construct
  source 1..75: mol_type = other DNA
gctgaaaatcagcaggcgtttcttcatcccatgcgtatacaggaaatcacgcaatatattctgaataatttccgc

SEQ ID NO: 556699 - DNA, 75 bp, synthetic construct
  source 1..75: mol_type = other DNA
gaaaaagacttttttaatattctgaaaaagaaaaaagggagtattcgctggagtaaaacatttgatgcccgcaag

SEQ ID NO: 556700 - DNA, 75 bp, synthetic construct
  source 1..75: mol_type = other DNA
aaatgatcgaagaggtcaaacgcttaattcgttcaagcctggggaaccgggcgaaagagggcctggtggtcgatt

SEQ ID NO: 556701 - DNA, 75 bp, synthetic construct
  source 1..75: mol_type = other DNA
ggcttcgatgctccaacattaaacacgctattcgtcgataaaaacttgcgttttcacggcctgatgcaggcattc

SEQ ID NO: 556702 - DNA, 75 bp, synthetic construct
  source 1..75: mol_type = other DNA
agaaggtctggtggtcgattttattcagcaaacgaacctggatgatttgccggataaagccagcatcattgacgc

SEQ ID NO: 556703 - DNA, 75 bp, synthetic construct
  source 1..75: mol_type = other DNA
gcaggacaatatcgactgcgaatcgggaattatctttgacaacgatgaggataaaacggattcggcagcactgtt

SEQ ID NO: 556704 - DNA, 75 bp, synthetic construct
  source 1..75: mol_type = other DNA
gataccaccactccggcagcgatggctcaaacgctacaaaaattgttaaacgaaagtgtacttacagaaaaatct

SEQ ID NO: 556705 - DNA, 75 bp, synthetic construct
  source 1..75: mol_type = other DNA
atattacaaatactcattcatctatgaatgaactcaacgagcatattgcagggatcggagattcagtaattaaga

SEQ ID NO: 556706 - DNA, 75 bp, synthetic construct
  source 1..75: mol_type = other DNA
ctgagtccaataattttatcattttggacaaatacaacccggactggaagattaccgagagctaccagagcgaag

SEQ ID NO: 556707 - DNA, 75 bp, synthetic construct
  source 1..75: mol_type = other DNA
ctgaatccaataactttatcgttcttgataagtacatcaaagctgagcaaacaggcgacagctaccagagcgaat

SEQ ID NO: 556708 - DNA, 75 bp, synthetic construct
  source 1..75: mol_type = other DNA
acggattcagcagcactgttgccctgtatcgaacaggcccgggaggatgtccgtaccctgcgtcatctgcagctt

SEQ ID NO: 556709 - DNA, 75 bp, synthetic construct
  source 1..75: mol_type = other DNA
gctccaaaggctttaatgccatgctggcagtgagtagcgtggatgccgcgaaagcctattacgcgacgtttaaac

SEQ ID NO: 556710 - DNA, 75 bp, synthetic construct
  source 1..75: mol_type = other DNA
aacgatattcgtgactggcagcgccgtgagaaagaagctgacaaaaaagaaaaatcaaccactgactgggatgac

SEQ ID NO: 556711 - DNA, 75 bp, synthetic construct
  source 1..75: mol_type = other DNA
gcgactttatttttgatgacgggcgtcttgagaacatctatttgatagataaaaagaatctcatgcgcaataaag

SEQ ID NO: 556712 - DNA, 75 bp, synthetic construct
  source 1..75: mol_type = other DNA
tgaaatcaataacaggcataccggacagagcggtaaggggctggaggcagggaaactcacgcttgccgccgatat

SEQ ID NO: 556713 - DNA, 75 bp, synthetic construct
  source 1..75: mol_type = other DNA
atgcaggacgaccggctattttcaggatcaattcgtgaaaatatctgtgggtttgcagaagaaacagacgacgaa

SEQ ID NO: 556714 - DNA, 75 bp, synthetic construct
  source 1..75: mol_type = other DNA
attagcatctgctgctacaactttaacaatgtgcctacttcacaatcaaggtctaacaattatacatgtaggtga

SEQ ID NO: 556715 - DNA, 75 bp, synthetic construct
  source 1..75: mol_type = other DNA
ggcgcaggcgaccggggcgatgacaggggaagcaatagggatactggcggagtctgtttatcataaaaaagcgca

SEQ ID NO: 556716 - DNA, 75 bp, synthetic construct
  source 1..75: mol_type = other DNA
tcaccgtggcgggtatctggcggcccgggagagtgtcagactggataccggcgaaacggataacagcggtggtct

SEQ ID NO: 556717 - DNA, 75 bp, synthetic construct
  source 1..75: mol_type = other DNA
tgaaggcgggcagatactggccggtgcactgacgttatcagcagggaatacggataatcaggcgggggttattgc

SEQ ID NO: 556718 - DNA, 75 bp, synthetic construct
  source 1..75: mol_type = other DNA
ttacgcgaaaaactgactatttcccgctacgactccatcgtccccggcggtcgttatcataattttaaagacttt

SEQ ID NO: 556719 - DNA, 75 bp, synthetic construct
  source 1..75: mol_type = other DNA
agcagcgggtgctggacatcatcgaaattctgttcagcgatacagtcaaagcgcgttatatcgataaagaactca

SEQ ID NO: 556720 - DNA, 75 bp, synthetic construct
  source 1..75: mol_type = other DNA
acagcatcttttggtacagtaacaaatcaggaagtaaatagtgcaaaacaatatcagaaaataaaatctgtaacc

SEQ ID NO: 556721 - DNA, 75 bp, synthetic construct
  source 1..75: mol_type = other DNA
aggcttcgttcgacccaagtgtactggctattaaaattaacatttaccgcgtggcgaaagattctcggatcatcg

SEQ ID NO: 556722 - DNA, 75 bp, synthetic construct
  source 1..75: mol_type = other DNA
tatgcccagtgcgctggttgaggtgttgcgcgaaaaactgactatttcccgctacgactccatcgtacccggtgg

SEQ ID NO: 556723 - DNA, 75 bp, synthetic construct
  source 1..75: mol_type = other DNA
ggcggcgataaaaaggtctatctttcttccgccgactggatgacgcgcaatattgattatcgtattgaagtggcg

SEQ ID NO: 556724 - DNA, 75 bp, synthetic construct
  source 1..75: mol_type = other DNA
cggcacattgtcactccgtgctgacggtcaactggtgaacagcggtgtactggccggacagggggatctgagcgt

SEQ ID NO: 556725 - DNA, 75 bp, synthetic construct
  source 1..75: mol_type = other DNA
aaggcggttctggatgcggtgagtgccctgccggctccgcaggacgggcgtgatgccacggcactggaaatactc

SEQ ID NO: 556726 - DNA, 75 bp, synthetic construct
  source 1..75: mol_type = other DNA
cggatgttctgcagaaggcggtgaatgatgcggtcgcgaaaataccggtaccggcagacggtaaaagtatcaccc

SEQ ID NO: 556727 - DNA, 75 bp, synthetic construct
  source 1..75: mol_type = other DNA
aaaaaacattttccctgccggtgatgctctaccgcggtgtgttcagagccggtgaaatctaccaccccggcgata

SEQ ID NO: 556728 - DNA, 75 bp, synthetic construct
  source 1..75: mol_type = other DNA
gctccgcaggacgggcgtgatgccacggcactggaaatactccccgccattgacgatcaaaaatcctttccccgg

SEQ ID NO: 556729 - DNA, 75 bp, synthetic construct
  source 1..75: mol_type = other DNA
ggacggtaaaagtctcaccccggatgatgtgcgtccgatgcttgaacagatggtgaaagaggcggtaagccatat

SEQ ID NO: 556730 - DNA, 75 bp, synthetic construct
  source 1..75: mol_type = other DNA
atccggttctgcaggcgatggtggatgacgctgtgggggccatttcggtaccgcgtgatggtcgtgattatgatc

SEQ ID NO: 556731 - DNA, 75 bp, synthetic construct
  source 1..75: mol_type = other DNA
gatgcggtcgcaaatattccgcagccggcggacggtaaaagtatcaccccggatgatgtgcgtccgatgcttgaa

SEQ ID NO: 556732 - DNA, 75 bp, synthetic construct
  source 1..75: mol_type = other DNA
cgcgtgacggtcgtgattacgatccggaagtactgcagaaggcggtgaatgatgcggtcgcaaatattccgcagc

SEQ ID NO: 556733 - DNA, 75 bp, synthetic construct
  source 1..75: mol_type = other DNA
ttgctcggtgttcgttaaggacgcgacggttgccgggctggacgatggcgatatcgttacggtgaaagaagcgac

SEQ ID NO: 556734 - DNA, 75 bp, synthetic construct
  source 1..75: mol_type = other DNA
actacagagtcaggctatagcattgattttgttggtacctatacggacccactgaagcatgcggtttacccggat

SEQ ID NO: 556735 - DNA, 75 bp, synthetic construct
  source 1..75: mol_type = other DNA
tggatggttttctgaaaggtaaatgcatcccacgagatttaaaggttaacgaaacaaacgcagaatatctggtgc

SEQ ID NO: 556736 - DNA, 75 bp, synthetic construct
  source 1..75: mol_type = other DNA
gtttaatgacctttgctcggtgttcgttaaggacgcgacggttgccgggctggacgatggcgacatcgttacggt

SEQ ID NO: 556737 - DNA, 75 bp, synthetic construct
  source 1..75: mol_type = other DNA
attaaaatgtcaggtaactacaataaaaatcatacaggtgcatggagcgcacaatacactttgactgcaacttat

SEQ ID NO: 556738 - DNA, 75 bp, synthetic construct
  source 1..75: mol_type = other DNA
atgatgccgcgcattaaatctctttttgttctttgtgccgtcttactgacggtgacgcctgctgtgtctgcagac

SEQ ID NO: 556739 - DNA, 75 bp, synthetic construct
  source 1..75: mol_type = other DNA
atgctcggagtttccaacagcatgatttaccagctgacggactatatcggttacgacatcctgctgcagtacatt

SEQ ID NO: 556740 - DNA, 75 bp, synthetic construct
  source 1..75: mol_type = other DNA
caggctgccgggtatgcctatggtggctccctgtatgcccgtacccaggtcaaaaatatccagctgatttccatg

SEQ ID NO: 556741 - DNA, 75 bp, synthetic construct
  source 1..75: mol_type = other DNA
gaccacgggggcgcgaacgatgaccgcctggacgcaggatctcatctatgcgggcgatccggttcattatcacgg

SEQ ID NO: 556742 - DNA, 75 bp, synthetic construct
  source 1..75: mol_type = other DNA
ttattctttgtgccgccttactgacggtgacgcctgcagcgtcagcggatgtgaacagcgacatgaatcagttct

SEQ ID NO: 556743 - DNA, 75 bp, synthetic construct
  source 1..75: mol_type = other DNA
tgttttcagatatctggttgacccactgatgctgggcgtatccaacagtgtgctctaccagctgacggactatat

SEQ ID NO: 556744 - DNA, 75 bp, synthetic construct
  source 1..75: mol_type = other DNA
gtcagatgagctacatgcgtcagcagctttccgcccgtatgctcagccgttaccagaacaactatcacttcggag

SEQ ID NO: 556745 - DNA, 75 bp, synthetic construct
  source 1..75: mol_type = other DNA
ggggaagacagcgagattacccccctgccggcgcgtaccactgaccgcgatatcctccgggcgattatggggcac

SEQ ID NO: 556746 - DNA, 75 bp, synthetic construct
  source 1..75: mol_type = other DNA
ccgactgggccgcatctcgtcaggggtgcacggtcggagggcagtcctcatctgttcgtgacaaagccagcgaca

SEQ ID NO: 556747 - DNA, 75 bp, synthetic construct
  source 1..75: mol_type = other DNA
ttctttgtgccgccttactgacggtcacacccgcagcgtcagcggatgtgaacagcgacatgaaccagttcttta

SEQ ID NO: 556748 - DNA, 75 bp, synthetic construct
  source 1..75: mol_type = other DNA
acaggtccagcaggatgcgctgctggttgtcgaacgtcagatgagctacatgcgtcaacagctttccgcccgtat

SEQ ID NO: 556749 - DNA, 75 bp, synthetic construct
  source 1..75: mol_type = other DNA
gtgcacggtcggagggcagtcctcatctgttcgtgacaaagccagcgacaaggacaaggagcgggtgctgaaaaa

SEQ ID NO: 556750 - DNA, 75 bp, synthetic construct
  source 1..75: mol_type = other DNA
ttacgcgatctggacttacgcctttcttttatttcagaagataacaggattcttgattcagaagggatctggcga

SEQ ID NO: 556751 - DNA, 75 bp, synthetic construct
  source 1..75: mol_type = other DNA
agctagtgaggcttaaatatgcgacggacgccctgctgcattgtgcggaacagcttcgcaaaggagttcagtcat

SEQ ID NO: 556752 - DNA, 75 bp, synthetic construct
  source 1..75: mol_type = other DNA
tcgagggaattagccgatgcgagagctgaaaatgaaactctgcgtgctgatgttgccgctggtcgtaagcgcctg

SEQ ID NO: 556753 - DNA, 75 bp, synthetic construct
  source 1..75: mol_type = other DNA
aaaaaggaaaacgttttcatattgcttggtgcagaactcttgatgaaatgcgacaaaagaatcgattcgaaagat

SEQ ID NO: 556754 - DNA, 75 bp, synthetic construct
  source 1..75: mol_type = other DNA
cacgtctgtacgccgcatttatccatgcacaactgtttgtaatgtcatgccggagcaaactgactaagttcctgc

SEQ ID NO: 556755 - DNA, 75 bp, synthetic construct
  source 1..75: mol_type = other DNA
atactgtccattgtggtcggtgcctgtcttgccgtcgtaccggaaatgatgagcagtggacagaaaacgctcggt

SEQ ID NO: 556756 - DNA, 75 bp, synthetic construct
  source 1..75: mol_type = other DNA
ctaccaagtgacctgatgaatccttcatgggcgaattcatcaccagttggtaaaaaacaatctttatgggaaaag

SEQ ID NO: 556757 - DNA, 75 bp, synthetic construct
  source 1..75: mol_type = other DNA
aactggaaagatatatctaaattaatgcgagaaaaggctaattatatttgtaatgactgtggtgtaaatttatca

SEQ ID NO: 556758 - DNA, 75 bp, synthetic construct
  source 1..75: mol_type = other DNA
actgggcgaagggagattttattgcgaagcgcgcgccaattggtcagtgggaaccttattcggaagagtcactac

SEQ ID NO: 556759 - DNA, 75 bp, synthetic construct
  source 1..75: mol_type = other DNA
atatcgatcctggctcaatcccaatggctaatttctttggggatgatggggctgcatttacccttgatagcgatt

SEQ ID NO: 556760 - DNA, 75 bp, synthetic construct
  source 1..75: mol_type = other DNA
aatcattctcattaaatgagtttttttcagattatagtacctgttttcgtcatatgcctaagggtatctatgaca

SEQ ID NO: 556761 - DNA, 75 bp, synthetic construct
  source 1..75: mol_type = other DNA
cccctccacgaaggtatattcgttacccaagcagagatggctatcattcaacgtttacgttcccaacaagggtta

SEQ ID NO: 556762 - DNA, 75 bp, synthetic construct
  source 1..75: mol_type = other DNA
atgattgtggcgtgaatttatcaaccgccaaaaacttgtgccatgtccatcataaaaatggcatcaaatatgata

SEQ ID NO: 556763 - DNA, 75 bp, synthetic construct
  source 1..75: mol_type = other DNA
tatctcttcctgaaggcactttaggacaatgggttaccgcacggtggctgaactggaatctgaaattctgcaact

SEQ ID NO: 556764 - DNA, 75 bp, synthetic construct
  source 1..75: mol_type = other DNA
tcgaaatgcagatgaaaacacaacgtggcggacgttctggccgtcatccaacaatacgcataacaggagcgcccg

SEQ ID NO: 556765 - DNA, 75 bp, synthetic construct
  source 1..75: mol_type = other DNA
gcaccattggcatttacagcaataaagccgagatcaagcaggcaatggacgcagcaagcgcgcgcatcgcagcag

SEQ ID NO: 556766 - DNA, 75 bp, synthetic construct
  source 1..75: mol_type = other DNA
taccttttcgtttaggactgtacccggtggtggacagcgtacagtggatcgaacgtctgttggatgcaggcgtgc

SEQ ID NO: 556767 - DNA, 75 bp, synthetic construct
  source 1..75: mol_type = other DNA
gtgaggcgttaaaagatgcggtagcacaagccgatgtagtgctcgactgtactgacaatatggcgactcgacagg

SEQ ID NO: 556768 - DNA, 75 bp, synthetic construct
  source 1..75: mol_type = other DNA
gaagctcgccttgagcgagatatattaaaaaaagcagctgtagattcaatctgtcaatgcaacacccctttcaat

SEQ ID NO: 556769 - DNA, 75 bp, synthetic construct
  source 1..75: mol_type = other DNA
tcggcggcaccaccgggccatctatcgccagttctctattaccattgttgcggcgatggtgctgtcagtactggt

SEQ ID NO: 556770 - DNA, 75 bp, synthetic construct
  source 1..75: mol_type = other DNA
gcggtatttgtgccaatgaccttcttcggcggcaccaccgggccatctatcgccagttctctattaccattgttg

SEQ ID NO: 556771 - DNA, 75 bp, synthetic construct
  source 1..75: mol_type = other DNA
aaaatggccgcgtttggacaatccattggtggaatttttccatctgatgaaattgtcaaaggttccatcagtggc

SEQ ID NO: 556772 - DNA, 75 bp, synthetic construct
  source 1..75: mol_type = other DNA
cagactctgggcctgactcaaggtaccgttgtgactatctccgcagaaggcgaagacgagcagaaagcggttgaa

SEQ ID NO: 556773 - DNA, 75 bp, synthetic construct
  source 1..75: mol_type = other DNA
gggcatcgcgacgattacgcgtggatctaatagtctgaaagccgcgcccgtcgagctgcgccagtggctggaaga

SEQ ID NO: 556774 - DNA, 75 bp, synthetic construct
  source 1..75: mol_type = other DNA
aggatcgcgcggcgattctgtttaagattgccgatcgaatggaacaaaaccttgagctgttagcgacggctgaaa

SEQ ID NO: 556775 - DNA, 75 bp, synthetic construct
  source 1..75: mol_type = other DNA
tctagccagtggcgcagcctggcgctgcgccgcgctacaggttgcccggtatgcggaggaagcaatgcagatcct

SEQ ID NO: 556776 - DNA, 75 bp, synthetic construct
  source 1..75: mol_type = other DNA
cctgccgcgcctgtcgtagccccagcacctaaatctgcaccggcaacaccagccgctcctgcccaacctgggctg

SEQ ID NO: 556777 - DNA, 75 bp, synthetic construct
  source 1..75: mol_type = other DNA
tgtacgtccgcaagatgtacaggttgaagagcagcgcgaacaggaagaagtacatgtgcagccgatggtgactga

SEQ ID NO: 556778 - DNA, 75 bp, synthetic construct
  source 1..75: mol_type = other DNA
caacgctgataaagccgcatttgctgaaagaatatttaacgaaggcggcgcgggtgtaaaaaatcatgctatcgt

SEQ ID NO: 556779 - DNA, 75 bp, synthetic construct
  source 1..75: mol_type = other DNA
gaatccgtaaaactggacggtgaaagcaacgccggattcatagtaaccgccatgcgcggtgagatcgcccgccgc

SEQ ID NO: 556780 - DNA, 75 bp, synthetic construct
  source 1..75: mol_type = other DNA
atgaatttcgtcctgatctaccggagcttttcccacacccaagcttagcgcacacagaagatggagtgtgcgaag

SEQ ID NO: 556781 - DNA, 75 bp, synthetic construct
  source 1..75: mol_type = other DNA
tggtgaaagtcccgctgccagtcgtagcgcaaactgcaccagaacagcaagaagagaacaatgctgataaccgtg

SEQ ID NO: 556782 - DNA, 75 bp, synthetic construct
  source 1..75: mol_type = other DNA
agaaaaacccaacgttactctaaagagttcaaagccgaagctgtcagaacggttcttgaaaatcaactttcgatc

SEQ ID NO: 556783 - DNA, 75 bp, synthetic construct
  source 1..75: mol_type = other DNA
ctaaagagttcaaagccgaagctgtcagaacagttcctgaaaatcaactttcgatcagtgaaggcgcttcccgat

SEQ ID NO: 556784 - DNA, 75 bp, synthetic construct
  source 1..75: mol_type = other DNA
ctacggagtttaaagccgaagccgtcaaaacggttcctgaaaatcagctttcgatcagtgaaggagcttcccgat

SEQ ID NO: 556785 - DNA, 75 bp, synthetic construct
  source 1..75: mol_type = other DNA
atgaaacggttagcaaaaatggtgcttgctgtgattgctgcactagcatttaacgctaacgctaacgaggccata

SEQ ID NO: 556786 - DNA, 75 bp, synthetic construct
  source 1..75: mol_type = other DNA
aaaattttgaaggtaaaccagtttatgctcgttggtttaattatggccttgtaaacgaggctgctgtaggcgtag

SEQ ID NO: 556787 - DNA, 75 bp, synthetic construct
  source 1..75: mol_type = other DNA
gtcaggtatttggtgtatccaggagcggttattacaactgggtacagcatgaaccctcagacagaaaacaaagtg

SEQ ID NO: 556788 - DNA, 75 bp, synthetic construct
  source 1..75: mol_type = other DNA
actggttacgtgacgcccacgcaatggaaaagcaagccgaatctatgcttgaatccatggccagccgtatagata

SEQ ID NO: 556789 - DNA, 75 bp, synthetic construct
  source 1..75: mol_type = other DNA
ctaccaccccggcgatacggtgacgtgggggggctcgctgtggcactgcaacagtatgaccgaagataaacccgg

SEQ ID NO: 556790 - DNA, 75 bp, synthetic construct
  source 1..75: mol_type = other DNA
acgatcaaaaatcctttccccggggcacgtatgccacacaccagggaggactctggcgggcgtatgaaaaaacgc

SEQ ID NO: 556791 - DNA, 75 bp, synthetic construct
  source 1..75: mol_type = other DNA
cccgccattgacgatcaaaaatcctttccccggggcacgtatgccacacaccagggcggactctggcgggcgtat

SEQ ID NO: 556792 - DNA, 75 bp, synthetic construct
  source 1..75: mol_type = other DNA
ttctggaagttcacggtgagcgcatgattaaacgcacctttaatccaggtttcaaaattgcgctgcaccagaaag

SEQ ID NO: 556793 - DNA, 75 bp, synthetic construct
  source 1..75: mol_type = other DNA
gtgcgtccgatgcttgaacagatggtgaaggaggcggtaagccatattcctgttccgcgtgatggtcgtgactac

SEQ ID NO: 556794 - DNA, 75 bp, synthetic construct
  source 1..75: mol_type = other DNA
atgaccggtgataaacccggagaagctcattcatcaggctggaccctggctgcaaaacgagggcgggatgcagga

SEQ ID NO: 556795 - DNA, 75 bp, synthetic construct
  source 1..75: mol_type = other DNA
gtgatggtcgtgactacgatccggaagtactgcagaaggcggtgaatgatgcggttgcgaatattccggtaccgg

SEQ ID NO: 556796 - DNA, 75 bp, synthetic construct
  source 1..75: mol_type = other DNA
ggattctggcgggcgtatgaaaaaacgcacgggatgcggggatgggaatgcctggttgacggggtggcggatatt

SEQ ID NO: 556797 - DNA, 75 bp, synthetic construct
  source 1..75: mol_type = other DNA
aacagtatgaccggtgataaacccggagaagctcattcatcaggctggaccctggctgccaaacgtggacgggat

SEQ ID NO: 556798 - DNA, 75 bp, synthetic construct
  source 1..75: mol_type = other DNA
ggactctggcgggcgtatgaaaaaacgcacgggatgcggggatgggaatgcctggttgacggggtggcggatatc

SEQ ID NO: 556799 - DNA, 75 bp, synthetic construct
  source 1..75: mol_type = other DNA
caggcggttctggaggcggtgaatgcccttccggctccgcaggacgggcgtgatgccacggcactggaagtgctc

SEQ ID NO: 556800 - DNA, 75 bp, synthetic construct
  source 1..75: mol_type = other DNA
gtggtccggcagagcagtggccagcgtacggaaaaaacattttccctgccggtgatgctctaccgcggtgtgttc

SEQ ID NO: 556801 - DNA, 75 bp, synthetic construct
  source 1..75: mol_type = other DNA
tctgtggtgctttcggtttttgcctcactgtgcctgttgaaaaagaacctggttgatcggtctaaatttaccggg

SEQ ID NO: 556802 - DNA, 75 bp, synthetic construct
  source 1..75: mol_type = other DNA
ggcttccgtaggtgcgcagaaatttccggtgcactggggcggtgattgctacgccaattacgaatcaatggcgga

SEQ ID NO: 556803 - DNA, 75 bp, synthetic construct
  source 1..75: mol_type = other DNA
gctggattatctggaagcactggagctggtggatacctccagtgcgccagatattgaatggcctacgcctccggc

SEQ ID NO: 556804 - DNA, 75 bp, synthetic construct
  source 1..75: mol_type = other DNA
gctggattatctggaagcactggacctggtggatacgtccagtgcgccagatattgaatggcctacgcctccggc

SEQ ID NO: 556805 - DNA, 75 bp, synthetic construct
  source 1..75: mol_type = other DNA
ggtcagacggtggaaacctggaaccgtgatggcggaaccagcaccgaacaggcgtacaaaaacatcccgttctat

SEQ ID NO: 556806 - DNA, 75 bp, synthetic construct
  source 1..75: mol_type = other DNA
gtcaaaaatcccccgtctttaaagagttacaagagaaaggctatttactcaaacgcccggacggttcgctatggc

SEQ ID NO: 556807 - DNA, 75 bp, synthetic construct
  source 1..75: mol_type = other DNA
aaagtaaatggtctgcaaggcggttcgcaggctgaaagtgagcaggggctggtggtgacgcctcaagggaatgcg

SEQ ID NO: 556808 - DNA, 75 bp, synthetic construct
  source 1..75: mol_type = other DNA
aaacagtaagcagtggcctggcaaatcggtgcttggacgcctgaaagatgatgaattaacgcagtacaatttatg

SEQ ID NO: 556809 - DNA, 75 bp, synthetic construct
  source 1..75: mol_type = other DNA
atctcaaaaaaagaaacaagcacgtcttttggctattacaacaacatcgtctatggggcgctcatcggtatataa

SEQ ID NO: 556810 - DNA, 75 bp, synthetic construct
  source 1..75: mol_type = other DNA
ctttggaaagcaagagatctatttgattttattagtaatgactcgctaaactttcccccgtttgacgagatagcg

SEQ ID NO: 556811 - DNA, 75 bp, synthetic construct
  source 1..75: mol_type = other DNA
gctggattatctggaagcactggacctggtggatacctccagtgcgccagatattgaatggcctacccctccggc

SEQ ID NO: 556812 - DNA, 75 bp, synthetic construct
  source 1..75: mol_type = other DNA
gctggattatctggaagcactggacctggtggatacatccagtgcgccagatattgaatggcctacacctccggc

SEQ ID NO: 556813 - DNA, 75 bp, synthetic construct
  source 1..75: mol_type = other DNA
gctggattatctggaagcactggaactggtggatacctccagtgcgccagatattgaatggcctacacctccggc

SEQ ID NO: 556814 - DNA, 75 bp, synthetic construct
  source 1..75: mol_type = other DNA
gacaatgctctggcagagactgacaggtgtactgcccacccctgcggtgagtgcccccgctcccgttgtgaacgt

SEQ ID NO: 556815 - DNA, 75 bp, synthetic construct
  source 1..75: mol_type = other DNA
aaaattatgattgcacagaaaccgacgaaaaaaaaacacgccaaaattggcgtgtcttatttaacatttacttaa

SEQ ID NO: 556816 - DNA, 75 bp, synthetic construct
  source 1..75: mol_type = other DNA
cgcaggggctgggcgtctcggtactccgcacgcgaacattcactctgcttgcgatcgcgttgctctgtggcgcag

SEQ ID NO: 556817 - DNA, 75 bp, synthetic construct
  source 1..75: mol_type = other DNA
ggcgatatcggccagggctttatccatatccaccatctcatcccgctggccgggataaagcaggactaccgcctg

SEQ ID NO: 556818 - DNA, 75 bp, synthetic construct
  source 1..75: mol_type = other DNA
ttgctatcgtaaccttatcgcaaactatatcaatagggcctggcgttgcattggttataaacaatgccttttcac

SEQ ID NO: 556819 - DNA, 75 bp, synthetic construct
  source 1..75: mol_type = other DNA
aatggcagtaataccgcgattacgctcaagtttaagcaggagccgggtgtcgggtatgaaacactgacagtcagc

SEQ ID NO: 556820 - DNA, 75 bp, synthetic construct
  source 1..75: mol_type = other DNA
ccattatgaacatcacacgaagtgatggtaaaaatattccatttgctgcagatatttatgatgagcaaggcaatg

SEQ ID NO: 556821 - DNA, 75 bp, synthetic construct
  source 1..75: mol_type = other DNA
gcaacggtctcggtatggctttagatcctgctcacttctccttagacagagcgttggaagaaatttggcatcgcc

SEQ ID NO: 556822 - DNA, 75 bp, synthetic construct
  source 1..75: mol_type = other DNA
tgaacacaccacacgtcacaattgaacgttatagcgaactcacaggccttccggttgatacgatcaatgacatgt

SEQ ID NO: 556823 - DNA, 75 bp, synthetic construct
  source 1..75: mol_type = other DNA
aacccaacgccgccgaagccaccattattctgcgcggtctgtcggcggtctatgaacagtctcacggcgtgctga

SEQ ID NO: 556824 - DNA, 75 bp, synthetic construct
  source 1..75: mol_type = other DNA
cggaatttaccccggcggatttcagcggggggattaaatcaaaatgcgtgcgtctgttactggagcaaggattta

SEQ ID NO: 556825 - DNA, 75 bp, synthetic construct
  source 1..75: mol_type = other DNA
ccatttatgggatgcgggagaaactcatcagttccagcctgcgcggttgtatgagattgaatatcatggccgacg

SEQ ID NO: 556826 - DNA, 75 bp, synthetic construct
  source 1..75: mol_type = other DNA
ccgaaagatacggttgagattcagggggaggtcgataaagactggaactctgttgagatcgacgttaaacagatt

SEQ ID NO: 556827 - DNA, 75 bp, synthetic construct
  source 1..75: mol_type = other DNA
atggagattatattccacaaatgcgaatttgtcggagaaatggctgttgtgcaacaggcacaacgtaatctctgt

SEQ ID NO: 556828 - DNA, 75 bp, synthetic construct
  source 1..75: mol_type = other DNA
gtccggccagaaccagaaggacacgttgttttattccccgaagggcatgcagaattctacgtaccgtcggcggaa

SEQ ID NO: 556829 - DNA, 75 bp, synthetic construct
  source 1..75: mol_type = other DNA
aaaagaacgctgggcgcgaaacgaagtcgctgagctatgccagcagtttaatttgatgctaagcggcgcgattga

SEQ ID NO: 556830 - DNA, 75 bp, synthetic construct
  source 1..75: mol_type = other DNA
ttatggaataatgcacatactgcaactctagaagactttaaaattaaagatactgacttatttcatccggatgca

SEQ ID NO: 556831 - DNA, 75 bp, synthetic construct
  source 1..75: mol_type = other DNA
tgctgtgggtaaggttatcgttagtgttgcctgttcggatgggacaatagcgcctgccgaaatcaaacagcttga

SEQ ID NO: 556832 - DNA, 75 bp, synthetic construct
  source 1..75: mol_type = other DNA
catagccaactttatcgcaggttgctggagaaagaacaatggtccagaaaagaggcgacagagttgtgtagtaac

SEQ ID NO: 556833 - DNA, 75 bp, synthetic construct
  source 1..75: mol_type = other DNA
attcttcgtccgaacgaaaatcttgcagcagctctcagcgatgattcagagttcagcaatagcatgcagttcagg

SEQ ID NO: 556834 - DNA, 75 bp, synthetic construct
  source 1..75: mol_type = other DNA
ggttatacccttgccgacatcagaagcacactgaaggaagccggttatgaggtgggagaaaagacactgagggat

SEQ ID NO: 556835 - DNA, 75 bp, synthetic construct
  source 1..75: mol_type = other DNA
gcgcgtggctacgatatgaaagtcattgccgtggatgaccagtttgttaacgccaaaggtaagccaatggatacc

SEQ ID NO: 556836 - DNA, 75 bp, synthetic construct
  source 1..75: mol_type = other DNA
gcggaagatattggaaaatattttggcgtggaatcaccagaatataaagctgcgcaggtgtttttctcacaatca

SEQ ID NO: 556837 - DNA, 75 bp, synthetic construct
  source 1..75: mol_type = other DNA
aatagataagctctacgcattaaatgatcacggaattgataatgacaaagtaggtaacaatgaaattaatgacat

SEQ ID NO: 556838 - DNA, 75 bp, synthetic construct
  source 1..75: mol_type = other DNA
aagctctacgaattaaatgatcacggaattgataatgacaaagaaggtaacaatgaaattaatgacatcatgatt

SEQ ID NO: 556839 - DNA, 75 bp, synthetic construct
  source 1..75: mol_type = other DNA
acaccggtcatcgattcgattctggagatttttttaaaattcccatatattaatgatgtaagaatactggattga

SEQ ID NO: 556840 - DNA, 75 bp, synthetic construct
  source 1..75: mol_type = other DNA
cagcgaacagccggaagagaccgctgaaacagtttccccggtacaacgtctggcacatctcactgccgaactgga

SEQ ID NO: 556841 - DNA, 75 bp, synthetic construct
  source 1..75: mol_type = other DNA
ggttcatctgcaggcagtgttcagaccacagtgaatttcagcctgaatccatttacgctgaatgacacagtaaca

SEQ ID NO: 556842 - DNA, 75 bp, synthetic construct
  source 1..75: mol_type = other DNA
gtgcaaaaaattaattggacaccggaagaggatgcaatcttgggaaccgactcgctggcaaaagtatccgttcgg

SEQ ID NO: 556843 - DNA, 75 bp, synthetic construct
  source 1..75: mol_type = other DNA
tcgctttccttctgattgccggatggggaacatccatgcgtctgtcatggtcgcttggccgggagaacgccagaa

SEQ ID NO: 556844 - DNA, 75 bp, synthetic construct
  source 1..75: mol_type = other DNA
gcaaatacaacctaggggccgatttttctctgcctgccgaggccaaagataaaaaagttatcctggtgccgggtc

SEQ ID NO: 556845 - DNA, 75 bp, synthetic construct
  source 1..75: mol_type = other DNA
aggtagaagacgatgcctcaattaaaacaggcactgtctcgattaagagcaaccttgagttattacgcacagtac

SEQ ID NO: 556846 - DNA, 75 bp, synthetic construct
  source 1..75: mol_type = other DNA
cgcgatgagtggaaactcatgggagaatgtcttttccggatggtgcgtgggaaattatgtatcaacgcagggact

SEQ ID NO: 556847 - DNA, 75 bp, synthetic construct
  source 1..75: mol_type = other DNA
cggggccggttggcgcgacagtggggcaaatcggcaaactaaaaggttgccgcgtggtgggtgttgccggtggcg

SEQ ID NO: 556848 - DNA, 75 bp, synthetic construct
  source 1..75: mol_type = other DNA
actgcgcacagtttatttgtccctggacccgtatatgcgtggacgtatgagcgatgagccatcttattcaccgcc

SEQ ID NO: 556849 - DNA, 75 bp, synthetic construct
  source 1..75: mol_type = other DNA
tctgtattttgtgtcgttttccattcccgaagaggggctgaaacgaatgctgggcgaaacccggcactacggtat

SEQ ID NO: 556850 - DNA, 75 bp, synthetic construct
  source 1..75: mol_type = other DNA
ccacagacgtttatcggcctgctgaagggtaaaaacttcggcaaagtggtgatccgcgtggcgggtgatgattaa

SEQ ID NO: 556851 - DNA, 75 bp, synthetic construct
  source 1..75: mol_type = other DNA
atggggcaacaaaagcagcgtaaccgccgttgggttctggcctcgcgtccgcatggcgcgccggttccggagaat

SEQ ID NO: 556852 - DNA, 75 bp, synthetic construct
  source 1..75: mol_type = other DNA
atcggtctgctgaatggtaaaaacttcggcaaagtcgtgatccgtgttgcggatgatgatgaacatttcaggtgg

SEQ ID NO: 556853 - DNA, 75 bp, synthetic construct
  source 1..75: mol_type = other DNA
gtcgctgtactgcggcaagcgcctgcgtggtatggggtgtaaagggagaacagcaatggcgagccgaagcgcagc

SEQ ID NO: 556854 - DNA, 75 bp, synthetic construct
  source 1..75: mol_type = other DNA
tgggtaaaaccgaaaccgtcctgcaactggcagaactgctctacggcggtcgccagtacctgaccaccatcaata

SEQ ID NO: 556855 - DNA, 75 bp, synthetic construct
  source 1..75: mol_type = other DNA
cagttggtgaaggtcagtgaacccagtgctgccgaagccaccattattctgcgcggcctctcttcggtctatgaa

SEQ ID NO: 556856 - DNA, 75 bp, synthetic construct
  source 1..75: mol_type = other DNA
aaaagcgcacccggatgtgctcaacctgttctaccaggcgtttgacaagggcgagatggcagacggcgaaggccg

SEQ ID NO: 556857 - DNA, 75 bp, synthetic construct
  source 1..75: mol_type = other DNA
ccgaagcgattcgccagaaaccctactcggtagtactgctcgatgaagtggaaaaagcgcacccggatgtgctca

SEQ ID NO: 556858 - DNA, 75 bp, synthetic construct
  source 1..75: mol_type = other DNA
ggccgtcagtgttgtggtggatacaggggacaccctgcttgcccgctacgccaaaaacatgaccgaagatgcccg

SEQ ID NO: 556859 - DNA, 75 bp, synthetic construct
  source 1..75: mol_type = other DNA
tattctgcgtggtctgtcggcggtctatgaacggtctcacggcgtgctgattgacgatgatgccttgcaggccgc

SEQ ID NO: 556860 - DNA, 75 bp, synthetic construct
  source 1..75: mol_type = other DNA
tccgtggctcggaacgcttggtgttgcaggaaccggaatgacacccgcactgattgcgctggtgctttacgcctt

SEQ ID NO: 556861 - DNA, 75 bp, synthetic construct
  source 1..75: mol_type = other DNA
gcagtggcttctggctggctgcggcgctggcattgctggcctgtagcgatgcaatccgccggatcaccactcatc

SEQ ID NO: 556862 - DNA, 75 bp, synthetic construct
  source 1..75: mol_type = other DNA
ctggaagtggaagattacgttattgatatcaccggagatcaatataacatcatcaacgcccgtaaactaaacgaa

SEQ ID NO: 556863 - DNA, 75 bp, synthetic construct
  source 1..75: mol_type = other DNA
gaaaaacgcttcaaggggctgatggcggaggtcatttcctctccggtgccggtcattctgtttatcgacgaagcg

SEQ ID NO: 556864 - DNA, 75 bp, synthetic construct
  source 1..75: mol_type = other DNA
tcccggtaattgttctggcggtgctgatcgatgcgctgttcgatttacttatcgcactgttgaaggtgaaacgta

SEQ ID NO: 556865 - DNA, 75 bp, synthetic construct
  source 1..75: mol_type = other DNA
tttccaggggctgctaagcagtgccattgatttagtgttgctgggggtgatcccggtaattgttctggcggtgct

SEQ ID NO: 556866 - DNA, 75 bp, synthetic construct
  source 1..75: mol_type = other DNA
gatttatcatcgacgaagttcacaccgtggacgactgggagttccgcgccgctttccccgcgatgaagcacaccc

SEQ ID NO: 556867 - DNA, 75 bp, synthetic construct
  source 1..75: mol_type = other DNA
aacttgaaaataaagggctttggcgcagagctgcggctcgctggcaagatgtgctgatggattatcgtcaggaga

SEQ ID NO: 556868 - DNA, 75 bp, synthetic construct
  source 1..75: mol_type = other DNA
ctggtggccggcggtgtgcgtattgaagactctttaccatccctgtttgtgaaaacagcagatattttacggctg

SEQ ID NO: 556869 - DNA, 75 bp, synthetic construct
  source 1..75: mol_type = other DNA
ccgcccagcaggtggcaaggcttgaatccgccatgtgcctgcgccgccgctggtcaccagaaaacttccagctct

SEQ ID NO: 556870 - DNA, 75 bp, synthetic construct
  source 1..75: mol_type = other DNA
ctgcacggtgttcaaccgaagaagcaaaaacagcgctctgacacggggttgcggcaagtcatccagcccggtgac

SEQ ID NO: 556871 - DNA, 75 bp, synthetic construct
  source 1..75: mol_type = other DNA
ccgggctgctgttggtctggtcgatgccctcccggtggatgaaaaaacgctggttatggtggacagtatcaagat

SEQ ID NO: 556872 - DNA, 75 bp, synthetic construct
  source 1..75: mol_type = other DNA
aaaaagtcacgtaagcaaggctttaagtggcgaaaaaatgaaaaaagaaaatcgtgatgccgatttgcgctggat

SEQ ID NO: 556873 - DNA, 75 bp, synthetic construct
  source 1..75: mol_type = other DNA
cctggtggtttcacaattgaagaagcaaaagaattacacgaaaatctggtaaaaagtcacgtaagcaaggcttta

SEQ ID NO: 556874 - DNA, 75 bp, synthetic construct
  source 1..75: mol_type = other DNA
taacccacactacaacagcaccacgctgccgacgacgccgctgaacgactggctgatctggcacgaagtagggca

SEQ ID NO: 556875 - DNA, 75 bp, synthetic construct
  source 1..75: mol_type = other DNA
gaatggtcatccagactactatctggaactatttccggctttatcgatgcacctggcaatatgagtgaaacgact

SEQ ID NO: 556876 - DNA, 75 bp, synthetic construct
  source 1..75: mol_type = other DNA
ggcgtcgtgggatgaactggacgcaggagcgagccgccgaagagtttgggatatcgttggctacatataagcgat

SEQ ID NO: 556877 - DNA, 75 bp, synthetic construct
  source 1..75: mol_type = other DNA
tgattaaagaaatcagagagcgaatcggcagcctggacgtgcgagacaatattgagcgccgggcttatgaaattg

SEQ ID NO: 556878 - DNA, 75 bp, synthetic construct
  source 1..75: mol_type = other DNA
atgctacttatacgtgtgtctggcaaaactaaacgctgccatgaacgaatgactaaggcttgcactgcgttccca

SEQ ID NO: 556879 - DNA, 75 bp, synthetic construct
  source 1..75: mol_type = other DNA
ccgaacatgcgctgctggcaaatcagtttattgatggcgaaataatactggctggcagtgaaatgctgcgccccg

SEQ ID NO: 556880 - DNA, 75 bp, synthetic construct
  source 1..75: mol_type = other DNA
tcgcttgagaaggatgttaacacttacaagagtatgatagatgagttctcgctttctatccgtactgtaagggag

SEQ ID NO: 556881 - DNA, 75 bp, synthetic construct
  source 1..75: mol_type = other DNA
gccggggataacacggcctggctgaaacgcctggtgccgggacaacagctgcagtgtgtctccgccacagcagtc

SEQ ID NO: 556882 - DNA, 75 bp, synthetic construct
  source 1..75: mol_type = other DNA
atcaaaatagaaacgatcgaagtagatacagctgacgaggcagaaaccacagtcgtatttgaccaaagtatggtt

SEQ ID NO: 556883 - DNA, 75 bp, synthetic construct
  source 1..75: mol_type = other DNA
gtcaaaagatttttatcatctgaaagatgctatattttcaaataacagtgactttattgatgatgtgtctataaa

SEQ ID NO: 556884 - DNA, 75 bp, synthetic construct
  source 1..75: mol_type = other DNA
ttccatcagctaaaattaattttgagttgtcaacgttaaaactgaatatagagatccctcaggctcaactgaata

SEQ ID NO: 556885 - DNA, 75 bp, synthetic construct
  source 1..75: mol_type = other DNA
aacaaactcaaaaccctacgacaagacgcccgcacctggctgctgaaatacccggaacacgccattaccggccta

SEQ ID NO: 556886 - DNA, 75 bp, synthetic construct
  source 1..75: mol_type = other DNA
cacaatattttgcggctatcgaattagcgccactgatcgcccgcgccttcaacaaactcaaaaccctacgacaag

SEQ ID NO: 556887 - DNA, 75 bp, synthetic construct
  source 1..75: mol_type = other DNA
tcctcacgttctggaaatatcaccgacggatgctgccgcctttggtcagctttttgccgactacgaactgctacc

SEQ ID NO: 556888 - DNA, 75 bp, synthetic construct
  source 1..75: mol_type = other DNA
cctgtttccagaaaagacggctacctcctctgcgggaaggatgccatcacctggtgtctcggacatctcctgcag

SEQ ID NO: 556889 - DNA, 75 bp, synthetic construct
  source 1..75: mol_type = other DNA
cttaccgaaaacggtcatcagccattgctgcaagaaatcgcccggcgttataaccagccggaagtaaccgatgcg

SEQ ID NO: 556890 - DNA, 75 bp, synthetic construct
  source 1..75: mol_type = other DNA
cgtaacagttacgccctgacagaaaccgagcgcaatgccagcgaattgatccgctgggctggcagaaaatgcccg

SEQ ID NO: 556891 - DNA, 75 bp, synthetic construct
  source 1..75: mol_type = other DNA
ctttacaccaggcgacaaagtcacctgtgtggcagggaacaacacgacaattgctaccttcgacacccagtcaga

SEQ ID NO: 556892 - DNA, 75 bp, synthetic construct
  source 1..75: mol_type = other DNA
ctaaccccagccttaaaataaatgcaacggacaaagaagccattgtgaatgcgtggaaagcatttaatgctgagg

SEQ ID NO: 556893 - DNA, 75 bp, synthetic construct
  source 1..75: mol_type = other DNA
gcgcccactgaaccaacagcaacgtgataacgcccgccagcgtgttcaatcggcatcacctgaacaacgtcaggt

SEQ ID NO: 556894 - DNA, 75 bp, synthetic construct
  source 1..75: mol_type = other DNA
gccagcattgataacgataagggctaccacactgcaagcgtctatatgcctagcattgatgcgcctgggttaacc

SEQ ID NO: 556895 - DNA, 75 bp, synthetic construct
  source 1..75: mol_type = other DNA
ctggcacacaactgctgtgccaggatgaacacacctcccttctggcggcgctggaatcccacaatgtgacggttg

SEQ ID NO: 556896 - DNA, 75 bp, synthetic construct
  source 1..75: mol_type = other DNA
gcaggtcaggtggactggattgccgaaccgttagcctttattcagccgggggaaattttgccctgttgttgccgg

SEQ ID NO: 556897 - DNA, 75 bp, synthetic construct
  source 1..75: mol_type = other DNA
tatgcaataaaggcaaacaacatcagggagaagagtattgagggttaccagactggtaactgggggccattaatg

SEQ ID NO: 556898 - DNA, 75 bp, synthetic construct
  source 1..75: mol_type = other DNA
tatcagcactcttgcgggattttctgaaatgctcactaaatcgggtgttagtgcagaccagttatgcgggggcga

SEQ ID NO: 556899 - DNA, 75 bp, synthetic construct
  source 1..75: mol_type = other DNA
agctgatggaagattatccgggctgcgaaatgcagatcgtcgagaaggttaacgaaatttactccccaaaacttg

SEQ ID NO: 556900 - DNA, 75 bp, synthetic construct
  source 1..75: mol_type = other DNA
aaagaaaacgtatttatcagctgggtgatgcgattgctgattatcgtaagtctcgcctggacggggtgggccatt

SEQ ID NO: 556901 - DNA, 75 bp, synthetic construct
  source 1..75: mol_type = other DNA
tgatgcgattgctgattgtcgtaagtctcgcctggacggggtgggctgttaccctggtcttttatctactgaccg

SEQ ID NO: 556902 - DNA, 75 bp, synthetic construct
  source 1..75: mol_type = other DNA
caggggatttttccggtactggcagcgttcggcgtttgggtagcctgtttactgacatgggcggtaattccggta

SEQ ID NO: 556903 - DNA, 75 bp, synthetic construct
  source 1..75: mol_type = other DNA
tcttgcctggacggggtgggccattactctggtcttttatctgctaactgttattgccttctggatcacccgtaa

SEQ ID NO: 556904 - DNA, 75 bp, synthetic construct
  source 1..75: mol_type = other DNA
aaccgttagcctttattcagccaggggaaattttgccctgttgttgcagggcaaaaggcgatattgaaattgaga

SEQ ID NO: 556905 - DNA, 75 bp, synthetic construct
  source 1..75: mol_type = other DNA
atattcagggccggatatcttgcgccagtaatgataaaggcgattggtcagaagctggcggcagcaggcgtacag

SEQ ID NO: 556906 - DNA, 75 bp, synthetic construct
  source 1..75: mol_type = other DNA
gtatggcttggtccaaaacagcttgcagaactggattcactgaaaattataccggaggagaaaaaacgcgtacga

SEQ ID NO: 556907 - DNA, 75 bp, synthetic construct
  source 1..75: mol_type = other DNA
cagaactggataagctgcaaattgtgccggaaggcagaaaatccgtgcgcatattcagggccggatatcttgcgc

SEQ ID NO: 556908 - DNA, 75 bp, synthetic construct
  source 1..75: mol_type = other DNA
caccctgacggcgctggccgggcttgctactgcggcagacaagtttccgtattttacggggaatgatgtcgccag

SEQ ID NO: 556909 - DNA, 75 bp, synthetic construct
  source 1..75: mol_type = other DNA
aaacgaacaagaaagcgcctttaaacagtcctgcgctgaccggaacgccaacaacgccaactgcgccaaaaggga

SEQ ID NO: 556910 - DNA, 75 bp, synthetic construct
  source 1..75: mol_type = other DNA
tatattacgcggaaagttaagggggtaacgcagactaacgcaataacaacagacgattgcgacgcgtttttataa

SEQ ID NO: 556911 - DNA, 75 bp, synthetic construct
  source 1..75: mol_type = other DNA
gagcgtggggaaagcctggtgcttaatcttccgacgaagcaaaaggcgcaactttcacagatggcagacagtgag

SEQ ID NO: 556912 - DNA, 75 bp, synthetic construct
  source 1..75: mol_type = other DNA
aaactggcaccgaacgtaaaacagcagtcacgcggcataaaacacaaagaaacagaagtcattatttttgcgggt

SEQ ID NO: 556913 - DNA, 75 bp, synthetic construct
  source 1..75: mol_type = other DNA
gcagcaagagaatatggggctgaatacctgacaagaggttttaaaggacgaatacaaaccaacgttatacaaacg

SEQ ID NO: 556914 - DNA, 75 bp, synthetic construct
  source 1..75: mol_type = other DNA
gcgggaactgtggttctattggcatggggaatggcacctggtttaccctcctcgatattccgggggtggaaaacc

SEQ ID NO: 556915 - DNA, 75 bp, synthetic construct
  source 1..75: mol_type = other DNA
ggctttactactggaacagcgtgacggtgatgaagcactggcaataaagcaacagacggatccggttattgagtt

SEQ ID NO: 556916 - DNA, 75 bp, synthetic construct
  source 1..75: mol_type = other DNA
gcgcgaatatctggccagtgagcgccagaatctttctgatgggctggttattgagcttcctgtaaagcaaaaggc

SEQ ID NO: 556917 - DNA, 75 bp, synthetic construct
  source 1..75: mol_type = other DNA
tttatcttcgttgccaacatcgaatcgaaagatccgcagcaaattatttctggtaacgaaaaggttgttcgtcca

SEQ ID NO: 556918 - DNA, 75 bp, synthetic construct
  source 1..75: mol_type = other DNA
cgtctggcggatgccgagttcttcttcaacaccgaccggaaaaaacgtcttgaagataacctgccgcgcctgcaa

SEQ ID NO: 556919 - DNA, 75 bp, synthetic construct
  source 1..75: mol_type = other DNA
gactttatgctcggtcgtttccgtgcctggtatcaggatgaaggttacactgttgataccattcaggccgttctg

SEQ ID NO: 556920 - DNA, 75 bp, synthetic construct
  source 1..75: mol_type = other DNA
attaaagccgatgccgaagaagcagcgcgtaagattggcggtaacgctgacttaagcgaaagcctgttggaagaa

SEQ ID NO: 556921 - DNA, 75 bp, synthetic construct
  source 1..75: mol_type = other DNA
cggaagaaattaagctggcgatgcaggtggttgtactgcgcgacaagctagagccatacttcgctgaaggtcgtt

SEQ ID NO: 556922 - DNA, 75 bp, synthetic construct
  source 1..75: mol_type = other DNA
aaattggcactgaagagctgccaccaaaagcactgcgcagcctggcagagtcctttgctgcgaactttactgcgg

SEQ ID NO: 556923 - DNA, 75 bp, synthetic construct
  source 1..75: mol_type = other DNA
cggtcgcgttttgcattattttcttcctttttgttgttgtgttttgtggcgcatttgctgcgcttgttagcttta

SEQ ID NO: 556924 - DNA, 75 bp, synthetic construct
  source 1..75: mol_type = other DNA
atctgttccgcaccttaatctcgggtgtcatcattatgagcatcaccctgtggatcgcgacgcaaactattggtt

SEQ ID NO: 556925 - DNA, 75 bp, synthetic construct
  source 1..75: mol_type = other DNA
ttcactgattgaaaaaattcgcattatctcagatgcaatagaagtttacctgaacaataaaggccaaccgttaat

SEQ ID NO: 556926 - DNA, 75 bp, synthetic construct
  source 1..75: mol_type = other DNA
tctgccctctaacccggtagcttgcgcgctggcgattgcggacaaaatggacactctggcgggtatcttcggtat

SEQ ID NO: 556927 - DNA, 75 bp, synthetic construct
  source 1..75: mol_type = other DNA
agggcgttatggggatgcactacgcgcgtcacgatggcgaagcggaagatgttgcagtggcgctgaacgagcagt

SEQ ID NO: 556928 - DNA, 75 bp, synthetic construct
  source 1..75: mol_type = other DNA
gctacgaaggagagtgtggagaaaattatatccgtagcatgaatgaaaaagggcagatttttgtttcactttcag

SEQ ID NO: 556929 - DNA, 75 bp, synthetic construct
  source 1..75: mol_type = other DNA
tttatcttcgttgccaacattgagtcgaaagatccgcagcagatcatttccggtaacgagaaagtcgttcgtccg

SEQ ID NO: 556930 - DNA, 75 bp, synthetic construct
  source 1..75: mol_type = other DNA
ttgagggagaaaatggacggggtggcgctcattctgatgccagattcgtttcctgacaaaaagtacgtcatgtga

SEQ ID NO: 556931 - DNA, 75 bp, synthetic construct
  source 1..75: mol_type = other DNA
gcaaatattaaaggtgaaaccgagggaactggtgatcagagtaaatgtgttggtgctcagttgtgcaccaaaccc

SEQ ID NO: 556932 - DNA, 75 bp, synthetic construct
  source 1..75: mol_type = other DNA
ttctctggcgttgttcatgattctgataatgtcttgcatgacacgaatccacattataatatattatttcctgat

SEQ ID NO: 556933 - DNA, 75 bp, synthetic construct
  source 1..75: mol_type = other DNA
cccggacggtgaacgctgggagtataaatacgacccgttcggcaggcgcatcagcaaacgctgcaccagccacaa

SEQ ID NO: 556934 - DNA, 75 bp, synthetic construct
  source 1..75: mol_type = other DNA
caatcaacggcaggcgtacggaatatcagtacgaccccgaccaggatacggtttcacaacgcaccaccgcaggca

SEQ ID NO: 556935 - DNA, 75 bp, synthetic construct
  source 1..75: mol_type = other DNA
tcccgcaaccggacacggtattcagcggtgaatccctgctgccaccaccagtgctctcaacacccggacgctgtc

SEQ ID NO: 556936 - DNA, 75 bp, synthetic construct
  source 1..75: mol_type = other DNA
ccgcgatcaaacgtctttccgatatgggcttcaaagtcaccgtcaccggaggcctggcgctggaagatctgccgc

SEQ ID NO: 556937 - DNA, 75 bp, synthetic construct
  source 1..75: mol_type = other DNA
gccgatcccgaaactgatgcgttggggtgcaagcgacgtgcacttcgtgcgtccggtgcacaccgtgaccctgct

SEQ ID NO: 556938 - DNA, 75 bp, synthetic construct
  source 1..75: mol_type = other DNA
aacgccgatcagtatccggaaattctgcgtgagcgcgggaaagtcatcgccgattatgaagaacgtaaggcgaag

SEQ ID NO: 556939 - DNA, 75 bp, synthetic construct
  source 1..75: mol_type = other DNA
ttcggtcggcgcatcagcaaacgctgtaccaaccgcgacaagccaggcatggaattccactggaacggtgaccag

SEQ ID NO: 556940 - DNA, 75 bp, synthetic construct
  source 1..75: mol_type = other DNA
tacagaagttggtggataaaggtggctatcgcccactggaatggcgttataaatgggatgcgcgaagccagttga

SEQ ID NO: 556941 - DNA, 75 bp, synthetic construct
  source 1..75: mol_type = other DNA
tcccctattcagtgatcgctaacctgggcgatgcagtacaaattgtgccgtcagtgaaagtcaacggatgcccgg

SEQ ID NO: 556942 - DNA, 75 bp, synthetic construct
  source 1..75: mol_type = other DNA
cgcatatcgaacaggggaaaccgcgatttgattcggtcatctgtggtaacgatcgtattgcatttatggtgtatc

SEQ ID NO: 556943 - DNA, 75 bp, synthetic construct
  source 1..75: mol_type = other DNA
ataaaacggattcggcagcactgttgccctgtatcgaacaggcctgggagggtatccgtaccctgcgccaactgc

SEQ ID NO: 556944 - DNA, 75 bp, synthetic construct
  source 1..75: mol_type = other DNA
ggaattatcttcgacaacgatgaggataaaacaggttcggcagcactgttgccctgtatcgaacaggccagggag

SEQ ID NO: 556945 - DNA, 75 bp, synthetic construct
  source 1..75: mol_type = other DNA
atagaacggattcagcagcactgttgccctgcatcgaacaggcccggaaggatgtccgtgctcttcgtcatctgc

SEQ ID NO: 556946 - DNA, 75 bp, synthetic construct
  source 1..75: mol_type = other DNA
accgcactggatattctgattgcgtggctgcaggacaatatcgactgcgaatcgggaattagactggccccctga

SEQ ID NO: 556947 - DNA, 75 bp, synthetic construct
  source 1..75: mol_type = other DNA
aaacagcgctggatattctgattgcgtggctgcaggacaatatcgactgcgaatcgggaattatctttgacaaca

SEQ ID NO: 556948 - DNA, 75 bp, synthetic construct
  source 1..75: mol_type = other DNA
gactgcgaatcgggaattatctttgacaacgatgaggataaaacggattcggcagcactgctgccctgcattgaa

SEQ ID NO: 556949 - DNA, 75 bp, synthetic construct
  source 1..75: mol_type = other DNA
aaaccacatttcgcggtactaatgcctatggtggtgtcgtgaagcaaacaattgcagcgcgtgttaatgtgaaaa

SEQ ID NO: 556950 - DNA, 75 bp, synthetic construct
  source 1..75: mol_type = other DNA
cgggcgaacacggccattgcgttattcggcacccccgttgaagacctttccgttgaccagatcccgcagttcctg

SEQ ID NO: 556951 - DNA, 75 bp, synthetic construct
  source 1..75: mol_type = other DNA
ggtcgggctgattgttgccgccctggtgggcggcgcggttctggtgtggaaatactgggatcagatcagcgcgtt

SEQ ID NO: 556952 - DNA, 75 bp, synthetic construct
  source 1..75: mol_type = other DNA
aggataaaacggattcggcagcactgctgccctgcattgaacagggaggatatccataccctgcgccaactgcag

SEQ ID NO: 556953 - DNA, 75 bp, synthetic construct
  source 1..75: mol_type = other DNA
aacatgaaatcattaaccacggaaacagcactggatattctgattgcgtggctgcaggacaatattgactgcgaa

SEQ ID NO: 556954 - DNA, 75 bp, synthetic construct
  source 1..75: mol_type = other DNA
ggatcacaagaagcaaaacatcatcatgcttttatgatcggtcgaatctcgggagtaagcagggctccagaaaac

SEQ ID NO: 556955 - DNA, 75 bp, synthetic construct
  source 1..75: mol_type = other DNA
aagagtggttatttaagcgtaaagacctactcgacgatctggtttttgccgggatatttcgtaaacgtccggcta

SEQ ID NO: 556956 - DNA, 75 bp, synthetic construct
  source 1..75: mol_type = other DNA
tccagacaaacactcgcactttttatttcctgaaaaacggcgtcgtatatcgcagtgacgacggggtaataatga

SEQ ID NO: 556957 - DNA, 75 bp, synthetic construct
  source 1..75: mol_type = other DNA
agcagcaaacacttcaggcggtaaatcgtctgctggaagatattcacaatgtggaacttcaacaccccctcagtt

SEQ ID NO: 556958 - DNA, 75 bp, synthetic construct
  source 1..75: mol_type = other DNA
atgaatgagtttaagcgttttgaagaccggctggccggactgactgaatcgctgtcaccgtcagggcgtcggcga

SEQ ID NO: 556959 - DNA, 75 bp, synthetic construct
  source 1..75: mol_type = other DNA
gctgtcaccgtcagggcgtcggcgagtggcggtagatgtcgcgaagaaactgcgccagcgtcagcagcagagaat

SEQ ID NO: 556960 - DNA, 75 bp, synthetic construct
  source 1..75: mol_type = other DNA
ggtgggcgaaaaagattgcttcatgttgcacgtgagagagcggcaaatgaagtgcaaatgtatttgcccgggatg

SEQ ID NO: 556961 - DNA, 75 bp, synthetic construct
  source 1..75: mol_type = other DNA
gcagcttggcagtactcatcaacaaatgcagatgtttaatcaacgaatggaacaaattgttcacgttagcggtgg

SEQ ID NO: 556962 - DNA, 75 bp, synthetic construct
  source 1..75: mol_type = other DNA
cttcaaacagttttcctgttacctgatgtcgctgcggcgttgcatcgattaaacaaagcagaactactaccaatc

SEQ ID NO: 556963 - DNA, 75 bp, synthetic construct
  source 1..75: mol_type = other DNA
atggacgtttacgaagatctatacctccatacagacataaacactttttattttcttaaaaacggcgtcgtgtat

SEQ ID NO: 556964 - DNA, 75 bp, synthetic construct
  source 1..75: mol_type = other DNA
ttgttctgacgttggcgctattgcctgccctatcgaatgccggacagataacaatggtcaacccacaggaagaac

SEQ ID NO: 556965 - DNA, 75 bp, synthetic construct
  source 1..75: mol_type = other DNA
ccgttatgccgcatggattaagccggaatttgagattgaagtatatgaggtgttccgaacggtggttcgcctcgg

SEQ ID NO: 556966 - DNA, 75 bp, synthetic construct
  source 1..75: mol_type = other DNA
aaaagcgattcgcccgagcttattggaactggcgattgaacttaagcagacagggttgattaccgagggagagga

SEQ ID NO: 556967 - DNA, 75 bp, synthetic construct
  source 1..75: mol_type = other DNA
gtggcaggcgctgaagtacgcgggctactgcgcgaacctgcgcaaagaacatatcgttgagatcttccagcgtta

SEQ ID NO: 556968 - DNA, 75 bp, synthetic construct
  source 1..75: mol_type = other DNA
gagaattacagtatacggcttcctcttattatggacgtgggcattaatcgccctgtacatcctgtatttccggtg

SEQ ID NO: 556969 - DNA, 75 bp, synthetic construct
  source 1..75: mol_type = other DNA
gataatccaccaatcccgggaaaacaatcactggcgaatggctcatcaattgccctggtcagcccggttgagttt

SEQ ID NO: 556970 - DNA, 75 bp, synthetic construct
  source 1..75: mol_type = other DNA
caacaaagggtatgagatgagcgaactgcttagcgccgcacttctcgatatgcgctggcattgcctggaagaaaa

SEQ ID NO: 556971 - DNA, 75 bp, synthetic construct
  source 1..75: mol_type = other DNA
ttatcgccgaatttatgggctgggaaaacctgaaagatggtgtactgaaccgtaaaggaacgcagcgcgtcatta

SEQ ID NO: 556972 - DNA, 75 bp, synthetic construct
  source 1..75: mol_type = other DNA
taagagcgatgaagaactctgtgaaattgctaaacagaacatcttggcatcacgtaacaagcaacttgaaaatgt

SEQ ID NO: 556973 - DNA, 75 bp, synthetic construct
  source 1..75: mol_type = other DNA
gtaaaaaggttgatagcttcggtgactggtcgccacagactgaacatccagctatcactattcagcgtaaagaac

SEQ ID NO: 556974 - DNA, 75 bp, synthetic construct
  source 1..75: mol_type = other DNA
aatatgaagatgctaagaagattgctatgcaggctgatattgagcagcttacgaagatttctcagaaatacagca

SEQ ID NO: 556975 - DNA, 75 bp, synthetic construct
  source 1..75: mol_type = other DNA
ctggtcgccacagactgaacatccagctatcactattcagcgtaaagaacacgatgaaagaattgcacttgagca

SEQ ID NO: 556976 - DNA, 75 bp, synthetic construct
  source 1..75: mol_type = other DNA
gctatcactatccagcgcaaagaacatgatgaaagaattaagcttgagcaagaaatccgaatgtcaccaaaggaa

SEQ ID NO: 556977 - DNA, 75 bp, synthetic construct
  source 1..75: mol_type = other DNA
aatatgaagatgctaagaaggttgctatgcaggctgatattgagcagttagtgaagatttcaacgaagtacacaa

SEQ ID NO: 556978 - DNA, 75 bp, synthetic construct
  source 1..75: mol_type = other DNA
ggtatatcggtacgcgcggtgccagttccagtgctaatctacaaacagtcattgccgggcttatcgtcacgctaa

SEQ ID NO: 556979 - DNA, 75 bp, synthetic construct
  source 1..75: mol_type = other DNA
aatccagaccattacctggcgcgcctctcttctcgccatattccgcataatgcccttaataccgtgcttggttgt

SEQ ID NO: 556980 - DNA, 75 bp, synthetic construct
  source 1..75: mol_type = other DNA
ggcaggcgctggaaaaagtggccgccacgggagactgccggcaggtggctcagggactgctggacggcaccaggg

SEQ ID NO: 556981 - DNA, 75 bp, synthetic construct
  source 1..75: mol_type = other DNA
gcatccgcagcgtgccggccctggtggtgttctgcagccaggggcacgacatcatccggggaaatctgcgcgtca

SEQ ID NO: 556982 - DNA, 75 bp, synthetic construct
  source 1..75: mol_type = other DNA
agaaggataaaccacagcagggcgccgtgtactttgtgtccttctccattcccgaagaggggctgaaacggatgc

SEQ ID NO: 556983 - DNA, 75 bp, synthetic construct
  source 1..75: mol_type = other DNA
aaagcggcacttgaacggatttcgaaggagggagaatgtgcatcggtggcggaggcgattctcagggagagtgag

SEQ ID NO: 556984 - DNA, 75 bp, synthetic construct
  source 1..75: mol_type = other DNA
aacaacgacctgaaagccacggctgaagcagtgctgtctctggtgaaagacggtgcgaccgatggtgttcagatt

SEQ ID NO: 556985 - DNA, 75 bp, synthetic construct
  source 1..75: mol_type = other DNA
tttctgtccacgctgaataaaatggcagaaaagaaaaaaacaccgggaaagagatgtttgtgggggttacccggg

SEQ ID NO: 556986 - DNA, 75 bp, synthetic construct
  source 1..75: mol_type = other DNA
atggtcatacattattgttaattactaaaccatccttgcaggcgacagcattattgcagcatttgaaacaatcgc

SEQ ID NO: 556987 - DNA, 75 bp, synthetic construct
  source 1..75: mol_type = other DNA
cccgaagaggggctgaaacgaatgctgggcgaaacccggcattacggtattccggccacgctgcggggcatggtg

SEQ ID NO: 556988 - DNA, 75 bp, synthetic construct
  source 1..75: mol_type = other DNA
ttgagcgagtcaccggctggctgtttttatcggtcattcccgtgggtttgcctgccgcgctacaaattgctgccg

SEQ ID NO: 556989 - DNA, 75 bp, synthetic construct
  source 1..75: mol_type = other DNA
gacggcgcaactgatggtgttcagatcgacccgacgctgttttcacagtacggcattcgcagcgttccggccctg

SEQ ID NO: 556990 - DNA, 75 bp, synthetic construct
  source 1..75: mol_type = other DNA
tcctgatggatatcgaattgtgaagatggttaaagcttcaagaggtgaaccgccccgggaatcctggagactaaa

SEQ ID NO: 556991 - DNA, 75 bp, synthetic construct
  source 1..75: mol_type = other DNA
atgggattcattgatgaagaccagcgtaattctatcggtacattagcggctggcgcacgtcttgcgtcatcttct

SEQ ID NO: 556992 - DNA, 75 bp, synthetic construct
  source 1..75: mol_type = other DNA
gaatggataatctttccagaacgatagagacggctacaaaagttcttaatagcccaggattcacgggatatttcg

SEQ ID NO: 556993 - DNA, 75 bp, synthetic construct
  source 1..75: mol_type = other DNA
caccggtattgctcacacccgctgggcgactcacggagaaccttcagaagcgaatgcgcatccgcatgtttctga

SEQ ID NO: 556994 - DNA, 75 bp, synthetic construct
  source 1..75: mol_type = other DNA
atgctggaactacttttcgttattggcttttttgtcatgttgatggtcactggtgtttcgttgctgggtattatc

SEQ ID NO: 556995 - DNA, 75 bp, synthetic construct
  source 1..75: mol_type = other DNA
ttttgcttttccgctctcagggcaggccaatgattcagttgttgttacatttactgggattttgttggcaaaaag

SEQ ID NO: 556996 - DNA, 75 bp, synthetic construct
  source 1..75: mol_type = other DNA
tcgcccacttcgagaagcacggcgcgcgggaagaagcgcactacaggcccgcagcgcgcgcgccgccagtgcaag

SEQ ID NO: 556997 - DNA, 75 bp, synthetic construct
  source 1..75: mol_type = other DNA
tttaccggggatgctgatgctatcaataccactttattacgccttagttccagtgcagatagtgcaactggagtg

SEQ ID NO: 556998 - DNA, 75 bp, synthetic construct
  source 1..75: mol_type = other DNA
tacttctatgcgatagtgataaattgtgatgagagcggatggaaacaatgcataactactagtattttagagcat

SEQ ID NO: 556999 - DNA, 75 bp, synthetic construct
  source 1..75: mol_type = other DNA
gtgcgggaagatgggcgtcagtcattccttgcagttgaaattcagtcgttaattgatgttctgaaagatatacgg

SEQ ID NO: 557000 - DNA, 75 bp, synthetic construct
  source 1..75: mol_type = other DNA
aaggcaagtgatgtaagtgaggcgttggcctatattcgccagaacaacgaaatggagcgttcaggtcgcaataac

SEQ ID NO: 557001 - DNA, 75 bp, synthetic construct
  source 1..75: mol_type = other DNA
acaaagagcagaattacaagaaaaggctctggacagacagatagccagagaaatcaatcagttaaagcttgaaga

SEQ ID NO: 557002 - DNA, 75 bp, synthetic construct
  source 1..75: mol_type = other DNA
ccgctgggtgcctggctggatgtgtgcaccacgtccacagacggataccactgaacgcaccgataacctggctga

SEQ ID NO: 557003 - DNA, 75 bp, synthetic construct
  source 1..75: mol_type = other DNA
atatttctattatccccgattacagacaagcctggaaagtggaacataaattaccggatattctactgttgacta

SEQ ID NO: 557004 - DNA, 75 bp, synthetic construct
  source 1..75: mol_type = other DNA
gaagtgattgcgcatttggttaactgggaactgaaacagggcggcaccctgcgtgaagctgttctgcgtgctatc

SEQ ID NO: 557005 - DNA, 75 bp, synthetic construct
  source 1..75: mol_type = other DNA
gtatgtccgcgcctgtggatgagccatccgggaaacaggagaaaaaaccggctgaaccggtaacggcaaaaaagc

SEQ ID NO: 557006 - DNA, 75 bp, synthetic construct
  source 1..75: mol_type = other DNA
gctgtacagcctggcattaagtgggatcctgtttgcgatattgattggagtagcttggtatctcgggactatcgt

SEQ ID NO: 557007 - DNA, 75 bp, synthetic construct
  source 1..75: mol_type = other DNA
tactggaacatcatcagcagtatggtcaaacctgcctatctggccactcctcccgcatttccggagcatggtatg

SEQ ID NO: 557008 - DNA, 75 bp, synthetic construct
  source 1..75: mol_type = other DNA
acgcagaataccgggcggccctggaaatcgatccccggcagtcgatttctgtacacctgccgtattcacagacct

SEQ ID NO: 557009 - DNA, 75 bp, synthetic construct
  source 1..75: mol_type = other DNA
gccggtctgataaaagttaaacccctggcagagcgtttcaccggagaaggcgctattaagttcgtcgacgcatct

SEQ ID NO: 557010 - DNA, 75 bp, synthetic construct
  source 1..75: mol_type = other DNA
ctttctctactgcgtcctgttccgcaaaacgtcgatgctatcgccgtgtggggacatcgccccagcgcggcgaaa

SEQ ID NO: 557011 - DNA, 75 bp, synthetic construct
  source 1..75: mol_type = other DNA
tgctggcggaagaggcggcattatggctgagcgccgcaccgcgcggtgaaatgaaaatatcaaaaaagaatattg

SEQ ID NO: 557012 - DNA, 75 bp, synthetic construct
  source 1..75: mol_type = other DNA
cggtaacactcgactttcagacattaaaagccagtgacatcaatgtaccggttaatactgtcagtatctttaggg

SEQ ID NO: 557013 - DNA, 75 bp, synthetic construct
  source 1..75: mol_type = other DNA
gtgccggtggcgggagtggtcctgtcgattaccttctgggccctgatcgtcagcgcgaacaagcgacggtgttac

SEQ ID NO: 557014 - DNA, 75 bp, synthetic construct
  source 1..75: mol_type = other DNA
gattgtttatccaacctatatccacccaacactgctacaacctattacggttgaagaggcggcggaatatttgat

SEQ ID NO: 557015 - DNA, 75 bp, synthetic construct
  source 1..75: mol_type = other DNA
aagaagttgatgctatcgccgtgtggggacatcgtcccagcgcggcgaaaccagtcgccatcgccaaagcagcgg

SEQ ID NO: 557016 - DNA, 75 bp, synthetic construct
  source 1..75: mol_type = other DNA
agcgcaaatgactgtatcagtcagcttccatattaagccttcagaagcgggggcggtttatactacctataacac

SEQ ID NO: 557017 - DNA, 75 bp, synthetic construct
  source 1..75: mol_type = other DNA
gttgtgctgccatttctctcgtattacaccgttaatgaaggtgaacgcggcattttgctgcgctacggaaaaatc

SEQ ID NO: 557018 - DNA, 75 bp, synthetic construct
  source 1..75: mol_type = other DNA
gcttcctgagtaacattaatgtttacaacaaaggtgaagtggatcagaaaaaggggatgcgatacgttgtggtaa

SEQ ID NO: 557019 - DNA, 75 bp, synthetic construct
  source 1..75: mol_type = other DNA
ggaaaagcactgactgcggatataacattaacgccgaaagatattggtactttaaattcagtaacgatgtctttc

SEQ ID NO: 557020 - DNA, 75 bp, synthetic construct
  source 1..75: mol_type = other DNA
ctcaccactgctgagcgttgggacggtaagctacccgataccatgatccccggcagtacagttccgtttatctct

SEQ ID NO: 557021 - DNA, 75 bp, synthetic construct
  source 1..75: mol_type = other DNA
cttaccactgccgaacgctgggacggaaaactgcccgataccatgatccctggcagtaccgttccgtttatctca

SEQ ID NO: 557022 - DNA, 75 bp, synthetic construct
  source 1..75: mol_type = other DNA
atggtcgggtaccttctgcccgtaaggtgaatggtaaggcgctttcagcggatataacactgacgccgaaagata

SEQ ID NO: 557023 - DNA, 75 bp, synthetic construct
  source 1..75: mol_type = other DNA
cacaccatcaccgttaacgctacgggtaacgaagaaaacaccgtaaaaaacatcgcatttaactatattgtgagg

SEQ ID NO: 557024 - DNA, 75 bp, synthetic construct
  source 1..75: mol_type = other DNA
tcaatggcgtctcgtttgatggttctaaagatattgaacttaacccacggtctataggcacaatcaactccacaa

SEQ ID NO: 557025 - DNA, 75 bp, synthetic construct
  source 1..75: mol_type = other DNA
gcgctgctgtatgccgatgtgttgcatgaactggcgcagctgcgcggtgaagatttctcgcaactgcatattgtc

SEQ ID NO: 557026 - DNA, 75 bp, synthetic construct
  source 1..75: mol_type = other DNA
cgcgccgcttatctctcttctggcacctggtcattgatgggcttcgaaagccagacgccatttaccaatgacacg

SEQ ID NO: 557027 - DNA, 75 bp, synthetic construct
  source 1..75: mol_type = other DNA
catccagtacggatttggggacgaaaaccacatcgtcgtttgattacggcactaaatccacgaataacactggtg

SEQ ID NO: 557028 - DNA, 75 bp, synthetic construct
  source 1..75: mol_type = other DNA
cccttaccggacgcatcagccacggtcaggttgatttaagcgagctgggaccgaacgccgacgaactgctgtcga

SEQ ID NO: 557029 - DNA, 75 bp, synthetic construct
  source 1..75: mol_type = other DNA
gcgatttatggccagcctcaatgcggagctgcaggactggcagcgccgccatgatgcgctgattctggtcacgcc

SEQ ID NO: 557030 - DNA, 75 bp, synthetic construct
  source 1..75: mol_type = other DNA
taatgaaaatgatctgatcttctttgataatggtcaggagataccactcgttataagcatgatcccggatgcaat

SEQ ID NO: 557031 - DNA, 75 bp, synthetic construct
  source 1..75: mol_type = other DNA
gtgcgccggtttacgaggcggcgcaggttacgccgctacaaaaaatggaaaaaactgtcgtcgcgtcttgataac

SEQ ID NO: 557032 - DNA, 75 bp, synthetic construct
  source 1..75: mol_type = other DNA
actttgacgaagcgaaagctaaagcgatcgaactgtcacagcagcaggggttcacctgggtgccgccgttcgacc

SEQ ID NO: 557033 - DNA, 75 bp, synthetic construct
  source 1..75: mol_type = other DNA
aatgcaggtcatccggttgatctgccacgcgtggggctgtttgccgaaggtgttgcggtgaaacgcatcggcgac

SEQ ID NO: 557034 - DNA, 75 bp, synthetic construct
  source 1..75: mol_type = other DNA
gcaagcgcaggtgcacacgcacatactgtcggtattggtgctcatacgcactccgttgcgattggctcacatgga

SEQ ID NO: 557035 - DNA, 75 bp, synthetic construct
  source 1..75: mol_type = other DNA
tgcagccacttctgcatccaccgtgaccacgaaagcgtcagaagctgccacctcagcccgggatgcggcggcctc

SEQ ID NO: 557036 - DNA, 75 bp, synthetic construct
  source 1..75: mol_type = other DNA
tacaacgtcggttccccacatcaggcaggcatttcagaactggttctacgagcaggcaatggaaaccccaaagga

SEQ ID NO: 557037 - DNA, 75 bp, synthetic construct
  source 1..75: mol_type = other DNA
cagttaactgtgctgttgatgctggtggcgaagctgtctcgcctgaaaggtctggatgcctccattgaacatgac

SEQ ID NO: 557038 - DNA, 75 bp, synthetic construct
  source 1..75: mol_type = other DNA
aaacttgcagccgcttatccgtcaggcgtgatccctgatatgcgtggctggacgattaagggcaaacctgccagt

SEQ ID NO: 557039 - DNA, 75 bp, synthetic construct
  source 1..75: mol_type = other DNA
cgaaacttgcagccgcttatccgtcaggcgtgatccctgatatgcgtggctggacgattaagggcaagcccgcca

SEQ ID NO: 557040 - DNA, 75 bp, synthetic construct
  source 1..75: mol_type = other DNA
ccgtaaggtgaatggtaaggcgctttcagcggatataacactgacgccgaaagatattggtacgcttaactcaac

SEQ ID NO: 557041 - DNA, 75 bp, synthetic construct
  source 1..75: mol_type = other DNA
atcgtgacctgatcacctttgtcgctgaccgtccggggcatgatctgcgttatgccattgatgcttcgaaaattg

SEQ ID NO: 557042 - DNA, 75 bp, synthetic construct
  source 1..75: mol_type = other DNA
ctcgacggatgatttcttcaccgaaaccacgccgtatgcgccgagcagcccttattccgcttcaaaagccagcag

SEQ ID NO: 557043 - DNA, 75 bp, synthetic construct
  source 1..75: mol_type = other DNA
accgccttattgactggtgccagtcgcgcggagaagcggttatcgccagtcaggactggcacccggcgaatcacg

SEQ ID NO: 557044 - DNA, 75 bp, synthetic construct
  source 1..75: mol_type = other DNA
cggaaagtgatgctgaactggcgcgctgtattttcgacagtctggcgttgctgtacgccgatgtgttgcatgagc

SEQ ID NO: 557045 - DNA, 75 bp, synthetic construct
  source 1..75: mol_type = other DNA
gcagccaacatcaccaatgaaggcggggcggaaggtcgctatcgggtgctgaaaaatattatgggcttatggctg

SEQ ID NO: 557046 - DNA, 75 bp, synthetic construct
  source 1..75: mol_type = other DNA
gggtcagcgtgtgggcctgcccgttgcttatcgcgatagccgcaccgatggcctaatggcgcaggcacaacaaca

SEQ ID NO: 557047 - DNA, 75 bp, synthetic construct
  source 1..75: mol_type = other DNA
tcgccatggcaggcgtcatacccgcaaaggcgaaagaggtacgattaacatagtgaacggaacaccaattcacga

SEQ ID NO: 557048 - DNA, 75 bp, synthetic construct
  source 1..75: mol_type = other DNA
tctatctcgcgtgaattcgcgcaggaactggtggattgctgctggatcaagcttaacgacattaacaaaacgcgt

SEQ ID NO: 557049 - DNA, 75 bp, synthetic construct
  source 1..75: mol_type = other DNA
cgtaatacactgctggcagcacaaaaagaaccagaaaaatatcgtgatctggttgtgcgtgtggcgggttacagt

SEQ ID NO: 557050 - DNA, 75 bp, synthetic construct
  source 1..75: mol_type = other DNA
tcgatgactggttacgcgatcatgaaatcgatgaattgatcgttatgggcctggctactgactattgcgtgaagt

SEQ ID NO: 557051 - DNA, 75 bp, synthetic construct
  source 1..75: mol_type = other DNA
tcagctaaacaacagaccgagaaagacactgaagttcaaaacaccgaaagagataattgaaaggggtgttgcatt

SEQ ID NO: 557052 - DNA, 75 bp, synthetic construct
  source 1..75: mol_type = other DNA
ccccatgagcgtaagcgggctgtagctcacctgacactgtctgagcgcgaggagatacgagctggtttgtcagcc

SEQ ID NO: 557053 - DNA, 75 bp, synthetic construct
  source 1..75: mol_type = other DNA
acagaagaacaggctgtagctcaaaaacttaaaaatcaggtaaccgaaggtaagctcatcgattcagacttctgc

SEQ ID NO: 557054 - DNA, 75 bp, synthetic construct
  source 1..75: mol_type = other DNA
taaaccaatagcgtcagtggctaaagtcgccaagaaagccattgtttctgtagctaaaagtgtttggggattgct

SEQ ID NO: 557055 - DNA, 75 bp, synthetic construct
  source 1..75: mol_type = other DNA
gttttcgccctcagcaaactggcgatggcattgtccagtacgcttgattccattccgttatccatgcagcgacag

SEQ ID NO: 557056 - DNA, 75 bp, synthetic construct
  source 1..75: mol_type = other DNA
tggaacgtaattttgaacgcgatcgccagctaacctacaccgcgcatggcccgcataaagcggacttacgcattc

SEQ ID NO: 557057 - DNA, 75 bp, synthetic construct
  source 1..75: mol_type = other DNA
cgaaaaagggggtagtacagctcagcagtgcgaccaacagcacttccgagtcacaggcggcaacgccaaaagccg

SEQ ID NO: 557058 - DNA, 75 bp, synthetic construct
  source 1..75: mol_type = other DNA
taccttcgtttctgaaacagacaccgaagtaattgcccatctggtgaactgggagctgaaacaaggcgggactct

SEQ ID NO: 557059 - DNA, 75 bp, synthetic construct
  source 1..75: mol_type = other DNA
tggcttaccacgttgcgctgatcaaaggcactgacgttgaccagccgcgtaacctggcaaaatcggttacggttg

SEQ ID NO: 557060 - DNA, 75 bp, synthetic construct
  source 1..75: mol_type = other DNA
aatatgcctggaacagtgttaatggttatcctggcactgttgtttattatcaacagcgtctttacttcgccgcat

SEQ ID NO: 557061 - DNA, 75 bp, synthetic construct
  source 1..75: mol_type = other DNA
atggctatcagttggatccagcccagctttgccggtggtgagattggaccgtcgttgtacgggcgtattgacatg

SEQ ID NO: 557062 - DNA, 75 bp, synthetic construct
  source 1..75: mol_type = other DNA
gagctgtgggaagaaaccggcatcagcgcgcaaccgcaacattttatccgcatgcatcagtggattgcgcctgat

SEQ ID NO: 557063 - DNA, 75 bp, synthetic construct
  source 1..75: mol_type = other DNA
gacgggcataaggtcgcggaactggcgcacctgatgccaatgcagctgataacgccagaagggtttactttactc

SEQ ID NO: 557064 - DNA, 75 bp, synthetic construct
  source 1..75: mol_type = other DNA
ttcgcatacagaaggcacatcatgggatggctggggcggatccggtgatgatgatactggcattgagtgggaata

SEQ ID NO: 557065 - DNA, 75 bp, synthetic construct
  source 1..75: mol_type = other DNA
tactgcaactgctgaggtgatttcctatatcccttcgcaggtcgttggcgaggataatgccagctataaatgggc

SEQ ID NO: 557066 - DNA, 75 bp, synthetic construct
  source 1..75: mol_type = other DNA
gcacatacccatagtattagcgggacagcaaatagtgccggtgcgcaccaacacaagagttccggtgcgtttggt

SEQ ID NO: 557067 - DNA, 75 bp, synthetic construct
  source 1..75: mol_type = other DNA
gtgcagcctcctcggcaacagcggcaggaacttccgcgaaggcggcaaaaacgtccgagacgaacgcaaagtctt

SEQ ID NO: 557068 - DNA, 75 bp, synthetic construct
  source 1..75: mol_type = other DNA
ctgtccggcacagcagcatctgcaggtgcacacgcgcatactgtcggtattggtgctcatacgcactccgttgcg

SEQ ID NO: 557069 - DNA, 75 bp, synthetic construct
  source 1..75: mol_type = other DNA
cgcgaattgcgagaaaaagaggaaaagggttttatcgtgctggtggaagaggaaaacagctttattaccggttga

SEQ ID NO: 557070 - DNA, 75 bp, synthetic construct
  source 1..75: mol_type = other DNA
tgatagggggattatttggaatgatgagaatctatctattatttggcctagaaaaaatgaattaaacttgtcaaa

SEQ ID NO: 557071 - DNA, 75 bp, synthetic construct
  source 1..75: mol_type = other DNA
cagacgtattaattttcgaaccgaaagtttttggtgacgagcgtggtttctttttcgagagctttaaccagaagg

SEQ ID NO: 557072 - DNA, 75 bp, synthetic construct
  source 1..75: mol_type = other DNA
cattacagaaatggaggtctgttctaccgttcctcaagagatggctatggttttgaggaagactgggcagaagtt

SEQ ID NO: 557073 - DNA, 75 bp, synthetic construct
  source 1..75: mol_type = other DNA
tgtgttaaaggtgaagtttatgatgttgctgtagatatacgacctgagtcaagtacatactgtaagtgggtaggt

SEQ ID NO: 557074 - DNA, 75 bp, synthetic construct
  source 1..75: mol_type = other DNA
tatttgaagaagctgtaggacggaaaattaatttcgtacaagataatcactcgagatcagttaaaggtgttttaa

SEQ ID NO: 557075 - DNA, 75 bp, synthetic construct
  source 1..75: mol_type = other DNA
tgagcacaacaagcggtagtggccagactcgtaatgcagggaagacatcatcagatggtgctcatacccactcac

SEQ ID NO: 557076 - DNA, 75 bp, synthetic construct
  source 1..75: mol_type = other DNA
ttgccacagacgaaattgtagcgcgtggtggtaatcagattcgaatgataggtggggagtatggggcattatggc

SEQ ID NO: 557077 - DNA, 75 bp, synthetic construct
  source 1..75: mol_type = other DNA
atttcaaatccaagcgcggggattatgagcacaacaagcggtagtggccagactcgtaatgcagggaagacatca

SEQ ID NO: 557078 - DNA, 75 bp, synthetic construct
  source 1..75: mol_type = other DNA
atggcggttaagttggaagtaattatctataccaatgaaaaaggcagggttttaacccagattacaggaagttat

SEQ ID NO: 557079 - DNA, 75 bp, synthetic construct
  source 1..75: mol_type = other DNA
ttcaaatattgagagccttaccggtaccactacccgcttagtagaatctgttaatgccaccagctacccctctgt

SEQ ID NO: 557080 - DNA, 75 bp, synthetic construct
  source 1..75: mol_type = other DNA
cacctgccaatatcaaagaatcgcttgatgagaacgctgaccgtttctataaaatgttccgaatccataccacgt

SEQ ID NO: 557081 - DNA, 75 bp, synthetic construct
  source 1..75: mol_type = other DNA
cccggagaacgacgccatcgccgcgccccgtggtgaagcaaaatccacgctggtgactcagctgtttaccctgtg

SEQ ID NO: 557082 - DNA, 75 bp, synthetic construct
  source 1..75: mol_type = other DNA
gagcaaatacctacttgctcatgactgataaaggcgaccagtacggtggctggaacggtcttcgaccatttgcag

SEQ ID NO: 557083 - DNA, 75 bp, synthetic construct
  source 1..75: mol_type = other DNA
ttcaggaagagcatcaggttcgtgtagtgatgattaacggtgagccgtggtttgtggctaaggatgtatgtgatg

SEQ ID NO: 557084 - DNA, 75 bp, synthetic construct
  source 1..75: mol_type = other DNA
acgctggcggcaacgccaaaggcagtaaaagcagcctatgacaatgcagagaaacgtctgcagaaagaccagaac

SEQ ID NO: 557085 - DNA, 75 bp, synthetic construct
  source 1..75: mol_type = other DNA
cgcccgattaccgtttatgaattgctgtttattcgccacgaaggcaatgaactggagctggaaattcactgctca

SEQ ID NO: 557086 - DNA, 75 bp, synthetic construct
  source 1..75: mol_type = other DNA
ggaggtaatgaatcaaacgcttaataaagaatttaacggcgttgatttattttctgttggcgtggaaccctgcgc

SEQ ID NO: 557087 - DNA, 75 bp, synthetic construct
  source 1..75: mol_type = other DNA
tgatgttatcaaggaagcactgagaaatgactacaacggcgtgaatattttttctgaaaacgctgcgccctgcgc

SEQ ID NO: 557088 - DNA, 75 bp, synthetic construct
  source 1..75: mol_type = other DNA
gtacatcgccaacctccgccagaccatcgaggctgaatgtctggggttcgatgttaacccgcaggccacacaggc

SEQ ID NO: 557089 - DNA, 75 bp, synthetic construct
  source 1..75: mol_type = other DNA
cagcgactacagaagagacattgctcactcttgcgttgactcccttagtgaaagagttgaaggctctggagtgta

SEQ ID NO: 557090 - DNA, 75 bp, synthetic construct
  source 1..75: mol_type = other DNA
gtatctgctggactccgacaaacgctatcgggtgattgcgcgtcttggacagcgtaccgatacttctgatgccga

SEQ ID NO: 557091 - DNA, 75 bp, synthetic construct
  source 1..75: mol_type = other DNA
tttttgaggaagctgtaggccgcaaagttgaatttgttcaagataaccattcgaagtccaggaaaggtgttttac

SEQ ID NO: 557092 - DNA, 75 bp, synthetic construct
  source 1..75: mol_type = other DNA
tttctcaacacgctgggcacgcactggaacatttcgttgttccattatcgcagtcatggtactgactacggacgc

SEQ ID NO: 557093 - DNA, 75 bp, synthetic construct
  source 1..75: mol_type = other DNA
aacgactggcgcatgtgctttcgggggcgaacgtcaatttccacggcctgcgctacgtctcggaacgctgcgaac

SEQ ID NO: 557094 - DNA, 75 bp, synthetic construct
  source 1..75: mol_type = other DNA
gaaaccttccgtttgtgccaggagtatctcgacgacatcatcaccgtcgatagtgatgcgatctgtgcggcgatg

SEQ ID NO: 557095 - DNA, 75 bp, synthetic construct
  source 1..75: mol_type = other DNA
cgccatgatggcgggcctgacggaagaacaaaaagcgcacggcgtgatcaccgcttctgcgggtaaccacgcgca

SEQ ID NO: 557096 - DNA, 75 bp, synthetic construct
  source 1..75: mol_type = other DNA
ctgatgccgcaaatcaaagtgatcgccgtggaagcggaagattccgcctgcctgaaagcggcgctggatgcgggt

SEQ ID NO: 557097 - DNA, 75 bp, synthetic construct
  source 1..75: mol_type = other DNA
ggcagcttcctcaaattctgccagttacttggtgggcgctcggtcaccgagttcaactaccgctttgctgatgcc

SEQ ID NO: 557098 - DNA, 75 bp, synthetic construct
  source 1..75: mol_type = other DNA
caaagaaattttgcagatgctcaacgacggcggctacagcgtggttgatctctccgacgacgaaatggcgaagct

SEQ ID NO: 557099 - DNA, 75 bp, synthetic construct
  source 1..75: mol_type = other DNA
atgatggcagactcacaacccctgtccggtgctccggaaggtgccgaatatttaagagcggtgctacgtgcgccg

SEQ ID NO: 557100 - DNA, 75 bp, synthetic construct
  source 1..75: mol_type = other DNA
gagttcaactaccgttttgccgatgccaaaaacgcctgcatctttgtcggcgtgcgcctgagccgcggcctcgaa

SEQ ID NO: 557101 - DNA, 75 bp, synthetic construct
  source 1..75: mol_type = other DNA
agcgatcgaactgtcacagcagcagggcttcacctgggtgccgccgttcgaccatccgatggtgatcgccgggca

SEQ ID NO: 557102 - DNA, 75 bp, synthetic construct
  source 1..75: mol_type = other DNA
agcctgcctgaaagcggcgctggatgcaggtcatcctgttgacctgccgcgcgtaggtttgtttgctgagggggt

SEQ ID NO: 557103 - DNA, 75 bp, synthetic construct
  source 1..75: mol_type = other DNA
ccggcgccccggaaggcgccgaatatttaagagcggtgctgcgcgcgccggtctacgaagcggcgcaggtcacgc

SEQ ID NO: 557104 - DNA, 75 bp, synthetic construct
  source 1..75: mol_type = other DNA
tggagccgccggatgctcggcaccacccagcgtattctggtagaaggtacatcgcgtaagagcatcatggagctt

SEQ ID NO: 557105 - DNA, 75 bp, synthetic construct
  source 1..75: mol_type = other DNA
cgacgaactactacgcgccgcagtcagaacggagcatcatctggaacgatccggaaatagggattgactggccgg

SEQ ID NO: 557106 - DNA, 75 bp, synthetic construct
  source 1..75: mol_type = other DNA
gacggcctggcgcaaacattctggcctgaacactgtgtgcagaacagtgaaggcgcacaattacatccgttactg

SEQ ID NO: 557107 - DNA, 75 bp, synthetic construct
  source 1..75: mol_type = other DNA
cgccagcagcgcagcttcctcggctacggcggcaggaaattccgcgaaggcggcaaaaacgtccgagacgaacgc

SEQ ID NO: 557108 - DNA, 75 bp, synthetic construct
  source 1..75: mol_type = other DNA
gcagatgaagccactatcacggcgcggatgaacgcgatcccgcactcaaactaccgtgcagtcgtgtttaccaaa

SEQ ID NO: 557109 - DNA, 75 bp, synthetic construct
  source 1..75: mol_type = other DNA
ggcgaagctgtctcgcctgaaaggtctggatgcctccattgaacatgacatcgtgcatggtctgcaggcgctgcc

SEQ ID NO: 557110 - DNA, 75 bp, synthetic construct
  source 1..75: mol_type = other DNA
ggccagaaaataacatggaattcattctctcgactaaggatgtaatcctgccatgcttgactgatgctcgccatt

SEQ ID NO: 557111 - DNA, 75 bp, synthetic construct
  source 1..75: mol_type = other DNA
acgtctgagacaaacgccaggtcttctgaaacggcagcgggacagagcgcctcggctgcggcaggctcaaaaaca

SEQ ID NO: 557112 - DNA, 75 bp, synthetic construct
  source 1..75: mol_type = other DNA
gcggcggaggcaaaggcggcgaatgcccgggggccaaagggagataagggtgacccgggacctcagggggtacag

SEQ ID NO: 557113 - DNA, 75 bp, synthetic construct
  source 1..75: mol_type = other DNA
gcgttgaatgaaaagcctaatgtaacagcaatactttgtggtggtacgtatcgtgccagaagtgatgctttttac

SEQ ID NO: 557114 - DNA, 75 bp, synthetic construct
  source 1..75: mol_type = other DNA
gcgcagcttcctcggcaacggcggcagcaaattctgcgaaggcggcaaaaacgtccgagacgaacgctaagtctt

SEQ ID NO: 557115 - DNA, 75 bp, synthetic construct
  source 1..75: mol_type = other DNA
aatatggttatacaagcttatgtccagaattcacagtgtacaaggctcagtacttatgtctacgggggcgtttaa

SEQ ID NO: 557116 - DNA, 75 bp, synthetic construct
  source 1..75: mol_type = other DNA
agccagtgccaccgccgccggaaaatcggcagaaagtgccgcatcgtctgcttcaacagccacaacgaaggctgg

SEQ ID NO: 557117 - DNA, 75 bp, synthetic construct
  source 1..75: mol_type = other DNA
catctagaatttactgtcagcaccggcgttaaagtttacttctgcgatcctcagagtccttggctgcggggaaca

SEQ ID NO: 557118 - DNA, 75 bp, synthetic construct
  source 1..75: mol_type = other DNA
cttaagctcagttggaatgcggttgacggcattatgacccgggcagttaagcgaggtcttgcccggataaaaaag

SEQ ID NO: 557119 - DNA, 75 bp, synthetic construct
  source 1..75: mol_type = other DNA
cagaactcagaaaatcactgacatgggacagaggaatggaactggccagacactggagtacgataattttccgga

SEQ ID NO: 557120 - DNA, 75 bp, synthetic construct
  source 1..75: mol_type = other DNA
tgaaatcccaaccgatccagaaactggcatcagcgttgaagcgctggaactggcgctggaacagtggccgattaa

SEQ ID NO: 557121 - DNA, 75 bp, synthetic construct
  source 1..75: mol_type = other DNA
cgcgctgttcctgggccgtggcgatcagtacccaatcgcgctggaaggcgcattgaagctgaaagagatctccta

SEQ ID NO: 557122 - DNA, 75 bp, synthetic construct
  source 1..75: mol_type = other DNA
cctgagacaatttataaaacgctgtactttcgtagccgtgaagcgctacaccacctgaatatacagcatctgtga

SEQ ID NO: 557123 - DNA, 75 bp, synthetic construct
  source 1..75: mol_type = other DNA
gatccacagatgatgaaactggagggggctaccggtgagttacgtcgtgacggcagcattgtgtacaggcaggat

SEQ ID NO: 557124 - DNA, 75 bp, synthetic construct
  source 1..75: mol_type = other DNA
caatgacgcaacccgccgtgagaaagcgatcatccggcagcgtttccgtgacccgcgtatccggagaatacatta

SEQ ID NO: 557125 - DNA, 75 bp, synthetic construct
  source 1..75: mol_type = other DNA
atcgcgtgatcccggaaatggtttgctgcgaaaacaggttctcagggccgaaccgttgatatttggccgcaagag

SEQ ID NO: 557126 - DNA, 75 bp, synthetic construct
  source 1..75: mol_type = other DNA
caattttgtcgttattaaagagaataaatctcattcggattcggtgcaccagactcgtacgcctaatccccacga

SEQ ID NO: 557127 - DNA, 75 bp, synthetic construct
  source 1..75: mol_type = other DNA
gatggattactcaagagttatggcctctgctgatttgttgaagttgattgtggaaaattgggtaatgactccaac

SEQ ID NO: 557128 - DNA, 75 bp, synthetic construct
  source 1..75: mol_type = other DNA
ttttgcaaagtttttagacagacttatcaggtaacgccgcaggtatatcgtcaacaaattagcgaaaatacggct

SEQ ID NO: 557129 - DNA, 75 bp, synthetic construct
  source 1..75: mol_type = other DNA
acgtgaagttcagcgcaatcgaggcaggcgctattacaaagctgtagatgctaataaccgggccaacaggatggc

SEQ ID NO: 557130 - DNA, 75 bp, synthetic construct
  source 1..75: mol_type = other DNA
ggcagtactttcctaaaaagacatgtcttgcccaatatactcaacatgaactagatgaaccgccccgggtttcct

SEQ ID NO: 557131 - DNA, 75 bp, synthetic construct
  source 1..75: mol_type = other DNA
gtggcgcaaatgcaaccgcagcgcgctgcgcctgcagcgcgttcgggttgggataacgttcctgctccggcggaa

SEQ ID NO: 557132 - DNA, 75 bp, synthetic construct
  source 1..75: mol_type = other DNA
agatcattctcacctccgatcgctatccgaaagagatcaacggcgttgaggatcgtttgaaatcccgcttcggct

SEQ ID NO: 557133 - DNA, 75 bp, synthetic construct
  source 1..75: mol_type = other DNA
aaataacggatccagtaacgtgccacctatcgccgtggcaaacatcgcgttgttcattcaggaaaaaggcagcgt

SEQ ID NO: 557134 - DNA, 75 bp, synthetic construct
  source 1..75: mol_type = other DNA
cgtagagccacagaaaatcgtaaccggtggcgctgtcacgctggagtcacctggcgcggtggtgcatatcgggtt

SEQ ID NO: 557135 - DNA, 75 bp, synthetic construct
  source 1..75: mol_type = other DNA
acaacagaccgagaaagacactgaagtgcaaaacaaaaactggccaccgagttagagttttttccagtatcgatt

SEQ ID NO: 557136 - DNA, 75 bp, synthetic construct
  source 1..75: mol_type = other DNA
gtggcgcaaacgcagccgcaacgtgctgcgccttctacgcgctcaggttgggataacgtcccggccccggcagaa

SEQ ID NO: 557137 - DNA, 75 bp, synthetic construct
  source 1..75: mol_type = other DNA
cggagcggatgccccacagctgcgttttgaagtgggcacaaagcccgtgacacaaacgctgaaagtccctgccag

SEQ ID NO: 557138 - DNA, 75 bp, synthetic construct
  source 1..75: mol_type = other DNA
accattatattcgtgcggtcttagtgcgctgtaatatccaacgatatagtccgttattgcgtgagctgcatcgct

SEQ ID NO: 557139 - DNA, 75 bp, synthetic construct
  source 1..75: mol_type = other DNA
cccgcttcggctgggggctgactgtggcgatcgaaccgccagagttagaaacccgcgtggcgatcctgatgaaaa

SEQ ID NO: 557140 - DNA, 75 bp, synthetic construct
  source 1..75: mol_type = other DNA
atacgcccattgcaggtggaactgagcgataacacgctggccctgtacgcgccaaaccgttttgtcctcgattgg

SEQ ID NO: 557141 - DNA, 75 bp, synthetic construct
  source 1..75: mol_type = other DNA
gagatcaacggcgttgaggatcgtttgaaatcccgcttcggctgggggctgactgtggcgatcgaaccgccagag

SEQ ID NO: 557142 - DNA, 75 bp, synthetic construct
  source 1..75: mol_type = other DNA
tgatttaaaaggggccaacttttcccgagcaaactttgccaatcaagtgagtaatcgtatgtacttttgctcagc

SEQ ID NO: 557143 - DNA, 75 bp, synthetic construct
  source 1..75: mol_type = other DNA
tctgaccgatcatgaaatcagaactgtcctggcgcgcctggaggacatcccggaagaccagcggattgagtccgg

SEQ ID NO: 557144 - DNA, 75 bp, synthetic construct
  source 1..75: mol_type = other DNA
atgtacggaacatgcgaaacgctatgccgggagctggcagcaaagtatgcgggagacacgccactgatgctggtt

SEQ ID NO: 557145 - DNA, 75 bp, synthetic construct
  source 1..75: mol_type = other DNA
atgtacggaacatgcgaaacgctatgccggcagctggcagcaaagtatccgggagacacgccactgatgctggtt

SEQ ID NO: 557146 - DNA, 75 bp, synthetic construct
  source 1..75: mol_type = other DNA
catgatccagcggttattgattctcgtaggattaattgtcgcctgtctgctgtatggcgtgatgaccaacgtttt

SEQ ID NO: 557147 - DNA, 75 bp, synthetic construct
  source 1..75: mol_type = other DNA
ccttaccgggcgtatcaatcacggtcaggttgatttgagcgagctgggcccgaaagcagacgaattgttgtcgaa

SEQ ID NO: 557148 - DNA, 75 bp, synthetic construct
  source 1..75: mol_type = other DNA
aaccgccaggtgaccgtccctgctgaactgctggcgtccctgattcagaccgctgaacaggcattgtggaaacgt

SEQ ID NO: 557149 - DNA, 75 bp, synthetic construct
  source 1..75: mol_type = other DNA
atgtacggaacatgcgaaacgctatgccggaagctggcagcaaagtatacgggagacacgccactgatgctggtt

SEQ ID NO: 557150 - DNA, 75 bp, synthetic construct
  source 1..75: mol_type = other DNA
gccgggagctggcagcaaagtatccgggagacacgccgctgatgctggttgtctggtccccggaagagattcagg

SEQ ID NO: 557151 - DNA, 75 bp, synthetic construct
  source 1..75: mol_type = other DNA
tgcggtacctcgtacaactctggtatggtgtcccgctactggtttgaatcgctggcgggcattccatgcgatgtt

SEQ ID NO: 557152 - DNA, 75 bp, synthetic construct
  source 1..75: mol_type = other DNA
atgtacggaacatgcgaaacgctatgccggtagctggcagcaaagtatgcgggagacacgcctctgatgctggtt

SEQ ID NO: 557153 - DNA, 75 bp, synthetic construct
  source 1..75: mol_type = other DNA
atgtacggaacatgcgaaacgctatgccggaagctggcagcaaagtatgcgggagacacgccgctgatgctggtt

SEQ ID NO: 557154 - DNA, 75 bp, synthetic construct
  source 1..75: mol_type = other DNA
atgtacggaacatgcgaaacgctatgccggaagctggcagcaaagtatccgggagacacgcccctgatgctggtt

SEQ ID NO: 557155 - DNA, 75 bp, synthetic construct
  source 1..75: mol_type = other DNA
cgcgattttactcaatgcgttgttaagcagaaggttggttgacgttccaccgccagaagttgttcatcaggagcc

SEQ ID NO: 557156 - DNA, 75 bp, synthetic construct
  source 1..75: mol_type = other DNA
gcgagatactgcgcgcgccagtgagttaatgcgtcaacatttgctgacgccgattccgattatccagcaggcgat

SEQ ID NO: 557157 - DNA, 75 bp, synthetic construct
  source 1..75: mol_type = other DNA
tggttctcactatttgctgcaaatgcgtgaacggttgtttgatctggcggcgcgctatcgcttcatctggctgcg

SEQ ID NO: 557158 - DNA, 75 bp, synthetic construct
  source 1..75: mol_type = other DNA
atcgctggctgaagaacgatattattcgcggcaattttcagccggatgaaaaattacggatgagtttgctgacat

SEQ ID NO: 557159 - DNA, 75 bp, synthetic construct
  source 1..75: mol_type = other DNA
atcgggctaaaagatgataccaatgcccgtcacttcgccggccttaactttaccgagaaaaaattgcaggaagcg

SEQ ID NO: 557160 - DNA, 75 bp, synthetic construct
  source 1..75: mol_type = other DNA
actggtaatcgccggacatttagtcggttttgtattgtgcgggcaagttcgtctgcgtaatgatgatgtcgattt

SEQ ID NO: 557161 - DNA, 75 bp, synthetic construct
  source 1..75: mol_type = other DNA
gatgccgaatctattctgcactttgcagagattggcgtggtgctgatgctgtttattatcggcctcgaactcgat

SEQ ID NO: 557162 - DNA, 75 bp, synthetic construct
  source 1..75: mol_type = other DNA
ctgaggaccgtgatgatattgagtttgtgatggatgatttccagcggagcctggggaaaagtaaaccagtacgtg

SEQ ID NO: 557163 - DNA, 75 bp, synthetic construct
  source 1..75: mol_type = other DNA
atgtacggaacatgcgaaacgctatgctgggcgctggcagcaaagtatccgggagacacgccgctgatgttggtt

SEQ ID NO: 557164 - DNA, 75 bp, synthetic construct
  source 1..75: mol_type = other DNA
cgtcccggaatgcgtcacccgccgacaggcggtggttaatcaggcccgcgccctgctgaaaaacaacacacacga

SEQ ID NO: 557165 - DNA, 75 bp, synthetic construct
  source 1..75: mol_type = other DNA
tggaagcgatgctggtcagtctggcgattgcccgcggtggcgatgagtgggaggcagacgttcttgcgaaggcgc

SEQ ID NO: 557166 - DNA, 75 bp, synthetic construct
  source 1..75: mol_type = other DNA
agaccctgactgcggcggtactggcgcgagataccgcgcgcgccagtgagttaatgcgccagcatttactgacgc

SEQ ID NO: 557167 - DNA, 75 bp, synthetic construct
  source 1..75: mol_type = other DNA
tgaatcaaaaagggtatcgggtggcgtctatgtcagagcaggagctgctcgatattttcgacgcccgcgccaata

SEQ ID NO: 557168 - DNA, 75 bp, synthetic construct
  source 1..75: mol_type = other DNA
ggtgctgcagggtgaagacggcagtcgcctgaccctgaaggtgacgcaactggacggcagctggagcctgtaccg

SEQ ID NO: 557169 - DNA, 75 bp, synthetic construct
  source 1..75: mol_type = other DNA
ccctggaccgggagaagggcatcttcacctctgatatccacctgctgaatgaactcagcgtccatcagctggcgc

SEQ ID NO: 557170 - DNA, 75 bp, synthetic construct
  source 1..75: mol_type = other DNA
caaacgtgacccgttgttatctgccgatgatgagcgccgcctgcgtgacggtacagaacgggaaagccgggaact

SEQ ID NO: 557171 - DNA, 75 bp, synthetic construct
  source 1..75: mol_type = other DNA
tcccgcgtgtggcgtatgagatggaaaagaccatcattcgtcatattgctgagggtaaggatgcggtacaacccc

SEQ ID NO: 557172 - DNA, 75 bp, synthetic construct
  source 1..75: mol_type = other DNA
ccagctggcacaggactatgtgcgcctgtcggcggaagggcaggatgtcgtggcccaggtgaccggtgcccggga

SEQ ID NO: 557173 - DNA, 75 bp, synthetic construct
  source 1..75: mol_type = other DNA
gtgagctgaagggagccatcaaagcgaaagagcagttcaccgtggcggggctggaaaaaggcgcggtacggctgc

SEQ ID NO: 557174 - DNA, 75 bp, synthetic construct
  source 1..75: mol_type = other DNA
gtgcggagaagctgggcctgaagggtgaagtcgtcaatgccgatatggatgcggtgcgtcagggtaaacttccgg

SEQ ID NO: 557175 - DNA, 75 bp, synthetic construct
  source 1..75: mol_type = other DNA
ctgtgctgaaagaagccggtattccgcagtaccggttttatagcacccaactaccggaggtgcgactggtcagtg

SEQ ID NO: 557176 - DNA, 75 bp, synthetic construct
  source 1..75: mol_type = other DNA
accgacacggaaaagaagccggggcgctgctgacggaaattcgtattgaggatgatggaatgcgcgtggtgctca

SEQ ID NO: 557177 - DNA, 75 bp, synthetic construct
  source 1..75: mol_type = other DNA
aagagcatcatccgccatattgctgagggtaaggatgccgtacagcccctgatgtcgctgacgcctgcttcggta

SEQ ID NO: 557178 - DNA, 75 bp, synthetic construct
  source 1..75: mol_type = other DNA
ggacctgctgaaggccgactggcgccggcggctggccgatgagaaattcgatatcgatggctacatcagtcaggc

SEQ ID NO: 557179 - DNA, 75 bp, synthetic construct
  source 1..75: mol_type = other DNA
tggtcaccctgcgtaataccgacggtgaatcggttctgatttcaccgcagcagaacactgctcaggatatttccc

SEQ ID NO: 557180 - DNA, 75 bp, synthetic construct
  source 1..75: mol_type = other DNA
tctggacccgtcacgggaaagaggcaggggcgctgctgacggaaattcgtattgaggatgacggaatgcgcgtgg

SEQ ID NO: 557181 - DNA, 75 bp, synthetic construct
  source 1..75: mol_type = other DNA
actacatcggcatcggctgcggtgcacatggcaaagtgagcttcccgaacgggcgcattctgcgtaccaccaaaa

SEQ ID NO: 557182 - DNA, 75 bp, synthetic construct
  source 1..75: mol_type = other DNA
gcggattactggcagataacggaacatgggaagctgtttttaaattcgctgctggagctttttctggctgagtaa

SEQ ID NO: 557183 - DNA, 75 bp, synthetic construct
  source 1..75: mol_type = other DNA
aacgacttggacgtattcatggcccgcaagaagcgaaacgggcggcaaatctggcaagcgggctggggctgcgta

SEQ ID NO: 557184 - DNA, 75 bp, synthetic construct
  source 1..75: mol_type = other DNA
tttatttaacacatattatggtgaaggcagtgctgaattatttactgaaaaaggacgtacctgtttacgtatgct

SEQ ID NO: 557185 - DNA, 75 bp, synthetic construct
  source 1..75: mol_type = other DNA
caaacccggttatcagtgccagcacaatctcaactactggcgctttggcgactacatcggtattggctgcggcgc

SEQ ID NO: 557186 - DNA, 75 bp, synthetic construct
  source 1..75: mol_type = other DNA
ctggcaagcgggctggggctgcgtagttttaatcttgatttgatgcacgggttgcctgatcaatcactggaagag

SEQ ID NO: 557187 - DNA, 75 bp, synthetic construct
  source 1..75: mol_type = other DNA
cgctggcgcagagcggcggtgacatccggatttatacgccactggaaaccggacaggctgcacgtaaagtggaga

SEQ ID NO: 557188 - DNA, 75 bp, synthetic construct
  source 1..75: mol_type = other DNA
gcgtaccgagcgtgagtgggtggtgaatgtaccggaaaaagacattgagctggaaaaaacgctcggtggggactg

SEQ ID NO: 557189 - DNA, 75 bp, synthetic construct
  source 1..75: mol_type = other DNA
ctgacaccggtaaccgcctgctggccaccgcctccccgctggataaaaccgcgctgggtcgccgggtgctggcgg

SEQ ID NO: 557190 - DNA, 75 bp, synthetic construct
  source 1..75: mol_type = other DNA
agacgaggctattgctcagggttatctcacagaatgtgcggattactggcagataacggaacatgggaagttgtt

SEQ ID NO: 557191 - DNA, 75 bp, synthetic construct
  source 1..75: mol_type = other DNA
ttgggaaagtttttcaatccctgtcattcttataatttgtgatcctcaaagtcgtcagtgctattggaatttagt

SEQ ID NO: 557192 - DNA, 75 bp, synthetic construct
  source 1..75: mol_type = other DNA
ggttactggaaacacaaatatcagattaccgactcggccctacgtttgctactgacgttcgcacctggcttgcag

SEQ ID NO: 557193 - DNA, 75 bp, synthetic construct
  source 1..75: mol_type = other DNA
ctgaaagagaccgtgctgctgcaggagaaagcgctcagcgccggggcacagctgatattcatggatacggagaac

SEQ ID NO: 557194 - DNA, 75 bp, synthetic construct
  source 1..75: mol_type = other DNA
ttggtcagttatccattgaagaacaagaaaatccacagcactggcaaacccggctgagcgatatttgctccggct

SEQ ID NO: 557195 - DNA, 75 bp, synthetic construct
  source 1..75: mol_type = other DNA
acctcgcagctcgatttgctgcctttggtcagttatccattgaagaacaagaaaatccacagcactggcaaaccc

SEQ ID NO: 557196 - DNA, 75 bp, synthetic construct
  source 1..75: mol_type = other DNA
gcagcgctttctgcattcgggatgacggcaagttgctggtgctcacctatctgcgcgatcagcaggttttcgcat

SEQ ID NO: 557197 - DNA, 75 bp, synthetic construct
  source 1..75: mol_type = other DNA
catcaccgccgcattagcctggtcattacaaatgttgggagaaaatgtcctggtggtcggcctgcccggacaact

SEQ ID NO: 557198 - DNA, 75 bp, synthetic construct
  source 1..75: mol_type = other DNA
cttgttgcgcctgtcatttaatgttgattttacccaccgtcagggctgggccagagcgatgctggatggccagga

SEQ ID NO: 557199 - DNA, 75 bp, synthetic construct
  source 1..75: mol_type = other DNA
aacttgttgcgcctgtcatttaacgttgattttacccaccgtcagggctgggccagagcgatgctggatggctag

SEQ ID NO: 557200 - DNA, 75 bp, synthetic construct
  source 1..75: mol_type = other DNA
tgttcatccaggagaaaggtagcgttgtgcgtgatctggcctactccttcgatgtcgacggatatcagggaacag

SEQ ID NO: 557201 - DNA, 75 bp, synthetic construct
  source 1..75: mol_type = other DNA
gttctgcaatcttcggtgctgaacaggttggaaaactgttctatctcgagcagcccgcggttgattccgtcccag

SEQ ID NO: 557202 - DNA, 75 bp, synthetic construct
  source 1..75: mol_type = other DNA
gttaaggtccgccaacttgatcctttgcctctgtcagtgctggctgttcttcctcgccttaccgtcggaggcttc

SEQ ID NO: 557203 - DNA, 75 bp, synthetic construct
  source 1..75: mol_type = other DNA
cagcaactgggataaaaacggacgcgttaaggttcgccagcttgacccactcccgctttctgttcttgctgtatt

SEQ ID NO: 557204 - DNA, 75 bp, synthetic construct
  source 1..75: mol_type = other DNA
ggtggttcagtcacgctggagtcaccaggtgcagttgtgcatatcggattgcctatcaccgctgaattcgaaaca

SEQ ID NO: 557205 - DNA, 75 bp, synthetic construct
  source 1..75: mol_type = other DNA
tcgtggttaaccgtactatcaatgggcagaccgtacgttacatcgaacgcctgtccagccgcctgtttaccagtg

SEQ ID NO: 557206 - DNA, 75 bp, synthetic construct
  source 1..75: mol_type = other DNA
ggccgaagtgccgaagaaggaagagccggccatgccgggtgctggcggtatgggcggcatgggcggcatggattt

SEQ ID NO: 557207 - DNA, 75 bp, synthetic construct
  source 1..75: mol_type = other DNA
ccgcagttgcatacccacgctctggtctttaacgccacgtttgccgatgagaaatggcggtcgctggccagcgat

SEQ ID NO: 557208 - DNA, 75 bp, synthetic construct
  source 1..75: mol_type = other DNA
gcgcggagaagctgggcctgaagggcgaagttgccagcgccgatatggatgctgtgcgtcagggtaaacttccgg

SEQ ID NO: 557209 - DNA, 75 bp, synthetic construct
  source 1..75: mol_type = other DNA
ccaccgcccactggttgctgacggaacgccctttcaaacatcaggagaaagattatctgctgtataaattcaacc

SEQ ID NO: 557210 - DNA, 75 bp, synthetic construct
  source 1..75: mol_type = other DNA
cctgttcctgaccgatgagagctcgatggtgggtaaccgcgatatggcagagctctaccaactggtggccgccgg

SEQ ID NO: 557211 - DNA, 75 bp, synthetic construct
  source 1..75: mol_type = other DNA
gaactcagcgtccatcagctggcgcgcacggccattcaggaacagaccgtgctggtctttcctgaacgggcacag

SEQ ID NO: 557212 - DNA, 75 bp, synthetic construct
  source 1..75: mol_type = other DNA
tggcgtatgagatggaaaagagcatcatccgccatattgccgagggtaaggatgccgttcagcccctgatggcgc

SEQ ID NO: 557213 - DNA, 75 bp, synthetic construct
  source 1..75: mol_type = other DNA
ggaaatttgcggtggcggtacgcacccatttcagaaatggcagcgtcaggaggtgtgcgataacgcacgctatca

SEQ ID NO: 557214 - DNA, 75 bp, synthetic construct
  source 1..75: mol_type = other DNA
aagcacgatatcaccgaaagtatgctggaactggcaactggtgtttgccgtgatatcaaccaggctgccgggcaa

SEQ ID NO: 557215 - DNA, 75 bp, synthetic construct
  source 1..75: mol_type = other DNA
tggcgacgtattagtgattggtcgtggggcggtattgatcggcatgtctgaacgcacaacaccgcagggcgtgga

SEQ ID NO: 557216 - DNA, 75 bp, synthetic construct
  source 1..75: mol_type = other DNA
ggaaatttgcggcggtggcacgcatccgtttcagaaatggcagcgtcaggaggtatgcgataacgaacgctatca

SEQ ID NO: 557217 - DNA, 75 bp, synthetic construct
  source 1..75: mol_type = other DNA
taccccgttaacccttagccatgcggtaaatatggcgggattgattcaggccaccgcccactggttactgacgga

SEQ ID NO: 557218 - DNA, 75 bp, synthetic construct
  source 1..75: mol_type = other DNA
gtcagcatgttcacgttggctgcgccagtggcgatgacgccatttatttgctacacggcttatcgcgctttgtgc

SEQ ID NO: 557219 - DNA, 75 bp, synthetic construct
  source 1..75: mol_type = other DNA
tgcccaacatcaccgccgggctggtcaccgagatcacccgcgcactgtcgatggcaattctcgatatcgccgcgc

SEQ ID NO: 557220 - DNA, 75 bp, synthetic construct
  source 1..75: mol_type = other DNA
atgccacacaggttcaggggctgtttcagcatttgcaggtcaggtttggtgacgggccgtggcaggatgttaagg

SEQ ID NO: 557221 - DNA, 75 bp, synthetic construct
  source 1..75: mol_type = other DNA
ggcggggttttcaccggttgttattcgcgaagttaatgaaccgcaaacggtgctggccatgatcagtatgggtat

SEQ ID NO: 557222 - DNA, 75 bp, synthetic construct
  source 1..75: mol_type = other DNA
atggaacgcgtatacagaacagatcttaagttgctccgttattttcttgccgtagcggaagagttgcattttggt

SEQ ID NO: 557223 - DNA, 75 bp, synthetic construct
  source 1..75: mol_type = other DNA
tttgcactaccgctaacgccgaagagtattatttcgaccccattatgctggaaactacaaaaagtggtatgcaaa

SEQ ID NO: 557224 - DNA, 75 bp, synthetic construct
  source 1..75: mol_type = other DNA
atgccacaacgacaccaccagggacataaacgcacaccgaaacagttggcgctcatcatcaaacgctgtttgccg

SEQ ID NO: 557225 - DNA, 75 bp, synthetic construct
  source 1..75: mol_type = other DNA
aggccgtaaaccgaatccccaccggtggtgggacctcccgggccaaaggggggaacagggggcccgcgggtccgt

SEQ ID NO: 557226 - DNA, 75 bp, synthetic construct
  source 1..75: mol_type = other DNA
cggcgaacggggaccggcaggtgatgctggtccggcaggcccgcaggggccgaaaggtgacaggggagagcgggg

SEQ ID NO: 557227 - DNA, 75 bp, synthetic construct
  source 1..75: mol_type = other DNA
gcgggtcctcaggggccgaagggtgataagggagagcgcggtgacaccggccctgtcggggcaaccggcgaacgg

SEQ ID NO: 557228 - DNA, 75 bp, synthetic construct
  source 1..75: mol_type = other DNA
cctcgtcctcggcttctgcggccgctcaaaaagccagtgagtcatcacaaagtgcagcagaagctgaattgtcaa

SEQ ID NO: 557229 - DNA, 75 bp, synthetic construct
  source 1..75: mol_type = other DNA
cgcgaagttaatgaaccgcaaacggtactcgccatggtcagtatgggtattggtatcacattgatagcggacagc

SEQ ID NO: 557230 - DNA, 75 bp, synthetic construct
  source 1..75: mol_type = other DNA
ggcgggtttttcaccggttgttattcgcgaagttaatgaaccacaaacggtgctggccatgatcagtatgggcat

SEQ ID NO: 557231 - DNA, 75 bp, synthetic construct
  source 1..75: mol_type = other DNA
ggggacggatgcggccggttatgcggcgattccttagggaaaaccccaacgttgaagtactgtttcgcgaaaaga

SEQ ID NO: 557232 - DNA, 75 bp, synthetic construct
  source 1..75: mol_type = other DNA
tctcagttgcttctgggagaaagcgccaccagcggcagtattttttccagctacacctttactggcgtgcaactc

SEQ ID NO: 557233 - DNA, 75 bp, synthetic construct
  source 1..75: mol_type = other DNA
gtgaacggggaccggcaggtgatgctggtccggcaggcccgcagggccgaaaggcgacaggggagagcggggaga

SEQ ID NO: 557234 - DNA, 75 bp, synthetic construct
  source 1..75: mol_type = other DNA
ggctggcccggtgggggcaaccgggacctcagggaccgaagggcgacccgggggagacacaaatccgttttcgtc

SEQ ID NO: 557235 - DNA, 75 bp, synthetic construct
  source 1..75: mol_type = other DNA
tttgcaggtcaggtttggtgacgggccgtggcaggatgttaaggggctgaatgaagtgggcagtgatacaggcag

SEQ ID NO: 557236 - DNA, 75 bp, synthetic construct
  source 1..75: mol_type = other DNA
cgcaacagaaaaagcccgggagtcaacagaaagcgcacagtcagcggaacaaagcaggatagcggcggaagaggc

SEQ ID NO: 557237 - DNA, 75 bp, synthetic construct
  source 1..75: mol_type = other DNA
tgcaggtccacagggtccaaagggagataccggtgcggcaggcccggcaggcccacagggaccgaaaggagaaac

SEQ ID NO: 557238 - DNA, 75 bp, synthetic construct
  source 1..75: mol_type = other DNA
aggcccggcaggcccacagggaccgaaaggagaaacaggtgtggctggcccggtaggagcaaccggacctcaggg

SEQ ID NO: 557239 - DNA, 75 bp, synthetic construct
  source 1..75: mol_type = other DNA
tcagcagaggatgcatcggagtcagcccggcaggcggcagaaagtgcagccgctgcaaagcagtcagaggaggcg

SEQ ID NO: 557240 - DNA, 75 bp, synthetic construct
  source 1..75: mol_type = other DNA
atctggcgtgaggatacaaaactatccggggattgctactgatccctttggctatgcagtggttccttatctcac

SEQ ID NO: 557241 - DNA, 75 bp, synthetic construct
  source 1..75: mol_type = other DNA
gcactgggcgcgttgtcgatggatatcaacagagctgacacccaattcgataaccggcactcttttcatggctat

SEQ ID NO: 557242 - DNA, 75 bp, synthetic construct
  source 1..75: mol_type = other DNA
gggagctgcagggccggcagggccacagggaccgaaaggggatacgggagctgcaggcccggcagggccacaggg

SEQ ID NO: 557243 - DNA, 75 bp, synthetic construct
  source 1..75: mol_type = other DNA
gggagctgcaggcccggcagggccacagggaccgaaaggggatacgggagctgcagggccggcaggtcctcaggg

SEQ ID NO: 557244 - DNA, 75 bp, synthetic construct
  source 1..75: mol_type = other DNA
agcagccaaaaaatcagaaaccaacgcgaaaaacagtgagacagccgcaaagacgagcgaaaccaacgcaaagtc

SEQ ID NO: 557245 - DNA, 75 bp, synthetic construct
  source 1..75: mol_type = other DNA
gtgggggcaaccggacctcagggaccgaagggcgacccgggggagacacaaatccgttttcgtctggggccggcg

SEQ ID NO: 557246 - DNA, 75 bp, synthetic construct
  source 1..75: mol_type = other DNA
gacaccggcccggcaggggcaaccggtgaacggggaccggcaggtgatgctggtccggcaggcccgcaggggccg

SEQ ID NO: 557247 - DNA, 75 bp, synthetic construct
  source 1..75: mol_type = other DNA
gcagcagatgctgaattgtcaagaaagacggcagaaagtgcagccggtaatgcagccagggatgcaacgaccgca

SEQ ID NO: 557248 - DNA, 75 bp, synthetic construct
  source 1..75: mol_type = other DNA
caaatccgttttcgtctggggccggcgagcattattgagacaaacagcaatggctggttcccggatacagatggc

SEQ ID NO: 557249 - DNA, 75 bp, synthetic construct
  source 1..75: mol_type = other DNA
acgctgaatgattttctcggtgccatgtcggaggatgacgtccggccggaggcactgcgccgttttgaactgatg

SEQ ID NO: 557250 - DNA, 75 bp, synthetic construct
  source 1..75: mol_type = other DNA
cgctgaattagagcgaagcaaagcggaacttgaaaagaccaccgccgaggtagctaaattcaaacaggcggtaat

SEQ ID NO: 557251 - DNA, 75 bp, synthetic construct
  source 1..75: mol_type = other DNA
tggtccggcaggcccgcaggggccgaaaggtgacatgggagagcggggagagaccggtctgacgggaaatgcagg

SEQ ID NO: 557252 - DNA, 75 bp, synthetic construct
  source 1..75: mol_type = other DNA
ctcagcatgcgcaagaatcatgtggagatattgcagagaattaacacggttcttgccgggcgcaccgatgaagag

SEQ ID NO: 557253 - DNA, 75 bp, synthetic construct
  source 1..75: mol_type = other DNA
gacgccgtaaaccgaatccccaccgtggtgggacctcccgggccaaagggggaacaggggcccgcgggtcctcag

SEQ ID NO: 557254 - DNA, 75 bp, synthetic construct
  source 1..75: mol_type = other DNA
ccggcgaacggggaccggcaggtgatgctggtccggcaggcccgcaggggccgaaaggtgacaggggagagcggg

SEQ ID NO: 557255 - DNA, 75 bp, synthetic construct
  source 1..75: mol_type = other DNA
aggggcccgctggccctcaggggccgaagggcgataagggagagcgtggtgacaccggccctgtcggggcaaccg

SEQ ID NO: 557256 - DNA, 75 bp, synthetic construct
  source 1..75: mol_type = other DNA
gctggtcctgcaggcccgcaggggccgaaaggtgacaggggagagcggggagagaccggtctgacgggaaatgca

SEQ ID NO: 557257 - DNA, 75 bp, synthetic construct
  source 1..75: mol_type = other DNA
agcatggacgttgagtacggtcagtacagcgtcattctgttggtggaaggattcccgccgtcacatgccgggacc

SEQ ID NO: 557258 - DNA, 75 bp, synthetic construct
  source 1..75: mol_type = other DNA
ataatgtatctcgttacctgagtatacgccgtttagggcaaccgggctacatacacaatgcgttacggcctggtt

SEQ ID NO: 557259 - DNA, 75 bp, synthetic construct
  source 1..75: mol_type = other DNA
cgggtatatcagccggccaggcggaaaagagtgcagtaaatgctgagacttctgcaggggatgcatcggagtcag

SEQ ID NO: 557260 - DNA, 75 bp, synthetic construct
  source 1..75: mol_type = other DNA
cgttgttgatgaaggggaaatgcgcctgattaatggcgtatggcaaaaatatgctggtggtcgctggattgaatc

SEQ ID NO: 557261 - DNA, 75 bp, synthetic construct
  source 1..75: mol_type = other DNA
ggcgacccgggggagacacaaatacggttccgtctggggccgggaaacattattgagacaaacagcaatggctgg

SEQ ID NO: 557262 - DNA, 75 bp, synthetic construct
  source 1..75: mol_type = other DNA
catttgcaggtcaggtttggtgacgggccatggcaggatgttaagggactggatgaagtgggcagtgatacaggc

SEQ ID NO: 557263 - DNA, 75 bp, synthetic construct
  source 1..75: mol_type = other DNA
ggtgcggcaggcccacagggaccgaaaggagaaacaggtgcggctggcccggtggggcaaccggacctcagggac

SEQ ID NO: 557264 - DNA, 75 bp, synthetic construct
  source 1..75: mol_type = other DNA
ctggatcagcaactgctgcggctaacagccagaaagctgcgaagacgagtgaaactaacgcaaagtccagccaga

SEQ ID NO: 557265 - DNA, 75 bp, synthetic construct
  source 1..75: mol_type = other DNA
aaatggataaggcgaaagctgcgcaacgcgctcgccagaaagaacaggctactatcgaccttcagaactacatca

SEQ ID NO: 557266 - DNA, 75 bp, synthetic construct
  source 1..75: mol_type = other DNA
gcgaacggggaccggcaggtgatgctggtccggcaggcccgcagggccgaaaggtgacagggagagcggggagag

SEQ ID NO: 557267 - DNA, 75 bp, synthetic construct
  source 1..75: mol_type = other DNA
atggcagtaaagatttcaggtgtactgaaagacggcacaggaaaaacggtagagaactgcaccattcaactgaaa

SEQ ID NO: 557268 - DNA, 75 bp, synthetic construct
  source 1..75: mol_type = other DNA
ggacctcccgggccaaagggggaacaggggcccgctggccctcaggggccgaagggtgataagggagagcgtggt

SEQ ID NO: 557269 - DNA, 75 bp, synthetic construct
  source 1..75: mol_type = other DNA
ggtcaggtttggtgacgggccgtggcaggatgtcaaggggctggatgaagtgggcagtgatacaggcagaacagg

SEQ ID NO: 557270 - DNA, 75 bp, synthetic construct
  source 1..75: mol_type = other DNA
aaaccgaaaccgtcctgcaactggcagagctgctctacggcggtcgccagtacctgaccaccatcaatatgtccg

SEQ ID NO: 557271 - DNA, 75 bp, synthetic construct
  source 1..75: mol_type = other DNA
atctaccgccgtctgtaccacgttctgcataaactgcgcggcgatgcccctttcccgctgttacaccaggacaaa

SEQ ID NO: 557272 - DNA, 75 bp, synthetic construct
  source 1..75: mol_type = other DNA
tgaagtcagtgaaggattttatgcagaagctggccagtgaactgaataacatgaatatctcctcctgtcaggccg

SEQ ID NO: 557273 - DNA, 75 bp, synthetic construct
  source 1..75: mol_type = other DNA
tggtgcgttcctgctggctggccccagcggcgtgggtaaaaccgaaaccgtcctgcaactggcggaactgctcta

SEQ ID NO: 557274 - DNA, 75 bp, synthetic construct
  source 1..75: mol_type = other DNA
gcacaggcatcagtgcggaggatttacgccaggcgctgaccgtggagagttatcccggtggacgttccgccgaag

SEQ ID NO: 557275 - DNA, 75 bp, synthetic construct
  source 1..75: mol_type = other DNA
aaccgtcctgcaactggcagagctgctctacggcggtcgccagtacctgaccaccatcaatatgtccgagttcca

SEQ ID NO: 557276 - DNA, 75 bp, synthetic construct
  source 1..75: mol_type = other DNA
tgggcgcggcatcctgggcttcggcaccgggctgggtaaaaccacgaccgcgctggcgcttgaggcgttcaacta

SEQ ID NO: 557277 - DNA, 75 bp, synthetic construct
  source 1..75: mol_type = other DNA
ggcagcctgagttcacagataaaacactctccaggaaacccggggcggttcacaccggtgaccatcagccgggat

SEQ ID NO: 557278 - DNA, 75 bp, synthetic construct
  source 1..75: mol_type = other DNA
cttttttgaccttgccctgcagacaacggtgccggaaataaaaaccgcaaaagacttcctgcagaaaatggcaag

SEQ ID NO: 557279 - DNA, 75 bp, synthetic construct
  source 1..75: mol_type = other DNA
cagtgtccctattctgcgttatctggttgacccgcagatgctgaatatatccacgttctacccgtcactctccga

SEQ ID NO: 557280 - DNA, 75 bp, synthetic construct
  source 1..75: mol_type = other DNA
gaatcaaacgctctggtgacgctggtcaaaaatctgatgctctcaatgcagaacaagcttgttgatgacacggcg

SEQ ID NO: 557281 - DNA, 75 bp, synthetic construct
  source 1..75: mol_type = other DNA
tgaccgtcagatgagctacatgcgccagcagctgtccgcccgcatgctcagccgttaccagaacaactatcactt

SEQ ID NO: 557282 - DNA, 75 bp, synthetic construct
  source 1..75: mol_type = other DNA
cgcgcggaaaacggcgcgaggatgctggaatcggttatcgacggcgacatgctgccgccgctctcgctgctgctg

SEQ ID NO: 557283 - DNA, 75 bp, synthetic construct
  source 1..75: mol_type = other DNA
ctgggctttgcgtccaacaccacccagccgggcgtctggcagggacaggctgccgggtatgcctatggaggctcc

SEQ ID NO: 557284 - DNA, 75 bp, synthetic construct
  source 1..75: mol_type = other DNA
ttacgacatcctgctgcagtacattcaggagctgatacagcaggcccgggcgatggtggccacagggaaattatg

SEQ ID NO: 557285 - DNA, 75 bp, synthetic construct
  source 1..75: mol_type = other DNA
aacagcgacatgaatcagttctttaacaagctgggcttcgcttccaataccacacagccgggcgtctggcagggg

SEQ ID NO: 557286 - DNA, 75 bp, synthetic construct
  source 1..75: mol_type = other DNA
ggcaccgcgaaaatttatcactgcaatgattcggataagtgcctcaaagtggtggccgatgcgaatgtgaccatc

SEQ ID NO: 557287 - DNA, 75 bp, synthetic construct
  source 1..75: mol_type = other DNA
tttaccagctgacggactatatcggatacgacatcatgctccagtacattcaggaactgcttcagcaggcccggg

SEQ ID NO: 557288 - DNA, 75 bp, synthetic construct
  source 1..75: mol_type = other DNA
tatcactgcaacgattctgataaatgcctgaaagtggtggcagacacaccggtgaccatcagccgggataatgca

SEQ ID NO: 557289 - DNA, 75 bp, synthetic construct
  source 1..75: mol_type = other DNA
ccgtgacattttcttcagtaaacagaacggtctgggaacatcctttgccgtggaaacggtatcgctctccggcaa

SEQ ID NO: 557290 - DNA, 75 bp, synthetic construct
  source 1..75: mol_type = other DNA
tgtttacatctgccgatgacaacaaactggttgttccacagtttcttacccgttacggcctgcaaagctattttg

SEQ ID NO: 557291 - DNA, 75 bp, synthetic construct
  source 1..75: mol_type = other DNA
gagatgtcggtcatccccgccctgccggtatggctgggtgacaccatcaaaggccaggacctggcgattgccagc

SEQ ID NO: 557292 - DNA, 75 bp, synthetic construct
  source 1..75: mol_type = other DNA
agtgagtgacactccgcttgacgcccgggaacaggggtttatttccagcaccaccattcccgtttttaaatatct

SEQ ID NO: 557293 - DNA, 75 bp, synthetic construct
  source 1..75: mol_type = other DNA
atgcggacgtgattattgagtcggaagtgacggacgagatcatgagccgcgtcacccgcgcggaaaacggcgcaa

SEQ ID NO: 557294 - DNA, 75 bp, synthetic construct
  source 1..75: mol_type = other DNA
gcgcagttccgtctgttcggggccggacaactgaccggagtacaggatggcaactttaccgtgcgctttagcgtg

SEQ ID NO: 557295 - DNA, 75 bp, synthetic construct
  source 1..75: mol_type = other DNA
acagctaaaatctaccactgcaatgactcggataaatgtctcaaggtcgttgctgatgcgaccgtgaccatcacc

SEQ ID NO: 557296 - DNA, 75 bp, synthetic construct
  source 1..75: mol_type = other DNA
gaccgaggtgctggtgcagtatgatgaaacgctgacggcgctggatgaactggaagcggcctggcaccagcagca

SEQ ID NO: 557297 - DNA, 75 bp, synthetic construct
  source 1..75: mol_type = other DNA
cgcagggaccgaaaggggaaacaggtgcggctggcccggtgggggctaccggacctcagggggcgaagggcgacc

SEQ ID NO: 557298 - DNA, 75 bp, synthetic construct
  source 1..75: mol_type = other DNA
agggaccgaaaggggaaacaggtgcgtctggcccggtgggggctaccggacctcagggaccgaagggtgacccgg

SEQ ID NO: 557299 - DNA, 75 bp, synthetic construct
  source 1..75: mol_type = other DNA
ttccggcatatgctacgactacggtcatgagttctcgtatgttattggaatggcgagagacgttttaattaatca

SEQ ID NO: 557300 - DNA, 75 bp, synthetic construct
  source 1..75: mol_type = other DNA
ccttctggcatgatttagcgtctccggtcattgatgacattcttgccagtatgatcgtgaactggctgaacaagc

SEQ ID NO: 557301 - DNA, 75 bp, synthetic construct
  source 1..75: mol_type = other DNA
acgttggctacggtgaaggcggcgtactgaccgaagcgattcgccagaaaccctactcggtagtactgctcgatg

SEQ ID NO: 557302 - DNA, 75 bp, synthetic construct
  source 1..75: mol_type = other DNA
cacatggcgcgaatctttctgattcatgctctatctttctgcgccgtcttttccgtgccggtgataatgttttgg

SEQ ID NO: 557303 - DNA, 75 bp, synthetic construct
  source 1..75: mol_type = other DNA
acctaaaacatatagtgggccacaccttaaaattatcaaggcgcataaatgcaaagccccgcaagtgtcgttacc

SEQ ID NO: 557304 - DNA, 75 bp, synthetic construct
  source 1..75: mol_type = other DNA
cgaacggggaccggcaggtgatgctggtccggcaggcccgcaggggccgaaaggtgacaggggagagcggggaga

SEQ ID NO: 557305 - DNA, 75 bp, synthetic construct
  source 1..75: mol_type = other DNA
cccggtgggggcaaccggacctcagggaccgaagggcgacccgggggagacacaaatccgttttcgtctggggcc

SEQ ID NO: 557306 - DNA, 75 bp, synthetic construct
  source 1..75: mol_type = other DNA
gcccgcgggtcctcaggggccgaagggagataaaggagagcgtggtgacaccggccctgtcggggcaaccggcga

SEQ ID NO: 557307 - DNA, 75 bp, synthetic construct
  source 1..75: mol_type = other DNA
ttacagcatggacgttgagtacggtcagtacagcgtcattctgttggtggaaggattcccgccgtcacatgccgg

SEQ ID NO: 557308 - DNA, 75 bp, synthetic construct
  source 1..75: mol_type = other DNA
gggaagcacttctttaaagctgttggtgatgaactcaaaaatttgcgactagttttaaacgagtcacaaaatgag

SEQ ID NO: 557309 - DNA, 75 bp, synthetic construct
  source 1..75: mol_type = other DNA
ccttgtcagccagaaccactgaccgctcaattatccgggccatgatggaaggcggcacagcaaaaatttatcact

SEQ ID NO: 557310 - DNA, 75 bp, synthetic construct
  source 1..75: mol_type = other DNA
tggctgggtcagcactgatacattcctggctggctacggcgctgcccaggccgttcctggaccgttgttcacttt

SEQ ID NO: 557311 - DNA, 75 bp, synthetic construct
  source 1..75: mol_type = other DNA
atggggcatggcccgaaatctttgcccggatataccgcgtattactgtcatggcagtggcaacctgctttgtgct

SEQ ID NO: 557312 - DNA, 75 bp, synthetic construct
  source 1..75: mol_type = other DNA
attagagccatgatggagggcggcacggctaaaatctaccactgcaatgattcggataagtgtcttaaggtcgtt

SEQ ID NO: 557313 - DNA, 75 bp, synthetic construct
  source 1..75: mol_type = other DNA
gctgtctggcaggggcaggcggcaggctatgccaccggcggcaatctgttcttacgcaatcaggtgaataccctg

SEQ ID NO: 557314 - DNA, 75 bp, synthetic construct
  source 1..75: mol_type = other DNA
cgatatttatctgcagtatctggaagctgtcatgaaggtggtcaatggttcactggctaccaaagactatccggg

SEQ ID NO: 557315 - DNA, 75 bp, synthetic construct
  source 1..75: mol_type = other DNA
acgagatgttgatattaatgagccagacggaccaacgaatctttccgcatgggtaaggcttaagaacaaagaatt

SEQ ID NO: 557316 - DNA, 75 bp, synthetic construct
  source 1..75: mol_type = other DNA
gcgtgggaagtgttcgaaaaactggaagactgctatttcagccagtgcgagaaaaatactggcaaacaagagaag

SEQ ID NO: 557317 - DNA, 75 bp, synthetic construct
  source 1..75: mol_type = other DNA
agccagacggaccaacgaaccttctggcatgggaaaggcttaagaacaaagaattgccgccttcactgcatcgct

SEQ ID NO: 557318 - DNA, 75 bp, synthetic construct
  source 1..75: mol_type = other DNA
ctatgctgacttggtcgcgctttgtcagttcttgccagggcctgcaagcagccaggtcggcatagcggtaggact

SEQ ID NO: 557319 - DNA, 75 bp, synthetic construct
  source 1..75: mol_type = other DNA
gtggccgtggtcgctcaagcagtatggggcatggcgcgtaacctatgcacggatgggctgcgagtcaccatcatg

SEQ ID NO: 557320 - DNA, 75 bp, synthetic construct
  source 1..75: mol_type = other DNA
tggcacagatgatggcaaacgcactgcgtttgtctgggattccgggaagcgccgttaccgacgggcgccggagaa

SEQ ID NO: 557321 - DNA, 75 bp, synthetic construct
  source 1..75: mol_type = other DNA
acataaatcctcgtttctggtggcgataccggaagatcatcatctggcatcgagaacagctattcccctaactgc

SEQ ID NO: 557322 - DNA, 75 bp, synthetic construct
  source 1..75: mol_type = other DNA
cgctggcacgagtagagcagataggtcgcggcgaagcagggcgtattgagttgggcgtggtgggaacagccatgt

SEQ ID NO: 557323 - DNA, 75 bp, synthetic construct
  source 1..75: mol_type = other DNA
tgcccgcgatgcaaatggccctgctggaacgacgtgaactcgatgccgggatctggcgaatggcgacagaaccac

SEQ ID NO: 557324 - DNA, 75 bp, synthetic construct
  source 1..75: mol_type = other DNA
agaaacgtccgccaggtacgctacgtaccgcctggcgcaaattctacagtgatgcctctgcgatggtcggcttgt

SEQ ID NO: 557325 - DNA, 75 bp, synthetic construct
  source 1..75: mol_type = other DNA
atgtcgccccgtggactgtcatgctgccaggtgcggcaattatgattagcgtgttgttggttaacctccttggcg

SEQ ID NO: 557326 - DNA, 75 bp, synthetic construct
  source 1..75: mol_type = other DNA
tagattctgtttctggtggtgcttcagggcgtgatattgcgatggctataggagggggccgcttggaaaacggaa

SEQ ID NO: 557327 - DNA, 75 bp, synthetic construct
  source 1..75: mol_type = other DNA
caggtttctggaataacacccgatatggcgctgaattttatcagttgatcacgatgttcggtgcaggcggtcgcc

SEQ ID NO: 557328 - DNA, 75 bp, synthetic construct
  source 1..75: mol_type = other DNA
tcacgctggtggacgtggcaaccggcgaatgggctacctggtcgccggtaaattatgaatataaagtgcttccac

SEQ ID NO: 557329 - DNA, 75 bp, synthetic construct
  source 1..75: mol_type = other DNA
tgaccgataaagatctttttggaaatgaaaccacgctggcagtttcggaggaggatattcaggcggcgcttgatg

SEQ ID NO: 557330 - DNA, 75 bp, synthetic construct
  source 1..75: mol_type = other DNA
taacagccatcggtgtcggtattgtaggggtcgtctcagaaaacggaatctatggtcactcccgtttttgcaaca

SEQ ID NO: 557331 - DNA, 75 bp, synthetic construct
  source 1..75: mol_type = other DNA
aaatcgggttccgtctgaatctggccgataaactgctgagcgaaaatgtcaccggcaaaaagttgtttccgtact

SEQ ID NO: 557332 - DNA, 75 bp, synthetic construct
  source 1..75: mol_type = other DNA
aaagtttgccagcggtaagtgattttcgacgcgacttcccgcagtttgctgacccggcaaaatatcccgacgccc

SEQ ID NO: 557333 - DNA, 75 bp, synthetic construct
  source 1..75: mol_type = other DNA
gctgcctggtgcggcaatcatgatcagcgtattgctggtgaatctgctgggtgatggcgtacgtcgcgcgattat

SEQ ID NO: 557334 - DNA, 75 bp, synthetic construct
  source 1..75: mol_type = other DNA
cgcgttcccggcgcgcaaattgtcgctaatcaggaagggactgttttagataaagcgatttctgtcggtgaaaaa

SEQ ID NO: 557335 - DNA, 75 bp, synthetic construct
  source 1..75: mol_type = other DNA
gtaatataattttaatagctacgcttttgggtagcgcactattcgccagggctgcggaaaaagaaatgaccattg

SEQ ID NO: 557336 - DNA, 75 bp, synthetic construct
  source 1..75: mol_type = other DNA
cacaagtctaaaggacttgaatttaaaatagtattgcatttggatatggatgaatggtcttttccatatagaaca

SEQ ID NO: 557337 - DNA, 75 bp, synthetic construct
  source 1..75: mol_type = other DNA
tctgaaaatggcagtagccgtaccgttcgtcgcgccagtgaagcgggtattccggtgatttgctacaacacctgt

SEQ ID NO: 557338 - DNA, 75 bp, synthetic construct
  source 1..75: mol_type = other DNA
tgaaagcggtagtggatatttccggtaagaaaatgggcaatgctgttttcgcgcaaacattgaaggttatcaata

SEQ ID NO: 557339 - DNA, 75 bp, synthetic construct
  source 1..75: mol_type = other DNA
ccttcaggcgggattcatacagcggccagccatccgtcatccatatcaccaaaaactgggtaacgctgccgccga

SEQ ID NO: 557340 - DNA, 75 bp, synthetic construct
  source 1..75: mol_type = other DNA
ggatgagcagcatgacgattaccgctggctgacgccggacgcgctgctcgccagtgacaatgttcacgctaacag

SEQ ID NO: 557341 - DNA, 75 bp, synthetic construct
  source 1..75: mol_type = other DNA
gcgtctggcagcatttttatgacgataacttctccggtacagatttcaccacccactatgtggtgctcggttttc

SEQ ID NO: 557342 - DNA, 75 bp, synthetic construct
  source 1..75: mol_type = other DNA
tggaagccgcatttgagcggctgacgatggcggaactggggctgcgtctgccgataacagcaggccagttttacg

SEQ ID NO: 557343 - DNA, 75 bp, synthetic construct
  source 1..75: mol_type = other DNA
tcaattatttttaaaaataaatgagatcggtttatgttctattgctgttggtgatgtttggcaatcaatttatga

SEQ ID NO: 557344 - DNA, 75 bp, synthetic construct
  source 1..75: mol_type = other DNA
tctgttggaaaagttgctgagatatgcggttatgaaaacacgtcatattttgtaagtgttttcagaagatatttt

SEQ ID NO: 557345 - DNA, 75 bp, synthetic construct
  source 1..75: mol_type = other DNA
agcaaaaccgtggatgtagttagaaatcaaatatcacttgcatgtcttgctgtcttatcttcagagaaaatagtg

SEQ ID NO: 557346 - DNA, 75 bp, synthetic construct
  source 1..75: mol_type = other DNA
acctgaacacaatgcagctggagcaggaccagacaccttaaataaaggcggaccagaaaagaaaaattcggcagt

SEQ ID NO: 557347 - DNA, 75 bp, synthetic construct
  source 1..75: mol_type = other DNA
tttgagctttgcaaaacacaaggggttgtggcagctcttttacctgggggacttattcgttctcaaggtacacag

SEQ ID NO: 557348 - DNA, 75 bp, synthetic construct
  source 1..75: mol_type = other DNA
ggtgagttgataagaattcggcttgtagatattgatgccccggagaaaagccagccgttcggacagagagccaaa

SEQ ID NO: 557349 - DNA, 75 bp, synthetic construct
  source 1..75: mol_type = other DNA
atgcgaaataaggttaatttattattcatcgcggctttagctataccgttttattccttttcatcaactacaacc

SEQ ID NO: 557350 - DNA, 75 bp, synthetic construct
  source 1..75: mol_type = other DNA
ccggcaatatctgctggctgcaatgcaggattcggggatgcacctgccggggaatatccaggaactgattcacca

SEQ ID NO: 557351 - DNA, 75 bp, synthetic construct
  source 1..75: mol_type = other DNA
cagaacagataagatgtttaactgtaaggtaaacgtttctggctacaggccgtggcgccggggagaagcagagct

SEQ ID NO: 557352 - DNA, 75 bp, synthetic construct
  source 1..75: mol_type = other DNA
tggtcttgaccagcggctggctctctttggtcagttctatcccaagcatgaaaaggctaatttcctgaatctgag

SEQ ID NO: 557353 - DNA, 75 bp, synthetic construct
  source 1..75: mol_type = other DNA
gccctttaaaaaagtgccggcttactggtttcatcccggactgacttatctgaaagggcggtttggggagaggtt

SEQ ID NO: 557354 - DNA, 75 bp, synthetic construct
  source 1..75: mol_type = other DNA
gtattaatcgcatccagagaaactaaaggggccattcccggtagttacagtgcagttattgatatgcctagtggt

SEQ ID NO: 557355 - DNA, 75 bp, synthetic construct
  source 1..75: mol_type = other DNA
caatattacccgtcatactgatgatatgtatcattacttctttattctgggttgttatttatgctcgcggcaaat

SEQ ID NO: 557356 - DNA, 75 bp, synthetic construct
  source 1..75: mol_type = other DNA
ggtttcgactattttaaatatcaaaaagaattcaacaaaccatatgaaaaacatatttttattgatattctaaat

SEQ ID NO: 557357 - DNA, 75 bp, synthetic construct
  source 1..75: mol_type = other DNA
actggtaactcatcaatcaatccccaattctggattgataaagataaactttcactacaaacacgtgaaaggata

SEQ ID NO: 557358 - DNA, 75 bp, synthetic construct
  source 1..75: mol_type = other DNA
tctggcaggtcagaaaggatgaagcaatatcaaatggtgcaattgcttatatatcctctcagactatttttaaag

SEQ ID NO: 557359 - DNA, 75 bp, synthetic construct
  source 1..75: mol_type = other DNA
gggcgttaccaggaagcatgcgacattctgggaaaacgttatggagttcaggctcgcgttgcagcaccgggtaca

SEQ ID NO: 557360 - DNA, 75 bp, synthetic construct
  source 1..75: mol_type = other DNA
atgatgtttttacgtcaggaagactttgccacggtagtgcgctccactccgcttgtctctctcgattttatagtc

SEQ ID NO: 557361 - DNA, 75 bp, synthetic construct
  source 1..75: mol_type = other DNA
gattaccgctggctgacgccggacgcgctgctcgccagtgacaatgttcacgctaacagccgcgcctattttctc

SEQ ID NO: 557362 - DNA, 75 bp, synthetic construct
  source 1..75: mol_type = other DNA
tcaacagtatggtccgactataaaaatgaaaaactcactgacgctatctccctgcgctacctggtacgtttcacg

SEQ ID NO: 557363 - DNA, 75 bp, synthetic construct
  source 1..75: mol_type = other DNA
ttggctctaccgttgaatcccttgctatgcgctatcaacggtctagcactgctattcgtaaccagcttaaaatcc

SEQ ID NO: 557364 - DNA, 75 bp, synthetic construct
  source 1..75: mol_type = other DNA
gctgaacactataataatttagctggatttagtgaacaatactatatgtattgtgaagatatagatatttgttat

SEQ ID NO: 557365 - DNA, 75 bp, synthetic construct
  source 1..75: mol_type = other DNA
cccatgggcatattgagcttattaaaaaattaggatgtctaaataaattagcagaggaatttaccgttatagtaa

SEQ ID NO: 557366 - DNA, 75 bp, synthetic construct
  source 1..75: mol_type = other DNA
atgatgtttttacgtcaggaagactttgccacggtagtgcgctccacaccgcttgtctctctcgattttattgtc

SEQ ID NO: 557367 - DNA, 75 bp, synthetic construct
  source 1..75: mol_type = other DNA
ccaccgtggtgcagtctacgccgctgatctccatcgatttgatcgtcgagaacgcgcagggcgagtttttgctgg

SEQ ID NO: 557368 - DNA, 75 bp, synthetic construct
  source 1..75: mol_type = other DNA
ttgtttatttggtgcttttgccgctgcttctgtcgggtatcgctgaagaacaattgtggcgttacggaatattca

SEQ ID NO: 557369 - DNA, 75 bp, synthetic construct
  source 1..75: mol_type = other DNA
tatgtgcagcaacatttttactggctggctgtgcgccacgctcccccattgatgcgaagaaaacgggcgcatccg

SEQ ID NO: 557370 - DNA, 75 bp, synthetic construct
  source 1..75: mol_type = other DNA
tggcggaactggggctgcgtctgccgataacagcaggccagttttacggtgtctggcagcacttttatgacgata

SEQ ID NO: 557371 - DNA, 75 bp, synthetic construct
  source 1..75: mol_type = other DNA
gattaccgctggctgacgccggatgcgctgctggccagtgacaatgttcaccctaacagccgtgcctattttctc

SEQ ID NO: 557372 - DNA, 75 bp, synthetic construct
  source 1..75: mol_type = other DNA
tgctgtgccacgactgcggctggattgccgaatgcccacgttgcgatcactactacacgctgcatcaggcacagc

SEQ ID NO: 557373 - DNA, 75 bp, synthetic construct
  source 1..75: mol_type = other DNA
gtgacgctggtggcattactggacgtggacggcgcgctgttttctgccgatttccgctcggcggagcgttttgcc

SEQ ID NO: 557374 - DNA, 75 bp, synthetic construct
  source 1..75: mol_type = other DNA
aactgaaagcggtgggagaagtgctggacagtgagccggtgtttactcactccgtctggcgattattgctatggg

SEQ ID NO: 557375 - DNA, 75 bp, synthetic construct
  source 1..75: mol_type = other DNA
ctggcacttattaatacaataccggattcccgcaaggtgaaatgggtactggatgttgatccgattgagggttaa

SEQ ID NO: 557376 - DNA, 75 bp, synthetic construct
  source 1..75: mol_type = other DNA
cagctttacactcaggtcgctggtcgtgcggggcgtgcaggtaaacagggtgaggtggtgctgcaaacacaccat

SEQ ID NO: 557377 - DNA, 75 bp, synthetic construct
  source 1..75: mol_type = other DNA
tgtccgtcctgcggctctacgcacctgatgccggtggggctgggcactgagcagcttgaacagacgcttgcgccg

SEQ ID NO: 557378 - DNA, 75 bp, synthetic construct
  source 1..75: mol_type = other DNA
gtggtcgctggcgctggcaaattttgttgcagcacccttcccgcgtgcgattacagcacatcatcaatggtacgc

SEQ ID NO: 557379 - DNA, 75 bp, synthetic construct
  source 1..75: mol_type = other DNA
gcggaagtgcatcgcggcggcgcgaggatcttgattggcacgcaaatgctggcgaaaggtcaccactttcccgga

SEQ ID NO: 557380 - DNA, 75 bp, synthetic construct
  source 1..75: mol_type = other DNA
gctggctccggcgttaatcacccgtatgcgccagcatttacaggccgacaaccaggttatcctctttcttaaccg

SEQ ID NO: 557381 - DNA, 75 bp, synthetic construct
  source 1..75: mol_type = other DNA
ccgcgctggaaacgttatgcaacgtccagcagaaaaaataccgcctgctgcgcctgacccgtcgggcggggaatg

SEQ ID NO: 557382 - DNA, 75 bp, synthetic construct
  source 1..75: mol_type = other DNA
gtgccgggcgtgcgggtaaacagggcgaagtggtgctgcaaacgcaccatccggaacatcctctgttgcaaacgt

SEQ ID NO: 557383 - DNA, 75 bp, synthetic construct
  source 1..75: mol_type = other DNA
ttgcaacacatcattagtggtacgctggcactcatcaatacaataccggattcccgtaaggtgaaatgggtgctg

SEQ ID NO: 557384 - DNA, 75 bp, synthetic construct
  source 1..75: mol_type = other DNA
ccgattattcttggctccgcaacgcccgcactggaaacgttatgcaacgtccagcagaaaaaataccgcctgctg

SEQ ID NO: 557385 - DNA, 75 bp, synthetic construct
  source 1..75: mol_type = other DNA
cgactctgaaaagcacggtagaggcgatctgggcgggaattaaagcaaccgaagctgcggttagcgaagagtttg

SEQ ID NO: 557386 - DNA, 75 bp, synthetic construct
  source 1..75: mol_type = other DNA
actggaagatgcgtttgagctttcttcaatgggtatccgtgtggatgccgagacgttgaaacatcaactggcgct

SEQ ID NO: 557387 - DNA, 75 bp, synthetic construct
  source 1..75: mol_type = other DNA
gaccggtgacgaagatcgcctgcagctggagtggcatcaggcgctgctgcgcggtgaaatgccgcagaccatcgg

SEQ ID NO: 557388 - DNA, 75 bp, synthetic construct
  source 1..75: mol_type = other DNA
atggctggttcccggatacagatggcgcactcatcaccggactgacctttcttgaccccaaagatgccacacagg

SEQ ID NO: 557389 - DNA, 75 bp, synthetic construct
  source 1..75: mol_type = other DNA
aaaaaagtgctgccgctgcagagtcctcaaaaagcgcggcagctaccagtgccgctgccgcgaaaacgtcagaaa

SEQ ID NO: 557390 - DNA, 75 bp, synthetic construct
  source 1..75: mol_type = other DNA
ttcccgccgtcacatgccgggaccatcaccgtgtatgaagattctcaaccggggacgctgaatgattttctcggt

SEQ ID NO: 557391 - DNA, 75 bp, synthetic construct
  source 1..75: mol_type = other DNA
gcaattgtgcgggaggctcttcttcgtgattttaatactccaccctttaaaaaagtgccggcttactggcttcat

SEQ ID NO: 557392 - DNA, 75 bp, synthetic construct
  source 1..75: mol_type = other DNA
aagcaaaacgtaacagtaccacggtggtggtgaacacggtggcttcagaaaacccggatgaagccgggcgttaca

SEQ ID NO: 557393 - DNA, 75 bp, synthetic construct
  source 1..75: mol_type = other DNA
tgccatgacggaagaggatgtcatgccggaggcattgcgtcgttttgaggtaatggtggaggatgtggcacgcaa

SEQ ID NO: 557394 - DNA, 75 bp, synthetic construct
  source 1..75: mol_type = other DNA
caggggctgatgcagcgcattggtcgctgcatgggatatctgcagctggcggcagagattgaagcacttgcctgt

SEQ ID NO: 557395 - DNA, 75 bp, synthetic construct
  source 1..75: mol_type = other DNA
cggaggatgacgtccggccggaggcactgcgccgttttgaactgatggtggaagaggtggcgcgtcacgctgagg

SEQ ID NO: 557396 - DNA, 75 bp, synthetic construct
  source 1..75: mol_type = other DNA
cgtcgttttgaactgatggtggaagaagcggcgcgtcacgctgaggaggcgaagaagaatgccggagaggcggag

SEQ ID NO: 557397 - DNA, 75 bp, synthetic construct
  source 1..75: mol_type = other DNA
tttctcgtatcgaccgcgataccaccagccgcaaaggggcgctggaacagcaactggcggaagtgcatcgcggcg

SEQ ID NO: 557398 - DNA, 75 bp, synthetic construct
  source 1..75: mol_type = other DNA
tgggatgtcgatagtctggaaaacgccattcgctttgggttaaacaaggtgcgcgaggaagggattcgtatcgat

SEQ ID NO: 557399 - DNA, 75 bp, synthetic construct
  source 1..75: mol_type = other DNA
tgggatgtggatagcctggaaagtgccattcgccttggattaaacaaggtgtgcgaggaagggattcgtatcgat

SEQ ID NO: 557400 - DNA, 75 bp, synthetic construct
  source 1..75: mol_type = other DNA
aacaaagcctggtttggtcgcccgacgcatccgggtaatgtcattgggcactggatttgcccgcagggtaatgag

SEQ ID NO: 557401 - DNA, 75 bp, synthetic construct
  source 1..75: mol_type = other DNA
ctgatgcagcgcattggtcgctgcatgggatatctgcagctggcggcagagattgaagcacttgcctgtggtgct

SEQ ID NO: 557402 - DNA, 75 bp, synthetic construct
  source 1..75: mol_type = other DNA
tgaccacctttacccctaatcctgacagtgaaattgcccactatgtggcgcagattcactctacacgacagacaa

SEQ ID NO: 557403 - DNA, 75 bp, synthetic construct
  source 1..75: mol_type = other DNA
gaatgccgcagcctgacgctgcgtgaaattcatcgttttaacaatggcctgcatagccagaacggctatgtcacc

SEQ ID NO: 557404 - DNA, 75 bp, synthetic construct
  source 1..75: mol_type = other DNA
gtttgtgagttatagcaatatgctgaaaacggccgagggcatgaagcctctgcataagctgttaatgctcgacgg

SEQ ID NO: 557405 - DNA, 75 bp, synthetic construct
  source 1..75: mol_type = other DNA
cgcacaaattgtcgctaatcaggaaggcactgttttagataaagcgattttcgttggtgaaaaactgattatctc

SEQ ID NO: 557406 - DNA, 75 bp, synthetic construct
  source 1..75: mol_type = other DNA
gctgcggaaaaagaaatgaccattggcgcaatataccttgatactcaggggtactacgctggagtgcgtcagggc

SEQ ID NO: 557407 - DNA, 75 bp, synthetic construct
  source 1..75: mol_type = other DNA
cggtattcgggtgatcgccgggcctgttgaagcctcaacgctcggcaatatcggcatccagttaatgacgctgga

SEQ ID NO: 557408 - DNA, 75 bp, synthetic construct
  source 1..75: mol_type = other DNA
gggcggttcgtcgatcgaactggcggaagcggaatatatggtgcgcgccagcggctatctgcaaacgctcgacga

SEQ ID NO: 557409 - DNA, 75 bp, synthetic construct
  source 1..75: mol_type = other DNA
atctgttgaagtggggccggcgctgtttatcagtctgctgattatcacgctgtcgtttatcccgattttcaccct

SEQ ID NO: 557410 - DNA, 75 bp, synthetic construct
  source 1..75: mol_type = other DNA
gggagttttctaatgttgcggggggtaatgaagagttcgaaatagaggtttcaggtaagtatatttctaatgatg

SEQ ID NO: 557411 - DNA, 75 bp, synthetic construct
  source 1..75: mol_type = other DNA
accgtttcccgaaaaccctgtcagagcagaaccgcattattggactgccccttgatgaagctatccccgcagcgg

SEQ ID NO: 557412 - DNA, 75 bp, synthetic construct
  source 1..75: mol_type = other DNA
gttgttggcttactggtgatgcaaaatgccatcggcattgggatggctagcctgttagggcttgatccgctgatg

SEQ ID NO: 557413 - DNA, 75 bp, synthetic construct
  source 1..75: mol_type = other DNA
tgtggtggggattttcctcatcgtggttgttggcctgttggtgatgcaaaatgctatcggcattgggatggcaag

SEQ ID NO: 557414 - DNA, 75 bp, synthetic construct
  source 1..75: mol_type = other DNA
atcggcacccgctccgcgctgtttacgccgtttaaaaatctcggcgtgattgtcattgatgaagagcacgacagt

SEQ ID NO: 557415 - DNA, 75 bp, synthetic construct
  source 1..75: mol_type = other DNA
ccgttccgcttcctcgtacctttgactatctgctgccagaaggcatgacggttaaagccgggtgtcgcgtgcgcg

SEQ ID NO: 557416 - DNA, 75 bp, synthetic construct
  source 1..75: mol_type = other DNA
attggtgcagcggttctggtttatttcgggattaaaaaactgaaaaaagggcggggcagttcctggttgcgtatt

SEQ ID NO: 557417 - DNA, 75 bp, synthetic construct
  source 1..75: mol_type = other DNA
atgggctgggaagtcaactttgatatgtccctgcgcgatccgttaatgctggctttcttcgccaccattggcctg

SEQ ID NO: 557418 - DNA, 75 bp, synthetic construct
  source 1..75: mol_type = other DNA
ggggggccggtggcgcggtatctggtgaagcactccaccacgccaaacggtattccggatgaccaggaagtccca

SEQ ID NO: 557419 - DNA, 75 bp, synthetic construct
  source 1..75: mol_type = other DNA
acagcgtctgtatgaagtgctggtgtcggctttggggcaaattgatgatgcgttgaaagatgtcggtgataccca

SEQ ID NO: 557420 - DNA, 75 bp, synthetic construct
  source 1..75: mol_type = other DNA
gcacatggccttcctggtagtgccgatggtcggtgcgttctttattgatatcgttaacgcgctggtgattaagct

SEQ ID NO: 557421 - DNA, 75 bp, synthetic construct
  source 1..75: mol_type = other DNA
gcaacggcttgtcaatgttgggcttttaccgcgtctttgagcgcgcggtatccgtacttggtaacgtaagcctgt

SEQ ID NO: 557422 - DNA, 75 bp, synthetic construct
  source 1..75: mol_type = other DNA
aagttaattttgatatgtccttgcgcgatccattaatgctggctttcttcgccaccattggcctgaacgccaata

SEQ ID NO: 557423 - DNA, 75 bp, synthetic construct
  source 1..75: mol_type = other DNA
cctcaaaccatgccagcgccgatatgctgccagccatattagtctcaccgccctggctttcgaaaaagaaaaaat

SEQ ID NO: 557424 - DNA, 75 bp, synthetic construct
  source 1..75: mol_type = other DNA
ctgagtttatggctaatgcgcgggaaggcgattttgaccgctcattctctgatggcgttctcgaagatatcgctg

SEQ ID NO: 557425 - DNA, 75 bp, synthetic construct
  source 1..75: mol_type = other DNA
cattcgcgttgctgtgtcaccacaagaaccaacccctgctacagatgctttcctggctgaagtgcgtgcgcaggg

SEQ ID NO: 557426 - DNA, 75 bp, synthetic construct
  source 1..75: mol_type = other DNA
ggatgctgctatagaagctgcaaaaaatctggtggcccaagaatatgagtataaggatttcaaagcggcgcagag

SEQ ID NO: 557427 - DNA, 75 bp, synthetic construct
  source 1..75: mol_type = other DNA
atgagcgtcgaacagtacgtttccgagtttcgcaaatgcctggctgaagtgcgggcgcagggggtggatgctgct

SEQ ID NO: 557428 - DNA, 75 bp, synthetic construct
  source 1..75: mol_type = other DNA
tgggccaaacaagaacgttccggggctgattagaggcgcagagatatgcgtaagtattgctgaacagcttcgcaa

SEQ ID NO: 557429 - DNA, 75 bp, synthetic construct
  source 1..75: mol_type = other DNA
cgcagggggttgagatgtttgctgacaatctgttgtgtccagaccttgatggcactatccgtgactttgctgccc

SEQ ID NO: 557430 - DNA, 75 bp, synthetic construct
  source 1..75: mol_type = other DNA
attgcgcgcttcaacgaaacgggccgcagccaggtgctggcaaaacgtatgccgggtgacctctctgaatactct

SEQ ID NO: 557431 - DNA, 75 bp, synthetic construct
  source 1..75: mol_type = other DNA
ttattgatgatgccagcgccgatccgttgcgttacaaccttgcagcaatgattgcgcgcttcaatgaaactggtc

SEQ ID NO: 557432 - DNA, 75 bp, synthetic construct
  source 1..75: mol_type = other DNA
attgcgcgcttcaatgaaacgggccgtagtcaagtgctggcaaaacgtatgccgggtgacctctctgaatactcc

SEQ ID NO: 557433 - DNA, 75 bp, synthetic construct
  source 1..75: mol_type = other DNA
caccctggttcagacttggtagggaaggttgaaatgactgagtggttagttgactttgctgcccagcttcgcaag

SEQ ID NO: 557434 - DNA, 75 bp, synthetic construct
  source 1..75: mol_type = other DNA
gaaatgcagtgcatagaaactccagccaccgatgcttttctggctgaaattcgtgcggcggctcgcaacgagggg

SEQ ID NO: 557435 - DNA, 75 bp, synthetic construct
  source 1..75: mol_type = other DNA
gctgcgttacaaccttgctgccatgattgcacgtttcaatgaaacgggccgcagccaggtgctggcaaaacgtat

SEQ ID NO: 557436 - DNA, 75 bp, synthetic construct
  source 1..75: mol_type = other DNA
acgtttccgagtttcgcaaatgcctggctgaagtgcgggcgcagggattggagatgtttgcacagaaatgtaact

SEQ ID NO: 557437 - DNA, 75 bp, synthetic construct
  source 1..75: mol_type = other DNA
aagaatggataaacatcgtagcaatagcgtcgggccacacgatctttatttcacgttgctggatgattatctgca

SEQ ID NO: 557438 - DNA, 75 bp, synthetic construct
  source 1..75: mol_type = other DNA
actcaccctgatggtcggttttaaccgccgtttcgcaccgctctactgtgagttaaaaacgcaactcgctacggc

SEQ ID NO: 557439 - DNA, 75 bp, synthetic construct
  source 1..75: mol_type = other DNA
gaaaatctgcgtgatgccgagcggctggtggaactggcagcacggaaaaaactcaccctgatggtcggttttaac

SEQ ID NO: 557440 - DNA, 75 bp, synthetic construct
  source 1..75: mol_type = other DNA
tggctgtgcgcgtcacttcattgattgcgtgcaaaatcagacagttccacaaactgccggagaacaggcaatact

SEQ ID NO: 557441 - DNA, 75 bp, synthetic construct
  source 1..75: mol_type = other DNA
tgggattaggcggcattgcgcaaaaagcgtggttaccggtgctggcggcagcgtctgactggacgttacaaggag

SEQ ID NO: 557442 - DNA, 75 bp, synthetic construct
  source 1..75: mol_type = other DNA
cggcgaaatgctgtttgccgagcaccatttttcggctggtcctttgcagatcaccacctgtatgcatcgccgtgc

SEQ ID NO: 557443 - DNA, 75 bp, synthetic construct
  source 1..75: mol_type = other DNA
tcacgtctctattccgacggattattcagcttctcggtaaacgttaaccgcgctacgccatcgagcaccgatcag

SEQ ID NO: 557444 - DNA, 75 bp, synthetic construct
  source 1..75: mol_type = other DNA
tgctttctgttcctgtaggtgaaaaagctaaattcagctggacgccaacctggttgccacagggttttagcgaag

SEQ ID NO: 557445 - DNA, 75 bp, synthetic construct
  source 1..75: mol_type = other DNA
ctggcgaaggcaaatttgccgccgttgctttctgttcctgtaggtgaaaaagctaaattcagctggacgccaacc

SEQ ID NO: 557446 - DNA, 75 bp, synthetic construct
  source 1..75: mol_type = other DNA
ggagtgcgagttaatcccatgtatgcaagagggtggaatgactatcgcgcaaagtctctgcaatcagacacccca

SEQ ID NO: 557447 - DNA, 75 bp, synthetic construct
  source 1..75: mol_type = other DNA
tggatggatttctgaaaggtaaatgcattccacgagatttaaaggtcaacgaaacaaacgctgaatatctggtgc

SEQ ID NO: 557448 - DNA, 75 bp, synthetic construct
  source 1..75: mol_type = other DNA
ctggcgaaagcaaatctgccgccgctgctttctgttcctgtaggtgaaaaagctaaattcagctggacgccaacc

SEQ ID NO: 557449 - DNA, 75 bp, synthetic construct
  source 1..75: mol_type = other DNA
atcgcgaaggcaaagtcagccgcattgttgaatttatcgaaaaaccggatcagccgcagacgctggactcagaca

SEQ ID NO: 557450 - DNA, 75 bp, synthetic construct
  source 1..75: mol_type = other DNA
ctgtccgccgggcgtgaccattatgaacgtgcgtcagggcgaacctttaggtttgggccactccattttgtgtgc

SEQ ID NO: 557451 - DNA, 75 bp, synthetic construct
  source 1..75: mol_type = other DNA
gggctatatgcaggcgtttgtgaagtatggactacgcaacctgaaagaaggggcgaagttccgcaaagggattga

SEQ ID NO: 557452 - DNA, 75 bp, synthetic construct
  source 1..75: mol_type = other DNA
gggctatatgcaggcgtttgtgaagtatgggctgcgtaacctgaaggagggggcgaagttcagaacccgtattga

SEQ ID NO: 557453 - DNA, 75 bp, synthetic construct
  source 1..75: mol_type = other DNA
tattggtaaccacgatactttacgctctttggtggaacgttttgatattccgtttgaactggtgagtcatgaagg

SEQ ID NO: 557454 - DNA, 75 bp, synthetic construct
  source 1..75: mol_type = other DNA
cgagcaggttgaacgctctggctttatcttcatcggcccgaaagcagacactattcgcctgatgggcgacaaagt

SEQ ID NO: 557455 - DNA, 75 bp, synthetic construct
  source 1..75: mol_type = other DNA
tgccgagctggcgaaaaaacaatccgttgatgcaatgctgatgaccggcgacagttacgactgcggcaaaaaaat

SEQ ID NO: 557456 - DNA, 75 bp, synthetic construct
  source 1..75: mol_type = other DNA
aagttctgaccatcgttgttgacggtaaagaaatcaaagttaaagcccaggacgtacagcgtcacccgtacaaac

SEQ ID NO: 557457 - DNA, 75 bp, synthetic construct
  source 1..75: mol_type = other DNA
gacgcattcaaatacggtcaattcatgatgaatgcaaaagaagatgaataccgtgatttcttcctgaaggcactc

SEQ ID NO: 557458 - DNA, 75 bp, synthetic construct
  source 1..75: mol_type = other DNA
gaaggttgtcagcttgcgtgaaggattcgacctgtcaacgcccgttggcaaagcgatgcttaccatgatggcagg

SEQ ID NO: 557459 - DNA, 75 bp, synthetic construct
  source 1..75: mol_type = other DNA
atgacgaatttaaaagcagttataccggtagcgggtcttgggatgcatatgttgcctgccactaaggcgattcct

SEQ ID NO: 557460 - DNA, 75 bp, synthetic construct
  source 1..75: mol_type = other DNA
gtttgggccactccattttatgtgcacgacctgccattggtgacaacccatttgtcgtggtgctgccagacgttg

SEQ ID NO: 557461 - DNA, 75 bp, synthetic construct
  source 1..75: mol_type = other DNA
gtgaagtatgggctgcgtaacctgaaagaaggggcgaagttccgtaaagggattgagaagctgttaagcgaataa

SEQ ID NO: 557462 - DNA, 75 bp, synthetic construct
  source 1..75: mol_type = other DNA
cgtgacgtcgagaaaaacgtcttaagtcgcgcgctctacaaagtactggcgcagcgcgtctttgtttacggtaat

SEQ ID NO: 557463 - DNA, 75 bp, synthetic construct
  source 1..75: mol_type = other DNA
gttgatgcaatgctgatgaccggcgacagttacgactgcggcaaaaaaatgggctatatgcaggcgtttgtgaag

SEQ ID NO: 557464 - DNA, 75 bp, synthetic construct
  source 1..75: mol_type = other DNA
gggctatatgcaggcgtttgtgaagtatgggctgcgcaacctgaaagaaggggcgaagttccgtaaaggtattga

SEQ ID NO: 557465 - DNA, 75 bp, synthetic construct
  source 1..75: mol_type = other DNA
gtgtgcatacacgcttgaacatcatgatcacgcagtagccttcgccgctgagcttcgcaaaggaggcaaccagtg

SEQ ID NO: 557466 - DNA, 75 bp, synthetic construct
  source 1..75: mol_type = other DNA
gggctacatgcaggcgtttgtgaagtacggcctacgtaacctgaaggaaggaccgaagttccgtaagagcattga

SEQ ID NO: 557467 - DNA, 75 bp, synthetic construct
  source 1..75: mol_type = other DNA
gtttaggccactccattttgtgcgcgcgacctgccattggcgacaatccgtttgtcgtagtgttgccagacgttg

SEQ ID NO: 557468 - DNA, 75 bp, synthetic construct
  source 1..75: mol_type = other DNA
attgcacgtttcaacgaaacgggccgcagccaggtgctggcaaaacgtatgccgggtgacctctctgaatactcc

SEQ ID NO: 557469 - DNA, 75 bp, synthetic construct
  source 1..75: mol_type = other DNA
ggcggcaggctgcggcgtcacgccgattatgtcgatgcgtcgctggctggcgaagaaccgtccacaggccgatgt

SEQ ID NO: 557470 - DNA, 75 bp, synthetic construct
  source 1..75: mol_type = other DNA
tctctggttgagcgttttgatattccgtttgagctggtaagccatgaagggttaagccgcaacgagcacgatcaa

SEQ ID NO: 557471 - DNA, 75 bp, synthetic construct
  source 1..75: mol_type = other DNA
cgtttgagctggtaagccatgaagggttaagccgcaacgagcacgatcaaaagatggcggacgccattgatgctt

SEQ ID NO: 557472 - DNA, 75 bp, synthetic construct
  source 1..75: mol_type = other DNA
cggacctgagatgatgaaggctcttgatgcgtatgagaagtatcaggatgaagtgccggagactggaatgcttga

SEQ ID NO: 557473 - DNA, 75 bp, synthetic construct
  source 1..75: mol_type = other DNA
gttgatatgcgtagtgtggcaaagctgatcagcgatttggcaacgcaactggaagtgcaactggtgcgtgctaat

SEQ ID NO: 557474 - DNA, 75 bp, synthetic construct
  source 1..75: mol_type = other DNA
actatccgtatcgcgccgggcaatatgcgctggtcagcgtgcgaaactcagcagaaacgctgcgtgcttatacca

SEQ ID NO: 557475 - DNA, 75 bp, synthetic construct
  source 1..75: mol_type = other DNA
gctctggcgctcacttttcagtggacgaccgaacaaagtggtacttatttaattttattcagcgccagtgatgcc

SEQ ID NO: 557476 - DNA, 75 bp, synthetic construct
  source 1..75: mol_type = other DNA
gtgagctggcggggatggggaagggcggaaatcatgatactccgccagtgcgccgggactatgacagtcgtgagt

SEQ ID NO: 557477 - DNA, 75 bp, synthetic construct
  source 1..75: mol_type = other DNA
attgggaagctgatcggtcgtaccggtgatgccgtcaggactaaagcgcgagagcttgggatcagcatgattctg

SEQ ID NO: 557478 - DNA, 75 bp, synthetic construct
  source 1..75: mol_type = other DNA
gcacctggtttgggtatctttgacccgctgatcggcctgatgtcgccggtaggttcgttttatctggtgctggcg

SEQ ID NO: 557479 - DNA, 75 bp, synthetic construct
  source 1..75: mol_type = other DNA
cgcttatccagcgaagagattgccgctgccgattatgtcattctcgctaccgggcgtggcctgagcggcgatgac

SEQ ID NO: 557480 - DNA, 75 bp, synthetic construct
  source 1..75: mol_type = other DNA
tggattccggcgcaaacattcattcttgcaaaaagacagttgtaacactcgatgatcttggcttatccgagaatg

SEQ ID NO: 557481 - DNA, 75 bp, synthetic construct
  source 1..75: mol_type = other DNA
caatgccggacatacagacacgggaactggtgatgttgatcaagcgactggcatcatcgctgaaagcggtgaaac

SEQ ID NO: 557482 - DNA, 75 bp, synthetic construct
  source 1..75: mol_type = other DNA
cgtattttcatgaaaggagatcactcaataacttccatcgagatcgggtaataacatttgaacagatcgctgaat

SEQ ID NO: 557483 - DNA, 75 bp, synthetic construct
  source 1..75: mol_type = other DNA
attactgcgtgtgtatggagtcatatcgaggatattaataaacgtgatgcaaaactaactggaaagaaatattaa

SEQ ID NO: 557484 - DNA, 75 bp, synthetic construct
  source 1..75: mol_type = other DNA
gaataacacgtttatttcgacaggagagttcaggagtgagggtgagagtttatattgccggcccaatgacgggat

SEQ ID NO: 557485 - DNA, 75 bp, synthetic construct
  source 1..75: mol_type = other DNA
gaagtgggagcgagtctgcgccgcgctgcgggagctgaacaagtgccgggatattctccgggatattaccgccac

SEQ ID NO: 557486 - DNA, 75 bp, synthetic construct
  source 1..75: mol_type = other DNA
gcaactggtcagtgccgcctggtttgtccgtgccacacaggaagcgcatgggatgggcgttagaaatgagagtcc

SEQ ID NO: 557487 - DNA, 75 bp, synthetic construct
  source 1..75: mol_type = other DNA
ggagttctggctacctacagacagccggtagtcaatctcgggtataagataaaagggactcgcgttgttttaatt

SEQ ID NO: 557488 - DNA, 75 bp, synthetic construct
  source 1..75: mol_type = other DNA
atgcaggccggaaaattgcgtcacaggatcaccctgcaggaaccggtcaaagaacagaacccgacaacgggagcc

SEQ ID NO: 557489 - DNA, 75 bp, synthetic construct
  source 1..75: mol_type = other DNA
atgcaggccgggaaattgcgtcacaggataaccctgcaggagccggtaaaagaacagaacccgacaacgggagcc

SEQ ID NO: 557490 - DNA, 75 bp, synthetic construct
  source 1..75: mol_type = other DNA
aaacccagaaaaagatatctatctgtacattaactccccaggcggggtgattactgccgggatgtctatctatga

SEQ ID NO: 557491 - DNA, 75 bp, synthetic construct
  source 1..75: mol_type = other DNA
cgcagcaacggcacgccgctgtcaggggggagcatattaaatgccagtgttccggacgccaactccaatggtgat

SEQ ID NO: 557492 - DNA, 75 bp, synthetic construct
  source 1..75: mol_type = other DNA
catgctgacaaaaaaggaccatctcgttgcagggcaagtacagacaacatgggctgcgggaaatacatcactgtc

SEQ ID NO: 557493 - DNA, 75 bp, synthetic construct
  source 1..75: mol_type = other DNA
atcctgtgacgttgaaaatctaccataatggccagttgtcccgagtgatgacacagtattttcgcaatactggcg

SEQ ID NO: 557494 - DNA, 75 bp, synthetic construct
  source 1..75: mol_type = other DNA
gctggataagatgcgccagcatcgcatccggcaacgcgcacaggataacaaatgtgccattcatgtcagatgcgg

SEQ ID NO: 557495 - DNA, 75 bp, synthetic construct
  source 1..75: mol_type = other DNA
atgaaaaagattatcgctggtgttgttcttgctctgggtttggttggtgctgcaaatgccgaacaatatgtacag

SEQ ID NO: 557496 - DNA, 75 bp, synthetic construct
  source 1..75: mol_type = other DNA
tgattcaccagccgttgggcggctaccagggccaggcgaccgatatcgaaattcatgcccgtgaaattctgaaag

SEQ ID NO: 557497 - DNA, 75 bp, synthetic construct
  source 1..75: mol_type = other DNA
cgcgatcgcttcctttccgcccctgaagcggtggaatacggtctggtcgattcgattctgacccatcgtaattga

SEQ ID NO: 557498 - DNA, 75 bp, synthetic construct
  source 1..75: mol_type = other DNA
cggcctcaatgggagcattcctgctgaccgcaggggcaaaaggtaaacgtttctgcctgccgaattcgcgcgtga

SEQ ID NO: 557499 - DNA, 75 bp, synthetic construct
  source 1..75: mol_type = other DNA
gtccgtgccacactggaagcgcatgggatgagcgtcggtgatttactcccccgctccggcgggggtatggcctgc

SEQ ID NO: 557500 - DNA, 75 bp, synthetic construct
  source 1..75: mol_type = other DNA
gtcagccaccgatgcttttctggctgaaattcgtgcggaagcacgcaacgaggggattaactataccgccagccg

SEQ ID NO: 557501 - DNA, 75 bp, synthetic construct
  source 1..75: mol_type = other DNA
tggatggatttctgaaaggtaaatgcatctcatgtgatttaaaggttaacgaaacaaatgctgaatatatggtgc

SEQ ID NO: 557502 - DNA, 75 bp, synthetic construct
  source 1..75: mol_type = other DNA
agcaccagcaccgggcattaccccggaactgcgtcgctacatcggcgaacgttgcgctaaagcatgtgttgatat

SEQ ID NO: 557503 - DNA, 75 bp, synthetic construct
  source 1..75: mol_type = other DNA
actcgcgccgcctattgcggaagcgctgttgatgctgagagattcgccgcccagcttcgcaaaggaggcaaccag

SEQ ID NO: 557504 - DNA, 75 bp, synthetic construct
  source 1..75: mol_type = other DNA
cagaaagcgattgattcaattaagcaggctgattcgactgttaagttggcacacgagaagttttcagcgctggcg

SEQ ID NO: 557505 - DNA, 75 bp, synthetic construct
  source 1..75: mol_type = other DNA
ggaaggagattttgaccgctcattctctgatggcgttctcgaagatatcgccgcccagcttcgcaaaggaggcaa

SEQ ID NO: 557506 - DNA, 75 bp, synthetic construct
  source 1..75: mol_type = other DNA
tcagcgcgatgaagaggtggaagccgatgtagtagcggcaattgagctgggtcgccgctataacgcgcggctgtt

SEQ ID NO: 557507 - DNA, 75 bp, synthetic construct
  source 1..75: mol_type = other DNA
gctgatgtcgtagcggcaattgaactgggtcaccgctataacgcacgactgtttatcaacgattactggcaactg

SEQ ID NO: 557508 - DNA, 75 bp, synthetic construct
  source 1..75: mol_type = other DNA
gcgggcctgcggctgggcgtttcgactcatgatgatatggaaatcgacgtcgcgctggcggcacgtccttcttat

SEQ ID NO: 557509 - DNA, 75 bp, synthetic construct
  source 1..75: mol_type = other DNA
cagcagctatatagcgcatttactgaaagacgcgccttgtgaagtcattttacttggcggcgtgtaccagaaaaa

SEQ ID NO: 557510 - DNA, 75 bp, synthetic construct
  source 1..75: mol_type = other DNA
gtgatgacgtcgaaacccgtatgatgagtaattatacgctgaagcgtgaactcgccgagtttgctgcctcactgg

SEQ ID NO: 557511 - DNA, 75 bp, synthetic construct
  source 1..75: mol_type = other DNA
tacattcatactccatcggtcccgttgagcgattcaatcgcgtgattaccgattcgaaaatacgcgccagcgatc

SEQ ID NO: 557512 - DNA, 75 bp, synthetic construct
  source 1..75: mol_type = other DNA
cagaatgctggctgcctgggaagctggttttattgatgatactgcgaagaacgccgcggatattgcccggatgat

SEQ ID NO: 557513 - DNA, 75 bp, synthetic construct
  source 1..75: mol_type = other DNA
ttacttctttctttatcagaagtaatacaaaaagctatcagagaaaataaacacatgatacatttcggcatataa

SEQ ID NO: 557514 - DNA, 75 bp, synthetic construct
  source 1..75: mol_type = other DNA
tgtaggccgtcagccgctgcgtaaactgagcgccggagatcgtctggtaaaaccgctgctgggtacgctggagta

SEQ ID NO: 557515 - DNA, 75 bp, synthetic construct
  source 1..75: mol_type = other DNA
gcgatggaagaaagcggcgcggtgctaatcaagcgctacggttttgatgctgataaacatgctgcgtatatccag

SEQ ID NO: 557516 - DNA, 75 bp, synthetic construct
  source 1..75: mol_type = other DNA
gggaacgatccggaagaactgctgaatgatacagaaaccactgccagtgcgaatgttgtccgttatgtactgata

SEQ ID NO: 557517 - DNA, 75 bp, synthetic construct
  source 1..75: mol_type = other DNA
acatttatattgatgcatggtgggaacaactccagacaataaaaaccttctatcatagtttaaatcgtccaggtt

SEQ ID NO: 557518 - DNA, 75 bp, synthetic construct
  source 1..75: mol_type = other DNA
acatttatattgatgaatggtgggaacaactccagacaataaaaactttccatcatagtttaaatcgtcaaggtt

SEQ ID NO: 557519 - DNA, 75 bp, synthetic construct
  source 1..75: mol_type = other DNA
gaaaatggcagttggctttacctgattgacctagaacacgcattacgcgtcgctggcattcgcatcaaaggagag

SEQ ID NO: 557520 - DNA, 75 bp, synthetic construct
  source 1..75: mol_type = other DNA
aacagaatgctggctgcctgggaagctggttttattgatgatactgcgaagaacgccgctgatattgcccggatg

SEQ ID NO: 557521 - DNA, 75 bp, synthetic construct
  source 1..75: mol_type = other DNA
caagttccgtcagtgaatcaaaacaaatatctgaatgcgatgtggcggagtgggaagaaatgaaaccaatgtcac

SEQ ID NO: 557522 - DNA, 75 bp, synthetic construct
  source 1..75: mol_type = other DNA
atggagccctacgacaaaagcatcacttgaatacagctgcaaaagccaaagcgctctataaagctctagctagag

SEQ ID NO: 557523 - DNA, 75 bp, synthetic construct
  source 1..75: mol_type = other DNA
tacgcagtcatattggcactatcgggtcagcataaagcagctgatgtcgaaatgcagcgccttgctccctatatc

SEQ ID NO: 557524 - DNA, 75 bp, synthetic construct
  source 1..75: mol_type = other DNA
tggatggactggaagaagcaaaatcacaactcaacgagcagcgtgagtattacgaaggcgttatctctgatggga

SEQ ID NO: 557525 - DNA, 75 bp, synthetic construct
  source 1..75: mol_type = other DNA
agaggcaaaagaggatttgtcccctcaggacattgccaaaaacgcaccacctttggcaaacgacaatccgttaca

SEQ ID NO: 557526 - DNA, 75 bp, synthetic construct
  source 1..75: mol_type = other DNA
ttggagactggcgagctgtttctccgggctgctgcatgatgtgggtaaaccgctctcggatgtgtccattacgga

SEQ ID NO: 557527 - DNA, 75 bp, synthetic construct
  source 1..75: mol_type = other DNA
gacaagatactggcaacccaagctgaactgattgagaaagtgcggaactctctcggtttcactgtggacgacttc

SEQ ID NO: 557528 - DNA, 75 bp, synthetic construct
  source 1..75: mol_type = other DNA
aatgagccaggtgcgaaagtttggcacctgaaccaaggtgttttcatcgcctggaaacaacttggcgacctctac

SEQ ID NO: 557529 - DNA, 75 bp, synthetic construct
  source 1..75: mol_type = other DNA
ccaggatgcctttgagctcgtctctccccctggcttggatgcaagcaagaataagtctgcaccgaaacaacaaag

SEQ ID NO: 557530 - DNA, 75 bp, synthetic construct
  source 1..75: mol_type = other DNA
atcggcgttgcttgaacaagcgatcatgcctgttttggaaggtaaaacgacgctgggcgaagtcctatgcctgat

SEQ ID NO: 557531 - DNA, 75 bp, synthetic construct
  source 1..75: mol_type = other DNA
gaaaactttcagctctttctggttgagcatccgctggtctgccacttaacccgccgtctgatttggggcatttat

SEQ ID NO: 557532 - DNA, 75 bp, synthetic construct
  source 1..75: mol_type = other DNA
ttgttattacccgaaaaaccagaaattgcacatgaaattgcccagcgtctactggggcaaaaaaaattaccctcg

SEQ ID NO: 557533 - DNA, 75 bp, synthetic construct
  source 1..75: mol_type = other DNA
ttatgcagcttaacggcatcgcccagaaactgaaattcaaagcattacaggagcgggcaaaagaaaaaattgccg

SEQ ID NO: 557534 - DNA, 75 bp, synthetic construct
  source 1..75: mol_type = other DNA
ccccgcaggatggaggctggatcggctggatgatcaaacctctcggtcgctggtcgttaatcatggaaatcgatg

SEQ ID NO: 557535 - DNA, 75 bp, synthetic construct
  source 1..75: mol_type = other DNA
tacttcgcagcgagtgagctggcacctgccgtcgcccgagccttcaacaaactcaaaaccctacgacaagacgcc

SEQ ID NO: 557536 - DNA, 75 bp, synthetic construct
  source 1..75: mol_type = other DNA
cccggtattaaaagcaaacgcccaatcactgcccgatagcgcactccagcacctcggtgaaatgctccgcttccc

SEQ ID NO: 557537 - DNA, 75 bp, synthetic construct
  source 1..75: mol_type = other DNA
tcagggtgtagaggtgagccgcgccacgctggggcgctggaccagtgctgttgctgaactgctggagccgctgta

SEQ ID NO: 557538 - DNA, 75 bp, synthetic construct
  source 1..75: mol_type = other DNA
actggctattctggtctttcttatctccatgatttacatatcgattatattaaaattgatcacagtttcgtgggg

SEQ ID NO: 557539 - DNA, 75 bp, synthetic construct
  source 1..75: mol_type = other DNA
gcagaaaccgaatgccccgtctgcagcggcaaactgaaaccgctgggagaaagcatctctgaacaactggatatc

SEQ ID NO: 557540 - DNA, 75 bp, synthetic construct
  source 1..75: mol_type = other DNA
ctgacagaagatgcaatgttggcgctgataaatcagaagccatttacattcatgaaggatgctactgtctttgaa

SEQ ID NO: 557541 - DNA, 75 bp, synthetic construct
  source 1..75: mol_type = other DNA
ggaaggacgtaaagaaactgttttaaaaattgtagcttctgatttattatccatgcatcattcactaattcgtgt

SEQ ID NO: 557542 - DNA, 75 bp, synthetic construct
  source 1..75: mol_type = other DNA
tggcgtatctgattttaccgctgtttgcatttgctaatgctggcgtttcactgcaaggcgtcacgctggatggcc

SEQ ID NO: 557543 - DNA, 75 bp, synthetic construct
  source 1..75: mol_type = other DNA
ttgcccggtgaatatgactaaccacgtctatttcaacctcgacggtgaacagtctgacgtgcgtaatcacaagct

SEQ ID NO: 557544 - DNA, 75 bp, synthetic construct
  source 1..75: mol_type = other DNA
ccgatactgcttaagccgctgtatttcatctcctgcatcatgttccctctacactcgattccaaagcaatactgg

SEQ ID NO: 557545 - DNA, 75 bp, synthetic construct
  source 1..75: mol_type = other DNA
cgttgctgtttatatattgcttatgcttatcgtctggatggcaggcgaatatttcgaaataacaaactttttaca

SEQ ID NO: 557546 - DNA, 75 bp, synthetic construct
  source 1..75: mol_type = other DNA
ggcggtcagtctgggtcgtaaaaacttcctgttcttcggctctgatcatggtggtgagcggggagcgctactgta

SEQ ID NO: 557547 - DNA, 75 bp, synthetic construct
  source 1..75: mol_type = other DNA
atcagttatgcccggttatattagtgaaggtgtgagtttgaactacttggcaatgttcactttagtcactctgtt

SEQ ID NO: 557548 - DNA, 75 bp, synthetic construct
  source 1..75: mol_type = other DNA
ggggctgtttaattatcgaccagtaaaacccatcgatacgatcattgcacgtgcactgcttgagacactgattta

SEQ ID NO: 557549 - DNA, 75 bp, synthetic construct
  source 1..75: mol_type = other DNA
ggctatattatgcatcgtacgatgccaggtatctcgttcccggtatttttacttaatggtttgattccctttttt

SEQ ID NO: 557550 - DNA, 75 bp, synthetic construct
  source 1..75: mol_type = other DNA
atctccacataccgataccgaatacgccatgttacattttggactcaaagggttacctgggttagtaaactcact

SEQ ID NO: 557551 - DNA, 75 bp, synthetic construct
  source 1..75: mol_type = other DNA
aaatgtgtgccctgttgacgcgataagccgcgaacatgggcatattttcgttgaacaatcacgttgcattggctg

SEQ ID NO: 557552 - DNA, 75 bp, synthetic construct
  source 1..75: mol_type = other DNA
gcgtattcgtgtcattaaagatcatacttacaccacggcagtagcctgtcatcagtgtgaagatgcaccgtgcgc

SEQ ID NO: 557553 - DNA, 75 bp, synthetic construct
  source 1..75: mol_type = other DNA
acctgtaccacggcagtagcctgtcatcagtgtgaagatgcgccgtgcgcgaatgtctgccctgtggacgcgatt

SEQ ID NO: 557554 - DNA, 75 bp, synthetic construct
  source 1..75: mol_type = other DNA
gcgccagccaaagtcgctgaacggcttaatgacgtggcacataaggttatcgctgtgcgcggcaactgcgacagc

SEQ ID NO: 557555 - DNA, 75 bp, synthetic construct
  source 1..75: mol_type = other DNA
atgagtatggttgccagaactgaacccagacccgcagaggacgacatcaccgataccgatgatggcgatacccgc

SEQ ID NO: 557556 - DNA, 75 bp, synthetic construct
  source 1..75: mol_type = other DNA
gcgttatcgtgatgcagacacaacggacaagggcgaccgccgggcggacgctctggatatacagacatcggattt

SEQ ID NO: 557557 - DNA, 75 bp, synthetic construct
  source 1..75: mol_type = other DNA
tacttcaccggagaacttcagcatcgcaacagcttaagtgcgcagctcaacatgaaatgtcatgagtttgaccag

SEQ ID NO: 557558 - DNA, 75 bp, synthetic construct
  source 1..75: mol_type = other DNA
gcctcgcggcatggcgctacacgaaacctggtttgatcgctgaaattaactccctggctaaccagttgcagattt

SEQ ID NO: 557559 - DNA, 75 bp, synthetic construct
  source 1..75: mol_type = other DNA
cgataccgatgatggtgatacccgtatttcagcgggcgcattctggccggatattgtgctgcgtgagctgcgtct

SEQ ID NO: 557560 - DNA, 75 bp, synthetic construct
  source 1..75: mol_type = other DNA
ctgccacccgtgccctgattctggaacggtacagggatgcagacaccaccgacaagggggagcgccgggccgatg

SEQ ID NO: 557561 - DNA, 75 bp, synthetic construct
  source 1..75: mol_type = other DNA
ggcataaagggccggagatgcttttcaggcactatggctcatatctgaaggaatatgatggacaaacaagcttga

SEQ ID NO: 557562 - DNA, 75 bp, synthetic construct
  source 1..75: mol_type = other DNA
agacaccgacgacggagaagcgcgcatcagtacagacgcgttctggccggatatcgtgctgaaagagctgcgcct

SEQ ID NO: 557563 - DNA, 75 bp, synthetic construct
  source 1..75: mol_type = other DNA
atattgtgctgcgtgagctgcgtctggcggtacgactgccgggccgtgtgaccacctcccgcctgctgcataccg

SEQ ID NO: 557564 - DNA, 75 bp, synthetic construct
  source 1..75: mol_type = other DNA
cagcaggtagcaaggctggaatccgccatgtgcctgcgccgccgctggtcgccggaaaactttcagctcttcctg

SEQ ID NO: 557565 - DNA, 75 bp, synthetic construct
  source 1..75: mol_type = other DNA
accgcaggatggtggctggatcggctggatgatcaaacctctgggccgctggtcgttaatcatggaaatcgatga

SEQ ID NO: 557566 - DNA, 75 bp, synthetic construct
  source 1..75: mol_type = other DNA
ttatgccttcctgacgaaagcccaactgacggtcatgattaacagtaaagaactgacagagatttgctatgactg

SEQ ID NO: 557567 - DNA, 75 bp, synthetic construct
  source 1..75: mol_type = other DNA
accgtaacagttacgccctgacagaagccgagcgcaacgccagcgaactgacccgctgggcaggcagaaaatgcc

SEQ ID NO: 557568 - DNA, 75 bp, synthetic construct
  source 1..75: mol_type = other DNA
atcgtaacagttacgcgctgacagaagccgagcgcaatgccagcgaactgacacgctgggcaggcagaaaatgcc

SEQ ID NO: 557569 - DNA, 75 bp, synthetic construct
  source 1..75: mol_type = other DNA
gcaaaaaaaattaccctcgcttgagtggttaaaaatagtggcgactgatgagcacattcttgcctcattagaaaa

SEQ ID NO: 557570 - DNA, 75 bp, synthetic construct
  source 1..75: mol_type = other DNA
aaaaagcggcggatgttgccggaaaattggctctgctcataaatcaggatctggatgcgcctgttactgctgtgg

SEQ ID NO: 557571 - DNA, 75 bp, synthetic construct
  source 1..75: mol_type = other DNA
tatgtgttaaaggaatacctccaagagaagatgataaatgggctgaaggacaggttcagaagaaatcatcattgc

SEQ ID NO: 557572 - DNA, 75 bp, synthetic construct
  source 1..75: mol_type = other DNA
catcaacggtgagagcgtcaacgtatggcattaccgcaacgccgtctacagcgccacccgcgccctgattctgga

SEQ ID NO: 557573 - DNA, 75 bp, synthetic construct
  source 1..75: mol_type = other DNA
ggtttttttatgcatcgcacaatgccagatatttcctttcctgtatttttaataaatggaataattccttatttt

SEQ ID NO: 557574 - DNA, 75 bp, synthetic construct
  source 1..75: mol_type = other DNA
aatacaaatatattgtgatgccctataccgatgaaccgaacctgaatctgttacgcactgaattgcaggaacgct

SEQ ID NO: 557575 - DNA, 75 bp, synthetic construct
  source 1..75: mol_type = other DNA
atgaccatctgatctcctgtatggggattgccggtgcaccggaaccgtcatatctgtacgccgccacactgtgtg

SEQ ID NO: 557576 - DNA, 75 bp, synthetic construct
  source 1..75: mol_type = other DNA
tgcaaggatcgctggccagtttgcgccaggctgcgtttccggttattgccgcaatcggcgggatgattgtcccgg

SEQ ID NO: 557577 - DNA, 75 bp, synthetic construct
  source 1..75: mol_type = other DNA
ccgagaaaagtggcctggaaaggtgtcaccttgaggcggcattaaacattaagccggggcatacgcttggcatta

SEQ ID NO: 557578 - DNA, 75 bp, synthetic construct
  source 1..75: mol_type = other DNA
gtggaatgcaatcgctataactactgcgcagatgcagttaagggcgttgagtatgcctgccacgctgccatgctt

SEQ ID NO: 557579 - DNA, 75 bp, synthetic construct
  source 1..75: mol_type = other DNA
tactggctatgagttaatcgctgaagcttggcgtttgatggatggacaagaccctaaaaccagcgattggcatag

SEQ ID NO: 557580 - DNA, 75 bp, synthetic construct
  source 1..75: mol_type = other DNA
ggttcataagatggccagggctttattgccgctggtggctgaaaagcatgaggcggaccatgccaacgaaagctg

SEQ ID NO: 557581 - DNA, 75 bp, synthetic construct
  source 1..75: mol_type = other DNA
agggggggttccccggagagcggatccgaattaagccgcatgtttaccgtgaactggttaaccgcctccacgata

SEQ ID NO: 557582 - DNA, 75 bp, synthetic construct
  source 1..75: mol_type = other DNA
gtcatcagctatgagcagttgctacaggtattttgggagaatcacgatcccgcccagggaatgcgtcagggcaat

SEQ ID NO: 557583 - DNA, 75 bp, synthetic construct
  source 1..75: mol_type = other DNA
gcggaaaggggaaacacggaaactggattacgcgttgctaggttgggctatatcggcaaatttggggagggaatg

SEQ ID NO: 557584 - DNA, 75 bp, synthetic construct
  source 1..75: mol_type = other DNA
gcagccaggtgctggcaaaacgtatgccgggtgacctctctgaatactccgtcatccagaccaaagagccactgg

SEQ ID NO: 557585 - DNA, 75 bp, synthetic construct
  source 1..75: mol_type = other DNA
ctggcacccagcaattacgagaaagaattagccgtgttttgggcgacgttattacgccagatcatcataaacaag

SEQ ID NO: 557586 - DNA, 75 bp, synthetic construct
  source 1..75: mol_type = other DNA
aagatgaccaccagcaatatctgcataaaaacccgtatggttactgtggaattggcgtctgtctgccgccggaag

SEQ ID NO: 557587 - DNA, 75 bp, synthetic construct
  source 1..75: mol_type = other DNA
gggtgcttttggggcgtggaacgccttttctggcaacttcctggcgtttacagcaccgctgcaggctataccggt

SEQ ID NO: 557588 - DNA, 75 bp, synthetic construct
  source 1..75: mol_type = other DNA
tcactgaagagcgtatatcagagattatttcccgtatcgaaatgtatggtcacggcgctggatacacggcagatg

SEQ ID NO: 557589 - DNA, 75 bp, synthetic construct
  source 1..75: mol_type = other DNA
tatttagtgctctttccgtaatgttttcagcggggctgcatgcagaaacccatcagcacggcgaaatgaatgctg

SEQ ID NO: 557590 - DNA, 75 bp, synthetic construct
  source 1..75: mol_type = other DNA
tcggggcaattttgtgtgggtgagacgccgacgctggcagactgctgccttgttccgcagtgggcgaacgcgcta

SEQ ID NO: 557591 - DNA, 75 bp, synthetic construct
  source 1..75: mol_type = other DNA
ctggtgccgacgctgctgactgacgagggccaatcactcggacaatcgctggcgattattgactggctggagagg

SEQ ID NO: 557592 - DNA, 75 bp, synthetic construct
  source 1..75: mol_type = other DNA
aatccaggataggttagagatcagcaaagcaaccttctaccgacttaagtcgagcttgcaactcactgatatttg

SEQ ID NO: 557593 - DNA, 75 bp, synthetic construct
  source 1..75: mol_type = other DNA
aacgtcaccacctggggccagccgttctacagcggctggggactgaccgaagacagacatcctgccccgcgtcgt

SEQ ID NO: 557594 - DNA, 75 bp, synthetic construct
  source 1..75: mol_type = other DNA
tctccatcgacccggtggggatctacttcgacagccgccgtccaagcgggctggagcagttgctaaatcagcatg

SEQ ID NO: 557595 - DNA, 75 bp, synthetic construct
  source 1..75: mol_type = other DNA
tcactaaagagcgtatatcagagattatttcccgtatcgaaatgtatggtcacggtgctggatatacggcagatg

SEQ ID NO: 557596 - DNA, 75 bp, synthetic construct
  source 1..75: mol_type = other DNA
tcgttttcagcccaccaccattgtgaataccgatgatgctatctttggtacaggctattttgtgagcggtaaaat

SEQ ID NO: 557597 - DNA, 75 bp, synthetic construct
  source 1..75: mol_type = other DNA
aatcgaaaaaaataaacgccgctatccgtgggcgcaattcgttattgacggcaatggtctgggacgcgttgcctg

SEQ ID NO: 557598 - DNA, 75 bp, synthetic construct
  source 1..75: mol_type = other DNA
gttattaggtcgtaatgcctcggcaagaatattacaactaactttgctggacgctttttttgtctctgtcgccca

SEQ ID NO: 557599 - DNA, 75 bp, synthetic construct
  source 1..75: mol_type = other DNA
atcaaagctgctggggtttagcggctttcgtaacttacgcagtgcgctggaagattatttttctcagtcagaaca

SEQ ID NO: 557600 - DNA, 75 bp, synthetic construct
  source 1..75: mol_type = other DNA
tgtcgcccagctcaacattgaacaagctaatattaatatgcaaaaaaccggcgcaattgttgatttcttctcacc

SEQ ID NO: 557601 - DNA, 75 bp, synthetic construct
  source 1..75: mol_type = other DNA
tgcaattgacgccggtgtggtggcgctttcgaccaccaataccagcgtctggacgttagcgaaaaaattgcttta

SEQ ID NO: 557602 - DNA, 75 bp, synthetic construct
  source 1..75: mol_type = other DNA
attattgaggagggcgttgatttcgctcgttggcgttatcgtgactgcgttattaattttctcactcagtccttt

SEQ ID NO: 557603 - DNA, 75 bp, synthetic construct
  source 1..75: mol_type = other DNA
tggcgtatctgattttgccactgtttgcatttgctaatgctggcgtttcactgcaaggcgtcacgctggatggcc

SEQ ID NO: 557604 - DNA, 75 bp, synthetic construct
  source 1..75: mol_type = other DNA
atgaggaatggagctgattatttacgattagtccagaaaacagaaggtgttcccactcccacacctcttcatcca

SEQ ID NO: 557605 - DNA, 75 bp, synthetic construct
  source 1..75: mol_type = other DNA
cctgtaaatgggatggtcgcgcagtattaaagcaggagatgtacacgtttggttcccggcaatcgcgtgtttact

SEQ ID NO: 557606 - DNA, 75 bp, synthetic construct
  source 1..75: mol_type = other DNA
cggtctttactgctattgtcagacatgaggatatacaggatgagaagattagattttcaataccggatgtttatc

SEQ ID NO: 557607 - DNA, 75 bp, synthetic construct
  source 1..75: mol_type = other DNA
atctgtttgaaaatagtaatcaagtaatgacttctgttcattatagttatgctcaaactgctgccaatgaatttt

SEQ ID NO: 557608 - DNA, 75 bp, synthetic construct
  source 1..75: mol_type = other DNA
ggatagtttctccacctgctggaacttgttggcgagtatcacaagagcgatttaaagaactcgtcaatgataatc

SEQ ID NO: 557609 - DNA, 75 bp, synthetic construct
  source 1..75: mol_type = other DNA
agataatatctgtaagctcaaatcattgtttcctgaagcctttaatgaaaatggcattgattttgatgttttaaa

SEQ ID NO: 557610 - DNA, 75 bp, synthetic construct
  source 1..75: mol_type = other DNA
tggcggaaagctttttgaaagtgtctctggcagcgctctccgccccgttttctgccgcattacgccagggattac

SEQ ID NO: 557611 - DNA, 75 bp, synthetic construct
  source 1..75: mol_type = other DNA
agatgaagctctggccgccatccagcaggacattaataccatgggcgaattgtttgtgaacactgttgccagaaa

SEQ ID NO: 557612 - DNA, 75 bp, synthetic construct
  source 1..75: mol_type = other DNA
tacgacgataaccgggggcgggaatcccgtagcgacccgggttatgacaatgtgttgggcgtcgctgtcatcccg

SEQ ID NO: 557613 - DNA, 75 bp, synthetic construct
  source 1..75: mol_type = other DNA
ctggatatatttgaaggtgtggtgacgaaaaccgacgaggcaatggaacgaatcacccaggcgttatcagaattt

SEQ ID NO: 557614 - DNA, 75 bp, synthetic construct
  source 1..75: mol_type = other DNA
gtcacctacgggatgcgtaacctgaaagaaggcgccaaattccgcgaaagcattaaggaaggtgcgaataagcgg

SEQ ID NO: 557615 - DNA, 75 bp, synthetic construct
  source 1..75: mol_type = other DNA
ccgtagaaggtaaagtgagccgtatcgttgagttcatcgaaaaaccagaccaaccgcaaacgctggattccgacc

SEQ ID NO: 557616 - DNA, 75 bp, synthetic construct
  source 1..75: mol_type = other DNA
gtctgctgacatttgggcagaattagagcatacacaacctggtgcctggggccgtatccagttaacggatgctat

SEQ ID NO: 557617 - DNA, 75 bp, synthetic construct
  source 1..75: mol_type = other DNA
catcagtcaaatcgtcaaaaagattaaaaacgccgggaaatatgcctttattcatgtcgatttgctggaaggagc

SEQ ID NO: 557618 - DNA, 75 bp, synthetic construct
  source 1..75: mol_type = other DNA
acggaattatcagtaccaaagcctcaatgctgaaagcagcaagagcgggaaggttttttctgtattcatcgactg

SEQ ID NO: 557619 - DNA, 75 bp, synthetic construct
  source 1..75: mol_type = other DNA
gcgtatcgttgagtttattgaaaaaccggacgaaccgcagaccctggactccgacctgatggcggtgggccgcta

SEQ ID NO: 557620 - DNA, 75 bp, synthetic construct
  source 1..75: mol_type = other DNA
ctgcctgggacaaagaatggtattaatacgtgcggataaatctcaagtcatcccagaatatctactatatgtaat

SEQ ID NO: 557621 - DNA, 75 bp, synthetic construct
  source 1..75: mol_type = other DNA
cctaagctcagtgagaaaagagtatccattggacattttttacgccactttgatcaaaagataaatttatctctt

SEQ ID NO: 557622 - DNA, 75 bp, synthetic construct
  source 1..75: mol_type = other DNA
tgggtggatcctacaacgggagagatttttatccatcgctttggtcctaaaggtaataaggcgttcgtttttccg

SEQ ID NO: 557623 - DNA, 75 bp, synthetic construct
  source 1..75: mol_type = other DNA
ctgtcctcctggcgtcactatcatgaacgttcgtcaggcgcaattactcggcctgggccattcaatcctttgcgc

SEQ ID NO: 557624 - DNA, 75 bp, synthetic construct
  source 1..75: mol_type = other DNA
ttcttgatggcgcatccgccgacccgttgcgttataaccttgccgcgatggttgcacgctataacgaaactggcc

SEQ ID NO: 557625 - DNA, 75 bp, synthetic construct
  source 1..75: mol_type = other DNA
tacgccgagcgcacactcggcgaaatccataataagatcgaaaggggaacattcatttatgcggaatattttccc

SEQ ID NO: 557626 - DNA, 75 bp, synthetic construct
  source 1..75: mol_type = other DNA
atgcgcaatacactcatacccatcctcgttgcgatatgcttgtttattaccggtgtcgctattttgaacatccag

SEQ ID NO: 557627 - DNA, 75 bp, synthetic construct
  source 1..75: mol_type = other DNA
caggcggctgtcgccgccctgcgattactggctgaattaagttgttcagtcaatcccaatacgttctttgacgaa

SEQ ID NO: 557628 - DNA, 75 bp, synthetic construct
  source 1..75: mol_type = other DNA
agccgtggcgttaagtccgttatggattgtgcattctcttgctgaaattgccaaaggcaccgataaacaggcagc

SEQ ID NO: 557629 - DNA, 75 bp, synthetic construct
  source 1..75: mol_type = other DNA
tcctggtcaccggttttgatgcggtaccggaagcgctggcccgcgtgcgcgacggctggctggcggttacggcgg

SEQ ID NO: 557630 - DNA, 75 bp, synthetic construct
  source 1..75: mol_type = other DNA
gcgatggaaaaattggtcgcccagggcaaaatccgccgctggggcgtttctaaccttgattatgccgatatgcag

SEQ ID NO: 557631 - DNA, 75 bp, synthetic construct
  source 1..75: mol_type = other DNA
aaatgcatgcgaagccagtttacgccgtctcaatactgattatctcgatctctacttattacactggtctggcag

SEQ ID NO: 557632 - DNA, 75 bp, synthetic construct
  source 1..75: mol_type = other DNA
accgccgaaatgtatgccgatggcggtgccgagaaggtggtcggtgaagcattaaccggtctgcgtgatagagtc

SEQ ID NO: 557633 - DNA, 75 bp, synthetic construct
  source 1..75: mol_type = other DNA
cgataagatggtgactttcgcctttatttgggtggcgctggcaatttttgttgatggatgcgatttatacgcagc

SEQ ID NO: 557634 - DNA, 75 bp, synthetic construct
  source 1..75: mol_type = other DNA
catcgcgtgatctggtcgtttttctttatggtggtgctgatgagcatttgccgccagtggtcctatttaaaaacg

SEQ ID NO: 557635 - DNA, 75 bp, synthetic construct
  source 1..75: mol_type = other DNA
ttacctgtttgctattgccgacagctcaaccagccatatggggcaaaacccgatgtcgctgaatttactgctgat

SEQ ID NO: 557636 - DNA, 75 bp, synthetic construct
  source 1..75: mol_type = other DNA
ttcagtacgccaaacctggccatgccgtttgaagttcacatgcagcgcacggcggtgaaagccgcaaaagagatg

SEQ ID NO: 557637 - DNA, 75 bp, synthetic construct
  source 1..75: mol_type = other DNA
gtcgtttcgcacgaccgtcatttgctgcgttccaccactgacgatctctacctggttcacgatcgtaaagtcgaa

SEQ ID NO: 557638 - DNA, 75 bp, synthetic construct
  source 1..75: mol_type = other DNA
ctggcagtctctgccgtgctgattggcggcaactggttactgtttatctgggcggtaaacaaccaccatatgctg

SEQ ID NO: 557639 - DNA, 75 bp, synthetic construct
  source 1..75: mol_type = other DNA
cgcagaccaggctacagacacgccgccagcggcagcggataccaccgcggctaacacgcaaacgccagcgacaac

SEQ ID NO: 557640 - DNA, 75 bp, synthetic construct
  source 1..75: mol_type = other DNA
actaatggttatattttctcaagttgtgtttggtgcttttattgattacggaaaagagaaaaccttgctgggaat

SEQ ID NO: 557641 - DNA, 75 bp, synthetic construct
  source 1..75: mol_type = other DNA
gctgtaattagtaactctcttcgaaaacaattggctagtatgccgaacttggctggaataggcagcaagtatcgt

SEQ ID NO: 557642 - DNA, 75 bp, synthetic construct
  source 1..75: mol_type = other DNA
gcaaggtctatcaacaattgctcaggattatgttgaaggtgctattgaaacatctcacaacgaaagtgatgttca

SEQ ID NO: 557643 - DNA, 75 bp, synthetic construct
  source 1..75: mol_type = other DNA
tcagcgccggactatcattcgctgtttccgcgacgagcggaaataacactgtcgggcaggtctacgaaattgtcg

SEQ ID NO: 557644 - DNA, 75 bp, synthetic construct
  source 1..75: mol_type = other DNA
atgaaaaaagagacggatatcaatatcgacgcgctgctgcgcgacacgtttctgacggtggtggaactgcgtcag

SEQ ID NO: 557645 - DNA, 75 bp, synthetic construct
  source 1..75: mol_type = other DNA
gagcaagtagtagagcttgggcttgttactatcgcgcaggcttatgctaatgattctataaaatcagcgcatacc

SEQ ID NO: 557646 - DNA, 75 bp, synthetic construct
  source 1..75: mol_type = other DNA
gccgttgctgtggttgcttgatgtggacagcggcggattccatttcatgggcgacagttccagcgggaaaagcgt

SEQ ID NO: 557647 - DNA, 75 bp, synthetic construct
  source 1..75: mol_type = other DNA
ggaacgccgaacggtcagaaagtaacgattatgcttgaggagctgctggcgctgggcgttactggtgcagagtac

SEQ ID NO: 557648 - DNA, 75 bp, synthetic construct
  source 1..75: mol_type = other DNA
ataatccgccgatccgcgtgtttgaatctggttcgatcctgctttatctggcggagaaatttggctacttcctgc

SEQ ID NO: 557649 - DNA, 75 bp, synthetic construct
  source 1..75: mol_type = other DNA
agagcaaattgcaaggttgaatacaccggccttaattcgtgattacattcgaaaacagttttcgagtaggtcgat

SEQ ID NO: 557650 - DNA, 75 bp, synthetic construct
  source 1..75: mol_type = other DNA
gtgcttggcgctattgctgattatgcaaaagaacaaatcttatcgcaaatacacaagacagaatcatattctgta

SEQ ID NO: 557651 - DNA, 75 bp, synthetic construct
  source 1..75: mol_type = other DNA
ggtttatcgcccgccatgcttcacgctttgaagggggcagcacatacagcgaaccagtaagcaaccgcgccggat

SEQ ID NO: 557652 - DNA, 75 bp, synthetic construct
  source 1..75: mol_type = other DNA
cgcggtacggcgctgaaaatcatcgtccgtgaacaaaccccgagcctgcgcgcgaccgatgagcggctactgctc

SEQ ID NO: 557653 - DNA, 75 bp, synthetic construct
  source 1..75: mol_type = other DNA
ggacagcaatctgccaaaggaccgtgaatctctgttctggctgaacgtacaggaagtgccacctaaacctgattt

SEQ ID NO: 557654 - DNA, 75 bp, synthetic construct
  source 1..75: mol_type = other DNA
gtacgccgccataatcgcgtagttcgtggcgaggccgtctatcgctgtgttcactgcggtgaacagctggttgcg

SEQ ID NO: 557655 - DNA, 75 bp, synthetic construct
  source 1..75: mol_type = other DNA
ttttttaaaatcggggcaaagcaaaaacagattatccgtattattaataccgatagttctctgccaaaagaccgg

SEQ ID NO: 557656 - DNA, 75 bp, synthetic construct
  source 1..75: mol_type = other DNA
tgttaatgaaaaacatttttctcttttttatgctatagatagacttgaaaatattcttgatgcagatatgaatga

SEQ ID NO: 557657 - DNA, 75 bp, synthetic construct
  source 1..75: mol_type = other DNA
ggttttttcagttcactcataaccccaagaaatggttattttcaaacagtatcaacactcattgttggtgcgacg

SEQ ID NO: 557658 - DNA, 75 bp, synthetic construct
  source 1..75: mol_type = other DNA
ggtgtaaattatctatatttattattgcatttattttgctatggcttagaaggctggatatactcacaaacgcac

SEQ ID NO: 557659 - DNA, 75 bp, synthetic construct
  source 1..75: mol_type = other DNA
agatttgcttaacctgcaaagcgcagcagaaacgcatttagcgcactatgaagacttcatccgcagcatgaaaca

SEQ ID NO: 557660 - DNA, 75 bp, synthetic construct
  source 1..75: mol_type = other DNA
gtggttgccggtggaattactgctggcgctcggcatcgtgccttacggcgtggcggataccatcaactatcgcct

SEQ ID NO: 557661 - DNA, 75 bp, synthetic construct
  source 1..75: mol_type = other DNA
ggggtgaaagttgatggcaaggacgtgtctctcagtaataaaacgctggctgacattgcccgtttcagcccgttc

SEQ ID NO: 557662 - DNA, 75 bp, synthetic construct
  source 1..75: mol_type = other DNA
atgaagaagggaagaagaatatttcctttacagtgacaaatgaagcggacaaaacctatggtggccaggtctgga

SEQ ID NO: 557663 - DNA, 75 bp, synthetic construct
  source 1..75: mol_type = other DNA
ggacggcggcagattgccgtccgaccgggagacgctattctggctgaatattcaggaaattccgccgaagccgaa

SEQ ID NO: 557664 - DNA, 75 bp, synthetic construct
  source 1..75: mol_type = other DNA
gtacagaacccaaccttgaactgctgaccgaaatgaaaccgtcgtttatggtctggtctgcaggatatggccctt

SEQ ID NO: 557665 - DNA, 75 bp, synthetic construct
  source 1..75: mol_type = other DNA
ttcccgcaccgtgtcagcgggaagaaaccgcccctggcccacagccatatctgccagatagcattcgagggagcc

SEQ ID NO: 557666 - DNA, 75 bp, synthetic construct
  source 1..75: mol_type = other DNA
gcgcaacgatggtattttacttctggttgcctgggaagatcatactgtccgtatagaagtgggctacgggctgaa

SEQ ID NO: 557667 - DNA, 75 bp, synthetic construct
  source 1..75: mol_type = other DNA
atgagggtatctacatttccggaatcgtctttttttgacgatctgcattatctcacgcaattacatcacctctca

SEQ ID NO: 557668 - DNA, 75 bp, synthetic construct
  source 1..75: mol_type = other DNA
aagtagataagattgctcaacagaaagccaaaacagaaaaacagaatcaaagagcacaagctgccgcagcaagag

SEQ ID NO: 557669 - DNA, 75 bp, synthetic construct
  source 1..75: mol_type = other DNA
gtcggtaaaaacgagaccattaacgccacccacgatggacgccactggcgacgctaccccgaaccacaccggtta

SEQ ID NO: 557670 - DNA, 75 bp, synthetic construct
  source 1..75: mol_type = other DNA
aaatcattacagtatcaaaactccaattccattatcgattgctgtcattattttactggctgtactttcgtattt

SEQ ID NO: 557671 - DNA, 75 bp, synthetic construct
  source 1..75: mol_type = other DNA
ggtggcggctcaagtggcggaggctcaggcggcggatttagcggcgggggcggttcttctggcggtggcggcgcg

SEQ ID NO: 557672 - DNA, 75 bp, synthetic construct
  source 1..75: mol_type = other DNA
ctggaaaatctcaagggtatctataacctacgctttgtcagcgagccagataacggtatctacgacgccatgaac

SEQ ID NO: 557673 - DNA, 75 bp, synthetic construct
  source 1..75: mol_type = other DNA
gccggcgcgtaacgggatttcagaaggtgatgacccacgacctgcgggtcaaaattaaggacgtgctcggtgaac

SEQ ID NO: 557674 - DNA, 75 bp, synthetic construct
  source 1..75: mol_type = other DNA
ttcccgcaccgcgtcagcagggagaaaccagcactgaggcacagccatatccgccagatagcattcgagggagcc

SEQ ID NO: 557675 - DNA, 75 bp, synthetic construct
  source 1..75: mol_type = other DNA
agatgaaagatgtgcgtgaacgtgcaaccaaatcttatgatgaagctgaatatgtagttgataagaaaacaggcc

SEQ ID NO: 557676 - DNA, 75 bp, synthetic construct
  source 1..75: mol_type = other DNA
ggcaacaaaattaagcgccgggcaaaaccgggttggtatatttatcacagcctgcccgctagtcatcaggcgata

SEQ ID NO: 557677 - DNA, 75 bp, synthetic construct
  source 1..75: mol_type = other DNA
agcagggttggtatatttatcacagcctaccggctagccatcaggctattttcttcccgctgcgtgggctgaaaa

SEQ ID NO: 557678 - DNA, 75 bp, synthetic construct
  source 1..75: mol_type = other DNA
tctggcctgtgaactgttgccggagtggcgtgagttttttgatgctctgctggaaaacggagggaaaagcctgtg

SEQ ID NO: 557679 - DNA, 75 bp, synthetic construct
  source 1..75: mol_type = other DNA
ttaaaatagcgttagataactcgccatggaaaaatgattcccccagagatgcaaaatcagttatcgaatttaaga

SEQ ID NO: 557680 - DNA, 75 bp, synthetic construct
  source 1..75: mol_type = other DNA
tttgtaaaggcgatattagccaactattacatctgggtttaaatggagcggttgctgctgttgttaaagatgttg

SEQ ID NO: 557681 - DNA, 75 bp, synthetic construct
  source 1..75: mol_type = other DNA
tgcggctggtcagcccgttcatcgtctcgaaaaagaatccacacgtcgtagtgattctgcgcttgtcacgatgca

SEQ ID NO: 557682 - DNA, 75 bp, synthetic construct
  source 1..75: mol_type = other DNA
taccgtgaactgggtatccccctgccgaaagttcgcaccctggttaactgcatggattatacggcgctggccaga

SEQ ID NO: 557683 - DNA, 75 bp, synthetic construct
  source 1..75: mol_type = other DNA
cggcagccgcagtcattatgcatcatcttgtttcagagctgtttccggaatggaaaacccgttttgatgatgtgc

SEQ ID NO: 557684 - DNA, 75 bp, synthetic construct
  source 1..75: mol_type = other DNA
attcttaatgacgacattgtatatgtcctcaaaaatgcagattcaggtgaagaaataaaagtcactcttcaagac

SEQ ID NO: 557685 - DNA, 75 bp, synthetic construct
  source 1..75: mol_type = other DNA
ctgcttggctggctgactttcgcctggggctgggagcacgtctttaccgttatggggggattggttttgtgctga

SEQ ID NO: 557686 - DNA, 75 bp, synthetic construct
  source 1..75: mol_type = other DNA
ctggtcgctgttcaccttcctgcaaggctttgtcgatatgtttccgctggcctgggctgggatctccatgttctt

SEQ ID NO: 557687 - DNA, 75 bp, synthetic construct
  source 1..75: mol_type = other DNA
tagataaagttaaagcctgggattttcggctagctaatataaatacttctgaatgtttaaatgttgcctatggtg

SEQ ID NO: 557688 - DNA, 75 bp, synthetic construct
  source 1..75: mol_type = other DNA
aaagatataaacatttgttagtacaacatcattactttaccggaatcattgcaggagtccgttatctttaccgta

SEQ ID NO: 557689 - DNA, 75 bp, synthetic construct
  source 1..75: mol_type = other DNA
ttgtctattcttatgagtaaagataatgtgtataaataccctgatcaagatgttatgagggatgacaatattttt

SEQ ID NO: 557690 - DNA, 75 bp, synthetic construct
  source 1..75: mol_type = other DNA
tagcggagcataaaggcgatctgcttatcgctgcgctggtgcacgatcctcgactccgtgccgctttagctgact

SEQ ID NO: 557691 - DNA, 75 bp, synthetic construct
  source 1..75: mol_type = other DNA
ttaaagctcctcgatgtttcaagctctatcagtgcaatgcaccgcctttctgtagctgaacaatacaaagctatt

SEQ ID NO: 557692 - DNA, 75 bp, synthetic construct
  source 1..75: mol_type = other DNA
tgatttattttctttccctggcaataggccaccagaagtagaagtatttcaacatgaggaagtaaaaaaattcct

SEQ ID NO: 557693 - DNA, 75 bp, synthetic construct
  source 1..75: mol_type = other DNA
caggccggcagtcagcgtggcgacacgctgacgctgggcgaaaatctgctggatttggatcacaacgtggatcac

SEQ ID NO: 557694 - DNA, 75 bp, synthetic construct
  source 1..75: mol_type = other DNA
tacgggagaaaaacttccggcagacagggaatcactgttctggctgaatgttcttgatattccggccaaaccttc

SEQ ID NO: 557695 - DNA, 75 bp, synthetic construct
  source 1..75: mol_type = other DNA
ggcaaaaaaagactccgataactcagagcagcggaataataattatttgcaactagctattcgtagtcgcataaa

SEQ ID NO: 557696 - DNA, 75 bp, synthetic construct
  source 1..75: mol_type = other DNA
tgcgaccatccgacataaccgggccaggggcaaacatcagataacctcaatgtctgatattgtcagggacctgtc

SEQ ID NO: 557697 - DNA, 75 bp, synthetic construct
  source 1..75: mol_type = other DNA
caggctggaagcaagcagaccgatacgcttgtactgggtgagaatttgcttgaggccatttataacgatgaccac

SEQ ID NO: 557698 - DNA, 75 bp, synthetic construct
  source 1..75: mol_type = other DNA
ttgactggggtgtaacttatcaatatctgggatcgcgatacgattcggattactcatcctggccctataagtcag

SEQ ID NO: 557699 - DNA, 63 bp, synthetic construct
  source 1..63: mol_type = other DNA
ggctgccggtctcagcgtgccgggcgttgcccgcgccgttgttggtcagcaggaagccattaa

SEQ ID NO: 557700 - DNA, 75 bp, synthetic construct
  source 1..75: mol_type = other DNA
tggtaacagcagcaggtgcttaccagacgaccaaaggttttaacattcagcctggctcaccatacagtggtgata

SEQ ID NO: 557701 - DNA, 75 bp, synthetic construct
  source 1..75: mol_type = other DNA
aagcgtaataacactgggctttatctaaccgggcagcagcaaattgataacatcacactagaagcctctggtcgt

SEQ ID NO: 557702 - DNA, 75 bp, synthetic construct
  source 1..75: mol_type = other DNA
ccagaaccgttctggatgtgatgcgccgcttacctggtgttgatgtcgcacagtatggcggcatgggacagagtt

SEQ ID NO: 557703 - DNA, 75 bp, synthetic construct
  source 1..75: mol_type = other DNA
agcgtaaagcctaccaggcatggtgggatagagtggcgtcgattgttgcttgtgccagatctggctcggctaact

SEQ ID NO: 557704 - DNA, 75 bp, synthetic construct
  source 1..75: mol_type = other DNA
tcggcatcatgctgactgaaatgcacggcacacaacaagatacgcaagccgccattgcctggctgcaggaacacc

SEQ ID NO: 557705 - DNA, 75 bp, synthetic construct
  source 1..75: mol_type = other DNA
acacgttctattctcgagctgctgaaagacattaaccgccgtctgggtttgacgattctgttgatcacccacgaa

SEQ ID NO: 557706 - DNA, 75 bp, synthetic construct
  source 1..75: mol_type = other DNA
agaatgcggttgttccaccttcgcaggcaaatgttgataccgctgcgactccggcaccagcggcaacaacaacac

SEQ ID NO: 557707 - DNA, 75 bp, synthetic construct
  source 1..75: mol_type = other DNA
atgtctgaaatgaccccacgcgaaatcgtcagcgaactggataagcacatcatcggccaggacaacgccaagcgt

SEQ ID NO: 557708 - DNA, 75 bp, synthetic construct
  source 1..75: mol_type = other DNA
gaagtcactgaagcgggtgcacagttcgcaattagcccgggtctgaccgagccgctgctgaaagctgctaccgaa

SEQ ID NO: 557709 - DNA, 75 bp, synthetic construct
  source 1..75: mol_type = other DNA
ccgaagcgggtgcgcagttcgccattagtccgggtctgaccgagccactgctgaaagcggcgaccgaaggcacta

SEQ ID NO: 557710 - DNA, 75 bp, synthetic construct
  source 1..75: mol_type = other DNA
aaaagcaggctccactacgggctgcaaaagttgcgccgatgcagagtttttccctcggtaaacgccgcaaaaaac

SEQ ID NO: 557711 - DNA, 75 bp, synthetic construct
  source 1..75: mol_type = other DNA
gcactgcgaccagtgaaaacggcgctcaggcgatcagcgattatttaggtgctaacggtaaaggtctgatgttga

SEQ ID NO: 557712 - DNA, 75 bp, synthetic construct
  source 1..75: mol_type = other DNA
aatttgctttgtttctcaactcgggcgatatctttcacccgaatgccgcgaattttgtgcgtaagttaaaaacac

SEQ ID NO: 557713 - DNA, 75 bp, synthetic construct
  source 1..75: mol_type = other DNA
gacaaccacagatcaggctatggcgaccacgccgacatcacctgtggataccaccgcaaccaacacgcaaacacc

SEQ ID NO: 557714 - DNA, 75 bp, synthetic construct
  source 1..75: mol_type = other DNA
atgcagagtttttccctcggtaaacgccgcaaaaaacgtgacggctggctgatgaccttcacctggctggtgttg

SEQ ID NO: 557715 - DNA, 75 bp, synthetic construct
  source 1..75: mol_type = other DNA
tcggcggaactgagcagtaatagcgagcaggggcagagtgttccgttaaatacgtcgacaactacagacccggct

SEQ ID NO: 557716 - DNA, 75 bp, synthetic construct
  source 1..75: mol_type = other DNA
ctgccaatccgcgttgagctgcaggcactgaccaccagcgacttcgagcgtattctgaccgagccgaatgcctct

SEQ ID NO: 557717 - DNA, 75 bp, synthetic construct
  source 1..75: mol_type = other DNA
acgccggaaacgtgaagcagagagcaggaaaaagggcaacacgttcgaaaaagttgcctcggactggtacgagat

SEQ ID NO: 557718 - DNA, 75 bp, synthetic construct
  source 1..75: mol_type = other DNA
atcgactttgtcatgctggcgaaaaaaccgaccatcaacgcctggtggaagctactctcccgcgaggtgaaataa

SEQ ID NO: 557719 - DNA, 75 bp, synthetic construct
  source 1..75: mol_type = other DNA
gtgatatatggcgttctcttgagcgtcatgtgctgccacccataggccatcgcccaatcacagaactggttgcac

SEQ ID NO: 557720 - DNA, 75 bp, synthetic construct
  source 1..75: mol_type = other DNA
gtcgctgccttacaatttaatgcagtacgcgtggcggcgtttgggatatcaattccctcattggtctcttcatga

SEQ ID NO: 557721 - DNA, 75 bp, synthetic construct
  source 1..75: mol_type = other DNA
cgccttagtgaagtgatgaagagagagaacaccttcaggcatgtagctacgctctggtttgaacttaaaaaaggg

SEQ ID NO: 557722 - DNA, 75 bp, synthetic construct
  source 1..75: mol_type = other DNA
cgaagtaactacctggaaaagcgcgtggtgcttatgcgctggtggggggaatttgtagaggccgcagctaccgga

SEQ ID NO: 557723 - DNA, 75 bp, synthetic construct
  source 1..75: mol_type = other DNA
gattgaagaagaacaaccgaaacaggaagaagtaaagaaactgaatgttaccgcgatttacgcatgtactacaaa

SEQ ID NO: 557724 - DNA, 75 bp, synthetic construct
  source 1..75: mol_type = other DNA
gatgcaccccccagttgtagtggaaatgaatattgacgctgatggattcatgtcaaaaactacaaaaactggtgt

SEQ ID NO: 557725 - DNA, 75 bp, synthetic construct
  source 1..75: mol_type = other DNA
atgaaaaacattatcgctgctatcggtctttctgctactgctttcgctgttaatgctgcgtcctttgattgcact

SEQ ID NO: 557726 - DNA, 75 bp, synthetic construct
  source 1..75: mol_type = other DNA
ccccaaagaacacagggaaaaacaacgccgggatgatgaaatacggcgattaaacacatttcagcgcgtggccga

SEQ ID NO: 557727 - DNA, 75 bp, synthetic construct
  source 1..75: mol_type = other DNA
aaaaacatatgccaacaatccgccccgaacagctgcccgagcttatgcaggctttatcagtatcggcaacagaac

SEQ ID NO: 557728 - DNA, 75 bp, synthetic construct
  source 1..75: mol_type = other DNA
tattatgtgtggcgtgataatcaagatatgattcgcttagaagtacgagaaccaggatattctaaaatctatgtt

SEQ ID NO: 557729 - DNA, 75 bp, synthetic construct
  source 1..75: mol_type = other DNA
ttgttaaccgtcgcttgatcatgggtctggcagacggcgaagtactggttgatggtcgtctgatctacaccgcca

SEQ ID NO: 557730 - DNA, 75 bp, synthetic construct
  source 1..75: mol_type = other DNA
tcgcggtgaactgtttggcgcaaaaggcccacaattgccagcaccgaacatgctaatgatggatcgggtggtcaa

SEQ ID NO: 557731 - DNA, 75 bp, synthetic construct
  source 1..75: mol_type = other DNA
tattggtagatggtcgtctgatctacaccgccagcgacctgaaagtcggtctgttccaggatacttctgcattct

SEQ ID NO: 557732 - DNA, 75 bp, synthetic construct
  source 1..75: mol_type = other DNA
ttcctgcagtttttctcactgtatatcctgccggttatttgtattgctgcaggttatgtgttcttttctctgctt

SEQ ID NO: 557733 - DNA, 75 bp, synthetic construct
  source 1..75: mol_type = other DNA
ggagttctttgcgaaaaagagcaaagagtactctaacggtgatattactattcgtatttatccaaatggaacatt

SEQ ID NO: 557734 - DNA, 75 bp, synthetic construct
  source 1..75: mol_type = other DNA
aaaaagtgacctatcgtattcactttaaacgcatagttaaccgtcgtctgattatgggcctggctgatggcgaag

SEQ ID NO: 557735 - DNA, 75 bp, synthetic construct
  source 1..75: mol_type = other DNA
gagactggcttctctgaccttttaaagaaggatgcaaataatccttatggtaaaacgataagagcattttgccaa

SEQ ID NO: 557736 - DNA, 75 bp, synthetic construct
  source 1..75: mol_type = other DNA
aagactttatccgcagcatgaaaccccgctttgtgaagcgtggtgcacgcccgttattgctgacgacgcttatcg

SEQ ID NO: 557737 - DNA, 75 bp, synthetic construct
  source 1..75: mol_type = other DNA
acggaagaaacacctgtttcatcaagtgaaaaggtagctaatgataatgaggaggatgtgttagaaaattttgcc

SEQ ID NO: 557738 - DNA, 75 bp, synthetic construct
  source 1..75: mol_type = other DNA
tctgggtctggatgcgatgtggcagctggtagggttctaccttggctggctgggcggcgaaggtaaaggccgcgc

SEQ ID NO: 557739 - DNA, 75 bp, synthetic construct
  source 1..75: mol_type = other DNA
ttcttggttccatgtactgccgatatattttcggcttactgcataggactcattggtgaaactttaccaaaattt

SEQ ID NO: 557740 - DNA, 75 bp, synthetic construct
  source 1..75: mol_type = other DNA
tgatacctagtttaattgctagtaaagctcaagagttaaataattgtgaatacgattatgttcttattgatgtac

SEQ ID NO: 557741 - DNA, 75 bp, synthetic construct
  source 1..75: mol_type = other DNA
accataccattttcttgcagtttttttcactctatatcctgccggtcatttgtattgctgctgggtatgtgtttt

SEQ ID NO: 557742 - DNA, 75 bp, synthetic construct
  source 1..75: mol_type = other DNA
tggtcgtttttggtacgaaaggtggaagaccaagaaataccacaattattgacagagatgcggtaagacatgctt

SEQ ID NO: 557743 - DNA, 75 bp, synthetic construct
  source 1..75: mol_type = other DNA
gaaagatggtcgccttaaaatagcggatccgtccaatcctttattgagcaatgaagctcttggactcagggatac

SEQ ID NO: 557744 - DNA, 75 bp, synthetic construct
  source 1..75: mol_type = other DNA
aagttgaactgtttcgcaagtctttcatctcacttgcccgtgagtgtggtggcagttacgcaacaacagctgaca

SEQ ID NO: 557745 - DNA, 75 bp, synthetic construct
  source 1..75: mol_type = other DNA
gcgcccccgggatactattattaccgatcgtgatgttgtcagacaggccctgagttatgctgagaaaataatgaa

SEQ ID NO: 557746 - DNA, 75 bp, synthetic construct
  source 1..75: mol_type = other DNA
gatttaggtcatggggacggtcgggggcgttatgtgaaacaggtttactttaaaaacggtgatattcaggaataa

SEQ ID NO: 557747 - DNA, 75 bp, synthetic construct
  source 1..75: mol_type = other DNA
atgagcagaaaatcgcagcgttccagagttgagatgtttcgcaaggatttcattactcttgcccgtgagtgtggc

SEQ ID NO: 557748 - DNA, 75 bp, synthetic construct
  source 1..75: mol_type = other DNA
gaatgtcccgcgagattgccgaacgggtttcctatctgcgtcatgaatgcccacatcaatgccagccagccaaac

SEQ ID NO: 557749 - DNA, 75 bp, synthetic construct
  source 1..75: mol_type = other DNA
aacgctggggagcatgggcggcaaataatcatgagaatgttagttggtcgccaattgctgcggggtttaaaggcc

SEQ ID NO: 557750 - DNA, 75 bp, synthetic construct
  source 1..75: mol_type = other DNA
gaagaagtggaactgggccgcatccagaaaatttctggtgcgaacctgagccgtaactgggtaatgatcccgcat

SEQ ID NO: 557751 - DNA, 75 bp, synthetic construct
  source 1..75: mol_type = other DNA
caccgacgtgttgaataaacttggtgataaagagcgcacggcattattaaaagcagccggtgatgctgccaactt

SEQ ID NO: 557752 - DNA, 75 bp, synthetic construct
  source 1..75: mol_type = other DNA
gaacgcgtcaaaccgttatacgatgaattcaaggcgaaagatgcacaatcagccaaaaaccttgagctagtagaa

SEQ ID NO: 557753 - DNA, 75 bp, synthetic construct
  source 1..75: mol_type = other DNA
ccgattctggttgattttgccaccagtagcatggcgctaaataaagcacgggtaatgtcgtccaccgggaagcag

SEQ ID NO: 557754 - DNA, 75 bp, synthetic construct
  source 1..75: mol_type = other DNA
tgagtttgcaaattcactagcttgtagatacgggctaaaacgaccaaatggtattgaggcatatttttctaagca

SEQ ID NO: 557755 - DNA, 75 bp, synthetic construct
  source 1..75: mol_type = other DNA
tattgatgtgttttctctaatgaatacttttcagcagcatgtgcagattattgaacgagttcgcaggatgacatc

SEQ ID NO: 557756 - DNA, 75 bp, synthetic construct
  source 1..75: mol_type = other DNA
ctccgttgcgcgaaaggcattgaaggcagccgtacaaaaagcaggcatcgttagcaagcgtgtcacttgtcatac

SEQ ID NO: 557757 - DNA, 75 bp, synthetic construct
  source 1..75: mol_type = other DNA
taatttactgttggctccggcaatcgacaccgttaatagattacctatcctgctctatcagaaccaatttgcaga

SEQ ID NO: 557758 - DNA, 75 bp, synthetic construct
  source 1..75: mol_type = other DNA
gacaccccagccaccgatgctttcctggctgaagtccgggctaaggcgtttgatgacctttgcgcggcgttcgtt

SEQ ID NO: 557759 - DNA, 75 bp, synthetic construct
  source 1..75: mol_type = other DNA
gcggggctgaagtctggcgatatggacgaaatcaaggttatcaaccgtggagggcaggcatattgcgtaaaagat

SEQ ID NO: 557760 - DNA, 75 bp, synthetic construct
  source 1..75: mol_type = other DNA
aaagtctctgcaatcagacaccccagccaccgatgctttcctggctgaagtgcgggcgcagggggttgagatgat

SEQ ID NO: 557761 - DNA, 75 bp, synthetic construct
  source 1..75: mol_type = other DNA
cagggctttcttatctgcatgacctgcatattgattatatcaaaattgatcacagtttcgttggccgcgtaaacg

SEQ ID NO: 557762 - DNA, 75 bp, synthetic construct
  source 1..75: mol_type = other DNA
acgttacgcggcgtagaagtacttgccaggtggaaacatcctcgcggaggatatatttcacccgcagcatttatt

SEQ ID NO: 557763 - DNA, 75 bp, synthetic construct
  source 1..75: mol_type = other DNA
gacaccgttaatagattacctatcctgctctatcagaaccaatttgcagatacgcgcattttggttacgataagt

SEQ ID NO: 557764 - DNA, 75 bp, synthetic construct
  source 1..75: mol_type = other DNA
gtgtccactattctctcaggaatttcaggatctgccagacggtgctgagacgacgcttacgtttattaccggtgt

SEQ ID NO: 557765 - DNA, 75 bp, synthetic construct
  source 1..75: mol_type = other DNA
ctcgtattcctgttttcccggacagtaatttactgttggctccggcaatcgacaccgttaatagattacctatcc

SEQ ID NO: 557766 - DNA, 75 bp, synthetic construct
  source 1..75: mol_type = other DNA
atacggcgggagcgagatatgctgtcaacaatatcaatcacatacttgaagaagcgtcacaggcgactcaagcgg

SEQ ID NO: 557767 - DNA, 75 bp, synthetic construct
  source 1..75: mol_type = other DNA
gacaccccagccaccgatgctttcctggctgaaattgaacgcaaagcaatccgcaagttcattaacagcattgaa

SEQ ID NO: 557768 - DNA, 75 bp, synthetic construct
  source 1..75: mol_type = other DNA
ccaggaaggcattaatgcggtaatgctcgattttgcccatgtcatgatcgatatgatgcaggcgaatacgccttt

SEQ ID NO: 557769 - DNA, 75 bp, synthetic construct
  source 1..75: mol_type = other DNA
ttaccgaagcgtgttagaagatgagatgctcactttgcttaatgctggaggtcaacttgaagttaaatacactct

SEQ ID NO: 557770 - DNA, 75 bp, synthetic construct
  source 1..75: mol_type = other DNA
gtgcgcctgtttaatccagttactttgactgaagtaatccccggtcttcatgatgtgaccggggctattgaatta

SEQ ID NO: 557771 - DNA, 75 bp, synthetic construct
  source 1..75: mol_type = other DNA
cagcgcggcgcagacttgccccggactatgtactgagctttgccgggcgcattccctgcggaggtgaacatgcgt

SEQ ID NO: 557772 - DNA, 75 bp, synthetic construct
  source 1..75: mol_type = other DNA
atggctaaacagaagtgtacctggttatttgcggcgatcaaccgcagtcaacgcaatgcccgtcctgtgatgtta

SEQ ID NO: 557773 - DNA, 75 bp, synthetic construct
  source 1..75: mol_type = other DNA
atgtcactcagacaaatcgtaacccttgctgatgcggttgtcaaaggacaacccacccgcattccgccaatgaaa

SEQ ID NO: 557774 - DNA, 75 bp, synthetic construct
  source 1..75: mol_type = other DNA
gtcggcgcaggcgttggtgagttggtactcctcagcagtggttccagcgccagacatgtgttttccggccctaac

SEQ ID NO: 557775 - DNA, 75 bp, synthetic construct
  source 1..75: mol_type = other DNA
ggctgctgaaaatatctcgcttaagcaatctgagaaggaatttaatgacttttgtcgtgaggagtttagcgaatg

SEQ ID NO: 557776 - DNA, 75 bp, synthetic construct
  source 1..75: mol_type = other DNA
atgcacttaagggagattctttattttctgatggtgaatacctgcatgcagctattgtttccgcagctgtatatt

SEQ ID NO: 557777 - DNA, 75 bp, synthetic construct
  source 1..75: mol_type = other DNA
gtattgcaagaacagtagcagagcgcgtgtcagacctgaaaaactcaccattaagcgaacaacatttaaagcggc

SEQ ID NO: 557778 - DNA, 75 bp, synthetic construct
  source 1..75: mol_type = other DNA
attaaatttgcctcagaagtgatgcttgcgaagtgcgttctggtttcgcctgaagacgcaccatcaaaagcatta

SEQ ID NO: 557779 - DNA, 75 bp, synthetic construct
  source 1..75: mol_type = other DNA
cagacatgtgttttccggccctaacgaagccatcgacctggcagtggtcggcattgtcgatacgctttcgcgcta

SEQ ID NO: 557780 - DNA, 75 bp, synthetic construct
  source 1..75: mol_type = other DNA
cacaacgtcgcgtgggagcgccattgctgtggagcccaaacgaagaagaagaccgacagctacgtgaagactggg

SEQ ID NO: 557781 - DNA, 75 bp, synthetic construct
  source 1..75: mol_type = other DNA
aacattcgtttgtgttgccccgttaacgggcaatagcggagtgacctgggaaaccagccacgtgcgccacaagct

SEQ ID NO: 557782 - DNA, 75 bp, synthetic construct
  source 1..75: mol_type = other DNA
ttactgtatccgtcagtggagtgggttcagtcttttgcagacgaacgctgcggacgtgctggcgttgtgtatcag

SEQ ID NO: 557783 - DNA, 75 bp, synthetic construct
  source 1..75: mol_type = other DNA
tgtttccggaccggcaaatcagtttcaccagctacaacattttgacaatcgctgcactggttgccaacagtgaca

SEQ ID NO: 557784 - DNA, 75 bp, synthetic construct
  source 1..75: mol_type = other DNA
tcgacaacgctgcacatgtactcctgttaccggaagggcaaaatttcagcggtctgcggcagagagttcaagaga

SEQ ID NO: 557785 - DNA, 75 bp, synthetic construct
  source 1..75: mol_type = other DNA
ggttcctcttactattaattctgacacatcaagattaagcgattatgtggattttacagcgagagcaagtcggga

SEQ ID NO: 557786 - DNA, 75 bp, synthetic construct
  source 1..75: mol_type = other DNA
tattcagtctctggctggcgccactggtacgccagaaccggcattacgtcgctttgagctggcgctgttggggca

SEQ ID NO: 557787 - DNA, 75 bp, synthetic construct
  source 1..75: mol_type = other DNA
aaatttaatcagtatcgctacatcagattcctgaataagcgcgcaaaaaagcgactaaacactaagctattcagg

SEQ ID NO: 557788 - DNA, 75 bp, synthetic construct
  source 1..75: mol_type = other DNA
gcgtcgaattttgattttattggtagccatgaaagcacgttctacgagctggacggcgagtggtatcacgaaata

SEQ ID NO: 557789 - DNA, 75 bp, synthetic construct
  source 1..75: mol_type = other DNA
gtgggaaaagagaagaaatcacgcgttctgacaaaaccctgcgttattgagtatgaaggccggattgtcggctat

SEQ ID NO: 557790 - DNA, 75 bp, synthetic construct
  source 1..75: mol_type = other DNA
cagctacaacattttgacaatcgctgcactggttgccaacagtgacatgttagcgattattcccagccgttttta

SEQ ID NO: 557791 - DNA, 75 bp, synthetic construct
  source 1..75: mol_type = other DNA
aaaacatacggtggtcaggtttggattgataacacaaaccggggcaacggggtttatatggtgccacaaccgccg

SEQ ID NO: 557792 - DNA, 75 bp, synthetic construct
  source 1..75: mol_type = other DNA
tggctgccctcctttccctctctttctgcagtcaggtcatggcggcattcacgctgaacggaacccgcttcattt

SEQ ID NO: 557793 - DNA, 75 bp, synthetic construct
  source 1..75: mol_type = other DNA
aactgatttaccgtcctgtctcccttaaggatggtcgtaagaatgcggaaaagcaactgaagctggaacaacgtg

SEQ ID NO: 557794 - DNA, 75 bp, synthetic construct
  source 1..75: mol_type = other DNA
cgatagttctctgccaaaagaccgggagtcactgttctggctgaatgttcaggagatcccgccaaagccggagaa

SEQ ID NO: 557795 - DNA, 75 bp, synthetic construct
  source 1..75: mol_type = other DNA
atcaaacttgctaaaaatattttcgagggagtatctgttgaggctattaatgattggggtggggtagaacagttt

SEQ ID NO: 557796 - DNA, 75 bp, synthetic construct
  source 1..75: mol_type = other DNA
acttatggcgggcaagtttggattgataacagcactcaaggaaacgggggatatatggttccacaaccacctttt

SEQ ID NO: 557797 - DNA, 75 bp, synthetic construct
  source 1..75: mol_type = other DNA
ctcctggacctgtcccgtaacattcttaagttctgggacgacctgccaaccatcggcgagcgacgtgcttttgcc

SEQ ID NO: 557798 - DNA, 75 bp, synthetic construct
  source 1..75: mol_type = other DNA
tgcatcctgacacgatttcacgagtgcaggaatgtcgggatacagcaactgaaactgaaaatatgtcagcggcaa

SEQ ID NO: 557799 - DNA, 75 bp, synthetic construct
  source 1..75: mol_type = other DNA
tcggtcggagccctggtccttccagtcatctatcgggcgattaaaactcattatccgcagcttttactgcgcaac

SEQ ID NO: 557800 - DNA, 75 bp, synthetic construct
  source 1..75: mol_type = other DNA
tcgcagcagctttaatgtttatgtcagtacagagctatgccacagtaaatgtagaaagtgttattgatgtatctc

SEQ ID NO: 557801 - DNA, 75 bp, synthetic construct
  source 1..75: mol_type = other DNA
ttgtatcatttctccaaggagaaaatagacgccaactcattggagcgattgcaagaagcttcatctgaccttggt

SEQ ID NO: 557802 - DNA, 75 bp, synthetic construct
  source 1..75: mol_type = other DNA
gttacacgctgttccgggatgcttaccatctggcggggattgagatgccggattttcatcgcgaggatgactggt

SEQ ID NO: 557803 - DNA, 75 bp, synthetic construct
  source 1..75: mol_type = other DNA
ggtgtagatgaagatcatacaaagtttaatttaattccatttaaagatggaaaatactatagagtgaggaaagca

SEQ ID NO: 557804 - DNA, 75 bp, synthetic construct
  source 1..75: mol_type = other DNA
gtcgcttagcctgaaagccaaatggcgaccagaccaggacgctctggagttatcgcccgtcagtgggcgctcgcg

SEQ ID NO: 557805 - DNA, 75 bp, synthetic construct
  source 1..75: mol_type = other DNA
actggcgacacgctggatatcggtaacggcaaacagctcatttttgtcgaaacaccaatgctgcactggccggac

SEQ ID NO: 557806 - DNA, 75 bp, synthetic construct
  source 1..75: mol_type = other DNA
caaacgcgccagtgctttcggctctcacggctggagcggcggtgcggtggatcgtctttccacgcgcctgcagga

SEQ ID NO: 557807 - DNA, 75 bp, synthetic construct
  source 1..75: mol_type = other DNA
cacgacggctgacctcggcccacggatgcaatgcagcgtctgccagtggatttacgatccggcaaaaggcgagcc

SEQ ID NO: 557808 - DNA, 75 bp, synthetic construct
  source 1..75: mol_type = other DNA
cggtgaaaattttcaacgtcgcccgaagcgataaaaacgaaatcctgaccaatgtcttccgctcaaaaggcgtgc

SEQ ID NO: 557809 - DNA, 75 bp, synthetic construct
  source 1..75: mol_type = other DNA
gtcgcttagcctgaaagccaaatggcgaccggaccaggacgctctggagttatgccgtgaacacggtcgcgaaat

SEQ ID NO: 557810 - DNA, 75 bp, synthetic construct
  source 1..75: mol_type = other DNA
tgcgggtatttactgtaaacggtcgggctgacagggtgcaggttcgtctggaatgcgacgatgcagccgtttttg

SEQ ID NO: 557811 - DNA, 75 bp, synthetic construct
  source 1..75: mol_type = other DNA
aagccctgaaattagtgggtgagctgtttgtttatcacatgccatttaaccgcgcgttagggatggagctggagc

SEQ ID NO: 557812 - DNA, 75 bp, synthetic construct
  source 1..75: mol_type = other DNA
gtctggctttgacattcgtctggaagtggacggtggcgtgaaggtgaacaacattggcgaaatcgctgcagcggg

SEQ ID NO: 557813 - DNA, 75 bp, synthetic construct
  source 1..75: mol_type = other DNA
agctctttgtgctcgtaaaaggcgaggtgagcgaagttgaatgtatcactgcattttcacccggcagcaatccgg

SEQ ID NO: 557814 - DNA, 75 bp, synthetic construct
  source 1..75: mol_type = other DNA
atgtcagtagtgactcaaggcactcagatgtacgttctgaataacggtgtggtcagtgaagttgaatgtattact

SEQ ID NO: 557815 - DNA, 75 bp, synthetic construct
  source 1..75: mol_type = other DNA
atttttgaaagtatgaactccaccggtaaggcgttaagtcaggccgatctggtgcgcaattttattctgatgggc

SEQ ID NO: 557816 - DNA, 75 bp, synthetic construct
  source 1..75: mol_type = other DNA
aagatattcagggtgaaagaccttttattttagatttaacatcaaatgagaaatatattaacgatcaaatccgac

SEQ ID NO: 557817 - DNA, 75 bp, synthetic construct
  source 1..75: mol_type = other DNA
cactggtgccggtttaataaaaattatccggtaaacattaaccacgtcattcactattcagaccacaaagcggtg

SEQ ID NO: 557818 - DNA, 75 bp, synthetic construct
  source 1..75: mol_type = other DNA
gcaatcttcgaccagccagattacaaaaaagtcattgatgaaatgcgcagtgaactggcaaaggtaagtcatgaa

SEQ ID NO: 557819 - DNA, 75 bp, synthetic construct
  source 1..75: mol_type = other DNA
tattattctgatgcgtagcaggcttcccgaaaaaagtaaccggggtcgaccgcgactggacagcaccctgtcgga

SEQ ID NO: 557820 - DNA, 75 bp, synthetic construct
  source 1..75: mol_type = other DNA
cggtacaggcgcaaatattggcgctattaaaatcattgcaacaaaagcaccaactagcctatttgtttatcagcc

SEQ ID NO: 557821 - DNA, 75 bp, synthetic construct
  source 1..75: mol_type = other DNA
agtgggcgagtccggttccggtaaaagcactacgggactggcgctactgcgactgattaactctcagggcagcat

SEQ ID NO: 557822 - DNA, 75 bp, synthetic construct
  source 1..75: mol_type = other DNA
caaggggaagtagtggaacaaggaccgtgcgcgcgcgtgtttgccacaccgagcaggagtatacgcgtcagctac

SEQ ID NO: 557823 - DNA, 75 bp, synthetic construct
  source 1..75: mol_type = other DNA
tatctggcagaactgaatggttcgaaaaagcgcatccttgatgatgcgcctgaacatattatcaccggtccctag

SEQ ID NO: 557824 - DNA, 75 bp, synthetic construct
  source 1..75: mol_type = other DNA
agctgtccaggaagccgtcgcacgatatgtggacgaacaaaacagtattatgaaccgccaggtagccctgaacgt

SEQ ID NO: 557825 - DNA, 75 bp, synthetic construct
  source 1..75: mol_type = other DNA
cgatttagatgattattctatttttattaaacctatcgctgatagtctacaagatggtagtaaattttatgttat

SEQ ID NO: 557826 - DNA, 75 bp, synthetic construct
  source 1..75: mol_type = other DNA
tgcgtatcgatcacgtgattcactatagtgataaatctgcggtagacgacttacgttacgccctcagctacctgg

SEQ ID NO: 557827 - DNA, 75 bp, synthetic construct
  source 1..75: mol_type = other DNA
atgaatacttacaatgccaatcccggttacgaaatggatccccagctcctgacgcactttaatcagcatctggat

SEQ ID NO: 557828 - DNA, 75 bp, synthetic construct
  source 1..75: mol_type = other DNA
ctacctggatgggcaacgtcacaacaaatcttatcggatatccaggcaactgggagatatctggaggcggatcac

SEQ ID NO: 557829 - DNA, 75 bp, synthetic construct
  source 1..75: mol_type = other DNA
actgatgttagaacgtaaacgagaagcgcaagccgtcaatcctacaaaacgtggtaatggaaaagcagtagatag

SEQ ID NO: 557830 - DNA, 75 bp, synthetic construct
  source 1..75: mol_type = other DNA
gcaagaaagtgccacggcgaaagcgcaaaaagcggtggatgacatcgccgtccagtgctggctgcggcataagtt

SEQ ID NO: 557831 - DNA, 75 bp, synthetic construct
  source 1..75: mol_type = other DNA
atcggtcaaagacaaaaccgtcgagctggcaaagcaaaaacagatttgcgcgggctatgacaacaatatcaaggc

SEQ ID NO: 557832 - DNA, 75 bp, synthetic construct
  source 1..75: mol_type = other DNA
gtctggcaccagaacgtgttcgcttattatctctccatctcctgtaaccattgcgatgaccccgcatgtacaaaa

SEQ ID NO: 557833 - DNA, 75 bp, synthetic construct
  source 1..75: mol_type = other DNA
gtctggcgtttatgatggcgcatattttacatatcactattgggcaaaccttttcgggtggactgatcgatttcc

SEQ ID NO: 557834 - DNA, 75 bp, synthetic construct
  source 1..75: mol_type = other DNA
tttgccaacctgtcggtgctttttgcggttggtgttgccgtgggactggcgaaaacggataaaggcacggcgggc

SEQ ID NO: 557835 - DNA, 75 bp, synthetic construct
  source 1..75: mol_type = other DNA
agaagtcatcctacagcacagcatcacgttgcaatccgccgaccttatccgccattcttttatttggcgcaaccg

SEQ ID NO: 557836 - DNA, 75 bp, synthetic construct
  source 1..75: mol_type = other DNA
gtagcaaaagagagtttatagaaataatacttcatagcgttgatgcatacaccgaatgtttaaaggaattagata

SEQ ID NO: 557837 - DNA, 75 bp, synthetic construct
  source 1..75: mol_type = other DNA
ttactgccagtaaatgcgatagactctgctgtttttgtaagtcggttgatctaccggttttacgagtttccttcg

SEQ ID NO: 557838 - DNA, 75 bp, synthetic construct
  source 1..75: mol_type = other DNA
gcaggaaagcgccacggcgaaagcgcagaaagcggtggatgacatcgccgttcagtgctggttgcggcacaaatt

SEQ ID NO: 557839 - DNA, 75 bp, synthetic construct
  source 1..75: mol_type = other DNA
atgcgacaaatcatcgacaccctcgcgcaattgcagcgcctgcgggataaatcggtcaaagacaaaaccgtcgag

SEQ ID NO: 557840 - DNA, 75 bp, synthetic construct
  source 1..75: mol_type = other DNA
tctgcgggcgcggcagcgtcggtggaatcgctgaaaaacgtcagcggttacaaaggtacgctgcgcaaggtgatc

SEQ ID NO: 557841 - DNA, 75 bp, synthetic construct
  source 1..75: mol_type = other DNA
actggctcgcgtcgggatcggcgcacaacgttttgtcctgcacgatggcgtctgggccattcgccggagccgacg

SEQ ID NO: 557842 - DNA, 75 bp, synthetic construct
  source 1..75: mol_type = other DNA
atggcgaccatcccctttctccccgaccgcctcaaccgcgagcccgtggtctggcgcggcctgaccaccagcgaa

SEQ ID NO: 557843 - DNA, 75 bp, synthetic construct
  source 1..75: mol_type = other DNA
agtttacaactcgccagtatcttcagtacttatccagcagcggcgattaatgtatggcaagctgcgttggtcgaa

SEQ ID NO: 557844 - DNA, 75 bp, synthetic construct
  source 1..75: mol_type = other DNA
aagataatttccggcagatagaacagtacgaggggatatcagtcgtgcgtttttctgctccgtggtgtccgccct

SEQ ID NO: 557845 - DNA, 75 bp, synthetic construct
  source 1..75: mol_type = other DNA
acaccagtacagagcgcggatggttaataccaaccagtggcaatccggattatgacgaagcactcgacaggctgt

SEQ ID NO: 557846 - DNA, 75 bp, synthetic construct
  source 1..75: mol_type = other DNA
tcgctggaggaagcaccagtcaatctttttcggagattaagctatggcacagggcttgcctgtatcaaacgttgt

SEQ ID NO: 557847 - DNA, 75 bp, synthetic construct
  source 1..75: mol_type = other DNA
ttcaataatgatccgctgatcacacgggcgattgccgtcaatatcttgctcgatctctacaaaacgtctgaacgt

SEQ ID NO: 557848 - DNA, 75 bp, synthetic construct
  source 1..75: mol_type = other DNA
ccgtcgaccgtcgttggaattatcagaaacctgatcaacgtcgaatcaaaatagcactgccctatgtcgtaggcg

SEQ ID NO: 557849 - DNA, 75 bp, synthetic construct
  source 1..75: mol_type = other DNA
ggctggtgctggcttctccggcctttaaggttaaattgtatgtgccgctggcacgtcctgcgctggcgttatggc

SEQ ID NO: 557850 - DNA, 75 bp, synthetic construct
  source 1..75: mol_type = other DNA
aattatatgcacggatttgtcaaaggcatggaaaataaaagatgtgtgtgcgctgatccatatcagtgagagctt

SEQ ID NO: 557851 - DNA, 75 bp, synthetic construct
  source 1..75: mol_type = other DNA
atatatccgtgaatgtggttgtaaaacccccaaccatatccggctggtattaaccaaattaatcagcatggccgc

SEQ ID NO: 557852 - DNA, 75 bp, synthetic construct
  source 1..75: mol_type = other DNA
atcgccaaccgcagattgatttttatcagagattacgtagccctctgaaagagctgcatctgctgcctggctttt

SEQ ID NO: 557853 - DNA, 75 bp, synthetic construct
  source 1..75: mol_type = other DNA
acagatcgccgggttccgcacactggcagtgcaggggaaaacccccgcgcagattggcgatttactggggttcgg

SEQ ID NO: 557854 - DNA, 75 bp, synthetic construct
  source 1..75: mol_type = other DNA
cataaagctgttcagcgcctgatgggaaccctctcacttaaggcagcgattaaggtcaagcgataccgctcttac

SEQ ID NO: 557855 - DNA, 75 bp, synthetic construct
  source 1..75: mol_type = other DNA
ctgtgggcaatgccggtacaacgtccgtataacccgaacgctcgccgcatggcggagatgattcaggcagactgg

SEQ ID NO: 557856 - DNA, 75 bp, synthetic construct
  source 1..75: mol_type = other DNA
tctgtttggcctgattggcatccactttggccgcccgttgcagcacgaaggagaaagcaaaggtcgtttaacgct

SEQ ID NO: 557857 - DNA, 75 bp, synthetic construct
  source 1..75: mol_type = other DNA
tttacaaccatgcgcagtatctcgataagcgcagggagatgatgcagtggtgggcggactggattgatgggaaat

SEQ ID NO: 557858 - DNA, 75 bp, synthetic construct
  source 1..75: mol_type = other DNA
aagcccgcagaagatgcggcgaggttttccgttacgctattgtcaccggcagggctaaatataacccagcacctg

SEQ ID NO: 557859 - DNA, 75 bp, synthetic construct
  source 1..75: mol_type = other DNA
aaccacccgattaaacgctgtgctggattacattgacgcggtgacggcaacggataccagcaccgcgccggatgt

SEQ ID NO: 557860 - DNA, 75 bp, synthetic construct
  source 1..75: mol_type = other DNA
ttagttttcccaatcgcaatcgtgtttgcgattctgggtcgccgctatcccagcgcaggtggtgtcgcgcacttc

SEQ ID NO: 557861 - DNA, 75 bp, synthetic construct
  source 1..75: mol_type = other DNA
cgacgtgatcgacggacaagcggagtttatcgataaccatattctgcgcattcatcgacctgagggaaatctgga

SEQ ID NO: 557862 - DNA, 75 bp, synthetic construct
  source 1..75: mol_type = other DNA
aagggtctggaaagccttgctgaaggggagaaaccgctgctccacagtgatcaaggatggcattaccggataaaa

SEQ ID NO: 557863 - DNA, 75 bp, synthetic construct
  source 1..75: mol_type = other DNA
cctcaatgcccatgtgcagcgtatcagccacgatggaaataaagtgcaaatacattctgagcgcgatcaactggc

SEQ ID NO: 557864 - DNA, 75 bp, synthetic construct
  source 1..75: mol_type = other DNA
gtttttgcctcgggaagaacgggatattgctgataatatcgcgacgattttacgcgatcagggcgtcgatattat

SEQ ID NO: 557865 - DNA, 75 bp, synthetic construct
  source 1..75: mol_type = other DNA
aaaaatgtgccttattccgtattcatgactccaccgctgtcccgggttggtataacggaagagcaggccagggaa

SEQ ID NO: 557866 - DNA, 75 bp, synthetic construct
  source 1..75: mol_type = other DNA
gccaacggcggatctgtgcgcggtatttacaaccatgcgcagtatctcgataagcgcagagaaatgatgcagtgg

SEQ ID NO: 557867 - DNA, 75 bp, synthetic construct
  source 1..75: mol_type = other DNA
gatgctcctggagaagttaaagaaggctttgccatttgtcgcacctttgacttaagcgcatgggagtatctcgcc

SEQ ID NO: 557868 - DNA, 75 bp, synthetic construct
  source 1..75: mol_type = other DNA
gcaccaaaacaggagaatcaaaagaaatcaccgctccgggtgattaccctgaaaatacaaccactatcgccccat

SEQ ID NO: 557869 - DNA, 75 bp, synthetic construct
  source 1..75: mol_type = other DNA
gtgctggtcgcagtctgaaaccagaagaaacggcaaaactgaacgccgtgctggattatatcgacgagctgaacg

SEQ ID NO: 557870 - DNA, 75 bp, synthetic construct
  source 1..75: mol_type = other DNA
cgaaaacggcggctatgtcaaaagtgcatcgctcgataccgccctgctggaaaaactgcagaacatcgcggagca

SEQ ID NO: 557871 - DNA, 75 bp, synthetic construct
  source 1..75: mol_type = other DNA
aattacatcatcttttgtcgatgcgaaaatgttactgaggaaacgatatagaaaactcaatgccaaacaatttga

SEQ ID NO: 557872 - DNA, 75 bp, synthetic construct
  source 1..75: mol_type = other DNA
tacataaaagaattgcaggctgtcgtccctgacgctgcaccaaatatcaaatggcctaaacctccggcttcggtg

SEQ ID NO: 557873 - DNA, 75 bp, synthetic construct
  source 1..75: mol_type = other DNA
tttacaaccatgctcagtatctcgataagcgcagggagatgatgcagtggtgggctgactggcttgatgacaaat

SEQ ID NO: 557874 - DNA, 75 bp, synthetic construct
  source 1..75: mol_type = other DNA
acggcggatctgtgcgcgggatttacaaccacgctcagtatctcgataagcgcagagaaatgatgcagtggtggg

SEQ ID NO: 557875 - DNA, 75 bp, synthetic construct
  source 1..75: mol_type = other DNA
tttacaaccatgcgcagtatctcgataagcgcagagaaatgatgcagtggtgggcggactggcttgatggcaatg

SEQ ID NO: 557876 - DNA, 75 bp, synthetic construct
  source 1..75: mol_type = other DNA
cgatatcactgtatatcactatgacgaggaaacccgggaatacacctcatcctctgtggagtatctcgcccttgg

SEQ ID NO: 557877 - DNA, 75 bp, synthetic construct
  source 1..75: mol_type = other DNA
tagaagcggcagaagcacagcgccagtcactgattgatgctgcaatggcttcgatcagtctgattcagctgaaat

SEQ ID NO: 557878 - DNA, 75 bp, synthetic construct
  source 1..75: mol_type = other DNA
ggttcctatgtcagaccaggtggttgaacttctcactacgctaagctcaatcaccaaaccagtatcagagtttgt

SEQ ID NO: 557879 - DNA, 75 bp, synthetic construct
  source 1..75: mol_type = other DNA
tctttgataaggtcactgataatatggaggcgatgaaagaaattcatcttaacagtgacgagcaacatttatttg

SEQ ID NO: 557880 - DNA, 75 bp, synthetic construct
  source 1..75: mol_type = other DNA
gcaatgaaagagatacatcttaacagtgacgaacaacatttatttggcagagctgcattgatggccaggtacgaa

SEQ ID NO: 557881 - DNA, 75 bp, synthetic construct
  source 1..75: mol_type = other DNA
cactgtttgtggcgggagtatttattatctctcgcggaacattatatgaattacactggcgcggaaattttgccg

SEQ ID NO: 557882 - DNA, 75 bp, synthetic construct
  source 1..75: mol_type = other DNA
atggcggacaatatcaatgcattaattgccagcaaaaaacagcttatcgacgggattgctcacgaactgcgaacg

SEQ ID NO: 557883 - DNA, 75 bp, synthetic construct
  source 1..75: mol_type = other DNA
gatctgcgcgtcgaaccgttgagtaaatatcatctcgatgaaatctccatgcatcgactgcgtggcggcgaaatt

SEQ ID NO: 557884 - DNA, 75 bp, synthetic construct
  source 1..75: mol_type = other DNA
atgaaggtttccagccattctttgcctgtcagagtcgggttcgtgatttgggacgccgcgaatacagtaaacata

SEQ ID NO: 557885 - DNA, 75 bp, synthetic construct
  source 1..75: mol_type = other DNA
agtgacgatcaacatttatttggcagagctgcaatgatggccaggtaggaagatgaaaataaaacgccagtgacg

SEQ ID NO: 557886 - DNA, 75 bp, synthetic construct
  source 1..75: mol_type = other DNA
agggaagagcagtacttatttgggaaggcagcattaacggtacggtacaacgatgacaataaaattccggtgaca

SEQ ID NO: 557887 - DNA, 75 bp, synthetic construct
  source 1..75: mol_type = other DNA
gtcgggaggataaacagaacgatctctggacgacctggcagcgggttcaggagaatatgataaaaggtggattat

SEQ ID NO: 557888 - DNA, 75 bp, synthetic construct
  source 1..75: mol_type = other DNA
agtgacgagcaacatttatttggcagagctgcattgatggccaggtaggaagatgaaaataaaacgccagtgacg

SEQ ID NO: 557889 - DNA, 75 bp, synthetic construct
  source 1..75: mol_type = other DNA
agtgacgaccaacatttatttggcagagctgcattgatgggcaggtaggaagatgaaaataaaacgccagtgacg

SEQ ID NO: 557890 - DNA, 75 bp, synthetic construct
  source 1..75: mol_type = other DNA
agtgacgaccaacatttatttggcagagctgcaatgatggtcaggtaggaagatgaaaataaaacgccagtgacg

SEQ ID NO: 557891 - DNA, 75 bp, synthetic construct
  source 1..75: mol_type = other DNA
aaaaagcgaggtactacagaagatgggctgcccacctggagtaatctgccgcctttaagtcatgaggaagaagtt

SEQ ID NO: 557892 - DNA, 75 bp, synthetic construct
  source 1..75: mol_type = other DNA
gtgaagataatgtggtgaagttacaaggttcttggtttatacgtaaagttcatttttttcattttattaattctt

SEQ ID NO: 557893 - DNA, 75 bp, synthetic construct
  source 1..75: mol_type = other DNA
atctaatcaccactgtcagggatcgaattgacgggttttcttggcaagctaacgaaaaactttcaagagctagcg

SEQ ID NO: 557894 - DNA, 75 bp, synthetic construct
  source 1..75: mol_type = other DNA
caggatttggtgagtttgttgatcaccttggaatggctgctcttggtccgattgattacttcaatgttcaggaca

SEQ ID NO: 557895 - DNA, 75 bp, synthetic construct
  source 1..75: mol_type = other DNA
tgagcggttgtcgtttacgtttcccgcgtccaaatccgttaccaatttcctgtttccccggttcaagtaaggtgg

SEQ ID NO: 557896 - DNA, 75 bp, synthetic construct
  source 1..75: mol_type = other DNA
tgagcggttgccgtttgcgtttcccgcgccccaatccgttaccaatttcatgtttccccggatcaagcaaggtcg

SEQ ID NO: 557897 - DNA, 75 bp, synthetic construct
  source 1..75: mol_type = other DNA
tggctttcgcgatcgcgatggctatcgctgttaacgtcgccttgttcggcggtttgtatctgctagttaatccat

SEQ ID NO: 557898 - DNA, 75 bp, synthetic construct
  source 1..75: mol_type = other DNA
aagctgcgggaaaaatgggatgagctttccctgcgcttatcgccgtccgtcagcacgtacaccgaaaaacgcgaa

SEQ ID NO: 557899 - DNA, 75 bp, synthetic construct
  source 1..75: mol_type = other DNA
taccaggacaagagccattacaggtattgatggtgatataagaatcaacaaagcgttatgggtgattgccgaaca

SEQ ID NO: 557900 - DNA, 75 bp, synthetic construct
  source 1..75: mol_type = other DNA
acgcatgccattatgatatttatgagggcgcattttttgaacgtgtagccgctgtgcagacacaatggtttaaaa

SEQ ID NO: 557901 - DNA, 75 bp, synthetic construct
  source 1..75: mol_type = other DNA
atgctgactactatgtctctcggtgcgcttggaccagaaaaggcgtttgctgttcaggacaagatagctggtcgt

SEQ ID NO: 557902 - DNA, 75 bp, synthetic construct
  source 1..75: mol_type = other DNA
gaacttcttcttcgtcgcagacattgccgcaatctgagcaggtatcacagccagcagccagcagtaatttttctt

SEQ ID NO: 557903 - DNA, 75 bp, synthetic construct
  source 1..75: mol_type = other DNA
ttaatgctaatgacgcaataatggcaatactccgtcaggaaacaggggcatctatcctaccagctgaaatgtcca

SEQ ID NO: 557904 - DNA, 75 bp, synthetic construct
  source 1..75: mol_type = other DNA
catccagttatcagatgatccccggaatttttcgttttgtctgcacaaatggtctggtgtgcggaaataattttg

SEQ ID NO: 557905 - DNA, 75 bp, synthetic construct
  source 1..75: mol_type = other DNA
cttccatctgcgtaaaggtgtgaagtggcacgacaacaaagaatttaaaccgacgcgtgaactgaatgccgatga

SEQ ID NO: 557906 - DNA, 75 bp, synthetic construct
  source 1..75: mol_type = other DNA
cgatcgtcagaaaaacgcgcaaaacccgtaccataaagtttctggcggcagctacgaatacttcgaaggcatggg

SEQ ID NO: 557907 - DNA, 75 bp, synthetic construct
  source 1..75: mol_type = other DNA
actcaaaatggtgctacaaaccgtttgaagatctgattcaaccggcacgtgctactgacgaccacaacaagcgta

SEQ ID NO: 557908 - DNA, 75 bp, synthetic construct
  source 1..75: mol_type = other DNA
tttttactacatcctgtatggcatgttgggccgcgctatagggatgatggacacacagcataaagcactgtcgtg

SEQ ID NO: 557909 - DNA, 75 bp, synthetic construct
  source 1..75: mol_type = other DNA
tggcttaatctcccgccattcattgggtatatacggattccacgccttgattatccatgcgctgcgcacccgggg

SEQ ID NO: 557910 - DNA, 75 bp, synthetic construct
  source 1..75: mol_type = other DNA
cgccaatgttctgaattctgcctctcgtgtcagcgtgccgctatttttcatgatttccggctatctcttttttgg

SEQ ID NO: 557911 - DNA, 75 bp, synthetic construct
  source 1..75: mol_type = other DNA
gcaccggtccgttccagttacagcagtaccaaaaagattcccgtatccgctacaaagcgtttgatggctactggg

SEQ ID NO: 557912 - DNA, 75 bp, synthetic construct
  source 1..75: mol_type = other DNA
tcaggtcgttgattatcgcgttgtgaaaatgcccgttaccaagggtggaaagctggaactgatcatcaccgaact

SEQ ID NO: 557913 - DNA, 75 bp, synthetic construct
  source 1..75: mol_type = other DNA
gcaggttgaaacatttcggtacaacgaggctggagtgcacaagatcgaggaactcatcgaaggagaacgaaaggc

SEQ ID NO: 557914 - DNA, 75 bp, synthetic construct
  source 1..75: mol_type = other DNA
gcaacagcagttgcaacaaaaaacgaccacgaagaaatcaccggatggccttgaagaattccgtaaggcacgcgc

SEQ ID NO: 557915 - DNA, 75 bp, synthetic construct
  source 1..75: mol_type = other DNA
gaaattttcgtaacccccatggataagaaaaaaggcggtgcggatcaggttgttattgtgatgacctataaacaa

SEQ ID NO: 557916 - DNA, 75 bp, synthetic construct
  source 1..75: mol_type = other DNA
ctggatattctttggatatttaatgcaacgctgataatcagtttattgttttcagttcttttgcagaagattgat

SEQ ID NO: 557917 - DNA, 75 bp, synthetic construct
  source 1..75: mol_type = other DNA
gcaccggggaaatgtggtggatacagtcattgaaggggcttacgaggtggtgggcgtgtttgaccggattgagga

SEQ ID NO: 557918 - DNA, 75 bp, synthetic construct
  source 1..75: mol_type = other DNA
gcaccggggaaatgtggtggaaagagttattgaaggggcttacgaggtggtgggcgtgtttgaccggattgagga

SEQ ID NO: 557919 - DNA, 75 bp, synthetic construct
  source 1..75: mol_type = other DNA
gcaccggggaaatgtggtggaaatagtgattgaaggggcttacgaggtggtgggcgtgtttgaccggattgagga

SEQ ID NO: 557920 - DNA, 75 bp, synthetic construct
  source 1..75: mol_type = other DNA
aatatcatcaataagttacgcgatgaaggttttcagccgttctttgcctgccagagccgtgtgcgggatttgggt

SEQ ID NO: 557921 - DNA, 75 bp, synthetic construct
  source 1..75: mol_type = other DNA
atgcgattagcttcccgttttggtcggtataattccatccgccgtgagcgtcctttaacggatgatgaattaatg

SEQ ID NO: 557922 - DNA, 75 bp, synthetic construct
  source 1..75: mol_type = other DNA
caaaacctgcgaactggcttgtaaagactacaaagatttgacgccagaagtcagcttccgccgcatttatgaata

SEQ ID NO: 557923 - DNA, 75 bp, synthetic construct
  source 1..75: mol_type = other DNA
ttactgactctggtaaaaaatacccttaacgtccgtatgattccgggcctggagttgatatcgcgccattcgtta

SEQ ID NO: 557924 - DNA, 75 bp, synthetic construct
  source 1..75: mol_type = other DNA
gtttggaggataaacagaacgatctctggacaacctggcagcgggttcaggagaatatgataaaaggtggactgc

SEQ ID NO: 557925 - DNA, 75 bp, synthetic construct
  source 1..75: mol_type = other DNA
taccaggacaagagccattacaggtattgatggtaatatccgaatcaacaaggcgttatgggtgattgccgaaca

SEQ ID NO: 557926 - DNA, 75 bp, synthetic construct
  source 1..75: mol_type = other DNA
gcgaggcgatgggcttttctgaaaaacgcggtgactcgctcaatgtcgtcaactcgccgttcaatagcagtgacg

SEQ ID NO: 557927 - DNA, 75 bp, synthetic construct
  source 1..75: mol_type = other DNA
tggtggatcagagtggacatctgttaacccagtccaacaccagcggacgcgatcttaatgacgtccagttgaaat

SEQ ID NO: 557928 - DNA, 75 bp, synthetic construct
  source 1..75: mol_type = other DNA
aatttttcgttttgtctgcacaaatggcctggtgtgcgggaataattttggtgaaatccgcattccgcataaagg

SEQ ID NO: 557929 - DNA, 75 bp, synthetic construct
  source 1..75: mol_type = other DNA
taaaaccttcctgcaactgattaagcggatttcgtttatcccgtttgccatttatcgctttattgtggcagcagc

SEQ ID NO: 557930 - DNA, 75 bp, synthetic construct
  source 1..75: mol_type = other DNA
gagaaagcaaaggtcgtttaacgctgatccacattttgctggggatgattccggcggtggtactggggctgttgt

SEQ ID NO: 557931 - DNA, 75 bp, synthetic construct
  source 1..75: mol_type = other DNA
ctcacattctcgcttgagcataatgtggatgcggttccggcataccatcatgaaacacctgaaaatgttttccca

SEQ ID NO: 557932 - DNA, 75 bp, synthetic construct
  source 1..75: mol_type = other DNA
cggaccgtttcggcaatgttgttcctggttatgctgtcacattgtctttaccagcagggataactcaagttggtg

SEQ ID NO: 557933 - DNA, 75 bp, synthetic construct
  source 1..75: mol_type = other DNA
gtcgagtttgggactgtaacggaaaaagacggtgtctatagcgcgacagtaacttcaaaacgagctggtaagatt

SEQ ID NO: 557934 - DNA, 75 bp, synthetic construct
  source 1..75: mol_type = other DNA
acaacgcagttcactgcatcgaaatcaggccagtacacaattcaggccgagtatgttctggatgggaaacgcata

SEQ ID NO: 557935 - DNA, 75 bp, synthetic construct
  source 1..75: mol_type = other DNA
cggtcacgatatccgcagtctggcgctggcagagcactacttcggtgcaagtcaggattgcgaagactccattct

SEQ ID NO: 557936 - DNA, 75 bp, synthetic construct
  source 1..75: mol_type = other DNA
ttacgctacctgtgcagttgctggtctccggggaagattacgttgtgcaccgccagccgcagcttgatttttatc

SEQ ID NO: 557937 - DNA, 75 bp, synthetic construct
  source 1..75: mol_type = other DNA
gagtgggtaaccattcaggccggattttacaccgagcatatttatcctgatggtagtcgtgggtgcagggcaaaa

SEQ ID NO: 557938 - DNA, 75 bp, synthetic construct
  source 1..75: mol_type = other DNA
acagcctgaccgaaaacggtacccacggttctgattccgtcgaatctgccgctcgcgaaatcgcttatttcttcg

SEQ ID NO: 557939 - DNA, 75 bp, synthetic construct
  source 1..75: mol_type = other DNA
gctcaaaggagcgatttgcctccggcaccgcgagagttagatgccggccagctggctgaccacgatgcggtaact

SEQ ID NO: 557940 - DNA, 75 bp, synthetic construct
  source 1..75: mol_type = other DNA
cagggctaccagagccgcgtgccgctggacgactgcaccatcaaaactatctgcaaagccgcgaacaaaggcgat

SEQ ID NO: 557941 - DNA, 75 bp, synthetic construct
  source 1..75: mol_type = other DNA
cggttcccatagcgtggaatctggcagcgttaagttaacttttgtgcccgatgttgcttctgcagaacttactat

SEQ ID NO: 557942 - DNA, 75 bp, synthetic construct
  source 1..75: mol_type = other DNA
agctacatgcacgatttgcgcgaacgctgttactttgaaacattatggaattgtggggccagacctaatgaagca

SEQ ID NO: 557943 - DNA, 75 bp, synthetic construct
  source 1..75: mol_type = other DNA
atgtctgaccctgtacgtattacaaatcccggtgcagaatcgctggggtatgattcagatggccatgaaattatg

SEQ ID NO: 557944 - DNA, 75 bp, synthetic construct
  source 1..75: mol_type = other DNA
tcaacaaatcattctattgttgtgagcggtgatccgagatttgccggtacgataaaaatcacaaccagcgcagtc

SEQ ID NO: 557945 - DNA, 75 bp, synthetic construct
  source 1..75: mol_type = other DNA
gaaatcgaagagctgaaagaaaaaaacaactcattgtcgcaagaagttcagaatgcccagcatcagcgtgaggag

SEQ ID NO: 557946 - DNA, 75 bp, synthetic construct
  source 1..75: mol_type = other DNA
ggcataccatttagcaaggttagcgtattgaaaaacggacattctctcaacagcaatctttgcaagtatgaacag

SEQ ID NO: 557947 - DNA, 75 bp, synthetic construct
  source 1..75: mol_type = other DNA
gttgctacatttttcttgtggagagtaacaaggctattagcagacgagacaaaaaggatggttgacgcatcagtt

SEQ ID NO: 557948 - DNA, 75 bp, synthetic construct
  source 1..75: mol_type = other DNA
tcactgtcactgacgcctgaaagcagtagtttaatttccaatattcctgctaatggtaaggatgcagcggtatta

SEQ ID NO: 557949 - DNA, 75 bp, synthetic construct
  source 1..75: mol_type = other DNA
atggttctaatagtgtggaatctggaagcgttaagttaacttttgtgccagatattgcttccgcagaactcacta

SEQ ID NO: 557950 - DNA, 75 bp, synthetic construct
  source 1..75: mol_type = other DNA
aacaacgcagttcactgcatcgaaatcaggccagtacacaattcaggccgagtatgttctggatgggaaacgcat

SEQ ID NO: 557951 - DNA, 75 bp, synthetic construct
  source 1..75: mol_type = other DNA
aacaaaaccatctggggcggaaacgagtgggttgatgattccccaacccgaagtgatatcgaaaaaagggacaag

SEQ ID NO: 557952 - DNA, 75 bp, synthetic construct
  source 1..75: mol_type = other DNA
ctgaaagaagcgatggagcctgagttcaaaacttaccagcagcaggtcgcgaaaaacgctaaagcgatggtagaa

SEQ ID NO: 557953 - DNA, 75 bp, synthetic construct
  source 1..75: mol_type = other DNA
cgtgatgcaggcgcagggttctcagctgaccaataaatatgctgaaggttatccgggcaaacgctactacggcgg

SEQ ID NO: 557954 - DNA, 75 bp, synthetic construct
  source 1..75: mol_type = other DNA
tacgccagccctgagtgatgctgcagaacaatatctgaatactgttgcgacacgcaaaacccgggatacggcatt

SEQ ID NO: 557955 - DNA, 75 bp, synthetic construct
  source 1..75: mol_type = other DNA
tacctgatgcaaaaatccgttttgacctgtcactgctgcggctgaatgttgaaattccgcaggccatgctggttt

SEQ ID NO: 557956 - DNA, 75 bp, synthetic construct
  source 1..75: mol_type = other DNA
gctttgatgaaaccttaaaaccgtttgtgcgtgatgtttccggcagccgcctgaaagacctgcccaaaccaaaca

SEQ ID NO: 557957 - DNA, 75 bp, synthetic construct
  source 1..75: mol_type = other DNA
cgttctggaaatatcacccacggatgctgccgcctttggtcagctttttgccgactacgaactgctaccgccgtt

SEQ ID NO: 557958 - DNA, 75 bp, synthetic construct
  source 1..75: mol_type = other DNA
aggtcattgggggatttgttcggtctgctctcgcgccgcccgtacagataaaacgttatgcccacaatgtggatt

SEQ ID NO: 557959 - DNA, 75 bp, synthetic construct
  source 1..75: mol_type = other DNA
atgctaacagtactgggattatgctggctatgccgaatgccactggcgttaggtcattgggggatttgttcggtc

SEQ ID NO: 557960 - DNA, 75 bp, synthetic construct
  source 1..75: mol_type = other DNA
aaacgttatgcccacaatgtggattacccgccacacactcacatcttccctgcggtcgctgcctgcaaaaaccgc

SEQ ID NO: 557961 - DNA, 75 bp, synthetic construct
  source 1..75: mol_type = other DNA
tcggcaaagccggtgaagcccaggataatgcccgcgccgccttgcgtatgttgactgaaaatggtcatcagccat

SEQ ID NO: 557962 - DNA, 75 bp, synthetic construct
  source 1..75: mol_type = other DNA
aaaaccagctactggcttgctttcgcgtagcagaagataacagctacagcaccgctgacgatgatcttttcaccc

SEQ ID NO: 557963 - DNA, 75 bp, synthetic construct
  source 1..75: mol_type = other DNA
aacagcgcaggcgtggaatgtcctcagtaaagagccacacgtcggtgtcgagtttgtcatgacgcacctgcaact

SEQ ID NO: 557964 - DNA, 75 bp, synthetic construct
  source 1..75: mol_type = other DNA
ccgacaaccagctactggcttgctttcgcgttgcggaagataacagctacagtactgctgacgatgatctcttca

SEQ ID NO: 557965 - DNA, 75 bp, synthetic construct
  source 1..75: mol_type = other DNA
taaaagcaaacgcccaatcactaccagataacgccctcctccacctcggcgaaatgctccgcttcccccaggaag

SEQ ID NO: 557966 - DNA, 75 bp, synthetic construct
  source 1..75: mol_type = other DNA
ttgactgaaaatggtcatcagccattactggaacaagtcgccctgcgttataaccaaccggaagtaacagccgcc

SEQ ID NO: 557967 - DNA, 75 bp, synthetic construct
  source 1..75: mol_type = other DNA
ggctatgccgaatgccgctggcgttaggtcattgggggatttgttcggtctgctcacgcgccgcccgtagcgata

SEQ ID NO: 557968 - DNA, 75 bp, synthetic construct
  source 1..75: mol_type = other DNA
gctaaagtcatttgaggctttccgcgagtgggtaaccattcaggccggattttacaccgagcatatttatccgga

SEQ ID NO: 557969 - DNA, 75 bp, synthetic construct
  source 1..75: mol_type = other DNA
tggatcctgtgccgaaaattctcgtctccggaggacgtcgaaaacgtggccgcgcagctactggagtttgcgtaa

SEQ ID NO: 557970 - DNA, 75 bp, synthetic construct
  source 1..75: mol_type = other DNA
tcgattactggactccggtcggtggggcgatcacgcctcgagaacgagaactggtgtccggtttcgttgagtatc

SEQ ID NO: 557971 - DNA, 75 bp, synthetic construct
  source 1..75: mol_type = other DNA
tcgattactggactccgactggtggggcgatcatgcctcgcgaacgagagctggtgtccggttttgttgattacc

SEQ ID NO: 557972 - DNA, 75 bp, synthetic construct
  source 1..75: mol_type = other DNA
gagtgggtaaccattcaggccggattttacaccgagcatatttatccggacggtagccgtgggcgcagggcgaaa

SEQ ID NO: 557973 - DNA, 75 bp, synthetic construct
  source 1..75: mol_type = other DNA
tcgattactggactccggtcggtggggcgatcacgccttgcgaacgagaactgctgtctggtttcgttgattacc

SEQ ID NO: 557974 - DNA, 75 bp, synthetic construct
  source 1..75: mol_type = other DNA
ttcttcgctctgctgaatctcggcttcgaatactgggagccaaccggcggcgctatctcatccaacgaacgcaag

SEQ ID NO: 557975 - DNA, 75 bp, synthetic construct
  source 1..75: mol_type = other DNA
ggccgttgctcaactcattcgtcccggatttagtcgctggcaaatgtcagtgggaaagtatcgttatgcgaataa

SEQ ID NO: 557976 - DNA, 75 bp, synthetic construct
  source 1..75: mol_type = other DNA
gaaatcgccagcgccctgtcacgtctgttactattggaagtcttacacgctcgtcgcaccaccgggttgcaattg

SEQ ID NO: 557977 - DNA, 75 bp, synthetic construct
  source 1..75: mol_type = other DNA
tttacaccgagcatatttatccggacggtagccgtggacgcagggcgaaatccatcgcgtttgcgaatatggacg

SEQ ID NO: 557978 - DNA, 75 bp, synthetic construct
  source 1..75: mol_type = other DNA
ttgattactggactccggtcggtggggcgatcacgtcccgcgaacgaaaactggtgtccggtttcgttgattatc

SEQ ID NO: 557979 - DNA, 75 bp, synthetic construct
  source 1..75: mol_type = other DNA
acgccattcagctgcctgacggcaccctccgcaaacatccccgcagtatctcattcgcaaatatggatgaaactg

SEQ ID NO: 557980 - DNA, 75 bp, synthetic construct
  source 1..75: mol_type = other DNA
agggctaaatataacccggcacctgaccttgcagacgccatgaaaggataccgcaagaagaacttcccgtttctt

SEQ ID NO: 557981 - DNA, 75 bp, synthetic construct
  source 1..75: mol_type = other DNA
ggggttctggacatagacaatatgcagctgagagaagaaccggagtgcattattaacgagctgaacctgtattca

SEQ ID NO: 557982 - DNA, 75 bp, synthetic construct
  source 1..75: mol_type = other DNA
gtttcaatgcctgaaacacttaccgatttgccgaaagatattgatgccatcatcttcactctcggttccgatggc

SEQ ID NO: 557983 - DNA, 75 bp, synthetic construct
  source 1..75: mol_type = other DNA
ggaaagtgtggagccttatttcacccgcacgtttgagcgggtggcaaacacctggcgactgcatgagcaagtgac

SEQ ID NO: 557984 - DNA, 75 bp, synthetic construct
  source 1..75: mol_type = other DNA
acagccagcgtattgcgatggaacaaaagctgaaacgcagccaggcactggaaaccacggaaagcatgcacttgc

SEQ ID NO: 557985 - DNA, 75 bp, synthetic construct
  source 1..75: mol_type = other DNA
gaacttctcactacgctaagctcaatcactaaaccagtatcagagtatgtttttgccgggcgcaacgataagaat

SEQ ID NO: 557986 - DNA, 75 bp, synthetic construct
  source 1..75: mol_type = other DNA
tggctggatcggctggatgatcaaacctctgggccgctggtcgttaatcatggaaatcgatgaaggttttgcggt

SEQ ID NO: 557987 - DNA, 75 bp, synthetic construct
  source 1..75: mol_type = other DNA
gactaaaaaatggtactctggcggaacaccaacagcagggaaaatagagtattacgaaaacgggaatattccgtg

SEQ ID NO: 557988 - DNA, 75 bp, synthetic construct
  source 1..75: mol_type = other DNA
aaggtctcccgcgtgaaatcgagttgcgccagaaacaatacgaatactaccgtgatttactgttcagtttcccga

SEQ ID NO: 557989 - DNA, 75 bp, synthetic construct
  source 1..75: mol_type = other DNA
atgtcgaaaaactggatgcgtcactttgaattattgcttgttgatgataagggcgacgggataaaaatttctgag

SEQ ID NO: 557990 - DNA, 75 bp, synthetic construct
  source 1..75: mol_type = other DNA
tttgacaacattgccgctggagaaagcagtaagagcatggaatgcccttactctatctccacataccgataccga

SEQ ID NO: 557991 - DNA, 75 bp, synthetic construct
  source 1..75: mol_type = other DNA
ggatattctcgctgctatcggtagtgatatcgccctgatgcagcttaacggcatcgcccagaaactgaaattcaa

SEQ ID NO: 557992 - DNA, 75 bp, synthetic construct
  source 1..75: mol_type = other DNA
gcatacctggcacaggcggcagcactgagccgtaccgctggcgtaaaaagtatcagggcgcgcatcagggcacgc

SEQ ID NO: 557993 - DNA, 75 bp, synthetic construct
  source 1..75: mol_type = other DNA
ccgtgagcgccattttttgtggctggataatgaccgttttcaccttgagtcatgccgcctggttattaatgttgc

SEQ ID NO: 557994 - DNA, 75 bp, synthetic construct
  source 1..75: mol_type = other DNA
gtgcatcgccaaccgcagatcgatttttatcagcgtttacgtagccctctcaaagagctgcatctgctgccaggc

SEQ ID NO: 557995 - DNA, 75 bp, synthetic construct
  source 1..75: mol_type = other DNA
tcgatgaatttgtccgttttgctgccagcgacagccaggttggactggaagaggtggttgtgatcgcgcaaagcg

SEQ ID NO: 557996 - DNA, 75 bp, synthetic construct
  source 1..75: mol_type = other DNA
aaagaccagtgatgaacatggttgagaatatgctcgatcaggcattcaaaaagcttaatcctcacgagcatcctg

SEQ ID NO: 557997 - DNA, 75 bp, synthetic construct
  source 1..75: mol_type = other DNA
cgttaaaaagcgtattagtgagatttatcacgagaatagaggccgatacggataccgtagggtaacgctgtctct

SEQ ID NO: 557998 - DNA, 75 bp, synthetic construct
  source 1..75: mol_type = other DNA
tgataatgttctaaagcggaatttcaaggcaacccgacccaatgaaaaatgggtcactgacgtcaccgaatttgc

SEQ ID NO: 557999 - DNA, 75 bp, synthetic construct
  source 1..75: mol_type = other DNA
tggaaagccttgctgaaggggagaaaccgctgctccacagtgatcaaggatggcattaccggataaaaagttatc

SEQ ID NO: 558000 - DNA, 75 bp, synthetic construct
  source 1..75: mol_type = other DNA
gcccttgctcaattcatgatccggtagctgctaaagagtatgccactcgcttgttggcgctgcgggaagagctga

SEQ ID NO: 558001 - DNA, 75 bp, synthetic construct
  source 1..75: mol_type = other DNA
gcgctggactgggcggatgtggcaatccagcgggggcaggaaaccccggccgcgttcggcagtacgttcccggtg

SEQ ID NO: 558002 - DNA, 75 bp, synthetic construct
  source 1..75: mol_type = other DNA
accatcagcggatcgctggcggctcctttcaggtggacccgtgccattatcgccggttgatttggcgtatcgctt

SEQ ID NO: 558003 - DNA, 75 bp, synthetic construct
  source 1..75: mol_type = other DNA
ttctttggaaccttaaagtcggagtgtttttatcttgatgagttcagtaatataagcgaactgaagtatgctgtt

SEQ ID NO: 558004 - DNA, 75 bp, synthetic construct
  source 1..75: mol_type = other DNA
ctccagtgctaatctgcaaacgattattgccgggcttatcgtcgcgttgattgccgccatctggtgggctggcga

SEQ ID NO: 558005 - DNA, 75 bp, synthetic construct
  source 1..75: mol_type = other DNA
cgacgcaatcttctggcgtggcgctgctgggcactgccggaacgggtaattttggcagtctgaccaacggcgcgc

SEQ ID NO: 558006 - DNA, 75 bp, synthetic construct
  source 1..75: mol_type = other DNA
ctcgacagcggattcatcttttacgctggatggggattcgtctccgacgatctctgctgatggtcaatccactta

SEQ ID NO: 558007 - DNA, 75 bp, synthetic construct
  source 1..75: mol_type = other DNA
tgttaagaaagaaatcacctttattgaggaccggcagcaggttacattctctcagtttgaagccagccaaaataa

SEQ ID NO: 558008 - DNA, 75 bp, synthetic construct
  source 1..75: mol_type = other DNA
tgtgaaggaggctgtgttggagatcgtatcatctgcatcttcggctgtagtgagtgatatcaacaatctgatatt

SEQ ID NO: 558009 - DNA, 75 bp, synthetic construct
  source 1..75: mol_type = other DNA
actgccaggtagtcgagagtccatctggttcacgaaaatggtacaaatacgagcacaagacaggttgtattgcgt

SEQ ID NO: 558010 - DNA, 75 bp, synthetic construct
  source 1..75: mol_type = other DNA
taatgcagaacatagaaaaaatagaggcgtaccatttagcaaggtcagcgtattaaaaaacggacactctctcaa

SEQ ID NO: 558011 - DNA, 75 bp, synthetic construct
  source 1..75: mol_type = other DNA
ctgattctgaggccaatgctgttttaatcgctgccccggcacagcaggtagttggttacaatatcaatctacaac

SEQ ID NO: 558012 - DNA, 75 bp, synthetic construct
  source 1..75: mol_type = other DNA
ggcaattctggctgccggaggactgattcatcgtgccggatgtgcggaaaccatattattgtttgccaaccaccg

SEQ ID NO: 558013 - DNA, 75 bp, synthetic construct
  source 1..75: mol_type = other DNA
gtggcgtgtaagatgttaaccacgctggggctgaccattgatgacgcggtcagcgacggttcacaagcggatgcg

SEQ ID NO: 558014 - DNA, 75 bp, synthetic construct
  source 1..75: mol_type = other DNA
ttgatgcattacttctggaagatatccagggtggagatctgaccacacgagcattaggtatcggcaaacagcccg

SEQ ID NO: 558015 - DNA, 75 bp, synthetic construct
  source 1..75: mol_type = other DNA
acccgcaaatggctgggatttttctgctgaaggatggctacctgcttatccgcaattaggggcatctattcagtt

SEQ ID NO: 558016 - DNA, 75 bp, synthetic construct
  source 1..75: mol_type = other DNA
tcagtcaaacatcactacatcgtactgatgaccgtaatcagaccaatattggtttggggattcgtcatttcactc

SEQ ID NO: 558017 - DNA, 75 bp, synthetic construct
  source 1..75: mol_type = other DNA
cagcgacggttcacaagcgaacgcgggtcagcggctaatccgtgcgcaaggtaatgccgcagcacttcatcaggg

SEQ ID NO: 558018 - DNA, 75 bp, synthetic construct
  source 1..75: mol_type = other DNA
gcctggagcaacggcaacatgtccatctggcaagaaagtcattggtggaggcggtcaatgcagatcaaataccgg

SEQ ID NO: 558019 - DNA, 75 bp, synthetic construct
  source 1..75: mol_type = other DNA
ggcgcagatcctgcctcattctcgttaagtttcctcaattctatgcagcaaaacaccggcgcaaacaacattgtg

SEQ ID NO: 558020 - DNA, 75 bp, synthetic construct
  source 1..75: mol_type = other DNA
actccagtgatccgcttccgtcagtgactaccttcgatgccagtaatgcggatagctataacaaaaaaggctcgg

SEQ ID NO: 558021 - DNA, 75 bp, synthetic construct
  source 1..75: mol_type = other DNA
ttgccgacaacaatgcccgtctgcatagcggcagccttccggcaaatttcacggctgatgacctgattcgtcagg

SEQ ID NO: 558022 - DNA, 75 bp, synthetic construct
  source 1..75: mol_type = other DNA
ccgactattcagcagggggcgaatccaggcaatatttcgattccgaataccctgatggcggcgaaaacgacgaca

SEQ ID NO: 558023 - DNA, 75 bp, synthetic construct
  source 1..75: mol_type = other DNA
cctgatggcagcgaaaactaccaccacggcgtcgatgcagatcaacctgaattccagcgatccgcttccctctgt

SEQ ID NO: 558024 - DNA, 75 bp, synthetic construct
  source 1..75: mol_type = other DNA
aatatttcgatcccgaataccctgatggcagcgaaaactaccaccacggcgtcgatgcagatcaacctgaattcc

SEQ ID NO: 558025 - DNA, 75 bp, synthetic construct
  source 1..75: mol_type = other DNA
tatgttacggacactgtaaaaccgttaatgaagcgattagctatattcgagccagacgcccgcagattgtgctga

SEQ ID NO: 558026 - DNA, 75 bp, synthetic construct
  source 1..75: mol_type = other DNA
actctgacgacctggcagcatcattttattgatgtcatcacagggctggcggtaggtatgttgattgactggatg

SEQ ID NO: 558027 - DNA, 75 bp, synthetic construct
  source 1..75: mol_type = other DNA
ttgctcgatctctataaaacgtctgaacgtattattagagatgcggcggcgattacgctccccacgcaacttctg

SEQ ID NO: 558028 - DNA, 75 bp, synthetic construct
  source 1..75: mol_type = other DNA
aacagacatctcctgagttatcaggccgatcaatccggtgtctatcatgagcgtgggggatggctgaaagggcat

SEQ ID NO: 558029 - DNA, 75 bp, synthetic construct
  source 1..75: mol_type = other DNA
aaactcacggtggcggattttatatgtccgatggatcatgggttcgaagtgtaaacaacaagggcatctataccg

SEQ ID NO: 558030 - DNA, 75 bp, synthetic construct
  source 1..75: mol_type = other DNA
ggcgtttccacgacatattccggcacagaatgcggttctggacgtcacctttgaattccctcgcggacgagcgac

SEQ ID NO: 558031 - DNA, 75 bp, synthetic construct
  source 1..75: mol_type = other DNA
aatgaaaaacgaaggcgtttattctcggcctcaaatggttgtagccaatatcggcggactcattactgggatgaa

SEQ ID NO: 558032 - DNA, 75 bp, synthetic construct
  source 1..75: mol_type = other DNA
aggttatcagctttatgactactgacgcattcaccgccgaagtatgggacgttatcagcgtaacctatgatgaat

SEQ ID NO: 558033 - DNA, 75 bp, synthetic construct
  source 1..75: mol_type = other DNA
gatcagcacagattactgatgctagtatcaccacggctaaaattggcaatgctgcgatcaattcagcgaaaatcc

SEQ ID NO: 558034 - DNA, 75 bp, synthetic construct
  source 1..75: mol_type = other DNA
ccgattgaaaatattaacgttgattcattcctgaaagtgcgtaaacaagtacgccagatggatttacattccaac

SEQ ID NO: 558035 - DNA, 75 bp, synthetic construct
  source 1..75: mol_type = other DNA
tctattcagtaccgtacccgcgatcctgaatcatggacttatacgcttgatatgaaccagtttaacggcctttcc

SEQ ID NO: 558036 - DNA, 75 bp, synthetic construct
  source 1..75: mol_type = other DNA
ctggtttaccggattcaatgacagtacagaaaccgactaatttcagaattaaggcaactggtgagacaatccacg

SEQ ID NO: 558037 - DNA, 75 bp, synthetic construct
  source 1..75: mol_type = other DNA
gaacgaaataaatctcgtatcactcaggttatcagctttatgactactgacgcattcactgccgaagtttgggac

SEQ ID NO: 558038 - DNA, 75 bp, synthetic construct
  source 1..75: mol_type = other DNA
tgcgcggcctggcacatgagattaaaaatccgcttggcggtttacgtggcgcggcgcagctactcagcaaagcat

SEQ ID NO: 558039 - DNA, 75 bp, synthetic construct
  source 1..75: mol_type = other DNA
catcgcccgtaatttgattgatcagcattcaggcaaaattgaatttaccagttggccagggcataccgagttctc

SEQ ID NO: 558040 - DNA, 75 bp, synthetic construct
  source 1..75: mol_type = other DNA
atggcaacaggcacgcagcccgatgctgggcagatcctcaactcgctgattaacagtattttgttaattgatgac

SEQ ID NO: 558041 - DNA, 75 bp, synthetic construct
  source 1..75: mol_type = other DNA
caaccatgtgtattgtgttacgtcgtgatgacaaatctcttgctgctggtgttgatatccttcaaccaaatagcc

SEQ ID NO: 558042 - DNA, 75 bp, synthetic construct
  source 1..75: mol_type = other DNA
gattctggtatcgctggtatgctggcaatcaccgccacggaatacaattccaagatttataccgatctgaactat

SEQ ID NO: 558043 - DNA, 75 bp, synthetic construct
  source 1..75: mol_type = other DNA
atgatgggtaaagtgacactgaaaacaggtggcactaacggttattttaataccatcaatgcgatgtatcagaac

SEQ ID NO: 558044 - DNA, 75 bp, synthetic construct
  source 1..75: mol_type = other DNA
gacgtagaacatgactatgcagggtcaatcatccagtatgcaaccgataatactttctccgatgcaagggcagtg

SEQ ID NO: 558045 - DNA, 75 bp, synthetic construct
  source 1..75: mol_type = other DNA
ttgatacagccgggcgcgatagcaaagagatgcgtacaggcataaccgctgcagatattgtgttggtcccattca

SEQ ID NO: 558046 - DNA, 75 bp, synthetic construct
  source 1..75: mol_type = other DNA
aaggtggctgtggaaaatcaaccacaagcgtaaacatctgtgcggagcttgcccgcgaaaataaggatgtagtgt

SEQ ID NO: 558047 - DNA, 75 bp, synthetic construct
  source 1..75: mol_type = other DNA
atgggatttgaagtattggtaggcgcggttattgctggtgcttcggcggggatggcggcagccgcaacattttcg

SEQ ID NO: 558048 - DNA, 75 bp, synthetic construct
  source 1..75: mol_type = other DNA
acttgagctggcagataccgtcagtgaattacgccccgtcaaacatgcgtttgatgcaggcgttaaggcgcaaat

SEQ ID NO: 558049 - DNA, 75 bp, synthetic construct
  source 1..75: mol_type = other DNA
gtagatgagaacaataaagtccttgggacccggtatttctccacaacacgacaaggttaccggcagatgctggcc

SEQ ID NO: 558050 - DNA, 75 bp, synthetic construct
  source 1..75: mol_type = other DNA
ccgttttatttgcgacgttattatctggcgttatggctttttccgccaatgctgatgacaaagtagttcttaaac

SEQ ID NO: 558051 - DNA, 75 bp, synthetic construct
  source 1..75: mol_type = other DNA
gtggtcatttggtggctgattccggcgaaatgaacaacgtaacgattaattcaagttgccgcattttgggtatgc

SEQ ID NO: 558052 - DNA, 75 bp, synthetic construct
  source 1..75: mol_type = other DNA
aagaatcatctttacggctgataaaatcgcggtagctccacaagacggatcagaagtttgtccgtttggcatcga

SEQ ID NO: 558053 - DNA, 75 bp, synthetic construct
  source 1..75: mol_type = other DNA
agattgatgcaatgcataaacagattactaccgaaaccggaaagacggtccaagcctcagccgatacccttaaga

SEQ ID NO: 558054 - DNA, 75 bp, synthetic construct
  source 1..75: mol_type = other DNA
tgcggcaattactaccgctaagatcggaaatgctgcaattaacagcgcgaagattcaggacggggcgatcaccaa

SEQ ID NO: 558055 - DNA, 75 bp, synthetic construct
  source 1..75: mol_type = other DNA
cggttattgctggtgcgtcggctgggatggctgctgcttccgtggcggcaatttcaacattagcggctgttgcta

SEQ ID NO: 558056 - DNA, 75 bp, synthetic construct
  source 1..75: mol_type = other DNA
cagtaacaatgacttttgaagtttactgtaagggcgttaacaactataacccaagtgcatatatcagcgatctaa

SEQ ID NO: 558057 - DNA, 75 bp, synthetic construct
  source 1..75: mol_type = other DNA
ttcagattaaagtcgcccagggcgcgaaaccgggtgaaggcggtcagttaccgggcgataaagtcacgccttaca

SEQ ID NO: 558058 - DNA, 75 bp, synthetic construct
  source 1..75: mol_type = other DNA
acggttgcggcttgctgttacaaaaaccggatcgcttttttcgcatcgttgcgcaggagcgcggctggcgtttag

SEQ ID NO: 558059 - DNA, 75 bp, synthetic construct
  source 1..75: mol_type = other DNA
cattgagcaaattttcgttaacgctccggcaggctggcgtccgcgggatatggagcgccgtctgtttatcgcccg

SEQ ID NO: 558060 - DNA, 75 bp, synthetic construct
  source 1..75: mol_type = other DNA
acaccattgccttctttagcccgaactatctgcaaggctggcagcgggcgttggcgattgccgccggggaggttg

SEQ ID NO: 558061 - DNA, 75 bp, synthetic construct
  source 1..75: mol_type = other DNA
ctgccgcgcttctacctggacctcgctgacctacgtctggaatcggccatctgcctgtttcaccagcgcttttcc

SEQ ID NO: 558062 - DNA, 75 bp, synthetic construct
  source 1..75: mol_type = other DNA
ttcaggctatatcgcccagacgcacggcgatcaggggctggcagccgatcctatcaaagcgtacttcaacggcac

SEQ ID NO: 558063 - DNA, 75 bp, synthetic construct
  source 1..75: mol_type = other DNA
ccgccgcattgaaaagcgtctcgaagccgacaaagacttctacgtctgtagcctgtcgaatctggtgaacatcta

SEQ ID NO: 558064 - DNA, 75 bp, synthetic construct
  source 1..75: mol_type = other DNA
gcgaggcacgggaatggtttcgtcgtgaaactcgccgcgttgcgcctattacactggatgtcatgtgggatcact

SEQ ID NO: 558065 - DNA, 75 bp, synthetic construct
  source 1..75: mol_type = other DNA
ttccggcaatttactggctgatttcgtacgcggaaatcctgaagaaagttttccgcccgacgtcgtggctggcat

SEQ ID NO: 558066 - DNA, 75 bp, synthetic construct
  source 1..75: mol_type = other DNA
aggcactggcacaaaatcatcacaactgggctgcctgcgcgcggatgctggaaaccgacgtcgccaacctgcatc

SEQ ID NO: 558067 - DNA, 75 bp, synthetic construct
  source 1..75: mol_type = other DNA
tacccgctacgtcgcctggcgcaaaagcgagtcggctgtgtatttgccacccgcggtgatttgagcttttttgcc

SEQ ID NO: 558068 - DNA, 75 bp, synthetic construct
  source 1..75: mol_type = other DNA
cgcccattacgatgccctggaaacccgcttctggcagttttatccgcggatgatggcgcaggcgtcacgcaaggc

SEQ ID NO: 558069 - DNA, 75 bp, synthetic construct
  source 1..75: mol_type = other DNA
gtacgcggaaatcctgaagaaagttttccgcccgacgtcgtggctggcattcatatgcatcggcgcattgatgta

SEQ ID NO: 558070 - DNA, 75 bp, synthetic construct
  source 1..75: mol_type = other DNA
cttcctgaataaagatcctgaactcgccgccgccgcacgccgcgtcgttgaagaagagctacaacgcgaaacctt

SEQ ID NO: 558071 - DNA, 75 bp, synthetic construct
  source 1..75: mol_type = other DNA
tagaaggcattggcgacaacggctgtgaatatatgacgggcggtatcgtctgtattctgggtaaaaccggcgtta

SEQ ID NO: 558072 - DNA, 75 bp, synthetic construct
  source 1..75: mol_type = other DNA
atggcacagctgggcgtaacacgtctggtggatctgattggtcgcaccgacctgctgaaagagctggacggtttc

SEQ ID NO: 558073 - DNA, 75 bp, synthetic construct
  source 1..75: mol_type = other DNA
ttaatcaccatcgcaggctatgacggcggcaccggcgcaagtccgctttcatcggtgaaatacgcaggctgtccg

SEQ ID NO: 558074 - DNA, 75 bp, synthetic construct
  source 1..75: mol_type = other DNA
cgaaaaaggccgcgtggggccaggcgaactgatggtgatcgacacccgcagtgggcgtattctgcactcggcaga

SEQ ID NO: 558075 - DNA, 75 bp, synthetic construct
  source 1..75: mol_type = other DNA
cgcgaaacccgcgagctgatggcgcagcttggcgtgacgcgtctggtggatctcattggtcgcaccgacctgctg

SEQ ID NO: 558076 - DNA, 75 bp, synthetic construct
  source 1..75: mol_type = other DNA
tagtgcgtactgcaatacacgcactggcccgcatgcagccccgtggcgcgattctcgccgatggtaaaaccggcg

SEQ ID NO: 558077 - DNA, 75 bp, synthetic construct
  source 1..75: mol_type = other DNA
gtccggtcgcttcggcgttactccggcgtacctggtcaatgccgacgtcattcagattaaagtcgcccagggcgc

SEQ ID NO: 558078 - DNA, 75 bp, synthetic construct
  source 1..75: mol_type = other DNA
atggccgtttcgccgcctgtaacctcgaccgtaacggtctgcgtccggcacgctacgtcatcaccaaagataaac

SEQ ID NO: 558079 - DNA, 75 bp, synthetic construct
  source 1..75: mol_type = other DNA
aagaagaactacaacgcgaaaccttgtcgattgtgggctggcgtgatgtccccactaacgaaggcgtgctgggtg

SEQ ID NO: 558080 - DNA, 75 bp, synthetic construct
  source 1..75: mol_type = other DNA
agccgggcgttggcactatcgccaccggcgtggcgaaagcctatgcggacttgatcaccatcgcaggctatgacg

SEQ ID NO: 558081 - DNA, 75 bp, synthetic construct
  source 1..75: mol_type = other DNA
tctgattggtcgcaccgacctgctgaaagagctggacggtttcactgccaaacaacagaaactgacactgtcgaa

SEQ ID NO: 558082 - DNA, 75 bp, synthetic construct
  source 1..75: mol_type = other DNA
ttgatcaccatcgcgggctatgacggcggcaccggcgcaagcccgctgtcgtcagtgaaatacgcaggctgtccg

SEQ ID NO: 558083 - DNA, 75 bp, synthetic construct
  source 1..75: mol_type = other DNA
gatcacctgccggagcaagcgttctacatggtcggttccatcgaagaagctgtggaaaaagccaaaaaactttaa

SEQ ID NO: 558084 - DNA, 75 bp, synthetic construct
  source 1..75: mol_type = other DNA
tgggccgtatgccttcagcggtaggttatcagccgaccctggcggaagagatgggcgttcttcaggaacgtatca

SEQ ID NO: 558085 - DNA, 75 bp, synthetic construct
  source 1..75: mol_type = other DNA
catgaatgtcgccattatgggacagggatttttgcaggtgcaaaaggctaacggcgatatcgcctatacccgcga

SEQ ID NO: 558086 - DNA, 75 bp, synthetic construct
  source 1..75: mol_type = other DNA
acatgatggagctcattcgtaacatcgcgatcgagcactccggtttctctgtgtttgcgggcgtaggtgaacgta

SEQ ID NO: 558087 - DNA, 75 bp, synthetic construct
  source 1..75: mol_type = other DNA
gggcggtaaagttggtctgttcggtggtgcgggggtaggtaaaaccgtaaacatgatggagctcattcgtaacat

SEQ ID NO: 558088 - DNA, 75 bp, synthetic construct
  source 1..75: mol_type = other DNA
cgaaatgaccgactccaacgttatcgacaaagtatccctggtgtatggccagatgaatgagccgccgggaaaccg

SEQ ID NO: 558089 - DNA, 75 bp, synthetic construct
  source 1..75: mol_type = other DNA
tttggtgaggatggcacggtgacggcgatcttacccggcgacagcgacgtgactgagttagggcaactgacgctg

SEQ ID NO: 558090 - DNA, 75 bp, synthetic construct
  source 1..75: mol_type = other DNA
ggagtatcaaatcggcttgcatggggatgtcctacaaaggaacaccttcttccacactttctggaacatttaggt

SEQ ID NO: 558091 - DNA, 75 bp, synthetic construct
  source 1..75: mol_type = other DNA
aaagctggtgaagttagcgccgaaggtctgcgcattgtgctggaggctgggattcgcgaaccgatgattatgcga

SEQ ID NO: 558092 - DNA, 75 bp, synthetic construct
  source 1..75: mol_type = other DNA
ttacagtgcaacgggcttacgagatgaacgccaaaatggtgtcggctgcggacgatatgttgcagtacatcagtc

SEQ ID NO: 558093 - DNA, 75 bp, synthetic construct
  source 1..75: mol_type = other DNA
ggcgtactgaccaactcgcagggcttgccgttgcagccggaaatcgacgttccggcgggggccaccaacgtcgcg

SEQ ID NO: 558094 - DNA, 75 bp, synthetic construct
  source 1..75: mol_type = other DNA
tttggcgaagatggcacggtgacggcgattcttcctggcgacagcgacgtgaccgagttagggcaactgacgctg

SEQ ID NO: 558095 - DNA, 75 bp, synthetic construct
  source 1..75: mol_type = other DNA
gatcgacgcgggcggcttaacaacttcgcagttcgcctggacacaggttccggtattcggcgcggtgattgtcgc

SEQ ID NO: 558096 - DNA, 75 bp, synthetic construct
  source 1..75: mol_type = other DNA
gttttaccatggtttattaccaagttatgcatttcctacaagcctctgtagtttcttggtagaaaaaattgtaaa

SEQ ID NO: 558097 - DNA, 75 bp, synthetic construct
  source 1..75: mol_type = other DNA
ttattgactggatagcattccttcaggttttgctcatctggttttatatggcttacaggagtgggcagtggattg

SEQ ID NO: 558098 - DNA, 75 bp, synthetic construct
  source 1..75: mol_type = other DNA
tctgtcattgtagtcaccactcaaagcggcatgacgatacaaattcacaagccaaaggaggaaggtcgtggctaa

SEQ ID NO: 558099 - DNA, 75 bp, synthetic construct
  source 1..75: mol_type = other DNA
ttgttgaaccatcgcagcttaaatcaaaaaaaatgtgggaagatgtgcagtccaagaagctcaatattgagagca

SEQ ID NO: 558100 - DNA, 75 bp, synthetic construct
  source 1..75: mol_type = other DNA
aagatgaggatatcgatcttgttcccatagatatattggtcgaggaaacacctcatgtacatagtgattaccagg

SEQ ID NO: 558101 - DNA, 75 bp, synthetic construct
  source 1..75: mol_type = other DNA
aatcgctgtccagaattactgataacgaactactccatgcttgagtatatgctgatgcgacctatcgagcgtaat

SEQ ID NO: 558102 - DNA, 75 bp, synthetic construct
  source 1..75: mol_type = other DNA
acttgaactggcagataccgtcagtgaattacgccccgtcaaacatgcgtttgatgcaggagttaaagcacaaat

SEQ ID NO: 558103 - DNA, 75 bp, synthetic construct
  source 1..75: mol_type = other DNA
ccggaaggcattgcgggtgacgggagtgcttcagatggcggtgaacccacacctgacagcgacatgatgatgtaa

SEQ ID NO: 558104 - DNA, 75 bp, synthetic construct
  source 1..75: mol_type = other DNA
tactgctggcgatgccagagacggtgaagcgcggcgcggttccgtttagcgccaaaagcgtcttgcgcgattttc

SEQ ID NO: 558105 - DNA, 75 bp, synthetic construct
  source 1..75: mol_type = other DNA
gcgttggtggaaccaaaagaataaaaaagcactggcattggattcgttttacgaagcattcaatcttaacagcct

SEQ ID NO: 558106 - DNA, 75 bp, synthetic construct
  source 1..75: mol_type = other DNA
aagggctggggaatcaaaaattaaacataaaattagccatgatgtttttgatccttatcccgcggcgttacatgg

SEQ ID NO: 558107 - DNA, 75 bp, synthetic construct
  source 1..75: mol_type = other DNA
atattggcgttggaactgggttttaccttactcacgtacctgagagtagtctgatatctttaatggatttgaacg

SEQ ID NO: 558108 - DNA, 75 bp, synthetic construct
  source 1..75: mol_type = other DNA
gatggcgaattttgggcgcagagtatgcccgtctggcctgcgctgacttcgctgacccatcgtcggcaacttcct

SEQ ID NO: 558109 - DNA, 75 bp, synthetic construct
  source 1..75: mol_type = other DNA
cagagagctgaatctgaagccctgcacaacggcaatcagtagccctcagagtaatggaatggcagaacggttcgt

SEQ ID NO: 558110 - DNA, 75 bp, synthetic construct
  source 1..75: mol_type = other DNA
gcgttatcgtcgttttcaccctggcgggattgctcaatcgcgtgcgccaacatcaggctgccgagctggcggagg

SEQ ID NO: 558111 - DNA, 75 bp, synthetic construct
  source 1..75: mol_type = other DNA
atcgagcattacaatgaaacccatccgcatagtgcgttaggttatctctcaccaagggaatatcgacgtcagcgg

SEQ ID NO: 558112 - DNA, 75 bp, synthetic construct
  source 1..75: mol_type = other DNA
gagaaaatccctgtatctgaaaaggagtcccttcttgcccgtattgacaaactgacaaaagagtcagcaacggga

SEQ ID NO: 558113 - DNA, 75 bp, synthetic construct
  source 1..75: mol_type = other DNA
aacaggctggtgcattcactgggagacctgttgagaaggagattacctggaagcagagtgataaggaaattaccg

SEQ ID NO: 558114 - DNA, 75 bp, synthetic construct
  source 1..75: mol_type = other DNA
ctcagagtaatggaatggcagaaaggttcgtgaaaacgatgaaggaagactacatcgcgttcatgccgaaaccga

SEQ ID NO: 558115 - DNA, 75 bp, synthetic construct
  source 1..75: mol_type = other DNA
atcgtggttttaacggtgatgtcggtctcggtcgaaattggtcgctggctgtggtttaacggcggtcgtttgccg

SEQ ID NO: 558116 - DNA, 75 bp, synthetic construct
  source 1..75: mol_type = other DNA
ctcagctacatccccatgatgagttgggttgcggtgtcaccggttatcctgatcgacgcgggcggcttaacgact

SEQ ID NO: 558117 - DNA, 75 bp, synthetic construct
  source 1..75: mol_type = other DNA
agtcctttttgccatcattgcagttatgggttttatctcatttgttggcttactgctggcgatgccagagacggt

SEQ ID NO: 558118 - DNA, 75 bp, synthetic construct
  source 1..75: mol_type = other DNA
tgctggcgatgtactacgtcatcaccccctttggtggctggatcaacggcggtatccgtaccgtgctgaccgctg

SEQ ID NO: 558119 - DNA, 75 bp, synthetic construct
  source 1..75: mol_type = other DNA
tcagccagctgattgcttatagctggcttaaaattcctgctgatatcggcatcatggatgctcttaatagcggga

SEQ ID NO: 558120 - DNA, 75 bp, synthetic construct
  source 1..75: mol_type = other DNA
aactcccgcagcatgtgatgtcagggatttcacgcatggtgccgaccttaattatgggcggtgtgatcctcgctt

SEQ ID NO: 558121 - DNA, 75 bp, synthetic construct
  source 1..75: mol_type = other DNA
gaaaaagtttacgtacaagacaaactgcgcgaacagggcgcagagctgtggcgctggatcaatgacggtgcccac

SEQ ID NO: 558122 - DNA, 75 bp, synthetic construct
  source 1..75: mol_type = other DNA
aaagctggtgaagttagcgccgaaggtctgcgcattgtgctggaagcgggtattcgcgagccgatgattatgcgg

SEQ ID NO: 558123 - DNA, 75 bp, synthetic construct
  source 1..75: mol_type = other DNA
cgaactgccgtgtaatgcggatttctggctggcagtacagcaagagttattacccctggtgaaagctattgcccc

SEQ ID NO: 558124 - DNA, 75 bp, synthetic construct
  source 1..75: mol_type = other DNA
cctgtcaccgttgagggcaaaaccctgccgctgaatgaggcgctacagtggcattttgaactgaccgtcaacacc

SEQ ID NO: 558125 - DNA, 75 bp, synthetic construct
  source 1..75: mol_type = other DNA
gatgcgctttgttggcgcggcgggctgatgcaggggctcattgacctctggcaaccgctttcctatgacaggagt

SEQ ID NO: 558126 - DNA, 75 bp, synthetic construct
  source 1..75: mol_type = other DNA
gtctgcgcattgtgctggaagcgggtattcgcgagccgatgatcatgcaggccaatcaggcgctgtatgcgcaat

SEQ ID NO: 558127 - DNA, 75 bp, synthetic construct
  source 1..75: mol_type = other DNA
gccaatcaggcgctgtatgcgcaattacaccccataaaagaatccattttctggcgtcaggttgacggcggacat

SEQ ID NO: 558128 - DNA, 75 bp, synthetic construct
  source 1..75: mol_type = other DNA
cactggcgcggtgaatgaaatccacaccagtccgtatagtaaagaagcgccgctggtggcgagcctctctgttaa

SEQ ID NO: 558129 - DNA, 75 bp, synthetic construct
  source 1..75: mol_type = other DNA
ggaagtgattgccgaatttggtggcatggacaccgaagcggcggatgaatttttaagtgaactgcgcgtagagcg

SEQ ID NO: 558130 - DNA, 75 bp, synthetic construct
  source 1..75: mol_type = other DNA
tataaattcaaacaaatcgccagcgaaaaactgctcatcgtggtgacgtcaacgcaaggggaaggggaaccgccg

SEQ ID NO: 558131 - DNA, 75 bp, synthetic construct
  source 1..75: mol_type = other DNA
tcgagatcgatttaggtgattcaggcctgcactatcagccgggcgacgcgctgggcgtctggtatcagaacgatc

SEQ ID NO: 558132 - DNA, 75 bp, synthetic construct
  source 1..75: mol_type = other DNA
gtccaggcaccggcatcgcgccgttccgcgcctttatgcagcaacgtgctgctgacgaagcgccgggtaaaaact

SEQ ID NO: 558133 - DNA, 75 bp, synthetic construct
  source 1..75: mol_type = other DNA
actggctcgcctccaggcagccactactgatttgacacctacccagcttgcgtgggtatccggctatttctgggg

SEQ ID NO: 558134 - DNA, 75 bp, synthetic construct
  source 1..75: mol_type = other DNA
aaccccgaacggggcacgcactggaacgatgcctgccggggtctgcccgatattcgtgcccggcggcccggcgaa

SEQ ID NO: 558135 - DNA, 75 bp, synthetic construct
  source 1..75: mol_type = other DNA
cacaatcttcggcggaggatttttttacgcgtctgaaggaatccggagcaagacgtattctggatgtgcgtctca

SEQ ID NO: 558136 - DNA, 75 bp, synthetic construct
  source 1..75: mol_type = other DNA
ggtcgccaaagatccaacgctgccgtcttatgacgaactgaagaaaatggggatctataaacgtaaagatcctaa

SEQ ID NO: 558137 - DNA, 75 bp, synthetic construct
  source 1..75: mol_type = other DNA
gagctctggcttgccgggatgcttatctcagcagaaattatcagtattgaacccgctacaaacatacggctctga

SEQ ID NO: 558138 - DNA, 75 bp, synthetic construct
  source 1..75: mol_type = other DNA
ttatgaagaagtcgaggatgagcgtacaggggaaacagatatcatggccaccattaatattggcgaactgatatg

SEQ ID NO: 558139 - DNA, 75 bp, synthetic construct
  source 1..75: mol_type = other DNA
ggatgtttgatcgctcaccaggatttcctcctgatgccccacatcagacagaggttctcggattgataaatgata

SEQ ID NO: 558140 - DNA, 75 bp, synthetic construct
  source 1..75: mol_type = other DNA
attctgtttctggccgatctccattactctcgttttgttcctttaagcctgatttctgacgctattgtccttggc

SEQ ID NO: 558141 - DNA, 75 bp, synthetic construct
  source 1..75: mol_type = other DNA
aggcagccgctgcgacgttagctgccggatcaagcctcagctatatgcattattgggaacctggctggcttgaaa

SEQ ID NO: 558142 - DNA, 75 bp, synthetic construct
  source 1..75: mol_type = other DNA
ccggtttaaatgcctttggtgagcgacaaatttacacgactcggggtgtcggaagtttgtatggcttgcgtctga

SEQ ID NO: 558143 - DNA, 75 bp, synthetic construct
  source 1..75: mol_type = other DNA
ggtacgggcctgtttgcgtggtcgctcaattcgccggcgtattaatcatcccgaccgtttgaattacccaatgaa

SEQ ID NO: 558144 - DNA, 75 bp, synthetic construct
  source 1..75: mol_type = other DNA
gtggtctggggcgcctgttccgtcaactgtggtagccgttgccccttacgacttcatgtcaaagataatgaagtc

SEQ ID NO: 558145 - DNA, 75 bp, synthetic construct
  source 1..75: mol_type = other DNA
tggctgccgccgcaacgttaactgccggatcaggcttcggctatatgcgttattgggaaccaggttggctcgaat

SEQ ID NO: 558146 - DNA, 75 bp, synthetic construct
  source 1..75: mol_type = other DNA
tcaggatgaagacctgtccggagagagctggcttgctggaatgcttgtagctgcagaaattatcagtattgaacc

SEQ ID NO: 558147 - DNA, 75 bp, synthetic construct
  source 1..75: mol_type = other DNA
atgacgcagaaaacagcgcggcaggcgatgaaatgaatcgttttccgttggcatcagagagcacggcaaaggcca

SEQ ID NO: 558148 - DNA, 75 bp, synthetic construct
  source 1..75: mol_type = other DNA
ggcggtggtaacagcaacgagacgcctggtacgcgagatcagcaacggaaaattccgttacaaaatgcctgatgt

SEQ ID NO: 558149 - DNA, 75 bp, synthetic construct
  source 1..75: mol_type = other DNA
ccgcaaaagaacgccatccagactgtcagattgtgaagcgaaaaggacggctatatgtgatttgtaaatctaatc

SEQ ID NO: 558150 - DNA, 75 bp, synthetic construct
  source 1..75: mol_type = other DNA
tgatcggcttcgccaggataccggtacgttcagacaccggtgttcggggattgctcgttaaccttccggcgatcg

SEQ ID NO: 558151 - DNA, 75 bp, synthetic construct
  source 1..75: mol_type = other DNA
tcttgatgcaactggctattttcaaccagccgcaccagcgaatttatctcatgttgaaggtgaatatgtccccgt

SEQ ID NO: 558152 - DNA, 75 bp, synthetic construct
  source 1..75: mol_type = other DNA
ttattatcaagcgcaaagaatacaagggacgtgatgtcatcgacgagatttggcttgatgaaaatctttccatga

SEQ ID NO: 558153 - DNA, 75 bp, synthetic construct
  source 1..75: mol_type = other DNA
ctggatcatgcctgaagaaaacggtattacgccgcgttatgaacagcgtcgcttcgatgccgtacagggcaaaca

SEQ ID NO: 558154 - DNA, 75 bp, synthetic construct
  source 1..75: mol_type = other DNA
atgatctacttacgcaaagcaaatgaacgtggtcatgcaaatcatggctggctggactcctggcatactttctct

SEQ ID NO: 558155 - DNA, 75 bp, synthetic construct
  source 1..75: mol_type = other DNA
gaactctggcttgccgggatgcttatctcagcagaaattatcagtattgaacccgctacaaacatacgactctga

SEQ ID NO: 558156 - DNA, 75 bp, synthetic construct
  source 1..75: mol_type = other DNA
gatggttcattgaaagtgcatcaggatatggaactgtatcgttgggcgttgctgaaagatgagcagtcggtgcat

SEQ ID NO: 558157 - DNA, 75 bp, synthetic construct
  source 1..75: mol_type = other DNA
gctggtgctctcgccggatgcgcgtgatggttcgctgaaagtgtatcaggatatggaactgtaccgctgggcgct

SEQ ID NO: 558158 - DNA, 75 bp, synthetic construct
  source 1..75: mol_type = other DNA
caccattaacggcgtgaaagcctcgaccagcgatggtctggcaatctgggatgagcaggcaatctccatccacgc

SEQ ID NO: 558159 - DNA, 75 bp, synthetic construct
  source 1..75: mol_type = other DNA
gtgatcgccacgccgaacaggcaattcgaactggtaggcactggtgacttatgggccggacaatgcaaaccgcct

SEQ ID NO: 558160 - DNA, 75 bp, synthetic construct
  source 1..75: mol_type = other DNA
ttttccactgattcacgcaattctctcagttactggtgcctccctgttaacgcttctgctcaggagggactatga

SEQ ID NO: 558161 - DNA, 75 bp, synthetic construct
  source 1..75: mol_type = other DNA
agactatcacttatttaagtgatattggttgtctggagattcagggggccagtctacagacgttggcgcagtggt

SEQ ID NO: 558162 - DNA, 75 bp, synthetic construct
  source 1..75: mol_type = other DNA
caggaattcgcccagcgtcttctgagtaaaggaatgcttcgtgaggatgttgcagagttggcaaatttaccactt

SEQ ID NO: 558163 - DNA, 75 bp, synthetic construct
  source 1..75: mol_type = other DNA
acgccggaatatgaagaggcgctggcgtggacgcgcaatatcaccgtcgagcagctgcgtgaaggctataccaaa

SEQ ID NO: 558164 - DNA, 75 bp, synthetic construct
  source 1..75: mol_type = other DNA
acccgtcgctttatcttccttgaagaaggcgatattgcggaaatcactcgccgttcggtaaacatcttcgataaa

SEQ ID NO: 558165 - DNA, 75 bp, synthetic construct
  source 1..75: mol_type = other DNA
atgattgatgtcttaggaccgaagaaacgcagacggcgtactacacaggaaaagatcgctattgttcagcagagc

SEQ ID NO: 558166 - DNA, 75 bp, synthetic construct
  source 1..75: mol_type = other DNA
attgtcagccagctggcttttgctgacggtgaggttctggttaccggagaaatgaatgaactggagaaagcttct

SEQ ID NO: 558167 - DNA, 75 bp, synthetic construct
  source 1..75: mol_type = other DNA
cgtcgcgccactgccgcgcgcgcatttcacaaaacccaatatcgttatcaaacctaacgccaacagccgcccgac

SEQ ID NO: 558168 - DNA, 75 bp, synthetic construct
  source 1..75: mol_type = other DNA
gaaggaatcagcaccgacaattttttattcagatcagcgacgctgccctccagtttttcaatgggcgattcaata

SEQ ID NO: 558169 - DNA, 75 bp, synthetic construct
  source 1..75: mol_type = other DNA
tttttagtcatcctgtttacctctttctcaggaagtttagtctccaggattcccggggcggttcaatcccatcaa

SEQ ID NO: 558170 - DNA, 75 bp, synthetic construct
  source 1..75: mol_type = other DNA
tcgaactactgcaaaaacatattcgccagcgcgacttaatgttattgctggagcaactggtcacgctgattgacg

SEQ ID NO: 558171 - DNA, 75 bp, synthetic construct
  source 1..75: mol_type = other DNA
agacaggaatgcgccctgcgtcttctgagtaaggggatgcttcgtgaagacgttgcagagatggcaaatttatct

SEQ ID NO: 558172 - DNA, 75 bp, synthetic construct
  source 1..75: mol_type = other DNA
ctagcggaatactgcgggaaagtgaagcagactattttgcagatcgccacaatcgacgctttagaaattctcgaa

SEQ ID NO: 558173 - DNA, 75 bp, synthetic construct
  source 1..75: mol_type = other DNA
acctttctgttattgcaggacttatcaaacaactttccagcaatgtggcggtgtggttaatgacggaggaagaaa

SEQ ID NO: 558174 - DNA, 75 bp, synthetic construct
  source 1..75: mol_type = other DNA
ataacagcaacggtatgatctgggatatggcctggttgtaccgttacaccaatggcggtctgaccgtgacaccgg

SEQ ID NO: 558175 - DNA, 75 bp, synthetic construct
  source 1..75: mol_type = other DNA
tgggtaatgcccgccgcctgttcaaactggcgcgtggtgtgtaccggatttgtgatatcagcgatgcgccggtca

SEQ ID NO: 558176 - DNA, 75 bp, synthetic construct
  source 1..75: mol_type = other DNA
actctcgttttgttcctttaagcctgatttctgacgcgattgctcttggcatagaacaaaagcccgatttgatat

SEQ ID NO: 558177 - DNA, 75 bp, synthetic construct
  source 1..75: mol_type = other DNA
cgcggggtatcatgacgtcgaaacctgccgtgactatggggataacgagcgcgtaacgctcggccgctattatca

SEQ ID NO: 558178 - DNA, 75 bp, synthetic construct
  source 1..75: mol_type = other DNA
atgattgaacgtaaccacgaagaaattgacgaccatgacctttctgttattgcgggactgattaaacaactttcc

SEQ ID NO: 558179 - DNA, 75 bp, synthetic construct
  source 1..75: mol_type = other DNA
atgtacaagcgcagatccaacaagaacgattaagaaaggcgagaggcgaggccgatgccatcgaacttaagaacc

SEQ ID NO: 558180 - DNA, 75 bp, synthetic construct
  source 1..75: mol_type = other DNA
gaggaagaagaattaccattaatcgatgaaccggaacaagaaccagaagaagacgatgaatttgatgtgtcttaa

SEQ ID NO: 558181 - DNA, 75 bp, synthetic construct
  source 1..75: mol_type = other DNA
gatcgatgccctagaaattttagaatccgccaatgaccagaaaacattgaagaataagctaagggagatcatcga

SEQ ID NO: 558182 - DNA, 75 bp, synthetic construct
  source 1..75: mol_type = other DNA
aatctgcgtgctgcatggcgaggctggtcttggaaaaacaatgattctgagtgaatacgccgccagaaaccggga

SEQ ID NO: 558183 - DNA, 75 bp, synthetic construct
  source 1..75: mol_type = other DNA
acgtaatggcccgtcgcggctatacgcaaacccacgtcgcccgtgctattggtcgtagcagcgccgttatcaacc

SEQ ID NO: 558184 - DNA, 75 bp, synthetic construct
  source 1..75: mol_type = other DNA
ggtcttggcaaaacaatgattctgcgtgaatacgccgccagaaaccgggatgcggtcctgattgaagctgacccg

SEQ ID NO: 558185 - DNA, 75 bp, synthetic construct
  source 1..75: mol_type = other DNA
cgctgttcggtatgatgatggcagacagttataacttctactatcagggcgggcgggacgccagtgaaattctgc

SEQ ID NO: 558186 - DNA, 75 bp, synthetic construct
  source 1..75: mol_type = other DNA
gctgcgggtggataatgtaccgacaggactgtcggtgccgttccggtttattaccagtattggtggctcgctgac

SEQ ID NO: 558187 - DNA, 75 bp, synthetic construct
  source 1..75: mol_type = other DNA
tcatgagcggcggggagttctttgaggcggcattcaatggtgtggccgcactcattggctcatccacgtgggact

SEQ ID NO: 558188 - DNA, 75 bp, synthetic construct
  source 1..75: mol_type = other DNA
tatcactcccaagaggaataaccattcgtcaatacaagaattgctctacattagttgtaaccttcacatataaag

SEQ ID NO: 558189 - DNA, 75 bp, synthetic construct
  source 1..75: mol_type = other DNA
tggtttcacaggcagggaactatctgggctcatccattaacagcacagcctcgtctgctgcctctcaggccgcag

SEQ ID NO: 558190 - DNA, 75 bp, synthetic construct
  source 1..75: mol_type = other DNA
agccaggtgcagagtctcagtaacagcatcagtcatggcagccagctggtcggcagccagctgacgcagtgggcg

SEQ ID NO: 558191 - DNA, 75 bp, synthetic construct
  source 1..75: mol_type = other DNA
cattgacagccactggcactatctgcacggcggggagacggtcatcatcagccactggcgcatgaccttcacggc

SEQ ID NO: 558192 - DNA, 75 bp, synthetic construct
  source 1..75: mol_type = other DNA
gattattatggagcacaattgaaaggctaggaacgcaagccatacaattattattaatgttgtatttgggtaggg

SEQ ID NO: 558193 - DNA, 75 bp, synthetic construct
  source 1..75: mol_type = other DNA
aagcaataaaccaacttcaggcgagtgaaagcccgcggcgcgatgctgaaattttgttggaacatgttaccggca

SEQ ID NO: 558194 - DNA, 75 bp, synthetic construct
  source 1..75: mol_type = other DNA
aaagaaaaacctgcagtactgggtcatgacgaagcggcatactccaaaaaccgtcgtgcggtactggtttactaa

SEQ ID NO: 558195 - DNA, 75 bp, synthetic construct
  source 1..75: mol_type = other DNA
gactactaactggggggatgcttttgctgttagtgatatagcaagaaggtttaacagcctattggctgcattaaa

SEQ ID NO: 558196 - DNA, 75 bp, synthetic construct
  source 1..75: mol_type = other DNA
tggtggggtaagtataagtgaaaatcctatcgagagggctttagcttttcctgttgtggttttttctggtgctcc

SEQ ID NO: 558197 - DNA, 75 bp, synthetic construct
  source 1..75: mol_type = other DNA
gggactgtggaaacgcgattactcataatactgtgtattgcccgtattgtggttctgtcgaccccttcggctatt

SEQ ID NO: 558198 - DNA, 75 bp, synthetic construct
  source 1..75: mol_type = other DNA
ggctgatgattgctctgcctgttatggcaattgcggcatgttcttccaacaagaactccagcaatgacggcagcg

SEQ ID NO: 558199 - DNA, 75 bp, synthetic construct
  source 1..75: mol_type = other DNA
acggtaagtgagctgcgccccatcaaacatgcgtttgatgcaggtgtaaaagcgcagatagggattgattactaa

SEQ ID NO: 558200 - DNA, 75 bp, synthetic construct
  source 1..75: mol_type = other DNA
acaatctcctgggattatttactaaaaataacgcctgttttaacaagcattagcgatatgtattctgaagaaaaa

SEQ ID NO: 558201 - DNA, 75 bp, synthetic construct
  source 1..75: mol_type = other DNA
gccgcgccgtttgaagcggtgaaacagacgcagatgattggtctgtcgccaggcatgacgcaattgaaaaaagag

SEQ ID NO: 558202 - DNA, 75 bp, synthetic construct
  source 1..75: mol_type = other DNA
catcacaactgggcagcctgcgcgcgaatgctggaaaccgacgtcgccaacctgcatcggctggggaaacgtctg

SEQ ID NO: 558203 - DNA, 75 bp, synthetic construct
  source 1..75: mol_type = other DNA
caacatctccctgggtgaacgtcgtgcgaacgccgttaagatgtatctgcagggtaaaggcgtttctgcagacca

SEQ ID NO: 558204 - DNA, 75 bp, synthetic construct
  source 1..75: mol_type = other DNA
tatgattacgacctgaaccgccccgggtttcctggagagtattttatctgtgaactcaggctgccagatcattat

SEQ ID NO: 558205 - DNA, 75 bp, synthetic construct
  source 1..75: mol_type = other DNA
acaattttaaatccttttaaattggatgacacagattttactaatgccaacatgtttcaggtaaatttcgttagt

SEQ ID NO: 558206 - DNA, 75 bp, synthetic construct
  source 1..75: mol_type = other DNA
tatctctccctagaggagtaactattcgccagcataaaactggcagcaccctggttatcacttttacatataaag

SEQ ID NO: 558207 - DNA, 75 bp, synthetic construct
  source 1..75: mol_type = other DNA
atttaaacatagaagactctagctcagaggaattcctttttgataatggcctcgagaaagacgaaaattcttcgg

SEQ ID NO: 558208 - DNA, 75 bp, synthetic construct
  source 1..75: mol_type = other DNA
ttttcaaaaagaattagcgtacttacaaaatgtaattctttataatgattcgtctcttcgtctggatttttttgg

SEQ ID NO: 558209 - DNA, 75 bp, synthetic construct
  source 1..75: mol_type = other DNA
tcaattagaaaatgaattaacaaaagaaatatataaaagctcatcgaaaattaacaattacttgaacagaattaa

SEQ ID NO: 558210 - DNA, 75 bp, synthetic construct
  source 1..75: mol_type = other DNA
cagtttgcaatgattgtcagtaatcctccgtacattgatgagcaagaccctcatcttcaacaaggcgatgttcgc

SEQ ID NO: 558211 - DNA, 75 bp, synthetic construct
  source 1..75: mol_type = other DNA
gacctgtgaagataacgtgaaagatggtggagtcttcgagagcaacgaacgtgctgtcatcgcaaaccacgcctt

SEQ ID NO: 558212 - DNA, 75 bp, synthetic construct
  source 1..75: mol_type = other DNA
tgggcgatttcactggtcgggatcggtccaatctttgactacattccgagcggtattcagaaagcagaaaacagt

SEQ ID NO: 558213 - DNA, 75 bp, synthetic construct
  source 1..75: mol_type = other DNA
tatcgttttcggcggtatggcgatttgggcgatttcactggtcgggatcggtccaatctttgactacattccgag

SEQ ID NO: 558214 - DNA, 75 bp, synthetic construct
  source 1..75: mol_type = other DNA
ctacgggatttcgttgaggaatgttatgccccttcccgcgcccgtctgaaattccgcgctggagaactggacgat

SEQ ID NO: 558215 - DNA, 75 bp, synthetic construct
  source 1..75: mol_type = other DNA
gctttgaggtgcagcacacccggatcgccgatccggcgctggcgcaggagctacaggatttcgttaacgactgct

SEQ ID NO: 558216 - DNA, 75 bp, synthetic construct
  source 1..75: mol_type = other DNA
tatcctgcgtgtaaggagtggtggtccgatggcgatacggggctgaaaaaccgcctgctgaagcaggtcgatacc

SEQ ID NO: 558217 - DNA, 75 bp, synthetic construct
  source 1..75: mol_type = other DNA
aaactgtttaacgaactgggcccgcgtttcgcgagccgtgccggtgggtacactcgtattcttaagtgccgctga

SEQ ID NO: 558218 - DNA, 75 bp, synthetic construct
  source 1..75: mol_type = other DNA
gtggctgagttggttttctctgcattgaggattctcggtgctatgtggatggtggcgacgttcattgtggtggcc

SEQ ID NO: 558219 - DNA, 75 bp, synthetic construct
  source 1..75: mol_type = other DNA
tttcggtagcattctcatgtgggtgattatcggtgttgcgcctgtcgctgtagcaaaaatggcgtggcgttttgt

SEQ ID NO: 558220 - DNA, 75 bp, synthetic construct
  source 1..75: mol_type = other DNA
cgcatttgcatcgcttccagtgaagagatggacgctgttgcaattattgctcaagcaatggcgatgttaactaaa

SEQ ID NO: 558221 - DNA, 75 bp, synthetic construct
  source 1..75: mol_type = other DNA
gctgcggcaggctattcgggccgctgtgcgcgggggcaatgttggtcattcaccctctggcgccagtgtggatgc

SEQ ID NO: 558222 - DNA, 75 bp, synthetic construct
  source 1..75: mol_type = other DNA
gagatcgtggcaaaactgtttaacgaactgggcccgcgtttcgcgagccgtgccggtggttacactcgtattctg

SEQ ID NO: 558223 - DNA, 75 bp, synthetic construct
  source 1..75: mol_type = other DNA
atttactgaaaagcctgataccaagcctcattattcttacagttttttatctgggatggaaagataaccaggaaa

SEQ ID NO: 558224 - DNA, 75 bp, synthetic construct
  source 1..75: mol_type = other DNA
ttaaaccaggaagaaaatgaagccgtctgccggtggctgaaagagacttaccccgacgcagtagagtttttaccg

SEQ ID NO: 558225 - DNA, 75 bp, synthetic construct
  source 1..75: mol_type = other DNA
ccgattggtttagccaaacggattggttcgcgactgaaaaacagctacccgcgtgaactggtgcgcgatgggaaa

SEQ ID NO: 558226 - DNA, 75 bp, synthetic construct
  source 1..75: mol_type = other DNA
cttcctcatcaggtacaaagcgagcatacagaaaaggtaatcctctgacgcttgcagaacgtcagcaggcatctc

SEQ ID NO: 558227 - DNA, 75 bp, synthetic construct
  source 1..75: mol_type = other DNA
aagcgataaatcaacttcagtcgagcgagagtccgcggcgcgacgctgaaattttgctggaacatgttaccggca

SEQ ID NO: 558228 - DNA, 75 bp, synthetic construct
  source 1..75: mol_type = other DNA
atggaatatcaacactggttacgtgaagcaataagccaacttcaggcgagcgaaagcccgcggcgtgatgctgaa

SEQ ID NO: 558229 - DNA, 75 bp, synthetic construct
  source 1..75: mol_type = other DNA
tccgtggctgatttcctgcaattaacagcgccttatggctggacgttaacgccgattccgtggtgtgaagaaggt

SEQ ID NO: 558230 - DNA, 75 bp, synthetic construct
  source 1..75: mol_type = other DNA
tttacaaatccagttggcggaagcttaactgcaatatttgaattattctgtttcgttatatcagttcctgtggtt

SEQ ID NO: 558231 - DNA, 75 bp, synthetic construct
  source 1..75: mol_type = other DNA
aagtgtgagagattacctggaagagtatttggaaatttgcaaaaacagaaagttatcgccttcaacaataaatgg

SEQ ID NO: 558232 - DNA, 75 bp, synthetic construct
  source 1..75: mol_type = other DNA
atgcaagaatgttttatgcgttcatcggatgcattatcagtgccattacttttcctttttcaatgaggataatac

SEQ ID NO: 558233 - DNA, 75 bp, synthetic construct
  source 1..75: mol_type = other DNA
gccgttgggaaaaccctgggctttgatcctgagaaagtgaatgtcaacggcggggccatcgcgctcgggcatcct

SEQ ID NO: 558234 - DNA, 75 bp, synthetic construct
  source 1..75: mol_type = other DNA
tcgtggcaagctgtctgggacgctgaaatcgcgccccaaatggagactttgataaagaaacccggttacagcatg

SEQ ID NO: 558235 - DNA, 75 bp, synthetic construct
  source 1..75: mol_type = other DNA
tcctggcaagctatctgggatgccgaaatcgcgccccaaatggaggctttgataaagaaacccggttacagcatg

SEQ ID NO: 558236 - DNA, 75 bp, synthetic construct
  source 1..75: mol_type = other DNA
attcgctgatgcttcaagatattataatcttgataaaattgtaaaaggcaaaaaagaagtcaaagatccgttagc

SEQ ID NO: 558237 - DNA, 75 bp, synthetic construct
  source 1..75: mol_type = other DNA
ccaccatttcggcagtcagtaatctggtgggcattttgcctgcggaaagttttcctactgacattcgctcgctgg

SEQ ID NO: 558238 - DNA, 75 bp, synthetic construct
  source 1..75: mol_type = other DNA
cccgaccgaatccgtggccgttgatgtcgcttatgaaggctccggcagtggtgactggcgcactgacggtttcat

SEQ ID NO: 558239 - DNA, 75 bp, synthetic construct
  source 1..75: mol_type = other DNA
caattctggcagttctgggtgtagcgtctaatgccatggctgcaaacagtggtactgttaactttatgggtgcag

SEQ ID NO: 558240 - DNA, 75 bp, synthetic construct
  source 1..75: mol_type = other DNA
gtcatcttctacgcttgctcctactggtataactaactcagtagcaacgggaacaaatgcctatcttcaagtagc

SEQ ID NO: 558241 - DNA, 75 bp, synthetic construct
  source 1..75: mol_type = other DNA
cagggcggcggctttgaacctggcatgaaacaaaaagccaccaaagaaccgatcaaaaacgaggctaacaacggt

SEQ ID NO: 558242 - DNA, 75 bp, synthetic construct
  source 1..75: mol_type = other DNA
ctatgctgatgaactgcagatgctggcgcagcaatatgccaatgataaagagaaagtggcactgttaaaggcgct

SEQ ID NO: 558243 - DNA, 75 bp, synthetic construct
  source 1..75: mol_type = other DNA
aaacgcatagagaagctgttgttcaattatcgggcgcgtaacttccccggcacgttagattacgccgaacagcaa

SEQ ID NO: 558244 - DNA, 75 bp, synthetic construct
  source 1..75: mol_type = other DNA
ggaggatgccgaccgtctgggaattaatcgtcagcattgccttgataacctgaaaattttgcgtgaaaacccgca

SEQ ID NO: 558245 - DNA, 75 bp, synthetic construct
  source 1..75: mol_type = other DNA
taactgacaacaaggggaaaacgcacgatgtgctgaccggaagtgatgacggtcgccacagtaacacgtctctgg

SEQ ID NO: 558246 - DNA, 75 bp, synthetic construct
  source 1..75: mol_type = other DNA
actattattcgtgataatgtttctgttttcccttacttccttgataatatacctgaacatggctttggtacatcg

SEQ ID NO: 558247 - DNA, 75 bp, synthetic construct
  source 1..75: mol_type = other DNA
gttgaagtacttgagctacttacaaaagaaccaatacctcgcgtggagggaataatgagcaatgatttcttagtc

SEQ ID NO: 558248 - DNA, 75 bp, synthetic construct
  source 1..75: mol_type = other DNA
taaaaataactatctccagtcccgtgttcagcaatcaacacagcaggcagaaggtaatggtggtgaggatttatc

SEQ ID NO: 558249 - DNA, 75 bp, synthetic construct
  source 1..75: mol_type = other DNA
agtaaatgcgaatgggatcatgacgactatagctttacgctaaatgtactctctgattcagaacaacctgacgat

SEQ ID NO: 558250 - DNA, 75 bp, synthetic construct
  source 1..75: mol_type = other DNA
accatcaggtagagtatttactccgccaaaagggacttattggagaatatctgaagagaattttcacagattaaa

SEQ ID NO: 558251 - DNA, 75 bp, synthetic construct
  source 1..75: mol_type = other DNA
aatgaatcgtcggtggatcatggtagaattaggtgagcattgccacactcatattgtacctcgcctgaaaaaagt

SEQ ID NO: 558252 - DNA, 75 bp, synthetic construct
  source 1..75: mol_type = other DNA
gcattatctggcacacccagggcagtgggaaaaccgcattggcatactacaacgtgcgcttcctgacagattact

SEQ ID NO: 558253 - DNA, 75 bp, synthetic construct
  source 1..75: mol_type = other DNA
atggagtatgacgacagcgacccggagccgattcaaggggcattctacgccagcagctcttacagcaacccggta

SEQ ID NO: 558254 - DNA, 75 bp, synthetic construct
  source 1..75: mol_type = other DNA
tgcaagagcttgtcttcctttacgagcatgacgaagggtgcagagagttaaccgaatacaaacgagccaaggcag

SEQ ID NO: 558255 - DNA, 75 bp, synthetic construct
  source 1..75: mol_type = other DNA
agccgccttctgatgacaaggcagacaacacggatatccggaaaacggcggaagaaaaagtgaaagccgctgaac

SEQ ID NO: 558256 - DNA, 75 bp, synthetic construct
  source 1..75: mol_type = other DNA
cgggccgaacaggaagccgcacttcttcggggacagatagccgaagaaaaacgcctggttgaactgctgacgtct

SEQ ID NO: 558257 - DNA, 75 bp, synthetic construct
  source 1..75: mol_type = other DNA
gagttcgatacccgctgggtggagcacgcgctggcgaacggcaaatggccggagcgcggcgcagaagcggatcgc

SEQ ID NO: 558258 - DNA, 75 bp, synthetic construct
  source 1..75: mol_type = other DNA
caaggaaaaaaacatatctttcggaagtcgaagggcaaaacgcttggacatggtggacaaataccgaggttggtc

SEQ ID NO: 558259 - DNA, 75 bp, synthetic construct
  source 1..75: mol_type = other DNA
gatgagagatcgtttagagttattacgtaccttaatgagtgaagatgggtctatttggattacagttgacgacaa

SEQ ID NO: 558260 - DNA, 75 bp, synthetic construct
  source 1..75: mol_type = other DNA
gcattcgatacgccaaaacctgagagacttatacagcgtattcttcgaattgcaactaatccggatgatctagta

SEQ ID NO: 558261 - DNA, 75 bp, synthetic construct
  source 1..75: mol_type = other DNA
cagccacgcctgtttgattatctctttacccatcgtaataagcacaaactgatggcattgattgatgtgccacag

SEQ ID NO: 558262 - DNA, 75 bp, synthetic construct
  source 1..75: mol_type = other DNA
gctcgccctatcgtgtcacgatgaattacgcctttggtcaggtcattgaaggctgtgccagcgatcgcgaagaag

SEQ ID NO: 558263 - DNA, 75 bp, synthetic construct
  source 1..75: mol_type = other DNA
ttgactcccttcgccaggctatgcagcttctggagcacaagcacgaaccttcttcaccaccccattccccgtggt

SEQ ID NO: 558264 - DNA, 75 bp, synthetic construct
  source 1..75: mol_type = other DNA
agtaattgatactacagaacttattcgtgtttttggttctcttgcttttgacagtgaacgtgacaatgccgttgt

SEQ ID NO: 558265 - DNA, 75 bp, synthetic construct
  source 1..75: mol_type = other DNA
acccgttacagcgatacccgctggcatgaagattccgtgcgtaaccgctggttcagcgtgatggcggggccgtct

SEQ ID NO: 558266 - DNA, 75 bp, synthetic construct
  source 1..75: mol_type = other DNA
ccgtttcggccctgacgggcgcgttgttgctggtcattgccgatctgctggcacgaatcattcatccgccgctgg

SEQ ID NO: 558267 - DNA, 75 bp, synthetic construct
  source 1..75: mol_type = other DNA
tcagccggatggaaaatgcgtccaaaacggcgcttctggtcttctgtgatgaatttatccgtcatggcggtaaac

SEQ ID NO: 558268 - DNA, 75 bp, synthetic construct
  source 1..75: mol_type = other DNA
tttgtcactgaaaaacgcaaagcgtcaatttctggcgtacagcgtcagttccgcattggttataaccgtgcagcg

SEQ ID NO: 558269 - DNA, 75 bp, synthetic construct
  source 1..75: mol_type = other DNA
gcaccgcagcagcaatatcagcagccacaacagccggttacacagcagccgcagtatcagcagccgcaacagccg

SEQ ID NO: 558270 - DNA, 75 bp, synthetic construct
  source 1..75: mol_type = other DNA
gttgaagttattcctggcaaaccctatgtaggtctggagttaccgaataaaaaacgacaaaccgtttatctgcgc

SEQ ID NO: 558271 - DNA, 75 bp, synthetic construct
  source 1..75: mol_type = other DNA
cagcacgccttgtcagtgtcagtcggcctactatttacaagctgcttaaatctggtgatttaagttatacctcag

SEQ ID NO: 558272 - DNA, 75 bp, synthetic construct
  source 1..75: mol_type = other DNA
gctttcctgtaacccttacatcaagcgctggctacttgatgaaatgtccggtattcatcgactgacctacacgag

SEQ ID NO: 558273 - DNA, 75 bp, synthetic construct
  source 1..75: mol_type = other DNA
tgtccgcagtagtctggctggttgccgctggtacgccagcgagctcagcagagcatcagtccacactaagcgccg

SEQ ID NO: 558274 - DNA, 75 bp, synthetic construct
  source 1..75: mol_type = other DNA
atttgatgtttttgatgatgcaaatgcaagtgcgggaatctataaaacaagcagtgcagatatgtttaacgaaaa

SEQ ID NO: 558275 - DNA, 75 bp, synthetic construct
  source 1..75: mol_type = other DNA
ggtgcgcgagaaggtggtggcgatttttgctgaagccgagccgtttgtcgcatcggacaacgtcgacgcccagct

SEQ ID NO: 558276 - DNA, 75 bp, synthetic construct
  source 1..75: mol_type = other DNA
tgatcatggtcgacctggcgggcgacatcgccccgctgctcgagctggatgccgatacgctgcgcgagcgcctgt

SEQ ID NO: 558277 - DNA, 75 bp, synthetic construct
  source 1..75: mol_type = other DNA
acggtctaccgagctttcgccttgaacatttaaccaaagcgaatggtattgaacatagcaacgcccacgatgcga

SEQ ID NO: 558278 - DNA, 75 bp, synthetic construct
  source 1..75: mol_type = other DNA
tcgtaatttctacgatccctatgcctggagttggcagcatgataactctcgctgggatctgctggacgtcatgcg

SEQ ID NO: 558279 - DNA, 75 bp, synthetic construct
  source 1..75: mol_type = other DNA
agatgccgaccgactgggaattaatcgtcagcattgcctcgataacctgaaaattttgcgtgaaaatccgcaagt

SEQ ID NO: 558280 - DNA, 75 bp, synthetic construct
  source 1..75: mol_type = other DNA
tggagaccgagccgcgcaatctgccggcgctggacattaccttcgccgacccgcgtattgagaagctgctgttta

SEQ ID NO: 558281 - DNA, 75 bp, synthetic construct
  source 1..75: mol_type = other DNA
agttctggcgcgacggtgaacacatcatcagcgacatcctcgactactcagccggagccggattcagagacatct

SEQ ID NO: 558282 - DNA, 75 bp, synthetic construct
  source 1..75: mol_type = other DNA
tcgttatcatttattaatgatgatagctctcttttatatcctaattcgaccccaaaactaccgcaaccaacgcca

SEQ ID NO: 558283 - DNA, 75 bp, synthetic construct
  source 1..75: mol_type = other DNA
attgatgaatatgaatataatttctctattagcgcattgaatcgtagagataatatatcattattcttctttgat

SEQ ID NO: 558284 - DNA, 75 bp, synthetic construct
  source 1..75: mol_type = other DNA
gcgatattgtcatcaaaacttttgacgataaagcacctgaaacagttaaaaacttcctgaactactgccgcgaag

SEQ ID NO: 558285 - DNA, 75 bp, synthetic construct
  source 1..75: mol_type = other DNA
tgtaatattccatcccatctcgaatacagccgtattcaggcacataagatttccctaatcaacggaagcagtgcc

SEQ ID NO: 558286 - DNA, 75 bp, synthetic construct
  source 1..75: mol_type = other DNA
gtcaaagccagtgacgttatcggcaccaatggagaataagaaaactgcagtagaaaaacgtcctaaaggggataa

SEQ ID NO: 558287 - DNA, 75 bp, synthetic construct
  source 1..75: mol_type = other DNA
cgaaaatccaggagaaattaaaactatttctgtttctagtatcaatgctcttttcgtgaaagcctttcaggaatt

SEQ ID NO: 558288 - DNA, 75 bp, synthetic construct
  source 1..75: mol_type = other DNA
cgcagtgaacgcgcttttaattaaagcggtccaagaaatgagcgaagaaaataaacttcttcgtgaacgtcttgc

SEQ ID NO: 558289 - DNA, 75 bp, synthetic construct
  source 1..75: mol_type = other DNA
actctgctggtgctcgccacgtctggtttagagatgatagcgatacggaaaaggctgttatctgggctacagatg

SEQ ID NO: 558290 - DNA, 75 bp, synthetic construct
  source 1..75: mol_type = other DNA
ccctgattaagctggtagatgcgattaaccaactgcgtgaaggctttgaacgtaaagctgtcgaattccaggaca

SEQ ID NO: 558291 - DNA, 75 bp, synthetic construct
  source 1..75: mol_type = other DNA
cattacatctggcattgctgctgcgaagcaatgtattgcttgaggctgttgaacaccttgttggggcattctaca

SEQ ID NO: 558292 - DNA, 75 bp, synthetic construct
  source 1..75: mol_type = other DNA
agcactgcctggaaaaccctggctgtattccgctggaagtgctggagatccagtcgggggcgtaccttggcgagg

SEQ ID NO: 558293 - DNA, 75 bp, synthetic construct
  source 1..75: mol_type = other DNA
ctatgatttcgccgaaggtggattagatctaggtggcacaacgaccgaacgctgtttacatctgggaattgatgg

SEQ ID NO: 558294 - DNA, 75 bp, synthetic construct
  source 1..75: mol_type = other DNA
aatctcttaatgaccgagaagttataggtcatgagattggtattatcgcacaggatttacaagaggtattaccgg

SEQ ID NO: 558295 - DNA, 75 bp, synthetic construct
  source 1..75: mol_type = other DNA
catatgaacgaacaaccgacaaatgctaaaaagatgttgcgtcggtttagaagctctgccctcgcgacaatctgg

SEQ ID NO: 558296 - DNA, 75 bp, synthetic construct
  source 1..75: mol_type = other DNA
tgaaatgatccattggggtaacagtaatacaggacgcaacaacgttttgagtatgcgggattccaaaggattctt

SEQ ID NO: 558297 - DNA, 75 bp, synthetic construct
  source 1..75: mol_type = other DNA
cttaccacagatctcggtgattcatttggaccgtggaatactcgtagaccattcagctataattttgctgacggt

SEQ ID NO: 558298 - DNA, 75 bp, synthetic construct
  source 1..75: mol_type = other DNA
aacgtaggacagataacagtttgatgtttgatgttgctggcgcttttactgtgcatggatctagcgggatcacta

SEQ ID NO: 558299 - DNA, 75 bp, synthetic construct
  source 1..75: mol_type = other DNA
ttacgcttttggtcaggtcattgaaggctgtgccagcgatcgcgaagaaggaacctggatcacgcgtggcgtggt

SEQ ID NO: 558300 - DNA, 75 bp, synthetic construct
  source 1..75: mol_type = other DNA
ttaacccgaccgaatccgtggccattgatattgcttatgaaggttccggcagtggtgactggcgcactgacggtt

SEQ ID NO: 558301 - DNA, 75 bp, synthetic construct
  source 1..75: mol_type = other DNA
atgcgtaaattatgtactgttattttgtctgcagtcgtctggctggttgctgcgggtgcgcccgcaggtgcagca

SEQ ID NO: 558302 - DNA, 75 bp, synthetic construct
  source 1..75: mol_type = other DNA
aaataccagaaagagcattacccggatatgcatgaagttacccgccgcatgccggttgccgagagtgtggatgac

SEQ ID NO: 558303 - DNA, 75 bp, synthetic construct
  source 1..75: mol_type = other DNA
aaaaactgcctaccgatgcgcaaaaagtggcgttgggttttgcgctgtatcacgatccccgtttatcggctgata

SEQ ID NO: 558304 - DNA, 75 bp, synthetic construct
  source 1..75: mol_type = other DNA
gtccttcagttatgccaatgctgaggatgacccaaaaacgcgctacagcgatacccgctggcatgaagattccgt

SEQ ID NO: 558305 - DNA, 75 bp, synthetic construct
  source 1..75: mol_type = other DNA
ccggggattatctccgcgtaactgacaacaaggggaaaacgcacgatgtgctgaccggaagtgatgacggtcgcc

SEQ ID NO: 558306 - DNA, 75 bp, synthetic construct
  source 1..75: mol_type = other DNA
tgacggaagaaggtcaggaaggtcgcaacgccttcaaccagaaacgtcagcctgatttcagcaaatttaaacgga

SEQ ID NO: 558307 - DNA, 75 bp, synthetic construct
  source 1..75: mol_type = other DNA
cagctgacccattacagcgatacccgctggcatgaagattccgttcgtaaccgctggttcagcgtaatggcgggg

SEQ ID NO: 558308 - DNA, 75 bp, synthetic construct
  source 1..75: mol_type = other DNA
aaccagcgcagcgagtacaagcgccaccgtgagatttaccgcccctggggccgttgcgacgtagtggtccagacc

SEQ ID NO: 558309 - DNA, 75 bp, synthetic construct
  source 1..75: mol_type = other DNA
gtcacgttctgcacatgatgtgcgacctgactatcgcagcagataatgccatcttcggtcagactggcccgaaag

SEQ ID NO: 558310 - DNA, 75 bp, synthetic construct
  source 1..75: mol_type = other DNA
atgagtttacggacacgctggcatgaagattccgtgcgtaaccgctggttcagcgtaatggcggggccgtctgtg

SEQ ID NO: 558311 - DNA, 75 bp, synthetic construct
  source 1..75: mol_type = other DNA
tcccggcagtgatgatctgaacgggattaacgtgaaatatcgttatgagtttacggatacgctggggctggtgac

SEQ ID NO: 558312 - DNA, 75 bp, synthetic construct
  source 1..75: mol_type = other DNA
gctactggatataccgatgtaacccaacaattattgctttcggctgtaaccggtttgcatattcgtagattgacc

SEQ ID NO: 558313 - DNA, 75 bp, synthetic construct
  source 1..75: mol_type = other DNA
aagaagccctgaaacaaggtatcccgcaaaacgtgattgaggcagcccagcgttcaccggtttacaaaatggcaa

SEQ ID NO: 558314 - DNA, 75 bp, synthetic construct
  source 1..75: mol_type = other DNA
cggctgtcatacctgttcggtgacctgtaaaaacgtctggaccgggcgtgaaggtatggagtatgcgtggtttaa

SEQ ID NO: 558315 - DNA, 75 bp, synthetic construct
  source 1..75: mol_type = other DNA
ttcaactactttcgcgaagaagaactcttcaacctgacggcgttactgaaaccactgtcagaagaaaccgaaatc

SEQ ID NO: 558316 - DNA, 75 bp, synthetic construct
  source 1..75: mol_type = other DNA
gtcacggctccgataccaaattcaacctgttcaatagtagccgcattgatgccatcgacatcaccgaagtacgca

SEQ ID NO: 558317 - DNA, 75 bp, synthetic construct
  source 1..75: mol_type = other DNA
gtattccggtgcaatacctcgccaatatgttgagtgcgggcgataccggccctgtactgcgggcgctgaaacgga

SEQ ID NO: 558318 - DNA, 75 bp, synthetic construct
  source 1..75: mol_type = other DNA
cgttcgccagtctacaaaatggcgatggactggaaactggcgctgccgttgcaccctgaatatcgcactctgccg

SEQ ID NO: 558319 - DNA, 75 bp, synthetic construct
  source 1..75: mol_type = other DNA
cagcacatcaccctcagtgcgaaagcggctggtgacattaaccgcctgattgtggcggaatacctgaacgaattt

SEQ ID NO: 558320 - DNA, 75 bp, synthetic construct
  source 1..75: mol_type = other DNA
gctttgacgccaaacggctaaaaaaactctacctcgggcgggtgatcagaaagcacaacctgctccaggcgctga

SEQ ID NO: 558321 - DNA, 75 bp, synthetic construct
  source 1..75: mol_type = other DNA
aacaaagcctacttcgaagagctacaagccgaactgggcgacgaaatggagcactactcccgcctgttcaaatcg

SEQ ID NO: 558322 - DNA, 75 bp, synthetic construct
  source 1..75: mol_type = other DNA
tgcagatgaaaaagtgctgaacaacagccagatactgaacaatgaaagctattttgagcggcatatggagtcatg

SEQ ID NO: 558323 - DNA, 75 bp, synthetic construct
  source 1..75: mol_type = other DNA
ctgctgcgccagaaataccggggcgacgtgaaatacgcgcgtacccacaaacgcctgcgcgagcgcggcggcctg

SEQ ID NO: 558324 - DNA, 75 bp, synthetic construct
  source 1..75: mol_type = other DNA
gtttctccaggcgctggatttcaacaaactcaacatcctttatcgcgaagccagccgccgcctcgacttactcaa

SEQ ID NO: 558325 - DNA, 75 bp, synthetic construct
  source 1..75: mol_type = other DNA
cagaaacctgcgtgggtcgcatccgatatctgggcgtgctgctttacgacgctgaccgcatcgaggaagcggcga

SEQ ID NO: 558326 - DNA, 75 bp, synthetic construct
  source 1..75: mol_type = other DNA
ttgccctgtccggcatggtacaggcaaaaaacctgggcacatggggggagatgtaccccattgccgagcaggaca

SEQ ID NO: 558327 - DNA, 75 bp, synthetic construct
  source 1..75: mol_type = other DNA
tacccggaaatggggcagatgctgcgccaggcccgttccgttggcctgaaaacccagtttatggggccggaaggt

SEQ ID NO: 558328 - DNA, 75 bp, synthetic construct
  source 1..75: mol_type = other DNA
gggggaaatatccgtgatgccacaaaggcgctgaacacgcgaatttattttgatcaggatggcaccctgagccgt

SEQ ID NO: 558329 - DNA, 75 bp, synthetic construct
  source 1..75: mol_type = other DNA
atgcgtaaattatgtgctgttattttgtccgcagtagtctggcaggtcgccgctgccacgccagcgagtgcagca

SEQ ID NO: 558330 - DNA, 75 bp, synthetic construct
  source 1..75: mol_type = other DNA
tcccagcccgtgtgacgctggctgaagatcgtcgccgtctgcgggtggattcgtttgcactggatgtgccggagg

SEQ ID NO: 558331 - DNA, 75 bp, synthetic construct
  source 1..75: mol_type = other DNA
ttgcgtggatgaaaaagcagaagcccggtacgttgacgtaccgcgtgattctggtcaatggcgatattcgtgagg

SEQ ID NO: 558332 - DNA, 75 bp, synthetic construct
  source 1..75: mol_type = other DNA
atgccttattaccgcaggaagccgggaaattagccgggcagtatatcagcgcacataacacccttgtggaaattc

SEQ ID NO: 558333 - DNA, 75 bp, synthetic construct
  source 1..75: mol_type = other DNA
aggaagagtggcaaggcggctgggttcgcgatgtcaatggcaagatccgcccgcggctgggcagcaaaatgggcg

SEQ ID NO: 558334 - DNA, 75 bp, synthetic construct
  source 1..75: mol_type = other DNA
aactatgaagatcgttttgtcattccgaccagtcatcgtgaaatggcgggcgacgccttcgcagaacgcaacggc

SEQ ID NO: 558335 - DNA, 75 bp, synthetic construct
  source 1..75: mol_type = other DNA
gctcaaccgtaaggtgatactggtcgggggaaatatccgtgatgccacaaaggcgctgaacacgcggatttactt

SEQ ID NO: 558336 - DNA, 75 bp, synthetic construct
  source 1..75: mol_type = other DNA
ccctctccggcggcccttcataaaatgaagatccggcaggaacgtgaagaactgcaaaaacgtaaccgagccgcg

SEQ ID NO: 558337 - DNA, 75 bp, synthetic construct
  source 1..75: mol_type = other DNA
gacgcgatgccggaacaggacccggtgtttaaactggcgggcgttgcaccggattatgcggcccgtctggatttc

SEQ ID NO: 558338 - DNA, 75 bp, synthetic construct
  source 1..75: mol_type = other DNA
tcgtaccatccacaatatttcgctgaaccctaactttggcggcgaagtaatggtgattggtctgggttgtgaaaa

SEQ ID NO: 558339 - DNA, 75 bp, synthetic construct
  source 1..75: mol_type = other DNA
tctcaagtgctgcccggtcgaatcacatttgttaaaactaaaggaaagaagaaccgcactgtaccgatttcacct

SEQ ID NO: 558340 - DNA, 75 bp, synthetic construct
  source 1..75: mol_type = other DNA
attacttatacaaagacaaagggcaagaaaaacagaacaataccaatatctcaagatctgtatcacgaactcccc

SEQ ID NO: 558341 - DNA, 75 bp, synthetic construct
  source 1..75: mol_type = other DNA
caggggcataaagtcgcattgatcgacattcctgctgatggcgaaattattcgttatggcgaagtgattggttac

SEQ ID NO: 558342 - DNA, 75 bp, synthetic construct
  source 1..75: mol_type = other DNA
gattaatttacgccgcgacgccagccagcgatttcgtctgcggcacccaacaggtggcttcagggattaccgtgc

SEQ ID NO: 558343 - DNA, 75 bp, synthetic construct
  source 1..75: mol_type = other DNA
ccggcggttggctatgcgtctgatctactggtgcgctgcggcgcaacggtgatgttctcagaagtcacggaagtg

SEQ ID NO: 558344 - DNA, 75 bp, synthetic construct
  source 1..75: mol_type = other DNA
acctggctggtcactggcagccctggcggtagccgaattatcaccaccgtgctgcaaatggtagtgaacagtatc

SEQ ID NO: 558345 - DNA, 75 bp, synthetic construct
  source 1..75: mol_type = other DNA
gcaaatggtggtgaatagcatcgattatggcatgaatgtcgccgaagcgaccaatgcaccgcgtttccaccatca

SEQ ID NO: 558346 - DNA, 75 bp, synthetic construct
  source 1..75: mol_type = other DNA
atcatggccgaagccgagaaacatgcctatgccgatcgctcggaataccttggcgacccggattttgtcaaagta

SEQ ID NO: 558347 - DNA, 75 bp, synthetic construct
  source 1..75: mol_type = other DNA
tgcttaatgcctgcgccgaatctcaaaacaccagcctactaatgattgcaaaaatatgcctggctactggtgcgc

SEQ ID NO: 558348 - DNA, 75 bp, synthetic construct
  source 1..75: mol_type = other DNA
tttcgtgacgaccccgaggcaaatccacttaaaacaccttccggtaagattgaaatttattccagcaagctggcg

SEQ ID NO: 558349 - DNA, 75 bp, synthetic construct
  source 1..75: mol_type = other DNA
ttatcgatccgcgatataccgatacggctgctggtcgtgaagatgaatggctccctattcgcccgggcaccgatg

SEQ ID NO: 558350 - DNA, 75 bp, synthetic construct
  source 1..75: mol_type = other DNA
ttcgccggggaacaagaaaggcggtctggcaaatgtggtggagaaagcgctcggctccattgctaaatcgggtaa

SEQ ID NO: 558351 - DNA, 75 bp, synthetic construct
  source 1..75: mol_type = other DNA
ctctggcaaaacatggcgcacagtgaaatgaacggtgttgaggtgatccgtgagctgggccgcctgcgcggatca

SEQ ID NO: 558352 - DNA, 75 bp, synthetic construct
  source 1..75: mol_type = other DNA
gttagccgaaggacaaacgcctctggcactgcccgaacatttcgaccagcagacgcccgacagccagcttgccga

SEQ ID NO: 558353 - DNA, 75 bp, synthetic construct
  source 1..75: mol_type = other DNA
ccgtctgcatatgaacctcgaccttttgcagtttgatgtgcagagttttaaagtcatgatggacgacctggcgca

SEQ ID NO: 558354 - DNA, 75 bp, synthetic construct
  source 1..75: mol_type = other DNA
cgctttactggaaccgatactcgatcggttccaggacgcctgcgcggggctgcacgcggagccggggcaaatacc

SEQ ID NO: 558355 - DNA, 75 bp, synthetic construct
  source 1..75: mol_type = other DNA
ttcttgcggcgggcgccgcacaacgcctgtacgccaaaggcgagcaggttaggatggtgttaatcgatcccgtgt

SEQ ID NO: 558356 - DNA, 75 bp, synthetic construct
  source 1..75: mol_type = other DNA
acgcgctatgggccttgcttcgcgtcgcggccaacgaacagccggaacggttgcttgccgccatcgatctcgccg

SEQ ID NO: 558357 - DNA, 75 bp, synthetic construct
  source 1..75: mol_type = other DNA
agtattcaggtggcgcatcagctcggcgcccgcgtttttctggagatggggcccgatgcccagttggttgcttgc

SEQ ID NO: 558358 - DNA, 75 bp, synthetic construct
  source 1..75: mol_type = other DNA
aactcaacctgcacggtccggcgttatcggtacagaccgcctgttccagctcgctggttgccgtgcatctggcct

SEQ ID NO: 558359 - DNA, 75 bp, synthetic construct
  source 1..75: mol_type = other DNA
ttacacctttgaaggctatcgcaatgccgatggcagcgtgggcaccaaaaacctgctcggcatcaccaccagcgt

SEQ ID NO: 558360 - DNA, 75 bp, synthetic construct
  source 1..75: mol_type = other DNA
gggatgcgccgctgaattaccggcaaacgtgtttaccggcgatagccgctggcatctggtgaccggagcgtttgg

SEQ ID NO: 558361 - DNA, 75 bp, synthetic construct
  source 1..75: mol_type = other DNA
acagccggaacggttgcttgccgccatcgatctcgccgaaaacaccccgtgggaaacgctgcatcaagggttgag

SEQ ID NO: 558362 - DNA, 75 bp, synthetic construct
  source 1..75: mol_type = other DNA
tggtcgtatggcgcgtttcttgcggcgggcccgcacagcgcctgtacgccaaaggcaagcaggttcggatggtgt

SEQ ID NO: 558363 - DNA, 75 bp, synthetic construct
  source 1..75: mol_type = other DNA
gcccgtctcgtatggtgtggaggaagatgtcttccacccggtacgcgcgaaacagggaatggtagcgtctgtgga

SEQ ID NO: 558364 - DNA, 75 bp, synthetic construct
  source 1..75: mol_type = other DNA
atggaacagccgaaagatgccaaaggcacgggtacggaatccggcattcagccacagtacggcgtaccgtatggc

SEQ ID NO: 558365 - DNA, 75 bp, synthetic construct
  source 1..75: mol_type = other DNA
ttacctgtgtaccgctcaccagcgcctgtttgcgctcgatgccgccagcggcaaagagaaatggcattacgatcc

SEQ ID NO: 558366 - DNA, 75 bp, synthetic construct
  source 1..75: mol_type = other DNA
ccacaaacagttttattttttatcagtatcttctcagtgacgttaagtgcagaaacgccgacctgggcgcgttta

SEQ ID NO: 558367 - DNA, 75 bp, synthetic construct
  source 1..75: mol_type = other DNA
gatgccgacgcgattgaacgtgcggcaagtaccgagaacgagaaagatctctaccagcgtcagctggatgtgttc

SEQ ID NO: 558368 - DNA, 75 bp, synthetic construct
  source 1..75: mol_type = other DNA
ctggctgatcctgccgtttgtctggcgtcgcctggtcattcctgccagcggcgcagttgccgcactggtggtcgc

SEQ ID NO: 558369 - DNA, 75 bp, synthetic construct
  source 1..75: mol_type = other DNA
tccgcaggaaatcaacggcaccttaagcgccgatgccacacctgccgaagctatctcccccgttgccgatcagga

SEQ ID NO: 558370 - DNA, 75 bp, synthetic construct
  source 1..75: mol_type = other DNA
tcagccgaaactaaaaagcagcaattaattaatcaggccaacgattatatgaacagtagacaatgggttggtaaa

SEQ ID NO: 558371 - DNA, 75 bp, synthetic construct
  source 1..75: mol_type = other DNA
cgtgttgcaggagaaaatggattacccacatgggcactaatacctccaccatcacatgaagaacttattcaacag

SEQ ID NO: 558372 - DNA, 75 bp, synthetic construct
  source 1..75: mol_type = other DNA
gtggctggattatcttgacgcactggagctggtcgatacttccggtgcgccagatattgaatggcctacgcctcc

SEQ ID NO: 558373 - DNA, 75 bp, synthetic construct
  source 1..75: mol_type = other DNA
aacattaaatgccgaaacaccaacatgggcacgtttaatggcctgggcggggattgtgctcgcatcaattatctg

SEQ ID NO: 558374 - DNA, 75 bp, synthetic construct
  source 1..75: mol_type = other DNA
tgaccgtaggactgttcgtgattactttttttaatccgggagccaatctttttgtggtagtacaaaccagcctgg

SEQ ID NO: 558375 - DNA, 75 bp, synthetic construct
  source 1..75: mol_type = other DNA
tggcgtacccttacgccctacagtctgtttacgctgcaaaagggcaatggccagaaggaaaaggcgtagacatag

SEQ ID NO: 558376 - DNA, 75 bp, synthetic construct
  source 1..75: mol_type = other DNA
cgttcactgattgacggcaaacggatggacaaagtgatctgggggccaaactgggaagaattgttgggcggcgaa

SEQ ID NO: 558377 - DNA, 75 bp, synthetic construct
  source 1..75: mol_type = other DNA
gcaccatgccgttgaataaagtggtgcaaccggcgtttaaactggcgcgcgatggttttatcgttaacgacgcgc

SEQ ID NO: 558378 - DNA, 75 bp, synthetic construct
  source 1..75: mol_type = other DNA
atttctccgccaaaccgggcgtaccgaacgtttacgggctggtgggtggtgacgccaacgcggtcgggccgaata

SEQ ID NO: 558379 - DNA, 75 bp, synthetic construct
  source 1..75: mol_type = other DNA
gtagcaggtttctcgctggcgctggataaatacggcaccatgccgctgaacaaagtcgtgcagcccgcgtttaaa

SEQ ID NO: 558380 - DNA, 75 bp, synthetic construct
  source 1..75: mol_type = other DNA
taaagcggtcgaacgcacaccgataagcggcgattatcgcgggtatcaggtttactccatgccaccgccatcttc

SEQ ID NO: 558381 - DNA, 75 bp, synthetic construct
  source 1..75: mol_type = other DNA
gcggtagccggattatcaccaccgtgctgcaaatggtagtgaacagcatcgattatggcatgaatgtcgccgaag

SEQ ID NO: 558382 - DNA, 75 bp, synthetic construct
  source 1..75: mol_type = other DNA
cttacggcgtggaggaagatgtctttcatccggtacgcgcgaaacaggggatggtggcgtctgtagatgctactg

SEQ ID NO: 558383 - DNA, 75 bp, synthetic construct
  source 1..75: mol_type = other DNA
gtatctgggcgtgctgctttacgacgctgaccgcatcgaggaagcggcgagcaccgagcgcgaagttgacctcta

SEQ ID NO: 558384 - DNA, 75 bp, synthetic construct
  source 1..75: mol_type = other DNA
ggttatccgaaaaactgggaagatcaagaagagtggcaaggcggctgggtccgcgatgtcaacggtaagatccgc

SEQ ID NO: 558385 - DNA, 75 bp, synthetic construct
  source 1..75: mol_type = other DNA
gccacggctcagacagcaaattcaacctgttcaacagtagccgtatcgatgccatcaacattaccgaagtgcgcg

SEQ ID NO: 558386 - DNA, 75 bp, synthetic construct
  source 1..75: mol_type = other DNA
gctgcaaatggtggtgaacagcatcgattatggcatgaacgtcgccgaagcgaccaatgcgccgcgtttccacca

SEQ ID NO: 558387 - DNA, 75 bp, synthetic construct
  source 1..75: mol_type = other DNA
tggacaaagtgatctgggggccaaactgggaagaactgctgggcggtgagttcgaaaaacgtgctcgcgaccgca

SEQ ID NO: 558388 - DNA, 75 bp, synthetic construct
  source 1..75: mol_type = other DNA
cgaccagccatcgggaaatggcgggcgatgccttcgcagaacgcaatggctgcggttttacctttggcgacggtt

SEQ ID NO: 558389 - DNA, 75 bp, synthetic construct
  source 1..75: mol_type = other DNA
gttgctgaaattaagaaactgccggggttgcatttagccggactaacccatttcccttgcctgctttgggatgag

SEQ ID NO: 558390 - DNA, 75 bp, synthetic construct
  source 1..75: mol_type = other DNA
tatcagcagccgcaacaaccagttgcgccacagccgcaatatcaacagccgcaacaaccggttgcaccgcagcag

SEQ ID NO: 558391 - DNA, 75 bp, synthetic construct
  source 1..75: mol_type = other DNA
gcgtctggctgatttccgtattaaagccgatgttgtcaattactctccggggccagttatcactcgctttgaatt

SEQ ID NO: 558392 - DNA, 75 bp, synthetic construct
  source 1..75: mol_type = other DNA
gcgatgtcgtgctggtgtctggtattcaacacggcacggcagaaatcgttggtcgttacgatagtcttggcaacc

SEQ ID NO: 558393 - DNA, 75 bp, synthetic construct
  source 1..75: mol_type = other DNA
gtgtccggtattcatcgtggcgaaccggaaatcgtcggtcgttatgacagtcttggaaactctctgggggcgtaa

SEQ ID NO: 558394 - DNA, 75 bp, synthetic construct
  source 1..75: mol_type = other DNA
acgggatcaactggcgaaatctggtattgcgattgagcaactgaacgcgccttcagcgaccagctgcacttcgct

SEQ ID NO: 558395 - DNA, 75 bp, synthetic construct
  source 1..75: mol_type = other DNA
cagccgcaacaaccagttccgccacagcagcaatatcagcagccgcaacaaccggttgcaccgcagcagcagtat

SEQ ID NO: 558396 - DNA, 75 bp, synthetic construct
  source 1..75: mol_type = other DNA
catcctggccttacaaaaaattctcggacatcacgatataaaaatgacgatgcgttacgcacatctggcaccgga

SEQ ID NO: 558397 - DNA, 75 bp, synthetic construct
  source 1..75: mol_type = other DNA
acataaaaatgactatgcgttacgcacatctagcaccggatcacctggaaactgcattacggtttaatccgctgg

SEQ ID NO: 558398 - DNA, 75 bp, synthetic construct
  source 1..75: mol_type = other DNA
aagaaaaagcccgtgaagcccagcgcaatcagtacgattctggcgatcagtacaacgatgatgaaatcgatgcga

SEQ ID NO: 558399 - DNA, 75 bp, synthetic construct
  source 1..75: mol_type = other DNA
tgctgaagccgatcgcatgatgcgtccgattccagacccgtactggaagccgggtgacagtatggatgcccagca

SEQ ID NO: 558400 - DNA, 75 bp, synthetic construct
  source 1..75: mol_type = other DNA
atgcgtaatggcgacagccgtccgttgcataaaccgacgacgccgctgccttctctggatttgctgacaccgccg

SEQ ID NO: 558401 - DNA, 75 bp, synthetic construct
  source 1..75: mol_type = other DNA
ttgctatggcggtggttactatcgccgtggtcatgcacatcacgctcttatttttactccagaaaatcaaagcat

SEQ ID NO: 558402 - DNA, 75 bp, synthetic construct
  source 1..75: mol_type = other DNA
ttgcgccgcagccgcagtatcagcagccacaacagcaggttgcgccgcagccacaatatcagcagccgcaacaac

SEQ ID NO: 558403 - DNA, 75 bp, synthetic construct
  source 1..75: mol_type = other DNA
aaatgctggagctttcggtttatgaaggcattccgcatctgttaacggaagtcgttactgatatgaaagatgccg

SEQ ID NO: 558404 - DNA, 75 bp, synthetic construct
  source 1..75: mol_type = other DNA
gcatggtacaaactggatacacaggccagagataaaaaatggacagccctggcagaattccctgctggtccgcga

SEQ ID NO: 558405 - DNA, 75 bp, synthetic construct
  source 1..75: mol_type = other DNA
caacgccgacgacgctgtgattgaagccagccactggcaaatcatgatggaagccccccacgttcaggcttgtgc

SEQ ID NO: 558406 - DNA, 75 bp, synthetic construct
  source 1..75: mol_type = other DNA
ggttacgacctgatcgttgccgtcaatgtgctccacgacgccagccatgtcgtccagacgttgcgcagattaaaa

SEQ ID NO: 558407 - DNA, 75 bp, synthetic construct
  source 1..75: mol_type = other DNA
gctgtcaagcatggccatttgctgatcattaatgaaatggatcttgctgagcctgctgaactggctggactcaat

SEQ ID NO: 558408 - DNA, 75 bp, synthetic construct
  source 1..75: mol_type = other DNA
tttgccggaggggccggattcaaaggttcacgagaaaattaccagaacggtaagaactatgcgcatgaaggccta

SEQ ID NO: 558409 - DNA, 75 bp, synthetic construct
  source 1..75: mol_type = other DNA
tatcagcagccacaacaaccggttgcgccgcagcagcaatatcagcagccacaacagccagttgcgccgcagccg

SEQ ID NO: 558410 - DNA, 75 bp, synthetic construct
  source 1..75: mol_type = other DNA
tctggtggaagcgcgtctggctgatttccgtattaaagccgatgtcgtcaattactctccggggccagttatcac

SEQ ID NO: 558411 - DNA, 75 bp, synthetic construct
  source 1..75: mol_type = other DNA
cggtgaaactgcaggcggcaaagcggtaacggattcagtattgatctctgtgaaggataataaagtcacagtgca

SEQ ID NO: 558412 - DNA, 75 bp, synthetic construct
  source 1..75: mol_type = other DNA
ctatcataatggcttcatttgccgcaaacgcgtctgtattaccagaaacccctgtgccttttaaaagcggtactg

SEQ ID NO: 558413 - DNA, 75 bp, synthetic construct
  source 1..75: mol_type = other DNA
atttaaaatggaataaacttgatcccgtctcatcaccagatggcgtcgctggcggttttgcggggataagcaatg

SEQ ID NO: 558414 - DNA, 75 bp, synthetic construct
  source 1..75: mol_type = other DNA
aaaatgctggagctttcggtttatgaaggcattccgcatctgttaacggaagtcgttactgatatgaaagatgcc

SEQ ID NO: 558415 - DNA, 75 bp, synthetic construct
  source 1..75: mol_type = other DNA
actactttcagtttgcatcagtgatggataaaacctcaatcatactgccgcgtggccagctcacgcacgtccttc

SEQ ID NO: 558416 - DNA, 75 bp, synthetic construct
  source 1..75: mol_type = other DNA
gcgtggcaggatctgtctcctcatggaatcacgcagcttatctgttctaagccagagacgacgcctgccgcttcg

SEQ ID NO: 558417 - DNA, 75 bp, synthetic construct
  source 1..75: mol_type = other DNA
atgagtatgtcgggtgcatccgtcgtcagcagcctcacggcccttatgtgctggcgggttggtcgtatggcgcgt

SEQ ID NO: 558418 - DNA, 75 bp, synthetic construct
  source 1..75: mol_type = other DNA
agaaaaaccgtaccgtgccaatatctcaggatctttacaacgaactccctaaaaacagaggaaggctattcaccc

SEQ ID NO: 558419 - DNA, 75 bp, synthetic construct
  source 1..75: mol_type = other DNA
acaggagctgtatgacgaactcccaaagaacagagggaagttattctcaccatgtagaaaagcctttgaacgagc

SEQ ID NO: 558420 - DNA, 75 bp, synthetic construct
  source 1..75: mol_type = other DNA
tgaaccttgaacaacgtaacctatcctcagtttttggcacactgaaaaagctgggacattggtctgcacccaacc

SEQ ID NO: 558421 - DNA, 75 bp, synthetic construct
  source 1..75: mol_type = other DNA
aactcaacggtgttccggcgctggagtaccacttcaccgatatctcagcgctgttcacccgccgcgcccagcaga

SEQ ID NO: 558422 - DNA, 75 bp, synthetic construct
  source 1..75: mol_type = other DNA
aagtcatgatggacgacctggcgcaggcctggcgcggtgaaacgctggcaccgctcgctattaccttccgtgatt

SEQ ID NO: 558423 - DNA, 75 bp, synthetic construct
  source 1..75: mol_type = other DNA
cagaccgcctgctccagctcgctggttgccgtgcatctggcctgtgaaagcctgcgcgctggcgaatccgatatg

SEQ ID NO: 558424 - DNA, 75 bp, synthetic construct
  source 1..75: mol_type = other DNA
cgccattgggcattccgtcggtgaatttgccgctgccgttgtctgcggacactatacgattgaacaggtcatgcc

SEQ ID NO: 558425 - DNA, 75 bp, synthetic construct
  source 1..75: mol_type = other DNA
cattttacagatccggcaaagagaagcgttatttacgccgctgcatgccccgtctgatgcgccgactgagccagc

SEQ ID NO: 558426 - DNA, 75 bp, synthetic construct
  source 1..75: mol_type = other DNA
gaggcgcagtctcagggtttccagccacagtcttacgatctcattgtggcggcgaacgtgattcacgccacccgc

SEQ ID NO: 558427 - DNA, 75 bp, synthetic construct
  source 1..75: mol_type = other DNA
gctggagtgaagcagaaaatctgcagggacaccagttgtcaaaataccgcatcacatacaccaagacgaagggca

SEQ ID NO: 558428 - DNA, 75 bp, synthetic construct
  source 1..75: mol_type = other DNA
aagaagccctgaaacaaggtattccacaaaacgtgattgacgctgcccagcgttcgcctgtctacaaaatggcga

SEQ ID NO: 558429 - DNA, 75 bp, synthetic construct
  source 1..75: mol_type = other DNA
ttcgttctgctctagaaagaaccggtatagaattgccagccgggcagttaacccacgttttacgtcacacattcg

SEQ ID NO: 558430 - DNA, 75 bp, synthetic construct
  source 1..75: mol_type = other DNA
gctcgctattaccttccgtgattatgtgatggctgaacaggcgcgccgacagacatcggcatggcacgatgcctg

SEQ ID NO: 558431 - DNA, 75 bp, synthetic construct
  source 1..75: mol_type = other DNA
gggatgggggatatgctctactctgggccgaactccacgttgccggtacgtgtccatggtgcttttgttcgcgat

SEQ ID NO: 558432 - DNA, 75 bp, synthetic construct
  source 1..75: mol_type = other DNA
tgtggtgttggttgacgaatttgccgacctgatgatgacggtaggtaaaaaagtggaagagctgatagcacgtct

SEQ ID NO: 558433 - DNA, 75 bp, synthetic construct
  source 1..75: mol_type = other DNA
gcaccctgaataccgcaccctgccgatggtctggtacgttcctccgctgtcaccgattcagtcctacgctgatgc

SEQ ID NO: 558434 - DNA, 75 bp, synthetic construct
  source 1..75: mol_type = other DNA
gcttacacgcgctcaactctcaccctacaagctgaccttcaccaaaaccaaaggtaagaagaatagaactgttcc

SEQ ID NO: 558435 - DNA, 75 bp, synthetic construct
  source 1..75: mol_type = other DNA
attcaaagaagctgagaaagaaatgtcctggctaactttgtctcagctcccggagctgtttcgagcctgcgagca

SEQ ID NO: 558436 - DNA, 75 bp, synthetic construct
  source 1..75: mol_type = other DNA
cctgggtgatcccattgcctcggagctgactgccggtgactttacaaaataccgtgaagcacgcctaaaaggtga

SEQ ID NO: 558437 - DNA, 75 bp, synthetic construct
  source 1..75: mol_type = other DNA
aaaggagcaagcccagttactgttaacctggagcaaagccatctaagcagcgttttcagagaactttcccgcctg

SEQ ID NO: 558438 - DNA, 75 bp, synthetic construct
  source 1..75: mol_type = other DNA
atggcagtacgaaaactcaccacaggaaaatggctttgcgaatgttaccctgccggacgtagtggacgtcgtgtg

SEQ ID NO: 558439 - DNA, 75 bp, synthetic construct
  source 1..75: mol_type = other DNA
gccacgctaatattcgtgaaacgatgagatatgcccacttttctcccgagcatttagaggatgcggttacactaa

SEQ ID NO: 558440 - DNA, 75 bp, synthetic construct
  source 1..75: mol_type = other DNA
actttttccggggattatctccgcgtaactgacaacaaggggaaaacgcacgatgtgctgaccggaagtgatgac

SEQ ID NO: 558441 - DNA, 75 bp, synthetic construct
  source 1..75: mol_type = other DNA
tgcacgaattttgtgttcagcggtaagccgggtaccggaaagaaccaccttgcagccgccattggcaatcatctt

SEQ ID NO: 558442 - DNA, 75 bp, synthetic construct
  source 1..75: mol_type = other DNA
accggcccaacccaaagtgcaaaaattatattttcggggacccctgtcacagggaaaacaaatgttcttgcattg

SEQ ID NO: 558443 - DNA, 75 bp, synthetic construct
  source 1..75: mol_type = other DNA
ctggatgaacagcggggaaaatacatgacggtcagtgaactgagaacggaggtgtttggcatcatgcaggctttt

SEQ ID NO: 558444 - DNA, 75 bp, synthetic construct
  source 1..75: mol_type = other DNA
ttaattggttcaggcaaacttcctcaacctgataagttcacatattattatccagatctttccctaacaagaata

SEQ ID NO: 558445 - DNA, 75 bp, synthetic construct
  source 1..75: mol_type = other DNA
tccatcgctttctttactggggtgtgattattcgcgacgtgcccttcctgccccacccgatctctcgctgttaga

SEQ ID NO: 558446 - DNA, 75 bp, synthetic construct
  source 1..75: mol_type = other DNA
tttgatcaaactgtatcattaggtcaagtgcgctctgcaaaattaaaaaatgatggtgataaaagcgcccctgtg

SEQ ID NO: 558447 - DNA, 75 bp, synthetic construct
  source 1..75: mol_type = other DNA
taaagatggatatgtgtgggatgagcacaagtatatgtggttcacatatttcctctcaaggatcggaagtttcgt

SEQ ID NO: 558448 - DNA, 75 bp, synthetic construct
  source 1..75: mol_type = other DNA
atagcctactgtgaatataaaaaagccggttttctggcgctggaagccaccctgcagcagttacctgccgggaaa

SEQ ID NO: 558449 - DNA, 75 bp, synthetic construct
  source 1..75: mol_type = other DNA
gatggtggaacgagtctataccagtgaccgagaacaacaacaggcaaccttcggcgaacaagccagacttcagtt

SEQ ID NO: 558450 - DNA, 75 bp, synthetic construct
  source 1..75: mol_type = other DNA
ctgcctccacagcatcgtattacagagcaatacctgttccaaagtttctcaccgttattttcattttactttgtg

SEQ ID NO: 558451 - DNA, 75 bp, synthetic construct
  source 1..75: mol_type = other DNA
ggatatgtttttgacgaacacaaatatatgtggttaacctatttttcctcacgacttggaagctttacctgcatt

SEQ ID NO: 558452 - DNA, 75 bp, synthetic construct
  source 1..75: mol_type = other DNA
cggaagtttcgtttgtattaaatggattaaaagaagaagcgagaggtttgatcatgaactcagaaatcttatcga

SEQ ID NO: 558453 - DNA, 75 bp, synthetic construct
  source 1..75: mol_type = other DNA
atgaaaaatattgcgacaggcgacgttcttgaacgtatccgcagactggccccgtcacatgtaaccgcgccattc

SEQ ID NO: 558454 - DNA, 75 bp, synthetic construct
  source 1..75: mol_type = other DNA
tacgacaacggcaaatccggggaaaaatttttacaggagctttgcggggttgatttgctggtcctggatgaaata

SEQ ID NO: 558455 - DNA, 75 bp, synthetic construct
  source 1..75: mol_type = other DNA
acgccattaacgctgacgcggtatgagtttttattgctgaagacgttactcaagtcgccaggccgcgtctggtcc

SEQ ID NO: 558456 - DNA, 75 bp, synthetic construct
  source 1..75: mol_type = other DNA
aacgagtcgcgggtaagatttctgatgatattttctcagtgttcaaatgggatcgtgccgctagagcggacatga

SEQ ID NO: 558457 - DNA, 75 bp, synthetic construct
  source 1..75: mol_type = other DNA
cttattggtaccggggctttacctcaaccagatttgtactatttctattacccagacttagcactaactaggata

SEQ ID NO: 558458 - DNA, 75 bp, synthetic construct
  source 1..75: mol_type = other DNA
tgatcgccggacagcatcactgtgcagtgtcgggatgttaacaaacctgaatcatgccgcaatgagtacgcttct

SEQ ID NO: 558459 - DNA, 75 bp, synthetic construct
  source 1..75: mol_type = other DNA
accatacattataataaagcatgaggctttcagttggctcagggataaaaaccctgagggatatgttgtttatta

SEQ ID NO: 558460 - DNA, 75 bp, synthetic construct
  source 1..75: mol_type = other DNA
ttaggcgaggatgaaagactttttcttaaaattgacttcgacaagacagacaaaattgttgttgaatataatctt

SEQ ID NO: 558461 - DNA, 75 bp, synthetic construct
  source 1..75: mol_type = other DNA
atgaaaaacattacgtcaggtggtgttctggcaagaatcagcagatttgtgccgcaggatgcaatccctccgtac

SEQ ID NO: 558462 - DNA, 75 bp, synthetic construct
  source 1..75: mol_type = other DNA
cgtgagacgaaaaacgagcaggtggtattgcaccagataattgatcgccggacagcatcactgtgcagtgtcggg

SEQ ID NO: 558463 - DNA, 75 bp, synthetic construct
  source 1..75: mol_type = other DNA
cgtttgcaggtggcatttcagggccagggtattaaatggctggtggcggcatacgcccggctggagtcggtataa

SEQ ID NO: 558464 - DNA, 75 bp, synthetic construct
  source 1..75: mol_type = other DNA
catgtacgagcaggagaagggcgaaaaaggccagacgcgtatcgaaaacttagaggaactggtgacggcgacgcg

SEQ ID NO: 558465 - DNA, 75 bp, synthetic construct
  source 1..75: mol_type = other DNA
aacaacattcagtacgcgtggatccgcctgctggcgggcgatactggcaaagtgatgattgttggcgatgacgac

SEQ ID NO: 558466 - DNA, 75 bp, synthetic construct
  source 1..75: mol_type = other DNA
ttcatcatcgactgttgcgtaatcgccgtcaggtttcactcagcttcgatgaaacgaaaaacctcaatctaaacc

SEQ ID NO: 558467 - DNA, 75 bp, synthetic construct
  source 1..75: mol_type = other DNA
agagaatgtggaagaaggcgtatacgacgtggattttctctatacggatgtttgggtttcgatgggagagccaaa

SEQ ID NO: 558468 - DNA, 75 bp, synthetic construct
  source 1..75: mol_type = other DNA
tttaatgaccatgctggaacatgcgccaggcaaaacgctgccagagctgagctttgcgtatcttggtgatgcccg

SEQ ID NO: 558469 - DNA, 75 bp, synthetic construct
  source 1..75: mol_type = other DNA
tgcgcctggcgctcgcgggcgaggtccagggcggccgtcttcacgttctgccttgcgcagatgagatagatctag

SEQ ID NO: 558470 - DNA, 75 bp, synthetic construct
  source 1..75: mol_type = other DNA
gagcccaatattagatcaaaatgcctttgacatattcatctggagtgattttgctttgtgtcgaacctttattga

SEQ ID NO: 558471 - DNA, 75 bp, synthetic construct
  source 1..75: mol_type = other DNA
gataaggatttaaaagtgcatgccaaagaagtatcttttgacttcgtttttaacacaacattaaaaaatagtgat

SEQ ID NO: 558472 - DNA, 75 bp, synthetic construct
  source 1..75: mol_type = other DNA
caaaagaacatgtacgcagatcatggtatggcgtacgcctaatgttattcatgaccgtgctgttcatggtttgcc

SEQ ID NO: 558473 - DNA, 75 bp, synthetic construct
  source 1..75: mol_type = other DNA
gaaagtcgttgaatatctgaaagcaaatcaccgcagcgaatacaaacgccaccgcgagatttaccgtccgtgggg

SEQ ID NO: 558474 - DNA, 75 bp, synthetic construct
  source 1..75: mol_type = other DNA
agggcgtaaatttacaaatactcgacaatcaggggtatccagctaagtctggaaaggttatgcccccattattat

SEQ ID NO: 558475 - DNA, 75 bp, synthetic construct
  source 1..75: mol_type = other DNA
gaaaattcagcctccagctcaggaactgtgaatttaacagtcagggtgggaaccttttctctgattcccggataa

SEQ ID NO: 558476 - DNA, 75 bp, synthetic construct
  source 1..75: mol_type = other DNA
atgtcccttcctgaatactggggagaagaacacgtatggtgggacggcagggctacttttcatggtgaggttgtc

SEQ ID NO: 558477 - DNA, 75 bp, synthetic construct
  source 1..75: mol_type = other DNA
ggggagaagaacacgtatggtgggacggcagggctgcttttcatggtgaggttgtcagacctgcctgtactctgg

SEQ ID NO: 558478 - DNA, 75 bp, synthetic construct
  source 1..75: mol_type = other DNA
ctgaatactggggagaagaacacgtatggtgggacggcagggctgcttttcatggtgaggttgtcagacctgcct

SEQ ID NO: 558479 - DNA, 75 bp, synthetic construct
  source 1..75: mol_type = other DNA
catgccaataaaacagcatatattggctattggttaggcgctaactttcaggggaaggggattgtaaccaatgct

SEQ ID NO: 558480 - DNA, 75 bp, synthetic construct
  source 1..75: mol_type = other DNA
tagacggcaaagaatatgtgctcatgacgcatgagactgcaactgttccagttaacgcgctgggaacgaaatttt

SEQ ID NO: 558481 - DNA, 75 bp, synthetic construct
  source 1..75: mol_type = other DNA
tccccaacgagtaagtttgaataatgcacgtattagggaaggtgcgaataagcggggaaattcttctcggctgac

SEQ ID NO: 558482 - DNA, 75 bp, synthetic construct
  source 1..75: mol_type = other DNA
tttatggatacggccacacgtctttattacagctggccgggaaaaagttatgaagagaagttccgtgtgaagctg

SEQ ID NO: 558483 - DNA, 75 bp, synthetic construct
  source 1..75: mol_type = other DNA
cgggataaattatcactaacaataccgcccgaagaggctgtaatttattgccttgaacctcaaagtcagcgctgg

SEQ ID NO: 558484 - DNA, 75 bp, synthetic construct
  source 1..75: mol_type = other DNA
tgatgggtgaacgcagattaaaggttgccgatgtggtccgcgataccggtcttccgcgtagtactgtcacagcgc

SEQ ID NO: 558485 - DNA, 75 bp, synthetic construct
  source 1..75: mol_type = other DNA
attgttaaaaaaatgttcccaaaccaagtgattgaaacccgacgccgtaaaggggcaatggttcccactactatt

SEQ ID NO: 558486 - DNA, 75 bp, synthetic construct
  source 1..75: mol_type = other DNA
tattgtttgcagcgctgtctggcgggcagacaatggcctcagatgtggcattcaggggtaatctgcttgacagac

SEQ ID NO: 558487 - DNA, 75 bp, synthetic construct
  source 1..75: mol_type = other DNA
aaatagatgtgaaagccgttgctgaagcagccgcgaaacatcaggtggcgctggaaatcaataattcctcatttt

SEQ ID NO: 558488 - DNA, 75 bp, synthetic construct
  source 1..75: mol_type = other DNA
tcgcgcctgaatctgaaatggtgatatttatgacgaatcaggaaatgaaagaatgcattgtctctttatgtgcat

SEQ ID NO: 558489 - DNA, 75 bp, synthetic construct
  source 1..75: mol_type = other DNA
gtgtgaacagcggaaggctggggataggaattattgattctgacggcagcagtcttctgaagctgaatcaagtcc

SEQ ID NO: 558490 - DNA, 75 bp, synthetic construct
  source 1..75: mol_type = other DNA
cagaagccattgcaaacaaggccgttcagccgggaatttacaactctgttgcaacatttgaacttttgtataatt

SEQ ID NO: 558491 - DNA, 75 bp, synthetic construct
  source 1..75: mol_type = other DNA
cattattcagcgttctgttatcagtggtgttcctgcctgtatccgtttgtgcctcggaactgggatttaagggta

SEQ ID NO: 558492 - DNA, 75 bp, synthetic construct
  source 1..75: mol_type = other DNA
ttttaatagataactactgcaggaattataacaaggaaaacaaaaaggaaatttattccagttggtattacatac

SEQ ID NO: 558493 - DNA, 75 bp, synthetic construct
  source 1..75: mol_type = other DNA
ctaagcgcgccgttgctgattacgggtgacacaggtacaggtaaagatctttttgcctacgcctgccatcaggca

SEQ ID NO: 558494 - DNA, 75 bp, synthetic construct
  source 1..75: mol_type = other DNA
ccactaacagccggatgcaggcgcattgggctgaactgtgggcgcaacgcaatatcttcaacgaccagcatgacg

SEQ ID NO: 558495 - DNA, 75 bp, synthetic construct
  source 1..75: mol_type = other DNA
tttgtgccaataccagtagaaacagacgaagaagctagctttgcactggattgcgaggctttgccatggctaatt

SEQ ID NO: 558496 - DNA, 75 bp, synthetic construct
  source 1..75: mol_type = other DNA
ccttctcgttggcggtttacccgtcatcacagccggtgtttatggatctcgccaaaaaaggtgtggtagcagatt

SEQ ID NO: 558497 - DNA, 75 bp, synthetic construct
  source 1..75: mol_type = other DNA
ttggcagaagtaaagcgactgccgagctggaaaatcagcgtctggcgggaaatcgtcagcgagctgacagaggtg

SEQ ID NO: 558498 - DNA, 75 bp, synthetic construct
  source 1..75: mol_type = other DNA
atgaccctgaagcagcggtttgctgatacctggcaagcgacgctgaatgccacccactctgaagtcgaatttgac

SEQ ID NO: 558499 - DNA, 75 bp, synthetic construct
  source 1..75: mol_type = other DNA
ccgttaatcctaatctgccacgcaccacggttaaaatgttcaccagctatcggttgcctgtcatgccagagttga

SEQ ID NO: 558500 - DNA, 75 bp, synthetic construct
  source 1..75: mol_type = other DNA
gggtgatttgcgcgacgcaaaagaatctggttgagctggtgcaaaaaggcgtatttcgggaagatctctattatc

SEQ ID NO: 558501 - DNA, 75 bp, synthetic construct
  source 1..75: mol_type = other DNA
cacacatcgttaatggcgcaattgttggtagtgtactggatgttatcaagccgtttgtcccggttgatgatattc

SEQ ID NO: 558502 - DNA, 75 bp, synthetic construct
  source 1..75: mol_type = other DNA
aattctggaaagaaatcgataaccaaatcattgaactgaacaccgaagaggtcggtatcgagatcgtaaacgacc

SEQ ID NO: 558503 - DNA, 75 bp, synthetic construct
  source 1..75: mol_type = other DNA
gttggtgaaattcgtcagagctttgcactgaaaggcaacgaaatcattgcttatcagcgccgccgtgatgtcatc

SEQ ID NO: 558504 - DNA, 75 bp, synthetic construct
  source 1..75: mol_type = other DNA
tcggttggtttgtatattcctggcggttccgccccgctcttctcaacggtattaatgctggcgactccggcgcgt

SEQ ID NO: 558505 - DNA, 75 bp, synthetic construct
  source 1..75: mol_type = other DNA
gccatgcgaatacttaactctactttctggatgtcacctatagggctgattaccggtctgatcgtggctctcggt

SEQ ID NO: 558506 - DNA, 75 bp, synthetic construct
  source 1..75: mol_type = other DNA
caggaacgttttctgacgcatgtggccgccggcattgcaaaaacggatgcggtcaacaaaggtcaactggatgag

SEQ ID NO: 558507 - DNA, 75 bp, synthetic construct
  source 1..75: mol_type = other DNA
ttaaagcccgcctggcagtgtcaatgatccacgagcaggcgattgctgtgcagaacactgaataccagaattatc

SEQ ID NO: 558508 - DNA, 75 bp, synthetic construct
  source 1..75: mol_type = other DNA
atctgacgatgacgcttggacaggcgaaagacaagattggctctaacctagctggtggccttgctggcagtattg

SEQ ID NO: 558509 - DNA, 75 bp, synthetic construct
  source 1..75: mol_type = other DNA
cgttgaaggagcagcactgtccgtggtggcctttacggctaagattgcctccggcctggataatctttactgggc

SEQ ID NO: 558510 - DNA, 75 bp, synthetic construct
  source 1..75: mol_type = other DNA
agcggtaaagggttccggtttttcgaatcagctcttgagggctgggaggcgatgaaaaaccagctcatgcgttac

SEQ ID NO: 558511 - DNA, 75 bp, synthetic construct
  source 1..75: mol_type = other DNA
ttcgtggcttctgatttgctctcccaggctgaacacggcccggactctcaggtgattttactgacgcccgatgct

SEQ ID NO: 558512 - DNA, 75 bp, synthetic construct
  source 1..75: mol_type = other DNA
gaaaaacatcgagaccttccacgtcgcgcagaaactgcagaccgttgatgtggaaacgctaccgggtgtgcgttg

SEQ ID NO: 558513 - DNA, 75 bp, synthetic construct
  source 1..75: mol_type = other DNA
attaatgctggcgactccggcgcgtattgcgggttgcaataaagtggtgctgtgctcaccgccgccgattgccga

SEQ ID NO: 558514 - DNA, 75 bp, synthetic construct
  source 1..75: mol_type = other DNA
cactggccgctgctgaacgactgactgcccacaaaaatgctgtcaccctgcgcgttaacgccctgaaggagcaag

SEQ ID NO: 558515 - DNA, 75 bp, synthetic construct
  source 1..75: mol_type = other DNA
gcgcaaaaactgccgccggtagatgtagaaacccagccaggcgtgcgttgccagcaggtcacgcgcccggtcgct

SEQ ID NO: 558516 - DNA, 75 bp, synthetic construct
  source 1..75: mol_type = other DNA
aaagaatattgaaaccttccacactgcgcaaaaactgccgccggtagatgtcgaaactcagccaggcgtgcgttg

SEQ ID NO: 558517 - DNA, 75 bp, synthetic construct
  source 1..75: mol_type = other DNA
tggcacttaactgcgcgtctataccggaagatgcagtagagagcgaattgtttggtcatgcaccggaaggaaaaa

SEQ ID NO: 558518 - DNA, 75 bp, synthetic construct
  source 1..75: mol_type = other DNA
actggctcctgagcacgttcccgtgccgtacagtacgacggaggagtggcgcgagtggcaacttgccgaaggccg

SEQ ID NO: 558519 - DNA, 75 bp, synthetic construct
  source 1..75: mol_type = other DNA
atgaccatgaatggtggtcgttgggtgaattttaactgggagagctggcggtcaaacgttggacgtcagggtatg

SEQ ID NO: 558520 - DNA, 75 bp, synthetic construct
  source 1..75: mol_type = other DNA
aacggcgggcgctgggtgaattttaactgggagagctggcgcccgaatgttggtcagccaggtattgaaaagtaa

SEQ ID NO: 558521 - DNA, 75 bp, synthetic construct
  source 1..75: mol_type = other DNA
agctcggcaacgaaacgcaaattcatatccagatcccttccattcgtcaaaacctggtgtaccgccagtctgacg

SEQ ID NO: 558522 - DNA, 75 bp, synthetic construct
  source 1..75: mol_type = other DNA
tcggttcaccgaaaatgaatttcctgccggtaaaagtgaccgccgttgcaatcgatcaagtccaggttgagctgc

SEQ ID NO: 558523 - DNA, 75 bp, synthetic construct
  source 1..75: mol_type = other DNA
ggcgattggccgtacgctggtggccgagccaagcgtatttttgctcgatgaaccgctctccaacctcgatgctgc

SEQ ID NO: 558524 - DNA, 75 bp, synthetic construct
  source 1..75: mol_type = other DNA
taagggtgcttcaaacccgcaatgacgctcgtaaaaacaaggctaaaaaatacagcgtcaacatccagattaagt

SEQ ID NO: 558525 - DNA, 75 bp, synthetic construct
  source 1..75: mol_type = other DNA
cgccagttacgggtggaaaaattcctgaatcgttccggtatccagccgttgcaccagaaatgttcgtttgcgaat

SEQ ID NO: 558526 - DNA, 75 bp, synthetic construct
  source 1..75: mol_type = other DNA
ctgtacgatttactctctcgatatcggttctctgttagcgggcaccaaatatcgcggtgattttgaaaaacgctt

SEQ ID NO: 558527 - DNA, 75 bp, synthetic construct
  source 1..75: mol_type = other DNA
atgaaaaatattgcgacaggcggtgttcttgaacgcatccgtaagctggctccgcagcatgtaaccgcgccatac

SEQ ID NO: 558528 - DNA, 75 bp, synthetic construct
  source 1..75: mol_type = other DNA
ctcgcgcacgtctgatgccggtaagcaaacgcaagaaaaccgttaatgtggcggatattgagtccgtggtggccc

SEQ ID NO: 558529 - DNA, 75 bp, synthetic construct
  source 1..75: mol_type = other DNA
gaatcgacccgctgattggtcgtgagaaggaactggagcgcgccattcaggttctctgtcgccgccgtaaaaaca

SEQ ID NO: 558530 - DNA, 75 bp, synthetic construct
  source 1..75: mol_type = other DNA
tgccgcacggtgagctgagcgagtttcagcttgagtggctggaacgtaaactggccgatgcgccagaacgccata

SEQ ID NO: 558531 - DNA, 75 bp, synthetic construct
  source 1..75: mol_type = other DNA
cgcggaaggttgaacagtcatggctactgcgccagaatttgctcgggcaggctgtcactgagctaaatttccagt

SEQ ID NO: 558532 - DNA, 75 bp, synthetic construct
  source 1..75: mol_type = other DNA
tttccctgaagcccgcccgtcaggctgcaatacaggctatcagccatgttgagtctgcccgcgaacgcggcgcac

SEQ ID NO: 558533 - DNA, 75 bp, synthetic construct
  source 1..75: mol_type = other DNA
ctgtattgctgcttgcactgctaacctccacgagctttgctgcgggtaagaatgtcaatgttgagttcagaaaag

SEQ ID NO: 558534 - DNA, 75 bp, synthetic construct
  source 1..75: mol_type = other DNA
gcagttgaaaaatgctgtctatcgtgcactcacccaactggacggctacgaactgcgtccacaagacattttgct

SEQ ID NO: 558535 - DNA, 75 bp, synthetic construct
  source 1..75: mol_type = other DNA
ggaaacaccggaaggaatacaccgcgccgagcggtggcaggtgccaaacaagctgcgttatcagccggtggcagg

SEQ ID NO: 558536 - DNA, 75 bp, synthetic construct
  source 1..75: mol_type = other DNA
gaggaactggcggctccgttctggcggtggcaaagtcgcttccgctcactggaggagctggagtggaaccggctc

SEQ ID NO: 558537 - DNA, 75 bp, synthetic construct
  source 1..75: mol_type = other DNA
cgttgctgctactgcaccatcatccgctgcctgcaggctgtagctggctcgaccaacacagtctgcgtaacgcag

SEQ ID NO: 558538 - DNA, 75 bp, synthetic construct
  source 1..75: mol_type = other DNA
cagtttaaaccacactgttccaactttacgctggacactattgccccaggctggcgtacgctggaactccatgcc

SEQ ID NO: 558539 - DNA, 75 bp, synthetic construct
  source 1..75: mol_type = other DNA
ccacaccagcacgaattcgacctgattgtcgcgacaggtgatttagcgcaggatcaatcctctgcggcctatcag

SEQ ID NO: 558540 - DNA, 75 bp, synthetic construct
  source 1..75: mol_type = other DNA
tccagatattccccagaactcgatagtcacggacaatactcactccctgcttctggcaaatatgagctgcgagtg

SEQ ID NO: 558541 - DNA, 75 bp, synthetic construct
  source 1..75: mol_type = other DNA
tactgcaccagattgttgaccgccggacggcatcactgcgcagtgttgggatgctgacaaacctgaatcatgccg

SEQ ID NO: 558542 - DNA, 75 bp, synthetic construct
  source 1..75: mol_type = other DNA
ggactgtcaggggaaaaatttttgcgtgaactgtgcgaagtggacctcctggttattgacgaaattggcatccag

SEQ ID NO: 558543 - DNA, 75 bp, synthetic construct
  source 1..75: mol_type = other DNA
agtgatgatctgaacgggattaacgtgaaataccgttatgagtttacggacacactggggctggtgacgtcattc

SEQ ID NO: 558544 - DNA, 75 bp, synthetic construct
  source 1..75: mol_type = other DNA
cccgaccgaatccgtgaccattgaccttgcttatgaaggttccggcagtggcgactggcgcactgacggtttcat

SEQ ID NO: 558545 - DNA, 75 bp, synthetic construct
  source 1..75: mol_type = other DNA
gaagtgatgacggttgccacagcaacacgtctctggcgtggggggctggcgtgcagtttaacccgaccgaatccg

SEQ ID NO: 558546 - DNA, 75 bp, synthetic construct
  source 1..75: mol_type = other DNA
atacccgctggcatgaagattccgttcgtaaccgctggttctgtagtggtcaagtaatactggccacggttttac

SEQ ID NO: 558547 - DNA, 75 bp, synthetic construct
  source 1..75: mol_type = other DNA
gtctgtgcgcgtgaatgaatggttcagcgcgtatgcgatggcgggtgtagcttacagccgtgtgtcgactttctc

SEQ ID NO: 558548 - DNA, 75 bp, synthetic construct
  source 1..75: mol_type = other DNA
attaacgtgaaataccgttatgagtttacggacacactggggctggtgacgtcattcagctatgccaatgctgag

SEQ ID NO: 558549 - DNA, 75 bp, synthetic construct
  source 1..75: mol_type = other DNA
gaccttgcttatgaaggttccggtagtggcgactggcgaacggatgcatttattgttggtatcggataccgtttc

SEQ ID NO: 558550 - DNA, 75 bp, synthetic construct
  source 1..75: mol_type = other DNA
gtgttacagcgctggcatgaagattccgtgcgtaaccgctggttcagcgtaatggcggggccgtctgtgcgcgtg

SEQ ID NO: 558551 - DNA, 75 bp, synthetic construct
  source 1..75: mol_type = other DNA
atgccaatgctgaggatgagcaaaaaacgacgctacagcgatacccgctggcatgaagattccgtgcgtaaccgc

SEQ ID NO: 558552 - DNA, 75 bp, synthetic construct
  source 1..75: mol_type = other DNA
attaacgtgaaataccgttatgagtttacggacacgctggggctgattacgtcattcagttatgccaatgctgaa

SEQ ID NO: 558553 - DNA, 75 bp, synthetic construct
  source 1..75: mol_type = other DNA
gtggcttacagccgtgtgtcgactttctccggggattatcttcgcgtaactgacaacaaggggaaaacgcacgat

SEQ ID NO: 558554 - DNA, 75 bp, synthetic construct
  source 1..75: mol_type = other DNA
attaacgtgaaataccgttatgagtttacggacccactggggctggtgacgtcattcagctatgcaggagacaag

SEQ ID NO: 558555 - DNA, 75 bp, synthetic construct
  source 1..75: mol_type = other DNA
acaaggggaaaacgcacgatgtgctgaccggaagtgatgacggtcgccacagcgacacctctctggcgtggggag

SEQ ID NO: 558556 - DNA, 75 bp, synthetic construct
  source 1..75: mol_type = other DNA
cagtttaacccgaccgaatccgtggccattgatattgcttatgaaggctccggcagtggtgactggcgcactgac

SEQ ID NO: 558557 - DNA, 75 bp, synthetic construct
  source 1..75: mol_type = other DNA
aatggttcagcgcgtatgcgatggcgggcgtggcttacgagccgtgtgtcgactttctccggggattatctccgc

SEQ ID NO: 558558 - DNA, 75 bp, synthetic construct
  source 1..75: mol_type = other DNA
cattaaaccagcaaccaagattcatcgatatgtgttgcggttcaggcactatagttgtggagacagtaaaagcgg

SEQ ID NO: 558559 - DNA, 75 bp, synthetic construct
  source 1..75: mol_type = other DNA
gcacatgttacaggtacagagtcgcttgctaaatttcatgaatttggttcgaaaaagtatggattcgtggatgta

SEQ ID NO: 558560 - DNA, 75 bp, synthetic construct
  source 1..75: mol_type = other DNA
gaaacgccaggttagccagcgtctcgacggcgcggccatcgacatgccagcaggcccgtctgaagtgctggtcat

SEQ ID NO: 558561 - DNA, 75 bp, synthetic construct
  source 1..75: mol_type = other DNA
ccgaatacgtggccattgatattgcttatgaagggtccggcagtggtgactggcgcactgacggtttcatcgtgg

SEQ ID NO: 558562 - DNA, 75 bp, synthetic construct
  source 1..75: mol_type = other DNA
atattgcttatgaaggttctggcagtggtgactggcgcactgacggtttcatcgtgggtgtcggttataaattct

SEQ ID NO: 558563 - DNA, 75 bp, synthetic construct
  source 1..75: mol_type = other DNA
tccgcgtaactgataacaaggggaaaacgcacgacgtgctgaccggaagtgatgacggtcgccacagcaacacgt

SEQ ID NO: 558564 - DNA, 75 bp, synthetic construct
  source 1..75: mol_type = other DNA
gtcgccacagcaacacgtctctggcgtggggggctggcgtgcagtttaacccgaccgaatccgtgaccattgacc

SEQ ID NO: 558565 - DNA, 75 bp, synthetic construct
  source 1..75: mol_type = other DNA
ccgaatgcgtggccattgatattgcttatgaagggtccggtagtggggactggcgcactgacggtttcatcgtgg

SEQ ID NO: 558566 - DNA, 75 bp, synthetic construct
  source 1..75: mol_type = other DNA
ccgaattcgtggccattgatattgcttatgaagggtccggcagtggagactggcgcactgacggtttcatcgtgg

SEQ ID NO: 558567 - DNA, 75 bp, synthetic construct
  source 1..75: mol_type = other DNA
tcccggcagtgatgatctgaacgggattaacgtgaaataccgttatgagtttacggacacactggggatggtgac

SEQ ID NO: 558568 - DNA, 75 bp, synthetic construct
  source 1..75: mol_type = other DNA
tcacggacacgctggggctggtgacgtcattcagctatgcaggagacaagaatcgccagcttacccgttacagcg

SEQ ID NO: 558569 - DNA, 75 bp, synthetic construct
  source 1..75: mol_type = other DNA
ggtatcttcagactcatactgatatgccaggcagtgatgacctgaagggcattaacgtgaaataccgttatgaat

SEQ ID NO: 558570 - DNA, 75 bp, synthetic construct
  source 1..75: mol_type = other DNA
cccgatcgaatccgtggccattgatattgcttatgaaggctccggcagtggcgactggcgcactgacggcttcat

SEQ ID NO: 558571 - DNA, 75 bp, synthetic construct
  source 1..75: mol_type = other DNA
gtcattcagttatgccaatgccaaagatgagcaaaaaacgcattacagcgatacccgctggcatgaggattccgt

SEQ ID NO: 558572 - DNA, 75 bp, synthetic construct
  source 1..75: mol_type = other DNA
accggaagtgatgacggtcgccgcagcaacacgtctctggcgtggggggctggcgtgcagtttaacccgaccgaa

SEQ ID NO: 558573 - DNA, 75 bp, synthetic construct
  source 1..75: mol_type = other DNA
tgtccgcagccatctgtctgtccgtatccggtgcgcctgcatgggcgtcggaacatcagtccacactgagcacag

SEQ ID NO: 558574 - DNA, 75 bp, synthetic construct
  source 1..75: mol_type = other DNA
ggtcgccacagcaacatgtctctggcgtggggggctggcgtgcagtttaacccgaccgaatccgtggccattgat

SEQ ID NO: 558575 - DNA, 75 bp, synthetic construct
  source 1..75: mol_type = other DNA
gggcgtggcttacagccgtgtgtcgactttctccggggattatctccgcgtaactgacaacaaggggaaaacgca

SEQ ID NO: 558576 - DNA, 75 bp, synthetic construct
  source 1..75: mol_type = other DNA
gggctgattacgtccttcagttatgccaatgctgaggatgagcaaaaaacgcactacagcgatacccgctggcat

SEQ ID NO: 558577 - DNA, 75 bp, synthetic construct
  source 1..75: mol_type = other DNA
gcaggtgcgcaatgccttccgtcctctgacggtaaaagagatgatccaggcactggcagatgcgcgttatgacga

SEQ ID NO: 558578 - DNA, 75 bp, synthetic construct
  source 1..75: mol_type = other DNA
ggccattgatattgcttatgaaggctcaggcagtggtgactggcgcactgacggtttcatcgtgggtgtcggtta

SEQ ID NO: 558579 - DNA, 75 bp, synthetic construct
  source 1..75: mol_type = other DNA
acactgagcgcggggtatcttcatgcccgtacgaacgctcccggcagcgataatctgaacgggattaacgtgaaa

SEQ ID NO: 558580 - DNA, 75 bp, synthetic construct
  source 1..75: mol_type = other DNA
tctggcgtggggagctggcgtgcagtttaacccgaccgaatccgtggccattgaccttgcttatgaaggctccgg

SEQ ID NO: 558581 - DNA, 75 bp, synthetic construct
  source 1..75: mol_type = other DNA
ctgcgcactttctaactcgctgccacaattggttgtctttcgtgttattcaaggaacaggtggcgcaatgatgat

SEQ ID NO: 558582 - DNA, 75 bp, synthetic construct
  source 1..75: mol_type = other DNA
tatcgtaggcaatattgcaacccgtctggggaccggctgtgtaccgttccttatgccattgatgttacaggtagg

SEQ ID NO: 558583 - DNA, 75 bp, synthetic construct
  source 1..75: mol_type = other DNA
ctggcctgcctatggtcgcaatcaggaaggtcaacgcttttcacctctgaaacaaattaacgccgataacgttca

SEQ ID NO: 558584 - DNA, 75 bp, synthetic construct
  source 1..75: mol_type = other DNA
gtgctgagacgacgcttacggccgtctgtgcgcgtgaatgaattgttcagcgcgtatgcgatggcgggtgtgtct

SEQ ID NO: 558585 - DNA, 75 bp, synthetic construct
  source 1..75: mol_type = other DNA
gggtgtggcttacagccgtgtgtcgactttttccggggattatctccgcgtaactgacaacaaggggaaaacgca

SEQ ID NO: 558586 - DNA, 75 bp, synthetic construct
  source 1..75: mol_type = other DNA
ctgacaacaaggggaaaacgcacgatgtgctgaccggaagtgatgacggtcgccacagcaacatgtctctggcgt

SEQ ID NO: 558587 - DNA, 75 bp, synthetic construct
  source 1..75: mol_type = other DNA
gccggttccggtgccgttcaatatgggtatgccgatgctgggcgggccaatctccacggcgggtaacgtgctgtt

SEQ ID NO: 558588 - DNA, 75 bp, synthetic construct
  source 1..75: mol_type = other DNA
gcgggtggtcaggctacgccaatgacctatgaagtgaatggtaagcagtatgtggtgatctccgcaggcggtcac

SEQ ID NO: 558589 - DNA, 75 bp, synthetic construct
  source 1..75: mol_type = other DNA
atggcaggtgtggcttacagccgtgtgtcgactttctccggggattatctccgcgtaactgacaacaaggggaaa

SEQ ID NO: 558590 - DNA, 75 bp, synthetic construct
  source 1..75: mol_type = other DNA
gaaacggcttcgccggaagtgatggcggattgcccgcgtcgtatcattcttccagtgaatgatggtcgcctgatt

SEQ ID NO: 558591 - DNA, 75 bp, synthetic construct
  source 1..75: mol_type = other DNA
gaaaaccggcaacatttttgtgctcgatcgtcgtaatggtgaactggtggttcctgccccggaaaaaccagtgcc

SEQ ID NO: 558592 - DNA, 75 bp, synthetic construct
  source 1..75: mol_type = other DNA
gcgattaacgctgaaaacggcaagctgtgcgaaaccttcgccgataaaggcgtgctcaatctgcaaagcaatatg

SEQ ID NO: 558593 - DNA, 75 bp, synthetic construct
  source 1..75: mol_type = other DNA
ctgtgaaaggctaccatcaacggaggcatttaatgccatatgcaaagtgacgagtgctatcacgcttgatacgtg

SEQ ID NO: 558594 - DNA, 75 bp, synthetic construct
  source 1..75: mol_type = other DNA
tttgatttacgtgaaagcatggcgaatggcggtggcccggcgtgcctgcggttgcgcgtggtgttgacagaagaa

SEQ ID NO: 558595 - DNA, 75 bp, synthetic construct
  source 1..75: mol_type = other DNA
aaaacagggcttactgaaaatgaaagcccttgccgatgcgggatttccccaggcggtgatcccgccgcacgagcg

SEQ ID NO: 558596 - DNA, 75 bp, synthetic construct
  source 1..75: mol_type = other DNA
aggaaggacatcaaattggctggcaggagggtaagattgaaggttggcaggaggggaagttggagggtttgcaga

SEQ ID NO: 558597 - DNA, 75 bp, synthetic construct
  source 1..75: mol_type = other DNA
acaccgtggattcgctctgtttccggtactacggcacgacacagggcgtcaccgaaaaggtgctggatgccaacc

SEQ ID NO: 558598 - DNA, 75 bp, synthetic construct
  source 1..75: mol_type = other DNA
gggaagggagagatttcgactgcctgtaaagactgccgtgggcgtggtgttgccattcatcgagaagagtcggaa

SEQ ID NO: 558599 - DNA, 75 bp, synthetic construct
  source 1..75: mol_type = other DNA
ggcgtttttcataatgacgtgattgccgtgagtaaccgccaggtgctgttttgccatcaacaggcgttcgctcgc

SEQ ID NO: 558600 - DNA, 75 bp, synthetic construct
  source 1..75: mol_type = other DNA
gcgtgaaggaagggaagctctggatgcactgactcgtttactgaatctcggttcggtttacccgtttcagcggga

SEQ ID NO: 558601 - DNA, 75 bp, synthetic construct
  source 1..75: mol_type = other DNA
acggcggcggccctgcgtgcctgcggttacgcgtggtgctgacggcagaagaatatcaggcggtaaatccggcag

SEQ ID NO: 558602 - DNA, 75 bp, synthetic construct
  source 1..75: mol_type = other DNA
gcccgtcaccgaatcgctgttaaaagcgatttttaacgacgaagagaaatttagcgtccattcggcgttgccgca

SEQ ID NO: 558603 - DNA, 75 bp, synthetic construct
  source 1..75: mol_type = other DNA
atgaatgcttgcgaagtcaatttcgatgggctggtggggctgacacatcattacgctggtctgtcgtttggtaat

SEQ ID NO: 558604 - DNA, 75 bp, synthetic construct
  source 1..75: mol_type = other DNA
gcgcgaagggcgggaagcactggatgcactgagccaattactggatctcggttcggtttatccgttccagcgaga

SEQ ID NO: 558605 - DNA, 75 bp, synthetic construct
  source 1..75: mol_type = other DNA
atgactattgctgaacggctgaggcaggaaggtaagcttgaaggctggcaggagggtaaattagaaggtttgcag

SEQ ID NO: 558606 - DNA, 75 bp, synthetic construct
  source 1..75: mol_type = other DNA
agaatgccagcgccggaggcagcttcactttcgggtccatgagcggttcggcgagtgtgagcctcagccgggata

SEQ ID NO: 558607 - DNA, 75 bp, synthetic construct
  source 1..75: mol_type = other DNA
atgcaccctggttcagatctggtagggaaggttgaaatgactgagtggttagttgactttgctgcccagcttcgc

SEQ ID NO: 558608 - DNA, 75 bp, synthetic construct
  source 1..75: mol_type = other DNA
agtaaagaggggactgatgctaatctggatgttgatgatacggatagctatggaccagaaactgtcactatcagc

SEQ ID NO: 558609 - DNA, 75 bp, synthetic construct
  source 1..75: mol_type = other DNA
aattcagcctccggctcaggaactgtgaatttaacagtcagggtgggaaccttttctctgattcccggataaggg

SEQ ID NO: 558610 - DNA, 75 bp, synthetic construct
  source 1..75: mol_type = other DNA
gtatggcggcctccggttttggaacgggaggcaaataccagcaggcgatacaggccgcaacggcagcagtacagg

SEQ ID NO: 558611 - DNA, 75 bp, synthetic construct
  source 1..75: mol_type = other DNA
gcaacagaccggagccagatggactattgatataaaaggaaatcctcagttaggagagcttgctaataaatataa

SEQ ID NO: 558612 - DNA, 75 bp, synthetic construct
  source 1..75: mol_type = other DNA
acgcccgcgaactggtcgatagcatcaccagcgccggttcggtatttcttggtgactggtcaccggaatcggcag

SEQ ID NO: 558613 - DNA, 75 bp, synthetic construct
  source 1..75: mol_type = other DNA
caggcccatcggaagtgttggtgattgccgacagcggcgcaacgccggatttcgtggcttctgatttgctctctc

SEQ ID NO: 558614 - DNA, 75 bp, synthetic construct
  source 1..75: mol_type = other DNA
aaggtatgcatgaacaagccattaaaattgctttgcgcatgctggaacagggcattgatcgtgaccaggtgctcg

SEQ ID NO: 558615 - DNA, 75 bp, synthetic construct
  source 1..75: mol_type = other DNA
agctacctgatgaagagcacgaaggcgaaacattcaatgaatgtccacttagctggggaatgagcgtcgaacagt

SEQ ID NO: 558616 - DNA, 75 bp, synthetic construct
  source 1..75: mol_type = other DNA
ggttgcaggccaggaagtggaactgccggagcaaatccgtgagaaaaaacaggaaacggtattgctatggagctg

SEQ ID NO: 558617 - DNA, 75 bp, synthetic construct
  source 1..75: mol_type = other DNA
cggggatttcagccgtcatgtttctgcatgccggacaggaagtggagctgcaggggcagacccggcgtgaaatga

SEQ ID NO: 558618 - DNA, 75 bp, synthetic construct
  source 1..75: mol_type = other DNA
atctgaatgtcgtccgctgccagtagctgaagaatgtgaatatgccactgtggatatgttgccggagctgcttgt

SEQ ID NO: 558619 - DNA, 75 bp, synthetic construct
  source 1..75: mol_type = other DNA
aattatcaaccctgtcagaagcgcagaaaaaaacgcttttgcagaatgcagcactcatcgaccagaaaaagattc

SEQ ID NO: 558620 - DNA, 75 bp, synthetic construct
  source 1..75: mol_type = other DNA
gaaagtttcttgtcctgaatgtaaagggaagggggagatttccactgcctgtaaagactgccgtgggcgtggtgt

SEQ ID NO: 558621 - DNA, 75 bp, synthetic construct
  source 1..75: mol_type = other DNA
atgaaactggaagatttaccgaaatactactccccaaaatccctcggcctgactgatgcatcggcctcaacgtcg

SEQ ID NO: 558622 - DNA, 75 bp, synthetic construct
  source 1..75: mol_type = other DNA
atgcaaaacagtggcgatactcaactggcaagaaaatataatcgtgaaggtgaagctttttacaaaaccggtcaa

SEQ ID NO: 558623 - DNA, 75 bp, synthetic construct
  source 1..75: mol_type = other DNA
gctggtatcaaatatttccgatgcactggccgggaatgttgtggactggaggaactgggggagttcagttctccg

SEQ ID NO: 558624 - DNA, 75 bp, synthetic construct
  source 1..75: mol_type = other DNA
gcaaaggccgatgctttacgtaataactggaatgccggactccaggagggactgaccaactgggcagacagtgcc

SEQ ID NO: 558625 - DNA, 75 bp, synthetic construct
  source 1..75: mol_type = other DNA
cggcggaacagttcccgtggccggaagcgctcaactgaagccagcgccacgttttacaatgaggaaagaagatga

SEQ ID NO: 558626 - DNA, 75 bp, synthetic construct
  source 1..75: mol_type = other DNA
aaaaacggaatatcatgggatcttggtcccattcatcccggctcatcactatattttttgcgttctgagggtaaa

SEQ ID NO: 558627 - DNA, 75 bp, synthetic construct
  source 1..75: mol_type = other DNA
ggaaaaaactgttaagcaattctatgacacgctggtgattaagtttgatattgaggaagcatgggcagagcggca

SEQ ID NO: 558628 - DNA, 75 bp, synthetic construct
  source 1..75: mol_type = other DNA
ggcgtgtatccgtcttactgggaggaatggaaaaaagtccgggaggtggtgaaagtctcctgtccagaatgcaaa

SEQ ID NO: 558629 - DNA, 75 bp, synthetic construct
  source 1..75: mol_type = other DNA
taagaaaacttccggcagaaataaaaccggtagtgatgcgcattatggcttcgtatgcgtttgaggattatgccc

SEQ ID NO: 558630 - DNA, 75 bp, synthetic construct
  source 1..75: mol_type = other DNA
aaacgtggtatgcctgttatcagagactgccagcgttgtggtggtcgtggctgtgaaagactaccatcaacggag

SEQ ID NO: 558631 - DNA, 75 bp, synthetic construct
  source 1..75: mol_type = other DNA
cactgacatcacgccaggaattacagagttaatcagtcatactgacatatccagattcagtgaaatcgcgcaatt

SEQ ID NO: 558632 - DNA, 75 bp, synthetic construct
  source 1..75: mol_type = other DNA
gaagaatgtgaatatgccactgtggatatgttgccggagctgtttgtcgctccaccgtgggtaataaataagaaa

SEQ ID NO: 558633 - DNA, 75 bp, synthetic construct
  source 1..75: mol_type = other DNA
tggctactggggtttaaggaatggagcagaaccggagaagaacaatacgaaaaaaaaataatgccacaaagcgca

SEQ ID NO: 558634 - DNA, 75 bp, synthetic construct
  source 1..75: mol_type = other DNA
ggcaacgctgtgtagataaagtactcgcggctattccctcgctatccccagcacgggaaccttttgcggcgttac

SEQ ID NO: 558635 - DNA, 75 bp, synthetic construct
  source 1..75: mol_type = other DNA
cgagaacagttacctgactctggatcacctggcagacgagcccatgcagcaggtgcacgggcacagcattaccta

SEQ ID NO: 558636 - DNA, 75 bp, synthetic construct
  source 1..75: mol_type = other DNA
tgcattgcgaagatgacttacatgaaaaaaaatatataccgcaaagggctttgttgaataaatcgaacttttgct

SEQ ID NO: 558637 - DNA, 75 bp, synthetic construct
  source 1..75: mol_type = other DNA
tctgcgttcctggggaaaatgggcatcagtatgaatgacagggcgcgggcaacagaattactggcagattatgca

SEQ ID NO: 558638 - DNA, 75 bp, synthetic construct
  source 1..75: mol_type = other DNA
caggaaggacatcaaattggctggcaagaaggtaaattagaaggtttgcaggaaggcatgcatgaacaagccatt

SEQ ID NO: 558639 - DNA, 75 bp, synthetic construct
  source 1..75: mol_type = other DNA
ttagaaggtttgcagcaaggtaaattggagggtctgcagaaaggtaaattagaaggtttgcaggaaggcatgcat

SEQ ID NO: 558640 - DNA, 75 bp, synthetic construct
  source 1..75: mol_type = other DNA
tcttatcctgaaaattggcagcaagcgtttgccgagttacaaagtcgaattctggacaatcaacaaacagggagt

SEQ ID NO: 558641 - DNA, 75 bp, synthetic construct
  source 1..75: mol_type = other DNA
tgatccctgaacgcccggatattgccaatgctatggcgctacattatgcagatcaaaacgtccctgcgatgacct

SEQ ID NO: 558642 - DNA, 75 bp, synthetic construct
  source 1..75: mol_type = other DNA
gtgagatagcggaacgagcaccacaagaaaaggagaaactgatgaccattgctgacagattacgtgaagaaggcg

SEQ ID NO: 558643 - DNA, 75 bp, synthetic construct
  source 1..75: mol_type = other DNA
aaacgtgttgccggacagagcgtgattttcgaaggcaccgaaggactgcccgcgcagatcagtcgcgaattgtaa

SEQ ID NO: 558644 - DNA, 75 bp, synthetic construct
  source 1..75: mol_type = other DNA
ggatggcacttttgctctgcgcgtacatttcagcactacgcgctacagtctggctattcgtcaggaagtgtgtgc

SEQ ID NO: 558645 - DNA, 75 bp, synthetic construct
  source 1..75: mol_type = other DNA
ccggggatgaagtgttacatgggcaaatcgttgacactaacgctgcctggttggccgattttttcttccatcagg

SEQ ID NO: 558646 - DNA, 75 bp, synthetic construct
  source 1..75: mol_type = other DNA
taaccgtatcgcgtcgttttcgccagtaccggtaactgctgcggtgtatttccagagcagaacacaggctgacaa

SEQ ID NO: 558647 - DNA, 75 bp, synthetic construct
  source 1..75: mol_type = other DNA
atgccgggttacacagagtatgtcctggctgaaggatctttctcatacgggcagacggtggctgtcacaacagct

SEQ ID NO: 558648 - DNA, 75 bp, synthetic construct
  source 1..75: mol_type = other DNA
tattgaactgaaactcaccggaccggcaagcgagcaacaggcaatggaaaaactgtggctggatgttaaacgtgt

SEQ ID NO: 558649 - DNA, 75 bp, synthetic construct
  source 1..75: mol_type = other DNA
acatggctgaatgcggtgatcccgcagtttcaggaagaatcggaagtgactattcgcctggtcgataccgccgaa

SEQ ID NO: 558650 - DNA, 75 bp, synthetic construct
  source 1..75: mol_type = other DNA
acccgggaatgcatttccgtcgggttatccgcaacgcggaaggtcagcgacgctggcgctgccggaattctgaac

SEQ ID NO: 558651 - DNA, 75 bp, synthetic construct
  source 1..75: mol_type = other DNA
atgtgggactggccccctgttttattgcccgaaggccctttctcacgcgaacaggcggttggcgtcacaacagct

SEQ ID NO: 558652 - DNA, 75 bp, synthetic construct
  source 1..75: mol_type = other DNA
gaaatggaagccctcgaaacagagattatgcttgctctggactatgaggatccgtacattgccgagaaagaataa

SEQ ID NO: 558653 - DNA, 75 bp, synthetic construct
  source 1..75: mol_type = other DNA
ctgattttccagatgttcccggcggtgctttcactggtagcgttgtatgcgttatttgatcgtttgggtgagtac

SEQ ID NO: 558654 - DNA, 75 bp, synthetic construct
  source 1..75: mol_type = other DNA
gcatttgttaggttacgatcacatcgaagatgacgaagcagaagagatggaagccctcgaaacagagattatgct

SEQ ID NO: 558655 - DNA, 75 bp, synthetic construct
  source 1..75: mol_type = other DNA
aaccgggttgtttgctaaaagcggtgtggcagcggaagccgttaacgttcccggcggctggaataatgacacttt

SEQ ID NO: 558656 - DNA, 75 bp, synthetic construct
  source 1..75: mol_type = other DNA
atgagaactaagaaaacagcagatcagaaagcgttagttatagccacaacggatgtttcgttattcacgaagggc

SEQ ID NO: 558657 - DNA, 75 bp, synthetic construct
  source 1..75: mol_type = other DNA
gtatcgacaccgctaaagagaaactggatgtcgatgtgttgcgtcctgatggtcgtcatcgcaccaaaaaaattc

SEQ ID NO: 558658 - DNA, 75 bp, synthetic construct
  source 1..75: mol_type = other DNA
gagttggtgtatcaggcaattcgcggtgggctggctggcagtaccgttcttgatgctaaagcgccgatggtcatg

SEQ ID NO: 558659 - DNA, 75 bp, synthetic construct
  source 1..75: mol_type = other DNA
atagtaaacgcaaaaggaaaaaaaggaaatgaagaggttttaggtgctattaatacaacaacaggaagcatcatg

SEQ ID NO: 558660 - DNA, 75 bp, synthetic construct
  source 1..75: mol_type = other DNA
ttctttcatctgctgttgccggtctgttgttggtgagtggtggggttgttgcggcaactcctgaggacgtaaaaa

SEQ ID NO: 558661 - DNA, 75 bp, synthetic construct
  source 1..75: mol_type = other DNA
tcaaagatcgcaccactgttggtgtgagttctgacggcaccctgacccgtgcagaaggtgcaaagaacaccattt

SEQ ID NO: 558662 - DNA, 75 bp, synthetic construct
  source 1..75: mol_type = other DNA
acaaagacggtcagattcaattcgtactgctgaaaggtgagccggggcatccggatgcagaagcacgtaccactt

SEQ ID NO: 558663 - DNA, 75 bp, synthetic construct
  source 1..75: mol_type = other DNA
aggcactggcaatcaacctggttgacccggcagctgcgggtacggtgattgagaaagcgcgtgggcaaaacgtgc

SEQ ID NO: 558664 - DNA, 75 bp, synthetic construct
  source 1..75: mol_type = other DNA
gcggatggaaggcaaaaacagcaaagctgatgtggtgctggggctggataacaacctgttggactccgccagcaa

SEQ ID NO: 558665 - DNA, 75 bp, synthetic construct
  source 1..75: mol_type = other DNA
cgctggcggggccggaattttgaacatgatgccggaaaacagctaaatccgtatctcgccagtgaagggcttctc

SEQ ID NO: 558666 - DNA, 75 bp, synthetic construct
  source 1..75: mol_type = other DNA
ccgggtatggatacgttttcctctggcactgcgaccggaaatcccgcctttcagcatattctcctggagaacgat

SEQ ID NO: 558667 - DNA, 75 bp, synthetic construct
  source 1..75: mol_type = other DNA
tgctgatgaatgattcacagaatgaccagtccaagcagaacgatcagattgacgtgctgttggcgaaaggggtga

SEQ ID NO: 558668 - DNA, 75 bp, synthetic construct
  source 1..75: mol_type = other DNA
atgtcggactgtctccctgttttattgcccgaaggccctttctcacgcgaacaggcggttggcgtcacaacagct

SEQ ID NO: 558669 - DNA, 75 bp, synthetic construct
  source 1..75: mol_type = other DNA
cgtgcgctgatcgtgaccgaccgcttcctgttcaacaacggttatgcagaccagatcacctccgttctgaaagct

SEQ ID NO: 558670 - DNA, 75 bp, synthetic construct
  source 1..75: mol_type = other DNA
catgctacagggtaaagagctgaaagccgttcaggatatcatcctgaaaaatggcgcactgaacgcagccatcgt

SEQ ID NO: 558671 - DNA, 75 bp, synthetic construct
  source 1..75: mol_type = other DNA
gatatcaaacgtgcagttgcatctgtgctgatgtccaaaaccttcgacaacggcgtaatctgtgcttctgaacag

SEQ ID NO: 558672 - DNA, 75 bp, synthetic construct
  source 1..75: mol_type = other DNA
tgtagaaggcgaaactgcagcgaagaaagaagctgctccggctaaagctgagaaaaaagcgaaaaaatccgctta

SEQ ID NO: 558673 - DNA, 75 bp, synthetic construct
  source 1..75: mol_type = other DNA
accagtgcaccggtgctaacccgcgttacccactgatttctgagttgaaagaaatattgctagcaagcttttacg

SEQ ID NO: 558674 - DNA, 75 bp, synthetic construct
  source 1..75: mol_type = other DNA
ccgtactggcatctgagttttctgacggtcaggctctgcaggcgctgaagttgctgaaagaaaacctgccagcgt

SEQ ID NO: 558675 - DNA, 75 bp, synthetic construct
  source 1..75: mol_type = other DNA
tggatacctactacggtcgtgattatgtagaaggcgaaactgcagcgaagaaagaagccgctccggctaaagctg

SEQ ID NO: 558676 - DNA, 75 bp, synthetic construct
  source 1..75: mol_type = other DNA
ctgcaggcactgaaactgctgaaagaatatctgccagcgtcctaccacgaagggtctaaaaatccggtagcgcgt

SEQ ID NO: 558677 - DNA, 75 bp, synthetic construct
  source 1..75: mol_type = other DNA
acccagatatcaacctgatcctcgcgaccggtggtcctggcatggttaaagcagcatacagctccggtaaaccag

SEQ ID NO: 558678 - DNA, 75 bp, synthetic construct
  source 1..75: mol_type = other DNA
gcactgactccggatatggcgattgtcgatgcgaacctcgttatggacatgccgaagtcactgtgtgcattcggt

SEQ ID NO: 558679 - DNA, 75 bp, synthetic construct
  source 1..75: mol_type = other DNA
gatatcgtgctgcaggcagctatcgctgctggtgcgccaaaagacctgattggctggatcgagcaaccttctgtc

SEQ ID NO: 558680 - DNA, 75 bp, synthetic construct
  source 1..75: mol_type = other DNA
aagatgcattcgatgaccagtgcaccggtgctaacccgcgttacccgctgatctccgagctgaaacagattctgc

SEQ ID NO: 558681 - DNA, 75 bp, synthetic construct
  source 1..75: mol_type = other DNA
gctgggtggtggttccccgatggacgctgcgaagatcatgtgggttatgtacgaacatccagaaactcacttcga

SEQ ID NO: 558682 - DNA, 75 bp, synthetic construct
  source 1..75: mol_type = other DNA
tatccgtaatgctgaaggtcagttgcgctggcggtgctggaattttgaatccgatgccggcaaacaacttaatgc

SEQ ID NO: 558683 - DNA, 75 bp, synthetic construct
  source 1..75: mol_type = other DNA
caatagaatacctgtcttccgagagaagtagaattctaagcatgagcagagaagaggctgtaagagctttgatta

SEQ ID NO: 558684 - DNA, 75 bp, synthetic construct
  source 1..75: mol_type = other DNA
aaattatattcaaagtatacagatgcattgatttctgaatgttttaagttttttggtttgaatagcattgtgtta

SEQ ID NO: 558685 - DNA, 75 bp, synthetic construct
  source 1..75: mol_type = other DNA
atgtaggactgacgccctgttttattgcccgaaggccctttctcacgcgaacaggcggttggcgtcacaacagct

SEQ ID NO: 558686 - DNA, 75 bp, synthetic construct
  source 1..75: mol_type = other DNA
tcgtctgggtattcctgatgaacttgatggacttactgcctatcgatctgctgccgtacatcgctgaacatgtac

SEQ ID NO: 558687 - DNA, 75 bp, synthetic construct
  source 1..75: mol_type = other DNA
aggattacataggacaccacctgaataaccttcagctggacctgcgtacattctcgctggtggatccacaaaacc

SEQ ID NO: 558688 - DNA, 75 bp, synthetic construct
  source 1..75: mol_type = other DNA
gggacaatttgtttttgtcggctcttacaacgcaggcaatgtaagcgtaacgcgtctggaagatggcctgccagt

SEQ ID NO: 558689 - DNA, 75 bp, synthetic construct
  source 1..75: mol_type = other DNA
tgccggggcaggtgcagccgatggtggtcagcccggacaaacgttatctctatgttggtgttcgccctgagtttc

SEQ ID NO: 558690 - DNA, 75 bp, synthetic construct
  source 1..75: mol_type = other DNA
ccttttggcaagaaatgggagaaggacaaaaccgccgtcgaagcggaacacaaaaaaggcgagctaggccggttt

SEQ ID NO: 558691 - DNA, 75 bp, synthetic construct
  source 1..75: mol_type = other DNA
gctgaacatcgtattgaggaaaaacaacagcaggcggagaaccgtctcaggaatggtggagaggtgagtacaact

SEQ ID NO: 558692 - DNA, 75 bp, synthetic construct
  source 1..75: mol_type = other DNA
ccatttttgataaaaaacatcaacaaaaacaatgtaatttatgttttacttttttcatatttatcttcagcatta

SEQ ID NO: 558693 - DNA, 75 bp, synthetic construct
  source 1..75: mol_type = other DNA
tgccaaccgatatgttcttcaacaccggcattggcacctacatctggattttgactaaccataaagagccaagac

SEQ ID NO: 558694 - DNA, 75 bp, synthetic construct
  source 1..75: mol_type = other DNA
acagggccagcgattcggaaggacaactgactccacagggctggggggctggcggaggtagtgccgctgttgtgg

SEQ ID NO: 558695 - DNA, 75 bp, synthetic construct
  source 1..75: mol_type = other DNA
ggtcagtgatgagggtgccaccggtggtaaggccctgcaactgaacaaaccggaaagccacatctggtttctgga

SEQ ID NO: 558696 - DNA, 75 bp, synthetic construct
  source 1..75: mol_type = other DNA
ttcactggtgccgaatcggtttgccctgggcatttactggcagttgtcgtccctgccggagggagtgacgctggc

SEQ ID NO: 558697 - DNA, 75 bp, synthetic construct
  source 1..75: mol_type = other DNA
gcgtcttgagaaaagcaacagtgcgaaaccatggtcattacttcatagtattgcagccgaaaaatcaggacaact

SEQ ID NO: 558698 - DNA, 75 bp, synthetic construct
  source 1..75: mol_type = other DNA
gtactggcgctgaactgctgaaaaatggcggtttaatcagctgccgctttaaggcatccggtgaactggtagcaa

SEQ ID NO: 558699 - DNA, 75 bp, synthetic construct
  source 1..75: mol_type = other DNA
gtgtgagtggaaatgctggcacggtgccgtggatttgtggtgataccacgtattactggaaaaacgctggcaccg

SEQ ID NO: 558700 - DNA, 75 bp, synthetic construct
  source 1..75: mol_type = other DNA
acccgaaaaatgtgctgtttgccgtggtgtggatgcagggggaatttgattttggcggtacgccggtaaatcacg

SEQ ID NO: 558701 - DNA, 75 bp, synthetic construct
  source 1..75: mol_type = other DNA
tgcgaaacgaataactcaaaaactgaaggaaggggggcagccttatggtagtgcgctgatttcgacagctggtta

SEQ ID NO: 558702 - DNA, 75 bp, synthetic construct
  source 1..75: mol_type = other DNA
actgggaaccttcggggcatttaatcataactggcacaacgtggtgttcaggtttgccggcaataacagcatcag

SEQ ID NO: 558703 - DNA, 75 bp, synthetic construct
  source 1..75: mol_type = other DNA
actcaggccgcactgaaggctaaccctaaaaatattctgcttgcagtggtctggatgcagggcgagtttgatttg

SEQ ID NO: 558704 - DNA, 75 bp, synthetic construct
  source 1..75: mol_type = other DNA
tttgagtaagttttcacacccgaaagctagcgcagctcagtatggatgcgtggggcagggattacatatcgcgaa

SEQ ID NO: 558705 - DNA, 75 bp, synthetic construct
  source 1..75: mol_type = other DNA
cgcgatgtaccacaagaagcagaatgcgaagctggatacgttcggggtctttgataacggatggcacacactggc

SEQ ID NO: 558706 - DNA, 75 bp, synthetic construct
  source 1..75: mol_type = other DNA
cctctcttgatacaggaaaaaataagtatgtgttagggctgtactggaaaatagcgggatggccaggtgatggcg

SEQ ID NO: 558707 - DNA, 75 bp, synthetic construct
  source 1..75: mol_type = other DNA
atcgacatctctcgttttgagaaaaaaggctatatcccccctggtagatacctcgctcgtgtgcaaataaataaa

SEQ ID NO: 558708 - DNA, 75 bp, synthetic construct
  source 1..75: mol_type = other DNA
taatcagaattttgctgatggtcgttccgtcagccatagcggtgaatttgcgcgaacttatctctttcgccctat

SEQ ID NO: 558709 - DNA, 75 bp, synthetic construct
  source 1..75: mol_type = other DNA
taacacctcgcaaatgatttcctggtatgactcgtcggatcgcaacaatgtctggaacatttctgcgtcagcaac

SEQ ID NO: 558710 - DNA, 75 bp, synthetic construct
  source 1..75: mol_type = other DNA
ctctctttcgatgtcaccggagctgaagcctcgctgcagcaacaaaatagtgacaatctacgcggatacagctac

SEQ ID NO: 558711 - DNA, 75 bp, synthetic construct
  source 1..75: mol_type = other DNA
gcaaaactgaatgccaccaccggataccaaatcgtcggcgttattcgtcaagaaaatgggcgcttcccaccactg

SEQ ID NO: 558712 - DNA, 75 bp, synthetic construct
  source 1..75: mol_type = other DNA
tccatcccctatttaacccgtaaagggcaagtacgctacaaaacatcgctgggaaaaccaacatcagtcggacat

SEQ ID NO: 558713 - DNA, 75 bp, synthetic construct
  source 1..75: mol_type = other DNA
gtgacagctcagccacctggacgtcacaggacagggcgagccatttcagcgcctgggcacgccgtgggattattt

SEQ ID NO: 558714 - DNA, 75 bp, synthetic construct
  source 1..75: mol_type = other DNA
ccacatctggtttctggagcatgatgccgccgggcagggggcagagttgctgaagaaaggcggacgtgtgagcgt

SEQ ID NO: 558715 - DNA, 75 bp, synthetic construct
  source 1..75: mol_type = other DNA
gctgacctgtcgaaaggtcagtacggaaccgtggggcaggggctgcatattgccaaaaagctgctgccgtttata

SEQ ID NO: 558716 - DNA, 75 bp, synthetic construct
  source 1..75: mol_type = other DNA
tatcgaactacaccacctccatgttgcgggtgaacaataacgatctgccagaaggtgtcgatgtcgaaaactcgg

SEQ ID NO: 558717 - DNA, 75 bp, synthetic construct
  source 1..75: mol_type = other DNA
gtaccgtggggcaggggctgcatatcgccaaaaaactgctgccgtttataccggcgaatgcgggcattctgctgg

SEQ ID NO: 558718 - DNA, 75 bp, synthetic construct
  source 1..75: mol_type = other DNA
ccgaccgtctggcaacggcgattctggtgcatgccgggagaaccgctgaattcattaccggaaaacagcctgata

SEQ ID NO: 558719 - DNA, 75 bp, synthetic construct
  source 1..75: mol_type = other DNA
tttgtaccgttaatgacggatgagaatggtgcgaatgtgcagaccaatgacccggcagaagacccggacctggaa

SEQ ID NO: 558720 - DNA, 75 bp, synthetic construct
  source 1..75: mol_type = other DNA
atgttattgggctcaagattggatttatgatttgtgcttcattatggggaattgcttgtcttctgcatgcaggag

SEQ ID NO: 558721 - DNA, 75 bp, synthetic construct
  source 1..75: mol_type = other DNA
atggcgatgcatacatactggattacgaggactatcactgatgaaaatggccaatcatccccgcccggggacatt

SEQ ID NO: 558722 - DNA, 75 bp, synthetic construct
  source 1..75: mol_type = other DNA
ctgttcgaagcactgttcatcctgaccgcgctggatgcgggtacccgttctggccgctttatgctgcaagacctg

SEQ ID NO: 558723 - DNA, 75 bp, synthetic construct
  source 1..75: mol_type = other DNA
ggaagtttgatttttctcaacggatttatgctggcattaccgcttattaccctgctgctgacgctgaatctggcg

SEQ ID NO: 558724 - DNA, 75 bp, synthetic construct
  source 1..75: mol_type = other DNA
cgctaattgctccattttgcgaacatttatttagtgaaatttttaatttactggcagatattattagcgaatttc

SEQ ID NO: 558725 - DNA, 75 bp, synthetic construct
  source 1..75: mol_type = other DNA
cctttttgcgaacatttattcagtgaaatttttaatttgctggcagatattatcagcgaattacctgtaatatga

SEQ ID NO: 558726 - DNA, 75 bp, synthetic construct
  source 1..75: mol_type = other DNA
gaacccgcagtaacacccaggctatccagagtcactcccgccagctgcaggaacataacgcacgcctgaacagcc

SEQ ID NO: 558727 - DNA, 75 bp, synthetic construct
  source 1..75: mol_type = other DNA
cagagtgcggcgctgtccggtctgttccagccgtacagtgtgggtaaattcaacgccacggcagccctgggtggt

SEQ ID NO: 558728 - DNA, 75 bp, synthetic construct
  source 1..75: mol_type = other DNA
tggtgtgaaggatgttgtggctgatcttgttgctgacacgactgtgtatgccgaagaagatggctcactgacgat

SEQ ID NO: 558729 - DNA, 75 bp, synthetic construct
  source 1..75: mol_type = other DNA
tgaaaatcagggaagcggtgagcgttattctgtaaaacaaacagtcgcagatattaaggctgacactactgtcta

SEQ ID NO: 558730 - DNA, 75 bp, synthetic construct
  source 1..75: mol_type = other DNA
ttctttcttctgctgttgccggactgttgctggtgagtggcggggctatggctgctaataaaactaaagtagttg

SEQ ID NO: 558731 - DNA, 75 bp, synthetic construct
  source 1..75: mol_type = other DNA
gcagtcttaaaagaattcaaccgaattgattcggatatcgaccaactgaataaagacaccacttttgcaatggac

SEQ ID NO: 558732 - DNA, 75 bp, synthetic construct
  source 1..75: mol_type = other DNA
atttcattaatggcagcattaatgccgttaattgctccattttgtgaacatttatttagtgaaatttttaattta

SEQ ID NO: 558733 - DNA, 75 bp, synthetic construct
  source 1..75: mol_type = other DNA
agaaaatcctttgacgaagatttaaaagcgctgccggaaaaaggcggttatttgtgcctgtttgacgtcgataaa

SEQ ID NO: 558734 - DNA, 75 bp, synthetic construct
  source 1..75: mol_type = other DNA
ccatcattaataaccattttgaacgcgtactggatggcgggcttttcttttcggctgccgatgtcaaaaaactct

SEQ ID NO: 558735 - DNA, 75 bp, synthetic construct
  source 1..75: mol_type = other DNA
ttcaggcagaccactgcctgcatcatgtgcaggacatgagcgggataaaccacccgaaagctgacctgagtaaag

SEQ ID NO: 558736 - DNA, 75 bp, synthetic construct
  source 1..75: mol_type = other DNA
ggcatcgggggcggtggacaaactgcaactgaccgatatatcaaaatcggcgacgtatacgctgctgattgacag

SEQ ID NO: 558737 - DNA, 75 bp, synthetic construct
  source 1..75: mol_type = other DNA
cccaccagtaaagagaaagcacgggcaaatattcaggtaataaagaacatgattaacgcattcaggggcaagaaa

SEQ ID NO: 558738 - DNA, 75 bp, synthetic construct
  source 1..75: mol_type = other DNA
cgccgggggattatttccgaccgtctggcaacggcgattctgattcatgcgggacgaaccacagtaaaagtcgat

SEQ ID NO: 558739 - DNA, 75 bp, synthetic construct
  source 1..75: mol_type = other DNA
atgtctaacactgaacaatttacgcacaaccagcccctcgggaacagtgatccggcgcataccggttttgcacct

SEQ ID NO: 558740 - DNA, 75 bp, synthetic construct
  source 1..75: mol_type = other DNA
aaaccgtgggcaaaaataaacgcttttacggtatcgctatcccggcctttatggcagaaccggcgtgggcggtga

SEQ ID NO: 558741 - DNA, 75 bp, synthetic construct
  source 1..75: mol_type = other DNA
ccatgggcttctttgacctgattggcgctttcttcctggtcacctttattgctgaacgtcgcgcaaaacgcgcct

SEQ ID NO: 558742 - DNA, 75 bp, synthetic construct
  source 1..75: mol_type = other DNA
ggcacaccgttcacgctgacgcagtcaccggtcagtgcattttcggcggataagttgcatgtgacagatattacc

SEQ ID NO: 558743 - DNA, 75 bp, synthetic construct
  source 1..75: mol_type = other DNA
gaaaatcaggatcggggatattttccgggataaatatggcgacatcgtggttattaattccgtgtatgaacggca

SEQ ID NO: 558744 - DNA, 75 bp, synthetic construct
  source 1..75: mol_type = other DNA
atggcaatggtccaaccgaaatcgcaaaaagcacgtttgtttattactcacctgctactgctactttttatcgcg

SEQ ID NO: 558745 - DNA, 75 bp, synthetic construct
  source 1..75: mol_type = other DNA
tggtcgccagtctcagcattatctcagcgcccccggtcctcgctgaaaatatcgtgggttcagtcagaacctgga

SEQ ID NO: 558746 - DNA, 75 bp, synthetic construct
  source 1..75: mol_type = other DNA
tctgattttgcaaaaccacggcatcaaaacgctgattgtttgcggagtaaccacggaagtctgtgtgaccaccac

SEQ ID NO: 558747 - DNA, 75 bp, synthetic construct
  source 1..75: mol_type = other DNA
acgggcgctatatcactgacggcctgtcctctaaggacttcacgcgtttattcgaccttatcaggaaagaacaaa

SEQ ID NO: 558748 - DNA, 75 bp, synthetic construct
  source 1..75: mol_type = other DNA
ctcaccactatttacggaaatagaacctcggttttccattgacaaattgaccggattaaatcttgcgttcggccc

SEQ ID NO: 558749 - DNA, 75 bp, synthetic construct
  source 1..75: mol_type = other DNA
ctctcgctttggcccaaggctgactaacgacctctaccctgaatatactgtagcaggaagaaaagactggtttga

SEQ ID NO: 558750 - DNA, 75 bp, synthetic construct
  source 1..75: mol_type = other DNA
ggtcatatagcagcaatgagagctaaccagtcgggaaaacgcctgcctacgtttaattttctgggatttacctgc

SEQ ID NO: 558751 - DNA, 75 bp, synthetic construct
  source 1..75: mol_type = other DNA
gcgcaggagagcaaaagatatttttaattctggaaacaatattgaaagcggacaagaacgccttaatattaatcg

SEQ ID NO: 558752 - DNA, 75 bp, synthetic construct
  source 1..75: mol_type = other DNA
atggtgaatcaccccaacataatgctaggatttgaaaatggcagaaaaaaagaaaaaaacattactggtcaagtt

SEQ ID NO: 558753 - DNA, 75 bp, synthetic construct
  source 1..75: mol_type = other DNA
caggtgtgcagggagcgccgcatccggcgcgactgaagaaaaacgacggcacaacaatggcatgtggtggtcact

SEQ ID NO: 558754 - DNA, 75 bp, synthetic construct
  source 1..75: mol_type = other DNA
aacaaatccgccgaagatattctcaagttggggaagaagaaaggcggcacgttctttacgcgagacgatctgaaa

SEQ ID NO: 558755 - DNA, 75 bp, synthetic construct
  source 1..75: mol_type = other DNA
aatggtacattttttaccgtgaaaattcaggcgaggaaattttgcttgaaatgtcatcatttaaggaatgtcttt

SEQ ID NO: 558756 - DNA, 75 bp, synthetic construct
  source 1..75: mol_type = other DNA
tcgaaaggcgcaggacaacttgttgcggttctggccgtcctgctggccggggcggtttacgttccggtttcgctg

SEQ ID NO: 558757 - DNA, 75 bp, synthetic construct
  source 1..75: mol_type = other DNA
gtgggaacaacaaaagattgggttatacaagtcgaggaaagtcgccgtgaggaatggatacgagagcggctttcc

SEQ ID NO: 558758 - DNA, 75 bp, synthetic construct
  source 1..75: mol_type = other DNA
gaattaacggcagcaatgacggctattcgtgaaacagcccagattgcaaaactaatgaacgaggcaaaaactcaa

SEQ ID NO: 558759 - DNA, 75 bp, synthetic construct
  source 1..75: mol_type = other DNA
ttcataaaagcaggtgcctctactgtgaaaatcagtttcttatgaataaaaatccggattatgtatcgcctccat

SEQ ID NO: 558760 - DNA, 75 bp, synthetic construct
  source 1..75: mol_type = other DNA
aagagtggacgctttacgacaatctggagctggaagtgaagcagggcgatgtggtgtacatcaccggccaatccg

SEQ ID NO: 558761 - DNA, 75 bp, synthetic construct
  source 1..75: mol_type = other DNA
aatgtggcctgactgaagccaaatgccgtaacctggtcaacgcttaccggattcccacagatacgcatgagtttt

SEQ ID NO: 558762 - DNA, 75 bp, synthetic construct
  source 1..75: mol_type = other DNA
cccgcacaggtcacgcagtggatcaataaaggattcatcgtggtggaccataccttgtacagtccacgccgcaag

SEQ ID NO: 558763 - DNA, 75 bp, synthetic construct
  source 1..75: mol_type = other DNA
acacagtggatcaacaaaggattcatcgtggtgaatcacacactgtatagtccacgccgaaagctgggaatttaa

SEQ ID NO: 558764 - DNA, 75 bp, synthetic construct
  source 1..75: mol_type = other DNA
gtgctcgccgcttattcgaagagaatcgatgtgaaagtactgactgtatttggtacgcgcccggaagccatcaag

SEQ ID NO: 558765 - DNA, 75 bp, synthetic construct
  source 1..75: mol_type = other DNA
tattcaccgtggccggaagaggctaaccgcacgctgaccggtcatctggcgatgtaccatttctcgccaactgaa

SEQ ID NO: 558766 - DNA, 75 bp, synthetic construct
  source 1..75: mol_type = other DNA
catcgccaccacgcaccaggacatccagattgtctatccggtgcatctcaacccgaacgtcagagagccggtcaa

SEQ ID NO: 558767 - DNA, 75 bp, synthetic construct
  source 1..75: mol_type = other DNA
gtttgcagctgtcggctcagttgtttatgcaggatttggatttagtaacgagactgttatgcactataaacccgg

SEQ ID NO: 558768 - DNA, 75 bp, synthetic construct
  source 1..75: mol_type = other DNA
ggtgattgataacgccaccgtactggcgaattactttgccatcagcgaattgactattggtctgacggcaatcgc

SEQ ID NO: 558769 - DNA, 75 bp, synthetic construct
  source 1..75: mol_type = other DNA
acaacgtaatgcgttgaactgtgcagaatgtgaccggatttttgagggtaaaatgagagtgagcatattgcgtca

SEQ ID NO: 558770 - DNA, 75 bp, synthetic construct
  source 1..75: mol_type = other DNA
attttcaatggaaggctcagagattaatattggttcaaattgcatgttatctagttctgtgtatatacgaaactc

SEQ ID NO: 558771 - DNA, 75 bp, synthetic construct
  source 1..75: mol_type = other DNA
gaaagcgaaatattagcgctggtcgaggcattacagcaggaaggtgcattagtaaactggaaaaataatcccgac

SEQ ID NO: 558772 - DNA, 75 bp, synthetic construct
  source 1..75: mol_type = other DNA
gttcacattgatgatgtacttccggaagtggtcgaccgtgttgaatgccggaatcagggactggagaaatccaga

SEQ ID NO: 558773 - DNA, 75 bp, synthetic construct
  source 1..75: mol_type = other DNA
aggaaagcgcacaggttctttccaccccaatgcaacagccccagccgcgcagatacagcaacaaacgaactgaca

SEQ ID NO: 558774 - DNA, 75 bp, synthetic construct
  source 1..75: mol_type = other DNA
gttctcgctgccgccactggtgctgcatgcggtgcaaaaacagaacgttgaggcgctttgtgcgtgggcgcaaaa

SEQ ID NO: 558775 - DNA, 75 bp, synthetic construct
  source 1..75: mol_type = other DNA
atggtcatctgatgatggcttttcggtaattgattatcatcaggtcgccagtgaagcgggggagtggcaggatat

SEQ ID NO: 558776 - DNA, 75 bp, synthetic construct
  source 1..75: mol_type = other DNA
ccgccgcgagagtagcgatgaagaacgttgcgccaggtttatccttgcccatgcgattttgttaagtttccccgg

SEQ ID NO: 558777 - DNA, 75 bp, synthetic construct
  source 1..75: mol_type = other DNA
ccggtgattactgataccgggcgtaaaagctgggtgaagtcgtcactggagcactatgttgcagcgttgcgtcgc

SEQ ID NO: 558778 - DNA, 75 bp, synthetic construct
  source 1..75: mol_type = other DNA
ggggacgatttaccgacgtttttataacggacattttctgcctgtagaccaggaaagcgcacagtttctttccac

SEQ ID NO: 558779 - DNA, 75 bp, synthetic construct
  source 1..75: mol_type = other DNA
atgacaataccagtctggcgtaacgatgacctggaaggcgctgttattggcgcgttctttctgcgtggggcagat

SEQ ID NO: 558780 - DNA, 75 bp, synthetic construct
  source 1..75: mol_type = other DNA
aactggcgctggatatcatcgacaaggtgactgagcaggggcatggtgttcttctgttcacaatggaaatggcga

SEQ ID NO: 558781 - DNA, 75 bp, synthetic construct
  source 1..75: mol_type = other DNA
ttaccggcgtttttataacggacattttctgcccgtagaccaggaaagtgcgctggttctttccacaccaatgca

SEQ ID NO: 558782 - DNA, 75 bp, synthetic construct
  source 1..75: mol_type = other DNA
agatggcgaacatccagattggtgaacgtatggtgtctgctgccggtggaatgccggtatcccgtcttaagtctg

SEQ ID NO: 558783 - DNA, 75 bp, synthetic construct
  source 1..75: mol_type = other DNA
acccgcaaaccgatcttagcgccgtcactcgcccacgcgcgttacccttattaacgccgtttaaaatgcacgata

SEQ ID NO: 558784 - DNA, 75 bp, synthetic construct
  source 1..75: mol_type = other DNA
aacaactggcagactacttccgctcacgcggtaaaaacgtgcagtcacgccatcgtacgctggaaaaacgcaaat

SEQ ID NO: 558785 - DNA, 75 bp, synthetic construct
  source 1..75: mol_type = other DNA
atgaaacacccggaaacggcgctggtggtggtcgattacctcggcctgattaaaacccgcagcacggggcgtcac

SEQ ID NO: 558786 - DNA, 75 bp, synthetic construct
  source 1..75: mol_type = other DNA
gcagctgaagatgccctgaaggatgcgcagaacatgatggcctcattgtcgacggaaaagggcgttattcagccg

SEQ ID NO: 558787 - DNA, 75 bp, synthetic construct
  source 1..75: mol_type = other DNA
caattgctaaatcgacaggaaaaccggatcaacgtcgacgtgataataaagatactcctggtaataccccgggac

SEQ ID NO: 558788 - DNA, 75 bp, synthetic construct
  source 1..75: mol_type = other DNA
ccggtgattgataagcctggcaaaggcgcgttttatcaaaccgacttacatctgattttgcaaaaccacggtatc

SEQ ID NO: 558789 - DNA, 75 bp, synthetic construct
  source 1..75: mol_type = other DNA
gatgcagattacgtctttgacgtgcgcttcttgccgaacccgcactgggatccaaaactgcgtccgatgacaggt

SEQ ID NO: 558790 - DNA, 75 bp, synthetic construct
  source 1..75: mol_type = other DNA
atgcctgtatcgcgcctgaaatctgtctctaactttggtgacgaagactgggcgcgtttcattaagggtgtggag

SEQ ID NO: 558791 - DNA, 75 bp, synthetic construct
  source 1..75: mol_type = other DNA
aaagagccgggaacaagctgcatccatctggaaaaaacacatctgattatcaaactgttacggtcgattattgat

SEQ ID NO: 558792 - DNA, 75 bp, synthetic construct
  source 1..75: mol_type = other DNA
tgtggaaagagccgggaacgagttgcatccacctggataaaacacatcaaattatcaaactgttacgcgccatta

SEQ ID NO: 558793 - DNA, 75 bp, synthetic construct
  source 1..75: mol_type = other DNA
acgctgatgaccggtattgatgaactggacgcaaaaacaggggggatggagcctggcgacctggtattcattgct

SEQ ID NO: 558794 - DNA, 75 bp, synthetic construct
  source 1..75: mol_type = other DNA
acccatgacgccgggcaatccgcgcagatacagcaataaccgcatgtcgggcagtaaagcggagcgtttattttg

SEQ ID NO: 558795 - DNA, 75 bp, synthetic construct
  source 1..75: mol_type = other DNA
aaaaacccgaaccacggggcgtcatgaccttgccgtgggtgaaatctcaaaggggcttaaaggcctggcaaaatc

SEQ ID NO: 558796 - DNA, 75 bp, synthetic construct
  source 1..75: mol_type = other DNA
tatgtctgtatgtatccggcccggagaaaaggtgggcatcattggcactatcgggtgcggtaaatcaacgttact

SEQ ID NO: 558797 - DNA, 75 bp, synthetic construct
  source 1..75: mol_type = other DNA
tgggatttccgcgattggcattgtggcgctctccaccacctgcgcctacgctttcgcccgtatgcgctttccagg

SEQ ID NO: 558798 - DNA, 75 bp, synthetic construct
  source 1..75: mol_type = other DNA
tctgcagctttcgcgtctgccgggaagcctgtcggatgtggatatgattaatgcagccggacgtttcgggtttga

SEQ ID NO: 558799 - DNA, 75 bp, synthetic construct
  source 1..75: mol_type = other DNA
ctaatcgatcctgggaaacgttatggatgctgagtatcggggtgattgtcgctattatttttgagtgtactgcga

SEQ ID NO: 558800 - DNA, 75 bp, synthetic construct
  source 1..75: mol_type = other DNA
tattaatgcctccatgcgggaatcatcgcagcgtcagggattacttgtggaggctctggacggaatagaaaccct

SEQ ID NO: 558801 - DNA, 75 bp, synthetic construct
  source 1..75: mol_type = other DNA
agtgatgtctccttttcttataagcccggattacccgacgctttgtgcggtctgtcactctgtatccggcccgga

SEQ ID NO: 558802 - DNA, 75 bp, synthetic construct
  source 1..75: mol_type = other DNA
aaactcccctcatgtgaaagaggtggcgctgggtgagaatggcattattgaaggcgcgaagccaggtacggtatt

SEQ ID NO: 558803 - DNA, 75 bp, synthetic construct
  source 1..75: mol_type = other DNA
atttatagcctgggccgaatacaccggccagagtgactatgacacctttgaggatgctttccgtggtgaggcaga

SEQ ID NO: 558804 - DNA, 75 bp, synthetic construct
  source 1..75: mol_type = other DNA
cttctggcaggcgttgcaccgtcgtgatgtccaggttcctgatcttttctctctacgaggaaacgcccatgcgta

SEQ ID NO: 558805 - DNA, 75 bp, synthetic construct
  source 1..75: mol_type = other DNA
agggcatattacggacaggttattgttgcgagttttatcattaactttcttgctctggtcagttccctgtatgta

SEQ ID NO: 558806 - DNA, 75 bp, synthetic construct
  source 1..75: mol_type = other DNA
cagcagcggtcatggagatgatgcaggcgctgcgtgctgatggttcaggaacggcggaccatagcgccctggtgt

SEQ ID NO: 558807 - DNA, 75 bp, synthetic construct
  source 1..75: mol_type = other DNA
gatctggtgtatcaggcaattcgcggtgggctggcgggcagtaccgtgctggatgccaaagcgccgatggtgatg

SEQ ID NO: 558808 - DNA, 75 bp, synthetic construct
  source 1..75: mol_type = other DNA
acacccatatttctgaaccgggtcgtagccactgggaaggttatgaaaccggtactcgcgcagcggcaaaaggtg

SEQ ID NO: 558809 - DNA, 75 bp, synthetic construct
  source 1..75: mol_type = other DNA
tcttgatggagaaccgttaagcgggcaacgttttcatatcgaaatacttccggcagcattgcgttgccggctacc

SEQ ID NO: 558810 - DNA, 75 bp, synthetic construct
  source 1..75: mol_type = other DNA
tcttgatggcgaaccgttgagcggacaaaactttcatattgaaatacttccggcggcgttgcgttgtcgattacc

SEQ ID NO: 558811 - DNA, 75 bp, synthetic construct
  source 1..75: mol_type = other DNA
gaagaagcccggaaactgggcgtcgcgacagtgattgccggtggcggcgatggcaccattaatgaagtctccaca

SEQ ID NO: 558812 - DNA, 75 bp, synthetic construct
  source 1..75: mol_type = other DNA
cctgaactcagctatcctagcctgaaatccctgcaaaaacatctggatgaaatgtatacctacatccggaataat

SEQ ID NO: 558813 - DNA, 75 bp, synthetic construct
  source 1..75: mol_type = other DNA
gttttatcaacatggcgacgggcggatttggtacgcgcattaccaccgaaacaccggagaaattaaaagccgcgc

SEQ ID NO: 558814 - DNA, 75 bp, synthetic construct
  source 1..75: mol_type = other DNA
agtacaaaacaaacgcagaagcaggatccgcaggccggcatcatccctggattcttctgcgcttacaattttttc

SEQ ID NO: 558815 - DNA, 75 bp, synthetic construct
  source 1..75: mol_type = other DNA
ggctggaatatcaccgaccacatcctgcgctatctcattcttgattattcaccggttccggcagaaacacaggaa

SEQ ID NO: 558816 - DNA, 75 bp, synthetic construct
  source 1..75: mol_type = other DNA
tgcggttgatgccggcgttctcaccgaatgcaacggattttatgacgttccgcgcccgcgtccgacgccgcctgt

SEQ ID NO: 558817 - DNA, 75 bp, synthetic construct
  source 1..75: mol_type = other DNA
gtgacaaaacatttccactgcgaataccgccaaaacgacgactggtttactcgataccagtctcaatgcagtgca

SEQ ID NO: 558818 - DNA, 75 bp, synthetic construct
  source 1..75: mol_type = other DNA
tgattcttaacggcaaaagcgctgataatgcagcattgcgcgaagctatcatgctattgcgtgaagaaggaatga

SEQ ID NO: 558819 - DNA, 75 bp, synthetic construct
  source 1..75: mol_type = other DNA
tggcttaatgcgcatggatactctgcaaccggaccgttgtgaaatccgcggtgaaaactttcactggcaaggtga

SEQ ID NO: 558820 - DNA, 75 bp, synthetic construct
  source 1..75: mol_type = other DNA
aggctcgaaaaaacctcggcattcgggaaatgaaagggaagcaacatgctgcagaaattgtgcagtactggaaag

SEQ ID NO: 558821 - DNA, 75 bp, synthetic construct
  source 1..75: mol_type = other DNA
tttatcactggaatctgcaaaacttcgccccggaagatctactttatgctcgtttcgatagtccggcactcaaga

SEQ ID NO: 558822 - DNA, 75 bp, synthetic construct
  source 1..75: mol_type = other DNA
atatggaacaggcccgtggactgctgcatcgccaggatgcatcgctggtgagcattcgttcgtggccagaattta

SEQ ID NO: 558823 - DNA, 75 bp, synthetic construct
  source 1..75: mol_type = other DNA
gaagatttccataacccagacggcactatgcgtactgcggatgacatcacagcgatgtggaaagaatggaacatc

SEQ ID NO: 558824 - DNA, 75 bp, synthetic construct
  source 1..75: mol_type = other DNA
cgttgaacgcggtacgccaccgacagtgaaacccgaacctgacttcggcgtgaagatcccggcgcaaccgcaact

SEQ ID NO: 558825 - DNA, 75 bp, synthetic construct
  source 1..75: mol_type = other DNA
gtagattcatacaacaagggtcaaaagtatcctatagatattttatcccgcattgctttatagatcaaacaacac

SEQ ID NO: 558826 - DNA, 75 bp, synthetic construct
  source 1..75: mol_type = other DNA
cattaatgaatatatagaaacaaatactgaatataagaagtttttaaaagacaaccaagactctcttttaatagc

SEQ ID NO: 558827 - DNA, 75 bp, synthetic construct
  source 1..75: mol_type = other DNA
aagaatgtttccgtgtatgacggcggctggtacgaatggagcagcgatccaaaaaatccggtagcaaccggtgaa

SEQ ID NO: 558828 - DNA, 75 bp, synthetic construct
  source 1..75: mol_type = other DNA
gtgttaaaaaaatgtcttcccctgctgttgctgtgcacagcgcctgttttcgctaaacctgttctaactgtttat

SEQ ID NO: 558829 - DNA, 75 bp, synthetic construct
  source 1..75: mol_type = other DNA
tgatcgccgcaatggctgcaaatgcagttcagcagcaaaagcggcttcatgctgttgagtcaaaggttagccagg

SEQ ID NO: 558830 - DNA, 75 bp, synthetic construct
  source 1..75: mol_type = other DNA
agtttactgcccggctggtggaccgctggcgcgaactggaagaacaagtacgccagccgttgaccgaaatagaga

SEQ ID NO: 558831 - DNA, 75 bp, synthetic construct
  source 1..75: mol_type = other DNA
actgcggcaccggctggcgtgcgtcagaaacctttatgtacgcacgggcgatgggctggaataacgtctccgtgt

SEQ ID NO: 558832 - DNA, 75 bp, synthetic construct
  source 1..75: mol_type = other DNA
gtcattctgtacgggcgtgacgtatacgctggagcgcgtgtggcgcaaattatgctctacgcaggcgtgaaagat

SEQ ID NO: 558833 - DNA, 75 bp, synthetic construct
  source 1..75: mol_type = other DNA
ttctttgctggaatatgcgcgggaaaaactgaataacctggatgtcgaggtttatcactggaatctgcaaaactt

SEQ ID NO: 558834 - DNA, 75 bp, synthetic construct
  source 1..75: mol_type = other DNA
atgacagttctgagcctgaccgatatccagcgcatcaataccctcgttaagcgcgaccttcgcaatgtggaagag

SEQ ID NO: 558835 - DNA, 75 bp, synthetic construct
  source 1..75: mol_type = other DNA
aatcgataaataccggactgataacaaactggtagataaatccaaagcatattatggatccaatgaatatgctgc

SEQ ID NO: 558836 - DNA, 75 bp, synthetic construct
  source 1..75: mol_type = other DNA
ccatggccggataccggagtgaaggtgctgttgctgccggcttccattttaatacaagtgaaaacagtgctgtta

SEQ ID NO: 558837 - DNA, 75 bp, synthetic construct
  source 1..75: mol_type = other DNA
ccactcatggtgctgtatctgtggggaatgggaagagcatcacaaggcagatcacaagtgttgccgcgggttcgg

SEQ ID NO: 558838 - DNA, 75 bp, synthetic construct
  source 1..75: mol_type = other DNA
cttctggcaggcgttgcaccgccgtgatgtccaggttcctgaccttctctctctgcgaggtaacgcccatgcgta

SEQ ID NO: 558839 - DNA, 75 bp, synthetic construct
  source 1..75: mol_type = other DNA
tgtccggcggggaaacccgccggttaaggagaaaacgtatgaaacttgcaccggaaacccgcgagatcctgcgac

SEQ ID NO: 558840 - DNA, 75 bp, synthetic construct
  source 1..75: mol_type = other DNA
tctgggcgcaggaagtgttgctgatcgtggcgctggtattgaagcatatatgccagagacaaagcgctggaatct

SEQ ID NO: 558841 - DNA, 75 bp, synthetic construct
  source 1..75: mol_type = other DNA
gtggacgatctcgccgaccagtggaaggatgatgctgatattaccctgcaagattacgacactatccgccgtcgc

SEQ ID NO: 558842 - DNA, 75 bp, synthetic construct
  source 1..75: mol_type = other DNA
aggcttgaaattcctgtcgaagcggctgctcaagtgctgcgcctgatgcgtaatcgctggggctatcccgatatt

SEQ ID NO: 558843 - DNA, 75 bp, synthetic construct
  source 1..75: mol_type = other DNA
agcgcattaacgcgctggctcataagcacctaaagaacaatgaagagattgcagcggagacaggtcataccctga

SEQ ID NO: 558844 - DNA, 75 bp, synthetic construct
  source 1..75: mol_type = other DNA
tgcttacccgcatctccacgtgactgccgaaaaattgctcgtttcagggctatgtgttaaactcgccgcccctga

SEQ ID NO: 558845 - DNA, 75 bp, synthetic construct
  source 1..75: mol_type = other DNA
agaaccatatacttggcattcctgttgcctctgttatcgtagctacccaattcaaagtggctacgaaatggtcag

SEQ ID NO: 558846 - DNA, 75 bp, synthetic construct
  source 1..75: mol_type = other DNA
tgagccagctaattacttcatcctagaaacaaaatttcgtaatgatgatgaagatatccccgttttcatcagcaa

SEQ ID NO: 558847 - DNA, 75 bp, synthetic construct
  source 1..75: mol_type = other DNA
cacagccatgctacgcgtaaacaataacgatttgccagaaggcgttgatgttgaaaattccgttattagcaccac

SEQ ID NO: 558848 - DNA, 75 bp, synthetic construct
  source 1..75: mol_type = other DNA
atcacgtaaacacattaacctacagcgcggcagcgaagctgaaaggggaatcgcatctcgcggattttccggctc

SEQ ID NO: 558849 - DNA, 75 bp, synthetic construct
  source 1..75: mol_type = other DNA
gaaagccgctatcacgtaaacacattaacctacagggcactgttgcaaatagtcggtggtgataaacttatcatc

SEQ ID NO: 558850 - DNA, 75 bp, synthetic construct
  source 1..75: mol_type = other DNA
taaacgaggccgcgatcagggaattgtcaccatcgccatcaactatgactacaacgaaaatctctggctggagca

SEQ ID NO: 558851 - DNA, 75 bp, synthetic construct
  source 1..75: mol_type = other DNA
tgacgctctatgggatgaatagcgagctcggcggctcaaccattcccgaaaaaattcagctaatcactgaaggat

SEQ ID NO: 558852 - DNA, 75 bp, synthetic construct
  source 1..75: mol_type = other DNA
gcctcctgattgggacatggatgataggcggtactattccgctgatgatttattacggccttaatctgataaatc

SEQ ID NO: 558853 - DNA, 75 bp, synthetic construct
  source 1..75: mol_type = other DNA
ttggcattgccatgagtgaagaaaaatacagcggaattgttggtgcactgcgtggaaaatatattaattgtctgg

SEQ ID NO: 558854 - DNA, 75 bp, synthetic construct
  source 1..75: mol_type = other DNA
ggcagtgctcgatgtcatcggtcaggcccgggaaagcattgaccttgctgcctattacctcacctcaaagagcac

SEQ ID NO: 558855 - DNA, 75 bp, synthetic construct
  source 1..75: mol_type = other DNA
cttatatcaggttatcagaaaatactatagtttaaaccctgcgagtaaatccttcgaaatttcagttgaccaact

SEQ ID NO: 558856 - DNA, 75 bp, synthetic construct
  source 1..75: mol_type = other DNA
tgatttttttcaaaaagttgatgagaaaatattatcaccatatcgcggttttttagaaaaaatacagagaaagac

SEQ ID NO: 558857 - DNA, 75 bp, synthetic construct
  source 1..75: mol_type = other DNA
tcgctgaagctggttgttcgccccaaccaccctctgcttcaggagaatgtgacgctaagccgggttctgcaatgg

SEQ ID NO: 558858 - DNA, 75 bp, synthetic construct
  source 1..75: mol_type = other DNA
gataaattcacaccagatttacccggttatcacctgtactatccacaccgtcgacatgctggctcggcattctca

SEQ ID NO: 558859 - DNA, 75 bp, synthetic construct
  source 1..75: mol_type = other DNA
aatccgccccggcgatattttccgggataactatggcggcacggtaacgattaaaagcgtggcgggacggtgcgt

SEQ ID NO: 558860 - DNA, 75 bp, synthetic construct
  source 1..75: mol_type = other DNA
atgatgttgaatctggaaggcgtggacatcccactgggcatgattagtcagtatcttcccaaacaatttgaacgc

SEQ ID NO: 558861 - DNA, 75 bp, synthetic construct
  source 1..75: mol_type = other DNA
tcagattagtaccctgtacggcggtcgtctggcagaagagatcatctacggaccagaacatgtttctaccggtgc

SEQ ID NO: 558862 - DNA, 75 bp, synthetic construct
  source 1..75: mol_type = other DNA
caggatccgaaactactggataacctgctgaccaagaacgtcaaggttgtcggtgaaccgcctgaagagccaagc

SEQ ID NO: 558863 - DNA, 75 bp, synthetic construct
  source 1..75: mol_type = other DNA
ctcaacgacacgttgtgtgtgaccatttccgaaggttcccagcaaaaatacgcagggaaaatgccgtatgtcgca

SEQ ID NO: 558864 - DNA, 75 bp, synthetic construct
  source 1..75: mol_type = other DNA
gtcagaaactggaaagccagatttctacgttgtacggtggtcgtctggcggaagagatcatttatggtcctgaac

SEQ ID NO: 558865 - DNA, 75 bp, synthetic construct
  source 1..75: mol_type = other DNA
tcatgcgattatcggtcgcctggtaccggaacacgatccggtgcacaaagtgacaattatcccacgtggccgtgc

SEQ ID NO: 558866 - DNA, 75 bp, synthetic construct
  source 1..75: mol_type = other DNA
cgcagaaagaatcgacggcttaccacgaggcgggtcatgcgattatcggtcgcctggtaccggaacacgatccgg

SEQ ID NO: 558867 - DNA, 75 bp, synthetic construct
  source 1..75: mol_type = other DNA
ccgcaaaccgttttattttttatcagtattttctcagtaacattaaatgccgaaacaccaacatgggcacgatta

SEQ ID NO: 558868 - DNA, 75 bp, synthetic construct
  source 1..75: mol_type = other DNA
ccgcgatccaaccggaaccatcaaagttcgtattccacagaaagtctggaacgggcagcacttcgatgcgcagga

SEQ ID NO: 558869 - DNA, 75 bp, synthetic construct
  source 1..75: mol_type = other DNA
tcgtcaccggagtgttactcacttcgttcatcgccattcctgctctggcagcgcaaggtggcttctccgcagaga

SEQ ID NO: 558870 - DNA, 75 bp, synthetic construct
  source 1..75: mol_type = other DNA
ttttattaacgtgtctgggatcatcatccgcttatgcggataacgctttgattttacaaacggattttagcctga

SEQ ID NO: 558871 - DNA, 75 bp, synthetic construct
  source 1..75: mol_type = other DNA
tgcaatcagggatggtggataactttatcgaccgtaaacatggtcgcgaagagatctcctatccggacgtgcagt

SEQ ID NO: 558872 - DNA, 75 bp, synthetic construct
  source 1..75: mol_type = other DNA
atgctgcaacgctcggaaaccacggcggtattccagcttgaatcgcgcggcatgaaggacctgatcaagcgtctg

SEQ ID NO: 558873 - DNA, 75 bp, synthetic construct
  source 1..75: mol_type = other DNA
atatttttaattattgtattttttctgttatcattactgccaatatttgttgttattggtacttcattcctgaaa

SEQ ID NO: 558874 - DNA, 75 bp, synthetic construct
  source 1..75: mol_type = other DNA
tggatcgacgaatccacggtcacgctaccgaaagcgccgccgcttaacaccctgcctcgggcgaccaaagtgccg

SEQ ID NO: 558875 - DNA, 75 bp, synthetic construct
  source 1..75: mol_type = other DNA
acctgtatgaattatcccggcgtccagatggtcaatctaaagctcaatttttaagagaggcagttaaagaccgtc

SEQ ID NO: 558876 - DNA, 75 bp, synthetic construct
  source 1..75: mol_type = other DNA
gcgtggtttgagcatgatttacatgccctgagtgagcaacagaagggtaagcgtgcagcaagaaccgtattgacg

SEQ ID NO: 558877 - DNA, 75 bp, synthetic construct
  source 1..75: mol_type = other DNA
cttacacaactgctgggcgcagaggcagaaaacatcgatctcttcgaccgtatgcaactggaacacgttatcgct

SEQ ID NO: 558878 - DNA, 75 bp, synthetic construct
  source 1..75: mol_type = other DNA
ggtacccgtcattaaaatggcgacccgcaccgagctggcgaaccgctggtttgatttaatggatattaatgcggg

SEQ ID NO: 558879 - DNA, 75 bp, synthetic construct
  source 1..75: mol_type = other DNA
gtggtgggcatgcagtgcggtggcagcgacgcgttctccggcgttaccactaaccccgctgtcggctacgactct

SEQ ID NO: 558880 - DNA, 75 bp, synthetic construct
  source 1..75: mol_type = other DNA
acaacagcgtgttggcattgcccgcgcggtggtgaacaagcccgcggtactgctggcggatgaaccgaccggtaa

SEQ ID NO: 558881 - DNA, 75 bp, synthetic construct
  source 1..75: mol_type = other DNA
attctacgtctgtttgaagagtttaaccgcgttggggtaaccgtattgatggcaacgcacgacatcaacctgatt

SEQ ID NO: 558882 - DNA, 75 bp, synthetic construct
  source 1..75: mol_type = other DNA
ggtgtcggcggcactggataaagtcgggctactggacaaagcgaagaacttccctattcagctttccggcggtga

SEQ ID NO: 558883 - DNA, 75 bp, synthetic construct
  source 1..75: mol_type = other DNA
aagggtaagcgtgcagcaagaaccgtattgacggggatgtgttattcagtcggcagtgctacgcgccaggggagc

SEQ ID NO: 558884 - DNA, 75 bp, synthetic construct
  source 1..75: mol_type = other DNA
tgaagcagaggttctggttgtttgcgttgacccactcaaaatgaagcctcgtgcgcttcccaagtctattgtcgc

SEQ ID NO: 558885 - DNA, 75 bp, synthetic construct
  source 1..75: mol_type = other DNA
ttgccagccgtgtatatggcagaccctcttaggccaggaggaaacgctgaactctacatcaacagaaaagcgtgg

SEQ ID NO: 558886 - DNA, 75 bp, synthetic construct
  source 1..75: mol_type = other DNA
acgaccgatgcagacagtgccctgcatgctgccgatatcgcgatgtatcaggagaaaaaacacaaacagaaaaca

SEQ ID NO: 558887 - DNA, 75 bp, synthetic construct
  source 1..75: mol_type = other DNA
tctcaatatgggaaaaaccgaccgcagcgccaacccttcgccgggcaacgacaacggcggtctcgcaaacgtggt

SEQ ID NO: 558888 - DNA, 75 bp, synthetic construct
  source 1..75: mol_type = other DNA
tctcaatatgggaaaaaccgaccgcagcgccaacccttcgccgggcaacgataatggcggtctcgcaaacgtggt

SEQ ID NO: 558889 - DNA, 75 bp, synthetic construct
  source 1..75: mol_type = other DNA
tctcaatatgggaaaaaccgaccgcagcgccaacccttcgccgggcaacgaaaaaggcggtctcgcaaacgtggt

SEQ ID NO: 558890 - DNA, 75 bp, synthetic construct
  source 1..75: mol_type = other DNA
gcaattgttgaagtgctgtcgcccggtcaacgcccgactaaacgcgaattaatttacgccgcgacgccagccaga

SEQ ID NO: 558891 - DNA, 75 bp, synthetic construct
  source 1..75: mol_type = other DNA
gcaattgttgaagtgctgtcgcccggtcaacccccgactaaacgcggattaatttacgccgcgacgccagccagg

SEQ ID NO: 558892 - DNA, 75 bp, synthetic construct
  source 1..75: mol_type = other DNA
tctcaatatgggaaaaaccgaccgcagcgccaacccttcgccgggcaacgagaagggcggtctcgcaaacgtggt

SEQ ID NO: 558893 - DNA, 75 bp, synthetic construct
  source 1..75: mol_type = other DNA
gggcgactgacgacgcttcccttgcatttgacagcgatagcttaggcggtggcggcactggctggatgaatcaaa

SEQ ID NO: 558894 - DNA, 75 bp, synthetic construct
  source 1..75: mol_type = other DNA
atcgtgctgaaaatgcctatgcggattacgttttggatataggtaagcgaataccactttccgcagcagatttaa

SEQ ID NO: 558895 - DNA, 75 bp, synthetic construct
  source 1..75: mol_type = other DNA
cgccgtccatgacagccgtggcagactcattgagcagcatacagtcgatatgatcaacaacactatacttgatgc

SEQ ID NO: 558896 - DNA, 75 bp, synthetic construct
  source 1..75: mol_type = other DNA
aacccaaactttggcggcgaggtgatggtgattggcctgggttgcgagaaattacagccagaacgcctgctggtc

SEQ ID NO: 558897 - DNA, 75 bp, synthetic construct
  source 1..75: mol_type = other DNA
gccaccggcgaagaaaccatagaagaggtaggctggaagctgttccactttattctcgatgtcgccagcggaaag

SEQ ID NO: 558898 - DNA, 75 bp, synthetic construct
  source 1..75: mol_type = other DNA
gaccgctccgcaagctggtcaaatcgcaccggctctcgcacacattgggccagaatcaacggaatcagacctctc

SEQ ID NO: 558899 - DNA, 75 bp, synthetic construct
  source 1..75: mol_type = other DNA
taaaccatctggtgacgtcagttttccgctttacgccaatcggcggttcggctgtgattggcggcgaagaatatt

SEQ ID NO: 558900 - DNA, 75 bp, synthetic construct
  source 1..75: mol_type = other DNA
agggattgcggttgttaaacttgatcaaaataccctacaagtcattatcggcactaaagtcatcgccctgcgtcg

SEQ ID NO: 558901 - DNA, 75 bp, synthetic construct
  source 1..75: mol_type = other DNA
atgaccaacatccagctcattgaagcgcaatgtcgcatcgaacaggttcagactgttttagggttctggcttgaa

SEQ ID NO: 558902 - DNA, 75 bp, synthetic construct
  source 1..75: mol_type = other DNA
gtggtgatgtttaccatgaaattcttctgcgcatgaaaggtgagaatgatgaactgatcggccccgatagcttct

SEQ ID NO: 558903 - DNA, 75 bp, synthetic construct
  source 1..75: mol_type = other DNA
atgatgaatcgactacagcaggcgctggaacacaaccattttttcctgatggcccagccgattaccggtatgcgt

SEQ ID NO: 558904 - DNA, 75 bp, synthetic construct
  source 1..75: mol_type = other DNA
atgaaacaaaagaaagcctggagtttttttcagagcctggggaaggcatttatgtatccccaggctctgctaagt

SEQ ID NO: 558905 - DNA, 75 bp, synthetic construct
  source 1..75: mol_type = other DNA
ggtgtcgccgggagctggacgcactgaaaaaaatagatttatctgtttataacagacgcaagcaggagtttgata

SEQ ID NO: 558906 - DNA, 75 bp, synthetic construct
  source 1..75: mol_type = other DNA
tgtgaacctgttcggcggcagtaagttcaaggataaaacggaaacctactcggcgtttggcgaactgacctgggc

SEQ ID NO: 558907 - DNA, 75 bp, synthetic construct
  source 1..75: mol_type = other DNA
atcgtcagcggcgtgacagcttcgtcaatttaatttcctacgagccagtgggagatcctcgggaaattgaagcca

SEQ ID NO: 558908 - DNA, 75 bp, synthetic construct
  source 1..75: mol_type = other DNA
ggcggcggattattattcattaaaggaaaaatgattgggaggtataattttcataatgagaagagcttaagaata

SEQ ID NO: 558909 - DNA, 75 bp, synthetic construct
  source 1..75: mol_type = other DNA
agttataatgtcgcagatccattttcaggggatggtcgacttattacattgcttattaaacaatggatgataaat

SEQ ID NO: 558910 - DNA, 75 bp, synthetic construct
  source 1..75: mol_type = other DNA
cattttatttattccggacggataaactatgtgctgatatatcgaaagatgtgttagataatttatcaggcaagc

SEQ ID NO: 558911 - DNA, 75 bp, synthetic construct
  source 1..75: mol_type = other DNA
tgacggcagttttatccgcaatattgtgtcaaatagtctggattatcagatagtggcgtcgatttgccacctggc

SEQ ID NO: 558912 - DNA, 75 bp, synthetic construct
  source 1..75: mol_type = other DNA
ttgattatctggacgcactggaaatggttgatatttccagtgctccagatattgaatggcctacgcctccggcag

SEQ ID NO: 558913 - DNA, 75 bp, synthetic construct
  source 1..75: mol_type = other DNA
atgaattacatatattccgcgactacaaactctttctatccactggaaatgaaagaggattacactcaagctgac

SEQ ID NO: 558914 - DNA, 75 bp, synthetic construct
  source 1..75: mol_type = other DNA
tggctatcggtttgctgtttactggcccgttatccgatgccattggtcgcaaaccagtgatggtcacggcgctac

SEQ ID NO: 558915 - DNA, 75 bp, synthetic construct
  source 1..75: mol_type = other DNA
catgaacagtaagcaatggcccggtaaagccgctattggtcgtctgaaaggggaggaactggcgcaatataattt

SEQ ID NO: 558916 - DNA, 75 bp, synthetic construct
  source 1..75: mol_type = other DNA
catgaacagtaagcaatggcccggtaaagccgctattggtcgtctgaaaggcgacgaactggcgcaatataattt

SEQ ID NO: 558917 - DNA, 75 bp, synthetic construct
  source 1..75: mol_type = other DNA
catgaacagtaagcaatggcccggtaaagccgctattggtcgtctgaaaggagaagaactggcgcaatataattt

SEQ ID NO: 558918 - DNA, 75 bp, synthetic construct
  source 1..75: mol_type = other DNA
atcccaacaaatgaaattctaagaaggccagtggcagcaaatactatcgaaaccaacgcatggagacgacaacaa

SEQ ID NO: 558919 - DNA, 75 bp, synthetic construct
  source 1..75: mol_type = other DNA
taggtcaaagaacagatgtagaccaacagattgttcccgttgcaaaaggtacgcaaatacaatgcccttttatgg

SEQ ID NO: 558920 - DNA, 75 bp, synthetic construct
  source 1..75: mol_type = other DNA
gtgtgtcgaagtggcctatttcttcatttattactttgtgttccgttggactattctcaaatttaacctgatgac

SEQ ID NO: 558921 - DNA, 75 bp, synthetic construct
  source 1..75: mol_type = other DNA
cccgctttctgatgccattggtcgcaaaccggtgatggtcaccgcgttactcctcgcctcaatctgtacccttct

SEQ ID NO: 558922 - DNA, 75 bp, synthetic construct
  source 1..75: mol_type = other DNA
agcatttctcagccaaatcaatttattaaacgcggtacgccgcaatttatgcgcgtcaccctggcgctgttctct

SEQ ID NO: 558923 - DNA, 75 bp, synthetic construct
  source 1..75: mol_type = other DNA
taggccaaagaacagacgtggaacaacagattgttcccgtttcaaagggcacgctggcgcaatgcccttttatgg

SEQ ID NO: 558924 - DNA, 75 bp, synthetic construct
  source 1..75: mol_type = other DNA
ttgtcggaaccgtactggattatgccgggcgcggtagccaacgctggtcgaaatggcggccgacactctgtttat

SEQ ID NO: 558925 - DNA, 75 bp, synthetic construct
  source 1..75: mol_type = other DNA
tcattgatattgatcgtgaagcgaaaacaatcactattgcagaactgcgcgacgagaaaggtgaactgctggttc

SEQ ID NO: 558926 - DNA, 75 bp, synthetic construct
  source 1..75: mol_type = other DNA
tccagacatatacgctattggcgactgcgcgtcatgcccgcgtccggaagggggctttgttccgccgcgcgctca

SEQ ID NO: 558927 - DNA, 75 bp, synthetic construct
  source 1..75: mol_type = other DNA
atggttactttaaaaccggattaatgatactggtggggagtatcaaccgcgttatccgtccgcgtttgaaactgc

SEQ ID NO: 558928 - DNA, 75 bp, synthetic construct
  source 1..75: mol_type = other DNA
aaactgcgtcgtgaactggatgcgcaaccaactggtttcctcgacagccgcattcgtcgcttccagtcatttgct

SEQ ID NO: 558929 - DNA, 75 bp, synthetic construct
  source 1..75: mol_type = other DNA
agtgctcacactggacggtttctgcaaactgcgtcgtgagctggatgcgcaaccgactggcttcctcgacagccg

SEQ ID NO: 558930 - DNA, 75 bp, synthetic construct
  source 1..75: mol_type = other DNA
cgaaacagcgacgcgtccacaggatgagatcaccgtccaaatggcagagcgtcgccgcctcaaccgaatggcaga

SEQ ID NO: 558931 - DNA, 75 bp, synthetic construct
  source 1..75: mol_type = other DNA
gggccgtgactgacgaaaccatgcgcaactggctgaagcaggctgtcagacgggccgaagctgacggggtacact

SEQ ID NO: 558932 - DNA, 75 bp, synthetic construct
  source 1..75: mol_type = other DNA
agtggggcttctctgagaaactcggtccgctgctgtacgcggaagaagaaggtgaagtgttcctcggccgtagcg

SEQ ID NO: 558933 - DNA, 75 bp, synthetic construct
  source 1..75: mol_type = other DNA
aggtatcatcgtgatcgctgcgactaaccgcccggacgttctcgacccggcgctgctgcgtcctggtcgtttcga

SEQ ID NO: 558934 - DNA, 75 bp, synthetic construct
  source 1..75: mol_type = other DNA
gaacaatattctggcgcagatgaatggcaaaccgctgaaaaattatcagtataaagatcacggttcgctggtatc

SEQ ID NO: 558935 - DNA, 75 bp, synthetic construct
  source 1..75: mol_type = other DNA
ggtttccagttccagttaggttctgtggttgatatcgatcgtgaagcgaaaacaatcaccattgctgaactgcgc

SEQ ID NO: 558936 - DNA, 75 bp, synthetic construct
  source 1..75: mol_type = other DNA
aaaccttttacccgtttggcagcgatcgccaggtgagcagtgattttcagcttatcgccggaacggtgcgcgatt

SEQ ID NO: 558937 - DNA, 75 bp, synthetic construct
  source 1..75: mol_type = other DNA
gtgaaccattatgggccgtgactgacgaaaccatgcgcaactggctgaagcaggctgtcagacgggccgaagctg

SEQ ID NO: 558938 - DNA, 75 bp, synthetic construct
  source 1..75: mol_type = other DNA
gatcggctacgcaaatacctggcgcgttttggtctgacgtgggaagccgtgcaggatcagcacagctccagttga

SEQ ID NO: 558939 - DNA, 75 bp, synthetic construct
  source 1..75: mol_type = other DNA
cgacgcatcttcgagttaaaacaggcgcggcatcagtttagcggcgcgtttgtggaagtgaactgcgccaccctg

SEQ ID NO: 558940 - DNA, 75 bp, synthetic construct
  source 1..75: mol_type = other DNA
gcgagtctggatgaggccggatattccacggccagcatcatcaacctgctggtcacggaaggaggtgctgcatga

SEQ ID NO: 558941 - DNA, 75 bp, synthetic construct
  source 1..75: mol_type = other DNA
gcgacatctccccaggcgacatggcgtggtaactttcgcgagctttcggccagcgtcacgcggatggcgacattt

SEQ ID NO: 558942 - DNA, 75 bp, synthetic construct
  source 1..75: mol_type = other DNA
tcgccaggtgagcagtgattttcagcttatcgccggaacggtgcgcgatttgcgccagttggttgccgaaggcaa

SEQ ID NO: 558943 - DNA, 75 bp, synthetic construct
  source 1..75: mol_type = other DNA
tgggcgctgaggcagaaaacatcgacctctttgatcggctgcaactggaacacgtaatagccatctgccgccagg

SEQ ID NO: 558944 - DNA, 75 bp, synthetic construct
  source 1..75: mol_type = other DNA
gcgtcaagggtatgaatgaacctgaagagagcatgattaacattgttaaaaccagcaatggctggaaagcgctct

SEQ ID NO: 558945 - DNA, 75 bp, synthetic construct
  source 1..75: mol_type = other DNA
aatagatgaagacaacaaacaaagaggaggcgtaaaaggatttttttcaacaatcagcgagaacaaaaacgaaat

SEQ ID NO: 558946 - DNA, 75 bp, synthetic construct
  source 1..75: mol_type = other DNA
aaggtaacgaaagattaaatgaaatatacgaatctcgccgggtacatggtaaagatattaaaaagaacaggaaaa

SEQ ID NO: 558947 - DNA, 75 bp, synthetic construct
  source 1..75: mol_type = other DNA
ctcttggtattttgttaacaggttgcggcgaaaagagtgatttcgaaaaagccattaatgaaaaaatcagcaaaa

SEQ ID NO: 558948 - DNA, 75 bp, synthetic construct
  source 1..75: mol_type = other DNA
aaacgacagataaaggccgtaagaccaatttttgggatattaataatggtgtatgcattggtcatagaacagttt

SEQ ID NO: 558949 - DNA, 75 bp, synthetic construct
  source 1..75: mol_type = other DNA
caaagctgtgctactcactgcaggacaatgacattgtgttcaataaaggtttccccatccgggttaatcacggct

SEQ ID NO: 558950 - DNA, 75 bp, synthetic construct
  source 1..75: mol_type = other DNA
cttcgggtaataaaggggggatcaccttcgcagactgcgtgatccgcttcagcacgaaagagccattatgggtaa

SEQ ID NO: 558951 - DNA, 75 bp, synthetic construct
  source 1..75: mol_type = other DNA
cacagtttggtgcgctggttgataaattccgtgcagacctggcggatatggcaggtcagtgcgtcggtggctctg

SEQ ID NO: 558952 - DNA, 75 bp, synthetic construct
  source 1..75: mol_type = other DNA
agacccggacattccgggtatcggatattacggttcgaaatggcgtgacagctcagccacctggacgtcacagga

SEQ ID NO: 558953 - DNA, 75 bp, synthetic construct
  source 1..75: mol_type = other DNA
ggctacaaaggcaaggaaactcagaatattttctttgtaccgttcctgacggatgagaatggacagaacacgcca

SEQ ID NO: 558954 - DNA, 75 bp, synthetic construct
  source 1..75: mol_type = other DNA
agggagaagcagaccttgcatcgggaagtcagcagcataatggtttattcacgaccatggttcagcagttcagaa

SEQ ID NO: 558955 - DNA, 75 bp, synthetic construct
  source 1..75: mol_type = other DNA
cattccggcagaccactgcctgcatgatgttcaggatatgagcgggataaaccacccgaaagctgatctggcaaa

SEQ ID NO: 558956 - DNA, 75 bp, synthetic construct
  source 1..75: mol_type = other DNA
tttgacaacgaatggcatacgctgggtttccgttttgccggtaataacagcattcaggtgacgccggtgattgat

SEQ ID NO: 558957 - DNA, 75 bp, synthetic construct
  source 1..75: mol_type = other DNA
ccttatattccgcagaatgccgggatacttctggttccctgctgtcgtggtggttcggcattcaccaccggggat

SEQ ID NO: 558958 - DNA, 75 bp, synthetic construct
  source 1..75: mol_type = other DNA
ctggacgtcacaggacagggagagccatttcagttcatgggctcgccgcgggattatttccgaccgtctggcaac

SEQ ID NO: 558959 - DNA, 75 bp, synthetic construct
  source 1..75: mol_type = other DNA
acggacgccaaaacctggacgacggctgaccgtaaaacgcattttggatcatgggcacgtcgtgggattatttcc

SEQ ID NO: 558960 - DNA, 75 bp, synthetic construct
  source 1..75: mol_type = other DNA
atttcagtgcctgggcgcgccgtgggattatttccgaccgtctggccacggctgttctgactcacgcagggcgaa

SEQ ID NO: 558961 - DNA, 75 bp, synthetic construct
  source 1..75: mol_type = other DNA
tgaaaatggcgcgaatgtacccaccaacaatccgacagaagacccggatattgaatccattggttattacggctc

SEQ ID NO: 558962 - DNA, 75 bp, synthetic construct
  source 1..75: mol_type = other DNA
tcacctgacacgccatcaacaccatcgccggatacaccgtccacaccaccggctgacaccacgacgatgagcgcg

SEQ ID NO: 558963 - DNA, 75 bp, synthetic construct
  source 1..75: mol_type = other DNA
cggaaattcgtcatcactattgcgatgcgtttatggatggcaaggcgggagaacgggcggcgatggtgattatgg

SEQ ID NO: 558964 - DNA, 75 bp, synthetic construct
  source 1..75: mol_type = other DNA
ctggatacccttcaattcttgtatcaatattatttcttggcggcatccagttaattgggattggagtgctcggtg

SEQ ID NO: 558965 - DNA, 75 bp, synthetic construct
  source 1..75: mol_type = other DNA
ggctaaacgctctgaccgctccactgacagcaggctgaagcgtaaatctgctgagtggttctataaacttcataa

SEQ ID NO: 558966 - DNA, 75 bp, synthetic construct
  source 1..75: mol_type = other DNA
gttattcctcatcttattgaaaaatggcaagcaggtgctgatatggttcttgctaaaagatctgaccgctcaact

SEQ ID NO: 558967 - DNA, 75 bp, synthetic construct
  source 1..75: mol_type = other DNA
aatcctctttttaggaggagtgcaacttataggtatcggtgttttgggtgaatatattggaagaatatacataga

SEQ ID NO: 558968 - DNA, 75 bp, synthetic construct
  source 1..75: mol_type = other DNA
ctgagtggttctataagctccacaacaaaataagtaatccaaagatcgaggagaatgttggtgatttccggttaa

SEQ ID NO: 558969 - DNA, 75 bp, synthetic construct
  source 1..75: mol_type = other DNA
atccatttcaccagcgatctcgacgaagtattaaacgatcctgacgttaagctggttgtcgtctgcactcactct

SEQ ID NO: 558970 - DNA, 75 bp, synthetic construct
  source 1..75: mol_type = other DNA
gcttcggcaaaagcaccacccgttaccatctgccgtatgtacttaaccgcaaggatagctggcatgtcgcgcata

SEQ ID NO: 558971 - DNA, 75 bp, synthetic construct
  source 1..75: mol_type = other DNA
tggccggaacgctcaccccatcggactggaatgcaccggataacgccgggtcttccggcagtgtgagtggcggca

SEQ ID NO: 558972 - DNA, 75 bp, synthetic construct
  source 1..75: mol_type = other DNA
caaaattagcaacccaaaaattgaagagaacgtgggtgattttcgcctgatgtcacgcgaagttgttgaaaacat

SEQ ID NO: 558973 - DNA, 75 bp, synthetic construct
  source 1..75: mol_type = other DNA
cgctagttgttccgctgtcatttacacgcaactttggtaaagaaccagccttatttgcagggttagaccatgcaa

SEQ ID NO: 558974 - DNA, 75 bp, synthetic construct
  source 1..75: mol_type = other DNA
gccggaagtgggagattacggacgcgtctacgatgcgctgtatcaaaccattactaccggtgcgccaaattacgt

SEQ ID NO: 558975 - DNA, 75 bp, synthetic construct
  source 1..75: mol_type = other DNA
cgccggatgagaagccgtcaccggacacaccatcaacaccgtcaacggacgggaaatcagtgacaacgctgcttt

SEQ ID NO: 558976 - DNA, 75 bp, synthetic construct
  source 1..75: mol_type = other DNA
cacccgaaagccagcgcagctcagtatggatgcgtggggcagggattacatatcgcgaagaaattgttgccgttt

SEQ ID NO: 558977 - DNA, 75 bp, synthetic construct
  source 1..75: mol_type = other DNA
gctgaattcattaccggaaaacagcctgatacggtgaagcccaccggaccttccggtgaaggtacggagagagag

SEQ ID NO: 558978 - DNA, 75 bp, synthetic construct
  source 1..75: mol_type = other DNA
ggtgacgccggtcattgatggtaaggacgggacgccgttcatgctgtcacagtcaccggtcggcacgtttacggc

SEQ ID NO: 558979 - DNA, 75 bp, synthetic construct
  source 1..75: mol_type = other DNA
cattaccaaaagtgcgacttacccggtactgatagacagcattgcggtggaagtgaataacgcggacgccgctgc

SEQ ID NO: 558980 - DNA, 75 bp, synthetic construct
  source 1..75: mol_type = other DNA
tcaggtaacaccggttattgatggtaaggatggtacaccgttcacgctgacgcagtcaccggttggtagctttga

SEQ ID NO: 558981 - DNA, 75 bp, synthetic construct
  source 1..75: mol_type = other DNA
cgaagacctggcatcacagggctggcgctattatcacaaaccggcgagcggagacaatgttaacaaaaacattgc

SEQ ID NO: 558982 - DNA, 75 bp, synthetic construct
  source 1..75: mol_type = other DNA
ctgtcgcagtctccggtcggcacgtttacggcagacaagttgcgcgtgaccgatatcactaacggtgcaacatac

SEQ ID NO: 558983 - DNA, 75 bp, synthetic construct
  source 1..75: mol_type = other DNA
gggttgcatattgccaaaaaactgcttccctatatcccacagaatgccgggatacttctggtgccctgttgtcgt

SEQ ID NO: 558984 - DNA, 75 bp, synthetic construct
  source 1..75: mol_type = other DNA
actattcaccgtggggacgtctgaacattaacggcagtgtacagccgaatcagtacaattctgttaccgcaggct

SEQ ID NO: 558985 - DNA, 75 bp, synthetic construct
  source 1..75: mol_type = other DNA
tggtgaagggcttccgttaccggattcatttgaccgcccggacccacggattaagcaactggcacgccgcagcac

SEQ ID NO: 558986 - DNA, 75 bp, synthetic construct
  source 1..75: mol_type = other DNA
ctctaaggtcgcgattaaggctgctgcaaaacgctatcagcaggtcaccttttgtgtcgcttccagccaccgtct

SEQ ID NO: 558987 - DNA, 75 bp, synthetic construct
  source 1..75: mol_type = other DNA
cggttgtggagaagggtattacacgcacgcgtttgccgatgccttgcccgaagtaacgacctttggtctggatgt

SEQ ID NO: 558988 - DNA, 75 bp, synthetic construct
  source 1..75: mol_type = other DNA
atcggatattacggttcgaaatggcgtgacagctcagccacctggacgtcacaggacagggcgagccatttcagc

SEQ ID NO: 558989 - DNA, 75 bp, synthetic construct
  source 1..75: mol_type = other DNA
aaatcagtgacaacgctgctttcttaccgtgcagcagagtcagatggtttactgactccgcagggatggggagct

SEQ ID NO: 558990 - DNA, 75 bp, synthetic construct
  source 1..75: mol_type = other DNA
ggacaggacgggacaccgttcatgctgtcgcagtctccggtcggcacgtttacggcagacaagttgcgcgtgacc

SEQ ID NO: 558991 - DNA, 75 bp, synthetic construct
  source 1..75: mol_type = other DNA
tgtggtatggatgcagggagaggcagaccttgcatcgggaagtcagcagcataatggtttattcacagccatggt

SEQ ID NO: 558992 - DNA, 75 bp, synthetic construct
  source 1..75: mol_type = other DNA
tggaggtaaggcgatgaagcttaccaaagcgacgggaaaatcctcctggtacctggaacatgatgccggtaatgg

SEQ ID NO: 558993 - DNA, 75 bp, synthetic construct
  source 1..75: mol_type = other DNA
ttcacgctgacgcagtcaccggtcagtgcatttgcggcggataaactgcatgtgacagacattaccaggaatgcg

SEQ ID NO: 558994 - DNA, 75 bp, synthetic construct
  source 1..75: mol_type = other DNA
gtatctcgaacatgatgcgggtaacggagctgacctgctgggcaaaggtggtcttgtcagttgtcgttttaaact

SEQ ID NO: 558995 - DNA, 75 bp, synthetic construct
  source 1..75: mol_type = other DNA
ctccgcgtaacggatatcaccaaaaatgcaacttacccggtgctgattgacagcattttggtggaagtgaataac

SEQ ID NO: 558996 - DNA, 75 bp, synthetic construct
  source 1..75: mol_type = other DNA
aacaaaaaatcagaaactggggacatttggcgcatttgataatgaatggcatacgctggccttccgctttgcagg

SEQ ID NO: 558997 - DNA, 75 bp, synthetic construct
  source 1..75: mol_type = other DNA
ctgcttgccgtggtgtggatgcagggcgagtttgatattgatgcgaaacctgcggagcattccgcgctgtttctg

SEQ ID NO: 558998 - DNA, 75 bp, synthetic construct
  source 1..75: mol_type = other DNA
gtgccgtggatttgtggtgacacgacgtattactggaaaaacacctacggcacgcagtacaacaccatttacggg

SEQ ID NO: 558999 - DNA, 75 bp, synthetic construct
  source 1..75: mol_type = other DNA
agccggaaacgtatgaccgtccggatccacgcatcagacagttagcccgtcgcgacacagtgacgccgggaggtg

SEQ ID NO: 559000 - DNA, 75 bp, synthetic construct
  source 1..75: mol_type = other DNA
cacggcgggtgctgacggcacgtacagtgacagcacgggtgcttcagaggactcagcccgctggggtgtggataa

SEQ ID NO: 559001 - DNA, 75 bp, synthetic construct
  source 1..75: mol_type = other DNA
ggagcagtacaacatcgtaggcgaacacctgctggccaccctcgacgaaatgttcagcccgggtcaggaagtgct

SEQ ID NO: 559002 - DNA, 75 bp, synthetic construct
  source 1..75: mol_type = other DNA
ttttaacatgagtaaccagcgtaatggcgatcaacgtgaagccctgtttaacgccattgccgcctacgccagtaa

SEQ ID NO: 559003 - DNA, 75 bp, synthetic construct
  source 1..75: mol_type = other DNA
atgcttgacgctcaaaccatcgctacagtaaaagccactatccctttactggtggaaacagggccgaaattaacc

SEQ ID NO: 559004 - DNA, 75 bp, synthetic construct
  source 1..75: mol_type = other DNA
cagcaggcgctggcgcatttcggcagcgcaaaagtggtcggcaacccgcgcttcgacgcctggcataacggcacg

SEQ ID NO: 559005 - DNA, 75 bp, synthetic construct
  source 1..75: mol_type = other DNA
gcctgtaatggatgaggaaggtaaacaggtcagtcaggtttttgaacctaatgctaaggactggcctaccaacct

SEQ ID NO: 559006 - DNA, 75 bp, synthetic construct
  source 1..75: mol_type = other DNA
cagatgctcttaatcttgatgataatcagcgagcagaagtgatagccagcggtcagttagtttataaaaatcggg

SEQ ID NO: 559007 - DNA, 75 bp, synthetic construct
  source 1..75: mol_type = other DNA
aactcgaacgcggcgatgtgcttccccatgatatggtcgaatcctccgctactgcatggcgggatgaaataagca

SEQ ID NO: 559008 - DNA, 75 bp, synthetic construct
  source 1..75: mol_type = other DNA
ttatgcaccacatcagggcgataattcgcaaaatataagttcctatgggcaggctggggttaatcttggggcctg

SEQ ID NO: 559009 - DNA, 75 bp, synthetic construct
  source 1..75: mol_type = other DNA
ggggtgacaaatcttgttttattcaacccccccccaatagcagcaacttaaccaccggaacggttattttaccgt

SEQ ID NO: 559010 - DNA, 75 bp, synthetic construct
  source 1..75: mol_type = other DNA
aaggtcagtttgatagcgaaggtctgatggatttgagcaaactggaaggtgcgttcagcgatccgacaatgcagt

SEQ ID NO: 559011 - DNA, 75 bp, synthetic construct
  source 1..75: mol_type = other DNA
tacgtgttttggataaatttacaccagatttacccggttatcacctgtactatccacaccgtcgacatgctggct

SEQ ID NO: 559012 - DNA, 75 bp, synthetic construct
  source 1..75: mol_type = other DNA
gtgcgtggaaaatgtcgccacaaccgaaatcattaaagcaactgaagaaagtaacggccatcgtgtcagtctgcc

SEQ ID NO: 559013 - DNA, 75 bp, synthetic construct
  source 1..75: mol_type = other DNA
gttaccaacgaccgggctttagtgatatcgagaaaaaagtcaccgacaacattagtcactatttcaacaagttac

SEQ ID NO: 559014 - DNA, 75 bp, synthetic construct
  source 1..75: mol_type = other DNA
atgcctggtcagcccctatcacacgcccgcgctcagtggcctggcagcggtgaacgtccgcgccatgtacggctt

SEQ ID NO: 559015 - DNA, 75 bp, synthetic construct
  source 1..75: mol_type = other DNA
acatcctcaacggcaccttttgttatcaccgtaactacctgaaaaagcaccgttacgatgacgattgcaatttag

SEQ ID NO: 559016 - DNA, 75 bp, synthetic construct
  source 1..75: mol_type = other DNA
tggctggcctgttacccgagccttagttatcagcgaccgggctttagcgatatcgagaaaaaagtgaccgacaac

SEQ ID NO: 559017 - DNA, 75 bp, synthetic construct
  source 1..75: mol_type = other DNA
atgcaagaaagcactcaaaacgcgccggagtcactttgtggcacacgatgcgatcaccagtcagagatatcggaa

SEQ ID NO: 559018 - DNA, 75 bp, synthetic construct
  source 1..75: mol_type = other DNA
tgatttgcaaactgcaccatggcacctgctcacgcccggaagaagcagcatcgctggccctggtgcgcaggcatt

SEQ ID NO: 559019 - DNA, 75 bp, synthetic construct
  source 1..75: mol_type = other DNA
aggcacacggtcagcgggtgaaatgcctggtcagcccctaccacacgcccgcgctcaatggcctggcagcggtga

SEQ ID NO: 559020 - DNA, 75 bp, synthetic construct
  source 1..75: mol_type = other DNA
gcatggcaacgttgctcgacggtgagaaaagttactccacgccggagagcgccgatcagcaaatccgcgaaatat

SEQ ID NO: 559021 - DNA, 75 bp, synthetic construct
  source 1..75: mol_type = other DNA
caactggcgcagcagatgagcaacgataagcactcacttgaagagtgttggcagtcgctgctacgcgccgacaaa

SEQ ID NO: 559022 - DNA, 75 bp, synthetic construct
  source 1..75: mol_type = other DNA
tggcactgctgcatattccgcctgataagatcacccgtcttgccgcctgtgaggatgaaaacggtcaacggggcc

SEQ ID NO: 559023 - DNA, 75 bp, synthetic construct
  source 1..75: mol_type = other DNA
ttgcgatgcgtttatggatggcaaggcgggtgaacgggcggcattggtgattgtggaggcgctgggggccaggaa

SEQ ID NO: 559024 - DNA, 75 bp, synthetic construct
  source 1..75: mol_type = other DNA
cactcgccacccagcgcgaaaaaccgttcgtcagcgtcgtcacgcccacatggaaccgtagcgcattcctgccgt

SEQ ID NO: 559025 - DNA, 75 bp, synthetic construct
  source 1..75: mol_type = other DNA
ttaaaccgtttcttgatgagatgctggaaacactgaaaaacatcgacgatccgcagcttaaaggtatgcgtctgt

SEQ ID NO: 559026 - DNA, 75 bp, synthetic construct
  source 1..75: mol_type = other DNA
tcacagaacaaccgtattatttatcaagaaaatgttcctcctggcccatttgctattactaatttattaaataca

SEQ ID NO: 559027 - DNA, 75 bp, synthetic construct
  source 1..75: mol_type = other DNA
ttatggtgcatggatgatttttgacacgcttgtattcggcaatgctgttcgtggatatccatcgttattggtctc

SEQ ID NO: 559028 - DNA, 75 bp, synthetic construct
  source 1..75: mol_type = other DNA
ttatggtgcatggatgattatagacactatcgcctttggcaatccggtgcgaggctacccctcattgctggtttc

SEQ ID NO: 559029 - DNA, 75 bp, synthetic construct
  source 1..75: mol_type = other DNA
tcttcgtagccggttgctcatttttttatggggcatacatgattgtggataccctttgttttggcaatccggtga

SEQ ID NO: 559030 - DNA, 75 bp, synthetic construct
  source 1..75: mol_type = other DNA
aagcagaagagcgaaacggcgtaccagacggtgtacggtagttacaaaaataaaacggaaaagaatatccatttc

SEQ ID NO: 559031 - DNA, 75 bp, synthetic construct
  source 1..75: mol_type = other DNA
tgttgacctgcaagatccgattgaggttattcctcatctgattgaaaagtggcaggcaggcgctgatatggtgct

SEQ ID NO: 559032 - DNA, 75 bp, synthetic construct
  source 1..75: mol_type = other DNA
atatggcacatggatgattatcgacactttggtttttggcaatccggttaggggatacccatcacttattgtgtc

SEQ ID NO: 559033 - DNA, 75 bp, synthetic construct
  source 1..75: mol_type = other DNA
caggttatccttctctacttgtatcaatactcttccttgggggggttcaacttattggaatcggagtgctagggg

SEQ ID NO: 559034 - DNA, 75 bp, synthetic construct
  source 1..75: mol_type = other DNA
attaacgttctggctgtttcagatccgctagttgttccgctgtcatttacacgaaactttggtaaagaaccagca

SEQ ID NO: 559035 - DNA, 75 bp, synthetic construct
  source 1..75: mol_type = other DNA
ctcattggtatcggagttttgggcgagtacattggccggatttataccgaagttaaacagagacctcgctacttg

SEQ ID NO: 559036 - DNA, 75 bp, synthetic construct
  source 1..75: mol_type = other DNA
gtatggcgcatggatgattttagataagattctttttggcaacagtgttccaggctacccatcactacttgtgtc

SEQ ID NO: 559037 - DNA, 75 bp, synthetic construct
  source 1..75: mol_type = other DNA
cttataggtataggcgttttgggtgagtatattggtaggatatatattgaaagtaaaggtcggcctaaatatatc

SEQ ID NO: 559038 - DNA, 75 bp, synthetic construct
  source 1..75: mol_type = other DNA
gggggtatccttctttacttgtttcgatattattccttggcggtgttcagttaatcggtataggttttttaggtg

SEQ ID NO: 559039 - DNA, 75 bp, synthetic construct
  source 1..75: mol_type = other DNA
acactgctgtcttaccgtgccagtgagtctgaagggaagctgaccgaacagggctggagtgctggcggaggtaaa

SEQ ID NO: 559040 - DNA, 75 bp, synthetic construct
  source 1..75: mol_type = other DNA
aactcgagcgcggcgatgtgcttacccatgacatggtcgaatcttctgccgctgcatggcgggatgaaatgagca

SEQ ID NO: 559041 - DNA, 75 bp, synthetic construct
  source 1..75: mol_type = other DNA
aactcgaacgcggtgatgtgcttccccatgacatggtcgaatcctccgctgctgcatggcgggatgagatgagca

SEQ ID NO: 559042 - DNA, 75 bp, synthetic construct
  source 1..75: mol_type = other DNA
gaccaggttgcggcaggacgtcagcaactcgaacgcggcgatgtgcttccccatgacatggtcgaatcctccgct

SEQ ID NO: 559043 - DNA, 75 bp, synthetic construct
  source 1..75: mol_type = other DNA
cattcgtcgcttccagtcatttgctgaaattagcactgaacccggtcctcactttggcctcggtctggaggcata

SEQ ID NO: 559044 - DNA, 75 bp, synthetic construct
  source 1..75: mol_type = other DNA
gaagaactggttgaaccgttcctgactcgtttcgtgggtaaagttcagggcaaaaatgaccgtctggccatcgtt

SEQ ID NO: 559045 - DNA, 75 bp, synthetic construct
  source 1..75: mol_type = other DNA
ccgaacaagtccgtttgctagcacaaatttgccaacgccgcggcgagtggcgtcataaccacgcactggtgttta

SEQ ID NO: 559046 - DNA, 75 bp, synthetic construct
  source 1..75: mol_type = other DNA
ggtgcacgccgggagaaccgctgaattcattaccggaaaacagcctgatatggtgaggtccaccgtaccttccgg

SEQ ID NO: 559047 - DNA, 75 bp, synthetic construct
  source 1..75: mol_type = other DNA
atgcggggacacgacgtatttctggaagcagaagaacgaatccacgtaccagacggtgtacggcagctataaaaa

SEQ ID NO: 559048 - DNA, 75 bp, synthetic construct
  source 1..75: mol_type = other DNA
accctgacaggggatgcagggaataatctgctggcatcgttttacatccagacagacgtaaaagacctgaatgtg

SEQ ID NO: 559049 - DNA, 75 bp, synthetic construct
  source 1..75: mol_type = other DNA
aactcgggcgcggcgacgtgcttccccatgacatggtcgaatcttctgctgctgcatggcgggatgaaataagca

SEQ ID NO: 559050 - DNA, 75 bp, synthetic construct
  source 1..75: mol_type = other DNA
gaccaggttgcggcaggacatcagcaactcgagcgcggcgatgtgcttccccatgacatggtcgaatcctccgct

SEQ ID NO: 559051 - DNA, 75 bp, synthetic construct
  source 1..75: mol_type = other DNA
atgtgcttccccatgacatggtcgaatcctctgcgactgcatggcgggatgaaatgagcaggaaggtcgccggta

SEQ ID NO: 559052 - DNA, 75 bp, synthetic construct
  source 1..75: mol_type = other DNA
aatatgggacatcatccacaaatacgcacctgccagcgacaacaacgaccccgaggcctattcgaacttcgtagc

SEQ ID NO: 559053 - DNA, 75 bp, synthetic construct
  source 1..75: mol_type = other DNA
ggttctcgttacgtcagctggaagaacatgccatctcaacaaacacatggaaacttatagaggctgaactgaaaa

SEQ ID NO: 559054 - DNA, 75 bp, synthetic construct
  source 1..75: mol_type = other DNA
ctggtcacgcctgatgaatgaaaccggcatgaaaaccctgatgagccataagcagattgacgaatgggaaaagca

SEQ ID NO: 559055 - DNA, 75 bp, synthetic construct
  source 1..75: mol_type = other DNA
caaaagctgaacggcgaagtggaaaaagtgttacttcgtcttggatttaccttaacggacgttcccgacagccat

SEQ ID NO: 559056 - DNA, 75 bp, synthetic construct
  source 1..75: mol_type = other DNA
gtgccacgcatcatccccctgttcgacagctctcacgtcgatcccggtaacgatatccgtctgatgcgtgaacgt

SEQ ID NO: 559057 - DNA, 75 bp, synthetic construct
  source 1..75: mol_type = other DNA
aaatggttatcgctgcccgtcaggtggaacgggaaacgggtaaaccggttcgaatgattattctggatacgctgg

SEQ ID NO: 559058 - DNA, 75 bp, synthetic construct
  source 1..75: mol_type = other DNA
gcgctattgtgtccggctgtacaaggcaggccacatcaggccatcaaatattaatgccattgcgcacaagctggc

SEQ ID NO: 559059 - DNA, 75 bp, synthetic construct
  source 1..75: mol_type = other DNA
agcgccattctggcttttccaatggcgtggtatatggcgcgctatactagcggaaaaatgaaagcgtttttttat

SEQ ID NO: 559060 - DNA, 75 bp, synthetic construct
  source 1..75: mol_type = other DNA
cagttaatgaaggacaccacagatgacaaaatgtatggctatatcgaagtagtccgaaatggcctgggcggttca

SEQ ID NO: 559061 - DNA, 75 bp, synthetic construct
  source 1..75: mol_type = other DNA
cgcaggaagcgaagcgctggtcatctcatgcaccaaaatgaaggacgcggaggaactcaaagaggctgcctatga

SEQ ID NO: 559062 - DNA, 75 bp, synthetic construct
  source 1..75: mol_type = other DNA
accgatggcgaagagattgtgtccatggtggtgattgacgttccccgcgcccctgctgaactggagcgcatagag

SEQ ID NO: 559063 - DNA, 75 bp, synthetic construct
  source 1..75: mol_type = other DNA
cactgcgcccgttacaaatgtgcagacagcgtattgaagcgacctcttcaataccacaaattatcagtgagcaaa

SEQ ID NO: 559064 - DNA, 75 bp, synthetic construct
  source 1..75: mol_type = other DNA
tatggagaactgcatcggattatcccgctgattgaaaccgttgaaaccatcaaccagcgtctggtcgaagaatat

SEQ ID NO: 559065 - DNA, 75 bp, synthetic construct
  source 1..75: mol_type = other DNA
gcctgccagtctccgtcactgacggaatttgacggcaaactgctaaagacgctgttcctgatccgctacgttgac

SEQ ID NO: 559066 - DNA, 75 bp, synthetic construct
  source 1..75: mol_type = other DNA
ttcgggcgctacaattcaaggcaaacgaacgactgaacagctgggttgaggaacagcgtaagaaagtgcctgacc

SEQ ID NO: 559067 - DNA, 75 bp, synthetic construct
  source 1..75: mol_type = other DNA
acagcaggggacacgcaaaatcaatgccggaacgggtgaagtgctgaatgcgcaaatggaggcggtgatcggtga

SEQ ID NO: 559068 - DNA, 75 bp, synthetic construct
  source 1..75: mol_type = other DNA
aggattggttaatcttgagcttacggacgatcaggtccgggaagaattcgacagaatcgtggaaaggatcagcaa

SEQ ID NO: 559069 - DNA, 75 bp, synthetic construct
  source 1..75: mol_type = other DNA
ctttgtcagcaaacgtgtagtgaataacaacaaaagcgcacggatataccgtattgccatcagtgctatcgatag

SEQ ID NO: 559070 - DNA, 75 bp, synthetic construct
  source 1..75: mol_type = other DNA
gggaacaagacggaaaaccataccgcgctatgggggtgcatccgttcacgcacacagaacggcgacaagtgcacg

SEQ ID NO: 559071 - DNA, 75 bp, synthetic construct
  source 1..75: mol_type = other DNA
aacacacaaatgatgttgaagcttcagaccattactgaagatcttggcacatattgtggtggcagagcttgggtc

SEQ ID NO: 559072 - DNA, 75 bp, synthetic construct
  source 1..75: mol_type = other DNA
aaagcggcgcatcaatgtcaggtaaaattggtgtgtggatctctggcttctttggttcgggtaagtctcacttcc

SEQ ID NO: 559073 - DNA, 75 bp, synthetic construct
  source 1..75: mol_type = other DNA
gagttaatcacgtcgctggtggtggtggataagccgcgccctcccgttgaactggagcgcatcgaagaggcaggc

SEQ ID NO: 559074 - DNA, 75 bp, synthetic construct
  source 1..75: mol_type = other DNA
cggggcgagcggttcctataaatcattccttgcgggttcgtgggcgtgtcacgtttccacgggccgccagtgggg

SEQ ID NO: 559075 - DNA, 75 bp, synthetic construct
  source 1..75: mol_type = other DNA
agtcattatttttgcgggtagtgatgcctgggcgcacgcgaaacagtggcaggagcaggacgggcgacttgctgg

SEQ ID NO: 559076 - DNA, 75 bp, synthetic construct
  source 1..75: mol_type = other DNA
cgtggtatatggcgcgctataccagcggaaaaatgaaagcgtttttttatatcgcggtaatgttgccgatgtggg

SEQ ID NO: 559077 - DNA, 75 bp, synthetic construct
  source 1..75: mol_type = other DNA
cgctctggccgttcctaagccaaaacatcatccatttctatctgccgaagaattacctcattttattcgggatct

SEQ ID NO: 559078 - DNA, 75 bp, synthetic construct
  source 1..75: mol_type = other DNA
ggtaggaataaccgtaataaaccaatctcaaaagaaagtgtatcacaagtaattgagtcactcggttacaaagga

SEQ ID NO: 559079 - DNA, 75 bp, synthetic construct
  source 1..75: mol_type = other DNA
aaggctggcgtttccgtttccggtttgcagggaaagcgcggttaatgtcatttggcagctacgatttagtaagcc

SEQ ID NO: 559080 - DNA, 75 bp, synthetic construct
  source 1..75: mol_type = other DNA
tgacgacggtcatcgagaacagtgtgacttccgcttccgttttaagaattgcccacaatgtaacgcagaaaatga

SEQ ID NO: 559081 - DNA, 75 bp, synthetic construct
  source 1..75: mol_type = other DNA
acacggctatctgacgccgccagaacgactggatatgccagtagtgcaatacgatttcagccgcttgcaggcaca

SEQ ID NO: 559082 - DNA, 75 bp, synthetic construct
  source 1..75: mol_type = other DNA
gcgtgaaaagtgttcgattacgaaggtcgttttcgtcgggcgcacgaattacgcggttaatggtagttttgattg

SEQ ID NO: 559083 - DNA, 75 bp, synthetic construct
  source 1..75: mol_type = other DNA
gttttctggagcgtattggggagcggaggcatcgtcaactcgctgacagcctagagagacagctcaacggaggga

SEQ ID NO: 559084 - DNA, 75 bp, synthetic construct
  source 1..75: mol_type = other DNA
ctttatacgataaaaacgccctgactgaaattctccgtcgcaatgctacacatccactcagtcgtgaagattttt

SEQ ID NO: 559085 - DNA, 75 bp, synthetic construct
  source 1..75: mol_type = other DNA
cggttaaaagagaaacgtaaagctggagtgctgaccaaaaacacaacgccaatcagtgatgatgaaatggtggaa

SEQ ID NO: 559086 - DNA, 75 bp, synthetic construct
  source 1..75: mol_type = other DNA
gtgcactggaacaaaccagtaagatccgccgccgctgcggtgaggttttacgttatgccgtcgccaccggacgag

SEQ ID NO: 559087 - DNA, 75 bp, synthetic construct
  source 1..75: mol_type = other DNA
cggttaacgggtcacggtttcaggcataccatgagcaccatcttgcatgagcatgggtttgaaagtgcctggatt

SEQ ID NO: 559088 - DNA, 75 bp, synthetic construct
  source 1..75: mol_type = other DNA
ctcaaagaggaatgcaattttagtacggcagaacaacacttctgcgtactctccgggctggatacgcgtctctga

SEQ ID NO: 559089 - DNA, 75 bp, synthetic construct
  source 1..75: mol_type = other DNA
tgacgacggtcatcgcgaacagtgtgacttccgtttccgttttaaaaattgcccgcaatgtaacgcagaaaacga

SEQ ID NO: 559090 - DNA, 75 bp, synthetic construct
  source 1..75: mol_type = other DNA
aagtgcacgatcccgctgttacgtgacgatatgaaaaagctggggtatgacacaaaacaccttaaacgatggtta

SEQ ID NO: 559091 - DNA, 75 bp, synthetic construct
  source 1..75: mol_type = other DNA
aaacgacgcacaggggccacggtgctggtggttcaccattccggcaaggatgagacgaaaggcgcgcgcggttcc

SEQ ID NO: 559092 - DNA, 75 bp, synthetic construct
  source 1..75: mol_type = other DNA
acagcacggcgacaagtgcactatttcgttgttgcgcgacgacatgaaacggcttgggtatgacgtgaaaaacat

SEQ ID NO: 559093 - DNA, 75 bp, synthetic construct
  source 1..75: mol_type = other DNA
tattaccgaaagataagcacacagaagcgattattttcgcgggtgttgatgctcactcatttgcagagcactaca

SEQ ID NO: 559094 - DNA, 75 bp, synthetic construct
  source 1..75: mol_type = other DNA
ttgcagcatatacggggcgagcggttcctataaatcattccttgccggatcgtgggcgtgccatgttgccactgg

SEQ ID NO: 559095 - DNA, 75 bp, synthetic construct
  source 1..75: mol_type = other DNA
cgcaggaagcgaggcgctggtaatctcatgtaccaaaatgaaggacgcggaggaacttaaagaagccgcctacga

SEQ ID NO: 559096 - DNA, 75 bp, synthetic construct
  source 1..75: mol_type = other DNA
aacagccgcacgacaaaatgaccgaagtcattatttttgcgggtagtgatgcctgggcgcacgcgaaacagtggc

SEQ ID NO: 559097 - DNA, 75 bp, synthetic construct
  source 1..75: mol_type = other DNA
aggttgagcaggaaacgggtaaacctgtacgcatgattattctggatactctggcgcgttgctttggtggcagcg

SEQ ID NO: 559098 - DNA, 75 bp, synthetic construct
  source 1..75: mol_type = other DNA
cacgaaaaaatggttacagatttgtgcatcattaacgcgccggtattccccgcatcgcctgactatgtggagcag

SEQ ID NO: 559099 - DNA, 75 bp, synthetic construct
  source 1..75: mol_type = other DNA
tcgttccttgcgggttcgtgggcgtgtcacgtttccacgggccgccagtggggaggccgcagggtggcgcatggc

SEQ ID NO: 559100 - DNA, 75 bp, synthetic construct
  source 1..75: mol_type = other DNA
tgcgcgatgacatgaaaaagctggggtatgagatgaaacacttccggcgctggctgtacaagctggaaggtgacg

SEQ ID NO: 559101 - DNA, 75 bp, synthetic construct
  source 1..75: mol_type = other DNA
cggagaatcacgccgcgctatggggctgtatccgttcacgcatacagcgaggcgataaatgcactatcccgttgt

SEQ ID NO: 559102 - DNA, 75 bp, synthetic construct
  source 1..75: mol_type = other DNA
gttccttctgtcatgatccgaatccaaccggaaaatatgagtccattcatcatagatatttctacaggagaacat

SEQ ID NO: 559103 - DNA, 75 bp, synthetic construct
  source 1..75: mol_type = other DNA
tcaccggatctgattcgtcgcctggcggatcggcacctgggtgtgggttttgatcagctactggtggtcgagccg

SEQ ID NO: 559104 - DNA, 75 bp, synthetic construct
  source 1..75: mol_type = other DNA
tggccagcagtccggcacaacccgtgaaaatgaagtctacatcggatatgactcaggtgtcacaaacccggccag

SEQ ID NO: 559105 - DNA, 75 bp, synthetic construct
  source 1..75: mol_type = other DNA
gtaagcccatggaaacttgaagaaaacatatcctcgtggattatcttctttgagataggtggtcctgaatgtgag

SEQ ID NO: 559106 - DNA, 75 bp, synthetic construct
  source 1..75: mol_type = other DNA
tctcgctgctgagcagtcggaagtgtcgccagaaaagcggcgcgccatctgcgaggcttttgagtctgccaataa

SEQ ID NO: 559107 - DNA, 75 bp, synthetic construct
  source 1..75: mol_type = other DNA
atgcacgcagtggttaacaatcacaatagaaatattgattattggacggtaaaaagaaagtttgcagaaattgtc

SEQ ID NO: 559108 - DNA, 75 bp, synthetic construct
  source 1..75: mol_type = other DNA
gtatcctgaaggaaatggtgctgcagcatcggtatcgggaaattatgcaactgcgggcagaagcccgggccactg

SEQ ID NO: 559109 - DNA, 75 bp, synthetic construct
  source 1..75: mol_type = other DNA
ggtataaacacgaagacggtgaacacctttctgtatatgggacttggtaaaaacggtcttaagtacaggagtgcg

SEQ ID NO: 559110 - DNA, 75 bp, synthetic construct
  source 1..75: mol_type = other DNA
gggataaacacgaagacggtgaacacctttctgtatctggggcttggtaaaaacggtcttaagtacaggagtgtg

SEQ ID NO: 559111 - DNA, 75 bp, synthetic construct
  source 1..75: mol_type = other DNA
aacgccacagcggctgtgggcgggtacagtgacaagcaggctgttgcggtgggcatgggatatcgctttaacgaa

SEQ ID NO: 559112 - DNA, 75 bp, synthetic construct
  source 1..75: mol_type = other DNA
tgcaactggtgcggtggcggtgggaactgcggcaaaggccgcgcatcagaactcagtggcactggggcagttttc

SEQ ID NO: 559113 - DNA, 75 bp, synthetic construct
  source 1..75: mol_type = other DNA
actcagtggcactgggacagttttccggtacaacccgtgaaaatgaagtctacatcggatatgactcaggtgtca

SEQ ID NO: 559114 - DNA, 75 bp, synthetic construct
  source 1..75: mol_type = other DNA
attatgctttgcgagaaaaactacagcataaaacgggggcgttgagagattctattgtccataaagtgcttcgca

SEQ ID NO: 559115 - DNA, 75 bp, synthetic construct
  source 1..75: mol_type = other DNA
tgaatgccagcaattacacgggcggactggagcaattcgctaaagatctggatacctttgccagctcgatgaatg

SEQ ID NO: 559116 - DNA, 75 bp, synthetic construct
  source 1..75: mol_type = other DNA
aaatattgagttttggaaggggttattcgtttctggttggcagattgcaaccaaccagcaccctgagattatatg

SEQ ID NO: 559117 - DNA, 75 bp, synthetic construct
  source 1..75: mol_type = other DNA
tcaatacccaaaccggtccagcgattgtcgccagcctgattgatctcggcgatcgttaccgtctgctggttaact

SEQ ID NO: 559118 - DNA, 75 bp, synthetic construct
  source 1..75: mol_type = other DNA
ccgtgaccgtcaccaataacagcaatggcgtttctgtcgattatgaaacagagacgccgatgactttgctggtgc

SEQ ID NO: 559119 - DNA, 75 bp, synthetic construct
  source 1..75: mol_type = other DNA
cagcactggctgggcaccgatcatttagggcgcgatattttctcgcgactgatggcggcgacccgtgtgtcgctc

SEQ ID NO: 559120 - DNA, 75 bp, synthetic construct
  source 1..75: mol_type = other DNA
atcgccctgtcgcactgggcgtggtatgcacgcatggtgcgcagcctggtgatttcactacgccaacgcgagttt

SEQ ID NO: 559121 - DNA, 75 bp, synthetic construct
  source 1..75: mol_type = other DNA
caatagcctatactggatgactccacttactcgatggaaactccttgaggagttgtcctcttggacgatctcttt

SEQ ID NO: 559122 - DNA, 75 bp, synthetic construct
  source 1..75: mol_type = other DNA
taacgctgctggttatccggtatataacggacagattgccaaattcgttaccgtgcaaggccattctatggctgt

SEQ ID NO: 559123 - DNA, 75 bp, synthetic construct
  source 1..75: mol_type = other DNA
atgacccccaggcaattgatttgccttcgcgcctgctctcgccggatgcgcagcactggttgggtaccgatcact

SEQ ID NO: 559124 - DNA, 75 bp, synthetic construct
  source 1..75: mol_type = other DNA
gctaaaccgcgtccgccgctgcgccataagcgtcgggttttaatgctggaaggctgcgcccagcctacgctttcg

SEQ ID NO: 559125 - DNA, 75 bp, synthetic construct
  source 1..75: mol_type = other DNA
gtgtacgctcgacagcgatccggacgacatgaagaatttcatggaaaacgtgttgcgctatctgtcaaatgaacg

SEQ ID NO: 559126 - DNA, 75 bp, synthetic construct
  source 1..75: mol_type = other DNA
caatgcgtcgcttgcacagggcgttgaggcgtccctgcgctggctgacggagctgacaacgtcacttgccaccac

SEQ ID NO: 559127 - DNA, 75 bp, synthetic construct
  source 1..75: mol_type = other DNA
tccatttgcgccgctgtggctgcgtctgacgcttatcggcctgatcctgctgacttatgcgctgtatggcctgta

SEQ ID NO: 559128 - DNA, 75 bp, synthetic construct
  source 1..75: mol_type = other DNA
cgatatcctgcgtaaccagctggcttttgaccctacaacaactactgcactacgtccttttaccagcgaagaaga

SEQ ID NO: 559129 - DNA, 75 bp, synthetic construct
  source 1..75: mol_type = other DNA
gtgacttcgcaggccgatatcaacgcggcaatcggtggtatgagcagtcgcgacggacaggacttctccaagatc

SEQ ID NO: 559130 - DNA, 75 bp, synthetic construct
  source 1..75: mol_type = other DNA
gatgccagcgcgtacatcgagttagatgaatatgtcatcacccgcgaactggaaaaccaccttcgccatttcttc

SEQ ID NO: 559131 - DNA, 75 bp, synthetic construct
  source 1..75: mol_type = other DNA
ggtggtcgtgcagccgtgctggaacatatcgacgctctgtttgacggtagccgcgtagtgcattcgccctacgaa

SEQ ID NO: 559132 - DNA, 75 bp, synthetic construct
  source 1..75: mol_type = other DNA
gaaggcaacatgacattgcttgggccggacctgacaccgtttcaggaggcgaaacagatccgcagcgtttttttt

SEQ ID NO: 559133 - DNA, 75 bp, synthetic construct
  source 1..75: mol_type = other DNA
attcaccgtctcataccctgccggacggcaaccgcagctattttctccacgatctactgaaacagttaatcttcc

SEQ ID NO: 559134 - DNA, 75 bp, synthetic construct
  source 1..75: mol_type = other DNA
cgccgcaggagttttcgctggtccgcgccgtgggtgcggatgcaggcacggtttttgtccgcacggatggcgcgc

SEQ ID NO: 559135 - DNA, 75 bp, synthetic construct
  source 1..75: mol_type = other DNA
ctgttgcgtaccggcgggcatctgctggtactggcgctggctttctggttgtggcagggcatgcagggcagccag

SEQ ID NO: 559136 - DNA, 75 bp, synthetic construct
  source 1..75: mol_type = other DNA
cggcaaccgcagctatttcctgcacgatctactgacgcagtttatcttccgcgaagcgcacctggtggagccgaa

SEQ ID NO: 559137 - DNA, 75 bp, synthetic construct
  source 1..75: mol_type = other DNA
tcaaccacgcaggctgcagaacacttaccggttcgcatgccccgtctctgctctgcagagcgcctctctgaaagt

SEQ ID NO: 559138 - DNA, 75 bp, synthetic construct
  source 1..75: mol_type = other DNA
tgatttctggctttgctctggcgtgtctgaccccgccctgcatttatgccatttataagggtctttctttttcta

SEQ ID NO: 559139 - DNA, 75 bp, synthetic construct
  source 1..75: mol_type = other DNA
ttttactggcaattatcgcatgcatttacggattactcgttccgttccttatatccatgaaggatacgatagcag

SEQ ID NO: 559140 - DNA, 75 bp, synthetic construct
  source 1..75: mol_type = other DNA
ttacggattaatcgttccggccctcatatcaatgaaggatacggtagcagtgatttctggctttgctctggcgtg

SEQ ID NO: 559141 - DNA, 75 bp, synthetic construct
  source 1..75: mol_type = other DNA
tgcgcaggaaaagggcttagtgcgcgcgcgaaataacattgatgcctggtggcctgcgattgaagcgggtgccga

SEQ ID NO: 559142 - DNA, 75 bp, synthetic construct
  source 1..75: mol_type = other DNA
gtggcgcggtggactatcatcttaatgcgcaggagaaagggctggcgcgggcgcgcaataatattgatgcctggt

SEQ ID NO: 559143 - DNA, 75 bp, synthetic construct
  source 1..75: mol_type = other DNA
tggaaggcaacgaagtcacgcttaaaacacaggagcatctcgatcgctgcctcacttgccgcaattgtgaaacca

SEQ ID NO: 559144 - DNA, 75 bp, synthetic construct
  source 1..75: mol_type = other DNA
cgtctgaacactctggactggcttggtggtcagggccgggagcaggcagataatgaatggtatgaagcgattaac

SEQ ID NO: 559145 - DNA, 75 bp, synthetic construct
  source 1..75: mol_type = other DNA
gctggggcgcgtttggtgatgtgatacgtcagggcgaaacaagccaggttaaccagttactggatattctcagac

SEQ ID NO: 559146 - DNA, 75 bp, synthetic construct
  source 1..75: mol_type = other DNA
ccaccgtgttgaccaggttcagcgggcacagttacatcttgagcagatattctcatggtggagtgccgggcgata

SEQ ID NO: 559147 - DNA, 75 bp, synthetic construct
  source 1..75: mol_type = other DNA
cgtctgaacactctggactggcttggtggtcagggccgggagcaggcagataacgaatggcatgaagcgattaac

SEQ ID NO: 559148 - DNA, 75 bp, synthetic construct
  source 1..75: mol_type = other DNA
accgttgtgctgccaaacgaatttcttgagcagtttgaatctggccaggcaaaagagattgataccgcgatttgt

SEQ ID NO: 559149 - DNA, 75 bp, synthetic construct
  source 1..75: mol_type = other DNA
ataaatcattaacgcagatggcacaggagagaggtggtagcgcaacagtacggctgaactcactggactggcttg

SEQ ID NO: 559150 - DNA, 75 bp, synthetic construct
  source 1..75: mol_type = other DNA
tacaatggcatcgtttctgcgccgccgagcgtaatgactgtcgtgggtcatgtagatttagccgggtcgtttaac

SEQ ID NO: 559151 - DNA, 75 bp, synthetic construct
  source 1..75: mol_type = other DNA
cgcaacattcacgcggcggtgctggtttccatcgtggtgacaacgctgctgggctggatgctgggtgatgtccac

SEQ ID NO: 559152 - DNA, 75 bp, synthetic construct
  source 1..75: mol_type = other DNA
ctggtagatagcatgggcaatggtgtggttggcgtaaattactacaccagctcaggccgtggcgtaactggcgaa

SEQ ID NO: 559153 - DNA, 75 bp, synthetic construct
  source 1..75: mol_type = other DNA
agaagggtaaattcccgcgcatgaagcaggcgctgtatgtcgacagtatctcttcggtgaccggttcgtttatcg

SEQ ID NO: 559154 - DNA, 75 bp, synthetic construct
  source 1..75: mol_type = other DNA
cgtggatttggccgggtcgtttaacctcggcctggcaggcgtaattttctctttcatgctggtcaacctgtttga

SEQ ID NO: 559155 - DNA, 75 bp, synthetic construct
  source 1..75: mol_type = other DNA
ctggcgcgctgatctacgtgggcgtactgatgacctcaagtcttgctcgcgtgaactggcaggatcttactgaat

SEQ ID NO: 559156 - DNA, 75 bp, synthetic construct
  source 1..75: mol_type = other DNA
gctggatctatcagttccattatcacggcatggtacgtggcgacgagaaagcccttttccgtgactgcatttatg

SEQ ID NO: 559157 - DNA, 75 bp, synthetic construct
  source 1..75: mol_type = other DNA
gctgaactgcaggcgctgcgtcaggcgcgccttgatttattaaccggtaaacgggtggtgtctgtccagaaagat

SEQ ID NO: 559158 - DNA, 75 bp, synthetic construct
  source 1..75: mol_type = other DNA
ggtgtaagtattccgacaccggtgatttttaaagatcccgaactcccgcgcaatacgccaaaaaggtcaattgat

SEQ ID NO: 559159 - DNA, 75 bp, synthetic construct
  source 1..75: mol_type = other DNA
catgatgaacccgagctacccgctcaactatatggaaaaaccgctgacgcgcctgatgctgggccgttcctggtg

SEQ ID NO: 559160 - DNA, 75 bp, synthetic construct
  source 1..75: mol_type = other DNA
agcaacgcattacgccacacatcatcagccaaatcatggagtttgctgcaacgcgcaaaggggtgatgattttcg

SEQ ID NO: 559161 - DNA, 75 bp, synthetic construct
  source 1..75: mol_type = other DNA
tcactcacctgaccaaagtgaatccccacttacgcctgctggggctgactgccacgccttttcgactgggcaaag

SEQ ID NO: 559162 - DNA, 75 bp, synthetic construct
  source 1..75: mol_type = other DNA
tgagtcttcttctggcgtttccgttggtggtcgtactggtctgacggcagtcgttgtcggcctgctgttcctgct

SEQ ID NO: 559163 - DNA, 75 bp, synthetic construct
  source 1..75: mol_type = other DNA
tgccacggattacaactttgctggctggacgctgcgcgatgtggaaatgggctacaaccacgactcaaacgggcg

SEQ ID NO: 559164 - DNA, 75 bp, synthetic construct
  source 1..75: mol_type = other DNA
tctgaataaagaagcgattgccagttacgactgggcggaaaatgcgcgtaaggatgaagtaaagttccagttgag

SEQ ID NO: 559165 - DNA, 75 bp, synthetic construct
  source 1..75: mol_type = other DNA
gtggcagctttctaatagcgaagagtcatcgccgtttcgtgaaaccaactatgaaccgcaattgttcctcggttt

SEQ ID NO: 559166 - DNA, 75 bp, synthetic construct
  source 1..75: mol_type = other DNA
ctggtgctcatttgtcagcacgacgccagcgccgggtcagacgatattcccgcccttgcctggcagcaggccatt

SEQ ID NO: 559167 - DNA, 75 bp, synthetic construct
  source 1..75: mol_type = other DNA
gtgacgccgacaatggcactggcgacctgtttttctgccgtgctggctcgctggggcggcctgacgcgtctgctg

SEQ ID NO: 559168 - DNA, 75 bp, synthetic construct
  source 1..75: mol_type = other DNA
tgccggtgtttatgttgccaatggcagtgtatgcgcaagaggcaacggtgaaagaggtgcatgacacgcctgcgg

SEQ ID NO: 559169 - DNA, 75 bp, synthetic construct
  source 1..75: mol_type = other DNA
aaaatggacaagatggacaagatggacaagatgaaaaaggatgatatgggtaaaaaagacagcatgaaccagtaa

SEQ ID NO: 559170 - DNA, 75 bp, synthetic construct
  source 1..75: mol_type = other DNA
tttttccaatttcgaggtagccagaaaccacgaaaggacaatggccgggcttgcagccgcaaagaagaaaggacg

SEQ ID NO: 559171 - DNA, 75 bp, synthetic construct
  source 1..75: mol_type = other DNA
gtggtggcgaactcagccatcatctctcttcacctgcaggtactggagttcctctggtggtacaaccatttgtaa

SEQ ID NO: 559172 - DNA, 75 bp, synthetic construct
  source 1..75: mol_type = other DNA
tctatggtaacgggcgctattgtcggtgcgatgaatatcggcctttcgacacccggtgccggcattttctcgctc

SEQ ID NO: 559173 - DNA, 75 bp, synthetic construct
  source 1..75: mol_type = other DNA
ggcggtgttatggcggcaattggctggtttggtgcggcattggtgggggctgcaatctcgactgcaattctcctg

SEQ ID NO: 559174 - DNA, 75 bp, synthetic construct
  source 1..75: mol_type = other DNA
ctcccgcaatagctattccacaaagagtgttattacgggcgaaggcatactggaacgtatactccacgcgatcgc

SEQ ID NO: 559175 - DNA, 75 bp, synthetic construct
  source 1..75: mol_type = other DNA
taccgctacattcagacgcatttccccgaccgcaaaacggtgacctatgaagatccggtggaatacattctgggg

SEQ ID NO: 559176 - DNA, 75 bp, synthetic construct
  source 1..75: mol_type = other DNA
acgcctggttgggctgacagggattgacgatgcggcgcgggcgctgagtaaatctctggccgacgtaaacgtaaa

SEQ ID NO: 559177 - DNA, 75 bp, synthetic construct
  source 1..75: mol_type = other DNA
gagtaaagaagtctgggccaacggcggcgaagtgctggtgctcaacttcgaagacggttgctcgaccactaacat

SEQ ID NO: 559178 - DNA, 75 bp, synthetic construct
  source 1..75: mol_type = other DNA
gctcgaacagcgtatgattgtgctgggcgcactggaagcggtcgactgggtggtgtcgtttgaagaagacacgcc

SEQ ID NO: 559179 - DNA, 75 bp, synthetic construct
  source 1..75: mol_type = other DNA
atcctgcacgccggacacgtctcttatctggcaaatgcccgcaaactgggtgaccgtttgattgtcgccgtcaac

SEQ ID NO: 559180 - DNA, 75 bp, synthetic construct
  source 1..75: mol_type = other DNA
atctggcaaatgcccgcaaactgggtgaccgcctgattgtcgctgtgaacagcgatgcctccaccaaacggctga

SEQ ID NO: 559181 - DNA, 75 bp, synthetic construct
  source 1..75: mol_type = other DNA
gaaggtgttgatccgcagccgttgcatgagcggattaatcaggctctgggttcgattggcgcgctggttctgtct

SEQ ID NO: 559182 - DNA, 75 bp, synthetic construct
  source 1..75: mol_type = other DNA
aattctggcactggtggtaaaaatatgtctaagtaccggcgcacgttggcgagaagcaatcaatcttacccgctc

SEQ ID NO: 559183 - DNA, 75 bp, synthetic construct
  source 1..75: mol_type = other DNA
taaccgtgaatcgtgagcagcaatatcttatagctgtgtttaatgagctgcggcggttaggggaatggagtttac

SEQ ID NO: 559184 - DNA, 75 bp, synthetic construct
  source 1..75: mol_type = other DNA
gggccatcaattatcaaaataccggatcacttacaccaaaactaaaggcaagaaaaaccgaaccgtaccgatatc

SEQ ID NO: 559185 - DNA, 75 bp, synthetic construct
  source 1..75: mol_type = other DNA
atggccggcggcggcgttaacgccctgcgcggtcactccaatattcaggggctgacggacctggggctactgtcg

SEQ ID NO: 559186 - DNA, 75 bp, synthetic construct
  source 1..75: mol_type = other DNA
gcgcgctttcctggtgctgagcattcttccgagttcggcgatatcacgcggacttatttgcaccatgttgagttg

SEQ ID NO: 559187 - DNA, 75 bp, synthetic construct
  source 1..75: mol_type = other DNA
gctttacgaagagatcatggcgtttgatgggttcaatttcttcacagactgctattttcaatttttatccgtgat

SEQ ID NO: 559188 - DNA, 75 bp, synthetic construct
  source 1..75: mol_type = other DNA
atgaaagtaacgcagccagagtttgaacgtgcaggagtgatggtggttggtgatgtgatgctggatcgttactgg

SEQ ID NO: 559189 - DNA, 75 bp, synthetic construct
  source 1..75: mol_type = other DNA
tcactggaacgcatgatcgctcgttatcccgataaagtgttctttaacggctttgatgaaatcttcctgtccagc

SEQ ID NO: 559190 - DNA, 75 bp, synthetic construct
  source 1..75: mol_type = other DNA
cgtggagctggcgaaaagcgccgagcaggatggggcgagcgcggtttcgctggtgccgccctattactataaata

SEQ ID NO: 559191 - DNA, 75 bp, synthetic construct
  source 1..75: mol_type = other DNA
atgaagaatggagtgattcataccacaagttttcattataaatatcatgctcaagacagttgcttacatcccggc

SEQ ID NO: 559192 - DNA, 75 bp, synthetic construct
  source 1..75: mol_type = other DNA
catgaacattgaaccagacctgcttgaagcaatggtctgcaaaagcggtctgggatttgtatgtggtgaaacagg

SEQ ID NO: 559193 - DNA, 75 bp, synthetic construct
  source 1..75: mol_type = other DNA
taccaaccacactcatgtcctccctgattgatgaactgttcggtcgggaagtcattccccgtgttctggcaggca

SEQ ID NO: 559194 - DNA, 75 bp, synthetic construct
  source 1..75: mol_type = other DNA
gctgggcaccctgtcattcattgttgtgcaggtgctggtcagaacccgggatggacgccggcgtgctgtccgtga

SEQ ID NO: 559195 - DNA, 75 bp, synthetic construct
  source 1..75: mol_type = other DNA
tgagaaagcacctaatcttgtacataacattgttttttcttctcctaagattgcaggcgttagcgagaaagatgc

SEQ ID NO: 559196 - DNA, 75 bp, synthetic construct
  source 1..75: mol_type = other DNA
ggaaccccagtaccaccagcttgagttcgacacccggctgtggctaacgcagttgtcgcttgggcaggacaaaat

SEQ ID NO: 559197 - DNA, 75 bp, synthetic construct
  source 1..75: mol_type = other DNA
ggtgatgaccaatggcgtctttgacatcctgcacgccgggcacgtctcctatctggcaaatgcccgcaaactggg

SEQ ID NO: 559198 - DNA, 75 bp, synthetic construct
  source 1..75: mol_type = other DNA
ataaaacccgcttttttgttcgtgctggcgttgcataccagtatcacgaatgcggatacattgaggcgcttgctt

SEQ ID NO: 559199 - DNA, 75 bp, synthetic construct
  source 1..75: mol_type = other DNA
acttcaaaaattttaggaatcaacattatattccgatcgctatgaataacaattcatcttggcttattggtgaaa

SEQ ID NO: 559200 - DNA, 75 bp, synthetic construct
  source 1..75: mol_type = other DNA
aaaaacgtagatgaagatgttttctttatggaaattttaggccatgacgatgaaaacactcaattacactataag

SEQ ID NO: 559201 - DNA, 75 bp, synthetic construct
  source 1..75: mol_type = other DNA
ttcgccattaccggtgcctccggtgctgaatacctctgccggacatagcggtgtgaataaggttcatcgcggagg

SEQ ID NO: 559202 - DNA, 75 bp, synthetic construct
  source 1..75: mol_type = other DNA
tacgccattaccggtgccaccggtgcttaacacttccactggtcataccgatgtgaataaggttcatcgcggagg

SEQ ID NO: 559203 - DNA, 75 bp, synthetic construct
  source 1..75: mol_type = other DNA
gtggtaaaagcgccgttctataaagacggtaaatggaaaaacgatctgaaatcccctgcgccgttgggcgagctg

SEQ ID NO: 559204 - DNA, 75 bp, synthetic construct
  source 1..75: mol_type = other DNA
atgtgtctcgcgcagcgatgaaagcttgtgtctggtatatgaacatcgcacaggtatttatcagtatcgggtaag

SEQ ID NO: 559205 - DNA, 75 bp, synthetic construct
  source 1..75: mol_type = other DNA
ttgcatgtggtggaagcgtaccggcggggaaaggcgaatgccggagctgccggaggggataaccagacgctgaaa

SEQ ID NO: 559206 - DNA, 75 bp, synthetic construct
  source 1..75: mol_type = other DNA
aaaagacgaaggcgtgtcagttaatggaaagactgtcgaaagagaagccggagctatttgcccactggaaagcag

SEQ ID NO: 559207 - DNA, 75 bp, synthetic construct
  source 1..75: mol_type = other DNA
cagggcggtgcagaagtattcctcaaaaatatgacaaggttgtggcgcaaagaaaactttcgaatgtggccactg

SEQ ID NO: 559208 - DNA, 75 bp, synthetic construct
  source 1..75: mol_type = other DNA
ccgatcaacctcgacggtctgggcgtgctgaaccttgagcgtctgatgtacatcaagtccttcatcgacaagctg

SEQ ID NO: 559209 - DNA, 75 bp, synthetic construct
  source 1..75: mol_type = other DNA
gcaactaccaggcagttgttccatcaacctggaactctggcccgcgtaacttcaatgatgacgtcggtccttacg

SEQ ID NO: 559210 - DNA, 75 bp, synthetic construct
  source 1..75: mol_type = other DNA
ccttgttcagagacgcggcggaacagggcgagcttgccgggaatggtgcctgctggctacctccagactactcgc

SEQ ID NO: 559211 - DNA, 75 bp, synthetic construct
  source 1..75: mol_type = other DNA
aggcagggatttctcttgatacaaacgaaggagatgatcccaaaattctagaagaaattgctaccgcgattgatc

SEQ ID NO: 559212 - DNA, 75 bp, synthetic construct
  source 1..75: mol_type = other DNA
tgagcgaggcgatggagaaaaaccggcggagcgtgctgctgacggcagggaggacatggctcaccatcctgatgg

SEQ ID NO: 559213 - DNA, 75 bp, synthetic construct
  source 1..75: mol_type = other DNA
gtaatcgttttgtctggcagggacgtgaatatcaactacaaccgaatgttgagtgggatgcgcactatctacacg

SEQ ID NO: 559214 - DNA, 75 bp, synthetic construct
  source 1..75: mol_type = other DNA
gctggcacacttatgcttgataaagtcatcttcctgcctggcaagcccttaccgcaacaaccgatttgtgttctg

SEQ ID NO: 559215 - DNA, 75 bp, synthetic construct
  source 1..75: mol_type = other DNA
agacagacagcgctcccgttcttgatagaatcattgaagcttacggctttactcaaaagctacagcttgccgaac

SEQ ID NO: 559216 - DNA, 75 bp, synthetic construct
  source 1..75: mol_type = other DNA
tgaccggagggcccacctccacccacctcagagcatggataacttatgctgcaattttcatattgccgctatcag

SEQ ID NO: 559217 - DNA, 75 bp, synthetic construct
  source 1..75: mol_type = other DNA
tgttggtgttcatgccttaatcgcggtactgagctacctggtgctggtgggcgatatcaagcgtatcgagctgaa

SEQ ID NO: 559218 - DNA, 75 bp, synthetic construct
  source 1..75: mol_type = other DNA
gaaaggggaacggcggtgtcgatttttaactccgctcaatacttcgcaacggttatcttcgcgccgattatgggc

SEQ ID NO: 559219 - DNA, 75 bp, synthetic construct
  source 1..75: mol_type = other DNA
atgtgcctcgtgcagcgatgatagcttgtgtctggtgtatgaacatctcagcggtgtttatcactatcgggtaag

SEQ ID NO: 559220 - DNA, 75 bp, synthetic construct
  source 1..75: mol_type = other DNA
cggatgaccatcatcgcccggaaggtggtgacctcattgcacttgcgccgggggagtcaacaacctcagagatgt

SEQ ID NO: 559221 - DNA, 75 bp, synthetic construct
  source 1..75: mol_type = other DNA
catcgcccggaagggggtgacctcattgcgcttgcgccgggggaatcaacaacctcagagatgtcgttgcgggta

SEQ ID NO: 559222 - DNA, 75 bp, synthetic construct
  source 1..75: mol_type = other DNA
gaaagttcaggagcgtcggataaatctgaacgatggggcgttgataagccgttgtataaagacctgctgacacgc

SEQ ID NO: 559223 - DNA, 75 bp, synthetic construct
  source 1..75: mol_type = other DNA
tgccgttgtgtggatgcagggggagtttgatttcagcggcacgccagcgaatcacacggctcagtttggcgcact

SEQ ID NO: 559224 - DNA, 75 bp, synthetic construct
  source 1..75: mol_type = other DNA
gccgtacggttcaaaattccggatggaagcgaactggtgaacggacagtttgtctttggtctctactggccggtg

SEQ ID NO: 559225 - DNA, 75 bp, synthetic construct
  source 1..75: mol_type = other DNA
aattgcaggatatcctgcaaaatcaatacagtgcactgatcaccaatatcggcaaaggcgaccacaccacgttcg

SEQ ID NO: 559226 - DNA, 75 bp, synthetic construct
  source 1..75: mol_type = other DNA
tgacaagctcggacgtaacactaatcaactttccggcggtgaatggcaacgagtgcgtcttgctgcggtggtact

SEQ ID NO: 559227 - DNA, 75 bp, synthetic construct
  source 1..75: mol_type = other DNA
atgttgcggaatctacccgcctggggccactttctggcgaggttcgggctggggagatcctgcatctggtggggc

SEQ ID NO: 559228 - DNA, 75 bp, synthetic construct
  source 1..75: mol_type = other DNA
tttgcgccatgtcggctgttcgccaagcgattatcgcaggcaatttaaaaactgttttgcggaacaagaaatctt

SEQ ID NO: 559229 - DNA, 75 bp, synthetic construct
  source 1..75: mol_type = other DNA
aagtataaggccatgctcatgcaaatgtgtcatgaagatggtctgacccaggctgaagttctgaccgcactgata

SEQ ID NO: 559230 - DNA, 75 bp, synthetic construct
  source 1..75: mol_type = other DNA
tggcgattgtgatgagcagtcacgatctcaaccacacattgcgtcatgcgcatcgggcgtggttgctaaaaggtg

SEQ ID NO: 559231 - DNA, 75 bp, synthetic construct
  source 1..75: mol_type = other DNA
ggatgaagttttgacgccgccgaacctggcccaggcttacgggatgaatttccgccgtctggacattgaaggaca

SEQ ID NO: 559232 - DNA, 75 bp, synthetic construct
  source 1..75: mol_type = other DNA
tctgggcgatttcacctcgctgatgctgctgagctggcatcccggcgaaagctggctgcacagcgcgcagtcact

SEQ ID NO: 559233 - DNA, 75 bp, synthetic construct
  source 1..75: mol_type = other DNA
gatttaccccagggcgacattgaaaaacaggttgccgccctctggcagcaactcttatcaactggcaatgtcacc

SEQ ID NO: 559234 - DNA, 75 bp, synthetic construct
  source 1..75: mol_type = other DNA
agaggcgttgcaggtgcgcgaaaaactggcccatcaggtactcaaccccgaagtctggccggtattcgatctcca

SEQ ID NO: 559235 - DNA, 75 bp, synthetic construct
  source 1..75: mol_type = other DNA
ggtacatcgtttagcggatgacgcgctgaatggtgtaaccgggctggttgagtaccacgatcacttcaatcgctt

SEQ ID NO: 559236 - DNA, 75 bp, synthetic construct
  source 1..75: mol_type = other DNA
ttgatgcgccgggtattgatgccctgctgcgtcgttcattcgaaagtgatgcggaagcgaagctggttcacgatc

SEQ ID NO: 559237 - DNA, 75 bp, synthetic construct
  source 1..75: mol_type = other DNA
ctgggtgatacccgcacacaccctccatacgcctgaagaggcgttgcgggtgcgcgaaaaactggcgcatcaggt

SEQ ID NO: 559238 - DNA, 75 bp, synthetic construct
  source 1..75: mol_type = other DNA
actaacgggcttattgataccggtttttcgcggcttactgccgatggtgagtgggttaacaacccagggaatgag

SEQ ID NO: 559239 - DNA, 75 bp, synthetic construct
  source 1..75: mol_type = other DNA
tgggcaaaggcgaaattaccgaaatcaataccggacatgccgggcaattgctgcgcttattgagcgttgatgccc

SEQ ID NO: 559240 - DNA, 75 bp, synthetic construct
  source 1..75: mol_type = other DNA
tgggcaaaggtgaaattaccgaaattagcaccggacatgccggacagttgctgcgcttattgagtgttgatgccc

SEQ ID NO: 559241 - DNA, 75 bp, synthetic construct
  source 1..75: mol_type = other DNA
tcagcaatggaataacctgagcattgtttcgcaaccgatggcaaatggtacgcaggtcgaggcgcaagggcgtga

SEQ ID NO: 559242 - DNA, 75 bp, synthetic construct
  source 1..75: mol_type = other DNA
tcagtgcagatttatggcgtagcagccagtgctattctgggggagtatttacattacaaactcctgcgtctgggg

SEQ ID NO: 559243 - DNA, 75 bp, synthetic construct
  source 1..75: mol_type = other DNA
aacacttagtaaaaacacgttcgtggtggcgatttccagttctggatccacgcgcgatctgctgcatgtcgtaaa

SEQ ID NO: 559244 - DNA, 75 bp, synthetic construct
  source 1..75: mol_type = other DNA
aagtataaggccatactcatgcaaatgtgtcatgaagatggcctgactcaggctgaagttctgaccgcactgata

SEQ ID NO: 559245 - DNA, 75 bp, synthetic construct
  source 1..75: mol_type = other DNA
ccgtggctcggtaaatggatgcaggacaatattgcgctggaaacggcacagttctcccttgaaggctggatgacg

SEQ ID NO: 559246 - DNA, 75 bp, synthetic construct
  source 1..75: mol_type = other DNA
agtctggaagccagtcacatcagcgatctgtttcttcgtcaatttgaccatttcgatctccgcgacagtgaagtc

SEQ ID NO: 559247 - DNA, 75 bp, synthetic construct
  source 1..75: mol_type = other DNA
gaaaaactgctgattgacgctgacattaaaggtccgggtaaagccgttggcccttactttgatgagacaccgctg

SEQ ID NO: 559248 - DNA, 75 bp, synthetic construct
  source 1..75: mol_type = other DNA
catttctggcgatacattaacgctgaccaatggactgattgataccggtttctcgcggcttactgccgatggtga

SEQ ID NO: 559249 - DNA, 75 bp, synthetic construct
  source 1..75: mol_type = other DNA
atattacgcgtgaaaatccgggctggcagttctctattcccgatacacggatcacgatggacggcaaaccctggc

SEQ ID NO: 559250 - DNA, 75 bp, synthetic construct
  source 1..75: mol_type = other DNA
gctttccggcagcgtagaaaatggtttgcttaccgcgtcgatgaaacaggcaaagatgccttacgaaacggtatt

SEQ ID NO: 559251 - DNA, 75 bp, synthetic construct
  source 1..75: mol_type = other DNA
cgttcagcaccttggtattggcggtaaagacgacccggctcgcctgatcttcaatactcaaactggtccggccat

SEQ ID NO: 559252 - DNA, 75 bp, synthetic construct
  source 1..75: mol_type = other DNA
tccgcgtttagcggcaatgctggtgagcgcaaagagcgacgacgaagctgctaccgcggcaaaaattgccgccat

SEQ ID NO: 559253 - DNA, 75 bp, synthetic construct
  source 1..75: mol_type = other DNA
gcagcaatcggacaccgtggagtgggatgatgcgcaaggtacgctgaaagcctggcgtcggttgcaaatcggcca

SEQ ID NO: 559254 - DNA, 75 bp, synthetic construct
  source 1..75: mol_type = other DNA
tgccggagcgtttgccgatcgcatcgctcgccgccgtgggcaagaggggcgctatcaactggcaaacggcatggg

SEQ ID NO: 559255 - DNA, 75 bp, synthetic construct
  source 1..75: mol_type = other DNA
ccgtaatgatgggtacgcccgccaataaagcgttattagatactacaggtttctggcatgacgattttaataatg

SEQ ID NO: 559256 - DNA, 75 bp, synthetic construct
  source 1..75: mol_type = other DNA
aaactactgattatgtcggctacgctggacaatgaccgcttgcagcagatgctgccagaagcgcccgtcgtcatc

SEQ ID NO: 559257 - DNA, 75 bp, synthetic construct
  source 1..75: mol_type = other DNA
acgtagtcagcaactgttaaaacgcttaaacgtacgcggcggtgaggcagacagttcgcttatcgcgccgctact

SEQ ID NO: 559258 - DNA, 75 bp, synthetic construct
  source 1..75: mol_type = other DNA
gacttacctcatccattgacacgagaggaaataacggaatcaatgattgtaaaacctgaagaatgtacttatgac

SEQ ID NO: 559259 - DNA, 75 bp, synthetic construct
  source 1..75: mol_type = other DNA
aatcgcaagagagtcttcaggataaaatatctcaatgtaagttttctgttaatccagatgaccttcagtgcccgc

SEQ ID NO: 559260 - DNA, 75 bp, synthetic construct
  source 1..75: mol_type = other DNA
cgttgcccgaacggttacagctggaacgggggcgttaataaagatgggcagtgtacgctcaacagcgacccggat

SEQ ID NO: 559261 - DNA, 75 bp, synthetic construct
  source 1..75: mol_type = other DNA
gccagcgatggcactgggggattatttactgaattattgcttttagggttcaataatgggcctcaggctcttggc

SEQ ID NO: 559262 - DNA, 75 bp, synthetic construct
  source 1..75: mol_type = other DNA
caataatgggcctcaggctcttggcgagagaatgttaagtatgattacacaatcgcaagagagtcttcaggataa

SEQ ID NO: 559263 - DNA, 75 bp, synthetic construct
  source 1..75: mol_type = other DNA
catcttcgttcagtcctggcgtggaggctcttcgtgcgcaaattgtagccaatgggcgcggagatattacatttg

SEQ ID NO: 559264 - DNA, 75 bp, synthetic construct
  source 1..75: mol_type = other DNA
gaaaaggtggtggcagtggtccggttgattacctgctgggaagggagcgtaaccgggaaggggcaacggtgcttc

SEQ ID NO: 559265 - DNA, 75 bp, synthetic construct
  source 1..75: mol_type = other DNA
tgactattgcatgagtaataattcggtaattggtaaggaaaccaaaagccacattttcaaggctgttgaaagcgc

SEQ ID NO: 559266 - DNA, 75 bp, synthetic construct
  source 1..75: mol_type = other DNA
catgcagtcgaactttatgattaatcatggcaaactgactaaccagctacttcaggccgtggccaaacaaacccg

SEQ ID NO: 559267 - DNA, 75 bp, synthetic construct
  source 1..75: mol_type = other DNA
ggcgattgcagaaaatgtgcaggatactcgactggtagggggggactcactgctttgttttttcttgatacaaaa

SEQ ID NO: 559268 - DNA, 75 bp, synthetic construct
  source 1..75: mol_type = other DNA
gtagggcgttagctcaggcggttacacaaactcttagaccagcagtaaccaaggctgcgacgcaagcgggcatgg

SEQ ID NO: 559269 - DNA, 75 bp, synthetic construct
  source 1..75: mol_type = other DNA
cagaattttggcggcttaaaagtcagcgatatcaagactattactcagagtgcgattgctgataacgtgcaggat

SEQ ID NO: 559270 - DNA, 75 bp, synthetic construct
  source 1..75: mol_type = other DNA
cagaaatttggtggtttgaaagttagtgatatcaaagctctgactcagagcacgattgcacagcatgtacaggat

SEQ ID NO: 559271 - DNA, 75 bp, synthetic construct
  source 1..75: mol_type = other DNA
cggcggcaaatgcaggcccgacgggtgttacagcagatgagtgatgaacggttgagggatactgggttaggctgg

SEQ ID NO: 559272 - DNA, 75 bp, synthetic construct
  source 1..75: mol_type = other DNA
agtgatatacagcctgatcggtagctgcaaacttaacggaatcgagccggaaacgtggctacgccacgtgatcgg

SEQ ID NO: 559273 - DNA, 75 bp, synthetic construct
  source 1..75: mol_type = other DNA
ggccagcgactttccgttttatccagacgtaaatccgccgcttgttactgtcagcatgttaatgctaatgtatgc

SEQ ID NO: 559274 - DNA, 75 bp, synthetic construct
  source 1..75: mol_type = other DNA
cggcggcaaatgcaggcccgacgggtgttacagcagatgagtgatgaacggttgagggagattgggttaagctgg

SEQ ID NO: 559275 - DNA, 75 bp, synthetic construct
  source 1..75: mol_type = other DNA
cggcggcaaatgcaggcccgacgggtgttacagcagatgagtgatgaacggttgagggagaatgggttatgctgg

SEQ ID NO: 559276 - DNA, 75 bp, synthetic construct
  source 1..75: mol_type = other DNA
cggcggcaaatgcaggcccgacgggtgttacagcagatgagtgatgaacggttgagggatagtgggttacgctgg

SEQ ID NO: 559277 - DNA, 75 bp, synthetic construct
  source 1..75: mol_type = other DNA
ggatttctcctgggaggggagagagttagagtttcttatatgccagatacaggccgttttttagcagaaagtgaa

SEQ ID NO: 559278 - DNA, 75 bp, synthetic construct
  source 1..75: mol_type = other DNA
gacttcagaggactctatctcaaggctctggcgcgttctgtagccgacgcgatatacggtttatccatgacgcgt

SEQ ID NO: 559279 - DNA, 75 bp, synthetic construct
  source 1..75: mol_type = other DNA
gtcgcaggcctggcagttcttatcgtgatctatggatacaagggtggacgttttgtatatgacaacttcaaagca

SEQ ID NO: 559280 - DNA, 75 bp, synthetic construct
  source 1..75: mol_type = other DNA
cgccgccgttattcaccgaggcctccttgcttgctgcgcttgttcgtgtcgcggattttgtcactgatccagtga

SEQ ID NO: 559281 - DNA, 75 bp, synthetic construct
  source 1..75: mol_type = other DNA
cattcagtgtggtgatgagtcgttttatgcccgtgccagaaaaacaactgacagcggatttgaggcatttcttgg

SEQ ID NO: 559282 - DNA, 75 bp, synthetic construct
  source 1..75: mol_type = other DNA
tgattaagggatttaaaaagaaaagcggtggaacgtatgatgcagttcttgtccttgaggataagaaaacaggga

SEQ ID NO: 559283 - DNA, 75 bp, synthetic construct
  source 1..75: mol_type = other DNA
cacagcagctacgcgaaaaatacaaagcaattacttacaaccgttcagattgttcatatctttcagacgaacaat

SEQ ID NO: 559284 - DNA, 75 bp, synthetic construct
  source 1..75: mol_type = other DNA
agttcgcggggcaaatatcgatcagctcattcatcgttattcgacgactggtcaaaataatactcgtgttgttcc

SEQ ID NO: 559285 - DNA, 75 bp, synthetic construct
  source 1..75: mol_type = other DNA
tgctcatatctttctgatgaacaattcagcgaagcgccgcaggttatcgatgccctgaaatcagtatttcctcag

SEQ ID NO: 559286 - DNA, 75 bp, synthetic construct
  source 1..75: mol_type = other DNA
ggcctgattgtgaatcgtacccgtgctaaccagaaccataaatccagtttttactacaccatgaccggagttttt

SEQ ID NO: 559287 - DNA, 75 bp, synthetic construct
  source 1..75: mol_type = other DNA
aaagtaaggcatttaacagcgcaaagataactgcacatacagctataattccaaccgtcagtgtacctgatatta

SEQ ID NO: 559288 - DNA, 75 bp, synthetic construct
  source 1..75: mol_type = other DNA
caccgttgaagcggcagcaactgatgataaaaaaactgccgcaccgttgccatttaacctggtcaggctccagca

SEQ ID NO: 559289 - DNA, 75 bp, synthetic construct
  source 1..75: mol_type = other DNA
tcagcgaagcgccgcaggttatcgatgccctgaaatcagtctttcctcagtcgctggatattgattcttcacgta

SEQ ID NO: 559290 - DNA, 75 bp, synthetic construct
  source 1..75: mol_type = other DNA
ggataaagacaaaaaagatgaacatggcggtattggtacgccagctacccgcgcagccattctggaaacactgaa

SEQ ID NO: 559291 - DNA, 75 bp, synthetic construct
  source 1..75: mol_type = other DNA
cgattaagaaattgctgaaagataaggataaagacaaaaaagatgaacatggcggtattggtacgccagctaccc

SEQ ID NO: 559292 - DNA, 75 bp, synthetic construct
  source 1..75: mol_type = other DNA
ttaaggcgctggcgcgttcagttgctgatgccgtctatggcttctccatgacgcgtgcttacaccattcctgcaa

SEQ ID NO: 559293 - DNA, 75 bp, synthetic construct
  source 1..75: mol_type = other DNA
agggatttaaaaagaaaagcggtggaacgtatgatacagttcttgtacttgaagataagaaaacagggaagctgg

SEQ ID NO: 559294 - DNA, 75 bp, synthetic construct
  source 1..75: mol_type = other DNA
ttactgaattattgcttttagggttcaataatgggcctcaggctcttggcgagagaatgttaagtatgattacac

SEQ ID NO: 559295 - DNA, 75 bp, synthetic construct
  source 1..75: mol_type = other DNA
gagagaatgctaagtatgctttcggactcaggtgaagcacaatcgcaagagagtattcaggacaaaatatctcaa

SEQ ID NO: 559296 - DNA, 75 bp, synthetic construct
  source 1..75: mol_type = other DNA
aagcataccaggaagtatcggttgccattcagtgtggtgatgagtcgttctgtgcccgtgccagaaaaacaactg

SEQ ID NO: 559297 - DNA, 75 bp, synthetic construct
  source 1..75: mol_type = other DNA
gcgtctaccccattgaaagagcaagccattgctgatgcgcttgatggcgattatcgtctgcgtagtggtatgaaa

SEQ ID NO: 559298 - DNA, 75 bp, synthetic construct
  source 1..75: mol_type = other DNA
atcattgcttgctgcgcttgttcgtgtcgcggattttgtcaccgatccaacgattaaaaagttactgaaagataa

SEQ ID NO: 559299 - DNA, 75 bp, synthetic construct
  source 1..75: mol_type = other DNA
agcgatcacttataaccgctctgattgttcatatctttctgatgaacaattcagcgaagcgccgcaggttatcga

SEQ ID NO: 559300 - DNA, 75 bp, synthetic construct
  source 1..75: mol_type = other DNA
gacgaataaagaattttcggctaaggttaaactgattgataaagcaaccggaaagttggggtttgagttctcccc

SEQ ID NO: 559301 - DNA, 75 bp, synthetic construct
  source 1..75: mol_type = other DNA
tctgccggatatagctgttaatccagatatgacagcattatgggctgaaaaacaggctgctattgaaaatggtga

SEQ ID NO: 559302 - DNA, 75 bp, synthetic construct
  source 1..75: mol_type = other DNA
ctgttccacgatgtcgtcagttaactggtctgccgctaacccgtggaactggtttgggtcgtccaccaaagtgag

SEQ ID NO: 559303 - DNA, 75 bp, synthetic construct
  source 1..75: mol_type = other DNA
aaaacactgtcgcgtcactcagatacggcaaaagcgttcgcatacctgctgaaacagtgggatgcactgaacgtg

SEQ ID NO: 559304 - DNA, 75 bp, synthetic construct
  source 1..75: mol_type = other DNA
tcggtgaactgtatgccatcgaggcagaggtccggggctgttcagcagaacagcgtctggcggcaagaaaagcca

SEQ ID NO: 559305 - DNA, 75 bp, synthetic construct
  source 1..75: mol_type = other DNA
ccgctctctgaatgggtggttcaggagcagctacccgtgttgatggtggtaggtattcaggaaggttgtattaac

SEQ ID NO: 559306 - DNA, 75 bp, synthetic construct
  source 1..75: mol_type = other DNA
ccgaacagctggagttgatgcgtagcgccttccgggttatccggacggtacgggaaaaacatgcctgtactcagt

SEQ ID NO: 559307 - DNA, 75 bp, synthetic construct
  source 1..75: mol_type = other DNA
aatcgcttttagcggctattttaagcgcaaccttattaaccggttgtgatggcggcggttcaggttcttcctccg

SEQ ID NO: 559308 - DNA, 75 bp, synthetic construct
  source 1..75: mol_type = other DNA
ggcggttacatgatggcctgtgtggcggacaaaattgtttccgcaccgtttgctattgtgggttccattggggtg

SEQ ID NO: 559309 - DNA, 75 bp, synthetic construct
  source 1..75: mol_type = other DNA
ctgccggctgctgtctccgctggaagaggcgcttcatggctatgtgctgactgacggtaagctccatgttgatga

SEQ ID NO: 559310 - DNA, 75 bp, synthetic construct
  source 1..75: mol_type = other DNA
atcgatacctttgaactgggctcagtacgtggcaataagtcgaccattgcgctgactgaattgggtgatgaagtt

SEQ ID NO: 559311 - DNA, 75 bp, synthetic construct
  source 1..75: mol_type = other DNA
agcccggacagaaaaggtatccacccgcggacccatcttgcggggttcagtggtgttctgcaggcggatgcgtac

SEQ ID NO: 559312 - DNA, 75 bp, synthetic construct
  source 1..75: mol_type = other DNA
tcgccaacgacgggctaccgctcattggctgggtggctaaccgaatcaacccaggacttgcgcattatgcggaaa

SEQ ID NO: 559313 - DNA, 75 bp, synthetic construct
  source 1..75: mol_type = other DNA
ccgctctctgaatgggtggttcaggagcagctaccggtgttgatggtggtgggcattcaggaaggctgtattaac

SEQ ID NO: 559314 - DNA, 75 bp, synthetic construct
  source 1..75: mol_type = other DNA
cccgcgtgctgatctcaaagtatgcagagcacaccccgctgtcccgccagtctgaaatgtacggccgccagggcg

SEQ ID NO: 559315 - DNA, 75 bp, synthetic construct
  source 1..75: mol_type = other DNA
cacgatgtgcacgttcgcatcccgtcagcactgacggaggaagcgctgaaacggatcggcgaactgtacgccatc

SEQ ID NO: 559316 - DNA, 75 bp, synthetic construct
  source 1..75: mol_type = other DNA
agcgcgccacgtttatgtcgagaatacgccgctgcctgctatctccgacatgagcatcggtcatgcgatggagtt

SEQ ID NO: 559317 - DNA, 75 bp, synthetic construct
  source 1..75: mol_type = other DNA
gttttcgtttaacaacccggcaggtgcctgcccgacctgtgacggccttggcgtacagcaatatttcgatcctga

SEQ ID NO: 559318 - DNA, 75 bp, synthetic construct
  source 1..75: mol_type = other DNA
aactgcaaacgctgatggatgttggcctgacgtacatccgcctcgggcagtccgccaccacgctttccggtggtg

SEQ ID NO: 559319 - DNA, 75 bp, synthetic construct
  source 1..75: mol_type = other DNA
ctggagattaagtacaaaggcaaaaccatccacgaagtgctggatatgaccatcgaagaggcgcgtgagttcttt

SEQ ID NO: 559320 - DNA, 75 bp, synthetic construct
  source 1..75: mol_type = other DNA
ccgctggcggcgcaaaccgtcagccagatggtggataacgtgctgtcacagccggaaggcaagcgtctgatgctg

SEQ ID NO: 559321 - DNA, 75 bp, synthetic construct
  source 1..75: mol_type = other DNA
catcgaagaggcgcgtgagttctttgatgccgttccggcgctggcgcgtaaactgcaaacgctgatagatgttgg

SEQ ID NO: 559322 - DNA, 75 bp, synthetic construct
  source 1..75: mol_type = other DNA
tcacgcaatattgtgattcgttcaccatttgcctgtcgaaaggtcttgggacgccagtcggttcattactcgtcg

SEQ ID NO: 559323 - DNA, 75 bp, synthetic construct
  source 1..75: mol_type = other DNA
gcacgctaccgctggataaagtggcgatgaaaatcaaacccgacgatatccatttcgcccgcaccaaattactca

SEQ ID NO: 559324 - DNA, 75 bp, synthetic construct
  source 1..75: mol_type = other DNA
gcttacggctgcgaactgaaagagatcacgcaatattgtgactcgttcaccatttgcctgtcgaaaggtcttggg

SEQ ID NO: 559325 - DNA, 75 bp, synthetic construct
  source 1..75: mol_type = other DNA
ggctgcacaaactttacgcataattacctctcgcttttctgcaataaaaaaggcaccatttctggcgcccgtatt

SEQ ID NO: 559326 - DNA, 75 bp, synthetic construct
  source 1..75: mol_type = other DNA
gtaatcgtgattacattaaacgcgccatccgctggcggaaaatgactggcggcgggatgcgtcaatccgggattc

SEQ ID NO: 559327 - DNA, 75 bp, synthetic construct
  source 1..75: mol_type = other DNA
atccgctggcggaaaatgacaggtggcgggatgcgccagtccggcattctggctgccgccgggatgtatgccctg

SEQ ID NO: 559328 - DNA, 75 bp, synthetic construct
  source 1..75: mol_type = other DNA
ccttccggggtatcctgcaggcggatgcattcagcggttacgatcggctgttcagtgccaaacgtgaaggtggtg

SEQ ID NO: 559329 - DNA, 75 bp, synthetic construct
  source 1..75: mol_type = other DNA
taatgctgcggaaagagcgcttcgtgcagtctgtctcggaaagaaaaactttatgttctttggcagcgatcacgg

SEQ ID NO: 559330 - DNA, 75 bp, synthetic construct
  source 1..75: mol_type = other DNA
ggcgctggctgacgacctgaccggacgtgagaagcatgaagttgcgctgaaccgtccgccaagagtgactaaaac

SEQ ID NO: 559331 - DNA, 75 bp, synthetic construct
  source 1..75: mol_type = other DNA
aagctacctacgcaatgtacttgacgtcatagcggactggccgttgaaccgggtcagcgaactgctcccttggcg

SEQ ID NO: 559332 - DNA, 75 bp, synthetic construct
  source 1..75: mol_type = other DNA
gctacgccaacgatgcctatactggcggcacgcagtgttctgatgagctgaaaaaatcgctggtcgataacaaca

SEQ ID NO: 559333 - DNA, 75 bp, synthetic construct
  source 1..75: mol_type = other DNA
tgtccttgacgtcattgctgactggccggtaaaccgggtaggtgaactgctgccgtggcggatcacactgcctgc

SEQ ID NO: 559334 - DNA, 75 bp, synthetic construct
  source 1..75: mol_type = other DNA
cagacccatcttgcggggttcagtggtgtactgcaggcggatgcatacgccgggttcaacgagctgtaccgggat

SEQ ID NO: 559335 - DNA, 75 bp, synthetic construct
  source 1..75: mol_type = other DNA
caccccgctgtattgccagtcagaaatatacggccggcaaggtgtggagctgagccgttcactgctgtcgggctg

SEQ ID NO: 559336 - DNA, 75 bp, synthetic construct
  source 1..75: mol_type = other DNA
caccttcgcggcccatcgagcggggtatcgccggaccggggctgctggcccgcgtgctgacctcgaagtatgcag

SEQ ID NO: 559337 - DNA, 75 bp, synthetic construct
  source 1..75: mol_type = other DNA
atccgcaggggtacccaaaccgcgttcgccagcaacgtgaaaaaggtatctgggtttatgaacgctatcctgccg

SEQ ID NO: 559338 - DNA, 75 bp, synthetic construct
  source 1..75: mol_type = other DNA
aagctacctacgcaatgtacttgacgtcatagccgactggccggtgaaccgggtcagcgaactgctcccctggcg

SEQ ID NO: 559339 - DNA, 75 bp, synthetic construct
  source 1..75: mol_type = other DNA
aagctacctacgcaatgtacttgacgtcatagctgactggccgttgaaccgggtcagcgaactgctcccgtggcg

SEQ ID NO: 559340 - DNA, 75 bp, synthetic construct
  source 1..75: mol_type = other DNA
aagctacctacgcaatgtacttgacgtcatagcagactggccgctgaaccgggtcagcgaactgctcccatggcg

SEQ ID NO: 559341 - DNA, 75 bp, synthetic construct
  source 1..75: mol_type = other DNA
aaatgacatctggcagccaaataccaagagcatcatgactgtcggcaccaacctggagaacgtttatttcaaaaa

SEQ ID NO: 559342 - DNA, 75 bp, synthetic construct
  source 1..75: mol_type = other DNA
acgttcgtaccccgtcagccctgacggaggaagcgctgaaacggatcggcgaactgtacgccatcgaggcagaga

SEQ ID NO: 559343 - DNA, 75 bp, synthetic construct
  source 1..75: mol_type = other DNA
gcctaagttctacagcgatcgtaaagggatgaagggctggaacctgttccagttgatgcaccgtaaagcgcgcgg

SEQ ID NO: 559344 - DNA, 75 bp, synthetic construct
  source 1..75: mol_type = other DNA
cggatgaacttcggcagccgctccgaaaaagtctcccgtcgtatcgcacagatggaagctgacctgaaggcactt

SEQ ID NO: 559345 - DNA, 75 bp, synthetic construct
  source 1..75: mol_type = other DNA
gttgacgcgtgctgccagttaatgactccgctgaatgatgccctgtaccgttatgtaatgaacacccgcaaggtt

SEQ ID NO: 559346 - DNA, 75 bp, synthetic construct
  source 1..75: mol_type = other DNA
ctgaaagtgatccgcactgttcgggtaaaaaaagcctgtacaaaatgtgactatatagttgaagcgccagcgccg

SEQ ID NO: 559347 - DNA, 75 bp, synthetic construct
  source 1..75: mol_type = other DNA
gtgttggattccaccaccttaagcattgagcaagtgattgaaaaagcgctacaatacgcgcgccagaaattggtt

SEQ ID NO: 559348 - DNA, 75 bp, synthetic construct
  source 1..75: mol_type = other DNA
ttgcgtcagacccgcccccgtaagccgttccctgaatcactaccccatgacgaaaagcggctgttgcctgcggcg

SEQ ID NO: 559349 - DNA, 75 bp, synthetic construct
  source 1..75: mol_type = other DNA
aaccgttccctgagtcactcccacgggatgagaagcggctgctgccgactgagccgtgttgcccggagtgcggtg

SEQ ID NO: 559350 - DNA, 75 bp, synthetic construct
  source 1..75: mol_type = other DNA
cgtatgttcgtgacgaccgtaacgccgggtcaacgctggcgccggcggtgtggttcgcttacagcccggacagaa

SEQ ID NO: 559351 - DNA, 75 bp, synthetic construct
  source 1..75: mol_type = other DNA
aacgaaaccgctgctgaaatccctggaaagctggctgcgtgaaaagatgaaaaccctgtcgcgacactcagaact

SEQ ID NO: 559352 - DNA, 75 bp, synthetic construct
  source 1..75: mol_type = other DNA
ttcgcaccccgtcagccctgacggaggaagcgctgaaacggatcggcgaactgtacgccatcgaggcagagataa

SEQ ID NO: 559353 - DNA, 75 bp, synthetic construct
  source 1..75: mol_type = other DNA
tccccggtgcggtgaccattatcatgacggtcatcggcgcgatcctcacctcgctggtggtggcgcgagaatggg

SEQ ID NO: 559354 - DNA, 75 bp, synthetic construct
  source 1..75: mol_type = other DNA
ggcaaagtcaccgccgccgtggcggggatggtttcggggatgacagttgccaatttgctgggcattccgctgggg

SEQ ID NO: 559355 - DNA, 75 bp, synthetic construct
  source 1..75: mol_type = other DNA
gtttttcggaaacggcgatgacctttattatgatgttagttgggctagggaaggtgcgaataagcaggtcatttc

SEQ ID NO: 559356 - DNA, 75 bp, synthetic construct
  source 1..75: mol_type = other DNA
aggtggagtatgtggctggtattctgaagcagtcccgccatctggatgacatcgaggcaagggagtggctgaaaa

SEQ ID NO: 559357 - DNA, 75 bp, synthetic construct
  source 1..75: mol_type = other DNA
tacggaccatcttgagtttgcgggtaacgttcgtgcgggttttgttccggtaattggtgaagccgttttgggagt

SEQ ID NO: 559358 - DNA, 75 bp, synthetic construct
  source 1..75: mol_type = other DNA
ctgcctgccgccctgctttcgtttgctgcgatgtcgtcgttgctgctgtatggtcgctataagcgccagcaagcg

SEQ ID NO: 559359 - DNA, 75 bp, synthetic construct
  source 1..75: mol_type = other DNA
gcaggatttcaggacgttattcaccactgcgcattgcagcagtgactgactttataattgtactggcactgctga

SEQ ID NO: 559360 - DNA, 75 bp, synthetic construct
  source 1..75: mol_type = other DNA
ggagccaaccgcgccattactcagttcttcttcgatgttgaaagctacctacgttttcgcgatcgctgcgtctcg

SEQ ID NO: 559361 - DNA, 75 bp, synthetic construct
  source 1..75: mol_type = other DNA
ggtaagccagaaatgtatgcttctgacctggtgacgctgttaaaagaagtggcagatttcgatatctccgtggcg

SEQ ID NO: 559362 - DNA, 75 bp, synthetic construct
  source 1..75: mol_type = other DNA
aggagtgaaagatttccacttctatacgcttaaccgtgctgaaatgagttacgcgatttgccatacgctgggtgt

SEQ ID NO: 559363 - DNA, 75 bp, synthetic construct
  source 1..75: mol_type = other DNA
aggtggagtatgtggctggtattctgaagcaatctcgtcatctggatgacatcgaggcaagggagtggctgaaaa

SEQ ID NO: 559364 - DNA, 75 bp, synthetic construct
  source 1..75: mol_type = other DNA
aagtcttcccgggtgatgaggtgtttgtcagaaccgttgaaggacacaacatgatcaaagttcttggctatgaca

SEQ ID NO: 559365 - DNA, 75 bp, synthetic construct
  source 1..75: mol_type = other DNA
caacctgagacgaaaagtggatgccggagccaaccgcgccattactcagttcttcttcgatgtcgaaagctacct

SEQ ID NO: 559366 - DNA, 75 bp, synthetic construct
  source 1..75: mol_type = other DNA
atgttgatgttatttctcaccgtcgccatggtgcacattgtggcgcttatgagtcccggtcccgatttctttttt

SEQ ID NO: 559367 - DNA, 75 bp, synthetic construct
  source 1..75: mol_type = other DNA
tcgatggcactgaacaagtcggtggtgaataacgatccgcaagggtatccgaaccgcgttcgtcagcagcgcgca

SEQ ID NO: 559368 - DNA, 75 bp, synthetic construct
  source 1..75: mol_type = other DNA
tatcggtgaactgtatgccatagaggcagaagtccggggatgtacagcagaacagcgtctggcggcaagaaaagc

SEQ ID NO: 559369 - DNA, 75 bp, synthetic construct
  source 1..75: mol_type = other DNA
tgtcaaacgacatctggcagccgaatacaaagagcacaatgaccgtgggtacgaacctggaaaacgtttatttca

SEQ ID NO: 559370 - DNA, 75 bp, synthetic construct
  source 1..75: mol_type = other DNA
tatcagggtgtgctgcaggctgatgcctatgcaggttataacgtactgtacgaaacgggccgggtgaaggaagcc

SEQ ID NO: 559371 - DNA, 75 bp, synthetic construct
  source 1..75: mol_type = other DNA
agcgacagttgcccggcagatgcagagcaactttgtctgaccttcccgtcagtggttgatcgcgcgcgttttgaa

SEQ ID NO: 559372 - DNA, 75 bp, synthetic construct
  source 1..75: mol_type = other DNA
accgccagtcagagatataccgccgtcagagtgtggatctgagccgtgccacactggggcgctggaccggtgccg

SEQ ID NO: 559373 - DNA, 75 bp, synthetic construct
  source 1..75: mol_type = other DNA
ggcgaatacagaacaggtttgtctgacgttctcctcggtgatcgagagtaaacgcttcgactcgctgtataagca

SEQ ID NO: 559374 - DNA, 75 bp, synthetic construct
  source 1..75: mol_type = other DNA
tgatcgtgaagctcaatgactggccgtcgaagcgtgtgcatgaactgctgccctggaactgctcaactgtaaaat

SEQ ID NO: 559375 - DNA, 75 bp, synthetic construct
  source 1..75: mol_type = other DNA
cctaaagcgattatctactttggttcggtgttctcgctgtttgtcggtgataacgtcggcaccaccgaacgttgg

SEQ ID NO: 559376 - DNA, 75 bp, synthetic construct
  source 1..75: mol_type = other DNA
ccctgcgccgttgggtgagctggagtcagattctttcgtctacactgcaccgaagaacaacctgaacgccagcaa

SEQ ID NO: 559377 - DNA, 75 bp, synthetic construct
  source 1..75: mol_type = other DNA
tcggtctggctgtggaacgatacgagctatcgttatgaggaaggtaaggaagatgagctgggctttaaaaccttc

SEQ ID NO: 559378 - DNA, 75 bp, synthetic construct
  source 1..75: mol_type = other DNA
tctttaagaaatggaatccgggtgcaagtgcttaccagttgccgggagcaacggagatgagtttccagggcggtg

SEQ ID NO: 559379 - DNA, 75 bp, synthetic construct
  source 1..75: mol_type = other DNA
tgctacagccctgtggagcgtattgcctacaatgttgaagcagcgcgtgtagaacagcgtaccgacttggacaag

SEQ ID NO: 559380 - DNA, 75 bp, synthetic construct
  source 1..75: mol_type = other DNA
gaatacgccgttctggcctgatgtggacttgtcggagtttcgcagtgtcatgcgcactgacggcacggtgacgca

SEQ ID NO: 559381 - DNA, 75 bp, synthetic construct
  source 1..75: mol_type = other DNA
atcaggactatgacgccacggcgtccggtgtgaagcggggcgaggaactggcggaagcaagcggtgatttgtggc

SEQ ID NO: 559382 - DNA, 75 bp, synthetic construct
  source 1..75: mol_type = other DNA
taaacgacgccgtaaaagaaaacgctatcaggcagataagagagatccagcctgatagcaaaagcccgctggtaa

SEQ ID NO: 559383 - DNA, 75 bp, synthetic construct
  source 1..75: mol_type = other DNA
gcacgcgccatgctcaacgaacgataccaggactatgacgccacggtatccggtgtgaagcggggcgaggaactg

SEQ ID NO: 559384 - DNA, 75 bp, synthetic construct
  source 1..75: mol_type = other DNA
cggtgtgaagcggggcgaggaactggcggaagcaagcggtgatttgtggcgtgatgcccgctgggccatcagccg

SEQ ID NO: 559385 - DNA, 75 bp, synthetic construct
  source 1..75: mol_type = other DNA
caccggaacaggcggaaatcatcaggaatacgccgttctggcctgatgtggatctgtcggagttccgcagtgtga

SEQ ID NO: 559386 - DNA, 75 bp, synthetic construct
  source 1..75: mol_type = other DNA
gggcggttggcgatctggtacaggtggtaaactccatcagcgatggtgatgtgaacgcgctggtcgatgagtatg

SEQ ID NO: 559387 - DNA, 75 bp, synthetic construct
  source 1..75: mol_type = other DNA
cagaacgtgctggaagcggcacgtattgagctggggatgaagcgtttcctggaacaaggtggcttccacgcgttc

SEQ ID NO: 559388 - DNA, 75 bp, synthetic construct
  source 1..75: mol_type = other DNA
gaaactgccctgcaaactggtgctgaaaccgctgggtaccacgccggacgaaatcaccgcaatttgccgcgatgc

SEQ ID NO: 559389 - DNA, 75 bp, synthetic construct
  source 1..75: mol_type = other DNA
gaagccccatccatcagcagaacgccattcaagccatccagaaaatccttccggacccaaccaaaccaatcgtag

SEQ ID NO: 559390 - DNA, 75 bp, synthetic construct
  source 1..75: mol_type = other DNA
cgaccatagccgggtggaaagaatagccacggaaaagctgcaaatgcagcatgttgatccgtcacaagaaaatat

SEQ ID NO: 559391 - DNA, 75 bp, synthetic construct
  source 1..75: mol_type = other DNA
agcgttcctgacacttccggctgtgggcggcaatacactgtctacttccgggctggggcgttttctggtgtttct

SEQ ID NO: 559392 - DNA, 75 bp, synthetic construct
  source 1..75: mol_type = other DNA
agcgccattctggcttttccaatggcgtggtatatggcgcgttataccagcgggaaaatgaaagcgtttttttat

SEQ ID NO: 559393 - DNA, 75 bp, synthetic construct
  source 1..75: mol_type = other DNA
atggcgatgaacgtattgcaatcaccttcacgtccgggtgttgggaaaatatcaggttttttctggcggaatccg

SEQ ID NO: 559394 - DNA, 75 bp, synthetic construct
  source 1..75: mol_type = other DNA
tacgtgatgtacgtcagcctgaagtgaaagaagagaaaccagagttcgatccgatcctgctgcgccctgttgacg

SEQ ID NO: 559395 - DNA, 75 bp, synthetic construct
  source 1..75: mol_type = other DNA
cgaaaagcgcccaggcggatttactcaacctgagacgcaaagtggatgctggagccaaccgcgctatcactcaat

SEQ ID NO: 559396 - DNA, 75 bp, synthetic construct
  source 1..75: mol_type = other DNA
cgggcattttgccggtctctaactttaaacaggcgaagaaatttgccgacatgactaacgtgcgtattccggcgt

SEQ ID NO: 559397 - DNA, 75 bp, synthetic construct
  source 1..75: mol_type = other DNA
gcagaagccagcggtgatttatggcgtgacgcccgctgggccatcagccgggtacaggacgcgccgcactgcaca

SEQ ID NO: 559398 - DNA, 75 bp, synthetic construct
  source 1..75: mol_type = other DNA
aaatacgccgttctggcctgatgtgaacctgtcggagtttcgcagtgtcatgcgcaccgacggcacggtgacgca

SEQ ID NO: 559399 - DNA, 75 bp, synthetic construct
  source 1..75: mol_type = other DNA
cgaccatagccgggtagaaaggatcgccacggagaagctgcaaatgcagcatgttgatccgtcacaagaaaatat

SEQ ID NO: 559400 - DNA, 75 bp, synthetic construct
  source 1..75: mol_type = other DNA
ctgttatggcagggcttttatacttttgatgatttcaccatgtcggtgacgccggaactgacgctggcaaatctc

SEQ ID NO: 559401 - DNA, 75 bp, synthetic construct
  source 1..75: mol_type = other DNA
gccggaactgacgctggcgaatattcgtgcgctgtttaatccggcgaattacgacatcattctccgcacgctgac

SEQ ID NO: 559402 - DNA, 75 bp, synthetic construct
  source 1..75: mol_type = other DNA
gcacgcgccatgctcaacgaacgataccaggactatgatgccacggcatccggtgtgaagcgaggcgaagaactg

SEQ ID NO: 559403 - DNA, 75 bp, synthetic construct
  source 1..75: mol_type = other DNA
aatatacaactaaagcttgtaatggcagcacatatcagaaaaataacgagttcaatgctcgtttccgcctgtatg

SEQ ID NO: 559404 - DNA, 75 bp, synthetic construct
  source 1..75: mol_type = other DNA
ctgaaaaatttgacattgccaccaatttctttacttcggatacattatatgataacacgcatctggaaatgggta

SEQ ID NO: 559405 - DNA, 75 bp, synthetic construct
  source 1..75: mol_type = other DNA
aacccgcgattaccaggccgaattaaccctgaagcctggtgaaccgctcgtctatggtccatttcagaaagacct

SEQ ID NO: 559406 - DNA, 75 bp, synthetic construct
  source 1..75: mol_type = other DNA
gttcgtttttatggtcctgacagccgcccggaaattgcggcatacgcgtttgatgtgctttcccgtcagatgatg

SEQ ID NO: 559407 - DNA, 75 bp, synthetic construct
  source 1..75: mol_type = other DNA
gcagatttaaaccggcaacatttgcacctgtgaataacgttgccgctgcattatgtgcggcagacgtaattaagt

SEQ ID NO: 559408 - DNA, 75 bp, synthetic construct
  source 1..75: mol_type = other DNA
ggcacaggcggcacatgctttccttctttggcatggtgtcctgcctgacgtagaaccagttatcaaacaattgca

SEQ ID NO: 559409 - DNA, 75 bp, synthetic construct
  source 1..75: mol_type = other DNA
gggttatcgctggaaaccgcagctaaactaagtgaagttatgccaggggctggcggacgctcctgtctggaacgt

SEQ ID NO: 559410 - DNA, 75 bp, synthetic construct
  source 1..75: mol_type = other DNA
ccggatgtgttcatcgccggaaaccgggttatcgctggaaacggcagctaaactaaatgaagtcatgccgggagc

SEQ ID NO: 559411 - DNA, 75 bp, synthetic construct
  source 1..75: mol_type = other DNA
cttctcttctgccaacgccgtagcgttgcaggcaaaacagtatggcgattttgatcgctatgtcctggccctctc

SEQ ID NO: 559412 - DNA, 75 bp, synthetic construct
  source 1..75: mol_type = other DNA
tacttcagatacattatatgacaatacgcatctggaaataggtaacgggttgctcatgcggattaccgatcaaaa

SEQ ID NO: 559413 - DNA, 75 bp, synthetic construct
  source 1..75: mol_type = other DNA
aattttgggcagatcgctgcgaattccattgcaactttcccaccgaaggcagcattcagcgtttctaccataaaa

SEQ ID NO: 559414 - DNA, 75 bp, synthetic construct
  source 1..75: mol_type = other DNA
tccctctgtgataaacaacccatacttaacatttggtgtaacttataatggacaggattacgaaggaaacaatca

SEQ ID NO: 559415 - DNA, 75 bp, synthetic construct
  source 1..75: mol_type = other DNA
atattcaggatttttttaactggatgtgggcggtggatccacgcctcgcttcccgtctcaatgatctgcacgact

SEQ ID NO: 559416 - DNA, 75 bp, synthetic construct
  source 1..75: mol_type = other DNA
gtctggatgtcgttaccatcaacaacaagtatcttattaagatggctgctgtctttaggtgggctgtgcgcaatg

SEQ ID NO: 559417 - DNA, 75 bp, synthetic construct
  source 1..75: mol_type = other DNA
cagccgcgatgacctgaacgaccctgagtcctaccagctctacgttgaccagtacgatgacatcaagtccaacct

SEQ ID NO: 559418 - DNA, 75 bp, synthetic construct
  source 1..75: mol_type = other DNA
agcgagaaaggtaacggtactgagtggactgaaaccacaacagacagcggtaaaaccgtcaccatcaacagtggt

SEQ ID NO: 559419 - DNA, 75 bp, synthetic construct
  source 1..75: mol_type = other DNA
ctgtacggtgaactgacaggcatgatttctgatgttgacctgggcaagatgaagattgaacccgcatctccagca

SEQ ID NO: 559420 - DNA, 75 bp, synthetic construct
  source 1..75: mol_type = other DNA
aggtagaaaacaaacctgatgacaaaccgaagctggaagttgccagctggctggaagatgtagatggcaaacagg

SEQ ID NO: 559421 - DNA, 75 bp, synthetic construct
  source 1..75: mol_type = other DNA
ttacgaccgttacgctaaagaggttgaggttgataggctggtcaatgtgatggctgatgtttataaggaggttgt

SEQ ID NO: 559422 - DNA, 75 bp, synthetic construct
  source 1..75: mol_type = other DNA
agcccgctgaccgccaaaggtgagcaacaggcgatgcaggtggcaacccgtgccaaagagcttggcattacgcat

SEQ ID NO: 559423 - DNA, 75 bp, synthetic construct
  source 1..75: mol_type = other DNA
accgaagctggaagttgccagctggctggaagatgtagatggcaaacaggaaacgcgttatgcctttattgatga

SEQ ID NO: 559424 - DNA, 75 bp, synthetic construct
  source 1..75: mol_type = other DNA
ggtgaataccagcgccttctcgtgctgtaccgcgcggcgtttcaggcggcaactgccggggagtgcgacgcatga

SEQ ID NO: 559425 - DNA, 75 bp, synthetic construct
  source 1..75: mol_type = other DNA
tgaaggcgagtcgatgcaggaacttagcgatcgcgttaacgcagcactggaatcttgtcgggatttaccaccggg

SEQ ID NO: 559426 - DNA, 75 bp, synthetic construct
  source 1..75: mol_type = other DNA
tgccaaagagcttggcattacgcatatcatcagtagtgatttaggccgcacccggcgtacggcggaaatcatcgc

SEQ ID NO: 559427 - DNA, 75 bp, synthetic construct
  source 1..75: mol_type = other DNA
gagaactggcgtcggcagctggtcaatggcaccgttgacgggcgtattcctgaaggcgagtcaatgcaggagctc

SEQ ID NO: 559428 - DNA, 75 bp, synthetic construct
  source 1..75: mol_type = other DNA
tgacggtagagaatgttaacactactgttaaacaatatctttctcatccggtgaatacctataccggagtattat

SEQ ID NO: 559429 - DNA, 75 bp, synthetic construct
  source 1..75: mol_type = other DNA
acggagcggctcctgtttgcctttaatgatgaaagagtcatcgtctatggcattgaccccaccgggaaagaatgg

SEQ ID NO: 559430 - DNA, 75 bp, synthetic construct
  source 1..75: mol_type = other DNA
actcgttggtatcacgttttttaaaacgctcttttttgcaaccgactggtttatttatcttacgtcaggtctggt

SEQ ID NO: 559431 - DNA, 75 bp, synthetic construct
  source 1..75: mol_type = other DNA
tcattgctaaccctgatgtttatcatcaccctgccgtttacgggcctgagcgcgatttctcgccacatctccgcc

SEQ ID NO: 559432 - DNA, 75 bp, synthetic construct
  source 1..75: mol_type = other DNA
ttatcgcctgcgcagcggaatgaaaactgcgaacggtaatgttgtgcgctttttcgaagtaatgaaaggcgacaa

SEQ ID NO: 559433 - DNA, 75 bp, synthetic construct
  source 1..75: mol_type = other DNA
gagctgaataagatttctattaacggtgtaaaggatgttttgacaattactgcccagttggttaattacctgaat

SEQ ID NO: 559434 - DNA, 75 bp, synthetic construct
  source 1..75: mol_type = other DNA
tgagtcgctgaaaagcgatgccgagtatatgaaagacccgaaacgcgcgcgggatctgctgatggcgttagatgg

SEQ ID NO: 559435 - DNA, 75 bp, synthetic construct
  source 1..75: mol_type = other DNA
tcgcgttcggcacatacattttgtcggcattggtggtgccggtatgggcggtattgccgaagttctggccaatga

SEQ ID NO: 559436 - DNA, 75 bp, synthetic construct
  source 1..75: mol_type = other DNA
cgagctgtatcgcaatggtcggataacggaagctgcctgctgggctcatgcccgccgaaagatccacgatgtgca

SEQ ID NO: 559437 - DNA, 75 bp, synthetic construct
  source 1..75: mol_type = other DNA
gatcccacgccaaacccggagccgacgcctgatccgacgccagaacctgaacctacgccggatcccactccagaa

SEQ ID NO: 559438 - DNA, 75 bp, synthetic construct
  source 1..75: mol_type = other DNA
tttaccagtcagtatggcataacgtacttatattactggtgatttttctcgccaatggcctgacgtggctggtgc

SEQ ID NO: 559439 - DNA, 75 bp, synthetic construct
  source 1..75: mol_type = other DNA
aacgaaataacgaaagaaaaattactcacagctgcgaaggatggaaaactggatctgacggtagatggtgaaacg

SEQ ID NO: 559440 - DNA, 75 bp, synthetic construct
  source 1..75: mol_type = other DNA
gtacgtgatgccagcgtggtcgttgtttccagcgcgatttctgccgataacccggaaattgtcgccgctcatgaa

SEQ ID NO: 559441 - DNA, 75 bp, synthetic construct
  source 1..75: mol_type = other DNA
caaggtacaatcagccgcattgatgtctcagatagcgatattcctgctgacacggggggtaaaatcggtacaccg

SEQ ID NO: 559442 - DNA, 75 bp, synthetic construct
  source 1..75: mol_type = other DNA
atgcgtcagtatcgtttatggttagctatgattaaggttaccatagtattattcctcctgatatttcctactgca

SEQ ID NO: 559443 - DNA, 75 bp, synthetic construct
  source 1..75: mol_type = other DNA
tgtctgaagacccgaatatgtcatatcaaaaattacgctgggcacgaaaaaatgaaatggttaccgtttataatc

SEQ ID NO: 559444 - DNA, 75 bp, synthetic construct
  source 1..75: mol_type = other DNA
ctgtctgatagaggaagatgagtacgacggcaaaaaggttttatgtactctaagatcgattattgcggttactga

SEQ ID NO: 559445 - DNA, 75 bp, synthetic construct
  source 1..75: mol_type = other DNA
gactaataaccctgaacctggtttccagttgattaaccagcgaatcacccacagcacgattaacgacaatatttg

SEQ ID NO: 559446 - DNA, 75 bp, synthetic construct
  source 1..75: mol_type = other DNA
ctaatcaacaagatgatggtgttgattacgagcgtgtaatcaagtctggcactgactattttaaatatttgcgaa

SEQ ID NO: 559447 - DNA, 75 bp, synthetic construct
  source 1..75: mol_type = other DNA
ggaggagatggactcactagtacgggatcagtagtaatgacggagtttcaagaatggtccagagagaaggggatg

SEQ ID NO: 559448 - DNA, 75 bp, synthetic construct
  source 1..75: mol_type = other DNA
gcaatgaaaatatcccaattgttgattttgacagtgtggatctaatatcaaaagttgactcaatcattttcgttt

SEQ ID NO: 559449 - DNA, 75 bp, synthetic construct
  source 1..75: mol_type = other DNA
gcgtccacaccactgcaagaacaagccattgctgatgcgcttgatggcgattatcgcctgcgcagcggaatgaaa

SEQ ID NO: 559450 - DNA, 75 bp, synthetic construct
  source 1..75: mol_type = other DNA
tgctggatagcgatattcctgctgatacgggtgttaaaatcggaacaccgtttagcgacctttacagcaaagcat

SEQ ID NO: 559451 - DNA, 75 bp, synthetic construct
  source 1..75: mol_type = other DNA
acgctcttttaaatattgaaagaattgaaagtttaggattcaattgtaaagaacaagaatctgaaattaatggtg

SEQ ID NO: 559452 - DNA, 75 bp, synthetic construct
  source 1..75: mol_type = other DNA
tgctgaaagcattgaatcagttctaaaaatatcagatataaaattcaatattataattattgatgatggttcaaa

SEQ ID NO: 559453 - DNA, 75 bp, synthetic construct
  source 1..75: mol_type = other DNA
ttatatcttacgaaatttattaagagtaatggtatagagtaccctgaaggagattatttttatgaggataatcct

SEQ ID NO: 559454 - DNA, 75 bp, synthetic construct
  source 1..75: mol_type = other DNA
ataatgcagccaaaattgaccgcctgattgctcttacgacgaacacactggacccggttaatgcggcgaactata

SEQ ID NO: 559455 - DNA, 75 bp, synthetic construct
  source 1..75: mol_type = other DNA
cgccaggtggaatggtggcgggtgcctttgactgtgcggacatcatcgcccgcatgcgggatatcaaacccatct

SEQ ID NO: 559456 - DNA, 75 bp, synthetic construct
  source 1..75: mol_type = other DNA
cctgtagatgtcagtgcgcaggttactgcagcagtagctgcagagaatagccgcatcatgggcatcctgaactgc

SEQ ID NO: 559457 - DNA, 75 bp, synthetic construct
  source 1..75: mol_type = other DNA
tgccgttgaacgcatggcggcgcttttgcaacaaacagacgaccccgtgagtctggtttctggctttgtcagttt

SEQ ID NO: 559458 - DNA, 75 bp, synthetic construct
  source 1..75: mol_type = other DNA
atgaattcactacgtccggaattattagaactgacaccacaagctttgacggcgttaagcaatgccggttttgtt

SEQ ID NO: 559459 - DNA, 75 bp, synthetic construct
  source 1..75: mol_type = other DNA
ctgatttaagctcaatgattaatgatggcctgccatcgtgggccatgatcatggctattttcggtgtgtcgtata

SEQ ID NO: 559460 - DNA, 75 bp, synthetic construct
  source 1..75: mol_type = other DNA
cttctttttctggcaacccggattcacaagaaatcccggatagacaaaaacattaccgtgacggtgaccgtcgat

SEQ ID NO: 559461 - DNA, 75 bp, synthetic construct
  source 1..75: mol_type = other DNA
aagagattgcccggttcattctccgccacccggcatttaacggcggctggctgctctttctggctgcagaaattc

SEQ ID NO: 559462 - DNA, 75 bp, synthetic construct
  source 1..75: mol_type = other DNA
atgcttctatcctgggtggaaaagttcgtattggggataatgtaacgattggcgctcacgcgttggttatgcatg

SEQ ID NO: 559463 - DNA, 75 bp, synthetic construct
  source 1..75: mol_type = other DNA
gaactatgccatcaccttctgcttcagctgtgaccactaagccagttgaccaggcagcaactcagacaactgcct

SEQ ID NO: 559464 - DNA, 75 bp, synthetic construct
  source 1..75: mol_type = other DNA
ccgcaacggctcttgttgctctggtcttcagtattcttaccggaagcgctttaggcattatcgggtatggtttac

SEQ ID NO: 559465 - DNA, 75 bp, synthetic construct
  source 1..75: mol_type = other DNA
tgatgaacgcgcagctttttggatatgtgcttatttactacatactccaatcatctccaaccagatgatcactgg

SEQ ID NO: 559466 - DNA, 75 bp, synthetic construct
  source 1..75: mol_type = other DNA
ttcagtgacggtgtccgtacccagctggcgaacggccaggcactgaaagaggctcagtgcacctgcggggctagc

SEQ ID NO: 559467 - DNA, 75 bp, synthetic construct
  source 1..75: mol_type = other DNA
gagatagataatctcagcgcgtctgacgatgcctttactaataataaaaaaagtaatgatgaaattaataagatc

SEQ ID NO: 559468 - DNA, 75 bp, synthetic construct
  source 1..75: mol_type = other DNA
tcggaggacgatcccatgcctttgaccaaagaagaacgcgccgaactggtaaaagaaattaacgaaggcttatcc

SEQ ID NO: 559469 - DNA, 75 bp, synthetic construct
  source 1..75: mol_type = other DNA
ccatgcgaacaggtgttatgcctgtatggtgtgatgacaaccggcaatatcgcaagcggatgttcagggccggtt

SEQ ID NO: 559470 - DNA, 75 bp, synthetic construct
  source 1..75: mol_type = other DNA
ccctgcgggatgggaaaatcaatatatatgattatattaatgaaaaacagttggaaaaattaaatccaccgcaag

SEQ ID NO: 559471 - DNA, 75 bp, synthetic construct
  source 1..75: mol_type = other DNA
atttgggataagttggttgcatatgtcaatgattttaacttaagcaatcaagaaaaatcacgcttaatactaaag

SEQ ID NO: 559472 - DNA, 75 bp, synthetic construct
  source 1..75: mol_type = other DNA
atcactactatgggggctcgtcaaggacatacagccattatatttccacaatctgattttttgagttttcgttat

SEQ ID NO: 559473 - DNA, 75 bp, synthetic construct
  source 1..75: mol_type = other DNA
cctgcatacggcctcttaatcaggtggataacttatttattctgccagtcgctgagtgtatttcactcggttggg

SEQ ID NO: 559474 - DNA, 75 bp, synthetic construct
  source 1..75: mol_type = other DNA
cagcctcagccagcgcgccttatgccgttgaacgcatggcggcgcttttgcaacaaacagacgaccccgtgtgtc

SEQ ID NO: 559475 - DNA, 75 bp, synthetic construct
  source 1..75: mol_type = other DNA
aagcgaggcacgggtagaagcaatgaataacggtgttttgctttgcgaacaattattccccatgcttcagcaaca

SEQ ID NO: 559476 - DNA, 75 bp, synthetic construct
  source 1..75: mol_type = other DNA
ccatgcgaacaggtattatgcctgtatggtgtgatgacaaccggaaatgtcgcaagcgggtgttcagggccggtt

SEQ ID NO: 559477 - DNA, 75 bp, synthetic construct
  source 1..75: mol_type = other DNA
gccgttgttgccagttatcggaaccggtcgcctctatattacgtccaaaggtcatgcttgccatgcatattttcg

SEQ ID NO: 559478 - DNA, 75 bp, synthetic construct
  source 1..75: mol_type = other DNA
atggcgcgacgcgacagtatcggtgaagttcctcccatgccgtggcgcacggtcgttggcgctggtattgccgga

SEQ ID NO: 559479 - DNA, 75 bp, synthetic construct
  source 1..75: mol_type = other DNA
atggctaatgaaaaaagacatccgcaaaagtttcgcgtggctgtctccggatcaactgttgatggccgtgaaatc

SEQ ID NO: 559480 - DNA, 75 bp, synthetic construct
  source 1..75: mol_type = other DNA
gcagagctccgggcaaatgcagcatatacgcggcgcagatatagcgatgattttccaggagccgatgacgtcgct

SEQ ID NO: 559481 - DNA, 75 bp, synthetic construct
  source 1..75: mol_type = other DNA
cagattattaacttgttgctcgatttacagcgcgatttcggcattgcgtatctgtttatctcccatgatatggcg

SEQ ID NO: 559482 - DNA, 75 bp, synthetic construct
  source 1..75: mol_type = other DNA
gttatccccatgagttttccggcggtcagcgccagcgcatctgcattgcccgcgcgttggcgttgaatcccaaag

SEQ ID NO: 559483 - DNA, 75 bp, synthetic construct
  source 1..75: mol_type = other DNA
aaaattgaaaaaataagaaacgaattagacacgataaaggacagttttttcaataagataagagattttaaggac

SEQ ID NO: 559484 - DNA, 75 bp, synthetic construct
  source 1..75: mol_type = other DNA
gtggtagagcggattagtcatcgtgtggcggtgatgtatctcgggcaaattgttgaaattggtccacggcgcgcg

SEQ ID NO: 559485 - DNA, 75 bp, synthetic construct
  source 1..75: mol_type = other DNA
gctgttagctgctgttccgcaacttggtgcgatgaaagggttagattatccccgacgtttcccattgatatcgct

SEQ ID NO: 559486 - DNA, 75 bp, synthetic construct
  source 1..75: mol_type = other DNA
cgacctatacgctgttttacatcatgaccgtctattcaatgaccttcagtaccgccgccgcgccagtcgggcttg

SEQ ID NO: 559487 - DNA, 75 bp, synthetic construct
  source 1..75: mol_type = other DNA
acgggctaggtgcagtggggttatatctggcgacaatggctggcttgacgttaattgccctgctgctgacgcatg

SEQ ID NO: 559488 - DNA, 75 bp, synthetic construct
  source 1..75: mol_type = other DNA
atcgcagcctggttgcagactaactacgggctaggtgcagtggggttatatctggcgacaatggctggcttgacg

SEQ ID NO: 559489 - DNA, 75 bp, synthetic construct
  source 1..75: mol_type = other DNA
gtcacaggctgacattatcgaccgttttaatgcactggaaacccgccatcagcaggacagccagaaaatcacgtc

SEQ ID NO: 559490 - DNA, 75 bp, synthetic construct
  source 1..75: mol_type = other DNA
gattggcttcttctttgccaacggcactttcttgctgctttcctggctactgaccgacgagcagtttatgagctg

SEQ ID NO: 559491 - DNA, 75 bp, synthetic construct
  source 1..75: mol_type = other DNA
tttggcgtgatggtgccggtagccggattgctggctgatgcctttggtcgtcgtaaaagcatggtaatcatcacc

SEQ ID NO: 559492 - DNA, 75 bp, synthetic construct
  source 1..75: mol_type = other DNA
tgacgcagagcatgcaggctgcgatgatgcgcggcgacgaagcctacagcggcagtcgtagctactatgcgctga

SEQ ID NO: 559493 - DNA, 75 bp, synthetic construct
  source 1..75: mol_type = other DNA
ggttgcggtcggcgatgtggtgtgctgctatgcacgctgtgtccagaaaggggacgacatcgggtcagcattaat

SEQ ID NO: 559494 - DNA, 75 bp, synthetic construct
  source 1..75: mol_type = other DNA
tcaccaacgatagtgcttcctatctgcataccttcggcgtgacggaagggttgctgtcagacagtcccttttatg

SEQ ID NO: 559495 - DNA, 75 bp, synthetic construct
  source 1..75: mol_type = other DNA
agaaccgagccagaccccgcaaggtgatcactgaggcgatacgcgctgacattatcgatcgctctgcaaaaggtc

SEQ ID NO: 559496 - DNA, 75 bp, synthetic construct
  source 1..75: mol_type = other DNA
atgtctacaacacataacgtccctcagggcgatcttgttttacttattttagccatccccgccgataccaatgcc

SEQ ID NO: 559497 - DNA, 75 bp, synthetic construct
  source 1..75: mol_type = other DNA
tctgaaccacttgggcaacgctataaagcgacagaagcattatttaagtatgtcgctgtagatcctgaaggaaag

SEQ ID NO: 559498 - DNA, 75 bp, synthetic construct
  source 1..75: mol_type = other DNA
aagcgacagaagcattatttaagtatgtcgcggttatcctgaaggaaaacctcgcgccttacctgttgagtaata

SEQ ID NO: 559499 - DNA, 75 bp, synthetic construct
  source 1..75: mol_type = other DNA
cgggggagctggcgagcgctgggcagcatcggtgggcgaaccatcttactgctgctggtcagcttctggctggta

SEQ ID NO: 559500 - DNA, 75 bp, synthetic construct
  source 1..75: mol_type = other DNA
tccaggctgccagtctggtgaagcccgatgctgtcagcctggtgatgctcggcctgttcagcgcctttctgctgc

SEQ ID NO: 559501 - DNA, 75 bp, synthetic construct
  source 1..75: mol_type = other DNA
atgactgactcccaactcgccgcctttcaggccgccagcctgagcaaaccagagaccgtcagtctactggtgctc

SEQ ID NO: 559502 - DNA, 75 bp, synthetic construct
  source 1..75: mol_type = other DNA
gcaatgtggtcgttgaaaacggtatgccggtattcattcatgacgacggcaaagagatcccgttcgatgcggtcg

SEQ ID NO: 559503 - DNA, 75 bp, synthetic construct
  source 1..75: mol_type = other DNA
agaagaaactgatcgacgctggtgccgttgaccaggtgaaggccgaaatcaccaaggtgttccagcagcagctgg

SEQ ID NO: 559504 - DNA, 75 bp, synthetic construct
  source 1..75: mol_type = other DNA
ccacgctgaccgcgcaacagcagcaggccacacgcagcgacggcaatgccacgcaggcactattccggcgactgc

SEQ ID NO: 559505 - DNA, 75 bp, synthetic construct
  source 1..75: mol_type = other DNA
atgcacgaaataaccctctgccaacgggcactggaattgatcgaacagcaggccgcaaaacacggcgcaaaacgc

SEQ ID NO: 559506 - DNA, 75 bp, synthetic construct
  source 1..75: mol_type = other DNA
cacggtactgaggaaaacttcgagcgggtagagaagatgtcgccagaagcgtttgaagagagcgtagatgccatt

SEQ ID NO: 559507 - DNA, 75 bp, synthetic construct
  source 1..75: mol_type = other DNA
tgccgcgctgggcgtcagagaaagagatgacgcgctttatgaacctggcttttcaacatatggccgataccgcag

SEQ ID NO: 559508 - DNA, 75 bp, synthetic construct
  source 1..75: mol_type = other DNA
gtggataaaacaaaatcgaatgacaacaataatgtgtttataaaaaattacctgataatattcctgggttacttt

SEQ ID NO: 559509 - DNA, 75 bp, synthetic construct
  source 1..75: mol_type = other DNA
gcaaaatatgtgccgaaatagagcaggaaacaaacctgaaaaacctacgtgcgatgcgtcgcggcaagattactg

SEQ ID NO: 559510 - DNA, 75 bp, synthetic construct
  source 1..75: mol_type = other DNA
aagggattgatagaagcggattctataagctaatgaagaaatacgaaattcaggtaaagattaacgttcaagttt

SEQ ID NO: 559511 - DNA, 75 bp, synthetic construct
  source 1..75: mol_type = other DNA
tccccgcttctgcctgcgccccctttgccgttgaacgcatggcggcgttgttaaaacaaaccgacgaccccgttt

SEQ ID NO: 559512 - DNA, 75 bp, synthetic construct
  source 1..75: mol_type = other DNA
ttcagcgacggtattcgtacgcaactgtcaagcggtcaggcgctgaaagaagcccggtgtacctgtggggccagc

SEQ ID NO: 559513 - DNA, 75 bp, synthetic construct
  source 1..75: mol_type = other DNA
gataacttatttattctgccggtcgctgagtgtatttcgctcggttgggatagcagccgccagacgctggatgcg

SEQ ID NO: 559514 - DNA, 75 bp, synthetic construct
  source 1..75: mol_type = other DNA
attgttgttgctggtgctggtggagttgcgccgttttcgccagacgccaccacaagcggcagcgtccgacagtta

SEQ ID NO: 559515 - DNA, 75 bp, synthetic construct
  source 1..75: mol_type = other DNA
aagtaggtattaaatcagaggaactccataaaggtgaatctgtacaacactatgctatgcgcgttcttgctcagc

SEQ ID NO: 559516 - DNA, 75 bp, synthetic construct
  source 1..75: mol_type = other DNA
ccgcaggtaatgatgacaaaaacccgcgcctgggcgctggacgcagaaactgcgcctgtcgcaccactgccttct

SEQ ID NO: 559517 - DNA, 75 bp, synthetic construct
  source 1..75: mol_type = other DNA
ccgaagtccgtcaacgggcagttcgtatggttctggaaagtcaggatgaatatgactcacagtgggcggcaattt

SEQ ID NO: 559518 - DNA, 75 bp, synthetic construct
  source 1..75: mol_type = other DNA
atgcagcagaaaaaatattcctttaattatctgctttttaagcagggtttcataaaaagaagaatgcttgttaat

SEQ ID NO: 559519 - DNA, 75 bp, synthetic construct
  source 1..75: mol_type = other DNA
gtaccagatcgatcccgcgacctatcaggcaaattatgacagcgcgaaaggcgaactggcgaaaagtgaagccgc

SEQ ID NO: 559520 - DNA, 75 bp, synthetic construct
  source 1..75: mol_type = other DNA
gcactgctgatgctggattctgccaaaggacggcagattgaagttgaagcgaccggtccacaggaagaggaagca

SEQ ID NO: 559521 - DNA, 75 bp, synthetic construct
  source 1..75: mol_type = other DNA
agccaggacctggcgcgcgagcaaattcgccaggcgcaggatggtcacttaccgactctggatttgacggcctct

SEQ ID NO: 559522 - DNA, 75 bp, synthetic construct
  source 1..75: mol_type = other DNA
accgactctggatttaacggcttctaccgggatttctgacacctcatatagcggttcgaaaacccgaggtgccgc

SEQ ID NO: 559523 - DNA, 75 bp, synthetic construct
  source 1..75: mol_type = other DNA
gtggtgaactcaacaagttacgtgcgggtttatcagcgtgtcggtgatagcgataaataccagcctgtcgtgctg

SEQ ID NO: 559524 - DNA, 75 bp, synthetic construct
  source 1..75: mol_type = other DNA
tatggttctggaaagtcaggacgaatatgactcacaatgggcgacaatttgttccattgctccaaagactggctg

SEQ ID NO: 559525 - DNA, 75 bp, synthetic construct
  source 1..75: mol_type = other DNA
aataaaaaaagtaatggcgaaataacacttgcgctctatccaagttcccaattgggctcaaaacaggatgtcacc

SEQ ID NO: 559526 - DNA, 75 bp, synthetic construct
  source 1..75: mol_type = other DNA
aaggagagtaatggagatattgtttttgagctttatcccagctcacagttaggttctaaacaggatattactgaa

SEQ ID NO: 559527 - DNA, 75 bp, synthetic construct
  source 1..75: mol_type = other DNA
tgctgttacgtaatgacgaaggcaccgaggccgaagccaacagcgttattgcgctgctgatgttagattctgcca

SEQ ID NO: 559528 - DNA, 75 bp, synthetic construct
  source 1..75: mol_type = other DNA
gcttggtctgccgaaaccgcagcaagggccggaaaccattaacaaggttaccgagcataagatgtctgccgagta

SEQ ID NO: 559529 - DNA, 75 bp, synthetic construct
  source 1..75: mol_type = other DNA
tatggttctggaaagtcaggacgaatatgactcacaatgggcgccaatttgttccattgctccaaagaatggctg

SEQ ID NO: 559530 - DNA, 75 bp, synthetic construct
  source 1..75: mol_type = other DNA
tggaagaactggctacccttcccgatgccacccgcaaacgcgcacaggcgctggtcgctaaaggcatcaccattg

SEQ ID NO: 559531 - DNA, 75 bp, synthetic construct
  source 1..75: mol_type = other DNA
accttacaccggtcatccattcgatgttggtgacttttttagaattgccatataataatgatgtaaaaatactgg

SEQ ID NO: 559532 - DNA, 75 bp, synthetic construct
  source 1..75: mol_type = other DNA
tatattgccatttattgaccaacagcgtttaaatacactaaatcctccggaaaatttacgtatagcaatagaaaa

SEQ ID NO: 559533 - DNA, 75 bp, synthetic construct
  source 1..75: mol_type = other DNA
atctgatggttcgactaatcgttatgaagggaagtcctttgaaagaaaagatgagagttcattacacctgattac

SEQ ID NO: 559534 - DNA, 75 bp, synthetic construct
  source 1..75: mol_type = other DNA
agttaaataatatacaggagttaaataattcgcaggagttaaataattcgcaggagttaaataactcgcaggact

SEQ ID NO: 559535 - DNA, 75 bp, synthetic construct
  source 1..75: mol_type = other DNA
ccggatgctgaaaaaagacggcaaggactccgatatccggattggcgatctgccgattaaccctgctggacggtg

SEQ ID NO: 559536 - DNA, 75 bp, synthetic construct
  source 1..75: mol_type = other DNA
atgatagttcattacatctgattactaacaaggttctggcgtgttaccaacgcgaagctaacaagaatatggcgc

SEQ ID NO: 559537 - DNA, 75 bp, synthetic construct
  source 1..75: mol_type = other DNA
tattcttattgattccttagatgatgcaaaagttaatctcgaaaaggtcatcgattcgatgttgaagactttttt

SEQ ID NO: 559538 - DNA, 75 bp, synthetic construct
  source 1..75: mol_type = other DNA
tcttatcgagcaggcaatcgaacagccattggatcctcagcgtctggccctgggggttcgaaacgaagaagaggc

SEQ ID NO: 559539 - DNA, 75 bp, synthetic construct
  source 1..75: mol_type = other DNA
tgcgggtactgtatccggcgctggctgacaactggcagatgtcggcggcacagattggttttctctatgcggcga

SEQ ID NO: 559540 - DNA, 75 bp, synthetic construct
  source 1..75: mol_type = other DNA
cggtgatttcgcccatgattggcggtttattgctggcgaccggaggcgtagcctggaactacgggctggcggcgg

SEQ ID NO: 559541 - DNA, 75 bp, synthetic construct
  source 1..75: mol_type = other DNA
ttaaaaattagaacaagaatgatgaaaatcctccggaatggcaaaatcaatatatataaatatataaatatataa

SEQ ID NO: 559542 - DNA, 75 bp, synthetic construct
  source 1..75: mol_type = other DNA
tttcaatctcgataaagaaccctataaaaatagccctgaattacaggagttgatttggaataagttggttgtata

SEQ ID NO: 559543 - DNA, 75 bp, synthetic construct
  source 1..75: mol_type = other DNA
tctggcattgccggagaagcaaagcttgatcatctgcggctggtagactggcccccagaatctccagacaaccag

SEQ ID NO: 559544 - DNA, 75 bp, synthetic construct
  source 1..75: mol_type = other DNA
gcaggtaatcagcggcgaaggtgaagataatctcctgacgttatcccttccggcatctgcctgttctccttttgc

SEQ ID NO: 559545 - DNA, 75 bp, synthetic construct
  source 1..75: mol_type = other DNA
gcccagttttgcctcctgagtgaaaaacataacagtattaattctcttgctaaggaacttaacaagagtagatgt

SEQ ID NO: 559546 - DNA, 75 bp, synthetic construct
  source 1..75: mol_type = other DNA
aggtacgcgcaaccgcttaagtagcgttgtgccactgtcacctgatgcctggcaaatgctgggggcaccgttacg

SEQ ID NO: 559547 - DNA, 75 bp, synthetic construct
  source 1..75: mol_type = other DNA
catgtcgtactggcggtacaggccttcgtcgaggccaaagcgcagcaagcagaatttaaccatttaatctggcag

SEQ ID NO: 559548 - DNA, 75 bp, synthetic construct
  source 1..75: mol_type = other DNA
ggcgttaagcaatgccggttttgttaagcgcagtcttaaggaactggaaaatggcaacgtcccggaaatcagcca

SEQ ID NO: 559549 - DNA, 75 bp, synthetic construct
  source 1..75: mol_type = other DNA
cgtcagatgcaactggtgccgtgacggtgggagttgtggcgaagggcacacatcagaactcaatggcacagggga

SEQ ID NO: 559550 - DNA, 75 bp, synthetic construct
  source 1..75: mol_type = other DNA
cagaagttaaataatctacagaagttaaataatatacaggagttaaataattcgcaggagttaaataattcgcag

SEQ ID NO: 559551 - DNA, 75 bp, synthetic construct
  source 1..75: mol_type = other DNA
tgtatttaataaagtgcctgtcagcattttagtaaatgatatttttctgaaggatttttttatgaaaaatcctga

SEQ ID NO: 559552 - DNA, 75 bp, synthetic construct
  source 1..75: mol_type = other DNA
atgaaaccttgtttagccgtatatgtcggtcagttactgtgtatggtatgtctccttctaccatgttacaaatcc

SEQ ID NO: 559553 - DNA, 75 bp, synthetic construct
  source 1..75: mol_type = other DNA
cttctgcagctcactgaaaatatccgctctgaacaagataccctcttaacctacaacctgtttttcaaccaaaag

SEQ ID NO: 559554 - DNA, 75 bp, synthetic construct
  source 1..75: mol_type = other DNA
ttgcatccggacgtagcaccactgctgttggttcgtgaatgcatgccagaccagttcgcatcgctgggaactgca

SEQ ID NO: 559555 - DNA, 75 bp, synthetic construct
  source 1..75: mol_type = other DNA
tcgtggttgatgtcagaagctttacgattacacatcctgctgaacccgaagaaatcgttatccctgactacccgg

SEQ ID NO: 559556 - DNA, 75 bp, synthetic construct
  source 1..75: mol_type = other DNA
gatctcatcccccttaatatttcggatgatgtaagaaaaaataacattccaaaacttaagccatctggattttta

SEQ ID NO: 559557 - DNA, 75 bp, synthetic construct
  source 1..75: mol_type = other DNA
tgaaccgtgctcccttacatatcaggaagcagactaagcctcgccagaacggtttgtttaaacgttttacactgc

SEQ ID NO: 559558 - DNA, 75 bp, synthetic construct
  source 1..75: mol_type = other DNA
agtgttacatgggtgccgttatgtaatgatttttatgacaattttgattatttgaaaattgagtttacaactgat

SEQ ID NO: 559559 - DNA, 75 bp, synthetic construct
  source 1..75: mol_type = other DNA
ctgacgcaggccgttgggcgcgactcacgcagtcgtggcaaccgtcgctggtacaccactggccctgtcggtctg

SEQ ID NO: 559560 - DNA, 75 bp, synthetic construct
  source 1..75: mol_type = other DNA
cagccgattgtggcaacaggaactacaagcagaagaccagcagcaaaatcttaccgtgatcccaataaggtcagt

SEQ ID NO: 559561 - DNA, 75 bp, synthetic construct
  source 1..75: mol_type = other DNA
caagtgcagccgatggtgactgaggtccctgtcgccgccgctgtcgaacctgttgttagcgcgccagttgttgaa

SEQ ID NO: 559562 - DNA, 75 bp, synthetic construct
  source 1..75: mol_type = other DNA
attcttcaatactgatattaaaagctttttcccatcgataactcgtgaatatgcacgatcagttttagttgataa

SEQ ID NO: 559563 - DNA, 75 bp, synthetic construct
  source 1..75: mol_type = other DNA
atgcgcatgtaatgttgacattaaaacagatcaccgctgatggctttggcaaaaaagaaagaaactggaatgaca

SEQ ID NO: 559564 - DNA, 75 bp, synthetic construct
  source 1..75: mol_type = other DNA
ttcccaagccgtcctaagcgagttcaattagagtcagagagcggtatggatgtcctccctaaaaataatcaattt

SEQ ID NO: 559565 - DNA, 75 bp, synthetic construct
  source 1..75: mol_type = other DNA
agcgtatcgcagagaactatgtctatgatgaagtgctgggtgtcaatgttccacgctcagagtttgaaaaacgta

SEQ ID NO: 559566 - DNA, 75 bp, synthetic construct
  source 1..75: mol_type = other DNA
aggtttatacaacattcagtgagctaccactggagatcgttgttgatgtcagaagatttacgatatctgttcttc

SEQ ID NO: 559567 - DNA, 75 bp, synthetic construct
  source 1..75: mol_type = other DNA
tttaaaaattgagtttacaactgatggggtgcattttaataaaatcgcatatcagtacctagagaattatattaa

SEQ ID NO: 559568 - DNA, 75 bp, synthetic construct
  source 1..75: mol_type = other DNA
caagaaaaccgttaatgtggcggatattgagtccgtggtggcccgtattgcacgcattccagagaagagtgtttc

SEQ ID NO: 559569 - DNA, 75 bp, synthetic construct
  source 1..75: mol_type = other DNA
ttttagacgacaatgaaactggatggggttctaccgaattcatagttatgcgtcctaaaaaagaaatccatcctt

SEQ ID NO: 559570 - DNA, 75 bp, synthetic construct
  source 1..75: mol_type = other DNA
atttttgatggcagctacatccttatttctgaagatggagaaaacttaaattccagaaaaacacctatagcattt

SEQ ID NO: 559571 - DNA, 75 bp, synthetic construct
  source 1..75: mol_type = other DNA
tgcagtcgccagcgcgattgaccagcgcagacgtcataaccagcaaccagcagagaccgaacaacagccaggcaa

SEQ ID NO: 559572 - DNA, 75 bp, synthetic construct
  source 1..75: mol_type = other DNA
ttggttgcgctccgtcaggaactggaagcctttattgaacaaaccacacccgttctgcctgccagtgaagaggag

SEQ ID NO: 559573 - DNA, 75 bp, synthetic construct
  source 1..75: mol_type = other DNA
cttccatgtccagtcctccggtcgcaatgaggtaaccggtgcaaacgttctggtcgctatctttagcgaacagga

SEQ ID NO: 559574 - DNA, 75 bp, synthetic construct
  source 1..75: mol_type = other DNA
atatactgattatgagagctttgctttattacaaccaacttcaccctttagagattcgacccatattattgaggc

SEQ ID NO: 559575 - DNA, 75 bp, synthetic construct
  source 1..75: mol_type = other DNA
aaaaaaaaattattggataatgctattatcaaacgaattgtcgataaaaaagatttatttaacaaagttgagcaa

SEQ ID NO: 559576 - DNA, 75 bp, synthetic construct
  source 1..75: mol_type = other DNA
ggaagagttgatagggataataatactatcaataaattaaatctggcaatgaaacaatattttagtaaattagac

SEQ ID NO: 559577 - DNA, 75 bp, synthetic construct
  source 1..75: mol_type = other DNA
tcctctctcgatgacaaaatagacctgcttcatcatcaaaataaaacacttgaattaatggctgaaaccatgttt

SEQ ID NO: 559578 - DNA, 75 bp, synthetic construct
  source 1..75: mol_type = other DNA
aatagccaaatcgatttggttggatgtaagtttatatccaaacaacaagcattgtctctacgtaaaggattcgca

SEQ ID NO: 559579 - DNA, 75 bp, synthetic construct
  source 1..75: mol_type = other DNA
agccacctgctgcacgttaccggtacggcagataaagggcgaaacgcctggctccactacatcagccagacagga

SEQ ID NO: 559580 - DNA, 75 bp, synthetic construct
  source 1..75: mol_type = other DNA
caaccacctaatgagaatcagcgttttccggatcgtcatctcaaccctatacctcctgtaaatgattttgaatgc

SEQ ID NO: 559581 - DNA, 75 bp, synthetic construct
  source 1..75: mol_type = other DNA
tcgtattgatggtcatcagggcgaaaatattacctggtctctgtcatcgcagtctcctgccgataagtatgatct

SEQ ID NO: 559582 - DNA, 75 bp, synthetic construct
  source 1..75: mol_type = other DNA
taataatattgatgctgaccttttaatggttatcggagggcttgttgttatattgtttctcatgatgcttgtcat

SEQ ID NO: 559583 - DNA, 75 bp, synthetic construct
  source 1..75: mol_type = other DNA
ctggcgagatggtaggcagggtaatttaccgccttattcagttgggtcagagtatcagcgactggtgggactctc

SEQ ID NO: 559584 - DNA, 75 bp, synthetic construct
  source 1..75: mol_type = other DNA
cttccggcttattgaggggacatccagccttattacctggtggcaatcgctggataagcaaacccgggagctgat

SEQ ID NO: 559585 - DNA, 75 bp, synthetic construct
  source 1..75: mol_type = other DNA
cgtcgaaggaactgcgctgtccgtggtgaccctcacggctaagatcgcctccggtctggataatctttactgggc

SEQ ID NO: 559586 - DNA, 75 bp, synthetic construct
  source 1..75: mol_type = other DNA
gccagcggtaacatgcgtgacatggcctctatttttacaggtgtaggccagaagctcagcggcatgccgtattac

SEQ ID NO: 559587 - DNA, 75 bp, synthetic construct
  source 1..75: mol_type = other DNA
tcggggacattatagggcggctgttcttccggcttattgaggggacatccagccttatcacctggtggcaatcgc

SEQ ID NO: 559588 - DNA, 75 bp, synthetic construct
  source 1..75: mol_type = other DNA
tcgcctgggcgtacagacccgtgacgccagcggcaacatgcgcgacatggccgctatctttacgggcgtcggcca

SEQ ID NO: 559589 - DNA, 75 bp, synthetic construct
  source 1..75: mol_type = other DNA
gaaagatgcttatgcgatcggcaagaacctgctggcacaagggcaaggccaggatgctctacctgcagtatctga

SEQ ID NO: 559590 - DNA, 75 bp, synthetic construct
  source 1..75: mol_type = other DNA
gcgtggtggatgctcaaccgcgctatgctcgcatcgccgattacgtgggttctcggtcttgccgctgccatagct

SEQ ID NO: 559591 - DNA, 75 bp, synthetic construct
  source 1..75: mol_type = other DNA
tattcaatcctgaaaaggccgcgcaggccgctgctaaatatctctcacagctgctgaaagctaacggtggtgacc

SEQ ID NO: 559592 - DNA, 75 bp, synthetic construct
  source 1..75: mol_type = other DNA
ttttcgacccggagaaggccgcgcaggcagccgcaaagtatctttcacagctgctgcaggcgaacggcggtgacc

SEQ ID NO: 559593 - DNA, 75 bp, synthetic construct
  source 1..75: mol_type = other DNA
ttcagcgctcagtattcagaaatggtgaaagcgatcggcttcaatgctgacgaggcggccagaagctccaacaaa

SEQ ID NO: 559594 - DNA, 75 bp, synthetic construct
  source 1..75: mol_type = other DNA
cggcgagcatagccgcctgcaggtggcgttccagggccagggtattaaatggctggtggcggcttacgcccggct

SEQ ID NO: 559595 - DNA, 75 bp, synthetic construct
  source 1..75: mol_type = other DNA
gtctgcttaagcgtttgatcaaggcgatgaatctcgacgagaagcagtggccgccgcgtcaggcaatgtggtaca

SEQ ID NO: 559596 - DNA, 75 bp, synthetic construct
  source 1..75: mol_type = other DNA
gaagtgttgctttattactatttgcattttctctagcttttgttcaatcttgttatgagaaaataataaaaaatt

SEQ ID NO: 559597 - DNA, 75 bp, synthetic construct
  source 1..75: mol_type = other DNA
ggggggggggcagtggtaagacgcgcgtactggtgcatcgtatcgcctggctgatgagcgtggaaaactgctcgc

SEQ ID NO: 559598 - DNA, 75 bp, synthetic construct
  source 1..75: mol_type = other DNA
cggcctgcgcaccatgtacgagcaggagaagggcgaaaaaggtcagacgcgtatcgaaaacttagaggaactggt

SEQ ID NO: 559599 - DNA, 75 bp, synthetic construct
  source 1..75: mol_type = other DNA
tgcagaaactgacgctgacctacgcggaaacccgccgtctgtatggcaaagaggtttaccatcgcccgtcgcgct

SEQ ID NO: 559600 - DNA, 75 bp, synthetic construct
  source 1..75: mol_type = other DNA
ttaaaccggaagcggtcagttgcaatttgttgtccctgtgtatgctggccccggtattctgtactcccaaaaagc

SEQ ID NO: 559601 - DNA, 75 bp, synthetic construct
  source 1..75: mol_type = other DNA
cctgacagtggccacttttatgaaccgggcacggctctggattatcgtgaacgggtacgcctttttattcagatc

SEQ ID NO: 559602 - DNA, 75 bp, synthetic construct
  source 1..75: mol_type = other DNA
tcagcgagtcagcttgggaagaaatgacctgcttattcgcaccttccttaaaccggaggcggtcagctgtaattt

SEQ ID NO: 559603 - DNA, 75 bp, synthetic construct
  source 1..75: mol_type = other DNA
ccactgcagcctatgctgtcggttacgaaagcttatcccatttcagtcgggaatattcgcggatgtttggagagt

SEQ ID NO: 559604 - DNA, 75 bp, synthetic construct
  source 1..75: mol_type = other DNA
acgggtacgcctttttattcagatccagtttccgcacgggagtgactggtctgaagtattgcgcctgactgacat

SEQ ID NO: 559605 - DNA, 75 bp, synthetic construct
  source 1..75: mol_type = other DNA
taatattgatactgaccttttagtggttatcggagggcttattgttatattgtttctcatgatgcttgtcatgta

SEQ ID NO: 559606 - DNA, 75 bp, synthetic construct
  source 1..75: mol_type = other DNA
atcttcggtttcgccatgatctggcatatctggtggctagcgattgttggcttcgcaggcatgatcatcacctgg

SEQ ID NO: 559607 - DNA, 75 bp, synthetic construct
  source 1..75: mol_type = other DNA
caagagcgaacgggaggcgtgcagttacctcgacagcctgccagcctccgaacgcagccgcgcacaacgcgcggc

SEQ ID NO: 559608 - DNA, 75 bp, synthetic construct
  source 1..75: mol_type = other DNA
gacgaaaaaatggggccagagccgattatcaaagggctctgggcggtaaccgtggttgccaccatcgtaatcctg

SEQ ID NO: 559609 - DNA, 75 bp, synthetic construct
  source 1..75: mol_type = other DNA
accgtcgtcgcatgaaggcgaatcagattcgtcgtgcggtgaaacgtcacagtcaggtgagcggcggtcgtcgtt

SEQ ID NO: 559610 - DNA, 75 bp, synthetic construct
  source 1..75: mol_type = other DNA
acagaacgccccgtgtcacagccagtaccaaccgcacagataaccaatcagatggccggaaatatcagggcgtta

SEQ ID NO: 559611 - DNA, 75 bp, synthetic construct
  source 1..75: mol_type = other DNA
ttctctgcctcgttattcagatgtacgtttctattcgtgaccgcgaccagaaccgtgacctgactggcgacccgt

SEQ ID NO: 559612 - DNA, 75 bp, synthetic construct
  source 1..75: mol_type = other DNA
cacgcaaaatgagccaggggaaacgacacaaccaggcgcttatcgccctggcaagacggcgctgcgacattctgt

SEQ ID NO: 559613 - DNA, 75 bp, synthetic construct
  source 1..75: mol_type = other DNA
tcggcgatccggctcgtcaatacgcggtgagcatccctcgcgacgggactttttataccccgcaggcgtcataac

SEQ ID NO: 559614 - DNA, 75 bp, synthetic construct
  source 1..75: mol_type = other DNA
cctcaccgaggtcgcctgccgcgccttcgcctctgccgcgccttcgcctctgccgcacatctcgctgcttatgct

SEQ ID NO: 559615 - DNA, 75 bp, synthetic construct
  source 1..75: mol_type = other DNA
gattcgtcgactttttacaaaacccggttatcgtgatcattaacctgatcactctggcggcagctctgctgcaca

SEQ ID NO: 559616 - DNA, 75 bp, synthetic construct
  source 1..75: mol_type = other DNA
actctggcggcagccctgctgcacaccaaaacctggtttgagctggcaccgaaagcggccaatatcattgtaaaa

SEQ ID NO: 559617 - DNA, 75 bp, synthetic construct
  source 1..75: mol_type = other DNA
aaccgctgccgcgcgggaaatgttccctgacgctgattacgtatacgtggtggacttcactgatagagaggtgac

SEQ ID NO: 559618 - DNA, 75 bp, synthetic construct
  source 1..75: mol_type = other DNA
cgtggtggctggacggagctggatctcgcccagactaactatctgcgtgagctggtggaactgccgccagaaacc

SEQ ID NO: 559619 - DNA, 75 bp, synthetic construct
  source 1..75: mol_type = other DNA
aaggaaaaactgcgcacgcaggacggcgatccgcagaaccgcttccccgcaacgggcgcagtctccgaccagttg

SEQ ID NO: 559620 - DNA, 75 bp, synthetic construct
  source 1..75: mol_type = other DNA
gtcgattgaccatgacgctatcttacttcatgaaccgccagccgcatcgccagagcagggcgttggcctgatggt

SEQ ID NO: 559621 - DNA, 75 bp, synthetic construct
  source 1..75: mol_type = other DNA
tcagtgccagttcctgcaaggtggaattccgtcacggtaacatgacgctggaaaatccatcgccagagctgctca

SEQ ID NO: 559622 - DNA, 75 bp, synthetic construct
  source 1..75: mol_type = other DNA
cacatcctgtcaccactccccggtagcgagttttccgctatgggcgatgttgtggggttgagcgccgaagacata

SEQ ID NO: 559623 - DNA, 75 bp, synthetic construct
  source 1..75: mol_type = other DNA
cgagcgcatggtgcagatgaccgacaaagggcaaaaagtctattccagtattgagctgcatccgcagtttgccct

SEQ ID NO: 559624 - DNA, 75 bp, synthetic construct
  source 1..75: mol_type = other DNA
cattatctctcgccttatccaggcagtgattttggcgcgatgggggatgttacggcgcttagcgctgaggacatt

SEQ ID NO: 559625 - DNA, 75 bp, synthetic construct
  source 1..75: mol_type = other DNA
gctacggaagagatgaaagcccagggtgctgacagcgttgttaaaattatgtcgatcgaccatgacgctatttta

SEQ ID NO: 559626 - DNA, 75 bp, synthetic construct
  source 1..75: mol_type = other DNA
gaggcggtgatggcgggctcaccaccactgaacgtcagcgtctgaaagaactggaacgtgaaaatcgtgaactgc

SEQ ID NO: 559627 - DNA, 75 bp, synthetic construct
  source 1..75: mol_type = other DNA
tcgcgttctggcttattacaagccggaaggtgagttatgtacccgtaacgacccggaagggcgtccgacagtgtt

SEQ ID NO: 559628 - DNA, 75 bp, synthetic construct
  source 1..75: mol_type = other DNA
tagcacaactaaaattggttttcgtcgcagtacatttttacgcagctatatgtatgattttattcagcgttttgc

SEQ ID NO: 559629 - DNA, 75 bp, synthetic construct
  source 1..75: mol_type = other DNA
gatgccgatgttattaaaacgtatgtccggttaggtctgggggtaggggtgattgccagtatggccgttgatccg

SEQ ID NO: 559630 - DNA, 75 bp, synthetic construct
  source 1..75: mol_type = other DNA
gttctattgcccctaagattggctgtacaccggagactctgcacgtctgggtactccagcatgagcaggatattg

SEQ ID NO: 559631 - DNA, 75 bp, synthetic construct
  source 1..75: mol_type = other DNA
ccttcgcgtgaaataatgcaacgttatccaacaatccctactgtgatgatggactgggcgccgttcgatggcgac

SEQ ID NO: 559632 - DNA, 75 bp, synthetic construct
  source 1..75: mol_type = other DNA
agctgcgtccacaggatattttgttgccggattatgacgccgcaacggtagccgtgggcgaagatgcgatggaag

SEQ ID NO: 559633 - DNA, 75 bp, synthetic construct
  source 1..75: mol_type = other DNA
taccaacaaaaccgcgtggcgcgctgggtagacgatcaaaaaatcgttggccaggttgacccggtggcttgggtc

SEQ ID NO: 559634 - DNA, 75 bp, synthetic construct
  source 1..75: mol_type = other DNA
ggtttctgggatcgaggttcgttctacagccgcgtggtcgatattccgcaaatgggtacccattccaccgccgat

SEQ ID NO: 559635 - DNA, 75 bp, synthetic construct
  source 1..75: mol_type = other DNA
gtgcggtgggcgtttctggtttaaccggagcacaagatgcgcaggtcgcgaaagcagcggcagcggtgttggcga

SEQ ID NO: 559636 - DNA, 75 bp, synthetic construct
  source 1..75: mol_type = other DNA
aagatctacttatcgcattcgaaaaaactcgtggccctgacacgatgcttagtgaactagaggataatggcttta

SEQ ID NO: 559637 - DNA, 75 bp, synthetic construct
  source 1..75: mol_type = other DNA
ctcggcgtttcacataccgcgattgccaataagttgcgggaatatggtctgagtcagaagaagaacgaagagtaa

SEQ ID NO: 559638 - DNA, 75 bp, synthetic construct
  source 1..75: mol_type = other DNA
tcctctacccgctggaatgatggggtctccttcccgattcagtctggtcacggctgcctgggctgttctgaaaat

SEQ ID NO: 559639 - DNA, 75 bp, synthetic construct
  source 1..75: mol_type = other DNA
ctgggtgagcaggggatgttctgtatcagcagtggtcgaccgtttattgaaaaactcaaacgcgccgccgccgga

SEQ ID NO: 559640 - DNA, 75 bp, synthetic construct
  source 1..75: mol_type = other DNA
gaaactcaaacgtgcagctgccggagccagtgcaattattgcctggggcacctgtgcgtcctggggctgtgtgca

SEQ ID NO: 559641 - DNA, 75 bp, synthetic construct
  source 1..75: mol_type = other DNA
aggctatgcgacgtcagggggttacccggcgaagttttcttaaatattgcagtctggctgccacgtcgctgggat

SEQ ID NO: 559642 - DNA, 75 bp, synthetic construct
  source 1..75: mol_type = other DNA
gccagcgcgattatcgcctggggaacctgcgcgtcctggggctgcgtgcaggccgcgcggcccaatccgacgcag

SEQ ID NO: 559643 - DNA, 75 bp, synthetic construct
  source 1..75: mol_type = other DNA
ttctatggtcagcgaatccacgataaatgttatcgccgcgcccacttcgacgccggagagttcgtgcagagttgg

SEQ ID NO: 559644 - DNA, 75 bp, synthetic construct
  source 1..75: mol_type = other DNA
cagctgatatcaccaaagaagtcatggctctggttgaaaaagaaaatctggtttttaatcagttacccaaagtgg

SEQ ID NO: 559645 - DNA, 75 bp, synthetic construct
  source 1..75: mol_type = other DNA
ctggcccttcgtggcggtttaacgaatacctcagtgtgtatgcaatggctggtatgggggttgcaaaagtcacca

SEQ ID NO: 559646 - DNA, 75 bp, synthetic construct
  source 1..75: mol_type = other DNA
atttttgtttctcattctgtttatcgtattgatgataccgatatccccgctaatttttgtctgggcaatcgggaa

SEQ ID NO: 559647 - DNA, 75 bp, synthetic construct
  source 1..75: mol_type = other DNA
gctttatcggcagcaacatcgttaaagccctgaatgataaaggcatcaccgatattctggtggtggacaacctga

SEQ ID NO: 559648 - DNA, 75 bp, synthetic construct
  source 1..75: mol_type = other DNA
ccgtactgtactgattactttaggaagtcgtggtgtatgggctagcgtgaatggtgaaggtcagcgcgttcctgg

SEQ ID NO: 559649 - DNA, 75 bp, synthetic construct
  source 1..75: mol_type = other DNA
cctcaggccgtctttaccggaaatgacgctatggctgttggcgtttaccaggcgttatatcaggcagagttacag

SEQ ID NO: 559650 - DNA, 75 bp, synthetic construct
  source 1..75: mol_type = other DNA
tatggatgtcgcgtatgaaagctccggatctggtgactggcgcacgagcggggttgttgtaggtattggcctgaa

SEQ ID NO: 559651 - DNA, 75 bp, synthetic construct
  source 1..75: mol_type = other DNA
gcccgaccgaagtcggccccgtacgccccaccataattcgtgtgcgaaaaagacgtggcgatacagtacgcacaa

SEQ ID NO: 559652 - DNA, 75 bp, synthetic construct
  source 1..75: mol_type = other DNA
gcagtaccggcaaacgcagaacccggcccgaccgaagtcggccccgtacgccccaccataattcgtgtgcgaaaa

SEQ ID NO: 559653 - DNA, 75 bp, synthetic construct
  source 1..75: mol_type = other DNA
cctggaataaagcctgtgagacggttggtagctcttcgcgcaatcatgtttcgatctccggtcggttactcagtc

SEQ ID NO: 559654 - DNA, 75 bp, synthetic construct
  source 1..75: mol_type = other DNA
gatatcctggtggtggacaacctgaaagacggcaccaagtttgtgaacctggttgacctgaatatcgcagactat

SEQ ID NO: 559655 - DNA, 75 bp, synthetic construct
  source 1..75: mol_type = other DNA
attagttgaaccagttattgagttatataccgacgtgacatcggagccattcaacgcactgcacagtaaaattaa

SEQ ID NO: 559656 - DNA, 75 bp, synthetic construct
  source 1..75: mol_type = other DNA
aataattgagccagttattgaattgtataacgacgtggtatgggcgtcgttcaacacattgcacaacaaaatcaa

SEQ ID NO: 559657 - DNA, 75 bp, synthetic construct
  source 1..75: mol_type = other DNA
cggttacaggccgccgctgttctgatgccatattttcacgaaacactaaacccgtgcttccaggaggaggaagaa

SEQ ID NO: 559658 - DNA, 75 bp, synthetic construct
  source 1..75: mol_type = other DNA
cggtcgttggcggattgatagccggttatctgatgcgctgggtgaaaaatcatctacgtcttagcagtaaattca

SEQ ID NO: 559659 - DNA, 75 bp, synthetic construct
  source 1..75: mol_type = other DNA
cagtaaaacataacgagagcatacctgaacgcgaagcccaaaaacttgaaatagagaggatgttttggcagttga

SEQ ID NO: 559660 - DNA, 75 bp, synthetic construct
  source 1..75: mol_type = other DNA
ggaggcttaagccggatgtttatccgattgtggaactacgcgcgatgatctcatcaatctttgatgtcgatgaac

SEQ ID NO: 559661 - DNA, 75 bp, synthetic construct
  source 1..75: mol_type = other DNA
ttagggcagttatggttggctggcgtcagcctagattggcgctgggtggatgcggcggagcgtatgttgggcagt

SEQ ID NO: 559662 - DNA, 75 bp, synthetic construct
  source 1..75: mol_type = other DNA
gattcatacttttgacgcgcaggcgagcggtacggtctacagcagtggtttgggcatggtgctgctcaaacgggc

SEQ ID NO: 559663 - DNA, 75 bp, synthetic construct
  source 1..75: mol_type = other DNA
ttttgcgggaattgcgtctcatcgcccgtgcacatgaggaagcagcaaaagttatcgcagctgctggaagaccag

SEQ ID NO: 559664 - DNA, 75 bp, synthetic construct
  source 1..75: mol_type = other DNA
acctatctgttagggctatggggtaatgactccaacttattgatagtgttttatgttcagataatgcccgatgac

SEQ ID NO: 559665 - DNA, 75 bp, synthetic construct
  source 1..75: mol_type = other DNA
tcctgccctcctttattctgatctccgcagctttaatcgccggttgtaacgataagggagaagagaaagctcacg

SEQ ID NO: 559666 - DNA, 75 bp, synthetic construct
  source 1..75: mol_type = other DNA
cggcccgtatgccattttcgcctccgtcaaaatggtttcggcatttaccgtaaccgcttccacgatgctcgcacc

SEQ ID NO: 559667 - DNA, 75 bp, synthetic construct
  source 1..75: mol_type = other DNA
gcgatgcgttgtgtctgaatgcgcgctttaccagccgtgaagaggccatccatgcgttgactcaacgtcttgctg

SEQ ID NO: 559668 - DNA, 75 bp, synthetic construct
  source 1..75: mol_type = other DNA
gtgaccgaggaattactgcagcctttaaaaaaacagcgttatccggagatgaagaaagtattgagttactgcata

SEQ ID NO: 559669 - DNA, 75 bp, synthetic construct
  source 1..75: mol_type = other DNA
ggcggcattcacgctgtttatggtggctgatatggcggtgatctcgccattctatgggcaagaggcagcttggca

SEQ ID NO: 559670 - DNA, 75 bp, synthetic construct
  source 1..75: mol_type = other DNA
gctctttcaggcgttcgataccctgaatctgcaacgggtaaaaacatttagcgttccaccggtgacgctttgcgg

SEQ ID NO: 559671 - DNA, 75 bp, synthetic construct
  source 1..75: mol_type = other DNA
gttccaccggtgacgctttgcggtccgggcgcggtgagcagttgcggacagcaagcgcaaacgcgtgggctgaaa

SEQ ID NO: 559672 - DNA, 75 bp, synthetic construct
  source 1..75: mol_type = other DNA
cgcatccgccagtggcgcggtgcaattgccggatgcgacgcttgccgcgtctgatccggcctacaggattgcaca

SEQ ID NO: 559673 - DNA, 75 bp, synthetic construct
  source 1..75: mol_type = other DNA
cctcgctgatgccggatgtcgcgattctcgacgccgcgctgaccgaaggcgtgccgtcgcatgtcacggcgatga

SEQ ID NO: 559674 - DNA, 75 bp, synthetic construct
  source 1..75: mol_type = other DNA
aaaggtatcgccatgacgctatggccatgtccggtgggcgaaccgtgcattaccgacgtgtgtgcggctgtggcg

SEQ ID NO: 559675 - DNA, 75 bp, synthetic construct
  source 1..75: mol_type = other DNA
ttaaccggatggtttgtcgtgaacgctttagtcagattggtcgggcactgcgaactaaaaatccgacgatcatga

SEQ ID NO: 559676 - DNA, 75 bp, synthetic construct
  source 1..75: mol_type = other DNA
atccagaaagcctaagcagtgaaattaaaagaatgcttgggattagagaaaaacaatatgactctgcaaatatga

SEQ ID NO: 559677 - DNA, 75 bp, synthetic construct
  source 1..75: mol_type = other DNA
ttaaataggaatatggtttcaataattggtggtagaggcactgggaaaagtatattccttgatgcaatgaaaaaa

SEQ ID NO: 559678 - DNA, 75 bp, synthetic construct
  source 1..75: mol_type = other DNA
ttccaatttgataaattgccttatgagtataagaaattatgatccttatataataagtaaagttttaacgatgga

SEQ ID NO: 559679 - DNA, 75 bp, synthetic construct
  source 1..75: mol_type = other DNA
tgtggattgggccgtgtggtacggcactccgctgccgcaacgcgggagcgcatcagcatatcccttcgcacacaa

SEQ ID NO: 559680 - DNA, 75 bp, synthetic construct
  source 1..75: mol_type = other DNA
ttagtgtattaaagactcttgggtatcatctgtggtacgacgttgtaaaatgttccgagtatggcttgcctcaaa

SEQ ID NO: 559681 - DNA, 75 bp, synthetic construct
  source 1..75: mol_type = other DNA
gattataaatttattggaaaaaatacgcctttttcattccaaaagttaggaacgatgattggtaatgctgttccc

SEQ ID NO: 559682 - DNA, 75 bp, synthetic construct
  source 1..75: mol_type = other DNA
gggagtgcagaaacgcacgttaaggatttcatgataggtaatgactccaacttattgatagtgttttatgttcag

SEQ ID NO: 559683 - DNA, 75 bp, synthetic construct
  source 1..75: mol_type = other DNA
gatttttaacaagataaaaatagaaaaaaaagattgtattatgctatcaaaaaaacatcacaatgaatggcatta

SEQ ID NO: 559684 - DNA, 75 bp, synthetic construct
  source 1..75: mol_type = other DNA
gattaatgctgtttattatgggagtgctgattttggagaagataaaacatcagaaaaacattttatcaatataat

SEQ ID NO: 559685 - DNA, 75 bp, synthetic construct
  source 1..75: mol_type = other DNA
atgcaaggtaatgcactaaccgttttattatccggtaaaaaatatctgctattgcagggaccgatgggacccttt

SEQ ID NO: 559686 - DNA, 75 bp, synthetic construct
  source 1..75: mol_type = other DNA
tattggcgataagtggctggtgacagaaggtctgaaagcaggcgatcgcgtagtaataagtgggctgcagaaagt

SEQ ID NO: 559687 - DNA, 75 bp, synthetic construct
  source 1..75: mol_type = other DNA
actgcgctggcaaccgtgcagcaacttgatccgatctacgttgatgtgacccagtccagcaacgacttcctgcgc

SEQ ID NO: 559688 - DNA, 75 bp, synthetic construct
  source 1..75: mol_type = other DNA
tgctgggttcgtgcgtactggcgcaagcaactttacaaggtaacacagcgtaaggtattgccgaggttaatgaac

SEQ ID NO: 559689 - DNA, 75 bp, synthetic construct
  source 1..75: mol_type = other DNA
caccctgatctctcgctgccagaaagcagtggatgaggaccgtaaggttttgcttggctttgcgttaagcaacct

SEQ ID NO: 559690 - DNA, 75 bp, synthetic construct
  source 1..75: mol_type = other DNA
ataaaaatcagttttatcaaagtggggcagaatatggtttataaagctgaaaagtccgagtcatccgactcatca

SEQ ID NO: 559691 - DNA, 75 bp, synthetic construct
  source 1..75: mol_type = other DNA
atcaagataggccaggagatggtttacaaggctgaaaaatcagactcccagccgccgcaaaacggcaccatgcaa

SEQ ID NO: 559692 - DNA, 75 bp, synthetic construct
  source 1..75: mol_type = other DNA
tgtataacgatagccagattcgtaaccacagcaattataacgatgtgcgtgactatattaatgaagtcatgtact

SEQ ID NO: 559693 - DNA, 75 bp, synthetic construct
  source 1..75: mol_type = other DNA
caggatatggtttataagactgaaaaaccggactccatgccgcctcagaacggcactgctcagcccgaatacgct

SEQ ID NO: 559694 - DNA, 75 bp, synthetic construct
  source 1..75: mol_type = other DNA
gcgtcagtctgaaagcccgcctgatcaaggtggactggattaaaataggccaggagcaggtctataaggctgaaa

SEQ ID NO: 559695 - DNA, 75 bp, synthetic construct
  source 1..75: mol_type = other DNA
atgcccgccgttggcgtagtaacagtcaaaactgaacctctgcagatcacaaccgagcttccgggtcgcaccagt

SEQ ID NO: 559696 - DNA, 75 bp, synthetic construct
  source 1..75: mol_type = other DNA
cgttttgtttcgaataaagggctatggcgctatgagatccacgatattgaaggtcgtgttgatccgacgctaggg

SEQ ID NO: 559697 - DNA, 75 bp, synthetic construct
  source 1..75: mol_type = other DNA
aaatcagcaggtcgtaaagtgactcaggcaggatatcccgaagaccatctcgataccctgtatagtcatcaaaat

SEQ ID NO: 559698 - DNA, 75 bp, synthetic construct
  source 1..75: mol_type = other DNA
ttcagctcctgcagcgaaagatcgctggcgtgctgataaccgggccatttctgtcactggttttcgcgacaaact

SEQ ID NO: 559699 - DNA, 75 bp, synthetic construct
  source 1..75: mol_type = other DNA
ctccattcctgtcatttctgactgcgttgcaatggctattgaaagccgcttcaaatatatgatgttgctttttta

SEQ ID NO: 559700 - DNA, 75 bp, synthetic construct
  source 1..75: mol_type = other DNA
tcagtctgctgttgctttttactctctctattcctgtcatttctgactgtgttgcaatggccattgaaagtcgct

SEQ ID NO: 559701 - DNA, 75 bp, synthetic construct
  source 1..75: mol_type = other DNA
tcagtccagtaacgatttcctgcgtctgaaacaagaactcgccaacggcacactgaagcaagagaacggtaaagc

SEQ ID NO: 559702 - DNA, 75 bp, synthetic construct
  source 1..75: mol_type = other DNA
caaagtgtcactgatcaccagtgacggcattaagttcccgcaggacggtacgctggaattctctgacgttaccgt

SEQ ID NO: 559703 - DNA, 75 bp, synthetic construct
  source 1..75: mol_type = other DNA
gcgtcctggtgttcaggtaaaagcgcaagagataaccgctgataacaaccagcaagccacaagcggtgctcagtc

SEQ ID NO: 559704 - DNA, 75 bp, synthetic construct
  source 1..75: mol_type = other DNA
atgaaaaagattgatgcgattataaaacccttcaagctggacgatgtccgcgaagcactggctgaagtcggtatt

SEQ ID NO: 559705 - DNA, 75 bp, synthetic construct
  source 1..75: mol_type = other DNA
gtaaaatcggtgacggtaaaatcttcgtcttcgacgtggcgcgagtcattcgtatccgtactggcgaggaagacg

SEQ ID NO: 559706 - DNA, 75 bp, synthetic construct
  source 1..75: mol_type = other DNA
ctggtaacagagagtttaaatccttcctgtcatctcttgactgggaggaagatgaagacctccagaataaactgt

SEQ ID NO: 559707 - DNA, 75 bp, synthetic construct
  source 1..75: mol_type = other DNA
cttgctgaagcgccatctttccccggcaacagtcgcattgttgcggcctggtttccggcgcaggaaaggggaacg

SEQ ID NO: 559708 - DNA, 75 bp, synthetic construct
  source 1..75: mol_type = other DNA
ggagaaccagaatacacgcgaaacgaagggtactttgttaatatccgtcttcttgacgatggatttgaggattcc

SEQ ID NO: 559709 - DNA, 75 bp, synthetic construct
  source 1..75: mol_type = other DNA
gtgttgacactgtcaacacctgataaagcatcggtattacccattcgtaccccggagctttcacccgggccgctg

SEQ ID NO: 559710 - DNA, 75 bp, synthetic construct
  source 1..75: mol_type = other DNA
ctgccgggaatgacgccgctgtttttaatcggcgacgatccgctgtccacagaatggctgcgccagcaccgggac

SEQ ID NO: 559711 - DNA, 75 bp, synthetic construct
  source 1..75: mol_type = other DNA
ccaatagatatatcatcttataatgtttctgaccgttcatggagtgaaagccaaataatgcaatcttatcatggc

SEQ ID NO: 559712 - DNA, 75 bp, synthetic construct
  source 1..75: mol_type = other DNA
attccgaagaagatgctttgcgttttgttgagatgtacatcgctgggcaagatcttcctgatggaatatcatttg

SEQ ID NO: 559713 - DNA, 75 bp, synthetic construct
  source 1..75: mol_type = other DNA
atgacgactccaaccagacggataagtttctatctgaagcccgccgccgtcaagaacgaaggtgaagcatgcgcc

SEQ ID NO: 559714 - DNA, 75 bp, synthetic construct
  source 1..75: mol_type = other DNA
caagaacgaaggagaagcatgcgcatggctggacagccttacaccagaagcccgcaaaagcggccaacgcgtggc

SEQ ID NO: 559715 - DNA, 75 bp, synthetic construct
  source 1..75: mol_type = other DNA
gatcgcctggtctgtaaaggctgggtggaaaggttgccgaacccgaatgataagcgcggcgtactggtaaaactt

SEQ ID NO: 559716 - DNA, 75 bp, synthetic construct
  source 1..75: mol_type = other DNA
tgaaaatggcgcggtggtcgatatggaccacaaaaagccgggcagcgcggcagcaagcggtcccaaactgcatta

SEQ ID NO: 559717 - DNA, 75 bp, synthetic construct
  source 1..75: mol_type = other DNA
tcattactctgtctctggcttgtgccggaatgtctcatagcgcgctggcggctgcccctacggcgaaaccggcag

SEQ ID NO: 559718 - DNA, 75 bp, synthetic construct
  source 1..75: mol_type = other DNA
aaggacgtgacagtctggagcgctacatgcttcagcaggcgcagcttgctggcatcaccacagaacggctgagca

SEQ ID NO: 559719 - DNA, 75 bp, synthetic construct
  source 1..75: mol_type = other DNA
tatggttttccattaccgttgttaagcctgattttaaaatccctgtaactccagattcattagtgtctgatgaat

SEQ ID NO: 559720 - DNA, 75 bp, synthetic construct
  source 1..75: mol_type = other DNA
gggtgaacttgtggaaagatatcttaggattatatccaagaatcattcagccaaaatttatttttatatctttgg

SEQ ID NO: 559721 - DNA, 75 bp, synthetic construct
  source 1..75: mol_type = other DNA
gaaggacggcaatgtgcgctattgcgaagcactgggctttgaccgcgaggagctgaacgaactcaacgccctgac

SEQ ID NO: 559722 - DNA, 75 bp, synthetic construct
  source 1..75: mol_type = other DNA
ctgaccccggaagaaattaaacgtctgctggatgcctgtgctgattctcaaagctctagtctgctgacggttgca

SEQ ID NO: 559723 - DNA, 75 bp, synthetic construct
  source 1..75: mol_type = other DNA
gggccatcagttatcaaaataccggatcacctataccaagacaaaaggtaagaaaaatcgtaccgtgccgatatc

SEQ ID NO: 559724 - DNA, 75 bp, synthetic construct
  source 1..75: mol_type = other DNA
cgaaacttaacattatttgtaatggccttggagaccccatcgcctcagagttaactgctggcgattttacaaaat

SEQ ID NO: 559725 - DNA, 75 bp, synthetic construct
  source 1..75: mol_type = other DNA
atgaatgacgtgacgctgacctcccgcaacatggacaacaccgtggcgcacgcgggtaagtatgcgaacgctgat

SEQ ID NO: 559726 - DNA, 75 bp, synthetic construct
  source 1..75: mol_type = other DNA
cagagcgacgagctgctgcaaagaatcaacgtcatcggtgtgaccgaccagaaaggcgaaaaagtcctgatcggc

SEQ ID NO: 559727 - DNA, 75 bp, synthetic construct
  source 1..75: mol_type = other DNA
tctcctcccgcttttcggtacagccggcagtgcagcagagatttgaaaacgcatcaaaggaaagccatgattttc

SEQ ID NO: 559728 - DNA, 75 bp, synthetic construct
  source 1..75: mol_type = other DNA
gcactggaagccatgatgctgctggcacaggaacgttcgctctcactgaccgtagtctggaatctgatccgccag

SEQ ID NO: 559729 - DNA, 75 bp, synthetic construct
  source 1..75: mol_type = other DNA
gcaagtatcgtgactggttcatgtttgatgaaacagatccagcagctggacaaatagccccggctctcgcacaca

SEQ ID NO: 559730 - DNA, 75 bp, synthetic construct
  source 1..75: mol_type = other DNA
gacggtcagacacgtaagacgttccaggagatcctcgccgcactgggtacaggtgatgcgctggcgtcgaaatat

SEQ ID NO: 559731 - DNA, 75 bp, synthetic construct
  source 1..75: mol_type = other DNA
atgacgacaccaaccagacggataagtttctatctgaagcccgccgccgtcaagaacgaaggcgaagcatgcacc

SEQ ID NO: 559732 - DNA, 75 bp, synthetic construct
  source 1..75: mol_type = other DNA
atgaaaatggcggacaggccaccgcgaaaaccgccgcacgggtggagcttgtggcccctgaaggctggcgggcac

SEQ ID NO: 559733 - DNA, 75 bp, synthetic construct
  source 1..75: mol_type = other DNA
caggaaacgcggaccggggcgcggaagaccggtcacgcctcccctgccaccgtccccagtgccaccgtctccctc

SEQ ID NO: 559734 - DNA, 75 bp, synthetic construct
  source 1..75: mol_type = other DNA
caggagacagaacttgtcggctcccgtatgcagcgaacgcttgccggtgttcgtggcagcatccgcacggtaacg

SEQ ID NO: 559735 - DNA, 75 bp, synthetic construct
  source 1..75: mol_type = other DNA
gacagaaatatttggtgtacagcctcacctgagcgcccgaatagaacttccggggggaaacatcaccgatgtgaa

SEQ ID NO: 559736 - DNA, 75 bp, synthetic construct
  source 1..75: mol_type = other DNA
cgccgctttattaccatgcttcaggatcagggcggctatcacggctggtcactgtcagatgcacagggtgcgtcc

SEQ ID NO: 559737 - DNA, 75 bp, synthetic construct
  source 1..75: mol_type = other DNA
gcagtattgatgtggatgataccgcacagcatggccttgatgtgaacgtctggaacggagggaactatggcctct

SEQ ID NO: 559738 - DNA, 75 bp, synthetic construct
  source 1..75: mol_type = other DNA
ttgattgccattccaacgaccgccggaaccggctctgaaacgactaacgtgacggtgattatcgatgcggtaagc

SEQ ID NO: 559739 - DNA, 75 bp, synthetic construct
  source 1..75: mol_type = other DNA
gcatgggcgcaggccgcgctggaagatatttgtctgcgcagtaacccgcgtaccgccagcctggagcagattgtc

SEQ ID NO: 559740 - DNA, 75 bp, synthetic construct
  source 1..75: mol_type = other DNA
acgcttgccgcgtcttatccagcctacgggattgcacatgtagggcggataaggcgtttacgccgcatccgccaa

SEQ ID NO: 559741 - DNA, 75 bp, synthetic construct
  source 1..75: mol_type = other DNA
aattcctggacgggaatgacgtccatgatgggcgacgtctgggatcagtttgcccgtgaagtgatggcaaaggga

SEQ ID NO: 559742 - DNA, 75 bp, synthetic construct
  source 1..75: mol_type = other DNA
cgggttatccacggccgctgtgctgacctcgccttttcgtaaaccgcagaccaccgttccgggcacgcagccagg

SEQ ID NO: 559743 - DNA, 75 bp, synthetic construct
  source 1..75: mol_type = other DNA
atgagcaacacatttaaattcagcagccggagcgaaaagaatttgcagggcgtaaatcctgatctggtgaaagtg

SEQ ID NO: 559744 - DNA, 75 bp, synthetic construct
  source 1..75: mol_type = other DNA
ccggctgacagagatatccggagttcagccccagataaccgccaggatacaactgccgggcggacaaactgctga

SEQ ID NO: 559745 - DNA, 75 bp, synthetic construct
  source 1..75: mol_type = other DNA
ttttcatgccgcggtgcttgtttctattgtggtgacgtcttgctgtggattatttttcggtgatgttcattttag

SEQ ID NO: 559746 - DNA, 75 bp, synthetic construct
  source 1..75: mol_type = other DNA
ccaataaagacaccctggtgatgattggcgatttaagttctcacggcgtgttgttaggtattttagggtttttta

SEQ ID NO: 559747 - DNA, 75 bp, synthetic construct
  source 1..75: mol_type = other DNA
tggaaaggttgccgaacccgaatgataagcgcggcgtactggtaaaacttaccaccaggcaatatgtgaacaatg

SEQ ID NO: 559748 - DNA, 75 bp, synthetic construct
  source 1..75: mol_type = other DNA
ttttctggccgggctggcacttctgaaaatgaatccagcagaggcttaccgactggctgcatgggctgacgatga

SEQ ID NO: 559749 - DNA, 75 bp, synthetic construct
  source 1..75: mol_type = other DNA
tgggcaagttatctcaaaaatgaatatgttgcagccagacgctttgggggttctggtgatcttgggatagatatt

SEQ ID NO: 559750 - DNA, 75 bp, synthetic construct
  source 1..75: mol_type = other DNA
cctgcgtttattaccacggtgatgatgccctttacgttctcgatcaccgaagggattgcactaggctttatgtcg

SEQ ID NO: 559751 - DNA, 75 bp, synthetic construct
  source 1..75: mol_type = other DNA
gggcgcgcggcggtgcgggtgaccgtctgctgatgtacgcacagctgaaagagtgggcagagaaaaactttgata

SEQ ID NO: 559752 - DNA, 75 bp, synthetic construct
  source 1..75: mol_type = other DNA
ttacaggcacggacgagcagtgctttgccttaatgtttcgttcattgtctaaagaaatttatgccaaagaagggg

SEQ ID NO: 559753 - DNA, 75 bp, synthetic construct
  source 1..75: mol_type = other DNA
ccagcatccatgcacgaagattgtgataaacgcatcgttcaggcgcatacgatatctaagagcagtagccttaag

SEQ ID NO: 559754 - DNA, 75 bp, synthetic construct
  source 1..75: mol_type = other DNA
gggaaaatctgagtgcaccggtgaaaaccgaacaaactcaaccagctgctccggctaagccgaccagcgatatcc

SEQ ID NO: 559755 - DNA, 75 bp, synthetic construct
  source 1..75: mol_type = other DNA
tcggtgcggaagcggtggtgttgtttccggatggcgaccgttctcatgcggtggttgttacggtgtcggaccgtc

SEQ ID NO: 559756 - DNA, 75 bp, synthetic construct
  source 1..75: mol_type = other DNA
ggtaataagtcgaccattgcgctgactgaactgggcgatgaagttcgcggagcaaatatcgatcagctgattcac

SEQ ID NO: 559757 - DNA, 75 bp, synthetic construct
  source 1..75: mol_type = other DNA
agatttttttaaaattcccatatattaatgatggtaatgactccaacttattgatagtgttttatgttcagataa

SEQ ID NO: 559758 - DNA, 75 bp, synthetic construct
  source 1..75: mol_type = other DNA
cgatgatgcagtggtggtcggattatctggaagcatgccgagaatcttatgcaccgccttatacaattggtaaaa

SEQ ID NO: 559759 - DNA, 75 bp, synthetic construct
  source 1..75: mol_type = other DNA
aggcactgcgggtgatgggctacgacacgaaaaaggatatctgtggccacggctttcgggcgatggcatgcagtg

SEQ ID NO: 559760 - DNA, 75 bp, synthetic construct
  source 1..75: mol_type = other DNA
atgggcaaaatatcagatttgaattattctcaacacattacattagccgacaattttaaacaaaaaaatgaagcc

SEQ ID NO: 559761 - DNA, 75 bp, synthetic construct
  source 1..75: mol_type = other DNA
tatttccacaacctgatggttcgactaatcgttatgaagggaagtcctttgaaagaaaagatgagagttcattac

SEQ ID NO: 559762 - DNA, 75 bp, synthetic construct
  source 1..75: mol_type = other DNA
aaatggtacttctatcaattacttaagaagtatgagggcgaacagctgtatcttaatgagttaggatatgtttat

SEQ ID NO: 559763 - DNA, 75 bp, synthetic construct
  source 1..75: mol_type = other DNA
ggggctgaagcggggctaccgtctgacagagctggtcctgatgcatgagccactggcgcaacagcgggtgtgcgg

SEQ ID NO: 559764 - DNA, 75 bp, synthetic construct
  source 1..75: mol_type = other DNA
tgtgcggatgtcagatgcgttttacggggctgaagcggggctaccgtctgacagagctggtcctgatgcatgagc

SEQ ID NO: 559765 - DNA, 75 bp, synthetic construct
  source 1..75: mol_type = other DNA
acgcagtcaaccgcagatggccggtatgtacagaatgttcagcttggagcacagagctatcattcacccggaggc

SEQ ID NO: 559766 - DNA, 75 bp, synthetic construct
  source 1..75: mol_type = other DNA
acccgctgaagtgcattctgtgcggaagtcagatgcgttttacggggctgaagcggggttaccgactggcagagc

SEQ ID NO: 559767 - DNA, 75 bp, synthetic construct
  source 1..75: mol_type = other DNA
acagggctgaagcggggataccgtctggcagagctggttatgatgcatgagccactggccaggatgcggtggtgc

SEQ ID NO: 559768 - DNA, 75 bp, synthetic construct
  source 1..75: mol_type = other DNA
gagtcagatgcggtttacgggactgaagcggggataccgtctggcagagctggttatgatgcatgagccgctggc

SEQ ID NO: 559769 - DNA, 75 bp, synthetic construct
  source 1..75: mol_type = other DNA
gaaagaaaagatgagagttcattacacctgattactaacaagattctggcgtgttaccaacgcgaagctaacaag

SEQ ID NO: 559770 - DNA, 75 bp, synthetic construct
  source 1..75: mol_type = other DNA
ctacaaaatgcagcaggcagtgccagataaagagttactggaagcaccaaccgcaggtgagggtgcaacctgccg

SEQ ID NO: 559771 - DNA, 75 bp, synthetic construct
  source 1..75: mol_type = other DNA
gtggcaacaaagggatcgacattgccggtagcaaaggacaggcaatcatcgcgaccgctgatggccgcgttgttt

SEQ ID NO: 559772 - DNA, 75 bp, synthetic construct
  source 1..75: mol_type = other DNA
acagccccaaattcagtcggtacaacaaccacaaattcaatctgcacagcagccgcagatccagccggtgcagcc

SEQ ID NO: 559773 - DNA, 75 bp, synthetic construct
  source 1..75: mol_type = other DNA
caatcacgaggttcatgttgaggaaaggctgcgagagagggcgctggtgccgctcaatcgtatgctggattttgc

SEQ ID NO: 559774 - DNA, 75 bp, synthetic construct
  source 1..75: mol_type = other DNA
gtcgaagagtgcagggccatcaaggcggagtatcaacagaaacttaaaaaactgcgaaacagcagaagtgaggct

SEQ ID NO: 559775 - DNA, 75 bp, synthetic construct
  source 1..75: mol_type = other DNA
cttcacctttaccggtgtggtgaaagcgccgttctataaagacggcgaatggaaaaacgatctgaactcccctgc

SEQ ID NO: 559776 - DNA, 75 bp, synthetic construct
  source 1..75: mol_type = other DNA
actgtacgccagaaccgccaggacagctggtttcgtaaaaccgcttcgaagatgattaaccggcttattcagcgc

SEQ ID NO: 559777 - DNA, 75 bp, synthetic construct
  source 1..75: mol_type = other DNA
tgaatatatcggcaggatctacaccgatgtccgcgcccgctattttgttcagcaagttatccgtccatccagcaa

SEQ ID NO: 559778 - DNA, 75 bp, synthetic construct
  source 1..75: mol_type = other DNA
agcgataattccgcgcatatgctggtcgaagcctcacaagcggagggcagccatattgtgtctattttgcttaac

SEQ ID NO: 559779 - DNA, 75 bp, synthetic construct
  source 1..75: mol_type = other DNA
cccggaaaaataacctgaaagaaattgctgatgccggtgcggaggcccagcgtctggcccgtggttatcttggtc

SEQ ID NO: 559780 - DNA, 75 bp, synthetic construct
  source 1..75: mol_type = other DNA
gttgagtgtgcccagcatccgaacgcggacaaactgcgtgtgacgaaagtcaatgtcggcggcgatcgcctgctg

SEQ ID NO: 559781 - DNA, 75 bp, synthetic construct
  source 1..75: mol_type = other DNA
gcgcgtgacgttgccgtgctgaaccagctgccgctggttgaaccggaaatcgttccggttggtgcgaccatcgac

SEQ ID NO: 559782 - DNA, 75 bp, synthetic construct
  source 1..75: mol_type = other DNA
gcgaatgggtgaacccggcgattgatagtgatgcgttggcaaatcaaatcaccatggctggcctggaagttgacg

SEQ ID NO: 559783 - DNA, 75 bp, synthetic construct
  source 1..75: mol_type = other DNA
gttgagtgtgcgcaacatccgaacgctgacaaactgcgtgtgacgaaagttaacgttggcggcgagcgtctgctc

SEQ ID NO: 559784 - DNA, 75 bp, synthetic construct
  source 1..75: mol_type = other DNA
gctgtgaagtgaccgaaggtaaggacgagtggcaggcagttgcgccgagctggcgtttcgacatggagattgaag

SEQ ID NO: 559785 - DNA, 75 bp, synthetic construct
  source 1..75: mol_type = other DNA
cgccggaagcctgcccgcgttaccttgggcgtgtggttaaaggcattaatgttaaagcgccaaccccgctgtgga

SEQ ID NO: 559786 - DNA, 75 bp, synthetic construct
  source 1..75: mol_type = other DNA
gaaagtggttctcaggcacaaaagttagttgaagcaatcattgttgcgatagaaaacgaacaggaacgtcttttt

SEQ ID NO: 559787 - DNA, 75 bp, synthetic construct
  source 1..75: mol_type = other DNA
ttcttgaagttttcgttaacaattgggttcctggtatcttcaccttctttttaggtatctgttactcaaatatcg

SEQ ID NO: 559788 - DNA, 75 bp, synthetic construct
  source 1..75: mol_type = other DNA
tgtttacggctacaacaacatcccggatgagccggtacaggcaagcctgattatgggtactcaccgtgaagctga

SEQ ID NO: 559789 - DNA, 75 bp, synthetic construct
  source 1..75: mol_type = other DNA
aactgggccagccgatgcacgctttcgataaagatcgcattgaaggcggcattgtggtgcggatggcgaaagagg

SEQ ID NO: 559790 - DNA, 75 bp, synthetic construct
  source 1..75: mol_type = other DNA
accctggttatcgccgaccacaacaaggcgctggcgatgggcggcatttttggtggcgaacactctggcgtgaat

SEQ ID NO: 559791 - DNA, 75 bp, synthetic construct
  source 1..75: mol_type = other DNA
gctgaatttattgctgcctttaatccaaagattgctttggcactactggatgaacgggaaagaaaccagcaatac

SEQ ID NO: 559792 - DNA, 75 bp, synthetic construct
  source 1..75: mol_type = other DNA
gcagggagcagaacggcgcagacattccggataaaggggcttttatcgataacgtcggtttacgggaaacggtaa

SEQ ID NO: 559793 - DNA, 75 bp, synthetic construct
  source 1..75: mol_type = other DNA
aggctggccaacgcccacaaaatcaatggtgtcgcctttgacggaacgcaggatatcactatctcatcaggaaca

SEQ ID NO: 559794 - DNA, 75 bp, synthetic construct
  source 1..75: mol_type = other DNA
gcgtggcgaatatgcctgcgctggcaccggcgcagagtaataccaccacctggtttaccgaaggtgacggacaga

SEQ ID NO: 559795 - DNA, 75 bp, synthetic construct
  source 1..75: mol_type = other DNA
agaaagttaccattcgcccggaagtaatgtggtgtcatggacttaccgcgcaccttcaggttgtatgctttctgg

SEQ ID NO: 559796 - DNA, 75 bp, synthetic construct
  source 1..75: mol_type = other DNA
atgaaaaagattggcgttgcaggcttacagcgtgagcagattaaaaaaaccattgaagcgacggctcctggctgt

SEQ ID NO: 559797 - DNA, 75 bp, synthetic construct
  source 1..75: mol_type = other DNA
cgggcaactggattattacatcggcgcgtgtaataccggtgcgggcgcggcattgtcgattgccatcgcggtgat

SEQ ID NO: 559798 - DNA, 75 bp, synthetic construct
  source 1..75: mol_type = other DNA
gccggataaggcaaaactgaaccagctggtgacagccattaaggcaatcattgcagcaaacgcatacagccggaa

SEQ ID NO: 559799 - DNA, 75 bp, synthetic construct
  source 1..75: mol_type = other DNA
ttatcttaaacaaatatctaaaatggaacaagtcacatttaaagtgctttgcgctcatcatgcttgtgattattt

SEQ ID NO: 559800 - DNA, 75 bp, synthetic construct
  source 1..75: mol_type = other DNA
tgcattgacgtaattcgtgaagaagtaaagcgatgggatgattcccgcgccgctgtcatttgcatcaaaggagag

SEQ ID NO: 559801 - DNA, 75 bp, synthetic construct
  source 1..75: mol_type = other DNA
caccttctggttgtatgctttcaggtattaacgtgcaggataccgggaaaagttcagccgataatatcggaggcg

SEQ ID NO: 559802 - DNA, 75 bp, synthetic construct
  source 1..75: mol_type = other DNA
tggtgatggtaatgcgacggtaaccgcatattatcgacctgttcagtttctgataaatggttcgtggaaaacagc

SEQ ID NO: 559803 - DNA, 75 bp, synthetic construct
  source 1..75: mol_type = other DNA
tgcggatgcaggtgcagaagcacaggctgctgcccgccgtcatctggggctgggaggattatcaggaaaagacag

SEQ ID NO: 559804 - DNA, 75 bp, synthetic construct
  source 1..75: mol_type = other DNA
ttagatgatggcaaattgagcgaatccatcggttcaaaatgcgccgctccatcaggtcaaaatgacacgatggaa

SEQ ID NO: 559805 - DNA, 75 bp, synthetic construct
  source 1..75: mol_type = other DNA
tggtcaatatgattcaggtgcaacgcgcttacgaaatcaacagtaaagcggtgtccaccaccgatcagatgctgc

SEQ ID NO: 559806 - DNA, 75 bp, synthetic construct
  source 1..75: mol_type = other DNA
ttcaggtgcaaccagcaatcaccattccggcgaatgcgttaagcattaccattggtcgtgatggcgtggtcagcg

SEQ ID NO: 559807 - DNA, 75 bp, synthetic construct
  source 1..75: mol_type = other DNA
gactttactgcgctggaaaacgtggctatgccgctgctgattggcaagaaaaagcccgctgaaatcaacagccga

SEQ ID NO: 559808 - DNA, 75 bp, synthetic construct
  source 1..75: mol_type = other DNA
atacgccaacctccggcgatgtgatctttaacggtcaaccgatgagcaaactgtcttcggcggcgaaagcagaac

SEQ ID NO: 559809 - DNA, 75 bp, synthetic construct
  source 1..75: mol_type = other DNA
aggcagtgtgcaaaccgatgtactgcacaatgtcagtttcagcgtcggcgaaggtgaaatgatggcgatcgtcgg

SEQ ID NO: 559810 - DNA, 75 bp, synthetic construct
  source 1..75: mol_type = other DNA
tgacatgtgcgcagtggatctgggggcgggttgtaaacctgtacgaacaggctgccagtgacgatggtgagatca

SEQ ID NO: 559811 - DNA, 75 bp, synthetic construct
  source 1..75: mol_type = other DNA
aacagtttccgttctggtcagagtcaacgttaaagcgtgcgtttgcaagtctgaaagcgctggggcttttgcgta

SEQ ID NO: 559812 - DNA, 75 bp, synthetic construct
  source 1..75: mol_type = other DNA
caggcaaaatccatcgctgacgaactgatgaccgggtgcacgaattttgtgttcagtggtaagccgggtaccgga

SEQ ID NO: 559813 - DNA, 75 bp, synthetic construct
  source 1..75: mol_type = other DNA
ccgaacgaaagcacgccgggcctgaacgggcgggactgctgtatcaagggtatgttgaaacgtctaacgtcaacg

SEQ ID NO: 559814 - DNA, 75 bp, synthetic construct
  source 1..75: mol_type = other DNA
caaagatgtggcaattaaaggacagggctttttccaggtgatgctgccggatggttcatcggcctatacccgcga

SEQ ID NO: 559815 - DNA, 75 bp, synthetic construct
  source 1..75: mol_type = other DNA
ggttattcgtctggggcgttcgcctgtacagcgttgcgtgaatcacatttctgaaccggacaccgaaattccgcc

SEQ ID NO: 559816 - DNA, 75 bp, synthetic construct
  source 1..75: mol_type = other DNA
cgaaacgtatgagccgtcaactggaaatgcgtgatggacggctgacggcggaactaagcctgatgggggcagagt

SEQ ID NO: 559817 - DNA, 75 bp, synthetic construct
  source 1..75: mol_type = other DNA
caaaaagaagcgatctaccgtcagttagatcaaaccacccaacgttttaacgtgggcctggtagcgatcaccgac

SEQ ID NO: 559818 - DNA, 75 bp, synthetic construct
  source 1..75: mol_type = other DNA
cgcacgtaacaacctcgacaatgccgttgagcaactgcgtcagatcaccggtaattactatccggaactggcagc

SEQ ID NO: 559819 - DNA, 75 bp, synthetic construct
  source 1..75: mol_type = other DNA
ccgggcaggcaatactgcctgaagagagttttctctggttgaaaactgacgaacttgctactttctttacctgga

SEQ ID NO: 559820 - DNA, 75 bp, synthetic construct
  source 1..75: mol_type = other DNA
ggcctctgatattttcaccctgacaaaaggtgagcatgccggagaacagcgggtcagcctgaaagccagactgct

SEQ ID NO: 559821 - DNA, 75 bp, synthetic construct
  source 1..75: mol_type = other DNA
gggcaagtggcctgattgagtttggcgatgtagttcctgatggtgcattgcctgtaataagcggtgagccaaaaa

SEQ ID NO: 559822 - DNA, 75 bp, synthetic construct
  source 1..75: mol_type = other DNA
ctgaaccgtccgcccagagtgaccaaaacgtttactcttgaggccaaaggcaaggatactttcaaggtgccttat

SEQ ID NO: 559823 - DNA, 75 bp, synthetic construct
  source 1..75: mol_type = other DNA
aagaggcattctgttttaagaaaaagaaaagaattaattgaaaagtataaggtggcatctgattcttttacgaga

SEQ ID NO: 559824 - DNA, 75 bp, synthetic construct
  source 1..75: mol_type = other DNA
cgtaaggtcggtgggcgtaatgtaagcaatatttaccgtcttaatgtggaaaaactcgaagcagcagcagcggcg

SEQ ID NO: 559825 - DNA, 75 bp, synthetic construct
  source 1..75: mol_type = other DNA
aaagcccgctgaaatcaacagtcgagcgttggaaatgttaaaagcggtggggctggagcatcgcgcgaatcaccg

SEQ ID NO: 559826 - DNA, 75 bp, synthetic construct
  source 1..75: mol_type = other DNA
gaatcgtggtggtccggcgggaaatgccgtggtggcgcattgataacgtgttctggggggggggggatgaagctc

SEQ ID NO: 559827 - DNA, 75 bp, synthetic construct
  source 1..75: mol_type = other DNA
ttcaaaacgacccaatgtcatcgggtcaaaatggcctgatgatcttacagagaatacaacagagattactacaga

SEQ ID NO: 559828 - DNA, 75 bp, synthetic construct
  source 1..75: mol_type = other DNA
tataacacaacggaacaatggctggaacagtttccgttctggtcagagtcaacgttaaagcgcgcgtttgcaagt

SEQ ID NO: 559829 - DNA, 75 bp, synthetic construct
  source 1..75: mol_type = other DNA
acgatctcaacgcctcaattgcgttgttgtggtcaactaaaactggccaccgcgttagagtttttccagtatcgg

SEQ ID NO: 559830 - DNA, 75 bp, synthetic construct
  source 1..75: mol_type = other DNA
ctgcatctttcggcgcggcctgacgccaggactgtggtgacctatcactctgatatagtgaaacaaaaacggtta

SEQ ID NO: 559831 - DNA, 75 bp, synthetic construct
  source 1..75: mol_type = other DNA
ttggagtcattacctaagcagctttttgaaattgcctccacgccgttttcgttgaaagcgttaaagcgttttaag

SEQ ID NO: 559832 - DNA, 75 bp, synthetic construct
  source 1..75: mol_type = other DNA
cctgccgtcctggcggctttttctgtccgctgcttcagagtggccagctgcacaaacggatacggaggcgcgagc

SEQ ID NO: 559833 - DNA, 75 bp, synthetic construct
  source 1..75: mol_type = other DNA
gcaagggctgggctatgagtatgtttacggcccggacattgaacccagtggaatcaatccgttacgtagctatca

SEQ ID NO: 559834 - DNA, 75 bp, synthetic construct
  source 1..75: mol_type = other DNA
gcattaataaaagagataaccagcagtacagacaacctgttaaaactgttttgtattacctcattacagcaatga

SEQ ID NO: 559835 - DNA, 75 bp, synthetic construct
  source 1..75: mol_type = other DNA
atgctgagggtacagaaacgtcgtaccacggcattaataaaagagataaccagcagtacagacaaccagttaaaa

SEQ ID NO: 559836 - DNA, 75 bp, synthetic construct
  source 1..75: mol_type = other DNA
ggcgatattctttatattccgccaggattcccgcatgaaggctacgcgctggaaaatgcgatgaactattccgtg

SEQ ID NO: 559837 - DNA, 75 bp, synthetic construct
  source 1..75: mol_type = other DNA
gcagaccacggctgatgaggctgcagagtttaccgggatgattcctgtttatcattttctggtcagtgccgcgat

SEQ ID NO: 559838 - DNA, 75 bp, synthetic construct
  source 1..75: mol_type = other DNA
tggactgtcgaagagtgcaaggcgatcaaggaagagtaccaacagaaacttaaaaaactgcgaaacagcaaaagt

SEQ ID NO: 559839 - DNA, 75 bp, synthetic construct
  source 1..75: mol_type = other DNA
tgaatcattttttggctgctgtagattatattgttactgcttctccaaattatgcacaaacaagtccagtactac

SEQ ID NO: 559840 - DNA, 75 bp, synthetic construct
  source 1..75: mol_type = other DNA
ggcggctaccagaataacgactcatggctggaccgctacaacagtgaaaagaccttcttctccggcattgtcgat

SEQ ID NO: 559841 - DNA, 75 bp, synthetic construct
  source 1..75: mol_type = other DNA
gttacgaaaaagttcctctgctctcaaatgtagctgctggcggtgtcacagggcttttgaccatacttgttgcct

SEQ ID NO: 559842 - DNA, 75 bp, synthetic construct
  source 1..75: mol_type = other DNA
gtgacgaaggtcgccagctaattgaagacttcgacgatgagtttaacgaagacgagctgacgcttacccagaaag

SEQ ID NO: 559843 - DNA, 75 bp, synthetic construct
  source 1..75: mol_type = other DNA
aagccccatccatgccgttatttgtcaattgcgatggtaatgactccaacttactgatagtgttttatgttcaga

SEQ ID NO: 559844 - DNA, 75 bp, synthetic construct
  source 1..75: mol_type = other DNA
ctgaaacatattatttcagtgattgagcggatgacgcagctcatttccgaacttaaagcatttgcctcgcgccat

SEQ ID NO: 559845 - DNA, 75 bp, synthetic construct
  source 1..75: mol_type = other DNA
atgtataagtccacattatattccaccattgaacaattttatgttttaccctatatgctctcaacagatcatatc

SEQ ID NO: 559846 - DNA, 75 bp, synthetic construct
  source 1..75: mol_type = other DNA
ttgagcagtatcagagcaatatcgactccgcgtcggcggggttaagccagcaggaatcaattctcgatggcgtca

SEQ ID NO: 559847 - DNA, 75 bp, synthetic construct
  source 1..75: mol_type = other DNA
gatgacggtgatggcgttaccgacagctatagctatcagggtaacagcgaccaccgccagaccacggtgtcgaac

SEQ ID NO: 559848 - DNA, 75 bp, synthetic construct
  source 1..75: mol_type = other DNA
agcgaatgacacaactcatctctgaacttaaagcatttgcttcgcgtcaccgtgtaccaaaaggatctgccgatg

SEQ ID NO: 559849 - DNA, 75 bp, synthetic construct
  source 1..75: mol_type = other DNA
gcgctttcgtactatgaccgcacacgctttccgacgctgaaagaacgctataccacgtccaaacctgcgtataac

SEQ ID NO: 559850 - DNA, 75 bp, synthetic construct
  source 1..75: mol_type = other DNA
cgtcacgctgttcgtgaattgggccgtcaagccattctcgatggccctgctggggtggctgttcatccgacaagt

SEQ ID NO: 559851 - DNA, 75 bp, synthetic construct
  source 1..75: mol_type = other DNA
ttgttccgcaaaagcggcataccgtgccggatttggactgacataccagctggcgcaggtgcgttatgcctggtg

SEQ ID NO: 559852 - DNA, 75 bp, synthetic construct
  source 1..75: mol_type = other DNA
atgagctacttcacgctgttaaatcgtctgctgccacttgtttcgtacagcccgggccagcctctgcttgatgca

SEQ ID NO: 559853 - DNA, 75 bp, synthetic construct
  source 1..75: mol_type = other DNA
gtgtgccacttcacaggacagattaaacagttctggctggaatcgggatgcgtctatggttatcgcaaaatccat

SEQ ID NO: 559854 - DNA, 75 bp, synthetic construct
  source 1..75: mol_type = other DNA
tcgggtgctggatgttcatcccagtggtttatacgcctggcttcagcaaccgcattcacaacgccatcaggcaga

SEQ ID NO: 559855 - DNA, 75 bp, synthetic construct
  source 1..75: mol_type = other DNA
ggctcaggttggataccgaagcccacgggcacgtaaaggcgaggccagtatcgtgtcacccaacaggctccagcg

SEQ ID NO: 559856 - DNA, 75 bp, synthetic construct
  source 1..75: mol_type = other DNA
tcaatccggatgctccggatgagcgttgggtaacggatataacctacatcaggacccacgaaggctggctgtatc

SEQ ID NO: 559857 - DNA, 75 bp, synthetic construct
  source 1..75: mol_type = other DNA
aacggacataacctacatcaggacccacgaaggctggctgtatcttgccgttgttgttgatctgttctcacgcaa

SEQ ID NO: 559858 - DNA, 75 bp, synthetic construct
  source 1..75: mol_type = other DNA
tataacagtaagcgtcggcatggttccagcgatcagatgtcaccgacagaatatgaaaaccagtattatcaacgg

SEQ ID NO: 559859 - DNA, 75 bp, synthetic construct
  source 1..75: mol_type = other DNA
cagagctggcttaccagtttccgctgggagaatggcaacggcatgttgacacaactcaaccgccagttcccgacc

SEQ ID NO: 559860 - DNA, 75 bp, synthetic construct
  source 1..75: mol_type = other DNA
gaccgacgccgaactggcgatgtgtcgcagcatgggtattaccggggaagagttcctcgccgctaaaccaaaaca

SEQ ID NO: 559861 - DNA, 75 bp, synthetic construct
  source 1..75: mol_type = other DNA
atgggattcgaaggattctggtctggtcaggctggaaaaacggaagttaaatatgatggagtttatatgcgagaa

SEQ ID NO: 559862 - DNA, 75 bp, synthetic construct
  source 1..75: mol_type = other DNA
attcatatattgatctatcgaagcatctcaattccgtctttagaaagcatggtgtcggatatacgttaatcaatg

SEQ ID NO: 559863 - DNA, 75 bp, synthetic construct
  source 1..75: mol_type = other DNA
acaccacaatcacaaggtactttgaaattagagcgccgagaattgaaagattataatataaatatagatatatct

SEQ ID NO: 559864 - DNA, 75 bp, synthetic construct
  source 1..75: mol_type = other DNA
actccaagcgccccgtcgccatccgctaccactcgatgagcagcggaaagtccgaacgggtcattgtgccctttg

SEQ ID NO: 559865 - DNA, 75 bp, synthetic construct
  source 1..75: mol_type = other DNA
gcccaacaggcttcagcgacagttcaatccggatgctccggatgagcgttgggtaacggacataacctacataag

SEQ ID NO: 559866 - DNA, 75 bp, synthetic construct
  source 1..75: mol_type = other DNA
gtgcaaaacgccaaactttttcccgatcaaaaaacgtttgccgacgccgtgccaaacagcgatccgttaatgatc

SEQ ID NO: 559867 - DNA, 75 bp, synthetic construct
  source 1..75: mol_type = other DNA
aaagtcgcggatatggtggccaattttgctcatgaaatagacacttacggtcatattcccaacggcaaccgcagt

SEQ ID NO: 559868 - DNA, 75 bp, synthetic construct
  source 1..75: mol_type = other DNA
ttacggctcattgctggcgtcaatgattgaccagccgcagaccccggcgcttgagttgcagattaaggtcgcctg

SEQ ID NO: 559869 - DNA, 75 bp, synthetic construct
  source 1..75: mol_type = other DNA
actcgcgcaacacgaaggtgacgacgcgttgaaacaatatctgccgcaactgcaaaaagagtacgcgtactggat

SEQ ID NO: 559870 - DNA, 75 bp, synthetic construct
  source 1..75: mol_type = other DNA
actggcgcagcatgaaggcgatgccgcgttgaaacaatacctgccgcaaatgcaaaaagaatatgcttactggat

SEQ ID NO: 559871 - DNA, 75 bp, synthetic construct
  source 1..75: mol_type = other DNA
gcggactgaacaccacctcggtgaaaagtgggcagcaatgggacgcgccaaatggctgggcgccgttacaatggg

SEQ ID NO: 559872 - DNA, 75 bp, synthetic construct
  source 1..75: mol_type = other DNA
gcacgctgccgtggccgatgctcgacccgcgcgaatgcggtctgaaaagcgtcgctgaagcggcaaataccccgg

SEQ ID NO: 559873 - DNA, 75 bp, synthetic construct
  source 1..75: mol_type = other DNA
tggtggagacgtcacacaccggcaatatgggttctgttgcccgtgccatgaaaacaatgggattaaccaatctgt

SEQ ID NO: 559874 - DNA, 75 bp, synthetic construct
  source 1..75: mol_type = other DNA
tggttatcgcaaaatccatctggatctgcgtgagagcgggcaacagtgcggagtaaacagagtctggagactgat

SEQ ID NO: 559875 - DNA, 75 bp, synthetic construct
  source 1..75: mol_type = other DNA
cgccagggtgacgctgtcaggtactgtcatgcagaccatgcagaatgttgaattaaccatcacgctgagagagta

SEQ ID NO: 559876 - DNA, 75 bp, synthetic construct
  source 1..75: mol_type = other DNA
cgtcggcttgaccaatgaagagttgcagaaatgccattatcatgtcgcgattgccgctaacccggaatacagttc

SEQ ID NO: 559877 - DNA, 75 bp, synthetic construct
  source 1..75: mol_type = other DNA
cgtcggcctgaccaatgaagaattgcagaaatgccattaccatgtcgcgattgcggctaacccggaatacagttc

SEQ ID NO: 559878 - DNA, 75 bp, synthetic construct
  source 1..75: mol_type = other DNA
ggctggcttgagcatgaagcgcaagacgcatgggaatataagaaggcacgattagatccacagtctggattctat

SEQ ID NO: 559879 - DNA, 75 bp, synthetic construct
  source 1..75: mol_type = other DNA
gtggtgaacaggcggtgttgagtcaacatttgggcgatttaagtgacgatggcattcagatgcagtggcgcgaag

SEQ ID NO: 559880 - DNA, 75 bp, synthetic construct
  source 1..75: mol_type = other DNA
gaacgaatcgccccgtcttcgccagcagtggcaggatgttctggaggagtgccggcagacagaggccgggccaga

SEQ ID NO: 559881 - DNA, 75 bp, synthetic construct
  source 1..75: mol_type = other DNA
gcaatgattgggtctatctattgtgatactttggcattattaactaactctattgttaacccaatagaaaaaggg

SEQ ID NO: 559882 - DNA, 75 bp, synthetic construct
  source 1..75: mol_type = other DNA
cacattgctctttccacagagtttaccggcgggtgatggcggtttgtctctggggcagggggttattgctgcggc

SEQ ID NO: 559883 - DNA, 75 bp, synthetic construct
  source 1..75: mol_type = other DNA
tgcccactgagttcactatccgccagagcacaggcggcaccatgaatacgcaaattgtcccggatgccgccactt

SEQ ID NO: 559884 - DNA, 75 bp, synthetic construct
  source 1..75: mol_type = other DNA
gccctgcctgtcttgccgaaatgaataccccaggcgagcggcgttatcgttatccgtttatcaactgtacccact

SEQ ID NO: 559885 - DNA, 75 bp, synthetic construct
  source 1..75: mol_type = other DNA
gtgctgggaatcatgcttggctggggtgtggttggtgtctggatgggaatgtttgccgactgggctgtgcgggcc

SEQ ID NO: 559886 - DNA, 75 bp, synthetic construct
  source 1..75: mol_type = other DNA
catgtggggttgccgggttgtagtcggttatgtgctgggaatcatgcttggctggggtgtggttggtgtctggat

SEQ ID NO: 559887 - DNA, 75 bp, synthetic construct
  source 1..75: mol_type = other DNA
ggatggtgaccgggcgctggctatggaaatatcctcgccctgaacatgaaaagtgtgaaaaaaaggcagttgtgt

SEQ ID NO: 559888 - DNA, 75 bp, synthetic construct
  source 1..75: mol_type = other DNA
ctcagtttattgctggaaataataacaaacaaacattgaatgttaacagccataatgataaccaatccgtgcatg

SEQ ID NO: 559889 - DNA, 75 bp, synthetic construct
  source 1..75: mol_type = other DNA
ggcagcgaacgttcctggcagcgggcagggcacgaatacaccctgtggatggatggcgaagaggtcatggttcgc

SEQ ID NO: 559890 - DNA, 75 bp, synthetic construct
  source 1..75: mol_type = other DNA
ctacgacgaagaaagcctgtcgctgtgcggcgttgaggattttcttcaggtggtggcggcttaccgtaatttcgt

SEQ ID NO: 559891 - DNA, 75 bp, synthetic construct
  source 1..75: mol_type = other DNA
atcgtgcgggcgtttgtttgatgccgtagcggcggcactgggctgtgcgccagtgacgttaagttatgaaggtga

SEQ ID NO: 559892 - DNA, 75 bp, synthetic construct
  source 1..75: mol_type = other DNA
aaatacggaagccttcttaatgagcgccatccggacctgtttgccagtgctcaggggagtatttcacgcagtgca

SEQ ID NO: 559893 - DNA, 75 bp, synthetic construct
  source 1..75: mol_type = other DNA
gttctcggtgcgttgctgctgcttgccgcctggaagccgccagaaatgatcatctggctgaatttgctggccttc

SEQ ID NO: 559894 - DNA, 75 bp, synthetic construct
  source 1..75: mol_type = other DNA
tgagcactggatctgcgggcaacgatttacaattgctgatgcctatctgtttacggttctgcgctgggcatacgc

SEQ ID NO: 559895 - DNA, 75 bp, synthetic construct
  source 1..75: mol_type = other DNA
gggcgaaagataaggccactggacggatgatggctattctggttaacgaagcgaattatatgttcttccttcaac

SEQ ID NO: 559896 - DNA, 75 bp, synthetic construct
  source 1..75: mol_type = other DNA
agccgcgcgacatggaaaactattgtgaatggaaattggtggcaaaatacacggtagactataaaggggttttct

SEQ ID NO: 559897 - DNA, 75 bp, synthetic construct
  source 1..75: mol_type = other DNA
gtcgggatgaaaggctggcaaccgcgcgacatgcttaattattgcgactggaatctgatagcaaaatacacggta

SEQ ID NO: 559898 - DNA, 75 bp, synthetic construct
  source 1..75: mol_type = other DNA
atcgtgtggacgtttgttcgatgccgtagcggcggcgttgggctgtgcgccagccacgttaagttatgaaggtga

SEQ ID NO: 559899 - DNA, 75 bp, synthetic construct
  source 1..75: mol_type = other DNA
gtgtgcaacagcaaaactggagcgtgctggcgcgggccattgagcgtggaattaacgcgccgctggcgtcatcgt

SEQ ID NO: 559900 - DNA, 75 bp, synthetic construct
  source 1..75: mol_type = other DNA
gctggtgatgacctccggcaacctgagcggtaaaccaccggctatcagcaacgaacaggcgctggcggatttgca

SEQ ID NO: 559901 - DNA, 75 bp, synthetic construct
  source 1..75: mol_type = other DNA
aagatttaaccgacagcgagcgcaaagagattaccgctgcgctatggaaagaaatgcgcgaaatttattacgggc

SEQ ID NO: 559902 - DNA, 75 bp, synthetic construct
  source 1..75: mol_type = other DNA
gccaaaaccgcagaagagcgcgacggttatattgcttatattgatgaactctataatgccaaccgcctgaccgaa

SEQ ID NO: 559903 - DNA, 75 bp, synthetic construct
  source 1..75: mol_type = other DNA
cctgcacttctgggtcttgagcaagcccggaagaaagcccaggatctgatcgacgatgcccgtcagtcgctgaaa

SEQ ID NO: 559904 - DNA, 75 bp, synthetic construct
  source 1..75: mol_type = other DNA
ggatggttggataagctgtagtgagcgaatgcctgtaattggcgagctaaattggagaactagttttcctttact

SEQ ID NO: 559905 - DNA, 75 bp, synthetic construct
  source 1..75: mol_type = other DNA
cagtggcctgaaccaaaagatggtgagcctcgcttgcacattaaagaacccggcaactctccggtaactccggat

SEQ ID NO: 559906 - DNA, 75 bp, synthetic construct
  source 1..75: mol_type = other DNA
gaaactacgtttataagctgcccggaatgctttggtgatgatgattgcgaaacttgtgactgcagcgggagaatc

SEQ ID NO: 559907 - DNA, 75 bp, synthetic construct
  source 1..75: mol_type = other DNA
gaggagaacggatcatcgcttcaattgcgcaatttaatccggcagcgccatgctgaatggtcagataagacgttt

SEQ ID NO: 559908 - DNA, 75 bp, synthetic construct
  source 1..75: mol_type = other DNA
tatatggcaggacaggtgcaaggggaatacgtggagttgagcgatggcactttatcgtggttagggaacgccttg

SEQ ID NO: 559909 - DNA, 75 bp, synthetic construct
  source 1..75: mol_type = other DNA
ggatggttgggttatggtgccgaaggagttaaccccggaaatgatgagagccgttcagattagaagtgagcttgg

SEQ ID NO: 559910 - DNA, 75 bp, synthetic construct
  source 1..75: mol_type = other DNA
ctgcacatgcgtattttcatgaaaggagatcactcaataacttccatcgagatcgggtaataacatttgaacaga

SEQ ID NO: 559911 - DNA, 75 bp, synthetic construct
  source 1..75: mol_type = other DNA
cctgtgcagttatcatgtgcgaacgacgaaaagccaccgccgttttgcgcaaaatcccgccagaaaaccttgaac

SEQ ID NO: 559912 - DNA, 75 bp, synthetic construct
  source 1..75: mol_type = other DNA
gctgaacgagctggctgcggcgttgggcaacgacccgaattttgcgaccaccatgactagcgcgcttgcgggtaa

SEQ ID NO: 559913 - DNA, 75 bp, synthetic construct
  source 1..75: mol_type = other DNA
atacctgtgacggtagcgggcggattgaaattaaagtaccagtcacgtggacgaccataaaatccatctgggata

SEQ ID NO: 559914 - DNA, 75 bp, synthetic construct
  source 1..75: mol_type = other DNA
cacttgggatgacggtgatggcgaagacctgtatctcaaagaggtaacccactggatgccgctacccgaaccgct

SEQ ID NO: 559915 - DNA, 75 bp, synthetic construct
  source 1..75: mol_type = other DNA
cggtaatggatgaaacgaacaagaaagcgcccttaaatagtcctgcactgaccggaacgccaacaacaccaactg

SEQ ID NO: 559916 - DNA, 75 bp, synthetic construct
  source 1..75: mol_type = other DNA
ttctgttgtgggatgcacagcgccgtgctggcatcagcgatgctgaaattaccgctgctatggaagataaattga

SEQ ID NO: 559917 - DNA, 75 bp, synthetic construct
  source 1..75: mol_type = other DNA
caatgcctgaactggctgctgttaccctcagtcgctcccgcactggcaatggcgatgctggcaattgtggcctgg

SEQ ID NO: 559918 - DNA, 75 bp, synthetic construct
  source 1..75: mol_type = other DNA
ggcggtgatttatgcaccgctgatcccggcagctctcacgctgatatcgcctgctttgtcgttgacgcactggca

SEQ ID NO: 559919 - DNA, 75 bp, synthetic construct
  source 1..75: mol_type = other DNA
gccgtggctgctcgccattccccacgtggcttttgccaccagcgcccttctgctctttgctgacggcggcctgct

SEQ ID NO: 559920 - DNA, 75 bp, synthetic construct
  source 1..75: mol_type = other DNA
tgcccgctcatgctgcgtcctgcgcttattgccttcgctgtcggattttcagtcagcattgcgcaatatatgccg

SEQ ID NO: 559921 - DNA, 75 bp, synthetic construct
  source 1..75: mol_type = other DNA
gtggctatggttgcccattttattacccgctctgccgctggtggcgggccagtacacgctggcgctatggctgaa

SEQ ID NO: 559922 - DNA, 75 bp, synthetic construct
  source 1..75: mol_type = other DNA
tatggcgcacctggcggcgcacaattccccgcaaagatggcgttcgcaaaccagccacgcctttattgcccggta

SEQ ID NO: 559923 - DNA, 75 bp, synthetic construct
  source 1..75: mol_type = other DNA
gataacctgtcacagcaaaaacttgttcacagagatgtgctgccgttctcgcttccggtaactccggatggttgg

SEQ ID NO: 559924 - DNA, 75 bp, synthetic construct
  source 1..75: mol_type = other DNA
tcgccacgagcatgccaaatggtctgactccacatttggctgcgttggccccattggtccactgaaacacctctc

SEQ ID NO: 559925 - DNA, 75 bp, synthetic construct
  source 1..75: mol_type = other DNA
tcaacaaatgccgctgcgggaataaatcacacacggtcaaaacagctcgcggaaatgaaaccgccttgtgggatg

SEQ ID NO: 559926 - DNA, 75 bp, synthetic construct
  source 1..75: mol_type = other DNA
tgctctttgctgacggagggctgctttatgactatttcccgtatttcactccgccaatggacaaattgggtattg

SEQ ID NO: 559927 - DNA, 75 bp, synthetic construct
  source 1..75: mol_type = other DNA
cccattttattacccgctctgccactggtggcgggccagtacatgctggcgctatggctgaacatagatgggagc

SEQ ID NO: 559928 - DNA, 75 bp, synthetic construct
  source 1..75: mol_type = other DNA
ggcgatgctggcgattgttgcctggtcgctgtcggtcgtggatgtggcgattattcttgggccaggtaatccccc

SEQ ID NO: 559929 - DNA, 75 bp, synthetic construct
  source 1..75: mol_type = other DNA
tgtagatgatgcatctatgttttttaactcctttcaaccaaggaaatttgaaaacaaacccctttatgagaaaga

SEQ ID NO: 559930 - DNA, 75 bp, synthetic construct
  source 1..75: mol_type = other DNA
cgtaatcagggcggactcacggcatttgaactgggctcacacggtattcctcacaccctgatcgccgacaacgcg

SEQ ID NO: 559931 - DNA, 75 bp, synthetic construct
  source 1..75: mol_type = other DNA
tgaagaaagtgtctgaactggaaacgctggtggcgcaggccaaagaagcggataaaggcggcatgaatttctcgt

SEQ ID NO: 559932 - DNA, 75 bp, synthetic construct
  source 1..75: mol_type = other DNA
aaagagcaacttcaggacgcaaactcaatctggatggccgaagactcatttcccgagagcattatgcgagtacaa

SEQ ID NO: 559933 - DNA, 75 bp, synthetic construct
  source 1..75: mol_type = other DNA
gcaagaagtctttttcatgcagttactataatgataactttacttttctcatggggaataggtgtcttattcttt

SEQ ID NO: 559934 - DNA, 75 bp, synthetic construct
  source 1..75: mol_type = other DNA
ccctttgtggcgcaagctgtggcttaacgtaatgccacaggatgaagccgatttacctttaccaaaaacctttga

SEQ ID NO: 559935 - DNA, 75 bp, synthetic construct
  source 1..75: mol_type = other DNA
cggtcgttgggatgatatctgggaagacgggctggaggttgaaaagctacgggaagcattgctgtctttagaaca

SEQ ID NO: 559936 - DNA, 75 bp, synthetic construct
  source 1..75: mol_type = other DNA
cggcttacgctggattccatcaccatcagcagcagctttgacggctccatggtggtagagcttaccgggcagcgc

SEQ ID NO: 559937 - DNA, 75 bp, synthetic construct
  source 1..75: mol_type = other DNA
tattgatcatctgcgccagtcggtgcgggacattttgctgacgccgcagggtagccgcattgcccgtcgggaata

SEQ ID NO: 559938 - DNA, 75 bp, synthetic construct
  source 1..75: mol_type = other DNA
tgaatggtgactacgaacctgaaaattgcagatgggcgacttttgaagaacaggccaataacacgcgttcaaact

SEQ ID NO: 559939 - DNA, 75 bp, synthetic construct
  source 1..75: mol_type = other DNA
gaccgcacgcaagaaatattttacaacatcagcggagaagcaaaatgctaacgccgccagggagaaaaagcagga

SEQ ID NO: 559940 - DNA, 75 bp, synthetic construct
  source 1..75: mol_type = other DNA
cgggacattttgctgacgccacagggtagccgcattgcccgtcgggaatatggttccctgctgtcggcgctgata

SEQ ID NO: 559941 - DNA, 75 bp, synthetic construct
  source 1..75: mol_type = other DNA
cggctgacgctggattccatcactattaacagcaattttgacggttcaatggtggtagagctgaccgggcggcgg

SEQ ID NO: 559942 - DNA, 75 bp, synthetic construct
  source 1..75: mol_type = other DNA
cctggttaagaaattaggtaacgataaaatcaagctggttctcgagctaacggaacgtaaccctattccggtaac

SEQ ID NO: 559943 - DNA, 75 bp, synthetic construct
  source 1..75: mol_type = other DNA
agatgaagggcgctatgaacgtttaaccagcggttacctgccggaagcagaaatcgtctttctggatgagatctg

SEQ ID NO: 559944 - DNA, 75 bp, synthetic construct
  source 1..75: mol_type = other DNA
taaaattcgctttccagaatgcgcgcgcttttgaatatctgatgacccgtttctccaccccggaagaagtttttg

SEQ ID NO: 559945 - DNA, 75 bp, synthetic construct
  source 1..75: mol_type = other DNA
gccaggtgaaataaaacaacaactggaagagcttgaaagtgactggcgcaagcaacacgctttattcagcgaaca

SEQ ID NO: 559946 - DNA, 75 bp, synthetic construct
  source 1..75: mol_type = other DNA
agcggatattcgtaacatgactattcagtctgttggtaacggtgggtattcacatccggaagggatttctacaac

SEQ ID NO: 559947 - DNA, 75 bp, synthetic construct
  source 1..75: mol_type = other DNA
ttcctatagatgatccttattatggagagtttattggtattcctgtagatgatgcatctatgttttttaactcct

SEQ ID NO: 559948 - DNA, 75 bp, synthetic construct
  source 1..75: mol_type = other DNA
ccaacatctggttgtacgcgatgtgagtttacaaggcagtacgctagcacttcccggttcatcggctgaaggtct

SEQ ID NO: 559949 - DNA, 75 bp, synthetic construct
  source 1..75: mol_type = other DNA
tcttattgtcataatgacccgccagttgatgaaacagactgcggatattctgatgccggtaaaacatttgctgcc

SEQ ID NO: 559950 - DNA, 75 bp, synthetic construct
  source 1..75: mol_type = other DNA
gcaaaagttcgatttattcaacaaagccgtctggcgttggaaaaccacgagtttaaaccgtggatccaaccggtt

SEQ ID NO: 559951 - DNA, 75 bp, synthetic construct
  source 1..75: mol_type = other DNA
agccttcatcagcacaacattacctttgcgctggatgactttggtacgggttatgcgacctatggtgatgctgcc

SEQ ID NO: 559952 - DNA, 75 bp, synthetic construct
  source 1..75: mol_type = other DNA
gccagaagcctgttttatgctgttacagttatcgtagtattcttgatcggatggggaactggtattgtttttttt

SEQ ID NO: 559953 - DNA, 75 bp, synthetic construct
  source 1..75: mol_type = other DNA
gtctgagtatcgtggcggaaggggtagaaacccaggagcaggcggatttaatgatcggtaaaggcgttcactttt

SEQ ID NO: 559954 - DNA, 75 bp, synthetic construct
  source 1..75: mol_type = other DNA
gtctcggcgggttgttttttggccgcgggatttgaaaaagaatgcctgaacctggtcaagaaattaggaaacgat

SEQ ID NO: 559955 - DNA, 75 bp, synthetic construct
  source 1..75: mol_type = other DNA
gatgaaattggcgatatctcgccgatgatgcaggtgcgtctgctgcgtgcgattcaggagcgcgaagttcagcgt

SEQ ID NO: 559956 - DNA, 75 bp, synthetic construct
  source 1..75: mol_type = other DNA
atgatgcaggtgcgtctgctgcgtgcgattcaggagcgcgaagttcagcgtgtcggtagcaaccagattatctcg

SEQ ID NO: 559957 - DNA, 75 bp, synthetic construct
  source 1..75: mol_type = other DNA
aacaggcggcaacaaaaccgaagccgcccgccagttagggatcacgcgcaaaacgctattggcaaaactgtcgcg

SEQ ID NO: 559958 - DNA, 75 bp, synthetic construct
  source 1..75: mol_type = other DNA
tcgatttgcacaaacgctacggcgaacatgaagtgctgaaaggggtatcactgcaagcgaatgccggagatgtaa

SEQ ID NO: 559959 - DNA, 75 bp, synthetic construct
  source 1..75: mol_type = other DNA
ccagcggcgcgatggtcgggtttaacatccatttccactctctggcaagcgcatcgattaccgcgatgttcagtt

SEQ ID NO: 559960 - DNA, 75 bp, synthetic construct
  source 1..75: mol_type = other DNA
ttaatagccatttcaacaatcccgctggttttctggtttatgaaaaaacagtaccaaaaagttgaaattggtata

SEQ ID NO: 559961 - DNA, 75 bp, synthetic construct
  source 1..75: mol_type = other DNA
ctggatatgaagcgctttgaacccgctatgcgtcatttactggatatgtatgttcgcgccgatggtagcgaagtg

SEQ ID NO: 559962 - DNA, 75 bp, synthetic construct
  source 1..75: mol_type = other DNA
tcgaggcggctaaacaacatattgcccgtcgtgaaggcggtattatctggcacacacagggatcgggtaaaagcc

SEQ ID NO: 559963 - DNA, 75 bp, synthetic construct
  source 1..75: mol_type = other DNA
gctattgacggcgaccgtctgttttatctgatttctgaggatacgactgaaccaggtgaactgcgtcgtgctgag

SEQ ID NO: 559964 - DNA, 75 bp, synthetic construct
  source 1..75: mol_type = other DNA
tacgccccaggcgatggatctgctgattcattacgactggccgggaaatattcgtgaactggaaaacgcggtgga

SEQ ID NO: 559965 - DNA, 75 bp, synthetic construct
  source 1..75: mol_type = other DNA
gagattagtttcgctatcgcggaagagatcaaaggttattctgtgacggtcgcagatgtaatggccctagtgaag

SEQ ID NO: 559966 - DNA, 75 bp, synthetic construct
  source 1..75: mol_type = other DNA
agtgaagctggttttgccggtaaatgtgcgattgtgacgagctaccagccaaatgccagtgagattaaaggtgag

SEQ ID NO: 559967 - DNA, 75 bp, synthetic construct
  source 1..75: mol_type = other DNA
ggcgcgccagaacagttattcggtaacccgcaaagtcctcgtctgcaacagttccttaagggatcgctgaaataa

SEQ ID NO: 559968 - DNA, 75 bp, synthetic construct
  source 1..75: mol_type = other DNA
aaagatttctcgctgaaggattcttcgctggaaatgctttatccgatttatgatacgccaacaaatatgttgttc

SEQ ID NO: 559969 - DNA, 75 bp, synthetic construct
  source 1..75: mol_type = other DNA
acaggaattatttgatgccatgaagaagggggctttaaaatctgccgatactcttcagaaggtcactcaggaatt

SEQ ID NO: 559970 - DNA, 75 bp, synthetic construct
  source 1..75: mol_type = other DNA
agcggcggttaaaacagcaggtgcatttatctcaatgcaggctgtattagccagttatcagaagattatggaaat

SEQ ID NO: 559971 - DNA, 75 bp, synthetic construct
  source 1..75: mol_type = other DNA
agacagctttaggtaagttagcaaacaactgggatgatacgatggtgaaaatcttctcaggttcacaggatgagc

SEQ ID NO: 559972 - DNA, 75 bp, synthetic construct
  source 1..75: mol_type = other DNA
agatgaaaccagctttatgacctttagcagtaatatctacgaccaatacgcagaagctacgctattaagttcatc

SEQ ID NO: 559973 - DNA, 75 bp, synthetic construct
  source 1..75: mol_type = other DNA
aagttgtaaggtcaaaggtggaacccacagaccaagcattgactggtgacatgaactctttagccgctgttttat

SEQ ID NO: 559974 - DNA, 75 bp, synthetic construct
  source 1..75: mol_type = other DNA
tcggtacagatggcattccggaagcccgcaaaatggtggaagccggacaaatgaccgcgacggttgcccagaacc

SEQ ID NO: 559975 - DNA, 75 bp, synthetic construct
  source 1..75: mol_type = other DNA
aatggtgccaccgaagccttcaaaaaagcaagccagatcaagcttgtcgccagccagcctgccgactgggaccgc

SEQ ID NO: 559976 - DNA, 75 bp, synthetic construct
  source 1..75: mol_type = other DNA
agtatctggcgaaagtcgggatagacgaacgtgcgcaggggaaatatccggtgcatctttccggcggtcagcaac

SEQ ID NO: 559977 - DNA, 75 bp, synthetic construct
  source 1..75: mol_type = other DNA
tttaaacagtttaggtggaagtggtaagagtctaggtgaaagtcttggcaatctcatgacttctatgtcacatgg

SEQ ID NO: 559978 - DNA, 75 bp, synthetic construct
  source 1..75: mol_type = other DNA
aacgaaaagttttgtcgtcacctgctatgacccggatgcgccaaccggctccggctggtggcactgggtagttgt

SEQ ID NO: 559979 - DNA, 75 bp, synthetic construct
  source 1..75: mol_type = other DNA
taatggaatagacgcggctgtttcatttagccaggcacagattcctgatgttgttcatcagttgctgctatggaa

SEQ ID NO: 559980 - DNA, 75 bp, synthetic construct
  source 1..75: mol_type = other DNA
cagacttggatttcatcaaactaacgctgtaaatgttgttttttccagcgaatgggataagtttgctcaaaagac

SEQ ID NO: 559981 - DNA, 75 bp, synthetic construct
  source 1..75: mol_type = other DNA
cgatccacaaagttccggtaccgcctacaccgcgctggctacctttgcgcagctgtgggggaagatcaggccttt

SEQ ID NO: 559982 - DNA, 75 bp, synthetic construct
  source 1..75: mol_type = other DNA
gttgatttccccgtgtgaaggtacgggctacgaaattggcggcgtcagcattctgaaaggcgcgcgcaacctcga

SEQ ID NO: 559983 - DNA, 75 bp, synthetic construct
  source 1..75: mol_type = other DNA
atggataacgccaaccgtctgtatgccggtctggagaaactcggttacgagttaagttcacacattagcccggta

SEQ ID NO: 559984 - DNA, 75 bp, synthetic construct
  source 1..75: mol_type = other DNA
attcatcattttggcgagcaaattattgatttcgtcgcgggtgatgccacgacagaagttaaagcactggcgttg

SEQ ID NO: 559985 - DNA, 75 bp, synthetic construct
  source 1..75: mol_type = other DNA
tacaggagtgggtagcacagaaaaaagggcttaacagcagcagtgcaaacactgccagagtggtttttctggcaa

SEQ ID NO: 559986 - DNA, 75 bp, synthetic construct
  source 1..75: mol_type = other DNA
cctgaaattaatcaactacgacatggataaatatggttccacggatgttcgtaaggcattgattaataaatgggt

SEQ ID NO: 559987 - DNA, 75 bp, synthetic construct
  source 1..75: mol_type = other DNA
ccgacagccacgccagtatttatgacgcctgttctctcggtggcgcggaaattattcgtttccgccataacgatg

SEQ ID NO: 559988 - DNA, 75 bp, synthetic construct
  source 1..75: mol_type = other DNA
gcgagttgcgccgggaaccggcggatgagattgcgcaagcgttgcttaataacacgtatacggtgtttagcgttc

SEQ ID NO: 559989 - DNA, 75 bp, synthetic construct
  source 1..75: mol_type = other DNA
gcgagttacgcccggaacccgcagatgagattgccgacgtgttgcttaataacacgtatgcggtgtttaacgtgc

SEQ ID NO: 559990 - DNA, 75 bp, synthetic construct
  source 1..75: mol_type = other DNA
attagagaaagaaattgcagagttcttcaaccgtccgactgccatcgtcttttccaccggctataccgctaattt

SEQ ID NO: 559991 - DNA, 75 bp, synthetic construct
  source 1..75: mol_type = other DNA
gctggcggaaattgttgatatcaaacgtcgtctcggcggttatttgattgtcgatgaagctcattcgtttggcgt

SEQ ID NO: 559992 - DNA, 75 bp, synthetic construct
  source 1..75: mol_type = other DNA
gcgattatcatcgttgagggcatctacagcatgctcggtgacgttgcgccgctggcggaaattgttgatatcaaa

SEQ ID NO: 559993 - DNA, 75 bp, synthetic construct
  source 1..75: mol_type = other DNA
ggcgcagttgcaattttgtgggtgctggcgattggttttaatcctgcgctaaggatttcgttaaagagctatttt

SEQ ID NO: 559994 - DNA, 75 bp, synthetic construct
  source 1..75: mol_type = other DNA
ttcaggcaagcaataccttttgccagtctactgagcatggtatagtcatcgacaataagctaacagctattcttg

SEQ ID NO: 559995 - DNA, 75 bp, synthetic construct
  source 1..75: mol_type = other DNA
ccggtgttctttacccctgtcgataaacctgtctcttatacacaaatccccacccggggatttgtgatgtctgtc

SEQ ID NO: 559996 - DNA, 75 bp, synthetic construct
  source 1..75: mol_type = other DNA
gctaaagccaatcccggcacggttacctatccccgcccaccggactttaccggcacggcgtttcttgaacagttg

SEQ ID NO: 559997 - DNA, 75 bp, synthetic construct
  source 1..75: mol_type = other DNA
attgccaatgccattcgagaggaaacagctgattatgaattggatattcaggctgtaatggaactcgctaaagct

SEQ ID NO: 559998 - DNA, 75 bp, synthetic construct
  source 1..75: mol_type = other DNA
gcatttgatggttatgacaaggaagacgttgcagggctgctgaaagatcgtttagagcaagctaagctcgatttg

SEQ ID NO: 559999 - DNA, 75 bp, synthetic construct
  source 1..75: mol_type = other DNA
ttgctgactctgttattagaaagaaagtttccttaattaataaatcaagaatacttgaagactactctgtgactg

SEQ ID NO: 560000 - DNA, 75 bp, synthetic construct
  source 1..75: mol_type = other DNA
tgtgtttgccgtgctttgcgagttgcgccgggaaccggcggatgagattgcgcaagcgttgcttaataacacgta

SEQ ID NO: 560001 - DNA, 75 bp, synthetic construct
  source 1..75: mol_type = other DNA
cgaaccagcatgagcgaaaacgaactggacattttaacgcggtatttccagtacaacgccaaagatattaccgag

SEQ ID NO: 560002 - DNA, 75 bp, synthetic construct
  source 1..75: mol_type = other DNA
cgtcattgcagggtgagcttcttgatcccgcgttagcggaccgtaaaccgttgtggcaatacgcaggaaaacttg

SEQ ID NO: 560003 - DNA, 75 bp, synthetic construct
  source 1..75: mol_type = other DNA
gattgttatcgctgttttctttggcaacacatgccagtgactggcaggaaataaaaaatgaggccaaaggacaaa

SEQ ID NO: 560004 - DNA, 75 bp, synthetic construct
  source 1..75: mol_type = other DNA
ttgcagactttatcgccggtcatccctcctgcacggtctgtttctgggaaaccttccacaaaatgtacccggatt

SEQ ID NO: 560005 - DNA, 75 bp, synthetic construct
  source 1..75: mol_type = other DNA
caccgtacgaatacgtcacgttctgccatacctgccgtcgttttgatttatacgaaacagaagcggagatgaagg

SEQ ID NO: 560006 - DNA, 75 bp, synthetic construct
  source 1..75: mol_type = other DNA
atgctgcgtctggattaccgctgctgcaacttggcgttgcgctgaaaaccatgggtgatgcgacgcgtggtgaag

SEQ ID NO: 560007 - DNA, 75 bp, synthetic construct
  source 1..75: mol_type = other DNA
agtacgctggtggttcgtccgggagataaatctcgttccgcgacgccaaaacgtgcggttggcgtgttgcatttg

SEQ ID NO: 560008 - DNA, 75 bp, synthetic construct
  source 1..75: mol_type = other DNA
caaatgactttggcagtagtgaaagcaaagtcgttgttgccgcaccagtgattgctgaacttaacacaccgcgct

SEQ ID NO: 560009 - DNA, 75 bp, synthetic construct
  source 1..75: mol_type = other DNA
gcgctgcgtgaaatctgggagcatcgtgcagatgccgcttctggtttaccgctgctgcaacttggcattgcgctg

SEQ ID NO: 560010 - DNA, 75 bp, synthetic construct
  source 1..75: mol_type = other DNA
gacattgctggatctctctgaagtccaactcgatggcgcagccacgctggtgctgaccttctctatccctctcga

SEQ ID NO: 560011 - DNA, 75 bp, synthetic construct
  source 1..75: mol_type = other DNA
ccgcaaccgatggtggaatcaatgtatgttccccaatggcgggcgaccggcgcggctgaagatctgctgattgtc

SEQ ID NO: 560012 - DNA, 75 bp, synthetic construct
  source 1..75: mol_type = other DNA
cgtgttaaacccgaatctctgccagcattcattagccaatgggaataccgcaattcgctggcgaactggcaatct

SEQ ID NO: 560013 - DNA, 75 bp, synthetic construct
  source 1..75: mol_type = other DNA
ttacgccacctcgaacctaaacgtgatttgatcgtgactattgggcaggaaatgaaggcgctcaataacgcaacc

SEQ ID NO: 560014 - DNA, 75 bp, synthetic construct
  source 1..75: mol_type = other DNA
ggtgatgaactgaaacgcgggggtaaaccgccagtaaatcacgtcaatattgttgcgcaacaggcgctaccggta

SEQ ID NO: 560015 - DNA, 75 bp, synthetic construct
  source 1..75: mol_type = other DNA
gcgatacctcgcgtctgacgctggatatcactaatcttaccgataaaccgcaaaaactgaacgttgccctgaccg

SEQ ID NO: 560016 - DNA, 75 bp, synthetic construct
  source 1..75: mol_type = other DNA
cggttacactgccgattggcgattttaacggtgaattacgcgtcatggcgcaagcctggacggcagatgacttcg

SEQ ID NO: 560017 - DNA, 75 bp, synthetic construct
  source 1..75: mol_type = other DNA
gcttctggtttaccgctgctgcaacttggcgttgcgctgaaaaccatgggtgatgcaacgcgtggtgaagaagcg

SEQ ID NO: 560018 - DNA, 75 bp, synthetic construct
  source 1..75: mol_type = other DNA
ttcagtaaagattacgaaaaaactataactacccgcgatatccaacccagcgtcggttttgccagccgtggttcg

SEQ ID NO: 560019 - DNA, 75 bp, synthetic construct
  source 1..75: mol_type = other DNA
cctgaaaaggccgttgagcctggcgatttctgcatagccagacttggtggtgatgaatttaccttcaagaaactg

SEQ ID NO: 560020 - DNA, 75 bp, synthetic construct
  source 1..75: mol_type = other DNA
atcaaagatagtgggcaagtgtttttgcaaccacttaatccgcagtttccaatcatcccatgcaatgagaactgc

SEQ ID NO: 560021 - DNA, 75 bp, synthetic construct
  source 1..75: mol_type = other DNA
ttcacctgttggcgaatactcatcagcccccgttaaaaaacaatatgagtaccctgttttttctcatgttcaggc

SEQ ID NO: 560022 - DNA, 75 bp, synthetic construct
  source 1..75: mol_type = other DNA
catgtggggttgccgggttgtcgtcggttatgtgctgggcatcatgcttggctggggtgtggttggtgtctggat

SEQ ID NO: 560023 - DNA, 75 bp, synthetic construct
  source 1..75: mol_type = other DNA
tcaacagtttgttgcatttgcagacaatttgtcggcgaaaatctttgcagctttgctgattctccctcattattt

SEQ ID NO: 560024 - DNA, 75 bp, synthetic construct
  source 1..75: mol_type = other DNA
cgacgacgagcgagggtggcgacgcggcagtcattggtgatcatgacgttgtttgccgtactgttggcaacgctt

SEQ ID NO: 560025 - DNA, 75 bp, synthetic construct
  source 1..75: mol_type = other DNA
gtttattgcaaggatggtaaacgcagagaaaattatcctgatattagttttgacttcctgggatatacctttcgc

SEQ ID NO: 560026 - DNA, 75 bp, synthetic construct
  source 1..75: mol_type = other DNA
gtgattaaacccgacgggcaggtactcaggagcgtcgttagtcagccggagaatggcctctaccactttacctgg

SEQ ID NO: 560027 - DNA, 75 bp, synthetic construct
  source 1..75: mol_type = other DNA
tcaaaccgcttcagcaggcaggcgtgtatctggctgtgatgaatcaggctggacgttacgattacagtaatcccg

SEQ ID NO: 560028 - DNA, 75 bp, synthetic construct
  source 1..75: mol_type = other DNA
ttcaatgcgctaagccagaaagaaaccgataagctttggcagcttgtcctttggttccctgccctgctggggatc

SEQ ID NO: 560029 - DNA, 75 bp, synthetic construct
  source 1..75: mol_type = other DNA
aaccgaatggcctccggcagctacatgccgccagcagtgcggcgcgtcgagattccaaaagcgtcaggcggggta

SEQ ID NO: 560030 - DNA, 75 bp, synthetic construct
  source 1..75: mol_type = other DNA
gagttatatgccgccaccggtaaggcgcgttgagataccaaaagcaacaggagggacgcgaccgttggggattcc

SEQ ID NO: 560031 - DNA, 75 bp, synthetic construct
  source 1..75: mol_type = other DNA
atggacgataaagagcagtttacgagtctcgtggcaaagcatgcctccagactcaccgaagagcagctggccggg

SEQ ID NO: 560032 - DNA, 75 bp, synthetic construct
  source 1..75: mol_type = other DNA
gaggttgttgtcaaaatctcaggaggtgcgattacccggcagggagttcgaaacagtattgactatatgagccgg

SEQ ID NO: 560033 - DNA, 75 bp, synthetic construct
  source 1..75: mol_type = other DNA
aacacttccttaaactcaagacgcttaacaaaggtgtagaaaaaacctattggggcgctggttttggagatttgg

SEQ ID NO: 560034 - DNA, 75 bp, synthetic construct
  source 1..75: mol_type = other DNA
aaaaacgtctcgaaaacggtgacgattactttgccgttaaccctaagggcaggtgcctgcattgctgctggatga

SEQ ID NO: 560035 - DNA, 75 bp, synthetic construct
  source 1..75: mol_type = other DNA
tggctggaagactgcacacaggaatgagtggcagctagagaacctgggggttaagggcatagacagaatctcttc

SEQ ID NO: 560036 - DNA, 75 bp, synthetic construct
  source 1..75: mol_type = other DNA
atgatagatcgtgctaatgaccctcaaaatgttttcgatgataaaggtaaggaaaataaaaaagtaacccaaaat

SEQ ID NO: 560037 - DNA, 75 bp, synthetic construct
  source 1..75: mol_type = other DNA
agccctgatatgcagctgaagcaacaacagcgaatggcgcagtttacgcagcagaaagcatccacgttacagtca

SEQ ID NO: 560038 - DNA, 75 bp, synthetic construct
  source 1..75: mol_type = other DNA
ttatcgttgagctaggcttcaatgagaacgttattaagggactgcaaagagttgaaaaggcagctttgcagtcag

SEQ ID NO: 560039 - DNA, 75 bp, synthetic construct
  source 1..75: mol_type = other DNA
gagcagatggcgagcaagggcaagattcaagctgaagagcttcgtgggcagttaggtgaccgtatggctggtgca

SEQ ID NO: 560040 - DNA, 75 bp, synthetic construct
  source 1..75: mol_type = other DNA
ttttgattgagctaggttttagctctcagcgagttttaaaaggcttggaaaaagccgagaaacaaacgatgcagg

SEQ ID NO: 560041 - DNA, 75 bp, synthetic construct
  source 1..75: mol_type = other DNA
cctgctctctcgcttcccatatcaccctgcgtgagagcggaaaggattttaccctcgtcagtgtggatttaatga

SEQ ID NO: 560042 - DNA, 75 bp, synthetic construct
  source 1..75: mol_type = other DNA
aacaatcaccttgaaggctggattttacagactaagaagttctattacagtcttgatgacactaaacgaaaacta

SEQ ID NO: 560043 - DNA, 75 bp, synthetic construct
  source 1..75: mol_type = other DNA
aaatttgacagcaatctgacaagttctttgaagtcaatggaaggaaaaattaataagacctttgaccgtctggaa

SEQ ID NO: 560044 - DNA, 75 bp, synthetic construct
  source 1..75: mol_type = other DNA
tgaacatcctgatcattgggcgaaaatttgaagctatcagtgatgtgaaaacatatacggaaatgtgggcttaca

SEQ ID NO: 560045 - DNA, 75 bp, synthetic construct
  source 1..75: mol_type = other DNA
gacagctaaagcgatcttaaatgaataccctattgatttatgggttctttctgccggtttaggcctcctccacca

SEQ ID NO: 560046 - DNA, 75 bp, synthetic construct
  source 1..75: mol_type = other DNA
ggctgctaataagcttaaagatcagctggaaagcgaagatgatatatgtcatgtaatcagtgataaagattttat

SEQ ID NO: 560047 - DNA, 75 bp, synthetic construct
  source 1..75: mol_type = other DNA
attgcacttgaattatattcagtagatgcggaacgggtgtctctgagagtccgggtggaagacgatatttctgtt

SEQ ID NO: 560048 - DNA, 75 bp, synthetic construct
  source 1..75: mol_type = other DNA
gaagcgcaatttaacgacgctcaaaattttaaggggttttcatatatagctaaaggtattaaaaaatacaaaggg

SEQ ID NO: 560049 - DNA, 75 bp, synthetic construct
  source 1..75: mol_type = other DNA
ggttacagtatccgccgtccagataatgaaaatcttgaagattacgaggggcttttactggggcatatcagcgct

SEQ ID NO: 560050 - DNA, 75 bp, synthetic construct
  source 1..75: mol_type = other DNA
atctaagcatcctacatctattgtagagttaatgaaaaaaagaaaaaaagaatattatataatctgtggttcccc

SEQ ID NO: 560051 - DNA, 75 bp, synthetic construct
  source 1..75: mol_type = other DNA
atctggaaaccaaaacagacgatgttctgcgtatttttgtagaccacgctgcatttgatgttagtggttttgatc

SEQ ID NO: 560052 - DNA, 75 bp, synthetic construct
  source 1..75: mol_type = other DNA
gcgcacgttacggcagaaacgccaaaaggtaagcacgacatcgaaggcaaccgtctgttttatcttatctctgaa

SEQ ID NO: 560053 - DNA, 75 bp, synthetic construct
  source 1..75: mol_type = other DNA
tgattttgttgtgttttatccggggaagtgcataaaccgctgtgcgcagtgggcgcgccagcccaggttcgcaaa

SEQ ID NO: 560054 - DNA, 75 bp, synthetic construct
  source 1..75: mol_type = other DNA
atggattgaatcactgtcgggtattgagccggttgatattgttgttgcgtttgagttgcattcggtgagcgaagc

SEQ ID NO: 560055 - DNA, 75 bp, synthetic construct
  source 1..75: mol_type = other DNA
ttataaagccctgaatgaattaagtagaataaataaaattattttttattatcttatcttaattgcttcagtttt

SEQ ID NO: 560056 - DNA, 75 bp, synthetic construct
  source 1..75: mol_type = other DNA
aatgccaaaccgaacgcgtcagcgccacgtaaagcaaacgcagatcttccgccagacgttcgacctccgcaagct

SEQ ID NO: 560057 - DNA, 75 bp, synthetic construct
  source 1..75: mol_type = other DNA
ggattcactgggctacagccgctggcaatccctgaactggctgctgctaccctccgccgctccagctctggcaat

SEQ ID NO: 560058 - DNA, 75 bp, synthetic construct
  source 1..75: mol_type = other DNA
cagatacttttacctttaattcatccacctattatggtcaacgtgactcatctaaaggtcgattgtatattccta

SEQ ID NO: 560059 - DNA, 75 bp, synthetic construct
  source 1..75: mol_type = other DNA
accggagcaacaacgccaaccgcagcagcctgaagccgattccgcgatgagcgggaagccgattgggttaacccg

SEQ ID NO: 560060 - DNA, 75 bp, synthetic construct
  source 1..75: mol_type = other DNA
gtcccgttctgactgaacgtccaggaccagctggcatgacaccggaagcagattccgggcgttgtgtgcagcagg

SEQ ID NO: 560061 - DNA, 75 bp, synthetic construct
  source 1..75: mol_type = other DNA
aaacccctggttgctcccggtaagcggcacgaacaaccagcgttgtgtgaatcatatttctgaaccggataccga

SEQ ID NO: 560062 - DNA, 75 bp, synthetic construct
  source 1..75: mol_type = other DNA
gtgaatatccgcatcgggcagggtcaaacccgaagaaatccgcgttcaatgcctggagggccagattacgcgaag

SEQ ID NO: 560063 - DNA, 75 bp, synthetic construct
  source 1..75: mol_type = other DNA
gttaatgttgaagacagaacgtttaccaccacattacccccaggggatttttaccggttagacggaaaggtatgg

SEQ ID NO: 560064 - DNA, 75 bp, synthetic construct
  source 1..75: mol_type = other DNA
ctggttacgatcaatttatggataacaaagggttactcatcgctggtgcttcaatagttgctggagcagttctgg

SEQ ID NO: 560065 - DNA, 75 bp, synthetic construct
  source 1..75: mol_type = other DNA
atgatttcaaggctaaagaaaatagcaaataaagaattgcttcctgaaaaatacgatctgaactactatactcat

SEQ ID NO: 560066 - DNA, 75 bp, synthetic construct
  source 1..75: mol_type = other DNA
gaccttgccggtggtccaatagaaaacctgacgatagatggcgtaacaatcaatagggaaggtatcgctattgtt

SEQ ID NO: 560067 - DNA, 75 bp, synthetic construct
  source 1..75: mol_type = other DNA
ttttgtattaaattcggccgcaaaaaaagcagccaaaaggacaactcaccatatatgtgtcgtttgggttgacag

SEQ ID NO: 560068 - DNA, 75 bp, synthetic construct
  source 1..75: mol_type = other DNA
acccgttgcgtgccggagcaaacccgaagaaatccgctttcagtgcctggaaggccagattacgcgagggggtgc

SEQ ID NO: 560069 - DNA, 75 bp, synthetic construct
  source 1..75: mol_type = other DNA
atcaggactggcagaaaagccaggaattgccaggcgcgccgcaacttgtggaaacacaaaccctccgagatttgc

SEQ ID NO: 560070 - DNA, 75 bp, synthetic construct
  source 1..75: mol_type = other DNA
ttcttttgagggatgtgaacacgacattttctattctgataggtgcgatgctattggctttggtctcttaagttt

SEQ ID NO: 560071 - DNA, 75 bp, synthetic construct
  source 1..75: mol_type = other DNA
cataatctcgcccttctgggccgcaatgtgcatctgatatctgctgtaggcaatgatttttatggcgaaacatta

SEQ ID NO: 560072 - DNA, 75 bp, synthetic construct
  source 1..75: mol_type = other DNA
cggaggtgtcggacgcaacatcgcccataatctcgcccttctgggccgcaatgtgcatctgatatctgctgtagg

SEQ ID NO: 560073 - DNA, 75 bp, synthetic construct
  source 1..75: mol_type = other DNA
gcatctcgtggggaccggtaatcttttttttgtgccttggtaaagcgttacgctatgttgcattgcagcagctac

SEQ ID NO: 560074 - DNA, 75 bp, synthetic construct
  source 1..75: mol_type = other DNA
tgctgatgaaattccgatgtttgtcgataccgtttccgaatttaaagcgaacaaagtaaaaaactggtacagccg

SEQ ID NO: 560075 - DNA, 75 bp, synthetic construct
  source 1..75: mol_type = other DNA
gaagttgattcgccagaaggatattcgagtgatggccatcaacgtaccgacaacctggattgcttcagcgagcca

SEQ ID NO: 560076 - DNA, 75 bp, synthetic construct
  source 1..75: mol_type = other DNA
atggacaacagagaaaaagagatactcaggatcctgcgtcacaacccactgctccagcagaatgaaatcgctgat

SEQ ID NO: 560077 - DNA, 75 bp, synthetic construct
  source 1..75: mol_type = other DNA
ggagcaatcacaccaactgcagcagcctgaagccgattccgccattcagcgggaagccgatcgggtagtcccgga

SEQ ID NO: 560078 - DNA, 75 bp, synthetic construct
  source 1..75: mol_type = other DNA
agcctggcaggttgggggaaagttaaagcctggcgataaccgttgtgcaggtgtcaggagtgaatatgcgtcatt

SEQ ID NO: 560079 - DNA, 75 bp, synthetic construct
  source 1..75: mol_type = other DNA
gcctggagggccagattacgcgaaggggtgtcaccggatgtcgtgctgtatgctgaccgaagaggtcgctccaaa

SEQ ID NO: 560080 - DNA, 75 bp, synthetic construct
  source 1..75: mol_type = other DNA
gacggaaacgcgactttcggctattttgtgggttccggtcgccaatggtagcaagttcaccagagggaagaaaaa

SEQ ID NO: 560081 - DNA, 75 bp, synthetic construct
  source 1..75: mol_type = other DNA
ggtcagccagcaggcacgacaccggaagccgattcagcgtatgcgctgaaagccgattcgggcgctgtgcagcag

SEQ ID NO: 560082 - DNA, 75 bp, synthetic construct
  source 1..75: mol_type = other DNA
tgccggggcaaacccgaagaaatccgctttcagtgcctggaaggccagattacgcgagggggtgccaccagaggc

SEQ ID NO: 560083 - DNA, 75 bp, synthetic construct
  source 1..75: mol_type = other DNA
tcacaacgggctcacttgcgaagccgacacacttggcagttgcggttacgtatacatcgccgtttatcccactca

SEQ ID NO: 560084 - DNA, 75 bp, synthetic construct
  source 1..75: mol_type = other DNA
gaattgccctcgctggcagatgccgttacaggttgttatctcacaccctacagtgaaaagcgccttgatgtgctg

SEQ ID NO: 560085 - DNA, 75 bp, synthetic construct
  source 1..75: mol_type = other DNA
gaagcgctgcacggtttgctggcattagcccgtcatcaactggcctgtcaacctgcatttatcgccggtttcagc

SEQ ID NO: 560086 - DNA, 75 bp, synthetic construct
  source 1..75: mol_type = other DNA
gccttactggagcgccgcagtcaggcgattcatgccccggcgctggatcgcggcgcggctcttggcgcgctgatg

SEQ ID NO: 560087 - DNA, 75 bp, synthetic construct
  source 1..75: mol_type = other DNA
gctggatgaaattagcggtatgcaaggcgcgcagatattacaaacgacgttatgcgcggctatcgatcgcacgct

SEQ ID NO: 560088 - DNA, 75 bp, synthetic construct
  source 1..75: mol_type = other DNA
acctgcatagctggcaagcgttgtgtcatatcctgcgcgatctacatagcggtgtgcaactccccggcatttctc

SEQ ID NO: 560089 - DNA, 75 bp, synthetic construct
  source 1..75: mol_type = other DNA
agtcaggcgattcatgccccggcgctggatcgcggcgcggctcttggcgcactgatgcgtctggaacatcccaac

SEQ ID NO: 560090 - DNA, 75 bp, synthetic construct
  source 1..75: mol_type = other DNA
gcggtcggtttttatcggctggcacatgtgttgggacaatttcgtaatacagaaagcgaggcacgggtagaagca

SEQ ID NO: 560091 - DNA, 75 bp, synthetic construct
  source 1..75: mol_type = other DNA
gtgacggattcggtaaacttgccccttccacgccacaaccgcctctgccaaaagatgtcacctgcgaactggaac

SEQ ID NO: 560092 - DNA, 75 bp, synthetic construct
  source 1..75: mol_type = other DNA
tgccgtggagctatcgcggcgttattcatcccgataccgatccgattctgctaacgttgatagacacattagcgg

SEQ ID NO: 560093 - DNA, 75 bp, synthetic construct
  source 1..75: mol_type = other DNA
gcgacaccctgtgggatcacttgttcgaagatgaaagccagcaaactatattaccctctgcactggcgcactatt

SEQ ID NO: 560094 - DNA, 75 bp, synthetic construct
  source 1..75: mol_type = other DNA
tacaggttgttatctcaccccctacagtgaaaagcgccttgatgtgctggcaggatacctttccggaatgcctgc

SEQ ID NO: 560095 - DNA, 75 bp, synthetic construct
  source 1..75: mol_type = other DNA
cccccgggcgtggtgcctggacgccatttgctgaattttcgccggagtggcaggcgctacaagccgcacgtcgca

SEQ ID NO: 560096 - DNA, 75 bp, synthetic construct
  source 1..75: mol_type = other DNA
tgcatcggctggcaatcctcgaactccccggcatcactcgtcaacacggaagtacactgacgcttgcgggtaacg

SEQ ID NO: 560097 - DNA, 75 bp, synthetic construct
  source 1..75: mol_type = other DNA
aatcacatgcagagcttgaaaactgggctgtggcacgcagacaggaaagtcgcaggctggaacttctgaccggcg

SEQ ID NO: 560098 - DNA, 75 bp, synthetic construct
  source 1..75: mol_type = other DNA
cctgccattcaggaagggttaatgaccagcattcagacccatgaaatcatgctgcttacacattttaatctgggc

SEQ ID NO: 560099 - DNA, 75 bp, synthetic construct
  source 1..75: mol_type = other DNA
gcggtcagccacaggccaccggcacagcggcagcggcgggaaacgagccgcctccgtttgatgatgatataccgt

SEQ ID NO: 560100 - DNA, 75 bp, synthetic construct
  source 1..75: mol_type = other DNA
gtcaccctgtaccacaacggttttacctgcgaagccgatacccttggcagttgtggctatgtatacgtcgctgtt

SEQ ID NO: 560101 - DNA, 75 bp, synthetic construct
  source 1..75: mol_type = other DNA
atctgctgctaattcagcatcagaaatggatggcaagtgtaacccggtttattgtcgctcatggaatgggctctc

SEQ ID NO: 560102 - DNA, 75 bp, synthetic construct
  source 1..75: mol_type = other DNA
acgtaataacaactattggcgaagcatgtgatcagtatgcgttaaacaatcctcgtaaatataactatgagcatg

SEQ ID NO: 560103 - DNA, 75 bp, synthetic construct
  source 1..75: mol_type = other DNA
atgacagtgatgacgctcaatctcgttgaaaaacaaccagtaactatgcgccggataattggtaagcatcttgcc

SEQ ID NO: 560104 - DNA, 75 bp, synthetic construct
  source 1..75: mol_type = other DNA
cgaacggttaacggtttgctttcatgcgcagttaaaacagcgtcacgcaacgatgcgttttgaagaaatgaacga

SEQ ID NO: 560105 - DNA, 75 bp, synthetic construct
  source 1..75: mol_type = other DNA
cggcgatgctctcaatcgtcagcgcgaagcctttatggcccgctggattggatgggcgatgcagcaaaataatgg

SEQ ID NO: 560106 - DNA, 75 bp, synthetic construct
  source 1..75: mol_type = other DNA
ataaacctgagtgccccacgtcagatacgtcactaactcatgtggcagccgtgcctgcccgtcctgcggaaaaaa

SEQ ID NO: 560107 - DNA, 75 bp, synthetic construct
  source 1..75: mol_type = other DNA
ttaactgtcagtcagcgccgcactttatttatgcacgcacgactgacagaaaaagaatttaaccagccatactgg

SEQ ID NO: 560108 - DNA, 75 bp, synthetic construct
  source 1..75: mol_type = other DNA
cgaattaatgaagaatcatgttactggcgtgatgctttattccgtgcattacgtgaattattcagtctgtttgag

SEQ ID NO: 560109 - DNA, 75 bp, synthetic construct
  source 1..75: mol_type = other DNA
acccgtgccgccaaattagcaatggactatggctttaccgttctcaatctctataagctgtatctgatcgttgat

SEQ ID NO: 560110 - DNA, 75 bp, synthetic construct
  source 1..75: mol_type = other DNA
ttgaggaaccctacgaagcctttgttgaactctctgatctgtatgataagcatattcacgatcagagcgaacggc

SEQ ID NO: 560111 - DNA, 75 bp, synthetic construct
  source 1..75: mol_type = other DNA
gttaagtggcgattatacattgattctggtcgatggacgacgtcagagtggtcgggaatccagaccaaacggtag

SEQ ID NO: 560112 - DNA, 75 bp, synthetic construct
  source 1..75: mol_type = other DNA
acgctgaattcctgtttacctcgatgcagcaagcctttgtgaagctacgccgcggtgaaaccgggcaactgccac

SEQ ID NO: 560113 - DNA, 75 bp, synthetic construct
  source 1..75: mol_type = other DNA
catatgagcggcgatattgataatttcccccgcgatgtcgcggagctggtggactggtttgacgcccgcgatccc

SEQ ID NO: 560114 - DNA, 75 bp, synthetic construct
  source 1..75: mol_type = other DNA
acccgtgccgccaaattagcaatggactatggctttaccgttctcaatctctataagctgtatgaggtgtactgg

SEQ ID NO: 560115 - DNA, 75 bp, synthetic construct
  source 1..75: mol_type = other DNA
gtaagcatttgtcagcaggaggagggaaacgccgcaagagaatttcaatctgcaaccagtttaggcgaagaaggt

SEQ ID NO: 560116 - DNA, 75 bp, synthetic construct
  source 1..75: mol_type = other DNA
ggtaccgtctaccgcagcatataaagttgtactgaagcggatacccgaactacacgtcaggacatggacacgtaa

SEQ ID NO: 560117 - DNA, 75 bp, synthetic construct
  source 1..75: mol_type = other DNA
aattatctgtagattataaaaatagcaataatattaaaataagtttgcagacggataataatagttatattgact

SEQ ID NO: 560118 - DNA, 75 bp, synthetic construct
  source 1..75: mol_type = other DNA
gtggcggtgcgttctccggtaaagatccatcaaaagtggaccgctctgcagcgtacgccgcacgctatgtagcga

SEQ ID NO: 560119 - DNA, 75 bp, synthetic construct
  source 1..75: mol_type = other DNA
agcagcatattgccgccgttgaagcattgacggaggtgcaggcggttatgggttacgactactcgtcaggatggc

SEQ ID NO: 560120 - DNA, 75 bp, synthetic construct
  source 1..75: mol_type = other DNA
cactcacaaaaatgggagcggagaaaaaaattccgccagggttaatgtggaaaactaaaaataatggtctgattg

SEQ ID NO: 560121 - DNA, 75 bp, synthetic construct
  source 1..75: mol_type = other DNA
cgccatatgagcggcgatattgataatttcccccgtgatgttgcagagctggtggactggtttgacgcccgcgat

SEQ ID NO: 560122 - DNA, 75 bp, synthetic construct
  source 1..75: mol_type = other DNA
tgtagaacatataaagtttgttaaagtagggcgtccttccttaaagcaaattgtaaaacaatctgttagtaataa

SEQ ID NO: 560123 - DNA, 75 bp, synthetic construct
  source 1..75: mol_type = other DNA
cgcccggctcttccatttgaacgcattacggagcttctgagccgcattgagagctacagaggaagactgctcacc

SEQ ID NO: 560124 - DNA, 75 bp, synthetic construct
  source 1..75: mol_type = other DNA
tttccgctctatggcctgtagtgccttaatcgaatccggcttatggtcaagggatgctgttgagcgacaaatgag

SEQ ID NO: 560125 - DNA, 75 bp, synthetic construct
  source 1..75: mol_type = other DNA
cgcgttgggcgtgacctgcgtggtagtttctcatgatgtgccggaagtcttaagtattgcggatcacgcctggat

SEQ ID NO: 560126 - DNA, 75 bp, synthetic construct
  source 1..75: mol_type = other DNA
aacgtatttgacaacgtcgcctatccactgcgcgaacatacccaacttcccgcgccattgttgcatagtacggtg

SEQ ID NO: 560127 - DNA, 75 bp, synthetic construct
  source 1..75: mol_type = other DNA
ttacagagcttctcagccgtattgagagctatagaggaagacagctaaacccgcctcgctgtgcgactcacttta

SEQ ID NO: 560128 - DNA, 75 bp, synthetic construct
  source 1..75: mol_type = other DNA
aatagtgatgaatataaaaatgtaaagtttttagtagagggaaaggtgggttcttatgcagcaagaaataaaggc

SEQ ID NO: 560129 - DNA, 75 bp, synthetic construct
  source 1..75: mol_type = other DNA
ttaacgggcagattttcgaccaccaggcacgcctgcattcatttgagctggcgatggatgttaaggaagagttgt

SEQ ID NO: 560130 - DNA, 75 bp, synthetic construct
  source 1..75: mol_type = other DNA
atcgcagcaacttcaaaccgtcggcacgactggaaaaaccatacgcgatggtgtgcatcaatattatcgccgccg

SEQ ID NO: 560131 - DNA, 75 bp, synthetic construct
  source 1..75: mol_type = other DNA
atgcatcttcttattcatcccaatggctccaaatactggcgtctacaataccgctttgcaggaaaacaaaagcta

SEQ ID NO: 560132 - DNA, 75 bp, synthetic construct
  source 1..75: mol_type = other DNA
caatggtgaggagctcttcgaaacacagagccgcaatgtaacccactggatgccgctaccggaaccgccgcagga

SEQ ID NO: 560133 - DNA, 75 bp, synthetic construct
  source 1..75: mol_type = other DNA
aaatgggcgacttacatcccgggtcatcctgacgctaatgatgggtggataattcctggtgcgtcgtggaaaccg

SEQ ID NO: 560134 - DNA, 75 bp, synthetic construct
  source 1..75: mol_type = other DNA
gaatgatgatgaagcgtcggcagataatgaaaccgttatgtcggtcattgacggcgataagcccgatcacgatga

SEQ ID NO: 560135 - DNA, 75 bp, synthetic construct
  source 1..75: mol_type = other DNA
ttttgaactggaatacgtcgccagtcgcccgcagctactggaaaaacttaacgcctggtttgccaactacgatcc

SEQ ID NO: 560136 - DNA, 75 bp, synthetic construct
  source 1..75: mol_type = other DNA
gcgcggtatccaggctgcaacggctgcacttcagggcctggtgggcggcaatatggcaggcgcgctggcaggtgc

SEQ ID NO: 560137 - DNA, 75 bp, synthetic construct
  source 1..75: mol_type = other DNA
gcgtaaaacatcgcgctggcaagagaatgctaccggctggctgaaacgctatggtgcagtcgcgctattattaag

SEQ ID NO: 560138 - DNA, 75 bp, synthetic construct
  source 1..75: mol_type = other DNA
ctctattttccgcgaatgcaccgcgctggttatgttgcacctaatctcggcgaagtgccgccacacgccagccct

SEQ ID NO: 560139 - DNA, 75 bp, synthetic construct
  source 1..75: mol_type = other DNA
ggcgtgctgggcaccactgcctgtcgcttcttcgatccgcgcctggcgtcgtcgatcaccatgcgtggtcatcag

SEQ ID NO: 560140 - DNA, 75 bp, synthetic construct
  source 1..75: mol_type = other DNA
gtcaccgtttacgaggccgatgtgcgtccgccagaacgttatctgatggagcgttttatcaccgctccggtgtgg

SEQ ID NO: 560141 - DNA, 75 bp, synthetic construct
  source 1..75: mol_type = other DNA
caggtaaaacaattgacaccatctggttccgcaaactgaaatccacctgcggcgctgttgtgcacagtggcgata

SEQ ID NO: 560142 - DNA, 75 bp, synthetic construct
  source 1..75: mol_type = other DNA
cggtatcactcagcaaagaatcatctgcattaagccagcttcatttcggtctcggttgggatccggttaagaaaa

SEQ ID NO: 560143 - DNA, 75 bp, synthetic construct
  source 1..75: mol_type = other DNA
gggaaaaacggcggtattacaataacgttgtgaaattatttgatataagaatccagcaccttcagaacgacatcc

SEQ ID NO: 560144 - DNA, 75 bp, synthetic construct
  source 1..75: mol_type = other DNA
ttgcaggttgtctgtgccggtaatgaagaggcataccaatatcttatccagtggatggcgcacattatccaaaag

SEQ ID NO: 560145 - DNA, 75 bp, synthetic construct
  source 1..75: mol_type = other DNA
accgccctgtcgtgccatttaattcgccctgacgcaatgacagtggcagcaatcgacgctggcaacctgttgcca

SEQ ID NO: 560146 - DNA, 75 bp, synthetic construct
  source 1..75: mol_type = other DNA
gctggctgcgtattaatggacagcaccggtaaaacaattgacaccatctggttccgcaaactgaaatccacctgc

SEQ ID NO: 560147 - DNA, 75 bp, synthetic construct
  source 1..75: mol_type = other DNA
atcatgcggcaaaccaaagcgttgattgaagcgcagggctacgacgtgatctacggcgatactgactcaacgttt

SEQ ID NO: 560148 - DNA, 75 bp, synthetic construct
  source 1..75: mol_type = other DNA
cagctctttacccagaatctggcgagcatggcggaacaggcgggggtaaaattccgctttaatacaccagtcgat

SEQ ID NO: 560149 - DNA, 75 bp, synthetic construct
  source 1..75: mol_type = other DNA
aaatgccgggcaaatctcgcctggttatgcggcaccgtgggcggcgccaggggtgccgttgaaggcgattaaatg

SEQ ID NO: 560150 - DNA, 75 bp, synthetic construct
  source 1..75: mol_type = other DNA
agctctgagattaactttgaacgattgtttatattacatgagggaaaatcacctacattagcctattttgaatcg

SEQ ID NO: 560151 - DNA, 75 bp, synthetic construct
  source 1..75: mol_type = other DNA
cccgccgggacaaccagcgcccgtcaggaaacaagctagccattcagtatggacaggttgatgcttccctgcttg

SEQ ID NO: 560152 - DNA, 75 bp, synthetic construct
  source 1..75: mol_type = other DNA
aatgaatgttacagacaggcgacctgctcgttatgatgtggatcgaaagggatcgccaggtatctattcatatga

SEQ ID NO: 560153 - DNA, 75 bp, synthetic construct
  source 1..75: mol_type = other DNA
aaacgacatcaatatattcttctaatgcgactcggcacagatgattcacctcattctctggcagatattgccgtc

SEQ ID NO: 560154 - DNA, 75 bp, synthetic construct
  source 1..75: mol_type = other DNA
cctatcacggctccagctcgcaccaggcagaaaagtactggctgcgtgaagtggtcgaaggcgtgttgaaccagt

SEQ ID NO: 560155 - DNA, 75 bp, synthetic construct
  source 1..75: mol_type = other DNA
ccctgaacccggccagcaagctggcgtatctggtcccacgaaaaaaggctgtatgcctggatatcagttatatgg

SEQ ID NO: 560156 - DNA, 75 bp, synthetic construct
  source 1..75: mol_type = other DNA
ttatggcgataccgactcaacgtttgtctggctgaaaggcgcacattcagaagaagaggcggcgaaaatcggttg

SEQ ID NO: 560157 - DNA, 75 bp, synthetic construct
  source 1..75: mol_type = other DNA
actatggcttcaccgttctcaatctctataagctgtatctgatcgtcgataaagagaatgaaaaagcgatacaca

SEQ ID NO: 560158 - DNA, 75 bp, synthetic construct
  source 1..75: mol_type = other DNA
accgacgctggcctattttgaagcggcgatcagaagccgttttcccgacgctgtctgtcagctggtggatacctt

SEQ ID NO: 560159 - DNA, 75 bp, synthetic construct
  source 1..75: mol_type = other DNA
cccgacgctggcctattttgaagcggcgatcagaagccgttttcccggcgcggtgtgccagctggtggatacctt

SEQ ID NO: 560160 - DNA, 75 bp, synthetic construct
  source 1..75: mol_type = other DNA
ctgcaaggtaatgaaaacatatatcaaagagcaggcatttaagcctaacacctgggggcacagtttcattaaggg

SEQ ID NO: 560161 - DNA, 75 bp, synthetic construct
  source 1..75: mol_type = other DNA
actgaagacggtgaaaaattaaaaggtggtgttcacatgcgagtctataccgtgttttgtagcggtgaagcagct

SEQ ID NO: 560162 - DNA, 75 bp, synthetic construct
  source 1..75: mol_type = other DNA
agaactgcatttaaccggccacatggaaaagtttgcctggtcatttaacggaatcaagttttcagatgccgcacc

SEQ ID NO: 560163 - DNA, 75 bp, synthetic construct
  source 1..75: mol_type = other DNA
tgccgtgggcaacactggtgacactgaccagtggatacatcggctattttattgcgaacgtgggcctgaaagacc

SEQ ID NO: 560164 - DNA, 75 bp, synthetic construct
  source 1..75: mol_type = other DNA
acaacgaccgttacggccgcattatcggacgtgtattcacaacaggcggtagtgaggctaaccgctttatggtgc

SEQ ID NO: 560165 - DNA, 75 bp, synthetic construct
  source 1..75: mol_type = other DNA
ttaaggataaaaatttcacactgggatgttttttttctttttctggaggggttggaatattctctactgtatatt

SEQ ID NO: 560166 - DNA, 75 bp, synthetic construct
  source 1..75: mol_type = other DNA
tgcgatggctgttgatggcggggctgggcggatttgtgttttcaatgtatctttttacccctataacccacgaat

SEQ ID NO: 560167 - DNA, 75 bp, synthetic construct
  source 1..75: mol_type = other DNA
actcaaacgcatgactctgcaaccgtcatctcttccagaactgtttgaattaaaaaatggtgaatggaattatat

SEQ ID NO: 560168 - DNA, 75 bp, synthetic construct
  source 1..75: mol_type = other DNA
atggcaggaatggaccacagccagatgggaggcatggataacagcggagagatgatgtctgtagtggtcaagtaa

SEQ ID NO: 560169 - DNA, 75 bp, synthetic construct
  source 1..75: mol_type = other DNA
cgtaaatgtgaacaccagtctttaaaagcctttctggaacagcacggtggcgtccgtgcatttcagtggacgcca

SEQ ID NO: 560170 - DNA, 75 bp, synthetic construct
  source 1..75: mol_type = other DNA
tccactggttgatatgcaggcaatgagcgtctccccgaaattaagcgatccaggcatagggcttcgcaacaacgg

SEQ ID NO: 560171 - DNA, 75 bp, synthetic construct
  source 1..75: mol_type = other DNA
aggcggatatggacgtcagctcacagccatcggtgcgcgaagtgcgctttggtgacggatattcccagcgttcgc

SEQ ID NO: 560172 - DNA, 75 bp, synthetic construct
  source 1..75: mol_type = other DNA
ctgcgggggctaacttcggtgcatggcgtctgcgtgcggactatcagggcaacctgaatcacaccaccggcagtg

SEQ ID NO: 560173 - DNA, 75 bp, synthetic construct
  source 1..75: mol_type = other DNA
attcctgaaaatgatgtgcggtttggcgagcgtaaatttagcacccggttaaacacaattaagcatagaggttaa

SEQ ID NO: 560174 - DNA, 75 bp, synthetic construct
  source 1..75: mol_type = other DNA
ctatgggctgattattccgggcatcctgtttgtactgatcacgctaatgctgttgaaaagcaaattccccagcca

SEQ ID NO: 560175 - DNA, 75 bp, synthetic construct
  source 1..75: mol_type = other DNA
gaagccgttaccacaggcctgtctgacgccggagatggtcagccggatgggactgacagaggtctctcaggaaaa

SEQ ID NO: 560176 - DNA, 75 bp, synthetic construct
  source 1..75: mol_type = other DNA
ggataacggtattcccgggttgttgtttgactacaacatcaatgggacggtgaacaaaccacatcagggaaaaca

SEQ ID NO: 560177 - DNA, 75 bp, synthetic construct
  source 1..75: mol_type = other DNA
cgggctggatatattatgcccggacagtatcaaatggaaatcagggttaatgaccaggatatttcaccgtcggca

SEQ ID NO: 560178 - DNA, 75 bp, synthetic construct
  source 1..75: mol_type = other DNA
aaatacagtgcgttgtagatattactgagaagataaattcagaccaacaattactgttaccatgcagaaaggtat

SEQ ID NO: 560179 - DNA, 75 bp, synthetic construct
  source 1..75: mol_type = other DNA
aatcgtttctggcagagcacggaggctggaaagcctttctgtggacgccgccttatgactggcggcagataaagg

SEQ ID NO: 560180 - DNA, 75 bp, synthetic construct
  source 1..75: mol_type = other DNA
ttaccgtgtctttattattcctgaaaaagatttacggttaggcgaacactatttccgcacctcagttaagcacca

SEQ ID NO: 560181 - DNA, 75 bp, synthetic construct
  source 1..75: mol_type = other DNA
cttcggtgtgatctccgataagtttggtcgtcgggcggtgatattaatggcagtaataatgtatctgctattctt

SEQ ID NO: 560182 - DNA, 75 bp, synthetic construct
  source 1..75: mol_type = other DNA
tagaatccgtcctgaccgagggggcaataggatatcgtaaatttgaagttctaaaggggaatcgcttgtttgccg

SEQ ID NO: 560183 - DNA, 75 bp, synthetic construct
  source 1..75: mol_type = other DNA
atgtctatgccattaagcaataccgctaataaccaaatctatacaaataatcacttccttcatcatccaaaagtt

SEQ ID NO: 560184 - DNA, 75 bp, synthetic construct
  source 1..75: mol_type = other DNA
aaaccgtgccattggtcgtttcaattcctcattttctgctttagcctgggcgcttgaaaaccaggaaatgccaga

SEQ ID NO: 560185 - DNA, 75 bp, synthetic construct
  source 1..75: mol_type = other DNA
gcagagccgcaatgtaacccactggatgccgctaccagaaccgccgagcaggatggtgaataattccgccagtta

SEQ ID NO: 560186 - DNA, 75 bp, synthetic construct
  source 1..75: mol_type = other DNA
tgagcactggatctgcgggcaacgtttcaccatcgctgacgcctatctgtttacggttctgcgctgggcatacgc

SEQ ID NO: 560187 - DNA, 75 bp, synthetic construct
  source 1..75: mol_type = other DNA
ctaagcaatacatcccgcccataccaagagaaagcatctatttttcatttaattatacaaataccttgcagcaga

SEQ ID NO: 560188 - DNA, 75 bp, synthetic construct
  source 1..75: mol_type = other DNA
aagcgctggagtcgatgattaagcacgaggcgacccgtccgttggtgttctcatcaaactactatcagactcgtc

SEQ ID NO: 560189 - DNA, 75 bp, synthetic construct
  source 1..75: mol_type = other DNA
tgaagcgactcgcccgttggtgttctcaccaaactactatcagactcgtcaaaacctgctggatactgagagatc

SEQ ID NO: 560190 - DNA, 75 bp, synthetic construct
  source 1..75: mol_type = other DNA
actggaacgcgaacagattcgccacgagcatgccaaatggtctgactccacatttggctgcgttggccccattgg

SEQ ID NO: 560191 - DNA, 75 bp, synthetic construct
  source 1..75: mol_type = other DNA
aagggtggcttggtgatgatatcagcatccctaaatgcgatgtaatcaattggatgcctctaccagaaccgccgc

SEQ ID NO: 560192 - DNA, 75 bp, synthetic construct
  source 1..75: mol_type = other DNA
ggcaactctccggtaactccggatggttggataagctgtagtgagcgaatgcccgctcaagatgattggatttta

SEQ ID NO: 560193 - DNA, 75 bp, synthetic construct
  source 1..75: mol_type = other DNA
atggtactttgctgacggaaggcgtagcaattatgcagtatcttgccgacagcgtccccgaccgccagttgctgg

SEQ ID NO: 560194 - DNA, 75 bp, synthetic construct
  source 1..75: mol_type = other DNA
tttacaattgctgatgcctatctgtttacggttctgcgctgggcatacgcggtgaaactgaatctggaagggtta

SEQ ID NO: 560195 - DNA, 75 bp, synthetic construct
  source 1..75: mol_type = other DNA
aaaaacgtctcgaaaacggtgacgattactttgccgttaaccctaaggggcaggtgcctgcattgctgctggatg

SEQ ID NO: 560196 - DNA, 75 bp, synthetic construct
  source 1..75: mol_type = other DNA
tccgtctcgcccgcattcccgtcgacagcagtgaaccggtgcgaagaaaatttggcagccggctgattggcattg

SEQ ID NO: 560197 - DNA, 75 bp, synthetic construct
  source 1..75: mol_type = other DNA
gcttaagcaacgcagtagagacgttgcaaaccatcgatccgcaactggttacgccacaaggcgctgacgatattc

SEQ ID NO: 560198 - DNA, 75 bp, synthetic construct
  source 1..75: mol_type = other DNA
tatgggcggtattgtgctggcgatgacgctcaccgcgacctatatcagtgccagttcgtttatcggcgggcctgg

SEQ ID NO: 560199 - DNA, 75 bp, synthetic construct
  source 1..75: mol_type = other DNA
agcggtacatcgggggatcatcatcgggacgattgtagtggcaatcctgatgtttggtatgcacctggccggagc

SEQ ID NO: 560200 - DNA, 75 bp, synthetic construct
  source 1..75: mol_type = other DNA
atgtctatgccaataagcaatgcccttcagagtcaaattattacagatgatcatttccttcatcacccaaaagtc

SEQ ID NO: 560201 - DNA, 75 bp, synthetic construct
  source 1..75: mol_type = other DNA
ggcaataaccataattacgatggaaaaagcgttgtcgaaattagaaaacttgatattagtaaagagtcctggcca

SEQ ID NO: 560202 - DNA, 75 bp, synthetic construct
  source 1..75: mol_type = other DNA
ttatatgaccctgatgctttcacgcattttgaccagcctgaatcacggagcattttttggtttgggttcagtcgt

SEQ ID NO: 560203 - DNA, 75 bp, synthetic construct
  source 1..75: mol_type = other DNA
caaaccaacatctgctggagctactcttccctggctggcagacgatgcccaaatcattctgcctacagaagtagc

SEQ ID NO: 560204 - DNA, 75 bp, synthetic construct
  source 1..75: mol_type = other DNA
acatcggaaatactggcttcaaccaaattattgagtcaattgatgctgagggaggcgcaaactatggcattttcg

SEQ ID NO: 560205 - DNA, 75 bp, synthetic construct
  source 1..75: mol_type = other DNA
caaaagaacggctgaagttagcctctggtgtatttaatttaacacgtaatcttgggggcgcgattggtattgccc

SEQ ID NO: 560206 - DNA, 75 bp, synthetic construct
  source 1..75: mol_type = other DNA
atgcagcttgaagtgattctaccgctggtcgcctatctggtggtggtgttcgggatttcagtttatgcgatgcgt

SEQ ID NO: 560207 - DNA, 75 bp, synthetic construct
  source 1..75: mol_type = other DNA
ggtacgattgtagtcgcaatcctgatgttcggtatgcacctggccggagcgttaggtcgtgcagtgatccccgat

SEQ ID NO: 560208 - DNA, 75 bp, synthetic construct
  source 1..75: mol_type = other DNA
aaaataccatcctgggcacccagggcaggtatttgatgattattactgcggtaaaatctggtgtgcgacggtact

SEQ ID NO: 560209 - DNA, 75 bp, synthetic construct
  source 1..75: mol_type = other DNA
tgagtcacagcagcgttatcttgactcacttcagataactctacagcgtgccagaggattgtatgcaagtggtgc

SEQ ID NO: 560210 - DNA, 75 bp, synthetic construct
  source 1..75: mol_type = other DNA
caacgtcacggatgcagaccgttatcctcagctaaatgcttcctcagggatcacctacagtggtggactgaaagg

SEQ ID NO: 560211 - DNA, 75 bp, synthetic construct
  source 1..75: mol_type = other DNA
agcaagccattctcgaccttacctattcccgacaggttaacgaaattaatctgttcaccgcgctgggtggcggtt

SEQ ID NO: 560212 - DNA, 75 bp, synthetic construct
  source 1..75: mol_type = other DNA
gcgcatggaagacggtagcgaagtgctgttgttgaagcgcggcgatgaaatgttggtcaagccatccaccccccg

SEQ ID NO: 560213 - DNA, 75 bp, synthetic construct
  source 1..75: mol_type = other DNA
acgagagtcctacgatctctcgtttgccgatgaaccagaggccaaaaccctcaacggtctgcgaacgctgtccgg

SEQ ID NO: 560214 - DNA, 75 bp, synthetic construct
  source 1..75: mol_type = other DNA
agccgcaccagtcatcgaacccggccaaactggtcaggtacatggtggcggccaagggcggcatcgacccgacga

SEQ ID NO: 560215 - DNA, 75 bp, synthetic construct
  source 1..75: mol_type = other DNA
atccagaacgcctttaaagaagtggcagatgcgctggcattacgtcaaagcctgaacgatcaaattagcgcccag

SEQ ID NO: 560216 - DNA, 75 bp, synthetic construct
  source 1..75: mol_type = other DNA
gtgatagaaagtacccgcagcgacatcgctaaacgtcagggggaactggcgcaggcgaataatgcattgcaactg

SEQ ID NO: 560217 - DNA, 75 bp, synthetic construct
  source 1..75: mol_type = other DNA
gccaatctgaagctggctgaaattcgccagcaacagtcggtggttaattacgaacaaaaaattcagtcagccttt

SEQ ID NO: 560218 - DNA, 75 bp, synthetic construct
  source 1..75: mol_type = other DNA
aaggatgtttccgacacgcttgcgctgcgcgacagccttagccagcaacttgagtcacagcagcgttatcttgat

SEQ ID NO: 560219 - DNA, 75 bp, synthetic construct
  source 1..75: mol_type = other DNA
atggcgacgattaaatgtgtgtactgcaaaaaagaagtcactgaactggattttcagcaggccagcttatttcag

SEQ ID NO: 560220 - DNA, 75 bp, synthetic construct
  source 1..75: mol_type = other DNA
actgatgaatataaggagtggtgcgtaaatttaattttgctctgtccgcactgcgagcaggcttataacgccttt

SEQ ID NO: 560221 - DNA, 75 bp, synthetic construct
  source 1..75: mol_type = other DNA
cagcgcgagcgacaggcggccattctggcccgccgtcagggcctcgaccagatcaagcgcgagagtgcggctttc

SEQ ID NO: 560222 - DNA, 75 bp, synthetic construct
  source 1..75: mol_type = other DNA
aagatggcgcgccggtgtccaccattcttgatgaaacctataaaatcgccattactcgtttcgataaccgcattc

SEQ ID NO: 560223 - DNA, 75 bp, synthetic construct
  source 1..75: mol_type = other DNA
tgtcacacatgccgagcttgggcgcagtttgcgccataatatgcccaatcctgtacctgttgttcttttagggcg

SEQ ID NO: 560224 - DNA, 75 bp, synthetic construct
  source 1..75: mol_type = other DNA
aaatgtggctgaacaggttggcgttaaggcggttatggtgcatgcaattgatgatgacgccagagcgttttatga

SEQ ID NO: 560225 - DNA, 75 bp, synthetic construct
  source 1..75: mol_type = other DNA
ttaacagtcagtcagcgtcgtactttatttatgcatgccggattgactgaaaaagaatttaaccagccatactgg

SEQ ID NO: 560226 - DNA, 75 bp, synthetic construct
  source 1..75: mol_type = other DNA
tcttgatgaaacctacaaaatcgccattacccgtttcgataaccgcattcgtgttggtggaatggcggaaattgt

SEQ ID NO: 560227 - DNA, 75 bp, synthetic construct
  source 1..75: mol_type = other DNA
ccacgtcgtgaaacgctggaaatggtggttcgcgatctctatccacgcggcggtcatgtcgagcaggccacattc

SEQ ID NO: 560228 - DNA, 75 bp, synthetic construct
  source 1..75: mol_type = other DNA
gatggcgcagtatggtggtgacatgcagcgcgcctttcaggcgtacaactggggcgaaggcaatatgagcgcctg

SEQ ID NO: 560229 - DNA, 75 bp, synthetic construct
  source 1..75: mol_type = other DNA
aaaaaacctgaatgcggcgctggcggagtccgatcgcctgaaactgacgatgccggacagcctgaacgcaaagct

SEQ ID NO: 560230 - DNA, 75 bp, synthetic construct
  source 1..75: mol_type = other DNA
acagtcagcagataaagcggagccagtccgcatcggcgcgaaggtggccagcgtggaggcgcagtccggcatcga

SEQ ID NO: 560231 - DNA, 75 bp, synthetic construct
  source 1..75: mol_type = other DNA
gtaagacgacacgggaagatccagccacgaaagcaaaccgtaaagcgggcatgtatcgcgagcaggaagaacggg

SEQ ID NO: 560232 - DNA, 75 bp, synthetic construct
  source 1..75: mol_type = other DNA
cacaggcgggcggcatggcgtgcagaggatgccagacgaggacaccgccgcgcgcgtggatattccagacagtgg

SEQ ID NO: 560233 - DNA, 75 bp, synthetic construct
  source 1..75: mol_type = other DNA
aagatggtgcgccggtatccactattcttgatgaaacctacaaaatcgccattacccgtttcgataaccgcattc

SEQ ID NO: 560234 - DNA, 75 bp, synthetic construct
  source 1..75: mol_type = other DNA
ttagccttgctatggcgatcagtttgcccgtatatgcctccggtattcctaccgttgatgtggcgaacatcactc

SEQ ID NO: 560235 - DNA, 75 bp, synthetic construct
  source 1..75: mol_type = other DNA
atgggtcgcctttattttttcctcgttgtaacattgccctgcaaaaattctgataactcacctgctaagcgtgca

SEQ ID NO: 560236 - DNA, 75 bp, synthetic construct
  source 1..75: mol_type = other DNA
cgcgcatgggtggtctggttacgcgaacgggtgggttatcacgccgggcagcatatccgttttgccatccgccgt

SEQ ID NO: 560237 - DNA, 75 bp, synthetic construct
  source 1..75: mol_type = other DNA
atgatgatgccagagttttttatgagcattttggttttgttcagtcagttgtggcacctgataccttgttttata

SEQ ID NO: 560238 - DNA, 75 bp, synthetic construct
  source 1..75: mol_type = other DNA
ttttggtcgtggtgaagccgaaattgaaagcattcgttctgcttcggaagatttccgtcaacggacgatggaggt

SEQ ID NO: 560239 - DNA, 75 bp, synthetic construct
  source 1..75: mol_type = other DNA
ggatgggcgctgctgatgctaaccgacgtaactttctcgcgcttgctcgcttaagtggacattttcttgatcgtc

SEQ ID NO: 560240 - DNA, 75 bp, synthetic construct
  source 1..75: mol_type = other DNA
taccagcagcaacactacggaacaatgtgctactggcgcgacctgatgccagcgaacaagagttacaaacagcac

SEQ ID NO: 560241 - DNA, 75 bp, synthetic construct
  source 1..75: mol_type = other DNA
gacagaggcgtcacaggaaaaaatcacatactggaataacgggcagtgtgcggatttccgacagttatccggagt

SEQ ID NO: 560242 - DNA, 75 bp, synthetic construct
  source 1..75: mol_type = other DNA
gttaccgcagccctgtctgacagcggagatggtcagccggatggggctaactgaggcttctcagaagaaggtcac

SEQ ID NO: 560243 - DNA, 75 bp, synthetic construct
  source 1..75: mol_type = other DNA
cggtggtcagccatcgcagagtcagatgagcgcgtattacaaccacagcagcccactggcgagtctgtcagccaa

SEQ ID NO: 560244 - DNA, 75 bp, synthetic construct
  source 1..75: mol_type = other DNA
gccatatggctcaggactggagcctgtcagacgatgagctggcccccctggcgttttacagtgataagcgactca

SEQ ID NO: 560245 - DNA, 75 bp, synthetic construct
  source 1..75: mol_type = other DNA
cttaaacgaagacgatgacgccttaatgctggaagtggccgcagaggcaacacgtaacccgcgggtgatggcaat

SEQ ID NO: 560246 - DNA, 75 bp, synthetic construct
  source 1..75: mol_type = other DNA
tacttcgctaataaagatgccatcattgaagagatggtccgccgtatcatcgactttcgtattgcccagatggat

SEQ ID NO: 560247 - DNA, 75 bp, synthetic construct
  source 1..75: mol_type = other DNA
accgctgaactttactttgccagcaggccaacgtgcagtgttggttggtcgcagcggttcaggtaaaagttcact

SEQ ID NO: 560248 - DNA, 75 bp, synthetic construct
  source 1..75: mol_type = other DNA
tgacctgtgccgcctggtcatcacgggttcgcatgctgagggttgaattcagggctgagtttaagcaggtggtga

SEQ ID NO: 560249 - DNA, 75 bp, synthetic construct
  source 1..75: mol_type = other DNA
ggaggccacggcgctggagtcgtttctggctgagcacgggggctggaaggcctttctgtggacgccgccttatgg

SEQ ID NO: 560250 - DNA, 75 bp, synthetic construct
  source 1..75: mol_type = other DNA
aggatatgtcggagtattacgcaggaaaaacccgcaagcagccgacccgtcctgtagttgatgccggaacctctg

SEQ ID NO: 560251 - DNA, 75 bp, synthetic construct
  source 1..75: mol_type = other DNA
tgacctgtgccgcctggtcatcacgggttcgcatgctgcgggttgaattcagtgcagagtttaagcaggtggtga

SEQ ID NO: 560252 - DNA, 75 bp, synthetic construct
  source 1..75: mol_type = other DNA
tgacctgtgccgcctggtcatcacgggttcgcatgctgtgggttgaattcagggcggagtttaagcaggtggtga

SEQ ID NO: 560253 - DNA, 75 bp, synthetic construct
  source 1..75: mol_type = other DNA
cagtggcggtggactgacatcgcaacgtcagattaatgcctattacagtcatcgtagtccgctggcaaatttgtc

SEQ ID NO: 560254 - DNA, 75 bp, synthetic construct
  source 1..75: mol_type = other DNA
cagtgtcaggtaaatgtaccggagacagcaatatctgaccagcagttattgcttccctgtacgcctcagaaataa

SEQ ID NO: 560255 - DNA, 75 bp, synthetic construct
  source 1..75: mol_type = other DNA
gcatcgttacagatttcatttgttgaacctgcgttgtcaggagataaggcagaaaaaaaattgccgcaggcctgt

SEQ ID NO: 560256 - DNA, 75 bp, synthetic construct
  source 1..75: mol_type = other DNA
tcccgtgaggaagccacggcgctggagtcatttctggcagagcacgggggctggaaagcctttctgtggacaccg

SEQ ID NO: 560257 - DNA, 75 bp, synthetic construct
  source 1..75: mol_type = other DNA
cgcggatacgggcatgagaccgaagggcctgtatttgcgaccggagaggcatcctgggggctcagtaaccagtgg

SEQ ID NO: 560258 - DNA, 75 bp, synthetic construct
  source 1..75: mol_type = other DNA
tgttaacgggcaaagtatttctcccgcatcgttacagatttcatttgttgaacctgcgttgtcaggagataaggc

SEQ ID NO: 560259 - DNA, 75 bp, synthetic construct
  source 1..75: mol_type = other DNA
agaagaatgcaaaaaacggctaccactccatcaaaaatacttgatctcactgccgcggcatttttacttgtcgcc

SEQ ID NO: 560260 - DNA, 75 bp, synthetic construct
  source 1..75: mol_type = other DNA
tttcagcggagcgcgaccgtctgtttaaaaattatcaacgttacttgaaaggcagccaggcggcggtgaatccgt

SEQ ID NO: 560261 - DNA, 75 bp, synthetic construct
  source 1..75: mol_type = other DNA
ctcaatccgtcgatacatgaaaacaaaaaaaacaattcaccacaactgagaccatccagttatcgtgttaataaa

SEQ ID NO: 560262 - DNA, 75 bp, synthetic construct
  source 1..75: mol_type = other DNA
cacagctgtgtaaagttgcgccgagcacccagaaataccatatggaagatgttcaccgtgctggtggtgttatcg

SEQ ID NO: 560263 - DNA, 75 bp, synthetic construct
  source 1..75: mol_type = other DNA
caacggctcgctgctggcaacccacgccgaccgtaagcagctgttccttaatgctggtaaacgcattgttgaatt

SEQ ID NO: 560264 - DNA, 75 bp, synthetic construct
  source 1..75: mol_type = other DNA
aataatcaggaagaggctgagaaaaaatgcattgataatatatcatctgaagaaacacgctcggctaaagataat

SEQ ID NO: 560265 - DNA, 75 bp, synthetic construct
  source 1..75: mol_type = other DNA
atcatgggcatctatggctaacagctatctcgaagccgcaggttcatcagaacgtattgaccatcgttcccttca

SEQ ID NO: 560266 - DNA, 75 bp, synthetic construct
  source 1..75: mol_type = other DNA
taaacgtcttaaaaggaaacaggctattccacgtcaggagaatgtctttaaacgctttacagcccttttagttga

SEQ ID NO: 560267 - DNA, 75 bp, synthetic construct
  source 1..75: mol_type = other DNA
accgactgtttcaacaataaatgataaaaatcatactcctcgtttaaggccacctacacgccgtggcctagataa

SEQ ID NO: 560268 - DNA, 75 bp, synthetic construct
  source 1..75: mol_type = other DNA
catttcatattagctccagctaacgcaccagaacacatcgtaaaagattctacagcattgtggaatgaagtggaa

SEQ ID NO: 560269 - DNA, 75 bp, synthetic construct
  source 1..75: mol_type = other DNA
atgaagcgtatccatagtgccaaatggcgtagtaaagcagcacaagagcaaagagcagcagaacaggctgttcgt

SEQ ID NO: 560270 - DNA, 75 bp, synthetic construct
  source 1..75: mol_type = other DNA
aagagcagcagaacaggctgttcgtgatgctgctaaacaagaagctgttgaagtctacaaaacattcagtgaact

SEQ ID NO: 560271 - DNA, 75 bp, synthetic construct
  source 1..75: mol_type = other DNA
gaccaaacgttactacgagcaaaacgacgaaagtgcactgccgcgtaatatcgccagtaaagcggcgtttgaaaa

SEQ ID NO: 560272 - DNA, 75 bp, synthetic construct
  source 1..75: mol_type = other DNA
agctgctggccggtttgttgcagcgttttggagagcacctgcatccacaacggtcacgggccaggaaggcggcgc

SEQ ID NO: 560273 - DNA, 75 bp, synthetic construct
  source 1..75: mol_type = other DNA
acggacctcatctgccagcttgccgaatccctgctgctgacgcaagcaaaagacgtgcgcatcgccacttactac

SEQ ID NO: 560274 - DNA, 75 bp, synthetic construct
  source 1..75: mol_type = other DNA
cgctgatcaccgacggacgcttctccggcggcacgtccggtctttctatcggccacgtctcaccggaagcggcaa

SEQ ID NO: 560275 - DNA, 75 bp, synthetic construct
  source 1..75: mol_type = other DNA
aaagtctgcgtcacgacaccctgcgggctattccggctccggatgcgcagggacgcacacgtatcgagcctccca

SEQ ID NO: 560276 - DNA, 75 bp, synthetic construct
  source 1..75: mol_type = other DNA
ctacagacccagcccggcataacgacagttcgccagaagtggctgttgcgcctgctgatggggcgcattgctgaa

SEQ ID NO: 560277 - DNA, 75 bp, synthetic construct
  source 1..75: mol_type = other DNA
catagaagcaaatccgctttggccgaaaggatggtttggctgggggcatccattaggccataaagatggctggtc

SEQ ID NO: 560278 - DNA, 75 bp, synthetic construct
  source 1..75: mol_type = other DNA
ccactcatggtcgtaatatggcgggtgctcgtgcgctgtggcgcgccactggaatgaccgacgctgatttcggta

SEQ ID NO: 560279 - DNA, 75 bp, synthetic construct
  source 1..75: mol_type = other DNA
ggaatgaccgacgccgattttggtaagccgattatcgcggttgtgaactcgttcacccaatttgtaccgggtcac

SEQ ID NO: 560280 - DNA, 75 bp, synthetic construct
  source 1..75: mol_type = other DNA
tgacagcatcctgaaatttaccggtccggcgaaagtgtatgaaagtcaggacgacgcggtagaagcgatcctcgg

SEQ ID NO: 560281 - DNA, 75 bp, synthetic construct
  source 1..75: mol_type = other DNA
gcatcgtgaaaaccgcgggcgtcgatgacagcatcctcaaattcaccggcccggcgaaagtatacgaaagccagg

SEQ ID NO: 560282 - DNA, 75 bp, synthetic construct
  source 1..75: mol_type = other DNA
ttgaacgttcggcctgtccaacctgtggttcctgctccgggatgttcaccgctaactcgatgaactgcctgaccg

SEQ ID NO: 560283 - DNA, 75 bp, synthetic construct
  source 1..75: mol_type = other DNA
tgtttccggtggtccgatggaggccgggaaaaccaaactatccgatcagttaatcaagcttgatctggttgatgc

SEQ ID NO: 560284 - DNA, 75 bp, synthetic construct
  source 1..75: mol_type = other DNA
aaattgtgaaacgaagtgagggaaaatcttccgttgcgaaagctgcctatcatgctcgttgcagaatcacagatg

SEQ ID NO: 560285 - DNA, 75 bp, synthetic construct
  source 1..75: mol_type = other DNA
ccgcagtctatcgccatagcttgtgcggcggtaggcctggtgggcaaagagtcagaactgttccgctttaccgtc

SEQ ID NO: 560286 - DNA, 75 bp, synthetic construct
  source 1..75: mol_type = other DNA
atcccgtcggaaatatctggctgtccagcctgacagcatcgcttcccattctgttttttttctttgccctgatta

SEQ ID NO: 560287 - DNA, 75 bp, synthetic construct
  source 1..75: mol_type = other DNA
aaggtatttatagggcaagtaaatttaataaagcttggttatcatcaaggcggaatggctggttatgggctgaga

SEQ ID NO: 560288 - DNA, 75 bp, synthetic construct
  source 1..75: mol_type = other DNA
aaagctcaggcggtgccagatttcagtaagctgtccgcgcaggagcaggcgaaggtgctacggggtttcacgatg

SEQ ID NO: 560289 - DNA, 75 bp, synthetic construct
  source 1..75: mol_type = other DNA
ttatctcgatgactctgcttgtttcaggtcaggcatgggcacaacgtgaaccggtgcgaacctatgtggatgacc

SEQ ID NO: 560290 - DNA, 75 bp, synthetic construct
  source 1..75: mol_type = other DNA
aaacacagcctgatcttcacctgtatggtgggcgtgatcaccacgcttcaggcctatgtcttaacgtggatgatc

SEQ ID NO: 560291 - DNA, 75 bp, synthetic construct
  source 1..75: mol_type = other DNA
atgggcaaaaccgaccgcagcgccaacccttcgccgggcaacaaaaagggcggtctcgctaacgtggtaaagaaa

SEQ ID NO: 560292 - DNA, 75 bp, synthetic construct
  source 1..75: mol_type = other DNA
atgggcaaaaccgaccgcagcgccaacccttcgccgggcaacaaaaacggcgggctcgccaacgtggtaaagaaa

SEQ ID NO: 560293 - DNA, 75 bp, synthetic construct
  source 1..75: mol_type = other DNA
atgggcaaaaccgaccgcagcgccaacccttcgccgggcaacaaaaatggcggtctcgcgaacgtggtaaagaaa

SEQ ID NO: 560294 - DNA, 75 bp, synthetic construct
  source 1..75: mol_type = other DNA
gcatataaacccattatttcaaagaaaaaatataataaagctcaagaaataattcagctccgatccgtacatttg

SEQ ID NO: 560295 - DNA, 75 bp, synthetic construct
  source 1..75: mol_type = other DNA
caaaagaaagagtattcaaacagatagagtaatattaattccgggccccaaaaatgagataaaaattgtaaatag

SEQ ID NO: 560296 - DNA, 75 bp, synthetic construct
  source 1..75: mol_type = other DNA
cctctctcggctggcggcaccgctatttttattgcggcgattatctctatcttcatcctcggcgtgggcatcaag

SEQ ID NO: 560297 - DNA, 75 bp, synthetic construct
  source 1..75: mol_type = other DNA
gatcgcaaaaagaaagaaatgtgcggatgggactattagaaaaaaatacaagcagcgatgggagtattggaggga

SEQ ID NO: 560298 - DNA, 75 bp, synthetic construct
  source 1..75: mol_type = other DNA
caagcagaagaccagcagcaaaatcttaccgtgatcccaataaggtcagtaaagtaaatgtttcagggaagaaat

SEQ ID NO: 560299 - DNA, 75 bp, synthetic construct
  source 1..75: mol_type = other DNA
gacaagaaaaaattggttgccgaatactgccaaaagaactttgttgataaaggaatgattgctgatatcgttttc

SEQ ID NO: 560300 - DNA, 75 bp, synthetic construct
  source 1..75: mol_type = other DNA
cacctgctcatattattgaaagctcctcagcactctggaatgaagttgaaagagtggaacgccagaacaacggtc

SEQ ID NO: 560301 - DNA, 75 bp, synthetic construct
  source 1..75: mol_type = other DNA
aacgtatcgatcatcgttctctccaagtccagcacgaggaagcgttagaaaaagcagcagtagctttagacaatg

SEQ ID NO: 560302 - DNA, 75 bp, synthetic construct
  source 1..75: mol_type = other DNA
aaccataggcccggaaggttttggcaaaaaggaaagaagctggaacgacagaaaaatgtctattttttggcgtga

SEQ ID NO: 560303 - DNA, 75 bp, synthetic construct
  source 1..75: mol_type = other DNA
ttaccgtaatcccaataaggtcagtaaagtaaatgtttcagggaagaaatcccctgttctggttgttcctgaacc

SEQ ID NO: 560304 - DNA, 75 bp, synthetic construct
  source 1..75: mol_type = other DNA
gcccgattggctttatcggtctcacggcacctcattttgcacgggcttttgtcggctcaggacaccgtctgctgc

SEQ ID NO: 560305 - DNA, 75 bp, synthetic construct
  source 1..75: mol_type = other DNA
aatgctggacgtggcgtcgctgggagtggataccggacgctctctcggcattaatacgcatgtactcgtcgggct

SEQ ID NO: 560306 - DNA, 75 bp, synthetic construct
  source 1..75: mol_type = other DNA
ggatgcgaagtgtagggttgggcggtggttttcttattctgttgatgctggggggatccagtctctggtttggtt

SEQ ID NO: 560307 - DNA, 75 bp, synthetic construct
  source 1..75: mol_type = other DNA
ctaacgagaaacatcgtgatatctgcgagaagaagtggaatatcccgagcggcaccattccggcaaaaatcggtc

SEQ ID NO: 560308 - DNA, 75 bp, synthetic construct
  source 1..75: mol_type = other DNA
tctggcagttagtccagttctcccgccgcttcaaaactgaagaagtatggccggaagagctgctggcgaagaaac

SEQ ID NO: 560309 - DNA, 75 bp, synthetic construct
  source 1..75: mol_type = other DNA
gacgaggtattaggccttcatatttctcgaactaaatttgagaaaatgtctagtttcaattgtcaaaatgacgaa

SEQ ID NO: 560310 - DNA, 75 bp, synthetic construct
  source 1..75: mol_type = other DNA
gtaattagaatgacctgggatgattttcaagaggttgcaagggaaaattatcctttggctgaaataatgaataaa

SEQ ID NO: 560311 - DNA, 75 bp, synthetic construct
  source 1..75: mol_type = other DNA
ataaaattacttataaatgaaattaataaagtatcagagcaaaacaaaatccttgtgaaggatgtatttctaaca

SEQ ID NO: 560312 - DNA, 75 bp, synthetic construct
  source 1..75: mol_type = other DNA
tctgttagcatttctccagatataaaagaaatctatacgggtaagaaaggtgatgttgctatagatatgtttatc

SEQ ID NO: 560313 - DNA, 75 bp, synthetic construct
  source 1..75: mol_type = other DNA
ggcgctcgtatcgggttattttgctcggcctgtttgctactttattgcaggcaaaaggcacattgcgactggata

SEQ ID NO: 560314 - DNA, 75 bp, synthetic construct
  source 1..75: mol_type = other DNA
cattcgttttaaccgtccgtcatcgctgtttgcccgttgttggctgctggtggaaggggaaacggaaacctgggt

SEQ ID NO: 560315 - DNA, 75 bp, synthetic construct
  source 1..75: mol_type = other DNA
tattaacgatcaggcacgccatctggtgcgtttaatgccggtgctgcgcttgcgtgatgcccgttttatgcgccg

SEQ ID NO: 560316 - DNA, 75 bp, synthetic construct
  source 1..75: mol_type = other DNA
ttattggttctgaccatgggattaatgtttttattggtaatgaattcgataatcactttgtcattgggcgttcag

SEQ ID NO: 560317 - DNA, 75 bp, synthetic construct
  source 1..75: mol_type = other DNA
cttccttgatcacgagacggtgaagacaatagatcgtctttatcatcagacagggacaggcgcgatccggtggag

SEQ ID NO: 560318 - DNA, 75 bp, synthetic construct
  source 1..75: mol_type = other DNA
ttgaaatcaccggtaagtcagtctgtcttgacgtactgattcagtggattgaagggaatgatgccccccggtacc

SEQ ID NO: 560319 - DNA, 75 bp, synthetic construct
  source 1..75: mol_type = other DNA
atataagaaatatcatcaggcactctgataaaatagttttatacctaagaggaaatcatggtgcttctgtgaaac

SEQ ID NO: 560320 - DNA, 75 bp, synthetic construct
  source 1..75: mol_type = other DNA
tgttatcaggtgatgctgatattactaactttttaagtaaatcaaaacaatatgaacatatatctttaagtgctc

SEQ ID NO: 560321 - DNA, 75 bp, synthetic construct
  source 1..75: mol_type = other DNA
ctgaggaagtgaaaatattctctaatgtaaaaggaaataaatgtactctaaaatttatatggtcctatggttctt

SEQ ID NO: 560322 - DNA, 75 bp, synthetic construct
  source 1..75: mol_type = other DNA
gatctctaccattttgaacgcgacgatttctggtttccgccgggcgatatcaatggccgggaacaccatctgcat

SEQ ID NO: 560323 - DNA, 75 bp, synthetic construct
  source 1..75: mol_type = other DNA
atgctgagaaatgcagtattgaatttatcaatttttcaccagcttctggtctttctggctgtcatgcgcaaaaca

SEQ ID NO: 560324 - DNA, 75 bp, synthetic construct
  source 1..75: mol_type = other DNA
acaagtgttctgctgcaaaaagtgttctggtaaagcgtgggatttttattcagagcgggcggaatatcggcatta

SEQ ID NO: 560325 - DNA, 75 bp, synthetic construct
  source 1..75: mol_type = other DNA
aagcaacaggctggcgtgacagctggaaaaccaaaactcgacctgacaaacactgactggatttacggggtggat

SEQ ID NO: 560326 - DNA, 75 bp, synthetic construct
  source 1..75: mol_type = other DNA
tcgcaccgaaatttagcttgctggatcaagacggagaacaagttaatttgaccgacttccagggacagcgtgttc

SEQ ID NO: 560327 - DNA, 75 bp, synthetic construct
  source 1..75: mol_type = other DNA
gtgcccaatgtggaagttaccgcgcgccagttggattttcttgcccgtgaattatcctcacatccacaaaatctt

SEQ ID NO: 560328 - DNA, 75 bp, synthetic construct
  source 1..75: mol_type = other DNA
aaacgctacgtgaacactgtcgccatatttttggtgatgagccgccagtgctctgtgtatgggaaacggaatttg

SEQ ID NO: 560329 - DNA, 75 bp, synthetic construct
  source 1..75: mol_type = other DNA
gtcgtgagtgaaatcatcaaaacctatgacgaacgaatcgaaacgctgtttgacacattgccagatgcggggctg

SEQ ID NO: 560330 - DNA, 75 bp, synthetic construct
  source 1..75: mol_type = other DNA
tgcaattgcccattttaacgtatggaatgcagaaatgttgatgggcgttatcgacgcagccgaagaagcgaaatc

SEQ ID NO: 560331 - DNA, 75 bp, synthetic construct
  source 1..75: mol_type = other DNA
accgcaaaacagcttaatttatctgaaggaatggatgcggaaaaagcgcaaaagcgggctgatgaccttaggtca

SEQ ID NO: 560332 - DNA, 75 bp, synthetic construct
  source 1..75: mol_type = other DNA
ctttggtgaaggccagtttacttttaatggtgatgatagttcattgtctaacctggatattgaaggcaaggtcga

SEQ ID NO: 560333 - DNA, 75 bp, synthetic construct
  source 1..75: mol_type = other DNA
aaagaccctggtgtagtgtgggtacagcggcagcggtgggtatttttatcggtgcgttgttgagcatgcgtaaat

SEQ ID NO: 560334 - DNA, 75 bp, synthetic construct
  source 1..75: mol_type = other DNA
catttagaacgtgaagtgcgtaaagctataaaagaacgggcattggataaaattaaactgttcggttctgatggc

SEQ ID NO: 560335 - DNA, 75 bp, synthetic construct
  source 1..75: mol_type = other DNA
tcgacgcagccgaagaagcgaaatcaccggttattatttcttttggcacaggttttgtcggcaacacctcatttg

SEQ ID NO: 560336 - DNA, 75 bp, synthetic construct
  source 1..75: mol_type = other DNA
gctctgcaagaagtgaatgctgcattgttcaaagagtatttaccgttattacaaaaaagtgagccgaccattaaa

SEQ ID NO: 560337 - DNA, 75 bp, synthetic construct
  source 1..75: mol_type = other DNA
atgtcatccccgcactggcagcggcaaaagtgaacttagtgaataatgaactgacacaaccgctatttatcgccg

SEQ ID NO: 560338 - DNA, 75 bp, synthetic construct
  source 1..75: mol_type = other DNA
ttgacaaaggtttttttaattctcgttttcaaatgcaaatgacattcgataacggtgcacccgatctcaatatca

SEQ ID NO: 560339 - DNA, 75 bp, synthetic construct
  source 1..75: mol_type = other DNA
cgaaaaataaatcgcccgttgaagcgaaattgcgattcgcgtttggtggctcattttccacgacattagatgttg

SEQ ID NO: 560340 - DNA, 75 bp, synthetic construct
  source 1..75: mol_type = other DNA
tgtggatgttgagcacggcccgtttcccatcacgatgttaatgcatggtaatgtcatccctgctctggcggctgc

SEQ ID NO: 560341 - DNA, 75 bp, synthetic construct
  source 1..75: mol_type = other DNA
gttaccgcttaatgttgtcacagaaaccgcaaaacagcttaatttatctgaaggaatggatgctgaaaaagcgca

SEQ ID NO: 560342 - DNA, 75 bp, synthetic construct
  source 1..75: mol_type = other DNA
aaccccggcccgaaccttgcggctgctgctggtatacccgtgaggactgcccttacgtcagcgcaaaacagatct

SEQ ID NO: 560343 - DNA, 75 bp, synthetic construct
  source 1..75: mol_type = other DNA
gcaggttaaaccattgttcgcttttggtaattaatcccggaaataataacgataaacaattttcaggtgatgctg

SEQ ID NO: 560344 - DNA, 75 bp, synthetic construct
  source 1..75: mol_type = other DNA
atgagaatagtaagcaaactcacttttttgggaatgatttttttgttttctgtaaatgcttatgctggtcaatta

SEQ ID NO: 560345 - DNA, 75 bp, synthetic construct
  source 1..75: mol_type = other DNA
taaattaccgttgttgttatcaggcgttgtaggaggagcgtccttacaagggatcggtggttttggagcaggtat

SEQ ID NO: 560346 - DNA, 75 bp, synthetic construct
  source 1..75: mol_type = other DNA
caccagaaagtaaaaggtagaatcgcaatagctctcgaactgaagaagggccccgtggtatatgctcttcaaaaa

SEQ ID NO: 560347 - DNA, 75 bp, synthetic construct
  source 1..75: mol_type = other DNA
tgaggagctagtaatgttttttaaagctctgcgtaaggggcggggtattagcagagagaatgagttaacgtttaa

SEQ ID NO: 560348 - DNA, 75 bp, synthetic construct
  source 1..75: mol_type = other DNA
tatttgacatccgttttatctgatatatgcgattcaaatgaaaaagatgcgaatgaagcgatgctcaatccctat

SEQ ID NO: 560349 - DNA, 75 bp, synthetic construct
  source 1..75: mol_type = other DNA
aaatactgattctatagatacacaaacatcacaaagtggtgatgaatatgaacaatttaaaaataagtcaaagtt

SEQ ID NO: 560350 - DNA, 75 bp, synthetic construct
  source 1..75: mol_type = other DNA
ggttttggggggtctcgttggacttccgatattgccattacatacttcaaaacagttctaggaattgccctgcag

SEQ ID NO: 560351 - DNA, 75 bp, synthetic construct
  source 1..75: mol_type = other DNA
cggaggaagtaagggtttcgcacaatctttctcccgcgctggccgtatggctggacacatggctaacagcctggc

SEQ ID NO: 560352 - DNA, 75 bp, synthetic construct
  source 1..75: mol_type = other DNA
cagcggaggaagccaggggtttgcttcatcattctcacgagctggccgcatggcttctcacatggcgagcgggct

SEQ ID NO: 560353 - DNA, 75 bp, synthetic construct
  source 1..75: mol_type = other DNA
ccgaagaatctggttcaggcggtggaggcggttccggtggaggatttggcggcggggaagataccggttctgtag

SEQ ID NO: 560354 - DNA, 75 bp, synthetic construct
  source 1..75: mol_type = other DNA
atgagaatagtaagcaaactcacttttttcggcataatttttttgttttctgtaaatgcttatgctggtcaatta

SEQ ID NO: 560355 - DNA, 75 bp, synthetic construct
  source 1..75: mol_type = other DNA
atgaaaataggcacacagaatcaggcattctttccggaaaatattctggagaaatttcgttatatcaaagagatg

SEQ ID NO: 560356 - DNA, 75 bp, synthetic construct
  source 1..75: mol_type = other DNA
ccgtccgcagttctacttccgtactactgacgtgactggtaccatccgaactgccggaagcgtagagatggtaat

SEQ ID NO: 560357 - DNA, 75 bp, synthetic construct
  source 1..75: mol_type = other DNA
ctccggtcgtggtaccgttgttactggtcgtgtagaacgcggtatcatcaaagttggtgaagaagttgaaatcgt

SEQ ID NO: 560358 - DNA, 75 bp, synthetic construct
  source 1..75: mol_type = other DNA
atcggccacgttgaccacggtaaaactactctgaccgctgcaatcaccaccgtactggctaaaacctacggcggt

SEQ ID NO: 560359 - DNA, 75 bp, synthetic construct
  source 1..75: mol_type = other DNA
ggccgtgctggtgagaacgtaggtgttctgctgcgtggtatcaaacgtgaagaaatcgaacgtggtcaggtactg

SEQ ID NO: 560360 - DNA, 75 bp, synthetic construct
  source 1..75: mol_type = other DNA
atgaaaataggcacacagaatcaggcattctttccggaaaatatccgcgagaaatttcgttatatcaaagagatg

SEQ ID NO: 560361 - DNA, 75 bp, synthetic construct
  source 1..75: mol_type = other DNA
gtactactgacgtgactggtaccatcgaactgccggaaggagtagagatggtaatgccgggcgacaatatcaaaa

SEQ ID NO: 560362 - DNA, 72 bp, synthetic construct
  source 1..72: mol_type = other DNA
ggtctgcgtttcgcaatccgtgaaggcggccgtaccgttggcgcgggcgttgttgctaaagttctggactaa

SEQ ID NO: 560363 - DNA, 75 bp, synthetic construct
  source 1..75: mol_type = other DNA
tgactggtaccatcgaactgccggaaggtgtagagatggtaatgccgggcgacaacatcaaaatggttgttaccc

SEQ ID NO: 560364 - DNA, 75 bp, synthetic construct
  source 1..75: mol_type = other DNA
aaacctacggcggtgctgctcgcgcattcgaccagatcgataacgcgccggaagaaaaagctcgtggtatcacca

SEQ ID NO: 560365 - DNA, 75 bp, synthetic construct
  source 1..75: mol_type = other DNA
ccaggcgtgatgcgcattccagagaaacatctggcacgcgaaattgaacgcatcgccaacgccggtattcgttcc

SEQ ID NO: 560366 - DNA, 75 bp, synthetic construct
  source 1..75: mol_type = other DNA
ttttatgctattgacttaaccagtaaaaatggacgagagttatgccgtacacttgcctataaaacattcgaaaaa

SEQ ID NO: 560367 - DNA, 75 bp, synthetic construct
  source 1..75: mol_type = other DNA
ctttgtgcgttcagataacgctcaaattgatggcgttactattgattctgaaatggcgaaagagttggttacgaa

SEQ ID NO: 560368 - DNA, 75 bp, synthetic construct
  source 1..75: mol_type = other DNA
tagacattgaatctgagcagcaagccttcgatttgcttgaaagctatcttgatggttatggtttacctgacagtt

SEQ ID NO: 560369 - DNA, 75 bp, synthetic construct
  source 1..75: mol_type = other DNA
cgataacgcgccggaagaaaaagctcgtggtatcaccatcaacacttctcacgttgaatacgacaccccgacccg

SEQ ID NO: 560370 - DNA, 75 bp, synthetic construct
  source 1..75: mol_type = other DNA
tatcggccacgttgaccagggtaaaactacgctgaccgctgcaatcactaccgtactggctaaaacctacggcgg

SEQ ID NO: 560371 - DNA, 75 bp, synthetic construct
  source 1..75: mol_type = other DNA
atgcccctcgattccacaaacatcaggcagaccatgacagacttaatccaacgccctcgtcgcctgcgcaaatct

SEQ ID NO: 560372 - DNA, 75 bp, synthetic construct
  source 1..75: mol_type = other DNA
ttaaagataccgcgatcatgtcgtattcgaccaaattcgcatcctccttttatggcccgttccgcgaagcagcgg

SEQ ID NO: 560373 - DNA, 75 bp, synthetic construct
  source 1..75: mol_type = other DNA
agtagtgctcgaaagcttaggttcgattaagcgtgcgggtgcggatctgattttcagctactttgcgctggatct

SEQ ID NO: 560374 - DNA, 75 bp, synthetic construct
  source 1..75: mol_type = other DNA
ccgcacactaagttcgaatctgaagtgtacattctgtccaaagatgaaggcggtcgtcatactccgttcttcaaa

SEQ ID NO: 560375 - DNA, 75 bp, synthetic construct
  source 1..75: mol_type = other DNA
acaggtgtaaagtatatggtaaatcgttttactgatattacagataaactcattcatgaagttgacgaacatctg

SEQ ID NO: 560376 - DNA, 75 bp, synthetic construct
  source 1..75: mol_type = other DNA
aaaggctaccgtccgcaattctacttccgtactactgacgtgactggtaccatcgaactgccggaaggcgtagag

SEQ ID NO: 560377 - DNA, 75 bp, synthetic construct
  source 1..75: mol_type = other DNA
attttgcagggtttaaaagccgacgttgtcacttataaccaggtgaccgacgtacaaatcctgcacgataaaggc

SEQ ID NO: 560378 - DNA, 75 bp, synthetic construct
  source 1..75: mol_type = other DNA
gaccgccattgagagcaaccgtcagcaggtaatggaaagcctggatcaggcaggctggcgtctggatgccctgcg

SEQ ID NO: 560379 - DNA, 75 bp, synthetic construct
  source 1..75: mol_type = other DNA
acaactctgaccgctgcaatcactaccgtactggctaaaacctacggcggtgctgctcgtgcattcgaccagatc

SEQ ID NO: 560380 - DNA, 75 bp, synthetic construct
  source 1..75: mol_type = other DNA
tatcggccacgttgaccaaggtaaaacgacgctgaccgctgcaatcaccaccgtactggctaaaacctacggcgg

SEQ ID NO: 560381 - DNA, 75 bp, synthetic construct
  source 1..75: mol_type = other DNA
tatcggccacgttgaccaaggtaaaaccacgctgaccgctgcaatcacgaccgtactggctaaaacctacggcgg

SEQ ID NO: 560382 - DNA, 75 bp, synthetic construct
  source 1..75: mol_type = other DNA
acgaccctgaccgctgcaatcacaaccgtactggctaaaacctacggcggtgctgctcgtgcattcgaccagatc

SEQ ID NO: 560383 - DNA, 75 bp, synthetic construct
  source 1..75: mol_type = other DNA
accacgctgaccgctgcaatcacaaccgtactggctaaaacctacggcggtgctgctcgtgcattcgaccagatc

SEQ ID NO: 560384 - DNA, 75 bp, synthetic construct
  source 1..75: mol_type = other DNA
actactctgaccgctgcaatcacgaccgtactggctaaaacctacggcggtgctgctcgtgcattcgaccagatc

SEQ ID NO: 560385 - DNA, 75 bp, synthetic construct
  source 1..75: mol_type = other DNA
gcgacgcagagtgggaagcgaaaatcctggaactggctggcttccttgattcttacattccggaaccagagcgtg

SEQ ID NO: 560386 - DNA, 75 bp, synthetic construct
  source 1..75: mol_type = other DNA
cagctggaaggcaaaaccttctgcgtacgcgtgaagcgccgcggcaaacatgattttagctcgattgatgtggaa

SEQ ID NO: 560387 - DNA, 75 bp, synthetic construct
  source 1..75: mol_type = other DNA
ccgacggtgaaagcggttaagtcgaagattgaagcggaagaagagaagttcgacttcagcattctcgacaaagtg

SEQ ID NO: 560388 - DNA, 75 bp, synthetic construct
  source 1..75: mol_type = other DNA
tggtgaccggcgaggcgttgggccaggtgtccagtcagacgctgaccaacctgcgtctgattgataacgtttctg

SEQ ID NO: 560389 - DNA, 75 bp, synthetic construct
  source 1..75: mol_type = other DNA
catctggaagttgaagacgatcgtctgctgctgattaaagggcgctacgaaggtattggtggtttcccgatcggc

SEQ ID NO: 560390 - DNA, 75 bp, synthetic construct
  source 1..75: mol_type = other DNA
gctgaacgttacggcgtacaggcgctggtcaccggcgaagctctgggtcaggtctccagccagacgctgaccaac

SEQ ID NO: 560391 - DNA, 75 bp, synthetic construct
  source 1..75: mol_type = other DNA
cggaaatcaccatcaaaagccaatctgtgcgcttgcgctttataaaaatccttaccgggaacattcgtaacgttt

SEQ ID NO: 560392 - DNA, 75 bp, synthetic construct
  source 1..75: mol_type = other DNA
gaaatggaagttcgtgaacttctgtctcagtacgacttcccgggcgacgacactccgatcggttcgtggttctgc

SEQ ID NO: 560393 - DNA, 75 bp, synthetic construct
  source 1..75: mol_type = other DNA
gttgaaggtatcgacgtggtttctctgccgttctataaactgagcaccaaatttggcgatctcgaccagaacaaa

SEQ ID NO: 560394 - DNA, 75 bp, synthetic construct
  source 1..75: mol_type = other DNA
agcgtctggcaattcgcgacgctttgacccgcattccgggtatccaccatattctcgaagtcgaagacgtgccgt

SEQ ID NO: 560395 - DNA, 75 bp, synthetic construct
  source 1..75: mol_type = other DNA
taaagcactatgatgagacgctcgctgtcgtccgccactgggataacatcgaagttcgcgcaaaagatgaaaacc

SEQ ID NO: 560396 - DNA, 75 bp, synthetic construct
  source 1..75: mol_type = other DNA
aagcagaaggaatttatacggttgtaagaacacagtatgaagtgaaggttatcgagaaagagttaacccatgaag

SEQ ID NO: 560397 - DNA, 75 bp, synthetic construct
  source 1..75: mol_type = other DNA
ggttccggcaattttgcagaagaccgcgaaagagcatcagaagcaggtaaaaaaggtggacaagagcagtcacgg

SEQ ID NO: 560398 - DNA, 75 bp, synthetic construct
  source 1..75: mol_type = other DNA
gatacatcgtgaagccgggagaagtccacgccgtaaggccgcacccgttgccgtcagggcagcaaattatgtgga

SEQ ID NO: 560399 - DNA, 75 bp, synthetic construct
  source 1..75: mol_type = other DNA
tatcagggagctaaactcgcttgttaattacatcgataataatcaagaaaaagcagaagaaatctctgctactgt

SEQ ID NO: 560400 - DNA, 75 bp, synthetic construct
  source 1..75: mol_type = other DNA
tattagggagctaaattcgcttgttaattacatagataacaatcaagaaaaagctgaagagatctatactaatgt

SEQ ID NO: 560401 - DNA, 75 bp, synthetic construct
  source 1..75: mol_type = other DNA
tggaaacactggaagagcagcttattattatcgttgataaatatatctcaaaacggtaccagccgggcgataaaa

SEQ ID NO: 560402 - DNA, 75 bp, synthetic construct
  source 1..75: mol_type = other DNA
ccacacaacgccacctcctgtcagcacaacatgtggtatctcattcagctgctcatgacactatatgttgtgtca

SEQ ID NO: 560403 - DNA, 75 bp, synthetic construct
  source 1..75: mol_type = other DNA
actaccgcgtgaataacccggaagtcatggacaaactgaaagacaaattcccgcagaccgagctgttccgcgtgg

SEQ ID NO: 560404 - DNA, 75 bp, synthetic construct
  source 1..75: mol_type = other DNA
gtgcgtaagggcaacccgaagaatatccatgactggaacgatctggtgcgctccgacgtgaagctgattttcccg

SEQ ID NO: 560405 - DNA, 75 bp, synthetic construct
  source 1..75: mol_type = other DNA
atgtttttattttatctgtttgtttataaggataaattaactaaaatggcaccatcaacaaaaccggaagaggtg

SEQ ID NO: 560406 - DNA, 75 bp, synthetic construct
  source 1..75: mol_type = other DNA
gatacatcgtcaagccgggagaagtccgcgccgtaaggccgcacccattgccgtcagggcagcaaattatgtgga

SEQ ID NO: 560407 - DNA, 75 bp, synthetic construct
  source 1..75: mol_type = other DNA
cgttatcaccagtgccagaacgtgaattgcagcgccacgttcatcacttatgagtcggtacagcgatacatcgtg

SEQ ID NO: 560408 - DNA, 75 bp, synthetic construct
  source 1..75: mol_type = other DNA
cagggcacaatatgaagttaaggttatcgagaacgagctaacccatgaagcagttcgcacaagaaccgtcagatt

SEQ ID NO: 560409 - DNA, 75 bp, synthetic construct
  source 1..75: mol_type = other DNA
ggattgctggcgtgcctggcgtgtcgtttgtggtgttgctggcaacgctgggtagcgtaggtattccgctggaag

SEQ ID NO: 560410 - DNA, 75 bp, synthetic construct
  source 1..75: mol_type = other DNA
ttccgcacactggcatgtagtgctctgattgaatcagggctatggtctgaagatgcggtagagcttcaaatgagc

SEQ ID NO: 560411 - DNA, 75 bp, synthetic construct
  source 1..75: mol_type = other DNA
ggtttgccaccaaaacaaaatggtctgaagattacgccgatacggtatggaagcgccttgagacctatgtattcc

SEQ ID NO: 560412 - DNA, 75 bp, synthetic construct
  source 1..75: mol_type = other DNA
atgggcaaaaccgaccgcagcgccaacccttcgccgggcaacaaaaaaggcggcctcgcaaacgtggtaaagaaa

SEQ ID NO: 560413 - DNA, 75 bp, synthetic construct
  source 1..75: mol_type = other DNA
cgcgcctgtgcgggttaagcgtctggatcctgattcgtattctgaaagatgagctgattctggcgtactccactg

SEQ ID NO: 560414 - DNA, 75 bp, synthetic construct
  source 1..75: mol_type = other DNA
gcgtactgcgctgaacgttgtgggtaatgcgctggcggtgctggtgattgccaagtgggaacacaaatttgaccg

SEQ ID NO: 560415 - DNA, 75 bp, synthetic construct
  source 1..75: mol_type = other DNA
atgagtgaaaataccatcaacaaagccctgcgtaatatgggatataacacgaagcaggacatctgtggacacggt

SEQ ID NO: 560416 - DNA, 75 bp, synthetic construct
  source 1..75: mol_type = other DNA
aggctggtcttaatgaaattcgttctgtttcgctgggagtagcgcaaccggatgcctataaagataaagcgcgta

SEQ ID NO: 560417 - DNA, 75 bp, synthetic construct
  source 1..75: mol_type = other DNA
ggccgctattcagtttgatgatcaggtcgatgtggtcttccagttagaacctgtggatcaacaacccgctaaaac

SEQ ID NO: 560418 - DNA, 75 bp, synthetic construct
  source 1..75: mol_type = other DNA
ctctaccttcttgtgcatcccaatggttcaaaatactggcagttaggctatcgcttcgatggtaaacagaaagtg

SEQ ID NO: 560419 - DNA, 75 bp, synthetic construct
  source 1..75: mol_type = other DNA
tcgtatagatgcgtataaaggccgtaggctcactgtattagctttaaaactcactttattagttttcattcggtc

SEQ ID NO: 560420 - DNA, 75 bp, synthetic construct
  source 1..75: mol_type = other DNA
aaaatgccagaccagcggaaaaagccgtcaagctcactgatggatttggtctctaccttcttgtgcatcccaatg

SEQ ID NO: 560421 - DNA, 75 bp, synthetic construct
  source 1..75: mol_type = other DNA
agtgttcgataccggcggtcgtggcgcgaccaccacctttgccgagcgcggcctgggcgatgtgctgatcagctt

SEQ ID NO: 560422 - DNA, 75 bp, synthetic construct
  source 1..75: mol_type = other DNA
ctaatattttttatcttcctgaatcagacaacttagaagaatgcatcgtttttcttgatgatgtataccaattac

SEQ ID NO: 560423 - DNA, 75 bp, synthetic construct
  source 1..75: mol_type = other DNA
gtggaggcatccggtgccagcctggagaaggggcggtatgaccagctgcttaccgcgcttcatgcgctgctgtta

SEQ ID NO: 560424 - DNA, 75 bp, synthetic construct
  source 1..75: mol_type = other DNA
atgaccattaacttccgccgtaacgcattgcagttgagcgtggctgcgctgttttcttctgcttttatggctaac

SEQ ID NO: 560425 - DNA, 75 bp, synthetic construct
  source 1..75: mol_type = other DNA
ctgtatgttcctgaagtttcctggcagtggcagccccacgctgtgcggatgagtacaccagacgccgtgcaggca

SEQ ID NO: 560426 - DNA, 75 bp, synthetic construct
  source 1..75: mol_type = other DNA
atctatgacaactgctcgcccggggcttcagccgtcagtaacattacttcaggtttcaccatcctctcctcatat

SEQ ID NO: 560427 - DNA, 75 bp, synthetic construct
  source 1..75: mol_type = other DNA
ctgtatatcccgaatgtttcttggcaatggcaacctcgttcaatacaaatagctacatcagatacagtacagaca

SEQ ID NO: 560428 - DNA, 75 bp, synthetic construct
  source 1..75: mol_type = other DNA
ccggaagagctgctggcgaagaaaccggaactgcgtggcaaaacgctgtacgaagttctgtatgccacccccgaa

SEQ ID NO: 560429 - DNA, 75 bp, synthetic construct
  source 1..75: mol_type = other DNA
aagagaaatagatatgcaattaagaaagtagcaaaaaatgcagaaagatcttttgcattcccaacgaagaaactt

SEQ ID NO: 560430 - DNA, 75 bp, synthetic construct
  source 1..75: mol_type = other DNA
ttggcgcgggcgttgtgctaaagttctgggctaattacacgttaattagttttgaattgaaaagggcgcttcggc

SEQ ID NO: 560431 - DNA, 75 bp, synthetic construct
  source 1..75: mol_type = other DNA
ggccgctattcagtttgatgatcaggtcgatgtggtcttccagttagaacctgtggatcaaccccccgctaaaac

SEQ ID NO: 560432 - DNA, 75 bp, synthetic construct
  source 1..75: mol_type = other DNA
tgtccgcacaggaaacttacgagcaggccgctattcagtttgatgatcaggtcgatgtagtcttccagttagaac

SEQ ID NO: 560433 - DNA, 75 bp, synthetic construct
  source 1..75: mol_type = other DNA
cttgttgatgtgatgaagaatattgatacatcaacaccagatattgaatataactttggacacaaccaagaaaca

SEQ ID NO: 560434 - DNA, 75 bp, synthetic construct
  source 1..75: mol_type = other DNA
acacaggtgaaacgccagttatggcaggtgaacggctataaatggactccggactatgccgggttaatcgcgcgc

SEQ ID NO: 560435 - DNA, 75 bp, synthetic construct
  source 1..75: mol_type = other DNA
tatattcagtcgattcgaggggctggtaagcgttcatcctgggagaacctgccgggccttgggggacaaacaacg

SEQ ID NO: 560436 - DNA, 75 bp, synthetic construct
  source 1..75: mol_type = other DNA
aatagtgataagcactattctatgcccatattcaaaatatgctattgaacacatattttttaagttcataaagaa

SEQ ID NO: 560437 - DNA, 75 bp, synthetic construct
  source 1..75: mol_type = other DNA
gataacgcctttgttgagacttgccgcaatttacctgcaacgcgcgtagctaaatatgtagaggatactctcgca

SEQ ID NO: 560438 - DNA, 75 bp, synthetic construct
  source 1..75: mol_type = other DNA
gttctactccaccatgggcttcctggtgcgtaagggtaacccgaagaatatccacgactggaacgacctggtgcg

SEQ ID NO: 560439 - DNA, 75 bp, synthetic construct
  source 1..75: mol_type = other DNA
gatcggttcaccgcaggagctctatcgtcagcccgcctcccgctttatggcaagttttatgggcgacgccaacct

SEQ ID NO: 560440 - DNA, 75 bp, synthetic construct
  source 1..75: mol_type = other DNA
cgacgacgacggtgaaatggatgtctggggatttggagagaagcataagaagtatccaaacgtcactctggacaa

SEQ ID NO: 560441 - DNA, 75 bp, synthetic construct
  source 1..75: mol_type = other DNA
ttccaacccggaatcagcccgggccatttcgcagttgataatgtcagatcttacgtcttgtgcgggtagtcgtta

SEQ ID NO: 560442 - DNA, 75 bp, synthetic construct
  source 1..75: mol_type = other DNA
aagcaggtgaaacgccagttatggcaggtgaacggctatgaatggactccggactatgccgggttaaccgcgcgt

SEQ ID NO: 560443 - DNA, 75 bp, synthetic construct
  source 1..75: mol_type = other DNA
cccggggacaggtgcgttacggggaaatcacgttcacgatgcgccatcttctggcatggcaggacaatattactg

SEQ ID NO: 560444 - DNA, 75 bp, synthetic construct
  source 1..75: mol_type = other DNA
actaagcattagcatgcttcatcttggtcatgttgttgttgtcatagatccaaagaacgatgcagagtggcgaga

SEQ ID NO: 560445 - DNA, 75 bp, synthetic construct
  source 1..75: mol_type = other DNA
ggggtccggaacatgcggatcgggcatatcaaatagctaacctctccagtgataaacgtgagatcgagttgccat

SEQ ID NO: 560446 - DNA, 75 bp, synthetic construct
  source 1..75: mol_type = other DNA
tatgccaaggctctcgtttccaatgtgatttccgggctttcttacatagagaaaaagccttctatttatctgatt

SEQ ID NO: 560447 - DNA, 75 bp, synthetic construct
  source 1..75: mol_type = other DNA
ggcaaatgaggttcgggatgccacaacgattaatcgggccagtaaagaacaaaatcttgttctgaaaagtcagat

SEQ ID NO: 560448 - DNA, 75 bp, synthetic construct
  source 1..75: mol_type = other DNA
gtaaaaacgcggaggaagaatcaggcattgttaatccggtcgctctggcgatgcaaacgttgcgctctaatgcgg

SEQ ID NO: 560449 - DNA, 75 bp, synthetic construct
  source 1..75: mol_type = other DNA
aggcaaggaagaaagtaaagaagaacatgtacgtggtgcagaagttgtcggaattaatgatctgatggccgcagc

SEQ ID NO: 560450 - DNA, 75 bp, synthetic construct
  source 1..75: mol_type = other DNA
atcaaatatcgtcggtcgcccgatgagcatggaactgctgctggcaggttgcaccaccaccgtgactcaccgctt

SEQ ID NO: 560451 - DNA, 75 bp, synthetic construct
  source 1..75: mol_type = other DNA
attgtgattgatgtcggcatcaaccgtctggaaaatggcaaagttgtgggcgacgtcgtgtttgaagacgcggct

SEQ ID NO: 560452 - DNA, 75 bp, synthetic construct
  source 1..75: mol_type = other DNA
tttatgggtgattatgcatagtatttttgatgcctgtattgattcgtggaaagctgacccggaattaaataattt

SEQ ID NO: 560453 - DNA, 75 bp, synthetic construct
  source 1..75: mol_type = other DNA
gccttttgttgcagcaaaatcccataatatggatgggatagccatagagttgatgccagttggtactttctttat

SEQ ID NO: 560454 - DNA, 75 bp, synthetic construct
  source 1..75: mol_type = other DNA
acaagaacatatgccttagaattagcataccttggtgttaatgaagaaaatatacgttcactgcgacaaaccttg

SEQ ID NO: 560455 - DNA, 75 bp, synthetic construct
  source 1..75: mol_type = other DNA
tgcgccactggcggaaatccagcaggtaacgcaacagcacaatggctggttgatggtcgatgatgcccacggcac

SEQ ID NO: 560456 - DNA, 75 bp, synthetic construct
  source 1..75: mol_type = other DNA
gttacttcaaaattgtattcatcgttttcgctctctccactggactcatgacttaccgttttacggacagcaccg

SEQ ID NO: 560457 - DNA, 75 bp, synthetic construct
  source 1..75: mol_type = other DNA
atcagatcatcgctgtgattaagtcggttgaagccggacgagacgttgaagatgtcggccgggaggctggtatct

SEQ ID NO: 560458 - DNA, 75 bp, synthetic construct
  source 1..75: mol_type = other DNA
attaaaatcccgcacatcgaccagtcgcaggagtccgacgcgaaattcctgacccgtcttgcagaacgcaacggc

SEQ ID NO: 560459 - DNA, 75 bp, synthetic construct
  source 1..75: mol_type = other DNA
agcggtcggccaacgcattaccggcaccgctcgccctttgcctgcaattaaagcacaggacggtacgccggactg

SEQ ID NO: 560460 - DNA, 75 bp, synthetic construct
  source 1..75: mol_type = other DNA
tgaactgcctggaggaactggcccccagagtggaacagtattcaattgatgagatgttcctcgatttgaccggcg

SEQ ID NO: 560461 - DNA, 75 bp, synthetic construct
  source 1..75: mol_type = other DNA
gcttctatgccagctgtgaacgtgttttccgaccggatttgaaaggaaagccgatagtcgtcctgagcaacaacg

SEQ ID NO: 560462 - DNA, 75 bp, synthetic construct
  source 1..75: mol_type = other DNA
tggcagatgaaacgggagatgctgtcaccggcatataccacctgctggaaggagctgccggttgcccgtttctga

SEQ ID NO: 560463 - DNA, 75 bp, synthetic construct
  source 1..75: mol_type = other DNA
ggacacccgggacatcattgcggccgccacaacggctctggagcgtatctggaaggaaggccaccggtatgccaa

SEQ ID NO: 560464 - DNA, 75 bp, synthetic construct
  source 1..75: mol_type = other DNA
ccctcacagtgctgagctgatgaaggttctggacgggatcaaccactcagggctgggtaaagtatggttcgcagg

SEQ ID NO: 560465 - DNA, 75 bp, synthetic construct
  source 1..75: mol_type = other DNA
attgccggcatatttccgttttcatcaaaacgtctccgttcgccgttaaagaaccttactacggcaacgtggcta

SEQ ID NO: 560466 - DNA, 75 bp, synthetic construct
  source 1..75: mol_type = other DNA
tgaactggatacaatattttttggacgcggcgtcagctatgacaaaccaattattgtcagttgcggttctggcgt

SEQ ID NO: 560467 - DNA, 75 bp, synthetic construct
  source 1..75: mol_type = other DNA
cggcaaaactgagcgatatcgtgcgcgatggcgatcgtgtagagatttatcgaccactgattgccgatccgaaag

SEQ ID NO: 560468 - DNA, 75 bp, synthetic construct
  source 1..75: mol_type = other DNA
atttcggcactaaaagcattggcgtagcggtcggacaacgcattaccggcaccgctcgcccactgcccgcaatta

SEQ ID NO: 560469 - DNA, 75 bp, synthetic construct
  source 1..75: mol_type = other DNA
ggagaaatgcgccaggccgtctgccagtatgccgagcgcgcggcggaaaagttgcgcgctgagcgacagtactgc

SEQ ID NO: 560470 - DNA, 75 bp, synthetic construct
  source 1..75: mol_type = other DNA
tcgatgaaccccgcgcaggtttacgtcgcggacatattcccggcgcgatgaatgttccgtggacggaactggtgc

SEQ ID NO: 560471 - DNA, 75 bp, synthetic construct
  source 1..75: mol_type = other DNA
atgtccacgacatggtttgtaggagccgactggctcgccgaacatattgatgacccggaaattcagattattgat

SEQ ID NO: 560472 - DNA, 75 bp, synthetic construct
  source 1..75: mol_type = other DNA
gtctacgcttaacgctaaccgcagtgcatgaaacgcaggatatcgaccgtttgctggaggtgctgcatggcaacg

SEQ ID NO: 560473 - DNA, 75 bp, synthetic construct
  source 1..75: mol_type = other DNA
tgccgctttgcaggctaccgccgcacaacaaattggcgtttctgacctgttgctggttgctgccaacaccaccgg

SEQ ID NO: 560474 - DNA, 75 bp, synthetic construct
  source 1..75: mol_type = other DNA
agtggcatttggtgcgatgggtattccgattctggtcgccgggcaggtaacaggcatcgacagctttgagattgg

SEQ ID NO: 560475 - DNA, 75 bp, synthetic construct
  source 1..75: mol_type = other DNA
tgacgccatcagcaccttcggcagcacactgaaagaactggcgctccccatctactccatcggcatggtgctggc

SEQ ID NO: 560476 - DNA, 75 bp, synthetic construct
  source 1..75: mol_type = other DNA
aagattaaaaatcaaaaaatttgtcatattattgactcagttaaaaactcttctgagcttgagttgttgaaatca

SEQ ID NO: 560477 - DNA, 75 bp, synthetic construct
  source 1..75: mol_type = other DNA
cactggcgcacaccggtcatgcattcaccttcttctcgccgttcctcggctggctgggggtattcctgaccggat

SEQ ID NO: 560478 - DNA, 75 bp, synthetic construct
  source 1..75: mol_type = other DNA
ccgccggtcgtcagcgaagctaccgcttacgccgccgtgtttaagtttgactggttctctgccactggcaccgcc

SEQ ID NO: 560479 - DNA, 75 bp, synthetic construct
  source 1..75: mol_type = other DNA
ttgtctggctgaagatgaaaccatctgacgctatcagcaccttcggcagcacgctgaaagaactggctctgccca

SEQ ID NO: 560480 - DNA, 75 bp, synthetic construct
  source 1..75: mol_type = other DNA
gggtgatcaacattccggtgccgtacctcgataaactggttgcccgtatgccgccagtggtcagcgaggctaccg

SEQ ID NO: 560481 - DNA, 75 bp, synthetic construct
  source 1..75: mol_type = other DNA
agtggcatttggcgcgatgggcattccaatcctggttgccggacaagtaacaggcatcgacagctttgagattgg

SEQ ID NO: 560482 - DNA, 75 bp, synthetic construct
  source 1..75: mol_type = other DNA
gccattctgtttgctgcactgctctcgattgtctggctgaagatgaaaccgtctgacgctatcagcaccttcggc

SEQ ID NO: 560483 - DNA, 75 bp, synthetic construct
  source 1..75: mol_type = other DNA
atcaaccctggcgctggcactggcgcacaccggccatgcattcaccttcttctcgccgttccttggctggctggg

SEQ ID NO: 560484 - DNA, 75 bp, synthetic construct
  source 1..75: mol_type = other DNA
ggactgtcatcaacactggcgctggcactggcgcacaccggtcatgcattcaccttcttctcgccgttcctcggc

SEQ ID NO: 560485 - DNA, 75 bp, synthetic construct
  source 1..75: mol_type = other DNA
ctctgaagtatattttattgagccgtatagaaaaagcttagctcttaaacttcattcggatgcgatgaccgaatc

SEQ ID NO: 560486 - DNA, 75 bp, synthetic construct
  source 1..75: mol_type = other DNA
cagccacgttaagttatgaaggtgaagcggcttgtgctctggaggcgctggcgacttcgtgccacggcgtgacgc

SEQ ID NO: 560487 - DNA, 75 bp, synthetic construct
  source 1..75: mol_type = other DNA
tgcaaagcagccgtggcgaaacctgctgacgcagtgcttgcgttttgtgccggagtggcagagttatcccgaaac

SEQ ID NO: 560488 - DNA, 75 bp, synthetic construct
  source 1..75: mol_type = other DNA
gcggtcatgttgccagtggctgacggtttaccagacgctgcgcgccagttgcttaccacgcccgccgcgccgatt

SEQ ID NO: 560489 - DNA, 75 bp, synthetic construct
  source 1..75: mol_type = other DNA
ggtgataacagccgtgcgttacaactggcagaaaaactgcgccagcaaggctgctgggtcacggcgattcgcccg

SEQ ID NO: 560490 - DNA, 75 bp, synthetic construct
  source 1..75: mol_type = other DNA
tggtggcggacgaacgccagtatctgaacttttccagtaacgattacctcggtttaagccatcatccgcaaatta

SEQ ID NO: 560491 - DNA, 75 bp, synthetic construct
  source 1..75: mol_type = other DNA
cgcgcctgcttgcttcctcctgtccggggttgcaactggtggtaacagaaggcgtattcagtatggacggtgata

SEQ ID NO: 560492 - DNA, 75 bp, synthetic construct
  source 1..75: mol_type = other DNA
gtacagacgcaaacgtatgaattatgcgatggcatcgccggaggttatgactggcgacgtgtccaacagcttgcc

SEQ ID NO: 560493 - DNA, 75 bp, synthetic construct
  source 1..75: mol_type = other DNA
ccagatacacagctctctttcctgcacgtcaccgattttgcgcaagcagtgggtcagtggttaagcgccgaaact

SEQ ID NO: 560494 - DNA, 75 bp, synthetic construct
  source 1..75: mol_type = other DNA
ttgttgatgatgaagataatgttcgccgtatgctgagcaccgcttttgcactacaaggatacgaaacacattgtg

SEQ ID NO: 560495 - DNA, 75 bp, synthetic construct
  source 1..75: mol_type = other DNA
gtgccgggcagcaacgccttgccgccgtgcaacgggccatgcagcagggggccgcgaatgatgactggtttatgc

SEQ ID NO: 560496 - DNA, 75 bp, synthetic construct
  source 1..75: mol_type = other DNA
tttcgagtctgaaaagctccagccaggaacgcttatcaaagtaaaaaaactggctcctacgcttgtacgtagtcc

SEQ ID NO: 560497 - DNA, 75 bp, synthetic construct
  source 1..75: mol_type = other DNA
gcgctactgggtttatcggtaaatatattatcgataacctgctcaaccgcggctttcacgttcgcgcattaacac

SEQ ID NO: 560498 - DNA, 75 bp, synthetic construct
  source 1..75: mol_type = other DNA
atttaccgatcaacggcaaaccggcaatgctgctaagcctggtgtttgccccaacctggcttggattatcgtttt

SEQ ID NO: 560499 - DNA, 75 bp, synthetic construct
  source 1..75: mol_type = other DNA
gtgggcagtttatgtattgattttccccgtctggatatcgtgctgcgcggcgaatacggcaatctgctggaagca

SEQ ID NO: 560500 - DNA, 75 bp, synthetic construct
  source 1..75: mol_type = other DNA
agaaaataaacggctggcaatttataattttgtaattgctacggcccttcggtgtgaggccttagtaaatgtatt

SEQ ID NO: 560501 - DNA, 75 bp, synthetic construct
  source 1..75: mol_type = other DNA
ccttcacttaacgacggcgaaacttacacgcttaccgtgcaggccaaagacgagatgaacaacgttaaagaaagc

SEQ ID NO: 560502 - DNA, 75 bp, synthetic construct
  source 1..75: mol_type = other DNA
caccggctatctgcatagtggttatgaggtacgttccacaacagaatccaccttcttcatgcctatctgggaaaa

SEQ ID NO: 560503 - DNA, 75 bp, synthetic construct
  source 1..75: mol_type = other DNA
agcgactatttttgtcgcgttttccggcgtcagtttggtctgacgccgggagagtacagcgcccgttttcagggc

SEQ ID NO: 560504 - DNA, 75 bp, synthetic construct
  source 1..75: mol_type = other DNA
cggtctgaaaacgtacagacagttaccgggattttattcccgacagctgtacgtccggcaccctttttccttttt

SEQ ID NO: 560505 - DNA, 75 bp, synthetic construct
  source 1..75: mol_type = other DNA
attttaaaggtttttgaggtctggcagcaaagagatgagaaaaggaagcttattaaggttgaaagacgattaagg

SEQ ID NO: 560506 - DNA, 75 bp, synthetic construct
  source 1..75: mol_type = other DNA
atgccgtccagggcgtttttatggagttgactatgaacaaaatcaaaaagcattagaaaaattaattaatcatat

SEQ ID NO: 560507 - DNA, 75 bp, synthetic construct
  source 1..75: mol_type = other DNA
atgagtgccgatatcgccaaagccttcaaccttgacgtgcagcgtggcgcgtttgtcagcgaagtgttgccaggt

SEQ ID NO: 560508 - DNA, 75 bp, synthetic construct
  source 1..75: mol_type = other DNA
aagcgggcgatattattaccagcctcaacggcaaaccactgaatagctttgctgagttgcgctctcgtatcgcga

SEQ ID NO: 560509 - DNA, 75 bp, synthetic construct
  source 1..75: mol_type = other DNA
atgtgattaatcaggcacagaaaatcagtattcagctcaatgatgggcgcgagtttgatgcaaaactgattggta

SEQ ID NO: 560510 - DNA, 75 bp, synthetic construct
  source 1..75: mol_type = other DNA
cgacaaaaggctgatggaacatggttcaacagcgtaaactggaacctgttcaaggcatctgatatgcctataaaa

SEQ ID NO: 560511 - DNA, 75 bp, synthetic construct
  source 1..75: mol_type = other DNA
tggtttacttgttccagagcctgggtgaactgtttattagcgccctgggtctggcgatggttgctgctctggtgc

SEQ ID NO: 560512 - DNA, 75 bp, synthetic construct
  source 1..75: mol_type = other DNA
tcatcgccctggggactattgccgtcggtaacggcttgtttaaagccaacccggcaagcctgctttctaaatgct

SEQ ID NO: 560513 - DNA, 75 bp, synthetic construct
  source 1..75: mol_type = other DNA
acgtggaagttgccaacctggtgctgatagtcctctccatcgtcgtcaccattattttcttccgtcaggcattca

SEQ ID NO: 560514 - DNA, 75 bp, synthetic construct
  source 1..75: mol_type = other DNA
gccgcgcgggtgtttgacgtgctttgcgagttacgccgggaaccggcggatgagattgcgcaagcgttgcttaat

SEQ ID NO: 560515 - DNA, 75 bp, synthetic construct
  source 1..75: mol_type = other DNA
gcgagttacgtccggaagcagaagatgagattgctgaagcgttgcgtaataacacatatgcgatgtttaacgtgc

SEQ ID NO: 560516 - DNA, 75 bp, synthetic construct
  source 1..75: mol_type = other DNA
gcggtttgtacagctgggctacaaaatcggcgtaggcggtactatcacctatccacgcgccagtaaaacccgcga

SEQ ID NO: 560517 - DNA, 75 bp, synthetic construct
  source 1..75: mol_type = other DNA
tactttctgggccactttgggagttgggccgaggcggtagtggccagttttctatatttgcagacggtattgagg

SEQ ID NO: 560518 - DNA, 75 bp, synthetic construct
  source 1..75: mol_type = other DNA
ggccctgtttctgatgcggtggaattgtcttgggtgaatctgggaaacaacctgtatgcacctaattatcccaag

SEQ ID NO: 560519 - DNA, 75 bp, synthetic construct
  source 1..75: mol_type = other DNA
ggttcatatttcgaccatgtttatgtaaatcgagtttggttgtcagataaaaaccgtaacaacgcagaaataagc

SEQ ID NO: 560520 - DNA, 75 bp, synthetic construct
  source 1..75: mol_type = other DNA
ctgtcgtggaatggtgaaagacattggttctgaacccgacttcaagccgatgagcttcagcaaactgttgtacgt

SEQ ID NO: 560521 - DNA, 75 bp, synthetic construct
  source 1..75: mol_type = other DNA
ccagccagcttgctttcgaagtgctatccgccgaaagatccgcggcttgatggcgcattcaccctgttctatatg

SEQ ID NO: 560522 - DNA, 75 bp, synthetic construct
  source 1..75: mol_type = other DNA
gtcaatctgaacaaaattcgcgagatagaaccgtggtttaataacacctacattttgcggctgaaagatctggat

SEQ ID NO: 560523 - DNA, 75 bp, synthetic construct
  source 1..75: mol_type = other DNA
accagtaaaaatagtagaggttgtacagtccccatggtgttcgccattccttgaaggggtgagtcttcagtcttc

SEQ ID NO: 560524 - DNA, 75 bp, synthetic construct
  source 1..75: mol_type = other DNA
ccgattttctgaccatcgatcgcggcggcagtgacaactgtgatgtcgaaagtattcctgagcaggagctctgtt

SEQ ID NO: 560525 - DNA, 75 bp, synthetic construct
  source 1..75: mol_type = other DNA
cgtacgcttatcagcattaaccgcgcgcaaccggcgaatctgccgctgaccattcacgaactcgaacgtcatccg

SEQ ID NO: 560526 - DNA, 75 bp, synthetic construct
  source 1..75: mol_type = other DNA
gtgtgcagttaacttacgagcacaccatgcttcagctctatccttcgccgtttgcgacctgtgattttatggttc

SEQ ID NO: 560527 - DNA, 75 bp, synthetic construct
  source 1..75: mol_type = other DNA
aaacttcaacgtagtgctggagcgcacggtacgtgagctgaacggcgagagttgcatttcgctggaggaagcgcc

SEQ ID NO: 560528 - DNA, 75 bp, synthetic construct
  source 1..75: mol_type = other DNA
ttcgttgcgcctctgctgctgaccgtcgggataacgctaatattgcgtctgacaagcaacgccgaagctcgcgta

SEQ ID NO: 560529 - DNA, 75 bp, synthetic construct
  source 1..75: mol_type = other DNA
gcagcagggaacgctggaggtaaagggacttgcgacgaacattactgtgttaaacgcactggaaaaagcactccg

SEQ ID NO: 560530 - DNA, 75 bp, synthetic construct
  source 1..75: mol_type = other DNA
agcaggtcttttggggagcgtatcacaacgtatgaagccctgcgtcaggcagtctgtcagtacgctgagcgtgct

SEQ ID NO: 560531 - DNA, 75 bp, synthetic construct
  source 1..75: mol_type = other DNA
atcaccactgcactgcagctggcgcgcgcgaaccccgtatttatccggaagaatttcaacgttgtgctggagaga

SEQ ID NO: 560532 - DNA, 75 bp, synthetic construct
  source 1..75: mol_type = other DNA
cagggtggaacagtattcaattgatgagatgttcctcgacctgaccggcgtggagcactgtatggagcttgagga

SEQ ID NO: 560533 - DNA, 75 bp, synthetic construct
  source 1..75: mol_type = other DNA
gttgcttacctgattgtcgcagtgctggtggtgatttcccagccatttaaagcgaaaaaacgtgacctgtttggt

SEQ ID NO: 560534 - DNA, 75 bp, synthetic construct
  source 1..75: mol_type = other DNA
cccgctctaatagccaacagttgatgtctgtattggacaccattaatcaaagcggtgccggaaagattttctttg

SEQ ID NO: 560535 - DNA, 75 bp, synthetic construct
  source 1..75: mol_type = other DNA
aacaatgacggctgtgtggttgcacgctcgcgtgaagccaagtcactcggtataaaaatgggcgtacccgtcttt

SEQ ID NO: 560536 - DNA, 75 bp, synthetic construct
  source 1..75: mol_type = other DNA
acatgcaacgggccgtggagatgatgcacctgtagtgttctgcccagagttagaggacgaagcactgaaggaatg

SEQ ID NO: 560537 - DNA, 75 bp, synthetic construct
  source 1..75: mol_type = other DNA
cgtgtcatctaaccgaatcgagatccgcacgcttgaagatggcagccaggtgctgtatgcgcccttctctgctgt

SEQ ID NO: 560538 - DNA, 75 bp, synthetic construct
  source 1..75: mol_type = other DNA
ttggttgattctggtgtatcccaagtcgtagtatatctggcgtcatcattagtcagaaaacatatgcattctttg

SEQ ID NO: 560539 - DNA, 75 bp, synthetic construct
  source 1..75: mol_type = other DNA
aagggttacagttctatgaagttgttcctgtcgcattagttgttgcggggacgcaaatggcgacgggccaccgta

SEQ ID NO: 560540 - DNA, 75 bp, synthetic construct
  source 1..75: mol_type = other DNA
gcctgatgaacatgtacctcccgaactggcgcgaacacagagctaagttgaataagatgcccttggcttataatt

SEQ ID NO: 560541 - DNA, 75 bp, synthetic construct
  source 1..75: mol_type = other DNA
ctggaaaccatgcgtggtattcaggcactgtttgtacgtcgtgatgaagtggaagaagcctggaaatgggtagac

SEQ ID NO: 560542 - DNA, 75 bp, synthetic construct
  source 1..75: mol_type = other DNA
tcaacgatcaggttggcgaatacttcgaggagtgccaggtttaccgtatcgaccactatcttggtaaagaaacag

SEQ ID NO: 560543 - DNA, 75 bp, synthetic construct
  source 1..75: mol_type = other DNA
ggtcttttgtttatcggtgttttaaatgcgcccattaacgcgtatgagatggtgatctatccgctcgcctttttc

SEQ ID NO: 560544 - DNA, 75 bp, synthetic construct
  source 1..75: mol_type = other DNA
agcaacttttggtaactatgcatatcttcgcgcagaaaaactcgggcaactggataatttttttacccatatctg

SEQ ID NO: 560545 - DNA, 75 bp, synthetic construct
  source 1..75: mol_type = other DNA
tataagccgaggatttaaggccgaaaggatacaagcaacaggccggggggctgatgcaccagtagcattatgccc

SEQ ID NO: 560546 - DNA, 75 bp, synthetic construct
  source 1..75: mol_type = other DNA
aattttgagttataccaacaccaaaatgaaagatgcgattgcacagcgtaaaccactggttaccaccgctggacc

SEQ ID NO: 560547 - DNA, 75 bp, synthetic construct
  source 1..75: mol_type = other DNA
tctgtctggttgtgcctctaaaatcacccagccagataaatattctggttttttaaacaattactctgatttaaa

SEQ ID NO: 560548 - DNA, 75 bp, synthetic construct
  source 1..75: mol_type = other DNA
tgttgtgaaccgccccgggtttcctggagagtgttttatctgtgaactcaggctgccagatcatcgtttccgatg

SEQ ID NO: 560549 - DNA, 75 bp, synthetic construct
  source 1..75: mol_type = other DNA
tgaacgtcgttatcaggccaaaatctgtgccgcatttgtccgtgaagctgcggaactctatgtcgagcgtaaaaa

SEQ ID NO: 560550 - DNA, 75 bp, synthetic construct
  source 1..75: mol_type = other DNA
atggcgacacggttcatgtccgtggtccaaaagtcattaacggcgaggagcgcattacgcgaacgccgctggcag

SEQ ID NO: 560551 - DNA, 75 bp, synthetic construct
  source 1..75: mol_type = other DNA
ccgggaaaaagacgataaaagaggccaggattggcagtatagtaccggcacagcaggaagggtacgtacttattg

SEQ ID NO: 560552 - DNA, 75 bp, synthetic construct
  source 1..75: mol_type = other DNA
aactatcagtcaccgacatcaatctctacgagaatactgtgagtctggacggtcagccatacccgttgtcgctcg

SEQ ID NO: 560553 - DNA, 75 bp, synthetic construct
  source 1..75: mol_type = other DNA
atgaataccgatgcaattgagtcgatggtcagggacgtgttgaaccgcatgaacagtctacagggtgcaactcct

SEQ ID NO: 560554 - DNA, 75 bp, synthetic construct
  source 1..75: mol_type = other DNA
aagtggcagacgtgggcggcgggcgatccggttaaacaggagtttgtaaaagcgactgccgccaatatgcctgct

SEQ ID NO: 560555 - DNA, 75 bp, synthetic construct
  source 1..75: mol_type = other DNA
atgctgtgggtgtggagctgcgggagctggcgctcacattacgccttatatcgttcgtcatagtcgattatgcgc

SEQ ID NO: 560556 - DNA, 75 bp, synthetic construct
  source 1..75: mol_type = other DNA
atgctgtggctgtggagctgcgggagctggcgctcacattacgccttatatcgttcgtcatagtcgattatttca

SEQ ID NO: 560557 - DNA, 75 bp, synthetic construct
  source 1..75: mol_type = other DNA
ctgcaatcgctaaaattacctgagtacatggactttgttgcttcccgtccatgctgtgggtgtggagctgcggga

SEQ ID NO: 560558 - DNA, 75 bp, synthetic construct
  source 1..75: mol_type = other DNA
ctatccgcaacgctatgtcttccactggtcgctcacgagccgcgaagctggtggagattgacggcatggacaact

SEQ ID NO: 560559 - DNA, 75 bp, synthetic construct
  source 1..75: mol_type = other DNA
gtgctggtgggctttcatgcgcaacatgatgcacctgatgccggaagaagtttgccgtatatcaataaataagat

SEQ ID NO: 560560 - DNA, 75 bp, synthetic construct
  source 1..75: mol_type = other DNA
atgcatcaacgattgttctttgattacgcgcttggagtcggcgttatcacaagtcattcgtcgagcgttagataa

SEQ ID NO: 560561 - DNA, 75 bp, synthetic construct
  source 1..75: mol_type = other DNA
gctgagcgtatgcgtgaagagaacatgaccgatgcagagtggcagaaagagctacagcgccgtgaacaggtcaaa

SEQ ID NO: 560562 - DNA, 75 bp, synthetic construct
  source 1..75: mol_type = other DNA
gcgattgatgcaggtgaccatgatgcggcctctcggctgttcggcaaattatcggatgccaaccccattaaaata

SEQ ID NO: 560563 - DNA, 75 bp, synthetic construct
  source 1..75: mol_type = other DNA
aacagcgtattggcatgcccgattcaaccgggaaaaagacaataaaagaggccaggattggcagtatcgtaccgg

SEQ ID NO: 560564 - DNA, 75 bp, synthetic construct
  source 1..75: mol_type = other DNA
atgaaaaagtgcctcacactactgattgccaccgtcctgagcgggctctctctcacggcttatgccgcgcaacca

SEQ ID NO: 560565 - DNA, 75 bp, synthetic construct
  source 1..75: mol_type = other DNA
cgcagtatcagcagcaaattcagcagcaaaaaattcaacaagggattaccagttgggcgggtgatgatccggata

SEQ ID NO: 560566 - DNA, 75 bp, synthetic construct
  source 1..75: mol_type = other DNA
cggggtgtttggcccggaactgcaacagcgtattggcatgcccgattcaaccgggaaaaagacgataaaagaggc

SEQ ID NO: 560567 - DNA, 75 bp, synthetic construct
  source 1..75: mol_type = other DNA
gccttgatctcacatacagcgatggctccactgcgcataaacctgtaacagaatatggcagtgcgcaccctgatg

SEQ ID NO: 560568 - DNA, 75 bp, synthetic construct
  source 1..75: mol_type = other DNA
cttactgcctatggtcgccgccagatgaacaaacgggctgaggctgagcgtatcgctaaagagcaacgcattcag

SEQ ID NO: 560569 - DNA, 75 bp, synthetic construct
  source 1..75: mol_type = other DNA
ctatcaagaccctcattccgggctacctgtcaggcctgccgtccaccagccgcgaggcgatggagttactggaag

SEQ ID NO: 560570 - DNA, 75 bp, synthetic construct
  source 1..75: mol_type = other DNA
atgaccgcctaccaacgccgccagatgaataaacgtgttgaggctgagcgtatcgctaaagaactggcgtctcag

SEQ ID NO: 560571 - DNA, 75 bp, synthetic construct
  source 1..75: mol_type = other DNA
cgcatcagcgacaaactggcgggtatcaacgccgctcgctttcatgactggcagccagatttcacaccggagaat

SEQ ID NO: 560572 - DNA, 75 bp, synthetic construct
  source 1..75: mol_type = other DNA
cagggaaaaagacgataaaagaggccaggattggcagtattgtaccggcacaacaggaagggtacgtacttatcg

SEQ ID NO: 560573 - DNA, 75 bp, synthetic construct
  source 1..75: mol_type = other DNA
ctctggctgaagctggcgtgaccattggtaacttctttagtaatgaactgctgaccgcctaccaacgccgccaga

SEQ ID NO: 560574 - DNA, 75 bp, synthetic construct
  source 1..75: mol_type = other DNA
acatggactttgttgcttcccgtccgtgctgtggatgtggagctgcgggagctggcgctcgcattacgccttata

SEQ ID NO: 560575 - DNA, 75 bp, synthetic construct
  source 1..75: mol_type = other DNA
gatttaagcccagagcaactattgaagttgaatgtattcctgacctttcaacaggaattaaacccttacagcgag

SEQ ID NO: 560576 - DNA, 75 bp, synthetic construct
  source 1..75: mol_type = other DNA
tacaagcgaatgtaaccgacttgatttaagcccggagcaattactgaagttgaatatattcttgacttatcagaa

SEQ ID NO: 560577 - DNA, 75 bp, synthetic construct
  source 1..75: mol_type = other DNA
agcgtcagccgcaggagagcgcgcagcagtatgttgtgcgtctggcgcgcgagaaagcacaggcgggtgtcgcgc

SEQ ID NO: 560578 - DNA, 75 bp, synthetic construct
  source 1..75: mol_type = other DNA
tcaatggtctgttgaatattgctgaggataaacttagtgatgatgcctttgttgaagttgttttcagcaaagcat

SEQ ID NO: 560579 - DNA, 75 bp, synthetic construct
  source 1..75: mol_type = other DNA
aaggttgaaatcccatgaagacatcaatcctgtcactggcgctgagcttgctgaaggagaaccacaaacaaaaat

SEQ ID NO: 560580 - DNA, 75 bp, synthetic construct
  source 1..75: mol_type = other DNA
acttctggtccggtaacgtgctgagtccagcaaaactccgcgacaagtggactcagctcgaaattaaccgcaaca

SEQ ID NO: 560581 - DNA, 75 bp, synthetic construct
  source 1..75: mol_type = other DNA
ctacgacaaattgaccgatgccgaccggaacgcactgaaaggcccgattaccgcactggcggaagatctggcgca

SEQ ID NO: 560582 - DNA, 75 bp, synthetic construct
  source 1..75: mol_type = other DNA
accgatgaccattacggttaatgccggtaaaacgcaattcatcattcagaaccacagccagaaggcgctggagtg

SEQ ID NO: 560583 - DNA, 75 bp, synthetic construct
  source 1..75: mol_type = other DNA
gacgagcacgttgtcatacaaggtgagagccgtattacaggtgcggtgataattgaaaaccatgtggagttaacc

SEQ ID NO: 560584 - DNA, 75 bp, synthetic construct
  source 1..75: mol_type = other DNA
aaaactgatttttcacctgcagtcgtccgctctgtcaccgatgttattccctatccggcatcattgaccaacaga

SEQ ID NO: 560585 - DNA, 75 bp, synthetic construct
  source 1..75: mol_type = other DNA
aaggactatcttcccagcgagacattgttcttggggtaaaatcatttgcggaaaaggaaaatcagaatattgttt

SEQ ID NO: 560586 - DNA, 75 bp, synthetic construct
  source 1..75: mol_type = other DNA
atgacttctctgtatttagcttccggttctccacgtcgtcaggagttacttgcgcaacttggcctcactttcgaa

SEQ ID NO: 560587 - DNA, 75 bp, synthetic construct
  source 1..75: mol_type = other DNA
tttaatatcatggacaacatgggcagcgagcgtgaactgccgaagctaatgaataaatccctgtggcggcagagt

SEQ ID NO: 560588 - DNA, 75 bp, synthetic construct
  source 1..75: mol_type = other DNA
acgctggcggtgagcatcgccatggtcgcccgtgcttttggcgcttatgccgtgcagtttttgcatgaaggcagc

SEQ ID NO: 560589 - DNA, 75 bp, synthetic construct
  source 1..75: mol_type = other DNA
gaaactcaaggatgaatcggtatgccatatcccttaccttgagcgttatctgcgctcctccgaggcaaggcgact

SEQ ID NO: 560590 - DNA, 75 bp, synthetic construct
  source 1..75: mol_type = other DNA
gaataaatctctgtggcggcagagtacctggggcaacatcatcgtcgtggtgttgattatgttgatgacggcggc

SEQ ID NO: 560591 - DNA, 75 bp, synthetic construct
  source 1..75: mol_type = other DNA
gatccgcctgcgtcatgatatccatgcctcgttgccgattcttatcgttggcacgttggttatgttgttggtgat

SEQ ID NO: 560592 - DNA, 75 bp, synthetic construct
  source 1..75: mol_type = other DNA
gatgtatcggcattagagttagaaaaatatgccgataccgccgtagcgcaggctgcttctccgctgctcgggcat

SEQ ID NO: 560593 - DNA, 75 bp, synthetic construct
  source 1..75: mol_type = other DNA
agggggcctgtgttaaccttgcctccatgaacttcgggacttctctggcgggtgcaggggttggaaatgatgtcg

SEQ ID NO: 560594 - DNA, 75 bp, synthetic construct
  source 1..75: mol_type = other DNA
gtgctcacactaacctgtacaagcggaaagttagctgttgcttatagcgttcccgcagaagactaccgcgtttct

SEQ ID NO: 560595 - DNA, 75 bp, synthetic construct
  source 1..75: mol_type = other DNA
caaaaggggctcccggtcgtaccatcctggcgggtgaatacgctggcagaattaaagacacgcctcgcggctccg

SEQ ID NO: 560596 - DNA, 75 bp, synthetic construct
  source 1..75: mol_type = other DNA
ggtaacttcaccaaaaatgctctgactccagcacgggcttccgacgcttgtaatcaggacgaaaacaccatcgcc

SEQ ID NO: 560597 - DNA, 75 bp, synthetic construct
  source 1..75: mol_type = other DNA
gaataccccgaaatcgagcgctattagtccatcagaggctgcaaatgcctgcgataataacagtaatgaaaacac

SEQ ID NO: 560598 - DNA, 75 bp, synthetic construct
  source 1..75: mol_type = other DNA
atattgcttcaatgaaccttggcacttccttacagggtgttggagtggatgtaacatcgatgagtagttcaacta

SEQ ID NO: 560599 - DNA, 75 bp, synthetic construct
  source 1..75: mol_type = other DNA
tccgttctgccaggggggcctgggcggtaatggcggcggccagcaacagaaattcatggcgctgggttccggcgt

SEQ ID NO: 560600 - DNA, 75 bp, synthetic construct
  source 1..75: mol_type = other DNA
gccaatcagcagctttgccgcactgcgtgctcaggtgggcactatgccggtaggtagcaaactgaccctgggctt

SEQ ID NO: 560601 - DNA, 75 bp, synthetic construct
  source 1..75: mol_type = other DNA
gcgaaagcgggcattaaagcgggtgatgtgatcacctcactgaacggtaagccaatcagcagctttgccgcactg

SEQ ID NO: 560602 - DNA, 75 bp, synthetic construct
  source 1..75: mol_type = other DNA
gcattaggttttatgcttccggcactctttatgagtttcctgctcgcctctttccagcgcaaacaatctctttgc

SEQ ID NO: 560603 - DNA, 75 bp, synthetic construct
  source 1..75: mol_type = other DNA
agatttaaaagcaaggcaaagttatcctatggttatcagcatggatttacttttcttgttcatgaaccattacgg

SEQ ID NO: 560604 - DNA, 75 bp, synthetic construct
  source 1..75: mol_type = other DNA
ttcggtgatgattctccgttctgccaggaaggttctccgttccagagctctccgttctgccaggggggccagggc

SEQ ID NO: 560605 - DNA, 75 bp, synthetic construct
  source 1..75: mol_type = other DNA
tgccaaaaccgaacgttatcgaaacgctggattacgaggtgatactggcagaaacgaaagcattcatcaccggtc

SEQ ID NO: 560606 - DNA, 75 bp, synthetic construct
  source 1..75: mol_type = other DNA
ccgccgtgaaaaaactggaagcgtatatcacggcacagcaccggctggggcgcgacatccgtctgtctgccattt

SEQ ID NO: 560607 - DNA, 75 bp, synthetic construct
  source 1..75: mol_type = other DNA
gggattgctgaaaaacagtatgagcgccatccgtcactgaatgactaccgccgcctgatcccctcgctaatgtga

SEQ ID NO: 560608 - DNA, 75 bp, synthetic construct
  source 1..75: mol_type = other DNA
atagcgaaggttacttctttgatgaagcttcctccagcaatggtgaactggtgtttaaacgctacgagcagcgtt

SEQ ID NO: 560609 - DNA, 75 bp, synthetic construct
  source 1..75: mol_type = other DNA
gcgttgtccgccattgctgccgcactgcatgtgcacggtgtgcaacgcgtggagataagggcgcttttctggaca

SEQ ID NO: 560610 - DNA, 75 bp, synthetic construct
  source 1..75: mol_type = other DNA
atgcccgccgttgacctttcacagttaccggaacccgccatcatcgcggagcctgactttgaagcaattctggct

SEQ ID NO: 560611 - DNA, 75 bp, synthetic construct
  source 1..75: mol_type = other DNA
tattatgacatgccagacgctgcatcagaatataataacggtaaccctgaaaaatggcgtaaggtcataacaggc

SEQ ID NO: 560612 - DNA, 75 bp, synthetic construct
  source 1..75: mol_type = other DNA
ggctgcgtaacacgttccggctaactgatgaggagatcgccgcgtcactcactcgcggacatgcggattatctgg

SEQ ID NO: 560613 - DNA, 75 bp, synthetic construct
  source 1..75: mol_type = other DNA
ccatcaattacagcgttatcagcacaaatggaaaagctggtatcagttgaaattacagcaagaaggcgtgatgcc

SEQ ID NO: 560614 - DNA, 75 bp, synthetic construct
  source 1..75: mol_type = other DNA
gcaattaaaagcggatattttacagcgtccggttgaagcaattgcatttaacgaggcggtttctgtcggagcatt

SEQ ID NO: 560615 - DNA, 75 bp, synthetic construct
  source 1..75: mol_type = other DNA
ggtggcatttggcgcaatgggtattccgattctggttgccgggcaggtaacaggcatcgacagctttgagattgg

SEQ ID NO: 560616 - DNA, 75 bp, synthetic construct
  source 1..75: mol_type = other DNA
accagcgcgttaaaagtgataggtccggcaacccataatcccctttggctgcaattaaaggcggatattttacag

SEQ ID NO: 560617 - DNA, 75 bp, synthetic construct
  source 1..75: mol_type = other DNA
aaatggaaaagctggtatcagttgaaattacagcaagaaggcgtgatgccattacatcatcgggaggagcactat

SEQ ID NO: 560618 - DNA, 75 bp, synthetic construct
  source 1..75: mol_type = other DNA
ataagcattgccagttttggcgagtcaggcgtgttccttgacgagcatggcgagatcctgacgccaatgctggca

SEQ ID NO: 560619 - DNA, 75 bp, synthetic construct
  source 1..75: mol_type = other DNA
gttttacggggctgaagcggggataccgtctgacagagctggtagtgatgcatgagcccctggcccggatgcggt

SEQ ID NO: 560620 - DNA, 75 bp, synthetic construct
  source 1..75: mol_type = other DNA
cgcctcggggatttccgtcgtcagcttatcggtcaggtgaaagaaacgctgcaaaaaggcaaaacgcccagcgaa

SEQ ID NO: 560621 - DNA, 75 bp, synthetic construct
  source 1..75: mol_type = other DNA
atcgacgccctctggcaggaggtccgccaggcgatagcgcaactgaacgccgcttcgccgctgccggtcaggcgg

SEQ ID NO: 560622 - DNA, 75 bp, synthetic construct
  source 1..75: mol_type = other DNA
actggatacacaaccgacgctggatgaacaggccaaacgtgacaagctggcaaacggctgttactcgcttgccaa

SEQ ID NO: 560623 - DNA, 75 bp, synthetic construct
  source 1..75: mol_type = other DNA
cgagatcctgacgccaatgctggcatggtatgaccgtcgcggtgaagagtatctggcaacacttagcgaggcaga

SEQ ID NO: 560624 - DNA, 75 bp, synthetic construct
  source 1..75: mol_type = other DNA
cgtgttgcgtgaagataccattccgtttctcaatgctctgaaagccagcggtaagcagcgaattttgctcaccaa

SEQ ID NO: 560625 - DNA, 75 bp, synthetic construct
  source 1..75: mol_type = other DNA
tctgatcatttcagccatgtctcggtgatgcgcaaagtgctattacgcatgaccagctgggtgcattacctttat

SEQ ID NO: 560626 - DNA, 75 bp, synthetic construct
  source 1..75: mol_type = other DNA
gactgcgcttaacgctaaccgcagcgcatgaaatgcaggatatcgaccgtctgctggaggtgctgcatggcaacg

SEQ ID NO: 560627 - DNA, 75 bp, synthetic construct
  source 1..75: mol_type = other DNA
ttgatggtcgatgacgcccacggcacgggcgttatcggggagcaggggcgcggcagctgctggctgcaaaaggta

SEQ ID NO: 560628 - DNA, 75 bp, synthetic construct
  source 1..75: mol_type = other DNA
cagaggaactcatccaaggtctgtcggacactattgcccaccagattctcgggcaatcggtagtctttcccgcgt

SEQ ID NO: 560629 - DNA, 75 bp, synthetic construct
  source 1..75: mol_type = other DNA
gaggagggtaagttcaccatcagtaagcgcgagcgcaatggccgggtgtctccaatcatcgatctgaccgtgcag

SEQ ID NO: 560630 - DNA, 75 bp, synthetic construct
  source 1..75: mol_type = other DNA
acgtccggtgatggtgtttatacccgatcagaaacgacaaatcgtggcgcagttccgtcagaactccttgctgcg

SEQ ID NO: 560631 - DNA, 75 bp, synthetic construct
  source 1..75: mol_type = other DNA
cgtgaagtggggatggactggatgtcacaagatctcgctgctcgtttgtcaacgcgtgctgcccaggggattggc

SEQ ID NO: 560632 - DNA, 75 bp, synthetic construct
  source 1..75: mol_type = other DNA
gacatggcgatcgattcgctgaataccccggaaaatctcgatgtgctttccggcgtgtttgccccggaactacaa

SEQ ID NO: 560633 - DNA, 75 bp, synthetic construct
  source 1..75: mol_type = other DNA
gaaagggagtttaacgctaaccagaattaccggaatgcgtcactgggtatggagcagcagcgactccagttgcag

SEQ ID NO: 560634 - DNA, 75 bp, synthetic construct
  source 1..75: mol_type = other DNA
tggctgggctattcgcgggcgctgctgtttatttctggttttgccgctaatcaggctgtcattgccgcgatgatg

SEQ ID NO: 560635 - DNA, 75 bp, synthetic construct
  source 1..75: mol_type = other DNA
cgcgatgatggcgaaagaggaccgtattgttgccgaccggcttagccatgcctccttgctggaggctgcaagttt

SEQ ID NO: 560636 - DNA, 75 bp, synthetic construct
  source 1..75: mol_type = other DNA
tttcgcaggcgccagcgagctggtgcgtgaagtgggaatggactggatgtcgcaggatttggctgcccgattatc

SEQ ID NO: 560637 - DNA, 75 bp, synthetic construct
  source 1..75: mol_type = other DNA
cgatcagaatcctaaattcagggcgcagcagacctttgacgaaaatcaggcgcaaaattttgccccggccacgct

SEQ ID NO: 560638 - DNA, 75 bp, synthetic construct
  source 1..75: mol_type = other DNA
attgtggcgcgtctgtgcgggttaagcgtctggatcctgattcgtattctgaaagatgagctgattctggcgtac

SEQ ID NO: 560639 - DNA, 75 bp, synthetic construct
  source 1..75: mol_type = other DNA
gcgcaggacatcgtgacgttcggcgtcacctatcttgagaagcatttcggaaccactccgatcgtgcctccgcac

SEQ ID NO: 560640 - DNA, 75 bp, synthetic construct
  source 1..75: mol_type = other DNA
cgccttggcgggaaggccctgctgttgggtgcgccgctaaactccgttaccgcattgcactacgccgaggcggtt

SEQ ID NO: 560641 - DNA, 75 bp, synthetic construct
  source 1..75: mol_type = other DNA
cgtactgcgtgaagataccattccgtttcttgaggcactgaaagccagcggtaagcagcgaattttgctcaccaa

SEQ ID NO: 560642 - DNA, 75 bp, synthetic construct
  source 1..75: mol_type = other DNA
catcctgtccactgagggcgacggcactgcaacggaggcgttgcttaataccgttcgcgccgttctgaatgcaga

SEQ ID NO: 560643 - DNA, 75 bp, synthetic construct
  source 1..75: mol_type = other DNA
ggtgctgacgctgatggtgacctcgaaagggattgctggcgtgccgggcgtgtcgtttgtggtgttgctggcaac

SEQ ID NO: 560644 - DNA, 75 bp, synthetic construct
  source 1..75: mol_type = other DNA
atggattatcaaagcagtttgacctttctgaatctgcaaatcagcggcatcagagaggccattgaagggaaataa

SEQ ID NO: 560645 - DNA, 75 bp, synthetic construct
  source 1..75: mol_type = other DNA
ccaaaggtgtgtataagcttattgttactacaactatgctcggtgggaaatatcatgtggatgatacatatgtag

SEQ ID NO: 560646 - DNA, 75 bp, synthetic construct
  source 1..75: mol_type = other DNA
gttgcacagtcacggcacgggtaaaggccgcgtattttgcgaaaaactggcgcagcaggcgggcatcgaccagtc

SEQ ID NO: 560647 - DNA, 75 bp, synthetic construct
  source 1..75: mol_type = other DNA
tcgctgagcggtatggggaccattgataatgccggggatgatgagcatgaggcgctgacgccggaaaagtcctga

SEQ ID NO: 560648 - DNA, 75 bp, synthetic construct
  source 1..75: mol_type = other DNA
tctttatgagttttctgctcgcctctttccagcgcaaacaatccctttgcgttaccgcagcgttaatcggcgccc

SEQ ID NO: 560649 - DNA, 75 bp, synthetic construct
  source 1..75: mol_type = other DNA
attacggcgaacagtctgtggtgctgacggaactttccgggctgcagcgggtggactggctggcgtttgtccggg

SEQ ID NO: 560650 - DNA, 75 bp, synthetic construct
  source 1..75: mol_type = other DNA
tgcgtggagcggctaaacttatgccttctgaactttccggcgggatggctcgtcgcgctgcactggcgcgtgcga

SEQ ID NO: 560651 - DNA, 75 bp, synthetic construct
  source 1..75: mol_type = other DNA
cacagaaacaatatccgtttaaccgccgccggagaaaagcttctgccttatgcagaaacgctcatgagcacctgg

SEQ ID NO: 560652 - DNA, 75 bp, synthetic construct
  source 1..75: mol_type = other DNA
ccgctttatgccatatggctgcaaaatagcgataaaaatacgttgattcgcgatctattgaaaattaacgtgctg

SEQ ID NO: 560653 - DNA, 75 bp, synthetic construct
  source 1..75: mol_type = other DNA
cccaaaatggacgaatttagcagtcagttgctggggtatttcactttagcgctttataccagtgccccttccaaa

SEQ ID NO: 560654 - DNA, 75 bp, synthetic construct
  source 1..75: mol_type = other DNA
ttataatcaataagttatctatcgacgtcaaaccaagtctcgatcaagatgggcgagtagtgtacttacccaaca

SEQ ID NO: 560655 - DNA, 75 bp, synthetic construct
  source 1..75: mol_type = other DNA
atgctccgcaccgttgccggtgatgagcacaccgcacgcctttccctcgttcgcgattacatcctctcgttcgct

SEQ ID NO: 560656 - DNA, 75 bp, synthetic construct
  source 1..75: mol_type = other DNA
cgccacagaaacaatatccgtttaaccgctgccggtgaaaaactactgccttatgcagaaacgctcatgagcacc

SEQ ID NO: 560657 - DNA, 75 bp, synthetic construct
  source 1..75: mol_type = other DNA
aacggtttaaattttatctggagcaacatgggtggatcgttgcccgtaaagaacaactagtggaaagattgatgc

SEQ ID NO: 560658 - DNA, 75 bp, synthetic construct
  source 1..75: mol_type = other DNA
ttttacgtcgtagctcaggcacaaccattttcagggctgtggtgtttatgcttacaccatggttctatcgagata

SEQ ID NO: 560659 - DNA, 75 bp, synthetic construct
  source 1..75: mol_type = other DNA
cctttaacgccatcaccagtcatgatcgtgatgatgtggccgtaatggcctcagcacgtcatggtgtcaagccac

SEQ ID NO: 560660 - DNA, 75 bp, synthetic construct
  source 1..75: mol_type = other DNA
cccctctatgctatctggctgcaaaatagcgataaacacgcattgatccgcgatctattgaaaattaatgttctg

SEQ ID NO: 560661 - DNA, 75 bp, synthetic construct
  source 1..75: mol_type = other DNA
cccaaaatggacgaatttagcagtcagttgttggggtatttcactttagcgctttataccagtgccccttctaaa

SEQ ID NO: 560662 - DNA, 75 bp, synthetic construct
  source 1..75: mol_type = other DNA
ttatggctacgatcctcgccccatcacatcctcaatttatatttgtttttgccgccgttcgtcgtgcagaacgta

SEQ ID NO: 560663 - DNA, 75 bp, synthetic construct
  source 1..75: mol_type = other DNA
gcaaccgccccaagacaggtggaaaatccccatcagaggttatcaggtctacaattggcaatgtctccgatttcg

SEQ ID NO: 560664 - DNA, 75 bp, synthetic construct
  source 1..75: mol_type = other DNA
ctgcgggcattgcgccggaaagcgttgattctggtgccatcatcatcaccggtgaaagcgcgaaaacccgcaatg

SEQ ID NO: 560665 - DNA, 75 bp, synthetic construct
  source 1..75: mol_type = other DNA
tcggtattgatatcggcaccaccaccactcaggtgatcttctcccatctggaactggttaaccgtgcggcggtgt

SEQ ID NO: 560666 - DNA, 75 bp, synthetic construct
  source 1..75: mol_type = other DNA
gttctgttttgccgatattggcccgcttctggcaacggcgctgcatgaccatccgcgcctgcgtgagatgaacgt

SEQ ID NO: 560667 - DNA, 75 bp, synthetic construct
  source 1..75: mol_type = other DNA
aaatttaatatatctgaagatgatttattgaatgatgcctgtataaacatatctgttgctggttatatcttagcc

SEQ ID NO: 560668 - DNA, 75 bp, synthetic construct
  source 1..75: mol_type = other DNA
cgcagacatttcccgcgcctgactgagagagcgcaggagccggaaccacaaccagttcgtgaaaccagacctgtg

SEQ ID NO: 560669 - DNA, 75 bp, synthetic construct
  source 1..75: mol_type = other DNA
cagaagatgaaacaattattgatagtgctaaaatttacgatgcgcttagaaaaaattattttgatagatgcttcc

SEQ ID NO: 560670 - DNA, 75 bp, synthetic construct
  source 1..75: mol_type = other DNA
tgtgtctgattttccaagtatcgatcaagcccgtgaggcagctcggcagttggttcagacaatgattgcaacaaa

SEQ ID NO: 560671 - DNA, 75 bp, synthetic construct
  source 1..75: mol_type = other DNA
gtgaaaagattgcttaaccaccgtaataccacggaccctactgaaagatatgctgagcctgataacgagcgagtt

SEQ ID NO: 560672 - DNA, 75 bp, synthetic construct
  source 1..75: mol_type = other DNA
caaccctctttgtcctacaatccattctctatcttgaaagttcagaagaagttcaggactcgttctgagcttgag

SEQ ID NO: 560673 - DNA, 75 bp, synthetic construct
  source 1..75: mol_type = other DNA
aaagcgttgattctggtgccatcatcatcaccggtgaaagcgcgaaaccccgcaatgctcgcccggcggtgatga

SEQ ID NO: 560674 - DNA, 75 bp, synthetic construct
  source 1..75: mol_type = other DNA
cggtactgacggtcatcaacgcgctggtcgatttcgtcgcgcgttttccgaatccgcatcccctgctggtggtgg

SEQ ID NO: 560675 - DNA, 75 bp, synthetic construct
  source 1..75: mol_type = other DNA
cgcgcgggggactatatcgacattggtacgcctctttttggcggatcggttgtgccggtgacggtgaaatcactc

SEQ ID NO: 560676 - DNA, 75 bp, synthetic construct
  source 1..75: mol_type = other DNA
agaaagctgatgtacaacctggctgagttcaaacgcctgcaggcggttgccaatctgcgtcttagcttgcgtgaa

SEQ ID NO: 560677 - DNA, 75 bp, synthetic construct
  source 1..75: mol_type = other DNA
attgctgcgtattgctgaccgtggtgaccgtccgttcgtactcggcccaactcatgaagaagtgattacagacct

SEQ ID NO: 560678 - DNA, 75 bp, synthetic construct
  source 1..75: mol_type = other DNA
tcgaagtcggtcacatcttccagctgggtactaagtactccgaagcactgaaagcctccgttcagggcgaagatg

SEQ ID NO: 560679 - DNA, 75 bp, synthetic construct
  source 1..75: mol_type = other DNA
cactacggaatgcagggcgtacacaataatgccggtcggggccacgaaaatggctcggttgaaagtgatcttacc

SEQ ID NO: 560680 - DNA, 75 bp, synthetic construct
  source 1..75: mol_type = other DNA
taaacactacttcggcatcaactgggatcgcgatgtcgctaccccggaaattgctgatatccgtaacgtggtggc

SEQ ID NO: 560681 - DNA, 75 bp, synthetic construct
  source 1..75: mol_type = other DNA
aagagatgaacaacgccggtgcaatcgaggtgtcgatgccggtggttcagccagccgatttgtggcaagagagtg

SEQ ID NO: 560682 - DNA, 75 bp, synthetic construct
  source 1..75: mol_type = other DNA
cgcgcacaaggtatcgaagtgctgctggatgaccgcaaagagcgtccgggcgtgatgtttgctgatatggaactg

SEQ ID NO: 560683 - DNA, 75 bp, synthetic construct
  source 1..75: mol_type = other DNA
ttgcgttcaatgcaactgctggcgcgtcagggcatcgacctgcctgtcacgggcattgcgcattcgccggatgat

SEQ ID NO: 560684 - DNA, 75 bp, synthetic construct
  source 1..75: mol_type = other DNA
cggcgcggcaagcgtcgccagtatcacaccacaggagcgtgaaatcgcgataaaagccgcgcgaacgatggcgct

SEQ ID NO: 560685 - DNA, 75 bp, synthetic construct
  source 1..75: mol_type = other DNA
gtgaaaattgccatattgtcccgggatggaacgctctattcgtgtaagcggctgcgtgaagccgctatacagcgc

SEQ ID NO: 560686 - DNA, 75 bp, synthetic construct
  source 1..75: mol_type = other DNA
ggcggaacctgaaggtcgctgtgtgcgtatgctttccgattcgtggagtttccccgattcgcgacacaccttagg

SEQ ID NO: 560687 - DNA, 75 bp, synthetic construct
  source 1..75: mol_type = other DNA
attatagagaagcggtcgatattcatagctcacttgagctttcatttatattgcataaatatcatttgcgtgtag

SEQ ID NO: 560688 - DNA, 75 bp, synthetic construct
  source 1..75: mol_type = other DNA
ttgcgttccatgcaactgctggcgcgtcagggcattgacctgcctgtcacggggattgcgcattcgctggatgat

SEQ ID NO: 560689 - DNA, 75 bp, synthetic construct
  source 1..75: mol_type = other DNA
tccggttgcgctcaaggcgcagccggaaccgtggcggcgcggtcgttctggggatcggggagcaaaaacacgcaa

SEQ ID NO: 560690 - DNA, 75 bp, synthetic construct
  source 1..75: mol_type = other DNA
ttattcgtgaattacgggatgctgaatcgccacgacgtattaccttccgggaaataggcgagaaatttgaattat

SEQ ID NO: 560691 - DNA, 75 bp, synthetic construct
  source 1..75: mol_type = other DNA
gtacatacccggagttgctgaaatataaacgaccgcgatttacacctgatgaagataaatttatccgaaaaaatg

SEQ ID NO: 560692 - DNA, 75 bp, synthetic construct
  source 1..75: mol_type = other DNA
cccgtggacacctgaagaagatgcgctgctgattgcgctttattcctccaccccggttaaggatattgccgccag

SEQ ID NO: 560693 - DNA, 75 bp, synthetic construct
  source 1..75: mol_type = other DNA
accgatctggggacgaaatcgacatcctcattcgattacggtaccaaaacagccagcacttttgattatgggact

SEQ ID NO: 560694 - DNA, 75 bp, synthetic construct
  source 1..75: mol_type = other DNA
tttggtaacgggtatctggtcgctaaaacaggaaatcagtttttcgtcactaagggcacgggctatgtggcagga

SEQ ID NO: 560695 - DNA, 75 bp, synthetic construct
  source 1..75: mol_type = other DNA
gcatatcctttactggccatcgcgtatccgtcgggtgttattcctgacatgcgccgccggacaatcaaagggaaa

SEQ ID NO: 560696 - DNA, 75 bp, synthetic construct
  source 1..75: mol_type = other DNA
gatcacctctcgcatgttgtcggtgatcccggtgttgttcttttggggatgagtcgccagatagcccctcaaacg

SEQ ID NO: 560697 - DNA, 75 bp, synthetic construct
  source 1..75: mol_type = other DNA
agactcacttccgcttcctcgctcactcagtcgctacgctcctgccgttcgactgcggcgagcggtaccacctct

SEQ ID NO: 560698 - DNA, 75 bp, synthetic construct
  source 1..75: mol_type = other DNA
gatattccgtttgccatctggtcagagcttcgccccgacaccccgtatcagtgcgtacgtgctcaatgtggtttc

SEQ ID NO: 560699 - DNA, 75 bp, synthetic construct
  source 1..75: mol_type = other DNA
aatggctgactgcggagcaggtcctgactgaggccaggattatggagaaaacacagtatggtcaatatttatttc

SEQ ID NO: 560700 - DNA, 75 bp, synthetic construct
  source 1..75: mol_type = other DNA
agcaccaacagcaccacgtcatttggtcagatgacgcaccagaccggtagtggtgcaaccgccacgcagacccgt

SEQ ID NO: 560701 - DNA, 75 bp, synthetic construct
  source 1..75: mol_type = other DNA
aaattgcgctcaccctgtctgttgttgctgtggcttttatgtgggtacagcggcataacgtgatggatttgctgg

SEQ ID NO: 560702 - DNA, 75 bp, synthetic construct
  source 1..75: mol_type = other DNA
aagaggggaggcaagacctggcattattatgtccagcagctatttggtggaagacctgacccgaacctgttattc

SEQ ID NO: 560703 - DNA, 75 bp, synthetic construct
  source 1..75: mol_type = other DNA
ggtggccgtgtttgtgcttatcagcctgctggttaatgtccgcacatcggtgcagattattgataacagtgacct

SEQ ID NO: 560704 - DNA, 75 bp, synthetic construct
  source 1..75: mol_type = other DNA
gtatcaccagtaatgccgcccgtaatggtgacaccgccagcctggtgaatctggccaccacgtcatcgatggaga

SEQ ID NO: 560705 - DNA, 75 bp, synthetic construct
  source 1..75: mol_type = other DNA
gctatgtgtttgctctgatgtggttccagacctggccgttgctgtatgccattctgaacagtgccatgacattct

SEQ ID NO: 560706 - DNA, 75 bp, synthetic construct
  source 1..75: mol_type = other DNA
agggatatatcacccgcctggagaaccagcctgtgcagggggaagtatcgtctccggtaacgctactggcgcagg

SEQ ID NO: 560707 - DNA, 75 bp, synthetic construct
  source 1..75: mol_type = other DNA
gcaggaacatcagaccctgccgcactcccgtctggtgtatgttgtttctgaaacaaaaacagagcccacactctt

SEQ ID NO: 560708 - DNA, 75 bp, synthetic construct
  source 1..75: mol_type = other DNA
caggcagtgtggttgacggtaattactcctacggcaacatgcagacggagaacgtgaacggcttcagctggagca

SEQ ID NO: 560709 - DNA, 75 bp, synthetic construct
  source 1..75: mol_type = other DNA
gcggggcgatgtcccggttaccggtcggtatcaatgcaacgcgtcagattgcagcggcacaacaggaaatggccc

SEQ ID NO: 560710 - DNA, 75 bp, synthetic construct
  source 1..75: mol_type = other DNA
acagcatcctcggtgaggaaaatattgtaagagggcagtattctgaactgcaaaatcaccataaaacagaggtat

SEQ ID NO: 560711 - DNA, 75 bp, synthetic construct
  source 1..75: mol_type = other DNA
gctattctgacaaataccagttcgccggagattgcagaacgccgtcgggctatggcgtggtcttttgttcaggaa

SEQ ID NO: 560712 - DNA, 75 bp, synthetic construct
  source 1..75: mol_type = other DNA
tagtcgcggagagatttttcttgctttgcgcgaccttagcagcaagctggtggtggaagagtctctggagcttgc

SEQ ID NO: 560713 - DNA, 75 bp, synthetic construct
  source 1..75: mol_type = other DNA
gtggggctggtggttgaaactgaagcctggcactatctttctctgcgcattagtcgcggggagattttccttgct

SEQ ID NO: 560714 - DNA, 75 bp, synthetic construct
  source 1..75: mol_type = other DNA
tttctggcgatggaaatcacagataacggtatttcctgatccggctggtgcttatcgtcaacatgctcgcggtga

SEQ ID NO: 560715 - DNA, 75 bp, synthetic construct
  source 1..75: mol_type = other DNA
agtatgagccggcgcggaaaccgctgggataacagcccaatggaacgcttcttcaggagtctgaagaacgaatgg

SEQ ID NO: 560716 - DNA, 75 bp, synthetic construct
  source 1..75: mol_type = other DNA
ctgggcggtgaccgggctctacttctatgacaacaacgtggtggagatggcgaaggacgtgaagccttctgagcg

SEQ ID NO: 560717 - DNA, 75 bp, synthetic construct
  source 1..75: mol_type = other DNA
aaaacggcgtcccgatgagccgttaccgtgccgggcggctgatgaaacatctgaatctgagcagttgtcagcccg

SEQ ID NO: 560718 - DNA, 75 bp, synthetic construct
  source 1..75: mol_type = other DNA
caggtggtgccggaaaatccatgctggccttacagcttgccacgcagatcgctggaggcccggacttgctggaag

SEQ ID NO: 560719 - DNA, 75 bp, synthetic construct
  source 1..75: mol_type = other DNA
atggcccttgatcttatggcggccttttctgaaacgccgccgcctcttgattatgttttacctaacatggttgcc

SEQ ID NO: 560720 - DNA, 75 bp, synthetic construct
  source 1..75: mol_type = other DNA
cagtaatgagcaggcgactcaggaactggcatccagaagtacgagagcttctgccgggatgtatggagatgctca

SEQ ID NO: 560721 - DNA, 75 bp, synthetic construct
  source 1..75: mol_type = other DNA
caggggtagtagcgtcctggttgataatatacggtggcaatcttatctggcgggcatgaccgccttggaagcgaa

SEQ ID NO: 560722 - DNA, 75 bp, synthetic construct
  source 1..75: mol_type = other DNA
atgctttgggaaaatatctaacagcacgtcagcagcagattgttgctgataagctacttgtcgaacctttggtag

SEQ ID NO: 560723 - DNA, 75 bp, synthetic construct
  source 1..75: mol_type = other DNA
ccaatggcgcaagtgatcggacgtatggaagccatcgccgccgatacggggtgctctatcgtatttttgcaccat

SEQ ID NO: 560724 - DNA, 75 bp, synthetic construct
  source 1..75: mol_type = other DNA
tattcacccaaccggacagcgtcacctacagcaagacaggcatgctgttcggggcgaatctgattgtgaaaagca

SEQ ID NO: 560725 - DNA, 75 bp, synthetic construct
  source 1..75: mol_type = other DNA
agcggtcgtgatgcggatggcctcaaggctggaagtacctcaacctgatgaagcacatattgtggaatattgggt

SEQ ID NO: 560726 - DNA, 75 bp, synthetic construct
  source 1..75: mol_type = other DNA
atgagcaaagttctcctgattttgttccctgggaggctgaaccttttgaggttattttgctgtgtggcttaccgg

SEQ ID NO: 560727 - DNA, 75 bp, synthetic construct
  source 1..75: mol_type = other DNA
ccaggcgcaagtatgcggtgcctgaagcggtcgtgatgcgaatggcctcaagactggaagttcctcaaccagatg

SEQ ID NO: 560728 - DNA, 75 bp, synthetic construct
  source 1..75: mol_type = other DNA
acgctggaagacctgatggtggctgatgacccctatatggtgattttttcccggcccagcccgctgcggggggta

SEQ ID NO: 560729 - DNA, 75 bp, synthetic construct
  source 1..75: mol_type = other DNA
agcggtcgtgatgcggatggcctcaaggctggaagttcctcaacctgatgaagcacatagcgtggagtatcgggt

SEQ ID NO: 560730 - DNA, 75 bp, synthetic construct
  source 1..75: mol_type = other DNA
aacgctggtcggtgctacgccagcgttttagttgggttgaagagatgcataacacaccgcaagacccggtgcatc

SEQ ID NO: 560731 - DNA, 75 bp, synthetic construct
  source 1..75: mol_type = other DNA
agcaccgatttcctgtcccggaatccggaaatcatcaatctgttccaggactacgtccagaactgcgtgctgggt

SEQ ID NO: 560732 - DNA, 75 bp, synthetic construct
  source 1..75: mol_type = other DNA
cgaccaccgcgggctatattgccgtgatgataccgcctttgtcgtgggggatcgtgaagagcatgggagcagcct

SEQ ID NO: 560733 - DNA, 75 bp, synthetic construct
  source 1..75: mol_type = other DNA
cccattaatattaaaagcaattgcatggaacgaatcaaaaaacaaaaacggaataaaaagtaaaataaacaaaaa

SEQ ID NO: 560734 - DNA, 75 bp, synthetic construct
  source 1..75: mol_type = other DNA
tccggcagccatactgacaataatgctgattcccgtgtggatcagttgtctgcagccctgaattcagcgaagcag

SEQ ID NO: 560735 - DNA, 75 bp, synthetic construct
  source 1..75: mol_type = other DNA
agacgggaggcaagacctggcattattatgtgcagcagatatttggcggcagaccggacccggacctgttattca

SEQ ID NO: 560736 - DNA, 75 bp, synthetic construct
  source 1..75: mol_type = other DNA
ttcacgggccagcaatgatgctcgtcatgatatcgatgccagagctacacaagactttaaagaggccagcgatta

SEQ ID NO: 560737 - DNA, 75 bp, synthetic construct
  source 1..75: mol_type = other DNA
attatgtgcagaactgtgtgatgggggatatttacctgaaccacaaatacacgctggaggagctgatggcctccg

SEQ ID NO: 560738 - DNA, 75 bp, synthetic construct
  source 1..75: mol_type = other DNA
gacggtaatatggtgatggatgcaagcggagcgatgtcccggttaccggtcggcatcaatgcaacgcgtcagatt

SEQ ID NO: 560739 - DNA, 75 bp, synthetic construct
  source 1..75: mol_type = other DNA
aatggcatcccgtactgaaagcatgagtgggcagatgagtgaagacttgtcgcaacagtttgcacagtatgtaat

SEQ ID NO: 560740 - DNA, 75 bp, synthetic construct
  source 1..75: mol_type = other DNA
tggaatttattcaaatggtgtgcaaaaagtttatatgggaatacaaaaagcctatataagtaatattgttaatgc

SEQ ID NO: 560741 - DNA, 75 bp, synthetic construct
  source 1..75: mol_type = other DNA
cagatatttggcggcagaccggacccggacctgttattcagacaactggtcagtgacagttacagttatttctac

SEQ ID NO: 560742 - DNA, 75 bp, synthetic construct
  source 1..75: mol_type = other DNA
ggggcgaatctgattgtgaaaagcaccgatttcctgtcccggaatccggaaatcatcaatctgttccaggactac

SEQ ID NO: 560743 - DNA, 75 bp, synthetic construct
  source 1..75: mol_type = other DNA
atgaagagcgagaaagtcaaaagataatacctgagccatcagaagagactgtgaaaaaaatgattgatgagaaaa

SEQ ID NO: 560744 - DNA, 75 bp, synthetic construct
  source 1..75: mol_type = other DNA
gcggtgaatcgcctgatgatctcccgtaaaatcgatgtcactgttgctgattttctttctgcattagttcgttat

SEQ ID NO: 560745 - DNA, 75 bp, synthetic construct
  source 1..75: mol_type = other DNA
gctatgtgtttgccctgatgtggttgcagtcatggccaatgttgtacgccattctgaacagtgccatgacatttt

SEQ ID NO: 560746 - DNA, 75 bp, synthetic construct
  source 1..75: mol_type = other DNA
tagccgaagcattggtaaaaaaagatgataaacgcaaacatacattgctggtttcattacttaatgcaaatcctt

SEQ ID NO: 560747 - DNA, 75 bp, synthetic construct
  source 1..75: mol_type = other DNA
gtgcgggggcaaccccgcacacatcaataatccctcccttcccctgtgctacacttcgcgccattccttactgct

SEQ ID NO: 560748 - DNA, 75 bp, synthetic construct
  source 1..75: mol_type = other DNA
gaagttgacgtgctgtacggtattggtggcgcgccggaaggtctctacagcgcgaaaaccttcagcgaagaagag

SEQ ID NO: 560749 - DNA, 75 bp, synthetic construct
  source 1..75: mol_type = other DNA
acctgaatctgccgctggcggataacctgcgcaacgttgcgacagcgctcggcaaaccgttaagcgaactgacgg

SEQ ID NO: 560750 - DNA, 75 bp, synthetic construct
  source 1..75: mol_type = other DNA
ggttgccgctggggtattcgctcaggggcttagggaaggtgcgaataagcggggaaattcttctcggctgactca

SEQ ID NO: 560751 - DNA, 75 bp, synthetic construct
  source 1..75: mol_type = other DNA
gtaccggacgggtgacgctgcaggaggtcgctaactttgcaggtgtcggaaccatgaccgtctcccgcgcgctga

SEQ ID NO: 560752 - DNA, 75 bp, synthetic construct
  source 1..75: mol_type = other DNA
aaatcagcggcactgcctgcctcaacgtcggcggtcgcctgctggaaaccgacagccaggggcgcgtggtttacg

SEQ ID NO: 560753 - DNA, 75 bp, synthetic construct
  source 1..75: mol_type = other DNA
tctttgacggcaaatggggcccgcaattgcacatcatcactattctggtgatctgtatgctgattgcctccattc

SEQ ID NO: 560754 - DNA, 75 bp, synthetic construct
  source 1..75: mol_type = other DNA
ccttcgctaacgtggtaatgctattagttgcggcaggggtttttgctcagggtcttagcaccattggctttatcc

SEQ ID NO: 560755 - DNA, 75 bp, synthetic construct
  source 1..75: mol_type = other DNA
gggcttagcaccatcggctttattcaaagtctgatttctatcgctacctcgtttggttcggcgagtatcatcctg

SEQ ID NO: 560756 - DNA, 75 bp, synthetic construct
  source 1..75: mol_type = other DNA
tggctgtttggggaacgcaccgtcaatcaggggccgtggctcagcaaggaggaaccatgtacctctcaagaataa

SEQ ID NO: 560757 - DNA, 75 bp, synthetic construct
  source 1..75: mol_type = other DNA
gcataccaacagtatcaggatcatttccataaactgaaagtctcactcccgaaacttcaggatgaatgctggtgg

SEQ ID NO: 560758 - DNA, 75 bp, synthetic construct
  source 1..75: mol_type = other DNA
cccggcgcgactactacaccgatgcctggtggatggtggcggtggcaacaacagccgatgcgccttacagcctcg

SEQ ID NO: 560759 - DNA, 75 bp, synthetic construct
  source 1..75: mol_type = other DNA
agttttttattcgccaccagaaaaaacttgagcgtctaacttcgattgccataaccttgccgggaattattgata

SEQ ID NO: 560760 - DNA, 75 bp, synthetic construct
  source 1..75: mol_type = other DNA
agcgatggggcagagcaatgcgctggcggtcatggctttcgcccctcgagatagcctgttacatgcgcccgatat

SEQ ID NO: 560761 - DNA, 75 bp, synthetic construct
  source 1..75: mol_type = other DNA
gcatatcaccagtatcaggagcatttccacgacctgaaaatcgcactcccgaaacttcaggatgaatgctggtgg

SEQ ID NO: 560762 - DNA, 75 bp, synthetic construct
  source 1..75: mol_type = other DNA
agctgctgccatttgtgcctccccggcggcgattattctcgcaccgacttcaggggatgtggtgctggcggcgca

SEQ ID NO: 560763 - DNA, 75 bp, synthetic construct
  source 1..75: mol_type = other DNA
cgctcatgttctgggaatgtcgcaacctgcggtcagtaacgctgttgcacgcctgaaggtgatgtttaatgacga

SEQ ID NO: 560764 - DNA, 75 bp, synthetic construct
  source 1..75: mol_type = other DNA
tcgaacaagttgcgccgaatattcatgttgtattcaagtcctctttaaatcagaacactgaacatcagttacgtt

SEQ ID NO: 560765 - DNA, 75 bp, synthetic construct
  source 1..75: mol_type = other DNA
gctgcaactcgtgcaaaatgagttaccgggctcaggattcgaacctgccagcagtgaacgcgtattccatctttg

SEQ ID NO: 560766 - DNA, 75 bp, synthetic construct
  source 1..75: mol_type = other DNA
gtctacaacggtgacagcaggcgcgctcatcgtgacggatgcctggggtaacacgcagagtaatttttcctcaac

SEQ ID NO: 560767 - DNA, 75 bp, synthetic construct
  source 1..75: mol_type = other DNA
tttaggccttccgctgactaacacctggtgggcttacgataaaattgcctacgcgaacgtctggtacgatcagtc

SEQ ID NO: 560768 - DNA, 75 bp, synthetic construct
  source 1..75: mol_type = other DNA
gcaaaattctgggggcatatggccgaaacgatgaccggtgctggcgggcttatttataaaagaccgttattgcaa

SEQ ID NO: 560769 - DNA, 75 bp, synthetic construct
  source 1..75: mol_type = other DNA
ccatgaaattcacgttgacctttctaacagaaacaaacattactcttcttcatatttaatgagtgtagtaaaagc

SEQ ID NO: 560770 - DNA, 75 bp, synthetic construct
  source 1..75: mol_type = other DNA
cacaatcctatttcagaagatacagaaaacaacaatgagaatgtagggaatgatcacgcacgcatcggattcaaa

SEQ ID NO: 560771 - DNA, 75 bp, synthetic construct
  source 1..75: mol_type = other DNA
atgctgacagttattgagctccttattggagttgtagttattgtgggtgtagctcgctacatcattaaagggtat

SEQ ID NO: 560772 - DNA, 75 bp, synthetic construct
  source 1..75: mol_type = other DNA
ggcggagttaagcaagccacagctacgcatggtcgatctcaacttattaaccgttttcgatgccgtgatgcagga

SEQ ID NO: 560773 - DNA, 75 bp, synthetic construct
  source 1..75: mol_type = other DNA
ttaccgctgccgttaaaacaaaatagcagaacctgttatctctcctggcatgaagctgccgggcgcgataaaggc

SEQ ID NO: 560774 - DNA, 75 bp, synthetic construct
  source 1..75: mol_type = other DNA
ttattaaccgttttcgatgccgtgatgcaggagcaaaacattacccgtgccgctcatgttctgggtatgtcgcaa

SEQ ID NO: 560775 - DNA, 75 bp, synthetic construct
  source 1..75: mol_type = other DNA
atgagccaatatctgatttttcagcttcatgggccgatggcgtcctggggcgtcgatgcccccggtgaagtgcgt

SEQ ID NO: 560776 - DNA, 75 bp, synthetic construct
  source 1..75: mol_type = other DNA
cgctgtataacgccaacagtggtaacgcggtgcaaacggcgcacggttggccaacacagcgtcagccttactgga

SEQ ID NO: 560777 - DNA, 75 bp, synthetic construct
  source 1..75: mol_type = other DNA
tatggcggataccgccacggtaagtggcaagacgctgcatcgcccgctattaaaatcggagttgccgtcaggcgc

SEQ ID NO: 560778 - DNA, 75 bp, synthetic construct
  source 1..75: mol_type = other DNA
ggccttccctcaaagctgaactctctggcggtacggccataacggtcaataatgaagtctggtcgcgcctgacag

SEQ ID NO: 560779 - DNA, 75 bp, synthetic construct
  source 1..75: mol_type = other DNA
catttatcctgacgcgtgccaacagcgtgagtcgggctaacgcatcagcaaccgcgagcgtgggcgcgctgacgg

SEQ ID NO: 560780 - DNA, 75 bp, synthetic construct
  source 1..75: mol_type = other DNA
acaggataacagtaccgggttaagaaccgatctcacggcaaaactggatacgtccagcagcgtcaaggcgatgct

SEQ ID NO: 560781 - DNA, 75 bp, synthetic construct
  source 1..75: mol_type = other DNA
agcatggagcagcgtaactacaaggcggtagatctcagcaatggcacgagtgcggcagtgtcatcaacgacgctg

SEQ ID NO: 560782 - DNA, 75 bp, synthetic construct
  source 1..75: mol_type = other DNA
gctggcggatgaaaccgaacatgaactgggatcggtgcgggaaaacaacgaagactgggcgctgtacgatcaaaa

SEQ ID NO: 560783 - DNA, 75 bp, synthetic construct
  source 1..75: mol_type = other DNA
aaatttaacatcgacagattgtccgctggagaatcaaccgcgcagtaatgaattgttggatttgtataatgatca

SEQ ID NO: 560784 - DNA, 75 bp, synthetic construct
  source 1..75: mol_type = other DNA
cgccgactttaccctcacgcgtgaaacgacgctggatcgctcgaaagcaaccgttaactcaaatgcggacgatct

SEQ ID NO: 560785 - DNA, 75 bp, synthetic construct
  source 1..75: mol_type = other DNA
gtcaggctaatacgtccagtaccagtaaaggcggctgcggcaccaatatgctgccgcgtcgttcccagctcagcg

SEQ ID NO: 560786 - DNA, 75 bp, synthetic construct
  source 1..75: mol_type = other DNA
catttatcctgacgcgtgccaacagcgtgagtcgggctaatgcatcagcgacgatgagcgtgggctcgttgacgg

SEQ ID NO: 560787 - DNA, 75 bp, synthetic construct
  source 1..75: mol_type = other DNA
aatgcaattacgttgacagaattgacacctgtgtcggcggagttttctctggccgcacacgatacgcaatggcaa

SEQ ID NO: 560788 - DNA, 75 bp, synthetic construct
  source 1..75: mol_type = other DNA
tgcgccattgaccaggattttcttgacgcagccggtattctcgaaaacgaagccattgatatctggaatgtgacc

SEQ ID NO: 560789 - DNA, 75 bp, synthetic construct
  source 1..75: mol_type = other DNA
aataacacgtttgtcactgaaactggctggcctgcgtattacacctggtgggcagaggataaatccgccgatggt

SEQ ID NO: 560790 - DNA, 75 bp, synthetic construct
  source 1..75: mol_type = other DNA
ctcggtaagtaataataatgagtcgtggtcataccttttttataccaataaagttacgccggattgcccggttga

SEQ ID NO: 560791 - DNA, 75 bp, synthetic construct
  source 1..75: mol_type = other DNA
actgtgataaccagtccgaactcaccgaaagcaaaatactggggtcatatgcccgacacgtttaccagtagggcg

SEQ ID NO: 560792 - DNA, 75 bp, synthetic construct
  source 1..75: mol_type = other DNA
tggcgaccaaaagtcgcctactttgaaggtgataacgaaatgaaacgtaccgcgaaagcgattccggttcaggtt

SEQ ID NO: 560793 - DNA, 75 bp, synthetic construct
  source 1..75: mol_type = other DNA
atggtgatacttgtcgatccccaagtggaagcaatcaacggaaaattggttgtagcgaaacttgacggtgacaat

SEQ ID NO: 560794 - DNA, 75 bp, synthetic construct
  source 1..75: mol_type = other DNA
cgggaagctatgattcgacgttaaaggcgatgaaggtaaaggtgggagaagaagccacgctccgactgactatta

SEQ ID NO: 560795 - DNA, 75 bp, synthetic construct
  source 1..75: mol_type = other DNA
ctttctttggatgaattaaatgattttctctctatgaatgaatctgaccttgatagtgaagctactaaagaggct

SEQ ID NO: 560796 - DNA, 75 bp, synthetic construct
  source 1..75: mol_type = other DNA
gctctaaaaagacttctaaacaagacagagaaatcactgatgtgagtgttgatagtgaccataaaaacacacagt

SEQ ID NO: 560797 - DNA, 75 bp, synthetic construct
  source 1..75: mol_type = other DNA
actttgatgatagtgacgatgattttacttttacaccaaaaaagaaaactcacaccgagccaaagaaagaaaaag

SEQ ID NO: 560798 - DNA, 75 bp, synthetic construct
  source 1..75: mol_type = other DNA
tctttttgttaacgataaccgagggggatgatattaagcgtaaaaaacttttattaattttatgccttcataaag

SEQ ID NO: 560799 - DNA, 75 bp, synthetic construct
  source 1..75: mol_type = other DNA
ctttcacaccaagaaagaaaactcacactgattcaaagaaagaaaaagttaaagtcagacgtgtttatggtggag

SEQ ID NO: 560800 - DNA, 75 bp, synthetic construct
  source 1..75: mol_type = other DNA
taaatgattttctctctatgaatgaatctgaccttgatagtgaagctactaaagagacctctaaaacatctgact

SEQ ID NO: 560801 - DNA, 75 bp, synthetic construct
  source 1..75: mol_type = other DNA
ttgatttcgctcgatcgtcaggaacgggggcgcggcgagatttcggcgattcaggaagttgagcgtgattacaac

SEQ ID NO: 560802 - DNA, 75 bp, synthetic construct
  source 1..75: mol_type = other DNA
cttatcctcgatgaaaccgcctgcattctcagccgtaatggcgatccgcaaaccttgcagcagctaagtgtactg

SEQ ID NO: 560803 - DNA, 75 bp, synthetic construct
  source 1..75: mol_type = other DNA
acagtgaagatctcatcgctgccacaagcgactgtggtgcatatgttgcactcagttcggccatgaagagcctct

SEQ ID NO: 560804 - DNA, 75 bp, synthetic construct
  source 1..75: mol_type = other DNA
taattgaacgttcgcgatttttgaaagaaaacggtcaatggtactatattgacggtacacgtccgcagtttggcc

SEQ ID NO: 560805 - DNA, 75 bp, synthetic construct
  source 1..75: mol_type = other DNA
taaacaggccaacctgacaccgttgctggcgattctgctgcataaactcggttttccggtggtggttcacggcgt

SEQ ID NO: 560806 - DNA, 75 bp, synthetic construct
  source 1..75: mol_type = other DNA
atggactatcgcaaaatcatcaaagagatcgggcgcggaaaaaaccacgcgcgcgatctggatcaggatacggcg

SEQ ID NO: 560807 - DNA, 75 bp, synthetic construct
  source 1..75: mol_type = other DNA
tgctctcacagtggtttctcaggaacttccgcagtgatgatacggcacagagtccgaaggagaagcaacgggtct

SEQ ID NO: 560808 - DNA, 75 bp, synthetic construct
  source 1..75: mol_type = other DNA
atggtctatacagcggtcatgcgcccccccctgaccgcgcgcggtattgagcaagcgcaaaatctgcatacgctg

SEQ ID NO: 560809 - DNA, 75 bp, synthetic construct
  source 1..75: mol_type = other DNA
gcgaaacgcaggcaaatgtcgatggattgtacagcggtcatgcgccgacgccactgactgcacgcggtatcgagc

SEQ ID NO: 560810 - DNA, 75 bp, synthetic construct
  source 1..75: mol_type = other DNA
acaggaacacctgcgggttgtaaaccttggtgctactgcgattggtacctgtgttaccgctcacccggattatcc

SEQ ID NO: 560811 - DNA, 75 bp, synthetic construct
  source 1..75: mol_type = other DNA
tcaaaaatgcgtttcatggtcgcacgctgtttactgtcagtgcgggtgggcagccagcctattcacaggatttta

SEQ ID NO: 560812 - DNA, 75 bp, synthetic construct
  source 1..75: mol_type = other DNA
atcccgctaccgatatccagcgtggccgtctgtaaggactgctttcgtcttaccgacggtgacacaggcgaggtt

SEQ ID NO: 560813 - DNA, 75 bp, synthetic construct
  source 1..75: mol_type = other DNA
gctatcgttagcggctatctctggtcaggcggtgaaaacgatagccgatcaacattttaaacaggcgctctggaa

SEQ ID NO: 560814 - DNA, 75 bp, synthetic construct
  source 1..75: mol_type = other DNA
atgagtctcttaaatgacgttcagaaattcattgaagcccatccggggtgtacttccggtgacattgcggatgct

SEQ ID NO: 560815 - DNA, 75 bp, synthetic construct
  source 1..75: mol_type = other DNA
atgagtctattcaatgacgttcagaaattcattgaagcccatccggggtgtacttccggtgacattgcggatgct

SEQ ID NO: 560816 - DNA, 75 bp, synthetic construct
  source 1..75: mol_type = other DNA
atgagtctatttaatgacgttcagaaattcattgaagcccatccggggtgtacttccggcgacattgcggatgct

SEQ ID NO: 560817 - DNA, 75 bp, synthetic construct
  source 1..75: mol_type = other DNA
ttctggcgcgtcgtgaacggtgtttacggaaaagcagtaagcgggctgcatcaggtgaagagtggtatctctcag

SEQ ID NO: 560818 - DNA, 75 bp, synthetic construct
  source 1..75: mol_type = other DNA
cagttacgacaacgtggactacagccagatcccggcaggattcagggggtaatcatgagtcttttgaatgaagtt

SEQ ID NO: 560819 - DNA, 75 bp, synthetic construct
  source 1..75: mol_type = other DNA
atgagtctctttaatgacgttcagaaattcattgaagcccatccggggtgtacttccggagacattgcggatgct

SEQ ID NO: 560820 - DNA, 75 bp, synthetic construct
  source 1..75: mol_type = other DNA
ggggatctttgtattaatatccgtaaacaaaacatggttaattaaactactgactattcgctggcgcgaatggtt

SEQ ID NO: 560821 - DNA, 75 bp, synthetic construct
  source 1..75: mol_type = other DNA
actcctgataataaggtcatattagagaacctgaactttcatgtttcgccaggcaaatggctattactgaaaggt

SEQ ID NO: 560822 - DNA, 75 bp, synthetic construct
  source 1..75: mol_type = other DNA
aattcataatgaaagcgagcgtgcagcggggccttatatcgccgtcaattgtgaattatatggtgatgcggcgct

SEQ ID NO: 560823 - DNA, 75 bp, synthetic construct
  source 1..75: mol_type = other DNA
acactattaactaacggtgtgctatccgtttccgggaaagtgagaaatattgtcaacatgaagctggcgcaccca

SEQ ID NO: 560824 - DNA, 75 bp, synthetic construct
  source 1..75: mol_type = other DNA
gtggcatggctacacacacccgagaaattcaccaagatagcaaagtatctctgtctgctgaagcccttttggctg

SEQ ID NO: 560825 - DNA, 75 bp, synthetic construct
  source 1..75: mol_type = other DNA
tcctgccgacagttggtatgtgtcacaaacaccgttaatcaaaaccggcttactgaaagagattatttgtaaagc

SEQ ID NO: 560826 - DNA, 75 bp, synthetic construct
  source 1..75: mol_type = other DNA
gggtgttggagcgccattgatatcaaccaaaaattcgcgacgctacgcgtcctcaatagccgtgccatcggggtc

SEQ ID NO: 560827 - DNA, 75 bp, synthetic construct
  source 1..75: mol_type = other DNA
tgaaaactcacatcaccgcgagaatgcgcagtgattttactgcctcggatgagaaagacgttatttttacggtga

SEQ ID NO: 560828 - DNA, 75 bp, synthetic construct
  source 1..75: mol_type = other DNA
ttttcaggaagatggagagagctggtcactgttctcgccggaccagtcgaacaacacatctgtaaatggttgcgg

SEQ ID NO: 560829 - DNA, 75 bp, synthetic construct
  source 1..75: mol_type = other DNA
ggtgaatggtaaatcgctacatcgaccgttgttaacgacagaattgccgtccggggctaatcccgtatcctcacc

SEQ ID NO: 560830 - DNA, 75 bp, synthetic construct
  source 1..75: mol_type = other DNA
acaccagcgtgaacagggccaatgtgtcaactacgacgtcgattgcttcgctggcggtaacggatgcctggggaa

SEQ ID NO: 560831 - DNA, 75 bp, synthetic construct
  source 1..75: mol_type = other DNA
cctttgctcaggatacggcaaaatggcttggttttaccggcagtgatggcacagtgacgttcaatgttacgcaaa

SEQ ID NO: 560832 - DNA, 75 bp, synthetic construct
  source 1..75: mol_type = other DNA
ggcgaaaagtcgttcaggaattaggccctcatcgtcggcagatgatcttattgtagatgtcgtcacaccgacagc

SEQ ID NO: 560833 - DNA, 75 bp, synthetic construct
  source 1..75: mol_type = other DNA
gcgacacaatttgtcaaagttgacgaaaccctcagcgcactaaaacggaaaaaaggtgacgacgcggtgattcgc

SEQ ID NO: 560834 - DNA, 75 bp, synthetic construct
  source 1..75: mol_type = other DNA
gcaagacagagaaggcgatatcattgccaccccacgttgggaaaaccaaacgccaccgacagtatctttagtttg

SEQ ID NO: 560835 - DNA, 75 bp, synthetic construct
  source 1..75: mol_type = other DNA
tatttataaaagaccgttattgcaagatgagctttccgttacaaccagtcgaagctcttttcaggaagatggaga

SEQ ID NO: 560836 - DNA, 75 bp, synthetic construct
  source 1..75: mol_type = other DNA
gtctcgcttgcacaagatccgcagatcacgtcaaacctggacctgatatttaccgtggtcaccagccctgacgcc

SEQ ID NO: 560837 - DNA, 75 bp, synthetic construct
  source 1..75: mol_type = other DNA
accgttgctcagcgatatgaagtcactgtatcaacgttatcccaataacacccttacgacggaaactggctggtc

SEQ ID NO: 560838 - DNA, 75 bp, synthetic construct
  source 1..75: mol_type = other DNA
gtgataaccagcccggatacccccctggcaagttactgggggcatatggcggaaacgttcactacgcgttccggg

SEQ ID NO: 560839 - DNA, 75 bp, synthetic construct
  source 1..75: mol_type = other DNA
cttcttgaaggcgtcgagatgccattagtcactcttactgccgcagaggctttagcacgtattgaagagctgagg

SEQ ID NO: 560840 - DNA, 75 bp, synthetic construct
  source 1..75: mol_type = other DNA
ggtcacagcaagttaagccgcgcactaaccaaagcaggcgttgatatcggtgccacaccaacatgcataggtaag

SEQ ID NO: 560841 - DNA, 75 bp, synthetic construct
  source 1..75: mol_type = other DNA
tccgcgtgcgctggcgttgctggaacaggccgtcgaaatcgaacaactgtttcgcgaagacaacggcgcgattcg

SEQ ID NO: 560842 - DNA, 75 bp, synthetic construct
  source 1..75: mol_type = other DNA
gcgtatacatcatcggcaaaaacacctttccaacgcgctacggcgctttctggactattgcgatcccgcgaatgt

SEQ ID NO: 560843 - DNA, 75 bp, synthetic construct
  source 1..75: mol_type = other DNA
taaaaatgcgcggaaccggtgtttcgatgcccaacaaacaactggcgtgtgaatatgtcgatgaattaacgccag

SEQ ID NO: 560844 - DNA, 75 bp, synthetic construct
  source 1..75: mol_type = other DNA
cgttgaacattatcttaaccacggctgctgcctggcgtttaccagcagaactctgggttatccctgtaccgatgt

SEQ ID NO: 560845 - DNA, 75 bp, synthetic construct
  source 1..75: mol_type = other DNA
tgctgcctggcgtttaccagcagagccctgggttatccctgcactgatgtactcgctcgctgggttaatgaactt

SEQ ID NO: 560846 - DNA, 75 bp, synthetic construct
  source 1..75: mol_type = other DNA
agtaaaattaacaacggctcttgaacggctggttagtctaagtagcgaaaaaaaggattcatctacaacaaagaa

SEQ ID NO: 560847 - DNA, 75 bp, synthetic construct
  source 1..75: mol_type = other DNA
tggaagacgttaaagattttaaatttattcttgatgaggctattagaataaataaagagttaacatcctcatcta

SEQ ID NO: 560848 - DNA, 75 bp, synthetic construct
  source 1..75: mol_type = other DNA
ctgaagaagataattgcggtgacgtactgaaatgtattaatcatccgttggccattacggcactcatcgaagccg

SEQ ID NO: 560849 - DNA, 75 bp, synthetic construct
  source 1..75: mol_type = other DNA
actgaaatcatttctgaaccgtggctggaagacgagctggtggttttcgccgcgccgacttcgccgttggctcgt

SEQ ID NO: 560850 - DNA, 75 bp, synthetic construct
  source 1..75: mol_type = other DNA
aactacattctgcctgcagttattgcccgttatcgccatgattatccgcagttgccgattgaacttagcgttggg

SEQ ID NO: 560851 - DNA, 75 bp, synthetic construct
  source 1..75: mol_type = other DNA
ttttattgaaggaccgtgccacagcactgaaattatttctgaaccgtggctggaagacgagctggtggttttcgc

SEQ ID NO: 560852 - DNA, 75 bp, synthetic construct
  source 1..75: mol_type = other DNA
ttcttccgcagtctgaaaacagaatgggtgccgacggatggttacgtaggcaaggacgaggcccggcaacaaatt

SEQ ID NO: 560853 - DNA, 75 bp, synthetic construct
  source 1..75: mol_type = other DNA
tattttactttccagcgtcgtacagcctaacttctggtggctgttggcaattaccgtcttgtttggctggatgag

SEQ ID NO: 560854 - DNA, 75 bp, synthetic construct
  source 1..75: mol_type = other DNA
ggcgattttattgtctttgctgatctttatcggtgaagcagtccgcgacgcatttgatcctaataaggcggtgta

SEQ ID NO: 560855 - DNA, 75 bp, synthetic construct
  source 1..75: mol_type = other DNA
gtgctggcgcgcattctctatggcacgcggatctcggttctgtttggcctgatgctgactctctgttccagcgtg

SEQ ID NO: 560856 - DNA, 75 bp, synthetic construct
  source 1..75: mol_type = other DNA
gattctgactatcacctctaacgtggtgtacggtcagaaaaccgggaacacgccggacggtcgccgcgccggaac

SEQ ID NO: 560857 - DNA, 75 bp, synthetic construct
  source 1..75: mol_type = other DNA
acgaagcctctctgatggcgctgcacgaccgtgacgttatccgcaccatggcgtgtggtatcgctggtctgtccg

SEQ ID NO: 560858 - DNA, 75 bp, synthetic construct
  source 1..75: mol_type = other DNA
cctaacttctggtggctgctggcaattaccgtcttgtttggctggatgagtctggtcggcgtggtgcgggcggag

SEQ ID NO: 560859 - DNA, 75 bp, synthetic construct
  source 1..75: mol_type = other DNA
atttgatggattgttgcgatatcacttacagccaggctgtacaggctctacgcagcaacgactgggatctctggc

SEQ ID NO: 560860 - DNA, 75 bp, synthetic construct
  source 1..75: mol_type = other DNA
ctactgtgacgcttgctcaggtaagagcaaagcgcgacgaagctaaaaagcttttagtgcagggcattgatccaa

SEQ ID NO: 560861 - DNA, 75 bp, synthetic construct
  source 1..75: mol_type = other DNA
tcgtccggtttgaaatggaaagaggtggctcaaaagatgaatactacacagcacagtgcgattgggtattataga

SEQ ID NO: 560862 - DNA, 75 bp, synthetic construct
  source 1..75: mol_type = other DNA
gcggattatcaggacccgtggctgaaacaacggctggaagataagggctgggtactgtgggcaccgattcgcttt

SEQ ID NO: 560863 - DNA, 75 bp, synthetic construct
  source 1..75: mol_type = other DNA
gattttgtcattgaaaaagtcattgctagtgatattcgttacacatttgtacaagtcaaaactaaggagaaactg

SEQ ID NO: 560864 - DNA, 75 bp, synthetic construct
  source 1..75: mol_type = other DNA
gacatggaagtagattttttcacaagatgtaaaataaaatgggatcagtggttaaggaataatagacatattata

SEQ ID NO: 560865 - DNA, 75 bp, synthetic construct
  source 1..75: mol_type = other DNA
gcgttggcgctacttgagcttggtattgagcttttcgcagtgcttatgttttgcgtcacgattttggggaaattt

SEQ ID NO: 560866 - DNA, 75 bp, synthetic construct
  source 1..75: mol_type = other DNA
gggaactcttagcaatacccgcttccagacgccggtcggcccgtggtcgctgacccgcgatattgcgctggatta

SEQ ID NO: 560867 - DNA, 75 bp, synthetic construct
  source 1..75: mol_type = other DNA
caggtacaggtaaccgatccacaagggcggcgtaacctcggcggcaacgtgaatatccgtaacttcaacctcgcg

SEQ ID NO: 560868 - DNA, 75 bp, synthetic construct
  source 1..75: mol_type = other DNA
agcattcttgagggcgcgcggcgctgtcgaggctttttactggtcgccgtctatggatggcgtgcaaaggctttt

SEQ ID NO: 560869 - DNA, 75 bp, synthetic construct
  source 1..75: mol_type = other DNA
aagtgagcagcatcgatggcaataccaaactggatgcgctggatatcgactctaaccagggaatcgtcaatgcca

SEQ ID NO: 560870 - DNA, 75 bp, synthetic construct
  source 1..75: mol_type = other DNA
cgtgcggtggtgaatctcaaccgcttcgacctcgccatgctgaaaccgtttatgccggaaactactcaggcaagc

SEQ ID NO: 560871 - DNA, 75 bp, synthetic construct
  source 1..75: mol_type = other DNA
aatatcgaagcaattcgtaacccggatgctacagaagatgacgtaatcgccggtgttcgcgtcactggactggcg

SEQ ID NO: 560872 - DNA, 75 bp, synthetic construct
  source 1..75: mol_type = other DNA
gccggaacatactccgctgcaggattctaacgacaacttcctcgctaacatccagaaagacggcacctactcggt

SEQ ID NO: 560873 - DNA, 75 bp, synthetic construct
  source 1..75: mol_type = other DNA
tatccgtccacgcgataaactggccacccaatgtggtctggatgttgcgccgcgcggggggattgtcataaacga

SEQ ID NO: 560874 - DNA, 75 bp, synthetic construct
  source 1..75: mol_type = other DNA
ggtgtccacgtgcacaccagcaaaaacacccttgagattgtgcaggaaggcgtcgaagcgcgtaaaactatgcgc

SEQ ID NO: 560875 - DNA, 75 bp, synthetic construct
  source 1..75: mol_type = other DNA
acattaagcgtctgcggcaaaaaattggcctgacacagaaagaatgtgccgaaatatttagcatgagtccgcgta

SEQ ID NO: 560876 - DNA, 75 bp, synthetic construct
  source 1..75: mol_type = other DNA
tctatcggtgttgataaactgccggacagcgcgcaaatctgctcctgcttcgacgtcaccaaaggcgacctgatt

SEQ ID NO: 560877 - DNA, 75 bp, synthetic construct
  source 1..75: mol_type = other DNA
ttcctgccagacttccgatccggatatctacgccatcggtgaatgcgcaagctggaacaaccgtgtgtttggtct

SEQ ID NO: 560878 - DNA, 75 bp, synthetic construct
  source 1..75: mol_type = other DNA
ggtaatacctggtgcgtcgtggataccatcacactggatgccgctaccagaaccgccgcaggaggcgaaaagatg

SEQ ID NO: 560879 - DNA, 75 bp, synthetic construct
  source 1..75: mol_type = other DNA
taacgacggcgtgcgtttctacacccgaatgaaaaccgtcaccgcacgctggccggaaatgcagcaggagacagg

SEQ ID NO: 560880 - DNA, 75 bp, synthetic construct
  source 1..75: mol_type = other DNA
aggcctgccggacggcgtattcaacgtggtgcagggcgataaagaatccgttgatgtgctcctgaccgacccgcg

SEQ ID NO: 560881 - DNA, 75 bp, synthetic construct
  source 1..75: mol_type = other DNA
cattcaggccgtcagttttgtcggatcttcttccgtcgctgagcatatctacaccaccgccagtgcacacggtaa

SEQ ID NO: 560882 - DNA, 75 bp, synthetic construct
  source 1..75: mol_type = other DNA
tcagacggactatgactataagcccgtcagtgggatcgtgggatctgagacggtatcacaaaagcattactggcg

SEQ ID NO: 560883 - DNA, 75 bp, synthetic construct
  source 1..75: mol_type = other DNA
tgaacagccagtgacgggcgtaaccggatatgtcgtcgagaagaaaataacgaggaaagttaaacacgggcagac

SEQ ID NO: 560884 - DNA, 75 bp, synthetic construct
  source 1..75: mol_type = other DNA
gccgctctgcctggctggcgcgacctgccgccagccaggcgcgcccagattttgtatcgcttcaagcagttgctg

SEQ ID NO: 560885 - DNA, 75 bp, synthetic construct
  source 1..75: mol_type = other DNA
agatgcgattacagctttctggaatgatatcccaacatactgtatgcgctcagctattcgggaagaacctgaatg

SEQ ID NO: 560886 - DNA, 75 bp, synthetic construct
  source 1..75: mol_type = other DNA
ttagcttcccaaggctaattgaaattctagaatggattgggatggatatcaccagcaaggcttattacgaaaaaa

SEQ ID NO: 560887 - DNA, 75 bp, synthetic construct
  source 1..75: mol_type = other DNA
tttattttgcaaccattgatcggtcttacttcctcgacaaacacaatttttatgttgctgaagccagaaagcgtc

SEQ ID NO: 560888 - DNA, 75 bp, synthetic construct
  source 1..75: mol_type = other DNA
gtcctgatggctgacagcatcatccctgcaccgaaacgccgtacaggcattgcggcggcgagacgagcagcaaag

SEQ ID NO: 560889 - DNA, 75 bp, synthetic construct
  source 1..75: mol_type = other DNA
caatgcattgaagaaaccgacatttggatgcatcatcatccctgctttagggaatcgtccatcttggtttcgatt

SEQ ID NO: 560890 - DNA, 75 bp, synthetic construct
  source 1..75: mol_type = other DNA
cggcaccaaagcgccgccataccggtattgcagcggcacgacgagcagcaaagaaacgcaaacgcaggagaacaa

SEQ ID NO: 560891 - DNA, 75 bp, synthetic construct
  source 1..75: mol_type = other DNA
cgatgtcgcagatgcactatatgcgacagctggatgtcgaggtatacccgtcagcgaaaggagcaaagcaggttc

SEQ ID NO: 560892 - DNA, 75 bp, synthetic construct
  source 1..75: mol_type = other DNA
caccggtggcgcagacatcgaatccatcgcagagctgctggaccgtctgctgtatgtgcgccgcaatcccccggt

SEQ ID NO: 560893 - DNA, 75 bp, synthetic construct
  source 1..75: mol_type = other DNA
ctgatcaccgatgaaggatcggtcaatgagaaacaggaaactttcattgtaccgatgcgtaatgctggcgagttg

SEQ ID NO: 560894 - DNA, 75 bp, synthetic construct
  source 1..75: mol_type = other DNA
atgcgaaagatttttcttccgttgttactggtggcactttcgcctgtcgctcacagtgaaggtgtgcaggaagtc

SEQ ID NO: 560895 - DNA, 75 bp, synthetic construct
  source 1..75: mol_type = other DNA
ttgagcgacggcactttatcgtggttagggaacgtcttgttctggatgccgctaccagaacctccgcaggaggtt

SEQ ID NO: 560896 - DNA, 75 bp, synthetic construct
  source 1..75: mol_type = other DNA
tggaggccgcctgtcagcccgcgcgaaaacccctggcaggctgacgcctgccggaaacgcggggtgcagcgcctg

SEQ ID NO: 560897 - DNA, 75 bp, synthetic construct
  source 1..75: mol_type = other DNA
gttctggaactcgtctttatccgattactcagggtgtgtcaaaacagttattgcctgtttatgacaagccgatgg

SEQ ID NO: 560898 - DNA, 75 bp, synthetic construct
  source 1..75: mol_type = other DNA
acatttcggcaacagtccaaagagagtttctaaggagtaccgttgtcaaaggcacacgggtatgaacacggacaa

SEQ ID NO: 560899 - DNA, 75 bp, synthetic construct
  source 1..75: mol_type = other DNA
gcatgcgcgtctgcagactaatcccgctatgtcgagcgtggtcgataccatgagcggtattggcgcatcgttcgg

SEQ ID NO: 560900 - DNA, 75 bp, synthetic construct
  source 1..75: mol_type = other DNA
gctcaacccggaacagcctcaccagttcacgccgtctgaattgtggctgctgactgacctgaccgaagactcaac

SEQ ID NO: 560901 - DNA, 75 bp, synthetic construct
  source 1..75: mol_type = other DNA
cacgggcgctatcaggtgtatatcaactactatggcggacgcagcgaaacggaattgacgactgctcaactgacg

SEQ ID NO: 560902 - DNA, 75 bp, synthetic construct
  source 1..75: mol_type = other DNA
tactggtggcgctttcgcctgttgcccatggcgaaggtgtgcaggaagtcgagattgatgcaccgctctctggct

SEQ ID NO: 560903 - DNA, 75 bp, synthetic construct
  source 1..75: mol_type = other DNA
caacattggcccggtgctggatgccctgctggccgagctgggtgagacgcggacggtgatttccccggcgctgcc

SEQ ID NO: 560904 - DNA, 75 bp, synthetic construct
  source 1..75: mol_type = other DNA
gccggtttgaagtgcctttatctgccatggaattacctaaagaagaaaagccactgccgtctaaccctgacgact

SEQ ID NO: 560905 - DNA, 75 bp, synthetic construct
  source 1..75: mol_type = other DNA
gcccgaacatgaagcggggtctatcggttgctggtattgctggtggtctcattcttatggtgatggtgttttcac

SEQ ID NO: 560906 - DNA, 75 bp, synthetic construct
  source 1..75: mol_type = other DNA
cagtgaagggggccagtaaggcgctagatcgcatcgctcagttctatatcgacatggccgaaggcatcttccctg

SEQ ID NO: 560907 - DNA, 75 bp, synthetic construct
  source 1..75: mol_type = other DNA
ttatgcgcgcaagcactatccatcagaaccgcaaacactgattcattatctcaatgccgccgatgcagcatttga

SEQ ID NO: 560908 - DNA, 75 bp, synthetic construct
  source 1..75: mol_type = other DNA
cgtcatcaggggatctggtccggtgaggcggagcaatacctgctcgcccatgcagaggcaatttcccatgattaa

SEQ ID NO: 560909 - DNA, 75 bp, synthetic construct
  source 1..75: mol_type = other DNA
tgagtaaaggtcaagtgttaggggcatcgttatgtgtccttattgagcgagccagtaatggtgaagttacacgtc

SEQ ID NO: 560910 - DNA, 75 bp, synthetic construct
  source 1..75: mol_type = other DNA
gattgatttgattgatttactggtgcaactatggcgtggcaagatgacaatcatcatttctgtcattgtcgctat

SEQ ID NO: 560911 - DNA, 75 bp, synthetic construct
  source 1..75: mol_type = other DNA
gtcaaaatctgctggatatcgaaaatctgaacgttgatgatctcgatattcacgcttaccgttacgtgatgaaac

SEQ ID NO: 560912 - DNA, 75 bp, synthetic construct
  source 1..75: mol_type = other DNA
gaaaaaggcaattaccttgattctggcggtgctgctgggcggcatggttggcgcgggagttgtactggggcgtaa

SEQ ID NO: 560913 - DNA, 75 bp, synthetic construct
  source 1..75: mol_type = other DNA
aaaacctgctggatatcgacaatcttgacgttgataaacttgatattcatgcttaccgctatgtgatgaaaccga

SEQ ID NO: 560914 - DNA, 75 bp, synthetic construct
  source 1..75: mol_type = other DNA
actatgttccttttggggagcgaagcgctggagtcgatgattaagcacgaagcgacccgtccgttggtgttctca

SEQ ID NO: 560915 - DNA, 75 bp, synthetic construct
  source 1..75: mol_type = other DNA
taaacgaagaactggaaaaagacctgaaagacaacatcgcgctgcgtatgaaaaacttgcaggattcgctgaaga

SEQ ID NO: 560916 - DNA, 75 bp, synthetic construct
  source 1..75: mol_type = other DNA
atcctttatgacatcagtaacgataagtattatctgattgaccataatctctcatttgatcagaatgctggacct

SEQ ID NO: 560917 - DNA, 75 bp, synthetic construct
  source 1..75: mol_type = other DNA
ctcgatcctgatctgatcttgttggatctaaatatgcccggtatgaacggtctggaaactctggataaactgcgc

SEQ ID NO: 560918 - DNA, 75 bp, synthetic construct
  source 1..75: mol_type = other DNA
acagggtattgaactggcggagtctcttgatcccgatctgatcctgttagatctcaatatgcccggcatgaacgg

SEQ ID NO: 560919 - DNA, 75 bp, synthetic construct
  source 1..75: mol_type = other DNA
atgattgttgcgctaaacggcctatgtgatcgcgcgcacattaatgaaagcataaaaaaagccggcatcatgccg

SEQ ID NO: 560920 - DNA, 75 bp, synthetic construct
  source 1..75: mol_type = other DNA
cgcgagaaaatatcggcgtaaatcttgataattattacaccaaagaagacgttgatgatttaattgatgctaacg

SEQ ID NO: 560921 - DNA, 75 bp, synthetic construct
  source 1..75: mol_type = other DNA
agatggcgaacatccagattggtgaacgtatggtgtctgcagcagggggaatgccggtatcccgtcttaagtctg

SEQ ID NO: 560922 - DNA, 75 bp, synthetic construct
  source 1..75: mol_type = other DNA
gggcgtcacgaccttgctgtgggggaaatctcaaagggacttaaaagcctggcaaaatccggcggttttccgctg

SEQ ID NO: 560923 - DNA, 75 bp, synthetic construct
  source 1..75: mol_type = other DNA
atgtcacatcatgttttcctcctgtgtttttactccattgttgtgatgatgatcttgtgtcaattgaaaacagtc

SEQ ID NO: 560924 - DNA, 75 bp, synthetic construct
  source 1..75: mol_type = other DNA
ttttctgctggggggcatatcgcctcaacgggtggggaatcagattagtgatttcaaacgtacttctgacagtaa

SEQ ID NO: 560925 - DNA, 75 bp, synthetic construct
  source 1..75: mol_type = other DNA
tctacagataatatatcaggtagctacaaaaatggtgaatcaggcgatgattgtatccctgccaaactaccgaca

SEQ ID NO: 560926 - DNA, 75 bp, synthetic construct
  source 1..75: mol_type = other DNA
cctttactatcagccggtgtacaccaaagcgccacttccggaaggcttccgccgccgttttcgcaacacgtttaa

SEQ ID NO: 560927 - DNA, 75 bp, synthetic construct
  source 1..75: mol_type = other DNA
ggttggaagctacacagcaagcgatgcaaaggcatgggtcccaacgaccacaaaagccagcgaaaaagctttctg

SEQ ID NO: 560928 - DNA, 75 bp, synthetic construct
  source 1..75: mol_type = other DNA
agtagatggtgggcaggttatggaatttttaaaaccgttgtaccatgctgctattgctggttattcaggcggtat

SEQ ID NO: 560929 - DNA, 75 bp, synthetic construct
  source 1..75: mol_type = other DNA
taaatgaagaacttgaaaaagatctgaaagacaacatcgcgctgcgtatgaaaaacttgcaggattctctgaaga

SEQ ID NO: 560930 - DNA, 75 bp, synthetic construct
  source 1..75: mol_type = other DNA
ttgacaataatatccatggttcaatatgttgcaatgtgattccagaacaatctccgcaagctatctatcaccatt

SEQ ID NO: 560931 - DNA, 75 bp, synthetic construct
  source 1..75: mol_type = other DNA
atgacacctttagaacgcattacccaacttgttaatatcaatggtgatgttaataatcctgatactcctcgtcca

SEQ ID NO: 560932 - DNA, 75 bp, synthetic construct
  source 1..75: mol_type = other DNA
atgagtttatggaaaaaaatcagcctcggcgtagtcatcgttattttactgttgctgggatcagtggcgtttctg

SEQ ID NO: 560933 - DNA, 75 bp, synthetic construct
  source 1..75: mol_type = other DNA
ttctcgcctcacgccagattctggtggcctttagtggcggactggactccaccgttttactgcatcaactggtgc

SEQ ID NO: 560934 - DNA, 75 bp, synthetic construct
  source 1..75: mol_type = other DNA
agtctcagattttgccggaacgcaactcatccgcccattacttgcccgcacgcgtggagaacttgagttgtgggc

SEQ ID NO: 560935 - DNA, 75 bp, synthetic construct
  source 1..75: mol_type = other DNA
acccgggcggtagcgtacctgaaaatgtaaagatgagtgtaacgctgcactggcaccctttgctgcatggtaaga

SEQ ID NO: 560936 - DNA, 75 bp, synthetic construct
  source 1..75: mol_type = other DNA
tggtatttaaagcggcagatcgctgggtgccagggctggacatcggtaaggtgactggcggctggcgcgatctca

SEQ ID NO: 560937 - DNA, 75 bp, synthetic construct
  source 1..75: mol_type = other DNA
tggtccgccagatcaaccatatctcaatatcgaagcgattcgtaacccggatgcgacagaagacgacgtaatcgc

SEQ ID NO: 560938 - DNA, 75 bp, synthetic construct
  source 1..75: mol_type = other DNA
ccttgtctgacgttcgttatgagcagccaggcgtggcggtaaaagcgggcaatctgcatctggcggtcgggcttg

SEQ ID NO: 560939 - DNA, 75 bp, synthetic construct
  source 1..75: mol_type = other DNA
ggccagattgtgggtaaaatcggcgagacgtttggcgtaagcaatttagcgctcgacaccgagggagtaggcgac

SEQ ID NO: 560940 - DNA, 75 bp, synthetic construct
  source 1..75: mol_type = other DNA
tcttctctgacccggcgatgtcgcaacaagctgcattgtcttatttgctacgtggacaagggctggagagcgatc

SEQ ID NO: 560941 - DNA, 75 bp, synthetic construct
  source 1..75: mol_type = other DNA
gacacggacatcaccgtgcgcaccatgctgctgaaagtgagcagcattgacggcaatactaaactggacgccctg

SEQ ID NO: 560942 - DNA, 75 bp, synthetic construct
  source 1..75: mol_type = other DNA
ggtgcagtggcggacggaaaatccgggcgtcactctacgcgctatccatgtgcatcacggtttaagtgccaatgc

SEQ ID NO: 560943 - DNA, 75 bp, synthetic construct
  source 1..75: mol_type = other DNA
gtttgctgttgctgcggtagaacccggtgcgctgcaagctactggcgggatccacgtagttgcggatggcgggct

SEQ ID NO: 560944 - DNA, 75 bp, synthetic construct
  source 1..75: mol_type = other DNA
atgccaacattgcagcgcccgctggttgttgtattggcttatgacggactatgcactttcgaatttggtgtagcc

SEQ ID NO: 560945 - DNA, 75 bp, synthetic construct
  source 1..75: mol_type = other DNA
caatgccaaggcagagattcaagctgcttttgcttttgtgacgtacttacgtaatcgtcacgcttgtttaaagga

SEQ ID NO: 560946 - DNA, 75 bp, synthetic construct
  source 1..75: mol_type = other DNA
gaaaaaggcaattaccttgattctggcagtgctgctgggcggcatggttggcgcggggattgtgctggggcgtaa

SEQ ID NO: 560947 - DNA, 75 bp, synthetic construct
  source 1..75: mol_type = other DNA
gaattacgttataacactgacgaaggagacaaagataaatgggatccttcacaatttggtaataatggaacgggt

SEQ ID NO: 560948 - DNA, 75 bp, synthetic construct
  source 1..75: mol_type = other DNA
ctttacaccaggcgacaaagtcacctgtgtggcagggaacaacacgacaattgctaccttcgacaactggtggcg

SEQ ID NO: 560949 - DNA, 75 bp, synthetic construct
  source 1..75: mol_type = other DNA
atgaccaaaatctggtctaacgacgttaccaaagatgtaaaaatgcagttagtttccccggcgcaactggttcaa

SEQ ID NO: 560950 - DNA, 75 bp, synthetic construct
  source 1..75: mol_type = other DNA
ggcagggcctgcaatcttaccagttaatgaccaaaatctggtcaaatgacacgaccaaagacgtgaaaatgcagt

SEQ ID NO: 560951 - DNA, 75 bp, synthetic construct
  source 1..75: mol_type = other DNA
catcctgcgcgctattcatgtgcatcacggtttaagtgccaacgctgatgcttgggtgaaacattgtgaaaatat

SEQ ID NO: 560952 - DNA, 75 bp, synthetic construct
  source 1..75: mol_type = other DNA
ttcatctggatgccagcgctgaatgcctgccgggtttacccactttcgactggtaaccaggaacaacatgaaatc

SEQ ID NO: 560953 - DNA, 75 bp, synthetic construct
  source 1..75: mol_type = other DNA
agttcacggacttttgaaagtgatggtggtgggggaaggattactcagcgctgcgcgcttcgcccttcgggtcgt

SEQ ID NO: 560954 - DNA, 75 bp, synthetic construct
  source 1..75: mol_type = other DNA
agtcgggaaccgttttatttttgctgctgtcaggataccgacgaagacaggagtaccgtgctgtacttgcaggac

SEQ ID NO: 560955 - DNA, 75 bp, synthetic construct
  source 1..75: mol_type = other DNA
atctcagaataataaatataatgaagaaaagtcggctcaggaaagaatgcctggtgctgacagcccacaggaact

SEQ ID NO: 560956 - DNA, 75 bp, synthetic construct
  source 1..75: mol_type = other DNA
ctcatgccggattagatgcaaagcccagcctttttggtgtgcgtgttgatgttggcgctaaggttggtgggggag

SEQ ID NO: 560957 - DNA, 75 bp, synthetic construct
  source 1..75: mol_type = other DNA
atgaagaaaagtcggctcaggaaagaatgcctggtgctgacagcccacaggaactgatgaaaagagcaaaggagt

SEQ ID NO: 560958 - DNA, 75 bp, synthetic construct
  source 1..75: mol_type = other DNA
ccggaggtaagacctggcattattatgtgcagcagatatttggcggccgaccagacccggacctgctattcagac

SEQ ID NO: 560959 - DNA, 75 bp, synthetic construct
  source 1..75: mol_type = other DNA
gtggtgagtggttgcgtaacaacctgaatgccattgcagcatttatgagtacccggacctgggattcaattgaaa

SEQ ID NO: 560960 - DNA, 75 bp, synthetic construct
  source 1..75: mol_type = other DNA
cgccataacgtgatggatttgctgggctgggcggcggtgtttgtacttatcagcctgctggttaatatccgcaca

SEQ ID NO: 560961 - DNA, 75 bp, synthetic construct
  source 1..75: mol_type = other DNA
ccgtgcgtcatcctggcgatattccttcatttgccagtctattacgcaacggttgccagatcacacactgtaaat

SEQ ID NO: 560962 - DNA, 75 bp, synthetic construct
  source 1..75: mol_type = other DNA
ttacaataacgtcaggcctcaccattacaacggtgggttgacgccggaagaatcagagaacagataccgtattta

SEQ ID NO: 560963 - DNA, 75 bp, synthetic construct
  source 1..75: mol_type = other DNA
gaatgggtaagaatggcgcagtccgcttttttagggaaagggataggaaatgtaatcctcattgtttgcgtcgat

SEQ ID NO: 560964 - DNA, 75 bp, synthetic construct
  source 1..75: mol_type = other DNA
ctaaagggcatttaggcataagtgtattgggtaacggtggaggggttggtctccaggccggagctaaggcaagca

SEQ ID NO: 560965 - DNA, 75 bp, synthetic construct
  source 1..75: mol_type = other DNA
cgtaatggtgatactgccagtctggtgaatctggccaccaccacttcaatggagaaacagcgtctggcgcacgtc

SEQ ID NO: 560966 - DNA, 75 bp, synthetic construct
  source 1..75: mol_type = other DNA
caatgtgccggtcgggctggcaacccctctttccctggcaaccagcatcggccatgccatggttgaggggtatga

SEQ ID NO: 560967 - DNA, 75 bp, synthetic construct
  source 1..75: mol_type = other DNA
tccggcagccatactgacaataatgctgactcccgggtggaccagttgtctgcagccctgaactcagcgaaacag

SEQ ID NO: 560968 - DNA, 75 bp, synthetic construct
  source 1..75: mol_type = other DNA
ggctggcaaatgcaggccccatgactttacgtctggacaaagacacggcggatgcagtggcaaaagacaatgtga

SEQ ID NO: 560969 - DNA, 75 bp, synthetic construct
  source 1..75: mol_type = other DNA
gcgctatatggaaattagccggtcatcgacaaaaattaacttagataatctcggtttattaaccatgcaggccaa

SEQ ID NO: 560970 - DNA, 75 bp, synthetic construct
  source 1..75: mol_type = other DNA
tgaccatcagtgatggacgctggatctggccttatgaaggttttccactgagcgggcgtctggggataaaagttg

SEQ ID NO: 560971 - DNA, 75 bp, synthetic construct
  source 1..75: mol_type = other DNA
ttttaccccgatgaatgccacctgggatgtcgcaggaaaaggtgagtggcatgacagcacgattacgcttaccga

SEQ ID NO: 560972 - DNA, 75 bp, synthetic construct
  source 1..75: mol_type = other DNA
tgttgatgttttaggtggtaacgtgctgatgaaacaattacgtatgccgcagcacgatccggcgctgttacggct

SEQ ID NO: 560973 - DNA, 75 bp, synthetic construct
  source 1..75: mol_type = other DNA
tcgacaaaaattaatttagataatctcggcgtgttaaccatgcaggcaacaatcaccggtaatagtcgtgtcgat

SEQ ID NO: 560974 - DNA, 75 bp, synthetic construct
  source 1..75: mol_type = other DNA
atttcgataccgtctttaaaggtggatttgcccctatatttccagacatctgttatcacttaacccattacaagc

SEQ ID NO: 560975 - DNA, 75 bp, synthetic construct
  source 1..75: mol_type = other DNA
aggactccatgatggccagccgtatgcgcagtgcagtggaaagctatgcgaaggcgcataatatcagtaatgagc

SEQ ID NO: 560976 - DNA, 75 bp, synthetic construct
  source 1..75: mol_type = other DNA
gtggctgcagtcatggccactcttgtacgccattctgaacagtgccatgacattttatgcgaaacagaatggtgc

SEQ ID NO: 560977 - DNA, 75 bp, synthetic construct
  source 1..75: mol_type = other DNA
cgtcgatgtgttaggcggtaacgtactgatgaaacaattacgtatgccgcaacatgacccggcgctgttgcggct

SEQ ID NO: 560978 - DNA, 75 bp, synthetic construct
  source 1..75: mol_type = other DNA
tctctccaccggctttgacaaattgcaatacgggacaatgacggtagaaaagccgcgattgattctcgacaagcc

SEQ ID NO: 560979 - DNA, 75 bp, synthetic construct
  source 1..75: mol_type = other DNA
ttttcgcttaagcgcatcaggcgctcatgctgaacgtgcagcccgtgactcattgaccagggcaatccggagtct

SEQ ID NO: 560980 - DNA, 75 bp, synthetic construct
  source 1..75: mol_type = other DNA
gtcaggagcatacctgcttgccgaatctgctcgggcgccagttcgctgtccccgagccagaccaggtatggtgtg

SEQ ID NO: 560981 - DNA, 75 bp, synthetic construct
  source 1..75: mol_type = other DNA
cctactcaaacgtggaaccgagcgatttcgttcagaccttctcgcgtcgtaacggcgggggagcaaccagcggat

SEQ ID NO: 560982 - DNA, 75 bp, synthetic construct
  source 1..75: mol_type = other DNA
ttcattctggtggagaaatttgcctacggtattaaagatcctatctaccagaaaacgctgatcgaaaccggccat

SEQ ID NO: 560983 - DNA, 75 bp, synthetic construct
  source 1..75: mol_type = other DNA
cttactccaacgttgaaccgagtgatttcgtacagactttctcacgtcgcaacggcggagaagcgaccagcggat

SEQ ID NO: 560984 - DNA, 75 bp, synthetic construct
  source 1..75: mol_type = other DNA
gctatgtgtttgccctgatgtggttccagacctggccgttgttgtatgccattctgaacagtgccatgacattct

SEQ ID NO: 560985 - DNA, 75 bp, synthetic construct
  source 1..75: mol_type = other DNA
aacgcttcttccgcagtctgaaaacagaatgggtgccaaccgatggctacactggcaaagacgtggcccggcagc

SEQ ID NO: 560986 - DNA, 75 bp, synthetic construct
  source 1..75: mol_type = other DNA
ttaccgggcgataaagtcacttatgatccggtctcaaaagagctgacgattcaaccgggatgcagttccggccag

SEQ ID NO: 560987 - DNA, 75 bp, synthetic construct
  source 1..75: mol_type = other DNA
gatacggttaattcggctcgcgtcaggttgtgcagcgaaatacgccgggcatggaaccagagccggggctctgca

SEQ ID NO: 560988 - DNA, 75 bp, synthetic construct
  source 1..75: mol_type = other DNA
agcctctgttctgctctggaaatacaccgcagcagttaccggtactggcgaaaacgacgcgatacggttaatccg

SEQ ID NO: 560989 - DNA, 75 bp, synthetic construct
  source 1..75: mol_type = other DNA
gctggcggggattcgcgacatcctgattatctccaccccggacgacatgccttccttccagcgcctgctgggtga

SEQ ID NO: 560990 - DNA, 75 bp, synthetic construct
  source 1..75: mol_type = other DNA
ttgcgccctagtaggggctctgcgggggcgcgcacgctggctgaaatgctgacccaaaacggcgtcccgatgagc

SEQ ID NO: 560991 - DNA, 75 bp, synthetic construct
  source 1..75: mol_type = other DNA
ggcgttacaggataaagcaaagtgtcagccgacggggaaactgctgggataacagtccaatggaacgcttcttcc

SEQ ID NO: 560992 - DNA, 75 bp, synthetic construct
  source 1..75: mol_type = other DNA
tagcgaccagggaagtcaatatacaggactgaaatatcaacaacttctctggcgttacaggataaagcaaagtgt

SEQ ID NO: 560993 - DNA, 75 bp, synthetic construct
  source 1..75: mol_type = other DNA
tgccctgcatgggttcagcagcagtattgccagtgcctggaacacgctcagtcagtttggttctaaccgggggag

SEQ ID NO: 560994 - DNA, 75 bp, synthetic construct
  source 1..75: mol_type = other DNA
taagaccgcacgaatataatggtgggttaccaccaaacgaatcagaaaaccgatactggaaaaactctaacgcgg

SEQ ID NO: 560995 - DNA, 75 bp, synthetic construct
  source 1..75: mol_type = other DNA
ccgcagggttatcggctggagcctgtcagcgaatgccgatactgcactgataagcagtgccttgcggatggcgta

SEQ ID NO: 560996 - DNA, 75 bp, synthetic construct
  source 1..75: mol_type = other DNA
gattgcagaacgtcgtcgggcaatggcctggtcttttgttcaggaacaggtacagcctggtgttgataacgcctg

SEQ ID NO: 560997 - DNA, 75 bp, synthetic construct
  source 1..75: mol_type = other DNA
ctctggcgttgcagaataaatcaaagcgtcagtcggcggggaaactgctgggataacagccccatggaacgcttc

SEQ ID NO: 560998 - DNA, 75 bp, synthetic construct
  source 1..75: mol_type = other DNA
aaaatgcctgtcaggagcatacgtgtttgccgaatctgctcgagcgtcagttcgctgtaccggagccagacaggg

SEQ ID NO: 560999 - DNA, 75 bp, synthetic construct
  source 1..75: mol_type = other DNA
gggcaggaaagtcgctggtgctatctggcggtcgtcatggatctttttgcccgcagggttatcggctggagcctg

SEQ ID NO: 561000 - DNA, 75 bp, synthetic construct
  source 1..75: mol_type = other DNA
attatgtgcagcagatatttggcggcagaccggacccggacctgttattcagacaactggtcagtgacagttaca

SEQ ID NO: 561001 - DNA, 75 bp, synthetic construct
  source 1..75: mol_type = other DNA
tgtaggaagacagtattctgaactacaaaatcaccataaaacagaggcattatctcagaataataaatataatga

SEQ ID NO: 561002 - DNA, 75 bp, synthetic construct
  source 1..75: mol_type = other DNA
cccgcttctggtactggcggctgtcttcaacaaactgacgctgtccgtcctgaaaggctatgtgtttgccctgat

SEQ ID NO: 561003 - DNA, 75 bp, synthetic construct
  source 1..75: mol_type = other DNA
atgaagaaaagtcggctcaggaaagaatgcccggggctgacagtccacaggaacttatgaaaagggcaaaggagt

SEQ ID NO: 561004 - DNA, 75 bp, synthetic construct
  source 1..75: mol_type = other DNA
ataatgccgattcccgcgtggaccagttgtctgcagccctgaactcagcgaaacagagttacgaccagtacacga

SEQ ID NO: 561005 - DNA, 75 bp, synthetic construct
  source 1..75: mol_type = other DNA
ggcgtcgaacagagctgaaagcgccctgcacggtttcagcagcagtattgccagtgcctggaactcgctcagtca

SEQ ID NO: 561006 - DNA, 75 bp, synthetic construct
  source 1..75: mol_type = other DNA
attcaggcgcgcttcttgccgggttaggcggcatgaactccaactctccaagagcaagtgatgcagacgccacgc

SEQ ID NO: 561007 - DNA, 75 bp, synthetic construct
  source 1..75: mol_type = other DNA
cagccatccagtccggtgatcgacagcaggttcgagatctgatgaccaaataccctggtcaattagagaagattc

SEQ ID NO: 561008 - DNA, 75 bp, synthetic construct
  source 1..75: mol_type = other DNA
ggataaccctgagacggtcgcaagatggcttgatgcaatggcaaaccttgagcgacgaaacgcgcagtttaatga

SEQ ID NO: 561009 - DNA, 75 bp, synthetic construct
  source 1..75: mol_type = other DNA
agcggctggctcttctttcactatcacatacgataatgtgccagcagcggaatgtgtgaagattgcgacagcggc

SEQ ID NO: 561010 - DNA, 75 bp, synthetic construct
  source 1..75: mol_type = other DNA
ttgatgctctacatatggtaaaagacaaaatagataaaaatttaagtcttagagcaaaattagataatcaatttt

SEQ ID NO: 561011 - DNA, 75 bp, synthetic construct
  source 1..75: mol_type = other DNA
tgtttaatattaaaccagattacgatctgaatcttatgaagacgggtcaaacattaaatgatattacttcctcta

SEQ ID NO: 561012 - DNA, 75 bp, synthetic construct
  source 1..75: mol_type = other DNA
ctccagaagcaatgcaatcatggctgcaaaacaacgccggtgagttagctcgtgttggcgttaatcctcaggacg

SEQ ID NO: 561013 - DNA, 75 bp, synthetic construct
  source 1..75: mol_type = other DNA
agggtcggttgggaataatgagcgtacagttcagttagcagatggcagaactgtaacggtaggcgggaagcttca

SEQ ID NO: 561014 - DNA, 75 bp, synthetic construct
  source 1..75: mol_type = other DNA
aactgacatggataaccctgagacggtcgcaagatggcttgatgcaatggcaaaccttgagcgacgaaacgcgca

SEQ ID NO: 561015 - DNA, 75 bp, synthetic construct
  source 1..75: mol_type = other DNA
atggctacttggcaacaaggaatcaactcaggcggttttcttgctggtatcggtgggcaaaactcaaatgcgcca

SEQ ID NO: 561016 - DNA, 75 bp, synthetic construct
  source 1..75: mol_type = other DNA
acctgaagcgccaggaaatacagagccgcatagcagccaacaaccagcagttgcagcagaagcagcaagcgctaa

SEQ ID NO: 561017 - DNA, 75 bp, synthetic construct
  source 1..75: mol_type = other DNA
cacaatgcgcgggcaagatatccaggcgaatttaggtcagcagcgcattaatctggacgcagaaacaaaccgcat

SEQ ID NO: 561018 - DNA, 75 bp, synthetic construct
  source 1..75: mol_type = other DNA
acatacgataatgtgccagcagcggaatgcgtgaaaataaccactgcggcagcaggcaacttttataccgctaaa

SEQ ID NO: 561019 - DNA, 75 bp, synthetic construct
  source 1..75: mol_type = other DNA
acactgtaaagccatctacattgcatgttgttgagtctaagatacaatttttagtagatgatttatctgctatag

SEQ ID NO: 561020 - DNA, 75 bp, synthetic construct
  source 1..75: mol_type = other DNA
ccaggtggcgaaattacgtcaggaagacgacgagcctgaaatcatcgatgacgaattgcttgagacgttggaaga

SEQ ID NO: 561021 - DNA, 75 bp, synthetic construct
  source 1..75: mol_type = other DNA
gggcagcggcctgggatccggtaaagtctccgtgactaacctggagtttgaacattatatcgatcgcgccagccc

SEQ ID NO: 561022 - DNA, 75 bp, synthetic construct
  source 1..75: mol_type = other DNA
gcccatcgggagctttccatcgcgcatcctgagtattatcaggatatcaatattccaggaggctatagatttagt

SEQ ID NO: 561023 - DNA, 75 bp, synthetic construct
  source 1..75: mol_type = other DNA
ttaccgagcaggcgacagatgatgtcagcgccacacgcctttccaccagtctgtcatttgcggaagttgaaaaag

SEQ ID NO: 561024 - DNA, 75 bp, synthetic construct
  source 1..75: mol_type = other DNA
atcatctccacaccggacgacataccttccttccagcgcctgctgggtgacgggtcgcagttcggggtgaacttc

SEQ ID NO: 561025 - DNA, 75 bp, synthetic construct
  source 1..75: mol_type = other DNA
tcaaagccgcaggtgaagtattagatgttgctaaaactgcaacacaatgtgaaatcggtggaaatgataatacat

SEQ ID NO: 561026 - DNA, 75 bp, synthetic construct
  source 1..75: mol_type = other DNA
ttaaacctgctggcggtgtgctggatgtcgcaggaacggctacacagtgtcaaaatggtggaaatgataatacat

SEQ ID NO: 561027 - DNA, 75 bp, synthetic construct
  source 1..75: mol_type = other DNA
gaaaacaacatgcgcacccaggaagaattgggacggattgaaacagtggctgaatatttggcacgccgtgaagag

SEQ ID NO: 561028 - DNA, 75 bp, synthetic construct
  source 1..75: mol_type = other DNA
cggtcggaggcacgaaaatcaccccggccagcgatattgccaccatcaacaccgcctgcggtaacgccaacagca

SEQ ID NO: 561029 - DNA, 75 bp, synthetic construct
  source 1..75: mol_type = other DNA
tgcctggtggcgcggagcaattattgatgaattagcaaattataattgcaggaaggtatcaaataataactctgt

SEQ ID NO: 561030 - DNA, 75 bp, synthetic construct
  source 1..75: mol_type = other DNA
gtggttctggctcctctgcaacgcctatcaatgcatttaaagggaatgttgtggtggcatcggcagataccggac

SEQ ID NO: 561031 - DNA, 75 bp, synthetic construct
  source 1..75: mol_type = other DNA
cgtgcagacgaagcggtcagcgtgcgtttcaaagcgccaggattgctgcatattgtcgggcgcaacggcggacgt

SEQ ID NO: 561032 - DNA, 75 bp, synthetic construct
  source 1..75: mol_type = other DNA
agagtgcgccagtgtgatgaccgttggcactcatggcaccacctatggtggtaatccgctagcctcggcggtagc

SEQ ID NO: 561033 - DNA, 75 bp, synthetic construct
  source 1..75: mol_type = other DNA
cggtggcaggcaaagtgctggatctcatcaacacgccagagatgcttaacggggttaaacagcgtcacgactggt

SEQ ID NO: 561034 - DNA, 75 bp, synthetic construct
  source 1..75: mol_type = other DNA
acaccagagatgcttaatggcgttaaacagcgtcacgactggtttgttgagcgtcttaataccattaatcaccgc

SEQ ID NO: 561035 - DNA, 75 bp, synthetic construct
  source 1..75: mol_type = other DNA
cctgtgcggtgattgtcgaacccatccagggggaaggcggtgtggtgccagccagcaacgcatttttacaaggtc

SEQ ID NO: 561036 - DNA, 75 bp, synthetic construct
  source 1..75: mol_type = other DNA
cgtaacgcccgatttgttaactaccgccaaagctttgggtggcggtttcccggttggcgcgctgctggcaaccga

SEQ ID NO: 561037 - DNA, 75 bp, synthetic construct
  source 1..75: mol_type = other DNA
aactgtatgcctatatgcgctacggggtgacgcccgatctgctgaccaccgctaaagccctgggcggcggtttcc

SEQ ID NO: 561038 - DNA, 75 bp, synthetic construct
  source 1..75: mol_type = other DNA
tcaataaagcacttgagcgcttttattttcgcttaagcgcatcaggcactcatgctgagctcgcagcccgggagt

SEQ ID NO: 561039 - DNA, 75 bp, synthetic construct
  source 1..75: mol_type = other DNA
cagccgctccaaaaaccctcgcgcagtggcaggccatgttgcctaacacctggatcaatatcgataaactgattt

SEQ ID NO: 561040 - DNA, 75 bp, synthetic construct
  source 1..75: mol_type = other DNA
gatgcagtagcaaaagacaatatgaccgcagggactgcaatcaactggttgcgctatatggaaattagccgttca

SEQ ID NO: 561041 - DNA, 75 bp, synthetic construct
  source 1..75: mol_type = other DNA
gaaaaaggcaatcaccttgattctggcagtgctgctgggcggtatggtgggttcggggattgtgttggggcgtaa

SEQ ID NO: 561042 - DNA, 75 bp, synthetic construct
  source 1..75: mol_type = other DNA
ttaataaagcccttgaacgctttaattttcgcctgagtatgtcaggagttgccgccgaacatgcagccagagact

SEQ ID NO: 561043 - DNA, 75 bp, synthetic construct
  source 1..75: mol_type = other DNA
atgggcaaagaatataaaactctcattaacaaagcacttgagcgtttttattttcgcttaagtgcatcaggtgct

SEQ ID NO: 561044 - DNA, 75 bp, synthetic construct
  source 1..75: mol_type = other DNA
tataatgccgatgataacgttaattagcagtggttcgcgcacagcatggttatcacttggtatgacacttttatt

SEQ ID NO: 561045 - DNA, 75 bp, synthetic construct
  source 1..75: mol_type = other DNA
gtatttgtgacgcaagaaggtgtggctgtaggtgagaatggcgtcagttttgtctggcagaaaacgcttagttaa

SEQ ID NO: 561046 - DNA, 75 bp, synthetic construct
  source 1..75: mol_type = other DNA
atggctacgtggcaacagggtattaattctggtggatttcttgctggcatcggtgcgcaaaatgagaatgcgcca

SEQ ID NO: 561047 - DNA, 75 bp, synthetic construct
  source 1..75: mol_type = other DNA
ttgagtttgcaaggaaaggcattccaagcgaaacggataatccaatggtcatggctcgatggttaaggggtatgg

SEQ ID NO: 561048 - DNA, 75 bp, synthetic construct
  source 1..75: mol_type = other DNA
agtctcggagtttgccggcacgcggcttatccgcccgttgctcgcccgcacgcggggagaactggtgcagtgggc

SEQ ID NO: 561049 - DNA, 75 bp, synthetic construct
  source 1..75: mol_type = other DNA
gtggtcgagcgcgtgcaacttgcgcaagaaggactgggcattgaggcccaggcgcggcaggtgcgttatcaggca

SEQ ID NO: 561050 - DNA, 75 bp, synthetic construct
  source 1..75: mol_type = other DNA
cttatccgcccgttgcttgcccgcacgcggggggaactggagcagtgggcgttggcgcatggtttacgctggatt

SEQ ID NO: 561051 - DNA, 75 bp, synthetic construct
  source 1..75: mol_type = other DNA
gatgttgagcgcatgaacagcatgggatttaccggcgtgttgatcgatctggattcaccagaaagtgttgatcgc

SEQ ID NO: 561052 - DNA, 75 bp, synthetic construct
  source 1..75: mol_type = other DNA
taacgataaggtcgttgatgagatgattgaaagaggtctagaaacgggatgcagtgtcgcttactttgaggcggt

SEQ ID NO: 561053 - DNA, 75 bp, synthetic construct
  source 1..75: mol_type = other DNA
ccgggctttcaaattcatttataaattcttttcctgtaaatcaattgttctttatctcatgcggatattatatat

SEQ ID NO: 561054 - DNA, 75 bp, synthetic construct
  source 1..75: mol_type = other DNA
acagaaactctggttgacacactgaaatctcagggattcttatctggcattcagcagatgaaagggatgggggct

SEQ ID NO: 561055 - DNA, 75 bp, synthetic construct
  source 1..75: mol_type = other DNA
gttgatcaccttgggatggctgctcttggtccgattgattacttcaatgttcaggacaagatggctggtcgtgag

SEQ ID NO: 561056 - DNA, 75 bp, synthetic construct
  source 1..75: mol_type = other DNA
gagctgcgccacagcggaattaaagtcagcctgatcgaacccggtcccattcgtactcgcttcaccgacaacgtc

SEQ ID NO: 561057 - DNA, 75 bp, synthetic construct
  source 1..75: mol_type = other DNA
atgcagtaaatgctctgaaagaagaaatcacctgcacttcacttatcaaatctgaatctatttttctcgctatcc

SEQ ID NO: 561058 - DNA, 75 bp, synthetic construct
  source 1..75: mol_type = other DNA
gacagaattaaaggcggtggtgtactaagtcaatcaatccaaaataaatcattaacatatgaaagtagtgaaata

SEQ ID NO: 561059 - DNA, 75 bp, synthetic construct
  source 1..75: mol_type = other DNA
tcagtcgtgcaaatgatttactttcggatatgaaaggctttaatactggatgccctattaaatcaattactacat

SEQ ID NO: 561060 - DNA, 75 bp, synthetic construct
  source 1..75: mol_type = other DNA
cccgaaaaattgcctgttatcttgccagcatcagtaaactggataactttcttggccagcttgatggtatccttc

SEQ ID NO: 561061 - DNA, 75 bp, synthetic construct
  source 1..75: mol_type = other DNA
agacgaagataatgaacccattatggtttttaacggagagaggaatgtaccggcagacagtctgaaaccgcagcc

SEQ ID NO: 561062 - DNA, 75 bp, synthetic construct
  source 1..75: mol_type = other DNA
ccgtcatttcgcaggtatttttcagtggatgaccggcattcgtactgaaaatataccgccattcaatccgctgac

SEQ ID NO: 561063 - DNA, 75 bp, synthetic construct
  source 1..75: mol_type = other DNA
tgtgttgctgctgttccttcttctgctccttgcacacagaaataccctcacatccattacagcgctgttatttct

SEQ ID NO: 561064 - DNA, 75 bp, synthetic construct
  source 1..75: mol_type = other DNA
ccagtgacatcacgtctcatcagtccgtcagcagaaaaatcagtgcccgtcatttcgcaggtatttttcagtggc

SEQ ID NO: 561065 - DNA, 75 bp, synthetic construct
  source 1..75: mol_type = other DNA
ggatggttaaaggaacagttgtgggaacaactgacacattgcgtgaaatgcagcgttatgaacaactgagtcagc

SEQ ID NO: 561066 - DNA, 75 bp, synthetic construct
  source 1..75: mol_type = other DNA
atgaagttaacatcgacggcaaagagtatgttgtcacagtagtccaaaccggcaagtcaacgtggagggcatggg

SEQ ID NO: 561067 - DNA, 75 bp, synthetic construct
  source 1..75: mol_type = other DNA
accgccattcaatccgctgacagacgaagataatgaacccgttatggtttttaacggagagaaaaatgtgccggc

SEQ ID NO: 561068 - DNA, 75 bp, synthetic construct
  source 1..75: mol_type = other DNA
aactgacacattgcgtgaaatgcagcgttataaacaactgagtcagcacggggctgacaactggaaaatcctgcc

SEQ ID NO: 561069 - DNA, 75 bp, synthetic construct
  source 1..75: mol_type = other DNA
tgatgcggagcatgccactttcctcaagaaaggcagcttcgcttcccgtaaaacagatgacaaactgttgttaca

SEQ ID NO: 561070 - DNA, 75 bp, synthetic construct
  source 1..75: mol_type = other DNA
gatatgagggagaggtttcagtctgcttctgcgggcgaattactgaacacgcttaaagacaaaatggcgacagcg

SEQ ID NO: 561071 - DNA, 75 bp, synthetic construct
  source 1..75: mol_type = other DNA
tcagcagatccagcagagcaaaacatggcgacatgtgaaaaatgagcgcattaaccgctctgcggcctggcagta

SEQ ID NO: 561072 - DNA, 75 bp, synthetic construct
  source 1..75: mol_type = other DNA
tcactctatcgccagccgttaattgccattttaatacctgaaatacccgaagtggcccatgatatcgcacgccag

SEQ ID NO: 561073 - DNA, 75 bp, synthetic construct
  source 1..75: mol_type = other DNA
ttgaaggtttttggggaagactaaatgcatcatgttcatttaatgaagatgtaaatattattattggtcgaaatg

SEQ ID NO: 561074 - DNA, 75 bp, synthetic construct
  source 1..75: mol_type = other DNA
gcgcgccatcatgatcagcgggacagcgggtcccctgttgagtggcggacgcctgcaggtctgggtcaccacagc

SEQ ID NO: 561075 - DNA, 75 bp, synthetic construct
  source 1..75: mol_type = other DNA
tctttgagttaaaaaccgttccccaccaacagttgcagcagtcaaagacctggcggcatgtgaagaacgaacgca

SEQ ID NO: 561076 - DNA, 75 bp, synthetic construct
  source 1..75: mol_type = other DNA
caccatcaccacgatctctctgttgccacgctgcatgtacatatcaatcacgacgattgcctggaaatcgccgtg

SEQ ID NO: 561077 - DNA, 75 bp, synthetic construct
  source 1..75: mol_type = other DNA
atgacgtacggtaaaatcaacaacagttttattgtcgcgttgttgcagaccacaactgatgaggcagcggagttt

SEQ ID NO: 561078 - DNA, 75 bp, synthetic construct
  source 1..75: mol_type = other DNA
ggaaacagaacgtgcgctggcggatacatcctctccgaagataattttcctgcacatgatgggttctcatccaaa

SEQ ID NO: 561079 - DNA, 75 bp, synthetic construct
  source 1..75: mol_type = other DNA
tctgggttgctttggaatggggagcaggccaaagacattgggttgattgatggcttggggagtttgaactccgtg

SEQ ID NO: 561080 - DNA, 75 bp, synthetic construct
  source 1..75: mol_type = other DNA
agacatcatccggcgactgacccaacgagcgaagctcgaagccagttccttcgtgcaagaactcagcgctgtgaa

SEQ ID NO: 561081 - DNA, 75 bp, synthetic construct
  source 1..75: mol_type = other DNA
cgtatgacgacgaaatggcggcaacactcgccaaagcatccgttatcgatcttgaagcgctggaagcgctctccc

SEQ ID NO: 561082 - DNA, 75 bp, synthetic construct
  source 1..75: mol_type = other DNA
aaagttcatgatttaaatgaagatgcggaatttgatgagaacggagttgaggtttttgacgaaaaggccttatag

SEQ ID NO: 561083 - DNA, 75 bp, synthetic construct
  source 1..75: mol_type = other DNA
atgattattgatttagacgctctttttccaagtcgaaagacgtttacagatctggtggcttattgtactgatccg

SEQ ID NO: 561084 - DNA, 75 bp, synthetic construct
  source 1..75: mol_type = other DNA
cgccacgtctgaactcgaaatggaacggatgaatgcgttatggaaacgcacggcggcaaacgggatcgagcgcga

SEQ ID NO: 561085 - DNA, 75 bp, synthetic construct
  source 1..75: mol_type = other DNA
atgtatgattttgtgattattggcggcggcatcatcggcatgtcgaccgccatgcaactgattgatgtttatcct

SEQ ID NO: 561086 - DNA, 75 bp, synthetic construct
  source 1..75: mol_type = other DNA
ttattaaagagtcgggtattctgtttggtaccagtggtgctcgtggtcttgttgagcaatttacgccaaacgcgt

SEQ ID NO: 561087 - DNA, 75 bp, synthetic construct
  source 1..75: mol_type = other DNA
aaaacagcattaattaaaaaggcttccagcttgaagggttccattctgttttcacttcttaataaaaggaataat

SEQ ID NO: 561088 - DNA, 75 bp, synthetic construct
  source 1..75: mol_type = other DNA
gctgaatgctgtaagtgaagcagcaaaaacagcattaattaaaaaggcttccagcttgaagggttccattctgtt

SEQ ID NO: 561089 - DNA, 75 bp, synthetic construct
  source 1..75: mol_type = other DNA
aaaacggatgacatgctgttgttacaggaaacagaacgtgcactggcggataaatcctctccgaaggtgattttc

SEQ ID NO: 561090 - DNA, 75 bp, synthetic construct
  source 1..75: mol_type = other DNA
tttcctcaagaaaggcagctttgcttcccgtaaaacggatgacatgttgttgttacaggaaacagaacgtgcact

SEQ ID NO: 561091 - DNA, 75 bp, synthetic construct
  source 1..75: mol_type = other DNA
gtatttttcagtggctgaccggtattcgtaccgaaaatataccgccattcaatccactgacagacgaagataatg

SEQ ID NO: 561092 - DNA, 75 bp, synthetic construct
  source 1..75: mol_type = other DNA
ggcaggaaaccgcgccaccaaagccttttgcgatcaaaacggcattcgctacgacaactgcggcaagatgctggt

SEQ ID NO: 561093 - DNA, 75 bp, synthetic construct
  source 1..75: mol_type = other DNA
cacggagcgggaagagtcgccacgcagaggcgcttattggggactcttcacaggttctgtatatcgctacctcgc

SEQ ID NO: 561094 - DNA, 75 bp, synthetic construct
  source 1..75: mol_type = other DNA
ctacgcgatcttatacgtcatgttgtagatcagtacggctacccaatcaccaagattcatgggttacggatgtta

SEQ ID NO: 561095 - DNA, 75 bp, synthetic construct
  source 1..75: mol_type = other DNA
taccgaagcggtttcagacgttgataaagaaaaagccaaaacatggtcgaagcagtatcagcttgatgcaatttt

SEQ ID NO: 561096 - DNA, 75 bp, synthetic construct
  source 1..75: mol_type = other DNA
gtggcatcatcggcatgtcgaccgccatgcaactgattgatgtctacccggatgcccgcattgcgttgctggaga

SEQ ID NO: 561097 - DNA, 75 bp, synthetic construct
  source 1..75: mol_type = other DNA
cgcaccagaaatacgatgctatgctgaatcttgtactgaacaaaaagcaaaagaatatgttaatatacttattaa

SEQ ID NO: 561098 - DNA, 75 bp, synthetic construct
  source 1..75: mol_type = other DNA
ttttattagaagatgttctttgttcacaacctaaagcatatcctgagcttcaggttaataaaaaggctgcggaaa

SEQ ID NO: 561099 - DNA, 75 bp, synthetic construct
  source 1..75: mol_type = other DNA
catgcaactgattgatgtttatccggatgcccgcattgcgttgctggaaaaagagtccggcccggcctttcatca

SEQ ID NO: 561100 - DNA, 75 bp, synthetic construct
  source 1..75: mol_type = other DNA
gccaaacgcagtgctggcgttcaaacgcgaaggctatcgcaagcgcgacttctcatttagcgacacgctggagat

SEQ ID NO: 561101 - DNA, 75 bp, synthetic construct
  source 1..75: mol_type = other DNA
gtacccgtcagggcagcgactatgaagcatcgacgctgattagctgttccgggctgatggctgaccggctggtga

SEQ ID NO: 561102 - DNA, 75 bp, synthetic construct
  source 1..75: mol_type = other DNA
agcagtaagcgatgaagatcgtatacttgcaagagagtggtctaaaaaatataatcttgatgctattttctcaac

SEQ ID NO: 561103 - DNA, 75 bp, synthetic construct
  source 1..75: mol_type = other DNA
tcattattccatacagaaaaacatcccctgcataatggttaccggtagtcacataccttttgaccgtaatggttt

SEQ ID NO: 561104 - DNA, 75 bp, synthetic construct
  source 1..75: mol_type = other DNA
agtgcgttatcgactggatgatgtgctggtggcaagcgaacagccatgcccctgtggcagtgcaacaatggcgat

SEQ ID NO: 561105 - DNA, 75 bp, synthetic construct
  source 1..75: mol_type = other DNA
atgcgcattaccttgaatgatgattctattctgcatttacgcccgtcaggcaatgcaccagagttacggtgttat

SEQ ID NO: 561106 - DNA, 75 bp, synthetic construct
  source 1..75: mol_type = other DNA
ttcagctttgcctactagagatgctttgttaccattcctgatggtgttagctcactcaaaaaaatataatactcc

SEQ ID NO: 561107 - DNA, 75 bp, synthetic construct
  source 1..75: mol_type = other DNA
tagcttctcgcaatagtactatctctcaactggttaataatcttccacagcgattcacttggtcagatagagtga

SEQ ID NO: 561108 - DNA, 75 bp, synthetic construct
  source 1..75: mol_type = other DNA
atgagctggacggagtggatttgttcacgggggcattactgacctatacagacagcaatgcaagcagccacgtct

SEQ ID NO: 561109 - DNA, 75 bp, synthetic construct
  source 1..75: mol_type = other DNA
attgccatataactaaaagcctgattgctgtctccgaactggcccgcagggtcacctgtaagagccatcgcagac

SEQ ID NO: 561110 - DNA, 75 bp, synthetic construct
  source 1..75: mol_type = other DNA
aatggttatatggatgtaaatatacatccactctctggtaaggatgtgctgactcttgatggttctgttaatctg

SEQ ID NO: 561111 - DNA, 75 bp, synthetic construct
  source 1..75: mol_type = other DNA
taacgcaaataacgccacattcctgatgcataccaacaacagtcaggctgaccagctgaatgtcacgaataaact

SEQ ID NO: 561112 - DNA, 75 bp, synthetic construct
  source 1..75: mol_type = other DNA
cgtgtctttactgacaagaatgacggaaccggtaatgcggtctcctctgttgagggaagtgccacagcaaccaca

SEQ ID NO: 561113 - DNA, 75 bp, synthetic construct
  source 1..75: mol_type = other DNA
ttggcgtactttcctcaggatctgactatggaaataactgggtcgtcaccactcaggatttccttggtcagcaac

SEQ ID NO: 561114 - DNA, 75 bp, synthetic construct
  source 1..75: mol_type = other DNA
gccgagcaggcagataacatgccgttattgcatcgggcgctggtgctggcgtgggcacaggagatgaatctgccg

SEQ ID NO: 561115 - DNA, 75 bp, synthetic construct
  source 1..75: mol_type = other DNA
gccagacgctgacgctgcacaaaggggcgaattatatttcgctgacgcagaatattcagcaatctggcttgttaa

SEQ ID NO: 561116 - DNA, 75 bp, synthetic construct
  source 1..75: mol_type = other DNA
cgacttattccactgagtcttgcctggcgtacgcttgccgatcatcagagtgctgctgcaaatgacattcgccag

SEQ ID NO: 561117 - DNA, 75 bp, synthetic construct
  source 1..75: mol_type = other DNA
acaagtttcacggcatcaaatttctgcatagtgcaattgaagaaatgaatgagaaagctgaagtaactctgaccg

SEQ ID NO: 561118 - DNA, 75 bp, synthetic construct
  source 1..75: mol_type = other DNA
aatttctctcagagctggatgttttatcaaaagagatcatgcctggttgtggtcttgtttttgagctataccaac

SEQ ID NO: 561119 - DNA, 75 bp, synthetic construct
  source 1..75: mol_type = other DNA
caccgcgcgtgggatgaacggcgacgggctggtcgggcaggggcgtgcttatctgcgttcggaaaaaaatctcta

SEQ ID NO: 561120 - DNA, 75 bp, synthetic construct
  source 1..75: mol_type = other DNA
tgccggaaatattcgcgacattccgttcgtcgttctggtgggtggctcttcgctggatttcgaagtaccgcaatt

SEQ ID NO: 561121 - DNA, 75 bp, synthetic construct
  source 1..75: mol_type = other DNA
gtcagggagaattttactggtggtattgaggcttatgacagttctgttagtgtgacctctcagaatgctattctt

SEQ ID NO: 561122 - DNA, 75 bp, synthetic construct
  source 1..75: mol_type = other DNA
ttagtgcgtttttacgggaaccacagcgagtaatgagcgcagtgcgcaaagtgctttctgcaccgcaacaaaccc

SEQ ID NO: 561123 - DNA, 75 bp, synthetic construct
  source 1..75: mol_type = other DNA
gaagaagatattcgtcgggctgatgtggcgctgctgattaccgatatcgagctttctggtgcggagcgattcgag

SEQ ID NO: 561124 - DNA, 75 bp, synthetic construct
  source 1..75: mol_type = other DNA
cctgaaggggggataacgaaaaagtcaggtactctgatattccaggggcatccggtgattcatgctggaatgaca

SEQ ID NO: 561125 - DNA, 75 bp, synthetic construct
  source 1..75: mol_type = other DNA
tttaatccagctaatgggcctcttgcaaactatctaaataaaggtgatagtggctctcctttatttgcgtatgac

SEQ ID NO: 561126 - DNA, 75 bp, synthetic construct
  source 1..75: mol_type = other DNA
cgctgatgccagagcctcgaaaatcgcaacggactttatggattcaggttataaatccttcctgacggaagtcaa

SEQ ID NO: 561127 - DNA, 75 bp, synthetic construct
  source 1..75: mol_type = other DNA
tcttccctactccattatcccctcatgtatttgcccgcgtttgtgtggtgaaacccgacgaactggtgcccattc

SEQ ID NO: 561128 - DNA, 75 bp, synthetic construct
  source 1..75: mol_type = other DNA
aaaagtagaaagcctgttccacttacgccatgaagatggcagcgttcagttcttccctactcccctcatgtattt

SEQ ID NO: 561129 - DNA, 75 bp, synthetic construct
  source 1..75: mol_type = other DNA
gaaattaagcaaaaactgcatgttgatgggaagcgccgccgcaagcgccgttggcgaagtgaaatcctgccatgt

SEQ ID NO: 561130 - DNA, 75 bp, synthetic construct
  source 1..75: mol_type = other DNA
tcggcaactcatccacagaggttgcgctggcaatgctcaatgcgtctggcgaaatgtcgttcgtgagcagcgccc

SEQ ID NO: 561131 - DNA, 75 bp, synthetic construct
  source 1..75: mol_type = other DNA
tggcaattctggacttaggcgccggttctaccgatgcctccatcatcaatcagaaaggggaaatgattgccactc

SEQ ID NO: 561132 - DNA, 75 bp, synthetic construct
  source 1..75: mol_type = other DNA
ttcagcagtagtagtgaaaacaccgtctggtgacgttaaagctcgttcgatacccgccggaaacattgagctgct

SEQ ID NO: 561133 - DNA, 75 bp, synthetic construct
  source 1..75: mol_type = other DNA
gatatcaatgacagcctgatcctcgatacaccggaatctccactggcagatgcggtggcaaacgtcttaaccatg

SEQ ID NO: 561134 - DNA, 75 bp, synthetic construct
  source 1..75: mol_type = other DNA
gtgagcgggtcatgatggccttcacctacgccagaaccacaccgctgaccccggcagatatgacgcgctgggctg

SEQ ID NO: 561135 - DNA, 75 bp, synthetic construct
  source 1..75: mol_type = other DNA
ggctggaaatacagagccagtttctccggggtaacgagcaggtgtaccagtgtcaggtggcatttgtattgccgg

SEQ ID NO: 561136 - DNA, 75 bp, synthetic construct
  source 1..75: mol_type = other DNA
ctgttgtaacttttcccgggaatattattcaggacagcactattaatatgctgcgcctcagcgatcccgacgctg

SEQ ID NO: 561137 - DNA, 75 bp, synthetic construct
  source 1..75: mol_type = other DNA
cctgctggcgggcggcccggataaaccgtccgacctgcctgcgcacctgaaaggcggcaacttcctgcgcccaac

SEQ ID NO: 561138 - DNA, 75 bp, synthetic construct
  source 1..75: mol_type = other DNA
tctttattcagcaaagcatctacccggaattcgttaaacgctttgccgaacgcgccaaccgtctgcgcgtgggcg

SEQ ID NO: 561139 - DNA, 75 bp, synthetic construct
  source 1..75: mol_type = other DNA
gatccatcagaccaaaaatgtgttgatcccacgcgcttctcacaactttgaatttttcgcggaagtctgccagca

SEQ ID NO: 561140 - DNA, 75 bp, synthetic construct
  source 1..75: mol_type = other DNA
gtatcaactttcatcaaaaaaacataccatccgactattcaacgccgatgacagaagaatctccctcagttatag

SEQ ID NO: 561141 - DNA, 75 bp, synthetic construct
  source 1..75: mol_type = other DNA
caatttttaagtattttaaaagaatttattactgataaggaatttgactttcaaggcggaatactttccataaag

SEQ ID NO: 561142 - DNA, 75 bp, synthetic construct
  source 1..75: mol_type = other DNA
tacatgagttcataaccgataaaaaatttaattttatctccggtgagctagtaatagaaaacgagcatgggccga

SEQ ID NO: 561143 - DNA, 75 bp, synthetic construct
  source 1..75: mol_type = other DNA
atgttgatgcccttcacgcagactggcaggccggaaacggcatcttaacctcagaaaatgacatgtacacggcag

SEQ ID NO: 561144 - DNA, 75 bp, synthetic construct
  source 1..75: mol_type = other DNA
cttacaaaatatcaacttgaactatcccagaaagccagagatatcgcattagaactgcaaaaagaggttctggca

SEQ ID NO: 561145 - DNA, 75 bp, synthetic construct
  source 1..75: mol_type = other DNA
atatcagctttcatctaaaaaacacacaattcgtttatttaacactgatgatagaagaatatctcttagttatag

SEQ ID NO: 561146 - DNA, 75 bp, synthetic construct
  source 1..75: mol_type = other DNA
tggcgaaagtgccgcaaagctctgtcgaccagatgtctcccgcagatctgaatgcggcagcgttgcttgtggccg

SEQ ID NO: 561147 - DNA, 75 bp, synthetic construct
  source 1..75: mol_type = other DNA
tatctacgccgccctttgggtgaaaggcacgattaccgccatggtggaaggatgggttaccagcgcttgggcgaa

SEQ ID NO: 561148 - DNA, 75 bp, synthetic construct
  source 1..75: mol_type = other DNA
tcgtaagatcgtcgtcaacgaggaagtaggtgacactgggcgttataacttcggtcagaaatgcgttttctgggc

SEQ ID NO: 561149 - DNA, 75 bp, synthetic construct
  source 1..75: mol_type = other DNA
acatcctcagactgcttgaagaacggaacatgacaaagcaggagctttcccaccaggccggtgtgtcgatttcat

SEQ ID NO: 561150 - DNA, 75 bp, synthetic construct
  source 1..75: mol_type = other DNA
atgcctgattcgttaacccgctggcgtatcaccgcgcgtgggatgaacggcgacgggctggtcgggcaggggcgt

SEQ ID NO: 561151 - DNA, 75 bp, synthetic construct
  source 1..75: mol_type = other DNA
caatgacagcctgatcctcgatacaccggaatctccactagcagatgcggtggcaaacgtcttaaccatgacgtt

SEQ ID NO: 561152 - DNA, 75 bp, synthetic construct
  source 1..75: mol_type = other DNA
tatctacgccgccctttgggtgaaaggcacgattaccgccatggtggaaggatgggtgaccagcgcctgggcaaa

SEQ ID NO: 561153 - DNA, 75 bp, synthetic construct
  source 1..75: mol_type = other DNA
tcacttctacagtgtcgcccaacatgcggtgctttgcagccagctggtgccgcaggaatttgcttttgaagcgtt

SEQ ID NO: 561154 - DNA, 75 bp, synthetic construct
  source 1..75: mol_type = other DNA
agttgttatgacgatgcactcaactgtggatccgctggaaaaagagccgagctggaatttccgtcttgctgaaat

SEQ ID NO: 561155 - DNA, 75 bp, synthetic construct
  source 1..75: mol_type = other DNA
atgaatcaggatgagtccgtcagacttctggcgcatgtggtatcgaaatacattgtgcggctggcgaaagtgccg

SEQ ID NO: 561156 - DNA, 75 bp, synthetic construct
  source 1..75: mol_type = other DNA
aagagtgtccgtaattctttctgaacagcaagcctttcgggtacgaatgtggagtgaacatacacgtcagaagtt

SEQ ID NO: 561157 - DNA, 75 bp, synthetic construct
  source 1..75: mol_type = other DNA
cgtccggcgcactggcgcacggtggagcgttggcaacatcttgatgaattaatttatgcagacattaacccgcat

SEQ ID NO: 561158 - DNA, 75 bp, synthetic construct
  source 1..75: mol_type = other DNA
tgattatggcggcgataaagaccctaatgaatgggattatcaggcgatggaacaggcgattaatgctgagattca

SEQ ID NO: 561159 - DNA, 75 bp, synthetic construct
  source 1..75: mol_type = other DNA
atgactcagtagccacgctgaatgaatcgcgcgatatcatggcgtttctcaataccaccgtggtcgccagcgccg

SEQ ID NO: 561160 - DNA, 75 bp, synthetic construct
  source 1..75: mol_type = other DNA
actggaacaatggcgagatgcgccgcagaacccgcccgtctggctggatattgaaatcactactgatgagtatct

SEQ ID NO: 561161 - DNA, 75 bp, synthetic construct
  source 1..75: mol_type = other DNA
gcccgcgcccggttccagttgaaacactgctggcgcgtattcaccatcacggtttactggcgatgaccgactgtt

SEQ ID NO: 561162 - DNA, 75 bp, synthetic construct
  source 1..75: mol_type = other DNA
cttctacccctgccgcgccactgatgccggtttctgataccgttcacgaacgctttatccgtctgcccgaagtga

SEQ ID NO: 561163 - DNA, 75 bp, synthetic construct
  source 1..75: mol_type = other DNA
cgtcccccacaaccgcgcacctgatgccggtttcagccccggctcaggaacgttttttacgtctcccggaagtca

SEQ ID NO: 561164 - DNA, 75 bp, synthetic construct
  source 1..75: mol_type = other DNA
tgcacctgtgcggcctgtcacgctcgaccatctatgaattcatccgtaagggggaatttccgccgcaggtgagtc

SEQ ID NO: 561165 - DNA, 75 bp, synthetic construct
  source 1..75: mol_type = other DNA
acggtggaagaattatagatgcgctaaatgtgcttcgtatttttagagaatgtgaggaaatggactatgttttat

SEQ ID NO: 561166 - DNA, 75 bp, synthetic construct
  source 1..75: mol_type = other DNA
attggctatgtgcattccgacatgggctttgacgctaactcctgtgcggttctgagcgccatcggtaaacaatcc

SEQ ID NO: 561167 - DNA, 75 bp, synthetic construct
  source 1..75: mol_type = other DNA
tcgaacgtagtgctgttgacgaggggtttagaaacttttttatggggttatttaacagcaaaaggtttcttacga

SEQ ID NO: 561168 - DNA, 75 bp, synthetic construct
  source 1..75: mol_type = other DNA
aagccacgcgtgcggtggtgagcgtgccgattatcgggattgtgaaacgcgatctggaggattctccggtacgca

SEQ ID NO: 561169 - DNA, 75 bp, synthetic construct
  source 1..75: mol_type = other DNA
gtcactttggtcgcgaacatttcccatgggaaaaaaccgacaaagcacagcttctgcgcgatgccgctggactga

SEQ ID NO: 561170 - DNA, 75 bp, synthetic construct
  source 1..75: mol_type = other DNA
aagataaaagtattgatggaggatgagttattattaaaaataacatttgcagaaatctttgaacatgtaagcttg

SEQ ID NO: 561171 - DNA, 75 bp, synthetic construct
  source 1..75: mol_type = other DNA
ggcgcaacggcctaccagattacggaagctcgtagcggtgacacctggcacgctacggctgaactgtacaaataa

SEQ ID NO: 561172 - DNA, 75 bp, synthetic construct
  source 1..75: mol_type = other DNA
ctttaaaaaaacgtgaaagtaactataaagacatcactgttgatgatatgaaaaacatacccggagcaccaatca

SEQ ID NO: 561173 - DNA, 75 bp, synthetic construct
  source 1..75: mol_type = other DNA
aaatttgttcatccagtaattggacgagccgttgattggccaacaaaaattgtttctatttctattggttgcatg

SEQ ID NO: 561174 - DNA, 75 bp, synthetic construct
  source 1..75: mol_type = other DNA
atggggtgcatatgtgcgacatcccattgagcgtctaccaggtgatacgtcgccaatccctatctgcggggtggc

SEQ ID NO: 561175 - DNA, 75 bp, synthetic construct
  source 1..75: mol_type = other DNA
ggagggttaggttttagaattaaggatgcgtgtgagttatattctgatgcttgcactgctgcttttccaaaagac

SEQ ID NO: 561176 - DNA, 75 bp, synthetic construct
  source 1..75: mol_type = other DNA
gctaaaggctattacgccagaatctattgaacctgaaaccatcaaagtacttgacccagcttgtggttcgggcca

SEQ ID NO: 561177 - DNA, 75 bp, synthetic construct
  source 1..75: mol_type = other DNA
agtgttttgtcccagaccttgaattttgatcaaggggtgatttctaggctccctataaaaaatattgaaaactat

SEQ ID NO: 561178 - DNA, 75 bp, synthetic construct
  source 1..75: mol_type = other DNA
tgcaggagcaaaccgcttctcaattggtattcagtcgtttaacagcaaaatccgcaagaaaatggcccgcacctc

SEQ ID NO: 561179 - DNA, 75 bp, synthetic construct
  source 1..75: mol_type = other DNA
cccaacacgccgctgggcaaagccgtggaaaatgggcgcactaccgtgccctctccggcagaacgtcgcgatctc

SEQ ID NO: 561180 - DNA, 75 bp, synthetic construct
  source 1..75: mol_type = other DNA
ccacgacgaactggatctgcctcctggcgtcgccaaatttaaattggggcggtggccatggtggtcacaatggac

SEQ ID NO: 561181 - DNA, 75 bp, synthetic construct
  source 1..75: mol_type = other DNA
gccagcgcgtactgattacaccagagcttggcccgaaaaccccgcttcacggtacttttctccgccgcgttccgc

SEQ ID NO: 561182 - DNA, 75 bp, synthetic construct
  source 1..75: mol_type = other DNA
gggctgaacggcccggacgatccaggcaacatcacctgttctgaccactacatcagccgccatgtccaaccactg

SEQ ID NO: 561183 - DNA, 75 bp, synthetic construct
  source 1..75: mol_type = other DNA
atgcacaccgctttttcttccccgtcttctgcccctgccgcgccgctgatgccggtctctgataccgttcatgag

SEQ ID NO: 561184 - DNA, 75 bp, synthetic construct
  source 1..75: mol_type = other DNA
ctagttatatgtgcgattgctttcgtggttttctttgtgctaaccggtgtttatttgaagtgcaaggtaatgact

SEQ ID NO: 561185 - DNA, 75 bp, synthetic construct
  source 1..75: mol_type = other DNA
cgaagcggcacgttgtaccgaaatgtggtttacagagggtttgaccaaagcaacgaaccgattgcacgcctttaa

SEQ ID NO: 561186 - DNA, 75 bp, synthetic construct
  source 1..75: mol_type = other DNA
aatgtgagcaaagcgccaacatcaatgcctactgggagcccaatactttgcgctgcctggaccgtcgaactggcc

SEQ ID NO: 561187 - DNA, 75 bp, synthetic construct
  source 1..75: mol_type = other DNA
ccacgacgaactggatctgcctcctggcgtcgccaaatttaagttgggtagcggtcatggtggtcacaatggact

SEQ ID NO: 561188 - DNA, 75 bp, synthetic construct
  source 1..75: mol_type = other DNA
gcgtggttattacatcacccttgatggtctgatgatgcttcagcttgggttaagtctacgcacaatgcggtacta

SEQ ID NO: 561189 - DNA, 75 bp, synthetic construct
  source 1..75: mol_type = other DNA
cctgtccagtccgccaccagtgagattggaacctccggtggtggaagtttttcactgctcaaggaggctgccatc

SEQ ID NO: 561190 - DNA, 75 bp, synthetic construct
  source 1..75: mol_type = other DNA
catgttggcaaaagccgaatccccgctggctgtaagtctgtatgaccgcatcaacgacgcggcgctactggccag

SEQ ID NO: 561191 - DNA, 75 bp, synthetic construct
  source 1..75: mol_type = other DNA
aaaacagactatcctaaggaatttattatcaataatagaattaaaaaacaaaaagagtacaatcatgttgtttta

SEQ ID NO: 561192 - DNA, 75 bp, synthetic construct
  source 1..75: mol_type = other DNA
atgccgcagtgaatgcgttgcatcagcaaggtgttcagcaactgtttgtttatttgcccgatgagtcagtttatt

SEQ ID NO: 561193 - DNA, 75 bp, synthetic construct
  source 1..75: mol_type = other DNA
atgaacgacagggaaaagcagattcttaaaattttacggcgtaacccgctgattcaacagaacgaaattgcggat

SEQ ID NO: 561194 - DNA, 75 bp, synthetic construct
  source 1..75: mol_type = other DNA
ttggttcgctcttagctcagaaggtcaagcgaagtaaaactggaagaataagagagcgttttgctgaaatagaag

SEQ ID NO: 561195 - DNA, 75 bp, synthetic construct
  source 1..75: mol_type = other DNA
gctcacatttcaaatggttataaacatatttatatagcgattaattcgccagagatatttctcaaggctttacca

SEQ ID NO: 561196 - DNA, 75 bp, synthetic construct
  source 1..75: mol_type = other DNA
cattacgcttattgaacaaaatcaactctggcgagacgctttttactggttagcctggcaaaatagaattctgga

SEQ ID NO: 561197 - DNA, 75 bp, synthetic construct
  source 1..75: mol_type = other DNA
acccgcaatttcataccgggtacttatcacatctatggtgactctttgcgaggttattacatcacccttgatggc

SEQ ID NO: 561198 - DNA, 75 bp, synthetic construct
  source 1..75: mol_type = other DNA
caagcagaccactgacgaatatatcaacactattctgcctccgctgactaaagcactgtttaaatatgttcgtga

SEQ ID NO: 561199 - DNA, 75 bp, synthetic construct
  source 1..75: mol_type = other DNA
gctttgaaaccgatattcacggtgcataccgtcaggctgatggccgctataccgttaaggtattgaaagaagaaa

SEQ ID NO: 561200 - DNA, 75 bp, synthetic construct
  source 1..75: mol_type = other DNA
aaggatacagacaagttcaaaattcttgatatgacagatgcaatatctttgaattacagtcgcgttaaaaaatta

SEQ ID NO: 561201 - DNA, 75 bp, synthetic construct
  source 1..75: mol_type = other DNA
gcgctctggttgttggttcatcttcatacctggcgggttgtactattggcagcgcagaatctgaatgcccgggaa

SEQ ID NO: 561202 - DNA, 75 bp, synthetic construct
  source 1..75: mol_type = other DNA
ggcccgggaaaatatgcagcagcaacaaaaagcaactaaagctgtctcttcgaacggcattgttagacaactgta

SEQ ID NO: 561203 - DNA, 75 bp, synthetic construct
  source 1..75: mol_type = other DNA
agaaagccgtccggttctggagttcctgcagatgctgtgtgaaatcggcgctcactatccgggctttgaaaccga

SEQ ID NO: 561204 - DNA, 75 bp, synthetic construct
  source 1..75: mol_type = other DNA
tggcagggtttgtctgggatgccgcgcaactggaaaataacccctatacctttgttgaagttaaaacgctgctcg

SEQ ID NO: 561205 - DNA, 75 bp, synthetic construct
  source 1..75: mol_type = other DNA
agaatatgcctggcagcaagttcttaaagaacttagccagcaataccaacagctggatgatgaatatctacaggc

SEQ ID NO: 561206 - DNA, 75 bp, synthetic construct
  source 1..75: mol_type = other DNA
aactgggtttaccatcatctcatgctcaagtctctgacccactccccccgcacgatgaagaggctcactctctgg

SEQ ID NO: 561207 - DNA, 75 bp, synthetic construct
  source 1..75: mol_type = other DNA
ggagatttatgttgccaatacaaaagaagaatatttacgtgtattaaattattttataacaaatctggataaata

SEQ ID NO: 561208 - DNA, 75 bp, synthetic construct
  source 1..75: mol_type = other DNA
aaacgcgaagagctcaactatgaatatgatcgtgaagtttttagtagtgttcacagagtatatctttcaaagaaa

SEQ ID NO: 561209 - DNA, 75 bp, synthetic construct
  source 1..75: mol_type = other DNA
tacgatgaagaagcccgttctctggcggtggtcattaaaaaccgtaacggcctgcatgtacgtccggcctcccgg

SEQ ID NO: 561210 - DNA, 75 bp, synthetic construct
  source 1..75: mol_type = other DNA
tgaactctatgaggttaaagaaggtcttggtacacgtgatgatgatatatttttgcgtagacactgggaagtatc

SEQ ID NO: 561211 - DNA, 75 bp, synthetic construct
  source 1..75: mol_type = other DNA
ccattcatcaaaatggaagcagctgttcaagaaaaaatcgaaactaatgaacagctgctgataaatatagcgatg

SEQ ID NO: 561212 - DNA, 75 bp, synthetic construct
  source 1..75: mol_type = other DNA
gaccgcgtttgaggtgctggatcatgtgccggaagtggcagaagccctgctgccggaaagtaaagcgcagctggt

SEQ ID NO: 561213 - DNA, 75 bp, synthetic construct
  source 1..75: mol_type = other DNA
tcaaacgtgagcatagtgaagaaatcagtaacccgagcgataaccgcgcgttttcgcaggtggcggaagtctatt

SEQ ID NO: 561214 - DNA, 75 bp, synthetic construct
  source 1..75: mol_type = other DNA
gagtgttacagggaggatgcagaaaactggctggattcattgccgaaacagactctgcatgaactgaacggcgac

SEQ ID NO: 561215 - DNA, 75 bp, synthetic construct
  source 1..75: mol_type = other DNA
ataaagatctattttcagcctttattataagaaatttacaactttccaaaaatggtgcacaacttgggttcatga

SEQ ID NO: 561216 - DNA, 75 bp, synthetic construct
  source 1..75: mol_type = other DNA
cttattggttgagctcacctgcacgttacatttttgaaacttctcctgcaataacatcagtagcgacatctgcag

SEQ ID NO: 561217 - DNA, 75 bp, synthetic construct
  source 1..75: mol_type = other DNA
tattcagcaggcgtggattctggcgcagcgatatgatgcggtggtggcaaatccgccgtatatgggtaatggggg

SEQ ID NO: 561218 - DNA, 75 bp, synthetic construct
  source 1..75: mol_type = other DNA
aacaggtaaagcctcagtaagatccgaggaattatattttcaaaagatgattggctggacagatatatcgagcca

SEQ ID NO: 561219 - DNA, 75 bp, synthetic construct
  source 1..75: mol_type = other DNA
cggtggcatttatccatcaaaatttagagataaagctggtatttgttggtctaaaatcacatcgggccaagctag

SEQ ID NO: 561220 - DNA, 75 bp, synthetic construct
  source 1..75: mol_type = other DNA
acgacgcttgggatcgctgcagataaaaaaggcaatctgcagattgccgaggccgaaaccattggcgagaccgtg

SEQ ID NO: 561221 - DNA, 75 bp, synthetic construct
  source 1..75: mol_type = other DNA
aataacattaacggtaaatcctgattataagtattctggaaccacggatgataaatcaaaaaggatgcagtcaga

SEQ ID NO: 561222 - DNA, 75 bp, synthetic construct
  source 1..75: mol_type = other DNA
aggcgcggtcgccggtgccgcggcaacgttcccgtttctgctgaaaccggaaaacgcgctggcgaaagcggtctc

SEQ ID NO: 561223 - DNA, 75 bp, synthetic construct
  source 1..75: mol_type = other DNA
catgcaactgattgatgtctatccggatgcccgcattgcgttgctggaaaaagagtccggcccggccagtcacca

SEQ ID NO: 561224 - DNA, 75 bp, synthetic construct
  source 1..75: mol_type = other DNA
ttgagtgcagaaaccgctctggaattgctggcgccagagatcgccgcaaaagtacgtttgtgcgcagcgccattg

SEQ ID NO: 561225 - DNA, 75 bp, synthetic construct
  source 1..75: mol_type = other DNA
cgttatggtttttaacggagagaggaatgtactggcagacagtctgaaaccacagcctctgattcttccggtcaa

SEQ ID NO: 561226 - DNA, 75 bp, synthetic construct
  source 1..75: mol_type = other DNA
tgctaatcctgttcatcatgatggtcatgtgcagggaggctacagcgtgcccctgattattaccgccagtgatat

SEQ ID NO: 561227 - DNA, 75 bp, synthetic construct
  source 1..75: mol_type = other DNA
ttcaacccgctgataaatgaagataatgaacctgttatggtttttaacggagagagaatagttcctgcggacggc

SEQ ID NO: 561228 - DNA, 75 bp, synthetic construct
  source 1..75: mol_type = other DNA
aagagtccggccctgcctgtcatcagacgggccacaacagcggcgtgatccatgccggggtctattacacgcccg

SEQ ID NO: 561229 - DNA, 75 bp, synthetic construct
  source 1..75: mol_type = other DNA
ctggttcgccacctaacccgtcgcctgatttggggcgcgtataacaccgacaaccagttgcaggcctgtttccgc

SEQ ID NO: 561230 - DNA, 75 bp, synthetic construct
  source 1..75: mol_type = other DNA
cggcattgtcagctaccgcgaagtgacagcggcgatggcaaaaatcttccagaccagaggcggtgagattatcta

SEQ ID NO: 561231 - DNA, 75 bp, synthetic construct
  source 1..75: mol_type = other DNA
aactgcgccaacggttttacgccgtggggcacctatctgacgtgcgaagagaactggtccgatattttcgtgaaa

SEQ ID NO: 561232 - DNA, 75 bp, synthetic construct
  source 1..75: mol_type = other DNA
cgggaaacacaccccggattttattgtttttattcttttttgttgtttctgcaataaccacaattgcatgcggat

SEQ ID NO: 561233 - DNA, 75 bp, synthetic construct
  source 1..75: mol_type = other DNA
atgaatatcagaaaactgttttgtccggacaacacaccccggattttattgtttttattcttttttgttgtttct

SEQ ID NO: 561234 - DNA, 75 bp, synthetic construct
  source 1..75: mol_type = other DNA
ggaaacagaacgtgcactggcggataaatcctctccgaaggtgatattcctgcacatgatggggtctcatccgaa

SEQ ID NO: 561235 - DNA, 75 bp, synthetic construct
  source 1..75: mol_type = other DNA
cctattggttacctcatacagttagcaatacttttcatgaaaattcttcaatcggggacgcaataccagtcaggg

SEQ ID NO: 561236 - DNA, 75 bp, synthetic construct
  source 1..75: mol_type = other DNA
tgctcgacccggcctgcggctccggtcatattttgattgaagcctataatgtactgaaaaatatctacgaagagc

SEQ ID NO: 561237 - DNA, 75 bp, synthetic construct
  source 1..75: mol_type = other DNA
tgccataaaaatcgctaagcacgattgggattcttttgaaacatcttatgacttcataagaaacccattaataaa

SEQ ID NO: 561238 - DNA, 75 bp, synthetic construct
  source 1..75: mol_type = other DNA
ttattaaaagattcaacaaaactaaaaatcggactgcaaacaggtgacacagataagtatatacgtttttggcat

SEQ ID NO: 561239 - DNA, 75 bp, synthetic construct
  source 1..75: mol_type = other DNA
caaaaaaaaatgggctcctctgattaaaggggggagttatagaaaatggtatggaaatatcataaatattattaa

SEQ ID NO: 561240 - DNA, 75 bp, synthetic construct
  source 1..75: mol_type = other DNA
gctgattctggaaaacaatattttcggcctggacattgacgaccgtgccgcacagctgtctggttttgcgatgct

SEQ ID NO: 561241 - DNA, 75 bp, synthetic construct
  source 1..75: mol_type = other DNA
tttggtcttgatatcgacgaccgagcggcacagctttccggctttgcattattaatgatggcacgtcaggatgac

SEQ ID NO: 561242 - DNA, 75 bp, synthetic construct
  source 1..75: mol_type = other DNA
aaattacacttaattgtaatttggaatataaatatggcaaagatacttcaaaagaagaaagattaaaaaaattat

SEQ ID NO: 561243 - DNA, 75 bp, synthetic construct
  source 1..75: mol_type = other DNA
cacggttatcttgatcacggcttccgtatgttgtctcacccggagactccggccgcgtttgaggtgctggatcat

SEQ ID NO: 561244 - DNA, 75 bp, synthetic construct
  source 1..75: mol_type = other DNA
tcttgaatcggatgaattgctttaaaaacactctgcagaatgactttaaaaaaatacctggttcacccattgctt

SEQ ID NO: 561245 - DNA, 75 bp, synthetic construct
  source 1..75: mol_type = other DNA
cagttagcaatcatcattgcggatggttttatcaggtgacatctgaaagtttcaaaataatcccagggagcccca

SEQ ID NO: 561246 - DNA, 75 bp, synthetic construct
  source 1..75: mol_type = other DNA
gatgattttggagaacaacctctacggcttagacatagatgatcgtgcagcgcagttatctggctttgcgctgat

SEQ ID NO: 561247 - DNA, 75 bp, synthetic construct
  source 1..75: mol_type = other DNA
attgaacctgaaaccatcaaagtactcgatcccgcttgtggctcgggccacatactgattgaagcttacaacgta

SEQ ID NO: 561248 - DNA, 75 bp, synthetic construct
  source 1..75: mol_type = other DNA
tccatcaattatcatgtagataaagaaagaattacactttctaataattactctgaatgtgatgtatttacatct

SEQ ID NO: 561249 - DNA, 75 bp, synthetic construct
  source 1..75: mol_type = other DNA
ttcgcccaacaattttatgcttactaaactccaaactaagctataatataatcaatatcatcaatcctaccattg

SEQ ID NO: 561250 - DNA, 75 bp, synthetic construct
  source 1..75: mol_type = other DNA
cgtattgggctagtgatgcaacaagagctgctttttcccataacaatacattatcgaaccaagtccctgtaaaag

SEQ ID NO: 561251 - DNA, 75 bp, synthetic construct
  source 1..75: mol_type = other DNA
ccccgtatttttccgcttaatcaatgggagtgaagaggaaaaaaaaagtgcactaatttcgcgcaaaaatatgtt

SEQ ID NO: 561252 - DNA, 75 bp, synthetic construct
  source 1..75: mol_type = other DNA
tctttttgaacgttcttggggaatgaaatcccatccttttcttttaaatagaacaaatctaattcaagatattta

SEQ ID NO: 561253 - DNA, 75 bp, synthetic construct
  source 1..75: mol_type = other DNA
ttaatcgatagcaaaacacttattacgatggctcacttaggcccaaaagcgttttctcaaatatctggtgagata

SEQ ID NO: 561254 - DNA, 75 bp, synthetic construct
  source 1..75: mol_type = other DNA
tattcagcaggcgtggattctggcgcagcgatatgatgcggtggtggcaaatccgccgtatatgggcggcaaagg

SEQ ID NO: 561255 - DNA, 75 bp, synthetic construct
  source 1..75: mol_type = other DNA
aatatgtggtgccgctgctggcacgttatcaggccaatatcgatcgcctgaacgatcaacttgatgaagcttctg

SEQ ID NO: 561256 - DNA, 75 bp, synthetic construct
  source 1..75: mol_type = other DNA
aattacgctcacgccctcaaaacatacaattttattgtaaagagggtttaacatggacaagtttaactatttcgt

SEQ ID NO: 561257 - DNA, 75 bp, synthetic construct
  source 1..75: mol_type = other DNA
aagccgaaaaaaggcgagtcttcgctggataccatccgtcgctatctttccactcagttctggaaagaccatatg

SEQ ID NO: 561258 - DNA, 75 bp, synthetic construct
  source 1..75: mol_type = other DNA
gtgccggaagtggcagaagccctgctgccggaaaataaggcgcagctggttgaaatgaagctttccggtaatcag

SEQ ID NO: 561259 - DNA, 75 bp, synthetic construct
  source 1..75: mol_type = other DNA
gtctgaatgttgtttctttgcaagaaagcctgcatctggatatcgccaaactctggcagcaactgaatttccacc

SEQ ID NO: 561260 - DNA, 75 bp, synthetic construct
  source 1..75: mol_type = other DNA
aaaaaaatccccggatatccgatatcctattggctaggccagaatataaatattttcgataatgacaaaatagct

SEQ ID NO: 561261 - DNA, 75 bp, synthetic construct
  source 1..75: mol_type = other DNA
gtttctgttaaaggaaaactgaagagtgcttcatcaataattatctcaccaataacaattgctattgtttcttat

SEQ ID NO: 561262 - DNA, 75 bp, synthetic construct
  source 1..75: mol_type = other DNA
gaagcctatgacgtgacccttgcgccgcactgtccgctcggaccgattgcactggcggcttgcctgcatatcgac

SEQ ID NO: 561263 - DNA, 75 bp, synthetic construct
  source 1..75: mol_type = other DNA
accttaaaaatgtgaagtttatatgttctccaagtgaacagtatatgagggagttatttaaaacatgtaaggggt

SEQ ID NO: 561264 - DNA, 75 bp, synthetic construct
  source 1..75: mol_type = other DNA
cgggctttttattcgcacatcgtgaggaatgcaccgtggaaattaaaaaaatcattaatccccgttataccgaaa

SEQ ID NO: 561265 - DNA, 75 bp, synthetic construct
  source 1..75: mol_type = other DNA
gtgagcgcatgttctcacgtttcgattttaaacgtgtgctggaggcgggtggtatttcgattctgcaaccggatc

SEQ ID NO: 561266 - DNA, 75 bp, synthetic construct
  source 1..75: mol_type = other DNA
cctgaaaattgaaaccgatgaaggcgtggtcggctggggcgagcccgtgattgaaggccgcgcccgtacggtgga

SEQ ID NO: 561267 - DNA, 75 bp, synthetic construct
  source 1..75: mol_type = other DNA
caacaaaggcgcggagttactcgactttgtgaaaaacaaagaagacttcagcatggtcggcggcttctttaaacc

SEQ ID NO: 561268 - DNA, 75 bp, synthetic construct
  source 1..75: mol_type = other DNA
tgtatcagttacggcgatgttcatcagtcaatacgctggaaaaaattattcataaaaacagaaacagtttattaa

SEQ ID NO: 561269 - DNA, 75 bp, synthetic construct
  source 1..75: mol_type = other DNA
tgtcatttactgggggtatcgcatactgcgccataaagaaggattaggctatggtgatgtgaagtttctcgccgc

SEQ ID NO: 561270 - DNA, 75 bp, synthetic construct
  source 1..75: mol_type = other DNA
gatttagccaatgcgttatggggggcaattatcggctacggcgcattcgccattatttactggggttaccgcact

SEQ ID NO: 561271 - DNA, 75 bp, synthetic construct
  source 1..75: mol_type = other DNA
gtatatggtgacaatgttattataccctatcagcaagccaccatgttacttacagttgcggagggttatcaaaca

SEQ ID NO: 561272 - DNA, 75 bp, synthetic construct
  source 1..75: mol_type = other DNA
agcagtcgtgaatcccattatggtgatgagtatttgaaactcatgaatatctacgccgccaatggcaacaaagaa

SEQ ID NO: 561273 - DNA, 75 bp, synthetic construct
  source 1..75: mol_type = other DNA
ttatcgcctctgttacggttatttctggtgctcaggctggtgttcccgttgccattgatgcaaaccctgaatggg

SEQ ID NO: 561274 - DNA, 75 bp, synthetic construct
  source 1..75: mol_type = other DNA
cgcccgctgtttattgaagagccggtgctggcggaacaagccgaatactacccgaaactggcggcacaaacgcat

SEQ ID NO: 561275 - DNA, 75 bp, synthetic construct
  source 1..75: mol_type = other DNA
tgtcagccggaacggcggaagggccgtttgctggtcgcaggcagggaaccgccacgcatctgtttgtggcggtgc

SEQ ID NO: 561276 - DNA, 75 bp, synthetic construct
  source 1..75: mol_type = other DNA
atcatcatcttgttctgattatgagtgatacatctaatcggttgaatgttgctgtaatgctcgcttttgatgctt

SEQ ID NO: 561277 - DNA, 75 bp, synthetic construct
  source 1..75: mol_type = other DNA
ccccagctcaggcactggataaactcgacgcgctgtatgagcaatctgtagtcgctttacgcaacgccattggca

SEQ ID NO: 561278 - DNA, 75 bp, synthetic construct
  source 1..75: mol_type = other DNA
ccggatggacttccggtaagtggtcatgctactgcgacgttaaacttaccgcaggagccttcactggtggatgcc

SEQ ID NO: 561279 - DNA, 75 bp, synthetic construct
  source 1..75: mol_type = other DNA
catccctccttcagcggtgcgctgtcactggacgccgggcaaacgctgttcactggcggcagtgtgttaccgcca

SEQ ID NO: 561280 - DNA, 75 bp, synthetic construct
  source 1..75: mol_type = other DNA
atgacagcacgattacgctgaccgatctctccaccggtttcgaccagttacaatacggtacgatgacggtagaaa

SEQ ID NO: 561281 - DNA, 75 bp, synthetic construct
  source 1..75: mol_type = other DNA
attcagtggctgacgcccgcgttagaaaatttccataagaactggccgcaggtggagatggattttaaatcgggc

SEQ ID NO: 561282 - DNA, 75 bp, synthetic construct
  source 1..75: mol_type = other DNA
ggagagttttgaacgccagggtctggtggtcaccaaaaccctgggcgaaggcttgtggagccgactgtacgccgc

SEQ ID NO: 561283 - DNA, 75 bp, synthetic construct
  source 1..75: mol_type = other DNA
tttgtgaaaaacaaagaagacttcagcatggttggcggcttctttaaaccgctaacgaaaccgggcttaggcgtg

SEQ ID NO: 561284 - DNA, 75 bp, synthetic construct
  source 1..75: mol_type = other DNA
caattgatttactgcgcgcggaaggcgatcgactgcattcccgtaaactgcgcacctttaatgagccgccgttcc

SEQ ID NO: 561285 - DNA, 75 bp, synthetic construct
  source 1..75: mol_type = other DNA
ccccagctcaggcactggataaacttgacgcgctgtatgagcaatctgtagtcgctttacgcaatgccattggca

SEQ ID NO: 561286 - DNA, 75 bp, synthetic construct
  source 1..75: mol_type = other DNA
ctggcgcaaattggcgatgaaactgcagacggcatttatcatccaacggaattctccccgctatcgcattttgat

SEQ ID NO: 561287 - DNA, 75 bp, synthetic construct
  source 1..75: mol_type = other DNA
agcagcaaaccaccggttagcagaattaatcaccggaaagttatatgacaggataccaaaaaaatatggaaatat

SEQ ID NO: 561288 - DNA, 75 bp, synthetic construct
  source 1..75: mol_type = other DNA
cttgggatggaaaaggcattaggtgtcggttctggaaaaatcccattccctccatctttgactagagcactaacg

SEQ ID NO: 561289 - DNA, 75 bp, synthetic construct
  source 1..75: mol_type = other DNA
gtctgattatttcaaaaattgaatatgatcatgcatctggagagtggaaaattgatggtaaattctgggggagta

SEQ ID NO: 561290 - DNA, 75 bp, synthetic construct
  source 1..75: mol_type = other DNA
tgaccgaacaggaaattgccagctactacgaacaaaacaaaaacaatttcatgacgccggaacaattccgcgtga

SEQ ID NO: 561291 - DNA, 75 bp, synthetic construct
  source 1..75: mol_type = other DNA
aactgcgctgtagctacacgccggatcaaggctctacacgcattgaacgcgtgctggcttccggtacaggagcgc

SEQ ID NO: 561292 - DNA, 75 bp, synthetic construct
  source 1..75: mol_type = other DNA
taaccgagcctgatccgcgtgacgacctctccggcaaagacgtaatgcgcaagctggtaattctggcgcgtgaag

SEQ ID NO: 561293 - DNA, 75 bp, synthetic construct
  source 1..75: mol_type = other DNA
aataaagaatcataagggaatagaagcatctttgaaaaggaatattatcggtcacgataataataatgttattta

SEQ ID NO: 561294 - DNA, 75 bp, synthetic construct
  source 1..75: mol_type = other DNA
atcaggatcaattcacccagccgcagcgtacccgctacagcatcatccagaccaaaactgaagatgaagcgaaag

SEQ ID NO: 561295 - DNA, 75 bp, synthetic construct
  source 1..75: mol_type = other DNA
aaaaagccctcgatgcgtactacgcgctgcagcagaaagtgagcgatgcggcaagcaacgacaccgagtctctgg

SEQ ID NO: 561296 - DNA, 75 bp, synthetic construct
  source 1..75: mol_type = other DNA
gaaatcgttagacgaagtacgtgacgacattgcggcgaaagtgaaacacgaaaaagccctcgatgcgtactacgc

SEQ ID NO: 561297 - DNA, 75 bp, synthetic construct
  source 1..75: mol_type = other DNA
cagtacgcccaggcgctgcgtaaccagctcactacccaacagctgattaacggcgttgccggtaccgattttatg

SEQ ID NO: 561298 - DNA, 75 bp, synthetic construct
  source 1..75: mol_type = other DNA
gtttgcactgccactgccagcgaaagacaaaccgagctacggtatggcgaccgatatgcaaggtaatgtggttct

SEQ ID NO: 561299 - DNA, 75 bp, synthetic construct
  source 1..75: mol_type = other DNA
gtggatgctgagaaactgctggttgatttgaaagccggcaaaggtgcggaagctatgcaggctgccggtctgaaa

SEQ ID NO: 561300 - DNA, 75 bp, synthetic construct
  source 1..75: mol_type = other DNA
tgatccgcggacctggcgcagggcgcgatgtcaccgccggggcgattcagtcggatatcaaccggctggcgcagt

SEQ ID NO: 561301 - DNA, 75 bp, synthetic construct
  source 1..75: mol_type = other DNA
cgaaaggtcgtcagctgcataaatttggtggcagtagtctggctgatgtgaagtgttatttgcgtgtcgcgggca

SEQ ID NO: 561302 - DNA, 75 bp, synthetic construct
  source 1..75: mol_type = other DNA
agcagcagactaccggttagcggaattaatcaccggaaagttatatgacaggataccaaaagagatatggaaata

SEQ ID NO: 561303 - DNA, 75 bp, synthetic construct
  source 1..75: mol_type = other DNA
ggggcagatatttcgaatattatttacctgtcaaagatgaaggtattaattttaaaccggagataaaacatttag

SEQ ID NO: 561304 - DNA, 75 bp, synthetic construct
  source 1..75: mol_type = other DNA
ccgatactaataaacgctgttatgaacgactaataaaaagtgccgaaaattttccttctgccacgatagcggcat

SEQ ID NO: 561305 - DNA, 75 bp, synthetic construct
  source 1..75: mol_type = other DNA
tgccgatcacaggcttgcggaactcacaatgaataaactctacgataaagtccctccatccgtctggaaatatgt

SEQ ID NO: 561306 - DNA, 75 bp, synthetic construct
  source 1..75: mol_type = other DNA
cgtcatcagtgccaacaaactggcgggagcaagcgacagcaataaatatcgccagatccacgacgccttcgaaaa

SEQ ID NO: 561307 - DNA, 75 bp, synthetic construct
  source 1..75: mol_type = other DNA
agcctgcacccaaccggtgcttggcatttgcctcggtatgcagatcctcggcagtcgtagcgcagagagcaacgg

SEQ ID NO: 561308 - DNA, 75 bp, synthetic construct
  source 1..75: mol_type = other DNA
atatgcaagattcgagtactcaggtaatataaaaaactacatacaatttatcaataatatatatatgaatgcatt

SEQ ID NO: 561309 - DNA, 75 bp, synthetic construct
  source 1..75: mol_type = other DNA
acctcatctattgttatatctcatgaggttaatccttcagcaagaagaaaagcaaaaatcaaactcattttttgg

SEQ ID NO: 561310 - DNA, 75 bp, synthetic construct
  source 1..75: mol_type = other DNA
acaaaaagataacttctacggcgtgcagttccacccggagcgttctggtgccgctggcgctaagttgctgaaaaa

SEQ ID NO: 561311 - DNA, 75 bp, synthetic construct
  source 1..75: mol_type = other DNA
gctgcgccaacctgcactcggtaaaatcagccgtcgcacgccacggatatgatcctgttgtcagccgtgacccgg

SEQ ID NO: 561312 - DNA, 75 bp, synthetic construct
  source 1..75: mol_type = other DNA
gcacagctacgccatgccggtgaatccctacaccatcgcccagtgcaattatggcgaggcgtttacggcggcagt

SEQ ID NO: 561313 - DNA, 75 bp, synthetic construct
  source 1..75: mol_type = other DNA
ctgacactaacgcaaccgggcggcgcgggtgtgaaaacgcacattaccgcaaagatgcgtagcgatttcactgcg

SEQ ID NO: 561314 - DNA, 75 bp, synthetic construct
  source 1..75: mol_type = other DNA
cacggtgaatggtaaaacattgcatcgcccgttgttggcatcggagctacctgcgaatgcttcttccccagccac

SEQ ID NO: 561315 - DNA, 75 bp, synthetic construct
  source 1..75: mol_type = other DNA
cgtcgaccacgtcgagtggattcgctttaatgctctgcctgacgcagccgcatacggtaccggcaagccttacac

SEQ ID NO: 561316 - DNA, 75 bp, synthetic construct
  source 1..75: mol_type = other DNA
gcactttgcagcggtttggctgaataacggaaacgtgcaaacaagttcctcggaaatttatatctcctgcctgaa

SEQ ID NO: 561317 - DNA, 75 bp, synthetic construct
  source 1..75: mol_type = other DNA
gcttagccgtcagaatgtagtaagttcagattaccagtcgaaattaatttacatcacggattcatccaatcatca

SEQ ID NO: 561318 - DNA, 75 bp, synthetic construct
  source 1..75: mol_type = other DNA
gctaattatgttcctgcgcaggttgggctggagtcgctgtttgacaataaccgcagcaacgcgatgaaaaccgta

SEQ ID NO: 561319 - DNA, 75 bp, synthetic construct
  source 1..75: mol_type = other DNA
tctctaaatccttcctgcaggagggcggggaaagccagccaaaagatctgaatattaagcttgtaaattgcgata

SEQ ID NO: 561320 - DNA, 75 bp, synthetic construct
  source 1..75: mol_type = other DNA
atgagtgatgacgtagcactgccgctggagtttaccgacgcagcagccaacaaagttaaaagcctgatcgctgac

SEQ ID NO: 561321 - DNA, 75 bp, synthetic construct
  source 1..75: mol_type = other DNA
aactcatggcccatacatattctcatttgtatggcttactgaaccgccccgggtttcctggagagtgttttatct

SEQ ID NO: 561322 - DNA, 75 bp, synthetic construct
  source 1..75: mol_type = other DNA
gtgccattcagcgaaccggcgcgcctgtttccacgatgattatcggcaccctgccagtggttatcccggtctttg

SEQ ID NO: 561323 - DNA, 75 bp, synthetic construct
  source 1..75: mol_type = other DNA
agcaaatgccaccgctaatgacgctgagcggtatcgcgctgttagtggtcggcgtggtgattgcggtcagagcaa

SEQ ID NO: 561324 - DNA, 75 bp, synthetic construct
  source 1..75: mol_type = other DNA
aggtcatgcaatttggcgcaacgtcaggagtagattgccttgcaggaatgctgcatggctttcgaaccctgaaca

SEQ ID NO: 561325 - DNA, 75 bp, synthetic construct
  source 1..75: mol_type = other DNA
gcaaaacaagaccggcaccaaacaaatcaaggaatggtctccacgattacgtacggcgatccagttagcccgaaa

SEQ ID NO: 561326 - DNA, 75 bp, synthetic construct
  source 1..75: mol_type = other DNA
acgtggtgacgctacgccgcgtaatagcggggcgacgttgtatggcgatgtggatacaatggacgatttgactgt

SEQ ID NO: 561327 - DNA, 75 bp, synthetic construct
  source 1..75: mol_type = other DNA
gtggtctttgaaagacctaaattgtggaaagagctgccgtcgacatcaggggttagcaaggtcaatagtaacaat

SEQ ID NO: 561328 - DNA, 75 bp, synthetic construct
  source 1..75: mol_type = other DNA
cggcaggcgttagcgtaacattgacgtcatccgcactggatgacgccagaaccctcagcaatggcggccgaccta

SEQ ID NO: 561329 - DNA, 75 bp, synthetic construct
  source 1..75: mol_type = other DNA
gctcgttaatggtcagatagttcaggcatcgtccagttatacggcggtagtgatgtgcctggtggaaccgcatac

SEQ ID NO: 561330 - DNA, 75 bp, synthetic construct
  source 1..75: mol_type = other DNA
cgcaaaccagcgaaacggcggtgatttttaccgtacttaccagcccggacgtggcgcaggccacgatgtggggcc

SEQ ID NO: 561331 - DNA, 75 bp, synthetic construct
  source 1..75: mol_type = other DNA
gcagcgtcagccctactggagcagttcccccgcggatgtaacgccgcactattacaccattgccctggataacgg

SEQ ID NO: 561332 - DNA, 75 bp, synthetic construct
  source 1..75: mol_type = other DNA
tttacaggtggggatatcaacgtggatttgtgccaggaaacccatgcgtaggcgtcgataaataccctaaacctc

SEQ ID NO: 561333 - DNA, 75 bp, synthetic construct
  source 1..75: mol_type = other DNA
agcctgagtcgagtatacgggtggggatatgagcgtgggtatgtgaagaataacccatgcaaaggagtcagaaaa

SEQ ID NO: 561334 - DNA, 75 bp, synthetic construct
  source 1..75: mol_type = other DNA
ttaatgaagcatggagaaaagcgagaaacgcggcttctgaagaacttggcaggccacttgattgcaccttccatg

SEQ ID NO: 561335 - DNA, 75 bp, synthetic construct
  source 1..75: mol_type = other DNA
agatagctacagctttgggtgtgaagccgtctgagatttggccggagcggtacgacgaagaacacgaaatacccc

SEQ ID NO: 561336 - DNA, 75 bp, synthetic construct
  source 1..75: mol_type = other DNA
ctgaaatgggagcagattggaaacgacgggatctttatccagcaagggaaaacagggaaaaaacagataaaagca

SEQ ID NO: 561337 - DNA, 75 bp, synthetic construct
  source 1..75: mol_type = other DNA
tgtacaaaggctttaacgaaatgtgggtagaagcaagaaatcgcgcaggcaaaatttcaggtattttaaccgact

SEQ ID NO: 561338 - DNA, 75 bp, synthetic construct
  source 1..75: mol_type = other DNA
ttcgaacgcgtaataaacctcgctgcgcaagccggtgtacgttactcccttgaaaatcccaatgcatatgcagat

SEQ ID NO: 561339 - DNA, 75 bp, synthetic construct
  source 1..75: mol_type = other DNA
gcttttaaggataaaagacagaaaggaccatgatttttgtcttgggcctacccatgaagaggtggtaaccgatat

SEQ ID NO: 561340 - DNA, 75 bp, synthetic construct
  source 1..75: mol_type = other DNA
atgatgaatacttcacaaagttcaacctaaaacttgatggtctatcagacacccaaaaaaacaagtttaatggga

SEQ ID NO: 561341 - DNA, 75 bp, synthetic construct
  source 1..75: mol_type = other DNA
agtataacttacctgaaatctcttttccggctaccttatagagacaaagtcataggtgctaccgattcggtatat

SEQ ID NO: 561342 - DNA, 75 bp, synthetic construct
  source 1..75: mol_type = other DNA
accagtgccacaaaaaagttcgcgccctgaagattggctctatagaacataagccaaacccagatcagtctggta

SEQ ID NO: 561343 - DNA, 75 bp, synthetic construct
  source 1..75: mol_type = other DNA
tgcatgagctggatgaagtgggcgttgtcggcttcaaatgcttcgttgcgacctgtggcgatcgcggtatcgaca

SEQ ID NO: 561344 - DNA, 75 bp, synthetic construct
  source 1..75: mol_type = other DNA
gggtaaggacagctaaggaagtagcagacttcttaggtttacctgtggcaaaaattaccaaaaccctaatctata

SEQ ID NO: 561345 - DNA, 75 bp, synthetic construct
  source 1..75: mol_type = other DNA
aagctgaaccatctgaagacggtcagagaacgtcttaatgccgagtttggctgtcgcctggccgggcacgatctg

SEQ ID NO: 561346 - DNA, 75 bp, synthetic construct
  source 1..75: mol_type = other DNA
cccctccaggccttccctctgacgactaacggtaagatcgatcgtcatgcgctgcgcgccatcctgacgcaaacg

SEQ ID NO: 561347 - DNA, 75 bp, synthetic construct
  source 1..75: mol_type = other DNA
cggcttcctgggttggcaggcaatcgcctcagtctctgggcggcgttgccgctcatttatacgccgaatttgacg

SEQ ID NO: 561348 - DNA, 75 bp, synthetic construct
  source 1..75: mol_type = other DNA
tgtttgtcggacccttcgttgagatacagaaaggctgtgtcattggtcgtggaagccggatacagtcgcacacgt

SEQ ID NO: 561349 - DNA, 75 bp, synthetic construct
  source 1..75: mol_type = other DNA
ttgctgtacacctttttactccgccagcaaatgccgccgctaatgacgctgagcggtatcgcgctgttagtggtt

SEQ ID NO: 561350 - DNA, 75 bp, synthetic construct
  source 1..75: mol_type = other DNA
tggcgcgtcgcgactggcttaccgccttgatgctcactatgatgggcaacctcatctattacttctgccttgcca

SEQ ID NO: 561351 - DNA, 75 bp, synthetic construct
  source 1..75: mol_type = other DNA
tggccaccagcatagaaacgctgatcgagctgctaaagaacctgcccgattacgggcgggtttcgtatgtggtga

SEQ ID NO: 561352 - DNA, 75 bp, synthetic construct
  source 1..75: mol_type = other DNA
ggtcacaacattattggtgcattcaccgcttataaatccggtcatgcactgaataacaaattgttgcaggctgtc

SEQ ID NO: 561353 - DNA, 75 bp, synthetic construct
  source 1..75: mol_type = other DNA
ggtcacaatattattggtgcatttaccgcttataaatccggtcatgcactgaataacaaactgctgcaggctgtc

SEQ ID NO: 561354 - DNA, 75 bp, synthetic construct
  source 1..75: mol_type = other DNA
tgctggtatcgacgagctgaactgcgccaagaaatttgttcgcatcaaagagactgttcgtgtcgaagatggcga

SEQ ID NO: 561355 - DNA, 75 bp, synthetic construct
  source 1..75: mol_type = other DNA
gtttatggcctcaaccgtaagatgcccttctctactgacgactcggtagaccacccggtgtcactgtacgcggcg

SEQ ID NO: 561356 - DNA, 75 bp, synthetic construct
  source 1..75: mol_type = other DNA
tggcgttgttcaagttcacgaaagcgatgctagaaggaaaaagtatcaacgtttacaactacagaaaaatgaagc

SEQ ID NO: 561357 - DNA, 75 bp, synthetic construct
  source 1..75: mol_type = other DNA
ggtgggtttcaagccgcagacgtcagtgaaggaaggcgtgaagaactttgtcgagtggtataaggattactatca

SEQ ID NO: 561358 - DNA, 75 bp, synthetic construct
  source 1..75: mol_type = other DNA
tcgctcatattcacagaccataccgcgttgggtgatctgactctggacgagatgaaagaagcctccattcagtgg

SEQ ID NO: 561359 - DNA, 75 bp, synthetic construct
  source 1..75: mol_type = other DNA
agccaatgattttgtccagatgcaggctttatcaggagaagcgcacaagcaggctgtgacaactatcgttgatgg

SEQ ID NO: 561360 - DNA, 75 bp, synthetic construct
  source 1..75: mol_type = other DNA
tagttacaacggtgttgctccatataccagtttgctattacatcgggcatccggcatcaaagacattattcatct

SEQ ID NO: 561361 - DNA, 75 bp, synthetic construct
  source 1..75: mol_type = other DNA
cgcttactacaaaacaaagaaataaaatcaacgacagttatttcttctgaggaagataaagctatttcgttttca

SEQ ID NO: 561362 - DNA, 75 bp, synthetic construct
  source 1..75: mol_type = other DNA
ctttaaaaaataccgcgccaaataatatagccctttcaatatgtgaaggggcaaggaagcatggtgtcaatatag

SEQ ID NO: 561363 - DNA, 75 bp, synthetic construct
  source 1..75: mol_type = other DNA
aatcaactacagttatcgccaaagaagaagataaagcgatctcattttcccagccttatgtttttgctttcacat

SEQ ID NO: 561364 - DNA, 75 bp, synthetic construct
  source 1..75: mol_type = other DNA
aatgctggctgatatggcggcgagctatcccattgtcgaagaaacgtttgctgaagcttctgcggcactgggtta

SEQ ID NO: 561365 - DNA, 75 bp, synthetic construct
  source 1..75: mol_type = other DNA
atgaatgaacatcacactgtggcagcaacagatgattcaggccttcaggtcagcggtgacaatcctgtcacggtg

SEQ ID NO: 561366 - DNA, 75 bp, synthetic construct
  source 1..75: mol_type = other DNA
aagccgaagccggacaggatgctccccggaaaaagaccggtaacaaagcgaaacaggcgaaaaaggcccgcgcat

SEQ ID NO: 561367 - DNA, 75 bp, synthetic construct
  source 1..75: mol_type = other DNA
gtgccagaagaaactggacaccatgcgtaacgcgggcgtgaaggtcaacggcatctgggcgcaggactggtccgg

SEQ ID NO: 561368 - DNA, 75 bp, synthetic construct
  source 1..75: mol_type = other DNA
tgccagtcatgcgcccactgttcctgcattacgaagacgatgcgcatacctacgccctgaaataccagtatctgt

SEQ ID NO: 561369 - DNA, 75 bp, synthetic construct
  source 1..75: mol_type = other DNA
tgcgttcggaaggcacggtctacaccggcttcaccttctttcgcaaagtgtctcaggcgctggctggtttcttcc

SEQ ID NO: 561370 - DNA, 75 bp, synthetic construct
  source 1..75: mol_type = other DNA
atgctaatgcgactatcgaaagtctccgtgctgatgtttctgctgggcgtaagcgcctgcaagtcgtcgccacct

SEQ ID NO: 561371 - DNA, 75 bp, synthetic construct
  source 1..75: mol_type = other DNA
gccagttacctgattacacattctggtaactatcgttataacagcacggaatcagccctccttactcatcgggaa

SEQ ID NO: 561372 - DNA, 75 bp, synthetic construct
  source 1..75: mol_type = other DNA
aaggcagacactatcatggacgcgctgtatgagtacaccgagtcttctttcggttctgaggttactgattacggt

SEQ ID NO: 561373 - DNA, 75 bp, synthetic construct
  source 1..75: mol_type = other DNA
gatgatgcgggagccgtggcgggtgtggttcatgcagagaccggtgcagatttagccggagccgaagccgaagcc

SEQ ID NO: 561374 - DNA, 75 bp, synthetic construct
  source 1..75: mol_type = other DNA
gaagccgaagccgaagccgaagccgaagccgaagccgaagccgaagccggacaggatgctccccggaaaaagacc

SEQ ID NO: 561375 - DNA, 75 bp, synthetic construct
  source 1..75: mol_type = other DNA
agcgtttactggatgcagttgttacctttgagtcgtcacttttgttatgtgtccacggtacagatcaggctcaag

SEQ ID NO: 561376 - DNA, 75 bp, synthetic construct
  source 1..75: mol_type = other DNA
gtcgcgctgaatgcgaagtccggcctgccggttatgcgcccgctgttcctgcattacgaagacgatgcgcacact

SEQ ID NO: 561377 - DNA, 75 bp, synthetic construct
  source 1..75: mol_type = other DNA
cgcctttaattcaggtatcgacttattattactggaaccagggaaaacgcaccgcctgttttttaatattcacgg

SEQ ID NO: 561378 - DNA, 75 bp, synthetic construct
  source 1..75: mol_type = other DNA
aaaggccgtgccagttatctcggcgaacgcagtattggtcaccaggatcctggcgcgacctccgtgatgtttatg

SEQ ID NO: 561379 - DNA, 75 bp, synthetic construct
  source 1..75: mol_type = other DNA
aaaggccgtgccagttacctcggtgaacgcagtatcggtcatcaggatcctggcgcgacctccgtgatgtttatg

SEQ ID NO: 561380 - DNA, 75 bp, synthetic construct
  source 1..75: mol_type = other DNA
tcggggcgactgttggttccgcagtaccggtagtggggacagccgtcggtgctgttgctggtgctgtgattggcg

SEQ ID NO: 561381 - DNA, 75 bp, synthetic construct
  source 1..75: mol_type = other DNA
tccagttatcgtggatgcagcacagtgctttggtatcaggtcactcatcaaccactgtgatctgctggcgttgag

SEQ ID NO: 561382 - DNA, 75 bp, synthetic construct
  source 1..75: mol_type = other DNA
ccggtatcgaccaggcgttatgggatatcaaaggcaaagtgctgaatgcgccggtctggcaactgatgggcggcc

SEQ ID NO: 561383 - DNA, 75 bp, synthetic construct
  source 1..75: mol_type = other DNA
atggatacgccacgcccacaattaccagattttcaatttcatcagtataacgactgttttaccctacgttttcag

SEQ ID NO: 561384 - DNA, 75 bp, synthetic construct
  source 1..75: mol_type = other DNA
tgcgatttcagcgccttcacgccgatgatgcgcacccatgaaggtaaccgtcctggcgacaactggcagtttgac

SEQ ID NO: 561385 - DNA, 75 bp, synthetic construct
  source 1..75: mol_type = other DNA
aaacgcgtaatgtggaactggaagtggaacagcgaaaactacccgcaactggattcacgtatcaagcagtggaac

SEQ ID NO: 561386 - DNA, 75 bp, synthetic construct
  source 1..75: mol_type = other DNA
gagaaactacccgccatcgaggacaaggatattggtttcatcctcaaaaataccggtatgacgttgctttccagc

SEQ ID NO: 561387 - DNA, 75 bp, synthetic construct
  source 1..75: mol_type = other DNA
gatcagacaggccaaagacaacccggaaaaagtagaagagcgctgggagttcctgcttagtgaagaatggatggt

SEQ ID NO: 561388 - DNA, 75 bp, synthetic construct
  source 1..75: mol_type = other DNA
ctatgcccggcgcagcaccggcaataacgcagcccggctggtcaaagggattcccttcaaggaataccactcata

SEQ ID NO: 561389 - DNA, 75 bp, synthetic construct
  source 1..75: mol_type = other DNA
gtgaccgctccgtctggtactgaaatcaccgttgagccgattgagcaagctatcctcgtgtcccaccagaccaag

SEQ ID NO: 561390 - DNA, 75 bp, synthetic construct
  source 1..75: mol_type = other DNA
gaaattgacggggatgagcgcgtggggatccgagctgagctttcacgcccgatttcatacaataacaagaatgta

SEQ ID NO: 561391 - DNA, 75 bp, synthetic construct
  source 1..75: mol_type = other DNA
acgttcgcacaattttcaataaaaaaggcggcaatatcggagcggcaggttctgtcagctatatgtttgacaata

SEQ ID NO: 561392 - DNA, 75 bp, synthetic construct
  source 1..75: mol_type = other DNA
ttccaaagcacgttattgataaagcaattgataaagccaaaggcggcggagatgaaacgttcgtacagggacgtt

SEQ ID NO: 561393 - DNA, 75 bp, synthetic construct
  source 1..75: mol_type = other DNA
caaaccaatatggggtactacagcgaactacttactacgttacaaagaaatggcatcagtattgaaaacatcgtt

SEQ ID NO: 561394 - DNA, 75 bp, synthetic construct
  source 1..75: mol_type = other DNA
cggcattgatgtccgagggaaaaattcagcgattttttgatcgcgacgccatggaaaagggggaacatcggatgg

SEQ ID NO: 561395 - DNA, 75 bp, synthetic construct
  source 1..75: mol_type = other DNA
gtggcgaaagagaaatagaaaaacgcgtccagactgcactggaacaggttggcttgcctttcgacaccgctcgtc

SEQ ID NO: 561396 - DNA, 75 bp, synthetic construct
  source 1..75: mol_type = other DNA
tcattacgggcgcacgcagggtgtcacggagcaggtactgaaggcaaatccggggcttgccgaatacgtcccctt

SEQ ID NO: 561397 - DNA, 75 bp, synthetic construct
  source 1..75: mol_type = other DNA
ttatggtgctattatttctaataataacaaaaataaatctgaattaacacttaaattacaaacgctaaataaaaa

SEQ ID NO: 561398 - DNA, 75 bp, synthetic construct
  source 1..75: mol_type = other DNA
taatggtgttaatgatgataacttacataaagttggtgaaggcacattaaccgttaatggaaaaggggttaataa

SEQ ID NO: 561399 - DNA, 75 bp, synthetic construct
  source 1..75: mol_type = other DNA
ccgcacggcaccgccgtcgagctgcccgacgttcagaccgcgcccgtggctgaaactgtcaatctgtgggagtaa

SEQ ID NO: 561400 - DNA, 75 bp, synthetic construct
  source 1..75: mol_type = other DNA
gaaagcgcaatctgacctcgccaaagccaataacgaagctaatcgtcgccgtcatctctcacataattttatctc

SEQ ID NO: 561401 - DNA, 75 bp, synthetic construct
  source 1..75: mol_type = other DNA
tgggcgttattctgccgcacggcacggcaatagaactgcccgaaactgacagcgccccgaaaaccgagacggtga

SEQ ID NO: 561402 - DNA, 75 bp, synthetic construct
  source 1..75: mol_type = other DNA
ataattggctacttaactaactttcaagaacaaaacaatgaattaaaggtgccgcctttttttgcgattaataca

SEQ ID NO: 561403 - DNA, 75 bp, synthetic construct
  source 1..75: mol_type = other DNA
tgaaattaaatggcggattatatatatcaggctcaccaattgtgagtctgttagtggagattggacctaatggct

SEQ ID NO: 561404 - DNA, 75 bp, synthetic construct
  source 1..75: mol_type = other DNA
ggcgatctgcctggcgatattcgaattatcaaaaacccagacacatgtcccgccgatttattaccctggctggca

SEQ ID NO: 561405 - DNA, 75 bp, synthetic construct
  source 1..75: mol_type = other DNA
aggacggcgcgtatttttacttcgttcacagctacgcgatgccggtcaatgaatacaccatcgcgcaatgccact

SEQ ID NO: 561406 - DNA, 75 bp, synthetic construct
  source 1..75: mol_type = other DNA
caccgacacagacaacattcaggttaacgaaggtctgccaaccaatgctgacccacaggtctatgctctggcact

SEQ ID NO: 561407 - DNA, 75 bp, synthetic construct
  source 1..75: mol_type = other DNA
tcggcattgagccagtacgtatcaccgacaccgacaacattcagattaacgaaggtttgccaactaacgcagacc

SEQ ID NO: 561408 - DNA, 75 bp, synthetic construct
  source 1..75: mol_type = other DNA
tgaaattaaatggcggattatatatatcaggctcgccaatcgtgagtctgttagtggagattggacccaatggct

SEQ ID NO: 561409 - DNA, 75 bp, synthetic construct
  source 1..75: mol_type = other DNA
cctgtgacatcattgataaaacaggtttagaaatcagcgagggcagtcgactagacatcattggaaaggccgtca

SEQ ID NO: 561410 - DNA, 75 bp, synthetic construct
  source 1..75: mol_type = other DNA
cctgcgacatcattgataaaactggtttagaaatcagcgagagcaatcggctagacatcattgaaaaagccgtaa

SEQ ID NO: 561411 - DNA, 75 bp, synthetic construct
  source 1..75: mol_type = other DNA
tatcattagataatatagttgtaacattcttcgttcttggtctaatctctggttgcaatattaagttaaataatg

SEQ ID NO: 561412 - DNA, 75 bp, synthetic construct
  source 1..75: mol_type = other DNA
aacactcatcgaggagatccgccatctgaccaatccgcaaatcgtgggctgggatatttgtttttcccgactatg

SEQ ID NO: 561413 - DNA, 75 bp, synthetic construct
  source 1..75: mol_type = other DNA
atgaaaaaggcggaactctagttgcgcgatcatcaaacttatacgaagggaagtttaagtatggtgaaaaggaaa

SEQ ID NO: 561414 - DNA, 75 bp, synthetic construct
  source 1..75: mol_type = other DNA
gtaagttatatgtatcgttttttggtagtgcatcagatggtgtaaggattggtcagtgggacctttcaaaagcac

SEQ ID NO: 561415 - DNA, 75 bp, synthetic construct
  source 1..75: mol_type = other DNA
ctggcgcataaagagatcgaccaaatcctgaaacgcgcgcaggtacgcccgctggcggttggcgtacataacgat

SEQ ID NO: 561416 - DNA, 75 bp, synthetic construct
  source 1..75: mol_type = other DNA
gtgtttgcgccgcatcagtacgtaagtttaaccaactggcaaccgagatcgacaacaccgttgtgctgtgtatct

SEQ ID NO: 561417 - DNA, 75 bp, synthetic construct
  source 1..75: mol_type = other DNA
gatgaactggctgatacgcagattcgcttccctgcatttttactgacgactcactatgaagtggtcaacaaaaac

SEQ ID NO: 561418 - DNA, 75 bp, synthetic construct
  source 1..75: mol_type = other DNA
gggaaatatctgaacggctggtttaaccgtctggatctgctcgccagcgcctgccgggaggttctgcatgggtaa

SEQ ID NO: 561419 - DNA, 75 bp, synthetic construct
  source 1..75: mol_type = other DNA
tttgattagtgcaagctggcataatacagaattggttgtgaagcgttacaaagctacatttggaattaaagcaca

SEQ ID NO: 561420 - DNA, 75 bp, synthetic construct
  source 1..75: mol_type = other DNA
caatgccaccgtcggtgcgggcttgccgatcaaccacaccgtgcgcgatctgatcgacagcggcgatactatttt

SEQ ID NO: 561421 - DNA, 75 bp, synthetic construct
  source 1..75: mol_type = other DNA
ccgcgatgggcgcctggattttgcgataggtacgttaagtgcagaaatgaagcttcaggatttgcatgttgagcc

SEQ ID NO: 561422 - DNA, 75 bp, synthetic construct
  source 1..75: mol_type = other DNA
tcaattgttgctctcacgctccgaatccattacccgcgaaatgaaaaatatggttaatgagattagcggtatgtc

SEQ ID NO: 561423 - DNA, 75 bp, synthetic construct
  source 1..75: mol_type = other DNA
agtggtctgatcctgaaactatcgaacgtaatattgatgagctactctattccgctgagtgcgagcaaacaacat

SEQ ID NO: 561424 - DNA, 75 bp, synthetic construct
  source 1..75: mol_type = other DNA
gcggtcagtgccacgtggagtattactttgacggtaaagataaagccgttaaattcccgtgggataacggcatga

SEQ ID NO: 561425 - DNA, 75 bp, synthetic construct
  source 1..75: mol_type = other DNA
agagtgctaaaacggaatggaaaaaatatcgcgccggtgaatcactgatctattcattattttcctggctcccgg

SEQ ID NO: 561426 - DNA, 75 bp, synthetic construct
  source 1..75: mol_type = other DNA
gtatggtcgaaaaattatcgtattaaaaaagcagcatcggttttggtggaattagccaaagagtattcatcttat

SEQ ID NO: 561427 - DNA, 75 bp, synthetic construct
  source 1..75: mol_type = other DNA
cgccctgtttgtctttgattctgccgtccagcatggcgtcaaaaaggctgtccagttgcttcaggaagctgtggg

SEQ ID NO: 561428 - DNA, 75 bp, synthetic construct
  source 1..75: mol_type = other DNA
ttaagcttggggtttacggagcagaaactagggttgtaagtttcacgggatcctctacaagcttacgcgataagc

SEQ ID NO: 561429 - DNA, 75 bp, synthetic construct
  source 1..75: mol_type = other DNA
cccagttacggctatccgtttatgctggcttcacaagttgtttattcgctcaatgcacgcacgggtctttccgtt

SEQ ID NO: 561430 - DNA, 75 bp, synthetic construct
  source 1..75: mol_type = other DNA
acaacgcttcaccacgttgatgagctggatttaaatttcggtaatgactccaacttattgatagtgttttatgtt

SEQ ID NO: 561431 - DNA, 75 bp, synthetic construct
  source 1..75: mol_type = other DNA
acggcgatcgcgcgttcgtcctgcgtatcagcgaacacaaaccggaaacggttaaaccgttggcagatgttcagg

SEQ ID NO: 561432 - DNA, 75 bp, synthetic construct
  source 1..75: mol_type = other DNA
ttcatttttatccagtagtatagaaattgactactttttgacagagtttggttctctgtatgaacaaacaaaaaa

SEQ ID NO: 561433 - DNA, 75 bp, synthetic construct
  source 1..75: mol_type = other DNA
acgagtacgcggatactacagacaagataaattttacccatatattgataccgaagggtacggtacaatcggtta

SEQ ID NO: 561434 - DNA, 75 bp, synthetic construct
  source 1..75: mol_type = other DNA
tgactcctgaacaggcctgggcaccgtggattgctgggctggatatctatcgtcaggattgtgcgcatgtggata

SEQ ID NO: 561435 - DNA, 75 bp, synthetic construct
  source 1..75: mol_type = other DNA
caatatcggttcccgctggctggaactgttcgcccgtgagcagagcacgctctcggcgcgtaccggctttgaatt

SEQ ID NO: 561436 - DNA, 75 bp, synthetic construct
  source 1..75: mol_type = other DNA
cgtgaaggcgctcaaggaacgccaccagcagaacgtaaaagcaggcattgcggcaggacttgatccgctggcgat

SEQ ID NO: 561437 - DNA, 75 bp, synthetic construct
  source 1..75: mol_type = other DNA
aatcaggtcttgaggcgaacctggacattactgaggacggtatttccattcgtcaccgcggaaaaggaaggcagt

SEQ ID NO: 561438 - DNA, 75 bp, synthetic construct
  source 1..75: mol_type = other DNA
catctgtttttagacagtgcacgcattgataacgagcatgccgcacaggagtatacgcgcacagtttacagcgtc

SEQ ID NO: 561439 - DNA, 75 bp, synthetic construct
  source 1..75: mol_type = other DNA
ccgctgacgatgatcttttcaccctgccggaaggcgatatctctatcggcattcctcacgttctggaaatatcac

SEQ ID NO: 561440 - DNA, 75 bp, synthetic construct
  source 1..75: mol_type = other DNA
aggcagcttttcctgaaaaagagttttcatcccctgaaaaggtcattgaactcctgcatggtcagttggcagcaa

SEQ ID NO: 561441 - DNA, 75 bp, synthetic construct
  source 1..75: mol_type = other DNA
ttgacgtgaatattcgtcttgcaggactgaaaggctatgatctgaatgaaggtatacctgatggtcagggacgca

SEQ ID NO: 561442 - DNA, 75 bp, synthetic construct
  source 1..75: mol_type = other DNA
tgcttctactcattttcaaagcacgcagattgtatctggatccagaatatcgtccctggtttgatgaacaacatc

SEQ ID NO: 561443 - DNA, 75 bp, synthetic construct
  source 1..75: mol_type = other DNA
agaagaaaaaaaataaaagattcccttacagcgaagacaggggggcgatccggcctttatggggaaaatgcctga

SEQ ID NO: 561444 - DNA, 75 bp, synthetic construct
  source 1..75: mol_type = other DNA
ccgtgagctggcggcgattgtctggcgactgtactgctcgctttcgcaacttgagcaggcaccaccacagggtac

SEQ ID NO: 561445 - DNA, 75 bp, synthetic construct
  source 1..75: mol_type = other DNA
ttagcgatctgtggcaatttttactgtttctctttccactgctggcgacaatgcagcttcttaaattgcagatgc

SEQ ID NO: 561446 - DNA, 75 bp, synthetic construct
  source 1..75: mol_type = other DNA
acgttatttttgccacctttatctgcaaagtagtcaggaattgcatcgcctggaaagcagctcagatgatcatac

SEQ ID NO: 561447 - DNA, 75 bp, synthetic construct
  source 1..75: mol_type = other DNA
tggtttaccgcgccccaagaaaattaacagccgacattattggttacgcaaagacattgatagattcctattaac

SEQ ID NO: 561448 - DNA, 75 bp, synthetic construct
  source 1..75: mol_type = other DNA
tgggcgctgctgttggtggtctccccggtgccgctattggtgcagtcatcggtggtcttgctggttcgttgtttt

SEQ ID NO: 561449 - DNA, 75 bp, synthetic construct
  source 1..75: mol_type = other DNA
acgggcattggtacgggggcggctattggcgcatccgttggtggtcctgttggtgctgttgctggagcagtaatt

SEQ ID NO: 561450 - DNA, 75 bp, synthetic construct
  source 1..75: mol_type = other DNA
aacagaagaaaaaaaataaaagattcccctacagcaaagatcgacatgcgatccaacctttatggagcaaatgcg

SEQ ID NO: 561451 - DNA, 75 bp, synthetic construct
  source 1..75: mol_type = other DNA
cgctttaatgcagctgtaacaaactgccctgtactttcgccgggcatttttaccgcctcaacattgttcataact

SEQ ID NO: 561452 - DNA, 75 bp, synthetic construct
  source 1..75: mol_type = other DNA
ctgatcggtgttttttgctcatagtactgacctgtaaagcaatgcgccggagtacctcacgccacggcgctgata

SEQ ID NO: 561453 - DNA, 75 bp, synthetic construct
  source 1..75: mol_type = other DNA
gctggcgcaatggcgttatgcgttacgcaataccattgccatgtgcctggcgctgacggttgcctattatttaaa

SEQ ID NO: 561454 - DNA, 75 bp, synthetic construct
  source 1..75: mol_type = other DNA
agaagcggctggaaacatttcaaaaatggtatgaaaaaaataaagttttgttagaaagtcataaacaaaaacgaa

SEQ ID NO: 561455 - DNA, 75 bp, synthetic construct
  source 1..75: mol_type = other DNA
ggttaacgaattctaccagaataagcaaaatattccagaatggctttcctgttttgagaataagaacaaatggcc

SEQ ID NO: 561456 - DNA, 75 bp, synthetic construct
  source 1..75: mol_type = other DNA
gccagaataactatagaaggaatagagacaactttagtttacgtctgcgtaaacatttatcgctgactgaagagg

SEQ ID NO: 561457 - DNA, 75 bp, synthetic construct
  source 1..75: mol_type = other DNA
attatcgcgacttcaacgaataaccaggctgtaacgaacattatcgaagcgttcgggaaagatttttcacagggc

SEQ ID NO: 561458 - DNA, 75 bp, synthetic construct
  source 1..75: mol_type = other DNA
cctcgtttgcattagctaagaaggcattagtgattggcgatacggagcagatcccgccaatatggagtattgctc

SEQ ID NO: 561459 - DNA, 75 bp, synthetic construct
  source 1..75: mol_type = other DNA
tgccagatcaccatacaacgagatgaactactcagattgattcacactaatacccttcaagatgcagtaatttat

SEQ ID NO: 561460 - DNA, 75 bp, synthetic construct
  source 1..75: mol_type = other DNA
cgggcgctaatgcgctaacactggcggcaatcagttgcgtactttattccgccgtcccggcgccatttaaatcgc

SEQ ID NO: 561461 - DNA, 75 bp, synthetic construct
  source 1..75: mol_type = other DNA
cagactcccacgaacagccggcctggcacgtcataccgataacgccgaagctatgtggagtggactgcgcacatt

SEQ ID NO: 561462 - DNA, 75 bp, synthetic construct
  source 1..75: mol_type = other DNA
atgaacgcatcgttatggtccttgcgcaatttgccctggtgcagggcctcgctggctcaatggcgttatgcgtta

SEQ ID NO: 561463 - DNA, 75 bp, synthetic construct
  source 1..75: mol_type = other DNA
ggggcgcacgattgtgatggtgacgcacaaccctgcgcttgggcagtttgccgaccgtattctgcggctgcaaca

SEQ ID NO: 561464 - DNA, 75 bp, synthetic construct
  source 1..75: mol_type = other DNA
aaaacatgcatgcccgattactggaacatgccagtttgctctggcaacctgaaacaaccgatgccattcgtacag

SEQ ID NO: 561465 - DNA, 75 bp, synthetic construct
  source 1..75: mol_type = other DNA
taatgaatgagcgtggcgttcagcaaaaatcactggcggccacacttgaagaattacagcggatatgcgacagcc

SEQ ID NO: 561466 - DNA, 75 bp, synthetic construct
  source 1..75: mol_type = other DNA
gttctcgtttaacaacccggcgggtgcctgcccgacctgtgacggcctcggcgtacagcaatatttcgatcctga

SEQ ID NO: 561467 - DNA, 75 bp, synthetic construct
  source 1..75: mol_type = other DNA
cttatacccataaccaacgccagacatcgcgcattatgctactggtgctgatcgcagccgtgccaggaatcgctg

SEQ ID NO: 561468 - DNA, 75 bp, synthetic construct
  source 1..75: mol_type = other DNA
acgccaccagcgaaacagaatatgccggggctttcgttcctcactcactggctcttatgcaatttagtgctgata

SEQ ID NO: 561469 - DNA, 75 bp, synthetic construct
  source 1..75: mol_type = other DNA
gagttccttgaaggtcgttggttaagtattcatgtgcgtgatattgacctgcaatggtacacctcggtggtgaac

SEQ ID NO: 561470 - DNA, 75 bp, synthetic construct
  source 1..75: mol_type = other DNA
gaagacatggagctttaccagtcgtttactgatgaattctttggtcccgcatttgcggtgctgggaggtgtctga

SEQ ID NO: 561471 - DNA, 75 bp, synthetic construct
  source 1..75: mol_type = other DNA
gaagatatggagctttaccagtcgtttactgatgaattctttggtcccgcatttgcggtgttgggaggtgtctga

SEQ ID NO: 561472 - DNA, 75 bp, synthetic construct
  source 1..75: mol_type = other DNA
ttatcgtgcgcttaaggctatcgcagaccaggtgagcacaaaggtgatcgtcgttcgcgtggctgaacacaaaga

SEQ ID NO: 561473 - DNA, 75 bp, synthetic construct
  source 1..75: mol_type = other DNA
agagggcgaaaaaacacaggaccagcttgtcatcggtggctcacaggatgacggcagctatacgggcatgtatgc

SEQ ID NO: 561474 - DNA, 75 bp, synthetic construct
  source 1..75: mol_type = other DNA
gcccgttccgccgcttgaggatatggaactttaccagacgtttactgatgaattctttggtcctgcatttgcgac

SEQ ID NO: 561475 - DNA, 75 bp, synthetic construct
  source 1..75: mol_type = other DNA
tcgggcaaaacttaatgaactggtaactgccggaaaactgattggggcggaatgctggtatgacgtgattgataa

SEQ ID NO: 561476 - DNA, 75 bp, synthetic construct
  source 1..75: mol_type = other DNA
caacgggttccgcttctggggcaaccgcacaccggaaacgaacgcctacatttttgaggtgtatacccgaaccgc

SEQ ID NO: 561477 - DNA, 75 bp, synthetic construct
  source 1..75: mol_type = other DNA
cgccagaaattcaacgaacgtgaagtgatgctcttatggccggacttcatcgcctacaacccgaaaagtggcaaa

SEQ ID NO: 561478 - DNA, 75 bp, synthetic construct
  source 1..75: mol_type = other DNA
catttgcggtgctgggaggtgcctgatggctgtgccaaaacatcttcgcttttttacgctgtttgtggatggtga

SEQ ID NO: 561479 - DNA, 75 bp, synthetic construct
  source 1..75: mol_type = other DNA
aaactggattcactggttactgccgggaaactgattggcgcgtcgtgctggtatgacgtggtggataacagcacc

SEQ ID NO: 561480 - DNA, 75 bp, synthetic construct
  source 1..75: mol_type = other DNA
tggtctataaaacgggtatgttaaatcacggacaggctcgtgtgtttgtgatggccacaaaaattcgtacacagc

SEQ ID NO: 561481 - DNA, 75 bp, synthetic construct
  source 1..75: mol_type = other DNA
ttgaaaaagaaatgatggagcatgaacaattacatgatgatgaaataaacgaaaatattaataaggaatcaacaa

SEQ ID NO: 561482 - DNA, 75 bp, synthetic construct
  source 1..75: mol_type = other DNA
ctaaatattcttgatattgccgctaactatgccgatttcgtgacagaagctgttttaagaaaaacaacggacggt

SEQ ID NO: 561483 - DNA, 75 bp, synthetic construct
  source 1..75: mol_type = other DNA
gcctgctcggagacgacctaaagcagacgctcaaacctagtgctcgcctgaagatcgctgcctcctgcttttcga

SEQ ID NO: 561484 - DNA, 75 bp, synthetic construct
  source 1..75: mol_type = other DNA
gtttattttttacgcctgcctctatttttgctctttctttatgacttatgctctgtgttatattccggttgtgtc

SEQ ID NO: 561485 - DNA, 75 bp, synthetic construct
  source 1..75: mol_type = other DNA
atttgcggttttcactttcgtcccgaaaatccacaggtaccatttggtccgtgctttcaaagcagccaaggtaga

SEQ ID NO: 561486 - DNA, 75 bp, synthetic construct
  source 1..75: mol_type = other DNA
cgtatctgatgatgcgagtgatgcgctttcgtcaatatccgaactgataagagcggcctttttcttacttggcac

SEQ ID NO: 561487 - DNA, 75 bp, synthetic construct
  source 1..75: mol_type = other DNA
acgccaccagcgaaacagaatatgccggtgctttcgttcctcactcactggctgtcatgcaatttagtgctgata

SEQ ID NO: 561488 - DNA, 75 bp, synthetic construct
  source 1..75: mol_type = other DNA
gcctacgcacagcttaccgctgatatggcactgaatgaggctaaagccatcctgattgctgattgtgaaaatggg

SEQ ID NO: 561489 - DNA, 75 bp, synthetic construct
  source 1..75: mol_type = other DNA
ggatgttatcagtgccatcagggcaaaactggattcactggtgactgccgggaaactgattggggcgtcgtgctg

SEQ ID NO: 561490 - DNA, 75 bp, synthetic construct
  source 1..75: mol_type = other DNA
aacgaacgttccccgcgcctgcttatgcgtgcggccttcgtgcgtacattgaccattgagcaggggtggcacaaa

SEQ ID NO: 561491 - DNA, 75 bp, synthetic construct
  source 1..75: mol_type = other DNA
gtattcgctacaaatatacgcctgttcccccgctggaagacatggagctttaccagacgtttactgatgaattct

SEQ ID NO: 561492 - DNA, 75 bp, synthetic construct
  source 1..75: mol_type = other DNA
gatgccattgcattccgcaaaaagatttccgggcgtgaaatcatgctcctgtggcctgatttcacggcgttcaac

SEQ ID NO: 561493 - DNA, 75 bp, synthetic construct
  source 1..75: mol_type = other DNA
aacgctatctacaacgacaagcaaacggaacattacgttaatatcccgcatcatgggcatattgataatattccg

SEQ ID NO: 561494 - DNA, 75 bp, synthetic construct
  source 1..75: mol_type = other DNA
tgctgtactacttcaagcaaaaagagatgttggcgattgaaatgggcgaatactacaagggcggtgcgcgtgcac

SEQ ID NO: 561495 - DNA, 75 bp, synthetic construct
  source 1..75: mol_type = other DNA
gtgggcatgaaaatgtttatcaacgatgtgctggcgctgaaagaagatgatgatctgtctatcgatctgttcggc

SEQ ID NO: 561496 - DNA, 75 bp, synthetic construct
  source 1..75: mol_type = other DNA
actttttgagctgtataaaaacccggagttgaaagttaagccgaaagaactggaacagcgcggtggggcttatta

SEQ ID NO: 561497 - DNA, 75 bp, synthetic construct
  source 1..75: mol_type = other DNA
cgtgagatgattctggcgcatgagaaatggctgccaaattttgccgactgcatagcagaactcaaaaaagcacat

SEQ ID NO: 561498 - DNA, 75 bp, synthetic construct
  source 1..75: mol_type = other DNA
ggccagcaacgcagcacttagcggggaatttaacgatgtgttactggcgctaaaccttagcccgttggtgcattc

SEQ ID NO: 561499 - DNA, 75 bp, synthetic construct
  source 1..75: mol_type = other DNA
tgcgcacaggggcaattgcaggactcattttctggccgatgctgtggggggcgttgaaaactgaagcgttttact

SEQ ID NO: 561500 - DNA, 75 bp, synthetic construct
  source 1..75: mol_type = other DNA
caacgactaatccatggctgtctttagggttattgggatcaattattttcttccattcagcgggtcctggtgggc

SEQ ID NO: 561501 - DNA, 75 bp, synthetic construct
  source 1..75: mol_type = other DNA
acacataaatgctcaaaaattccgttcgttgatatcctcaaattttctgtgtggtcctgtatgcgaatcggagaa

SEQ ID NO: 561502 - DNA, 75 bp, synthetic construct
  source 1..75: mol_type = other DNA
gctattgaaatgggcgaatactacaaaggcggcgcacgagcgcaggtagtacagaaagtcgagaaacaacttttt

SEQ ID NO: 561503 - DNA, 75 bp, synthetic construct
  source 1..75: mol_type = other DNA
atcgcgccagcaagagaggaaatttcacgttcgggactggcgttgaatcttattcccggcgtggaaatttccacg

SEQ ID NO: 561504 - DNA, 75 bp, synthetic construct
  source 1..75: mol_type = other DNA
cagttgctaaaatcgacttctgtattaaacgtatccggatgcgtgaacaaatgagcaggataatccggaagactg

SEQ ID NO: 561505 - DNA, 75 bp, synthetic construct
  source 1..75: mol_type = other DNA
cgcggtgctttccagtacctgattaactcatggaccacactggttgagttgatgtctatctacaaacgtctgcgc

SEQ ID NO: 561506 - DNA, 75 bp, synthetic construct
  source 1..75: mol_type = other DNA
gcacgacgcattgctaccacggttcaccgatgatataagccgtcagtcatgggatggtgaacgggtattctgtaa

SEQ ID NO: 561507 - DNA, 75 bp, synthetic construct
  source 1..75: mol_type = other DNA
ggaaacatcatgggggttctgattactggagaactccatttttgttatttaagaacttacaccgtgaatttattt

SEQ ID NO: 561508 - DNA, 75 bp, synthetic construct
  source 1..75: mol_type = other DNA
caggagacatccgctaccccggcgataacagcagacaaaaagactctggtcgctgaagcccgccgtaatctggcc

SEQ ID NO: 561509 - DNA, 75 bp, synthetic construct
  source 1..75: mol_type = other DNA
cgaagcgaaggaggcggaagaccagaagacacaggaccagcttgttattggtactgtggagtctgatggcagtta

SEQ ID NO: 561510 - DNA, 75 bp, synthetic construct
  source 1..75: mol_type = other DNA
ccgatggagtgtatggaactctatcagacgtttaccgacgagttctttggctctgcttttgcatctcttggaggt

SEQ ID NO: 561511 - DNA, 75 bp, synthetic construct
  source 1..75: mol_type = other DNA
gcacttgaaggcggtgtaaaaccgtggtcctgcccgtggcaacgcgtatccggcatatctggtctgccatcgaat

SEQ ID NO: 561512 - DNA, 75 bp, synthetic construct
  source 1..75: mol_type = other DNA
gcatggaagacgaacagttttccgtcaagcattacgaagcacgagtgaaagacggcgtggtgcagctgcgcggtt

SEQ ID NO: 561513 - DNA, 75 bp, synthetic construct
  source 1..75: mol_type = other DNA
tctcgtttcaatagatcttgttgcattggttacggcatttattgttggaaaacattattctaagcaggaacctga

SEQ ID NO: 561514 - DNA, 75 bp, synthetic construct
  source 1..75: mol_type = other DNA
gcctgggcttgcaaatcgacttgttgagttgaccgaaaaagagcaggctcatcgccataaaacagtggctgatag

SEQ ID NO: 561515 - DNA, 75 bp, synthetic construct
  source 1..75: mol_type = other DNA
gcacctgccgtccggcatcctgaaagacgccacttccgttcgcctcttcctgaaagccacagataccgaggaata

SEQ ID NO: 561516 - DNA, 75 bp, synthetic construct
  source 1..75: mol_type = other DNA
tgctccgctgctgtgtgaaccggacgcacaaaaacgggcgaccggatggcatcagctgtattccgctgacagtgg

SEQ ID NO: 561517 - DNA, 75 bp, synthetic construct
  source 1..75: mol_type = other DNA
gcatggaagacgaacagttttccgtcaagcattacgaagcacgagtgaaagacggcgtggtacagctacgcggtt

SEQ ID NO: 561518 - DNA, 75 bp, synthetic construct
  source 1..75: mol_type = other DNA
cgatcattcctgcggttgcagtgccggtttcgctgattggcacctttgcagcgatgtatctttgcggtttcagtc

SEQ ID NO: 561519 - DNA, 75 bp, synthetic construct
  source 1..75: mol_type = other DNA
tgcgcggcagttttgccggaacggcgcaggtgttccaggagacgatgaactcacaggtgatcctgattatcgccg

SEQ ID NO: 561520 - DNA, 75 bp, synthetic construct
  source 1..75: mol_type = other DNA
aactaaaaaccgcagccgaataccagccgctgattgttcactacaacaacggcggcgcggttcgtgtgggtgatg

SEQ ID NO: 561521 - DNA, 75 bp, synthetic construct
  source 1..75: mol_type = other DNA
catggctgcgtggcgaaccaacgcctgcttcgccgtttacgcctttcgctgatgtagtggaagagtaccagcaat

SEQ ID NO: 561522 - DNA, 75 bp, synthetic construct
  source 1..75: mol_type = other DNA
gcctcgaccatttcgttcaacctgccgaccgggaaatcgctctcggacgccagtgcggcgatcgatcgcgcaatg

SEQ ID NO: 561523 - DNA, 75 bp, synthetic construct
  source 1..75: mol_type = other DNA
cgtcaggctaacgccagctaccagtacacattattgtccgacgatctggcggcactgcgtgaatgggagccgaaa

SEQ ID NO: 561524 - DNA, 75 bp, synthetic construct
  source 1..75: mol_type = other DNA
gattttgcgcttgaagcccaacggcacggtaacctgacgccgcaggaagctattttccaggcctgtctgctgcgt

SEQ ID NO: 561525 - DNA, 75 bp, synthetic construct
  source 1..75: mol_type = other DNA
tgatgtgtggctggatgctgaaagccagcaagccgcgtgagcaaaagcgactgcgtggttttggtcgcatgttgg

SEQ ID NO: 561526 - DNA, 75 bp, synthetic construct
  source 1..75: mol_type = other DNA
caaggtactcgcgaagtcggttttacggtgctgtcgatgagtctgtcactggtggcggtgttcctgccgctgctg

SEQ ID NO: 561527 - DNA, 75 bp, synthetic construct
  source 1..75: mol_type = other DNA
agcgggatgatgtttatcaccctcaagccacgcgacgaacgcagcgaaacggcgcagcaaattatcgaccgtctg

SEQ ID NO: 561528 - DNA, 75 bp, synthetic construct
  source 1..75: mol_type = other DNA
cgcggtaagttgcaggattttatgaaaattatccgtgacgatccggcagtggataatgtcaccggctttaccggc

SEQ ID NO: 561529 - DNA, 75 bp, synthetic construct
  source 1..75: mol_type = other DNA
tggcacggctgggaatcgacgtacaggccgccaacagtctgttaaataacgccttcggtcagcggcaaatctcga

SEQ ID NO: 561530 - DNA, 75 bp, synthetic construct
  source 1..75: mol_type = other DNA
tacgatgagccaacgttaatccagcatgctgaacgcctgaaaatgctgatcgcccaattcgccgcggatccggcg

SEQ ID NO: 561531 - DNA, 75 bp, synthetic construct
  source 1..75: mol_type = other DNA
gaagtggtggaagagtaccagcagtaccgcgaaagcgacgcctggcagcgtgatgcagcattctgggcagaacag

SEQ ID NO: 561532 - DNA, 75 bp, synthetic construct
  source 1..75: mol_type = other DNA
tcctcacggcactgcgctggcattgatgcaggctgatttacaccaaaacctgcgcgtcgatagcggtaaaccgct

SEQ ID NO: 561533 - DNA, 75 bp, synthetic construct
  source 1..75: mol_type = other DNA
cgctggtggcagaacaagcggcaaaaacaccggatgctccggcgctggcagatgcgcgttaccagttcagctatc

SEQ ID NO: 561534 - DNA, 75 bp, synthetic construct
  source 1..75: mol_type = other DNA
agctaaaaatccgtggtcagcgtattgaactgggtgaaatcgatcgcgtgatgcaggcgctgccagatgtcgagc

SEQ ID NO: 561535 - DNA, 75 bp, synthetic construct
  source 1..75: mol_type = other DNA
ggccgaaaggggtgatggtcgggcagaaggctatcgttaatcgcctgttatggatgcaaaaccattacccgctga

SEQ ID NO: 561536 - DNA, 75 bp, synthetic construct
  source 1..75: mol_type = other DNA
aactacgctgatgctgtgcgcctgctgacgactgctcatagcgtaccgtttgatggtaaagcgacgctgtttgtt

SEQ ID NO: 561537 - DNA, 75 bp, synthetic construct
  source 1..75: mol_type = other DNA
ggcttagcacaagcggatacgttgcggatgcgttttacggaagataacggtgaagtctggcaatgggtcgatgat

SEQ ID NO: 561538 - DNA, 75 bp, synthetic construct
  source 1..75: mol_type = other DNA
tggtgccggtggttctgctgcaacttccacagttacctcttagcgccaacggcaagctggatcgcaaagccttac

SEQ ID NO: 561539 - DNA, 75 bp, synthetic construct
  source 1..75: mol_type = other DNA
agcgcatcttgcaacgttgctgcaacaacagccacacggcccttattatctgctgggatattcgttgggtggctc

SEQ ID NO: 561540 - DNA, 75 bp, synthetic construct
  source 1..75: mol_type = other DNA
tacgatgccgaacaaattgtccgtgacagcgggcgagcggcaggtgatgaaccgctgtttggtccggtactcaat

SEQ ID NO: 561541 - DNA, 75 bp, synthetic construct
  source 1..75: mol_type = other DNA
aattgcgcgacgttgaaacaggttttctgtagtggtgaggccttaccggctgatttatgccgcgaatggcaacag

SEQ ID NO: 561542 - DNA, 75 bp, synthetic construct
  source 1..75: mol_type = other DNA
ccagttcgccgcggatccggcgctgttgtgcggcgatgtcgatattatgctgccaggtgagtatgcgcagctggc

SEQ ID NO: 561543 - DNA, 75 bp, synthetic construct
  source 1..75: mol_type = other DNA
cgtttcgctgattggtacatttgcgacgatgtacctgtgcggtttcagtctcaataacctgtcgttaatggcgct

SEQ ID NO: 561544 - DNA, 75 bp, synthetic construct
  source 1..75: mol_type = other DNA
atgtcactgtcaattgttcatactcgtgccgccctgggagtcaatgctcccccgatcactgttgaggtacatatc

SEQ ID NO: 561545 - DNA, 75 bp, synthetic construct
  source 1..75: mol_type = other DNA
caatctgacgtcattactcgccagcatttacaggaagcggtgagctatcgggctatcgaccgcctgctcatccat

SEQ ID NO: 561546 - DNA, 75 bp, synthetic construct
  source 1..75: mol_type = other DNA
actggagagtgctgcgatattaagtctggtaaatgctgaatcagtacaaaacaatggcggcagcgcccgttccgc

SEQ ID NO: 561547 - DNA, 75 bp, synthetic construct
  source 1..75: mol_type = other DNA
tctcaaccgactctccggtccctttcttgaccgctttgacctctcactggagatcccgctaccgccacccggtat

SEQ ID NO: 561548 - DNA, 75 bp, synthetic construct
  source 1..75: mol_type = other DNA
gaaagcagcgccaccgttaaacaacgcgtaatagccgccagagagcgccaatttaagcggcagaataaactgaat

SEQ ID NO: 561549 - DNA, 75 bp, synthetic construct
  source 1..75: mol_type = other DNA
gtgcattacaacatgatctcagtgatgttgtcggtcaggagcaaggaaagcgaggactggaaattactgctgctg

SEQ ID NO: 561550 - DNA, 75 bp, synthetic construct
  source 1..75: mol_type = other DNA
tgatgtctgagaacgatcttactttgcttatcttttatatctgcctgtattattgctcttttttcataacttacg

SEQ ID NO: 561551 - DNA, 75 bp, synthetic construct
  source 1..75: mol_type = other DNA
aacagttaaacaacatgctttcttggattgcttttgcaggaacaattcctttctttattattcttataatttaca

SEQ ID NO: 561552 - DNA, 75 bp, synthetic construct
  source 1..75: mol_type = other DNA
attcaagtccaatcgcagcaaggctccgatgcagcagtttgcttgtgttcaggccgccgccacagagactgccta

SEQ ID NO: 561553 - DNA, 75 bp, synthetic construct
  source 1..75: mol_type = other DNA
cgaagaatcaacctatggggcggtatgtttaagtatgccggtattcaatatgtataacagagttaactatgcaat

SEQ ID NO: 561554 - DNA, 75 bp, synthetic construct
  source 1..75: mol_type = other DNA
tggcgcgaccacggctggtggaaacaacattatgaatggcgaggcaatcgctggcacccacatggaccgccgcca

SEQ ID NO: 561555 - DNA, 75 bp, synthetic construct
  source 1..75: mol_type = other DNA
atgatgccgcgcgtatggcgggcgatgccgtggcccagttccgatttacagatttcctggtcatcggaatatatc

SEQ ID NO: 561556 - DNA, 75 bp, synthetic construct
  source 1..75: mol_type = other DNA
ggacgcacagtggctggaagaaacgctgatccatctgggattatctattcgtgcctggcagcggttactgaaagt

SEQ ID NO: 561557 - DNA, 75 bp, synthetic construct
  source 1..75: mol_type = other DNA
ttgcttatacgctggataaaatgaatgcccgccttgcggccagtccccggcgggatgatggcaggatacgtaacg

SEQ ID NO: 561558 - DNA, 75 bp, synthetic construct
  source 1..75: mol_type = other DNA
cggaaaagcagggttcggtttccgaaccgggtaaaaaaatggggcaagaaagacagagttcggattccgaaccat

SEQ ID NO: 561559 - DNA, 75 bp, synthetic construct
  source 1..75: mol_type = other DNA
gctggaagcccggataggaagtgcccagacaccggggcagatggctgcccgtcagcgggtgacggaggacagaat

SEQ ID NO: 561560 - DNA, 75 bp, synthetic construct
  source 1..75: mol_type = other DNA
gccgctacccggcgaaactcgcctgtggggcgataccgatgtgattggtctgtttgacgccgaaaccgatatgaa

SEQ ID NO: 561561 - DNA, 75 bp, synthetic construct
  source 1..75: mol_type = other DNA
tgaagtagtggcgattctggagaatcatccgctgctcggcgcaggcttcgcgcacaaaatcgaacaactggaaga

SEQ ID NO: 561562 - DNA, 75 bp, synthetic construct
  source 1..75: mol_type = other DNA
gatataaaaaacgaccccaccatgcgccattatcgcagccatcttgcgctgatcgaatcgcgtctggacagccca

SEQ ID NO: 561563 - DNA, 75 bp, synthetic construct
  source 1..75: mol_type = other DNA
caaacggtccttcagggggacaccccagaccgggctgatgtggtggagcgtcacatcggccagtttaacagcccg

SEQ ID NO: 561564 - DNA, 75 bp, synthetic construct
  source 1..75: mol_type = other DNA
aaaaaataagagaattagcacagaaagctcaagagatacttgcagccattgatggtggtgcaagtgaagaagatg

SEQ ID NO: 561565 - DNA, 75 bp, synthetic construct
  source 1..75: mol_type = other DNA
atggcaaaaatccagtatctgcagggcacgcatgatgcccgggccggggatatccgtgatgtggcacagccgtgt

SEQ ID NO: 561566 - DNA, 75 bp, synthetic construct
  source 1..75: mol_type = other DNA
tcgccagaaaaagcgagaaatattgtcgcagaattccgtgccagcatacagcgtgctaatgctgcccgtctggct

SEQ ID NO: 561567 - DNA, 75 bp, synthetic construct
  source 1..75: mol_type = other DNA
agtccggacatggatgtgatgaacgtgaacgtcgtcgcagggaagtggcttcgccagaaaaagcgagaaatattg

SEQ ID NO: 561568 - DNA, 75 bp, synthetic construct
  source 1..75: mol_type = other DNA
ggccagcatggcagagaaagccagtcgtgaggagggcaggatacgcagtgggctgctgtttaccggtaatgttca

SEQ ID NO: 561569 - DNA, 75 bp, synthetic construct
  source 1..75: mol_type = other DNA
ttaatgggattgttgatcgtgctgtgctggctaccgctggcgacgcggatgtcgcatcaggggcagcccgtttaa

SEQ ID NO: 561570 - DNA, 75 bp, synthetic construct
  source 1..75: mol_type = other DNA
accttcagtatggcccgctggatgccggaaacgcgtccggtcgacgcaccgcgcacgcgcctgcttaccagttat

SEQ ID NO: 561571 - DNA, 75 bp, synthetic construct
  source 1..75: mol_type = other DNA
gcgtcgctctccgcgatgctgccgcaaaccggccagggaagcctggggctattgatgaccttaatgggaatgtta

SEQ ID NO: 561572 - DNA, 75 bp, synthetic construct
  source 1..75: mol_type = other DNA
tcttttgtcgccgcgatggttgctgcttttatcgcctcccgacaggggtgtgaattacaagatgacgaagtatat

SEQ ID NO: 561573 - DNA, 75 bp, synthetic construct
  source 1..75: mol_type = other DNA
ctagtaccgactatgacgtttacccgttgttcatgatcaagtgcgacgggctgaacgatgaagaaattcaagcgg

SEQ ID NO: 561574 - DNA, 75 bp, synthetic construct
  source 1..75: mol_type = other DNA
gcgaaaagtataaagtgtcagcctgtgtaaatcctctcgccaccctcccctgcattcagcaaaatcagactccac

SEQ ID NO: 561575 - DNA, 75 bp, synthetic construct
  source 1..75: mol_type = other DNA
aattgtttggtcgtcagcacaatctaatgtttggtggcagttacagcaaacaaaacaatcgttacttcagttcat

SEQ ID NO: 561576 - DNA, 75 bp, synthetic construct
  source 1..75: mol_type = other DNA
cccgtgtcacacttgccgacccactgcatcttatcctcggagcgcgttataccaactggcggattgatacgctga

SEQ ID NO: 561577 - DNA, 75 bp, synthetic construct
  source 1..75: mol_type = other DNA
caatatatttccggatgaaatcggcagtttctacaactttaatggcaatttcccgcaaaccgactggtcaccgca

SEQ ID NO: 561578 - DNA, 75 bp, synthetic construct
  source 1..75: mol_type = other DNA
ggtggcctgccacgctggaataccgatggcagcagcaacagttacgatcgcgcccgcagcaccgcgcctgactgg

SEQ ID NO: 561579 - DNA, 75 bp, synthetic construct
  source 1..75: mol_type = other DNA
aatctgccacgcaccacggttaaaatgttcaccagctatcggtcggttgcctgtcatgccagagttgacggtcgg

SEQ ID NO: 561580 - DNA, 75 bp, synthetic construct
  source 1..75: mol_type = other DNA
gcaccacggttaaaatgttcaccagctatcggttgcctgtcatgccagagttgacggtcggcggtggtgttaact

SEQ ID NO: 561581 - DNA, 75 bp, synthetic construct
  source 1..75: mol_type = other DNA
ggtgtatttgtactgccaacatatccaacgtcgctggccgccatggaatttgatactactggcacaactcgcgtg

SEQ ID NO: 561582 - DNA, 75 bp, synthetic construct
  source 1..75: mol_type = other DNA
ggttctttaccgggagataaatatggtcgggcggtaatcccacttactgcttataacaataatacgatttctgta

SEQ ID NO: 561583 - DNA, 75 bp, synthetic construct
  source 1..75: mol_type = other DNA
tcatccggcaatgtgtgaattcctggcacagcaaactgaacggcgtaatcagcgggcgcagttaatcgcagaaag

SEQ ID NO: 561584 - DNA, 75 bp, synthetic construct
  source 1..75: mol_type = other DNA
agatgcgcgtcggcaccctggcgatcaccgaccatgacaccacagctgcaatcgcgccagcaagagaggaaattt

SEQ ID NO: 561585 - DNA, 75 bp, synthetic construct
  source 1..75: mol_type = other DNA
aatcttgaagaaaaagatgaagggataatttctgtcggtgattgcaaattcgactctcgatcgctgaagaaagat

SEQ ID NO: 561586 - DNA, 75 bp, synthetic construct
  source 1..75: mol_type = other DNA
tatattattgatcttctatttaatggttccaaaatagcgacctctgtagaattagcaattagcaatgatgatgct

SEQ ID NO: 561587 - DNA, 75 bp, synthetic construct
  source 1..75: mol_type = other DNA
agatgttcctggcgttagatttaacggttccatgcctggcgataaaaaaggacgcgcagtgataccgttaacggc

SEQ ID NO: 561588 - DNA, 75 bp, synthetic construct
  source 1..75: mol_type = other DNA
taaggatattgctggtaatattttacaggcatatccgatgctgttggcactggttctttttggcacctgcgctct

SEQ ID NO: 561589 - DNA, 75 bp, synthetic construct
  source 1..75: mol_type = other DNA
atattattattatttgcatgctctctgctgcctgcctgatggtaatactgtgtaagatgtctactgatgacatta

SEQ ID NO: 561590 - DNA, 75 bp, synthetic construct
  source 1..75: mol_type = other DNA
ggtaaatatgtgctgaatcatccattcatgttgccaggattggggggaattattgcaggggtggcattaggtttc

SEQ ID NO: 561591 - DNA, 75 bp, synthetic construct
  source 1..75: mol_type = other DNA
tgagttgcaggatgacgaggtctatcttgagcgtctgcaaaaaggactggtgcaaaaatacgagaataatagcag

SEQ ID NO: 561592 - DNA, 75 bp, synthetic construct
  source 1..75: mol_type = other DNA
tacttggcgcaatattttttggtattcgtcagggaggaatcggcattggtttatgcggcggtcttggccttgcga

SEQ ID NO: 561593 - DNA, 75 bp, synthetic construct
  source 1..75: mol_type = other DNA
atcctgattattatgaccgttgttgtggcggcttcagcattacaggccgcaggcggaatggattatctggtacgc

SEQ ID NO: 561594 - DNA, 75 bp, synthetic construct
  source 1..75: mol_type = other DNA
ggctggaccgctacaacagtgaaaaaacctttttctccggcattgtcgatgctgatttaggcgagcttacctcac

SEQ ID NO: 561595 - DNA, 75 bp, synthetic construct
  source 1..75: mol_type = other DNA
tggcagccggtaagaccttccatatctgggccaagccggtgctggactcctttatttccttgggggcagtggtgc

SEQ ID NO: 561596 - DNA, 75 bp, synthetic construct
  source 1..75: mol_type = other DNA
cttaatggtctgaaaggtattggcggcaacgtatataacggaacattagggataatgtctttaatggcaccgttc

SEQ ID NO: 561597 - DNA, 75 bp, synthetic construct
  source 1..75: mol_type = other DNA
ggttaggtggggcgaatatcatctccgggattattattggcctggtggtggcagaaatgtttacctttattgtcc

SEQ ID NO: 561598 - DNA, 75 bp, synthetic construct
  source 1..75: mol_type = other DNA
gggctttgaccacggctcgtggggcgtactgattaagatgtatccgcaagcggatatcccgatggtgcagttaag

SEQ ID NO: 561599 - DNA, 75 bp, synthetic construct
  source 1..75: mol_type = other DNA
ttctcggcattaattcccggctttattattctttccgtgatggggattattgcctgggcgttgaatacctggggc

SEQ ID NO: 561600 - DNA, 75 bp, synthetic construct
  source 1..75: mol_type = other DNA
tgccaattatcatgaacccggtgatgtttatcccgtttgtactggtacaaccgattctggcggcaatcaccctgg

SEQ ID NO: 561601 - DNA, 75 bp, synthetic construct
  source 1..75: mol_type = other DNA
acgctgccagccggtgcggaaattcgtggtgaaggtgtcagcgtgaccaccacagcagactgcaccgtcggcgat

SEQ ID NO: 561602 - DNA, 75 bp, synthetic construct
  source 1..75: mol_type = other DNA
aagccgtgattaatgcgtcaacgtgggaatggttgcgccccggaaatattgatattcagccttttccgcgtgagg

SEQ ID NO: 561603 - DNA, 75 bp, synthetic construct
  source 1..75: mol_type = other DNA
gcgattaccgcattcgtgcaaatgccgtatctggcgtggctgacgggctttatatgcatcaggggtggatactcc

SEQ ID NO: 561604 - DNA, 75 bp, synthetic construct
  source 1..75: mol_type = other DNA
aacatgcctaagcttgctgaatcattcctcgaacactggcaagaccgctggaatcgcgggcgtgactaccgttcc

SEQ ID NO: 561605 - DNA, 75 bp, synthetic construct
  source 1..75: mol_type = other DNA
cattgcggccatgaactacatagcgaacagcggcatccctttgcgtactgacagtaatttccctatccagcatga

SEQ ID NO: 561606 - DNA, 75 bp, synthetic construct
  source 1..75: mol_type = other DNA
cgcggtgatggcccatatcaatgatgtccgcccggtaacggcgaaggatacaatggtactggcaccaacgaaaaa

SEQ ID NO: 561607 - DNA, 75 bp, synthetic construct
  source 1..75: mol_type = other DNA
tggcatttcgaaatggggcgcaaactcgcggcgctgcgtgatgaagggataatgttggtcgccagtggcaacgtg

SEQ ID NO: 561608 - DNA, 75 bp, synthetic construct
  source 1..75: mol_type = other DNA
gataccaatgtggaaggttctatcgtctacggcgcaccgcgtaatttcagcattaccggcacgtatcaattctga

SEQ ID NO: 561609 - DNA, 75 bp, synthetic construct
  source 1..75: mol_type = other DNA
tcgctgacggtagttatgaattgtttggtcgtcagcacaatctaatgtttggtggcagttacagcaaacaaaaca

SEQ ID NO: 561610 - DNA, 75 bp, synthetic construct
  source 1..75: mol_type = other DNA
accacgattgctgcgctggtggggcagtttattgcgaattccggtgtggacgcgctggataatgctgacgttaac

SEQ ID NO: 561611 - DNA, 75 bp, synthetic construct
  source 1..75: mol_type = other DNA
ggcaccggttggaacagcggcaaacgtaaagttgatgcgctggatttgttcgctgacggtagttatgaattgttt

SEQ ID NO: 561612 - DNA, 75 bp, synthetic construct
  source 1..75: mol_type = other DNA
gcaaaatgatcgtgacagttcaggcaaatatctggctccaatcaccggtaacaactacgagctgggtctgaaatc

SEQ ID NO: 561613 - DNA, 75 bp, synthetic construct
  source 1..75: mol_type = other DNA
ctccagatgatggcgaaaatgattacagcgtaacgtctacctctgcgggtaccaaaatgcagatgactcaacgtg

SEQ ID NO: 561614 - DNA, 75 bp, synthetic construct
  source 1..75: mol_type = other DNA
acgtgccatagccattggtcactggcctgaagtggatgtcactcttgcgcgtaagattgccatggagcataaacg

SEQ ID NO: 561615 - DNA, 75 bp, synthetic construct
  source 1..75: mol_type = other DNA
aagtttttgctacgctacctttatcatggacgaaaacgcgccatcgccattggtcactggcctgaagtggacgtc

SEQ ID NO: 561616 - DNA, 75 bp, synthetic construct
  source 1..75: mol_type = other DNA
atgaccgggagtaatgcgcggtggaaatggacaacagattacaaccgtcgctcgatagcggaaacggcgatgtac

SEQ ID NO: 561617 - DNA, 75 bp, synthetic construct
  source 1..75: mol_type = other DNA
ctggatttaatattacagtgtcgcccggttcaggatatggttcatctgctgatgcgtattacattgcaatgggat

SEQ ID NO: 561618 - DNA, 75 bp, synthetic construct
  source 1..75: mol_type = other DNA
ggcgcctgaatataatctgtcgcgagtgccggaaaagcgaagttatgcagcgtgtactggcattttaccagagta

SEQ ID NO: 561619 - DNA, 75 bp, synthetic construct
  source 1..75: mol_type = other DNA
taatcagcattatctgccatgggcaaaatccgctaaacgcagctgggggaaggatgtacagcgctaccgggatca

SEQ ID NO: 561620 - DNA, 75 bp, synthetic construct
  source 1..75: mol_type = other DNA
gctgctggagcgcggtaaacgcatggacatcaatatcccgttactcgaaaagaatccgggatattacacgcaggc

SEQ ID NO: 561621 - DNA, 75 bp, synthetic construct
  source 1..75: mol_type = other DNA
aaaatgatgggcaaagattatgatgctgtcgtgatcagcgcgggtcactgtggctttggtatgggagcaacacca

SEQ ID NO: 561622 - DNA, 75 bp, synthetic construct
  source 1..75: mol_type = other DNA
aaaggaggaaagccgttagttctattaactattgcagtaacgatcctaatcgccattcaaaatactgtcggcatg

SEQ ID NO: 561623 - DNA, 75 bp, synthetic construct
  source 1..75: mol_type = other DNA
tttcacctgcagggggaggggcgtacacagcttcacaatgtggcccagagtatttatcacacagacagggagttc

SEQ ID NO: 561624 - DNA, 75 bp, synthetic construct
  source 1..75: mol_type = other DNA
ccgcagctgtctggcccgctttctgtttcacctgcagggggaggggcgtacacagcttcacaatgtggcccagag

SEQ ID NO: 561625 - DNA, 75 bp, synthetic construct
  source 1..75: mol_type = other DNA
cggcggcagtgtgtttcccgcgaagacctggcctgctggaaagtggaccgtttcagcacagaagccctgctgaca

SEQ ID NO: 561626 - DNA, 75 bp, synthetic construct
  source 1..75: mol_type = other DNA
gcagttggagaaatatcttgagccgatccccaaagcggactgggagcaggtgaaagcgtattactatgccatgta

SEQ ID NO: 561627 - DNA, 75 bp, synthetic construct
  source 1..75: mol_type = other DNA
agaaatccacgcaagatcaccctgggacatgtgagagccgtggctaagttacctatcagcaagagagaaaagctc

SEQ ID NO: 561628 - DNA, 75 bp, synthetic construct
  source 1..75: mol_type = other DNA
acgggatcttcctcacaaacgcaatgtcgtcagtgcagagaagtattgtctggagatctgggaaaacaaactttt

SEQ ID NO: 561629 - DNA, 75 bp, synthetic construct
  source 1..75: mol_type = other DNA
gacgcgagtgatgccaacattaatgcgaacgcatcagatgaaactgatgatgacagcgcagaacaaccgtcaatc

SEQ ID NO: 561630 - DNA, 75 bp, synthetic construct
  source 1..75: mol_type = other DNA
ataaagcgattaatcatgacttcgccagctggaaaaatatctggagccaatccccaaagcggactgggagcaggt

SEQ ID NO: 561631 - DNA, 75 bp, synthetic construct
  source 1..75: mol_type = other DNA
tgaaagcagtggcgctggcgtttaagaaaatgcatagcattaatcgtcagcatggctgttgttatgttcgccata

SEQ ID NO: 561632 - DNA, 75 bp, synthetic construct
  source 1..75: mol_type = other DNA
ttaaccacgatgtaagttacctttcttccgttctggcgtccgccaaacccgtctacggtatcgactacacgacca

SEQ ID NO: 561633 - DNA, 75 bp, synthetic construct
  source 1..75: mol_type = other DNA
gtgcaaaacttaactcgacagagtgaaagcttaggcgagagtgcgaagcttgagctggatagagcggcaagcgag

SEQ ID NO: 561634 - DNA, 75 bp, synthetic construct
  source 1..75: mol_type = other DNA
ggcattttaccggtacccccggcgggtcatgcattagtaaccccatctgctgctgaagatattctgagcaaactt

SEQ ID NO: 561635 - DNA, 75 bp, synthetic construct
  source 1..75: mol_type = other DNA
acagcgtagtacacagaatacaggtaatggttacccttatctttctcaggtgaataacgttgaccctcagcaaat

SEQ ID NO: 561636 - DNA, 75 bp, synthetic construct
  source 1..75: mol_type = other DNA
gatagtgacatatccgcgatcaaactatctgaactgacagaaaatgacgtaattgaacattgcaggctaagaaac

SEQ ID NO: 561637 - DNA, 75 bp, synthetic construct
  source 1..75: mol_type = other DNA
gatagtgacatctccgcgatcaaactatctgaactgacagaaaatgacgtaattgaacattgcaggcttgaactg

SEQ ID NO: 561638 - DNA, 75 bp, synthetic construct
  source 1..75: mol_type = other DNA
cagccgttgccgctgtttttaacccagcactctgggctgttgttgccattggtgcaacagcaatggcactgcaaa

SEQ ID NO: 561639 - DNA, 75 bp, synthetic construct
  source 1..75: mol_type = other DNA
cgcacaatccgcagacgcctggggtacaccggcgactgcaccgactgacggcggtggtgctgactggctgaccag

SEQ ID NO: 561640 - DNA, 75 bp, synthetic construct
  source 1..75: mol_type = other DNA
cgggcgtggtggtgacgatcatctttgctctgccgccgattatccgtctgacaattctggggattaaccaggttc

SEQ ID NO: 561641 - DNA, 75 bp, synthetic construct
  source 1..75: mol_type = other DNA
gcggtggtgctgactggctgaccagtacgcctgcgccaaacgtcgagcattttaatattctcgatccgttccata

SEQ ID NO: 561642 - DNA, 75 bp, synthetic construct
  source 1..75: mol_type = other DNA
aagcgagttacaaaatcaggcgagctatttacaaagtgtttctcaactgatgtccgatttagcacgggtaaatag

SEQ ID NO: 561643 - DNA, 75 bp, synthetic construct
  source 1..75: mol_type = other DNA
tgattggattaagaaaggttcgataagtaaagataaacttccagaactatggcgtttcttttctgatgtggttgg

SEQ ID NO: 561644 - DNA, 75 bp, synthetic construct
  source 1..75: mol_type = other DNA
cgtgatggccatcatcctgggtctgatttacggtcttggtgaagttttcaacatcttttctggtgttggtaaaaa

SEQ ID NO: 561645 - DNA, 75 bp, synthetic construct
  source 1..75: mol_type = other DNA
gaatggacaaacgcgctggcagaacggttaaaccaacgctttcagacttatgaaattccgggccttgaagcaaaa

SEQ ID NO: 561646 - DNA, 75 bp, synthetic construct
  source 1..75: mol_type = other DNA
ggcacggtgatagttcaccgtatccttgggcgatgtcgtttaatgagtatgtgaaagcgaatctgacgtggcaag

SEQ ID NO: 561647 - DNA, 75 bp, synthetic construct
  source 1..75: mol_type = other DNA
atgccgcaaattccagccaccgatgcttttctggctgaaattcgtgcggaggctcgcaacgaggggattaactat

SEQ ID NO: 561648 - DNA, 75 bp, synthetic construct
  source 1..75: mol_type = other DNA
aagaactaattaaagaaatcagagagcgaattggcagcctggacgtccgagataatattgagcgtcgggcttatg

SEQ ID NO: 561649 - DNA, 75 bp, synthetic construct
  source 1..75: mol_type = other DNA
tgtcgcagcttacgtgtttgaggttcagaccagtgagcgtaacggttccgggctggcactggcggcgaagctgct

SEQ ID NO: 561650 - DNA, 75 bp, synthetic construct
  source 1..75: mol_type = other DNA
tatgtgccgccgcaggagacctttgtttatcggcctcgcttccgttccgtggcgtatctgtctgacattctggcc

SEQ ID NO: 561651 - DNA, 75 bp, synthetic construct
  source 1..75: mol_type = other DNA
ggatatcctcgtcgtgttacaggcgaaaaaagtcaggcgcgccagcgccgcgcacgcaccgagttcccacgagga

SEQ ID NO: 561652 - DNA, 75 bp, synthetic construct
  source 1..75: mol_type = other DNA
ccggcgtttccggaagtattaattcacgtttaagctataacgcatccatcaaccagtcacgcaacattacaggaa

SEQ ID NO: 561653 - DNA, 75 bp, synthetic construct
  source 1..75: mol_type = other DNA
ttagcgtgtttgataaatcacaatatagtttctcgggtataaactatgatcgccgtaacggtaccaatttcaaca

SEQ ID NO: 561654 - DNA, 75 bp, synthetic construct
  source 1..75: mol_type = other DNA
taatttctgtcggtgattgcaaattcgactctcgatcgctgaagaaagatatgggtaaagtacaggagattaagt

SEQ ID NO: 561655 - DNA, 75 bp, synthetic construct
  source 1..75: mol_type = other DNA
ggcatgaaacggcagggcaggcaaaaccagttgcatggcgatatcgctacgtgaaaaaaggcgttacggactctc

SEQ ID NO: 561656 - DNA, 75 bp, synthetic construct
  source 1..75: mol_type = other DNA
gaactgaccgctgaacgcgtggaaaaatgggttaagcaaatttctgaagagctgcatctcgacgaaattatcaac

SEQ ID NO: 561657 - DNA, 75 bp, synthetic construct
  source 1..75: mol_type = other DNA
cggtcactggccaactgccggctaccatttcgaagcatcgaaaggtctggtagatgatgaccacttcgtcggtct

SEQ ID NO: 561658 - DNA, 75 bp, synthetic construct
  source 1..75: mol_type = other DNA
ccagcagatttttcgcttcaaagcgcggtatgattatcctaataaaaaattgcatcaacgcgacgaaaagcatca

SEQ ID NO: 561659 - DNA, 75 bp, synthetic construct
  source 1..75: mol_type = other DNA
tgataagccgattcgcgctaaagcccgtgtacgcgggcgctggtggagtgtcagtgaagatgtgggtgccgttta

SEQ ID NO: 561660 - DNA, 75 bp, synthetic construct
  source 1..75: mol_type = other DNA
gagaaaacacgcatggcgctaaatgcatggcgtgatgcgctgtttgatcagtacaaaatgcaaagtgatgcagat

SEQ ID NO: 561661 - DNA, 75 bp, synthetic construct
  source 1..75: mol_type = other DNA
ggtcgaatcaaccagctgttgcacccggaagacgatgtgaacattggggcgtttgaggctctggcggcgaaagac

SEQ ID NO: 561662 - DNA, 75 bp, synthetic construct
  source 1..75: mol_type = other DNA
gactgggtacatctggtcttcaccctgccggacacgctgtggccggtgttcgaaagcaatcgctggctgctgaat

SEQ ID NO: 561663 - DNA, 75 bp, synthetic construct
  source 1..75: mol_type = other DNA
aacaggtgagcagaaagcgaactttgagcgtcagttggcgaaaatcgaagagaaacgtattttcacgccactaaa

SEQ ID NO: 561664 - DNA, 75 bp, synthetic construct
  source 1..75: mol_type = other DNA
agtggcgctacggagtcagagattgctgaacgtcttgcggcggctaagactgaacgggaagaacaggctgatgct

SEQ ID NO: 561665 - DNA, 75 bp, synthetic construct
  source 1..75: mol_type = other DNA
tgctggtgggctggcgagacgcgtccacaggagagcggaaggccaactttgagcgccagctttcaaaaatcgaag

SEQ ID NO: 561666 - DNA, 75 bp, synthetic construct
  source 1..75: mol_type = other DNA
ggcattctggcgttgtcatgggacaagatatcggcgatcgcgtccgactatccgtcggttatcagtgatgaagta

SEQ ID NO: 561667 - DNA, 75 bp, synthetic construct
  source 1..75: mol_type = other DNA
cattgccgaccaaccaggttcctcgacaatacggaacgccaaagacgcgattaagaagattggcgggcgtttctg

SEQ ID NO: 561668 - DNA, 75 bp, synthetic construct
  source 1..75: mol_type = other DNA
attaaagcggggacgaacaggaacgggcagaaatatgttctggaacagttgcgagactacagaaaacgtgtgcgg

SEQ ID NO: 561669 - DNA, 75 bp, synthetic construct
  source 1..75: mol_type = other DNA
aatggcttcatcccgtttacgcattctgacgcaccgcttggcctggaggggattagtgggaagcgcattcctctg

SEQ ID NO: 561670 - DNA, 75 bp, synthetic construct
  source 1..75: mol_type = other DNA
cggtggttggatcgccgcctgataaaagagttcctggcagagcagggctatgacgagtttaagtatacagaaccc

SEQ ID NO: 561671 - DNA, 75 bp, synthetic construct
  source 1..75: mol_type = other DNA
gcgcatgtggatattatctcttcagaggcgtttgaaaaaattgggccgattattcgcgcaacgctaaacaggtaa

SEQ ID NO: 561672 - DNA, 75 bp, synthetic construct
  source 1..75: mol_type = other DNA
ttacgccgtatcttaagggctggtgtagatgtagtcaccctgtccgatggtgaacattacacaaaggaatctctt

SEQ ID NO: 561673 - DNA, 75 bp, synthetic construct
  source 1..75: mol_type = other DNA
atcaagggaagaaaaaacagtttaagtctcataaagaattaatttcaaagttgatttcaaataggcagccgggac

SEQ ID NO: 561674 - DNA, 75 bp, synthetic construct
  source 1..75: mol_type = other DNA
ttttttaaatatgaacatcctgatctattgaatttgttactagaaaaatacttattggttgacaaaactgaatct

SEQ ID NO: 561675 - DNA, 75 bp, synthetic construct
  source 1..75: mol_type = other DNA
catacaatattgtctaatgcaaaaaatgaacgtgaaagctatatcgattatttacgagaaactggatttgaaaat

SEQ ID NO: 561676 - DNA, 75 bp, synthetic construct
  source 1..75: mol_type = other DNA
tatggctaaaaaacatggcataaaaacatatgtatttcaaaaagcgattgataattacaaaaaatctttaattgc

SEQ ID NO: 561677 - DNA, 75 bp, synthetic construct
  source 1..75: mol_type = other DNA
tgaggaaagtttgagaaagtctgagcgtgtccaagctgcatggaaccgtaaaaaagaactcatctccgaaggtat

SEQ ID NO: 561678 - DNA, 75 bp, synthetic construct
  source 1..75: mol_type = other DNA
aagagaaaagaaaaagggatgaaataaatatggtaaaggatgccataaaactcacctctgatttctacagaacga

SEQ ID NO: 561679 - DNA, 75 bp, synthetic construct
  source 1..75: mol_type = other DNA
aggtattctgggttttgcaattattatggcggctgtgagtgcgcttgttaatgataagtttattgagcaggtcaa

SEQ ID NO: 561680 - DNA, 75 bp, synthetic construct
  source 1..75: mol_type = other DNA
ctaagtataaatctggtgttaataccgtgaaagactcggtacgactggatccgtgggtgtttatgttctctgccg

SEQ ID NO: 561681 - DNA, 75 bp, synthetic construct
  source 1..75: mol_type = other DNA
cagactgaagctccgctgaaacgtgctcttatcccgttcggtggtatcaaaatgatcgaaggttcctgcaaagcg

SEQ ID NO: 561682 - DNA, 75 bp, synthetic construct
  source 1..75: mol_type = other DNA
taccggttcgatactaaatattactcctcgtaggcttcgttatacaatagcaactatgctggctaaggatgggca

SEQ ID NO: 561683 - DNA, 75 bp, synthetic construct
  source 1..75: mol_type = other DNA
ttcggcctgtcagaaagcaggtgcatgtatttttggatatgacaacttatgaacagttaaagaaaagcgcgattt

SEQ ID NO: 561684 - DNA, 75 bp, synthetic construct
  source 1..75: mol_type = other DNA
aagatggtcactgattggcttaaggctcatcctgagtactaccttgaccaagatttatcttttcgtgatttaggc

SEQ ID NO: 561685 - DNA, 75 bp, synthetic construct
  source 1..75: mol_type = other DNA
gagtgtgaatcttttcaaaggtgttatccgttgttctgaatgtggtcatgctctgattatcacaggctttagcga

SEQ ID NO: 561686 - DNA, 75 bp, synthetic construct
  source 1..75: mol_type = other DNA
gtgctaaagggctgtcacgtaagcaaaccgatggtacattacttgccctgctatctcgtcttgaccgatttgata

SEQ ID NO: 561687 - DNA, 75 bp, synthetic construct
  source 1..75: mol_type = other DNA
aggtacgcgcttctcggtggtcacaccacagatttcggcagcgggtgttgagcaccttgataccatccttcagcc

SEQ ID NO: 561688 - DNA, 75 bp, synthetic construct
  source 1..75: mol_type = other DNA
tgcaagaagccaccattactgattcgcgttacctggatggcttaagcattattgttgaagcgccggaagccggtt

SEQ ID NO: 561689 - DNA, 75 bp, synthetic construct
  source 1..75: mol_type = other DNA
tgaccggcaaaaccttcgaactggtgccaggtaatggcgagccacgcaaagagtttgttgttgtgcctggcgaga

SEQ ID NO: 561690 - DNA, 75 bp, synthetic construct
  source 1..75: mol_type = other DNA
aaccgctatcgagaaagggcttgttaaagctggtgatacgctcttgatagaatctcttgaccgtttgtcacgtca

SEQ ID NO: 561691 - DNA, 75 bp, synthetic construct
  source 1..75: mol_type = other DNA
tggcaacgtcgccggggtgtcatttggtatcaaaaataatgaaaaaaatatttattttaaaggctcgcagttggg

SEQ ID NO: 561692 - DNA, 75 bp, synthetic construct
  source 1..75: mol_type = other DNA
aaaccagcccgtttagtgctacagaacgcactacaagcggctttagtcggtaagcctgatttgtccacgttctta

SEQ ID NO: 561693 - DNA, 75 bp, synthetic construct
  source 1..75: mol_type = other DNA
ctacaaaggcgggaaggattgaagcacaactgataatcaaaagtgctgttaaagaggtcgttttaaatactgcta

SEQ ID NO: 561694 - DNA, 75 bp, synthetic construct
  source 1..75: mol_type = other DNA
aaagctcagtacaagaccttttgaagaatcgttctgtaattggttacttcacacctaaaggctgtgaggagatat

SEQ ID NO: 561695 - DNA, 75 bp, synthetic construct
  source 1..75: mol_type = other DNA
aaagacccgttagctctgattaagtccatcttgattatgcaaagagcacatgaagagagtctgcgtaaggctgag

SEQ ID NO: 561696 - DNA, 75 bp, synthetic construct
  source 1..75: mol_type = other DNA
ccatgactatgatgtggcgttcgctgaacacgaccatgaccatgaccactctgagcttgatgggctggatgtgaa

SEQ ID NO: 561697 - DNA, 75 bp, synthetic construct
  source 1..75: mol_type = other DNA
aagctggcgctatctgggcatcggggaggaagaagtgcgaccaacagcacatctgaaacgcttgcagcgacacca

SEQ ID NO: 561698 - DNA, 75 bp, synthetic construct
  source 1..75: mol_type = other DNA
tttctaaaaccagaacggatatttatcagaccgttaccgacagcatcattgcagcgctagaagccggtgtgaaac

SEQ ID NO: 561699 - DNA, 75 bp, synthetic construct
  source 1..75: mol_type = other DNA
gtattgttttattgactgaaaaagatgtctggataagggtgaatgggaaagaacctattagccttaaagctaacc

SEQ ID NO: 561700 - DNA, 75 bp, synthetic construct
  source 1..75: mol_type = other DNA
caccataacgtcccaccggttaatggtgccggagttgatttagtgattgccattaaagttgtccattatgcgaaa

SEQ ID NO: 561701 - DNA, 75 bp, synthetic construct
  source 1..75: mol_type = other DNA
gtcatggaacggctgaagatgctggattccctgcaggcaacacagcttcagtcggccattgttaaagccatgtat

SEQ ID NO: 561702 - DNA, 75 bp, synthetic construct
  source 1..75: mol_type = other DNA
gtggattggtgccggaagaatggccattgacgggctcaaggaagtccaggaatcagtgatgcgcattgaggccgg

SEQ ID NO: 561703 - DNA, 75 bp, synthetic construct
  source 1..75: mol_type = other DNA
cgcggtacgcgatggggtttcctggctgttgaactatattccgccggtcaaacgctacttccttgaaatgcggtt

SEQ ID NO: 561704 - DNA, 75 bp, synthetic construct
  source 1..75: mol_type = other DNA
cgaagcgcagcttagcgagccgcagaatatgcgccagttactgagcaaagtgctgccgaacccggacaacgtcga

SEQ ID NO: 561705 - DNA, 75 bp, synthetic construct
  source 1..75: mol_type = other DNA
aaacgctggcacggcgcggtacgcgatggggtttcctggctgttgaactatattccgccggtcaaacgctacttc

SEQ ID NO: 561706 - DNA, 75 bp, synthetic construct
  source 1..75: mol_type = other DNA
acctgagttataatttacagcaaagttatactgataataatgtgggttatggtgccagcatgaatggacgttatc

SEQ ID NO: 561707 - DNA, 75 bp, synthetic construct
  source 1..75: mol_type = other DNA
taccctttggggcattgctgacattagggaatagtacagcgattgttggtgaagatggagaggtttatattactg

SEQ ID NO: 561708 - DNA, 75 bp, synthetic construct
  source 1..75: mol_type = other DNA
tgcaccgaaatactggaatgatggtgagagtgcggcttggttaagttattatgccagtggttcccggcaaaatag

SEQ ID NO: 561709 - DNA, 75 bp, synthetic construct
  source 1..75: mol_type = other DNA
ggatgaaggggattttaacgctattccggttaagccagtagaaatctatcgtcgcgaggtgaaggatgaagccta

SEQ ID NO: 561710 - DNA, 75 bp, synthetic construct
  source 1..75: mol_type = other DNA
aaaaagtgattattctttttgaagattataacggtgaggcatggtgcaagtatttaagcggtgttgaagcacggt

SEQ ID NO: 561711 - DNA, 75 bp, synthetic construct
  source 1..75: mol_type = other DNA
aacatgggattacctgccgccgccggagaatatgacaggtctttgcctgatggcgaatggtattgccgccggatt

SEQ ID NO: 561712 - DNA, 75 bp, synthetic construct
  source 1..75: mol_type = other DNA
atggccgcattaccatacatgcaactttacatagctgattacctggcggacaccatgcatttgtccgcagaggag

SEQ ID NO: 561713 - DNA, 75 bp, synthetic construct
  source 1..75: mol_type = other DNA
cctttcagaagctgtcagggaaaaagcggcatacgctgctgcaaacttactggtgagcgattatgtcaatgaatg

SEQ ID NO: 561714 - DNA, 75 bp, synthetic construct
  source 1..75: mol_type = other DNA
tgtttgcctcatctatatcaatagcatcaatctcacttatgagatatatctggttgttttctaaatttagtaaat

SEQ ID NO: 561715 - DNA, 75 bp, synthetic construct
  source 1..75: mol_type = other DNA
tccagttagacagccaaacgctgtgtctgcggatcccgcaaatctatcagaatgcgcgggccgcagggagtattt

SEQ ID NO: 561716 - DNA, 75 bp, synthetic construct
  source 1..75: mol_type = other DNA
gtctggttgcatgccgagaaagatcagcgcattgaagtaaataataatgaaagccactgggtggggaataatcga

SEQ ID NO: 561717 - DNA, 75 bp, synthetic construct
  source 1..75: mol_type = other DNA
cgctggtactggctgatgccatcaatggtcataaagcgtgcccggactcgccgctggtagagtggcaccaggaag

SEQ ID NO: 561718 - DNA, 75 bp, synthetic construct
  source 1..75: mol_type = other DNA
gaaaggtgttgtacagctgagcagcgataccaacagcgatgatgaaacaaaagcggcaaccccaaaggctgtgaa

SEQ ID NO: 561719 - DNA, 75 bp, synthetic construct
  source 1..75: mol_type = other DNA
ctatttatacaggacaatgcgcaacacagcggccaggagcaacatttctcttactcaaccagctttgaactgcat

SEQ ID NO: 561720 - DNA, 75 bp, synthetic construct
  source 1..75: mol_type = other DNA
ggagagagccggaaaatctggtattaccacacggacctgacgggcacggtacaggaggtgaccgcgccggacggg

SEQ ID NO: 561721 - DNA, 75 bp, synthetic construct
  source 1..75: mol_type = other DNA
aaaaccgtggtggatattctcgatgaagtactggatgaatattcctttccggtggaaaagcggctggtggaaaat

SEQ ID NO: 561722 - DNA, 75 bp, synthetic construct
  source 1..75: mol_type = other DNA
agttggggattgcgcctatcggttggcgcaatgatgatattcctgagattggtaaagaaaatacatataaacaaa

SEQ ID NO: 561723 - DNA, 75 bp, synthetic construct
  source 1..75: mol_type = other DNA
ataagcagatggttcatataccttgtgggtggtgggttcgagaagaagatcgtgagaatattataaattgcttgt

SEQ ID NO: 561724 - DNA, 75 bp, synthetic construct
  source 1..75: mol_type = other DNA
tgccacctaaagacgttttgatgcctgctttagaacaggttctttacagtggaatggtcggtgaaggtaagcatg

SEQ ID NO: 561725 - DNA, 75 bp, synthetic construct
  source 1..75: mol_type = other DNA
atcaaagacgaaaacggaaactatatgaaagctaacaccgatggcattgacggcatactatcctcagttccgggc

SEQ ID NO: 561726 - DNA, 75 bp, synthetic construct
  source 1..75: mol_type = other DNA
ggaactatatgaaagctaacaccgatggcattgacggcaacctatcctcagttccgggctcatggatggtgtgta

SEQ ID NO: 561727 - DNA, 75 bp, synthetic construct
  source 1..75: mol_type = other DNA
aatgcggcaagaccgtttctggttttttacgggcggcagctctcggtaagaaagttaactcactgactgatgaca

SEQ ID NO: 561728 - DNA, 75 bp, synthetic construct
  source 1..75: mol_type = other DNA
tgcgtaacggcgggagcaacacatccagctatctgtcgctgaataacgttactgcactgcgcgaacatcatgtgg

SEQ ID NO: 561729 - DNA, 75 bp, synthetic construct
  source 1..75: mol_type = other DNA
tggcaacgtcgccggggtgtcatttggtatcaaaaataatgaaaaaaatattttcttcaagggttcatctcttgg

SEQ ID NO: 561730 - DNA, 75 bp, synthetic construct
  source 1..75: mol_type = other DNA
taaaatcttcgaagcgaataaaccgatgctaaaaagcccggataaaatttatccggggcaagtgttgcgtattcc

SEQ ID NO: 561731 - DNA, 75 bp, synthetic construct
  source 1..75: mol_type = other DNA
aaaagttagaagaacaacacaaaaagctgcacaagtactcaacagagttaaaaaacaataccataaagaaccaat

SEQ ID NO: 561732 - DNA, 75 bp, synthetic construct
  source 1..75: mol_type = other DNA
taaagttagaagaacaacacaaaaagctgcacaaatactcaacagagttaaaaaacaataccataaagaatcaat

SEQ ID NO: 561733 - DNA, 75 bp, synthetic construct
  source 1..75: mol_type = other DNA
ttaggtattaaaaaatcagttattcagcctaagaataaagaaactctggtcaaagaagaaataaagaaaaagccc

SEQ ID NO: 561734 - DNA, 75 bp, synthetic construct
  source 1..75: mol_type = other DNA
cacagccagcgtggggtaatcataaaactggaactgccgagcggtgccggattaaccgccgactcaacaccgtta

SEQ ID NO: 561735 - DNA, 75 bp, synthetic construct
  source 1..75: mol_type = other DNA
ggcgttttaccgatctggtgaaaaaagggagtcgcttctggaacgtttctggcgttgatgccaatgtcagtatca

SEQ ID NO: 561736 - DNA, 75 bp, synthetic construct
  source 1..75: mol_type = other DNA
ttcgccactttcacgggcgttaaagggggctatcagcttcgataacctcagcggcgccagcgccagccagcgtaa

SEQ ID NO: 561737 - DNA, 75 bp, synthetic construct
  source 1..75: mol_type = other DNA
gcggcgcgagtgccagtcaacgcaaaggcgataagcgtgttctgtacgcttcggaaaccgccgctcgcgcagtcg

SEQ ID NO: 561738 - DNA, 75 bp, synthetic construct
  source 1..75: mol_type = other DNA
aatgcgtttgatatcgatctgcatatcaaacctgaataccgaaatctcctgaccaacaatagtgtgttctgggct

SEQ ID NO: 561739 - DNA, 75 bp, synthetic construct
  source 1..75: mol_type = other DNA
tgttacgggaaaatacccgcatcgaattacgtaacccgaaattatccctcagcgatgcgaatctcagcgccctgc

SEQ ID NO: 561740 - DNA, 75 bp, synthetic construct
  source 1..75: mol_type = other DNA
agacaaacatcaatatatttgtgtgcgtcataaagatactgataaagaccatatccatatagttgcaaacaggat

SEQ ID NO: 561741 - DNA, 75 bp, synthetic construct
  source 1..75: mol_type = other DNA
aaggtcaccgtaactcaaggctgtgaacttgccgcagggacatcattggatatcgactttggtgagtatcaggcc

SEQ ID NO: 561742 - DNA, 75 bp, synthetic construct
  source 1..75: mol_type = other DNA
tgttttttagcgtaagtttattttcagagacactttacgctgcagattggggaccatgtaagattgcttttgatg

SEQ ID NO: 561743 - DNA, 75 bp, synthetic construct
  source 1..75: mol_type = other DNA
acattcacaattaagccaaaaacaatttttcattaccgtgacgatttctggtttgcatggccggatgtggtggat

SEQ ID NO: 561744 - DNA, 75 bp, synthetic construct
  source 1..75: mol_type = other DNA
cgcgtaaaaataaacaaagccagcgcaatttctttctcagaaatgaatgaacatgaaagatcaattattgcccat

SEQ ID NO: 561745 - DNA, 75 bp, synthetic construct
  source 1..75: mol_type = other DNA
cgtttacagctttattttgtggggcagcttttgctcagtccagtgatattgcccatgaagcacatcgatttgtta

SEQ ID NO: 561746 - DNA, 75 bp, synthetic construct
  source 1..75: mol_type = other DNA
cttcctgaagtaccatttcctgatttttctcctgttgctaataaaggagcaacgacatcaattggcggtgcttat

SEQ ID NO: 561747 - DNA, 75 bp, synthetic construct
  source 1..75: mol_type = other DNA
gtggatgcaatgcaggagtctgccacccgtcagcgtgaacaggatactattcggaagtttactggagggaataaa

SEQ ID NO: 561748 - DNA, 75 bp, synthetic construct
  source 1..75: mol_type = other DNA
gggcaacagctctgacgtcatttctgcatgggatgatcgccgattaaagagaaaagcgttcatggaaagtcttcg

SEQ ID NO: 561749 - DNA, 75 bp, synthetic construct
  source 1..75: mol_type = other DNA
ttttgacaagcttcatacgggggagtcagatcgtgagaaatatgcttcggtagcagaaaaacttaatgagtatgg

SEQ ID NO: 561750 - DNA, 75 bp, synthetic construct
  source 1..75: mol_type = other DNA
agcctttcgggaagcgtggtgagattacctgctgcaaccgggcaaaactggcaggtactggtttccggttttggt

SEQ ID NO: 561751 - DNA, 75 bp, synthetic construct
  source 1..75: mol_type = other DNA
gcaggtgatggtatccggattcgggcaggtggaacgaataaccctgagtacatcgatgtcggagctaccgatatg

SEQ ID NO: 561752 - DNA, 75 bp, synthetic construct
  source 1..75: mol_type = other DNA
tcactggtggtggcgacaaagggcgagccttatttgttcagtggggtttcaccgtccacaatttctggttcaaaa

SEQ ID NO: 561753 - DNA, 75 bp, synthetic construct
  source 1..75: mol_type = other DNA
accgaatgccgcagcaggtaagatcacgctaggggggctggacagaatggctgtggatttgcccctatatttcca

SEQ ID NO: 561754 - DNA, 75 bp, synthetic construct
  source 1..75: mol_type = other DNA
caaatgaataaaaatgttatggatatgctgaaggaaagaaatattgaaacggttcttgaattcagagctgaaaat

SEQ ID NO: 561755 - DNA, 75 bp, synthetic construct
  source 1..75: mol_type = other DNA
agtttaaacgcgaatccgctcaactggttgttgaccagacatacacagtggcagatgccgccaaagctatggatg

SEQ ID NO: 561756 - DNA, 75 bp, synthetic construct
  source 1..75: mol_type = other DNA
cgtatgcgtttgaggaactgatcgccgagctgggcagcgcgtttctgttggcggatttggggattacgggagagg

SEQ ID NO: 561757 - DNA, 75 bp, synthetic construct
  source 1..75: mol_type = other DNA
ttattgacgtgataggtaacgcgtacaaagaaaccggagaactgactgaagatggcgaaccggtatgtgttaagg

SEQ ID NO: 561758 - DNA, 75 bp, synthetic construct
  source 1..75: mol_type = other DNA
aagcaatcatcagtcgaattgaactcagtttaaaatcagttctatcactaccacaaagcgttattgatggattga

SEQ ID NO: 561759 - DNA, 75 bp, synthetic construct
  source 1..75: mol_type = other DNA
gaggagctggcgcagattgatcagcatatcgccgatggcgagctgaatctgtggcaggcgtcttccgataaatga

SEQ ID NO: 561760 - DNA, 75 bp, synthetic construct
  source 1..75: mol_type = other DNA
tcacgtaaatacctgctcgccagcctcgaccaaagcctgaagcgtatggggcttgagtatgtcgatatcttttac

SEQ ID NO: 561761 - DNA, 75 bp, synthetic construct
  source 1..75: mol_type = other DNA
caaaattagcaaagcggataattacaaaaactaaaaacgcccctataaagagacttgagtacatttacaacaaac

SEQ ID NO: 561762 - DNA, 75 bp, synthetic construct
  source 1..75: mol_type = other DNA
agtttaaacgcgaatccgctcaactggtagttgaccagatatacacggtggcagatgccgccaaagctatggatg

SEQ ID NO: 561763 - DNA, 75 bp, synthetic construct
  source 1..75: mol_type = other DNA
agtttaaacgcgaatccgctcaactggtagttgaccagaaatacactgtggcagatgccgccaaagctatggatg

SEQ ID NO: 561764 - DNA, 75 bp, synthetic construct
  source 1..75: mol_type = other DNA
ttttttattctcaccgcgttgatgagaatacgccaatggaagaaaccgcctcagcgctggcgcatgcagtgcaaa

SEQ ID NO: 561765 - DNA, 75 bp, synthetic construct
  source 1..75: mol_type = other DNA
gcgcgtgggcgagcagcagaagttgaaagagttcgatctcagcaacccgctggtccaggcgaagctcaaagaacg

SEQ ID NO: 561766 - DNA, 75 bp, synthetic construct
  source 1..75: mol_type = other DNA
ttaggggattcatcagtgcagggtgatattcttattgacgtgataggtaacgtgtacaaagaaaccggagaactg

SEQ ID NO: 561767 - DNA, 75 bp, synthetic construct
  source 1..75: mol_type = other DNA
caagattgttgaagagaacacttacggtatcgtgaaagagaagattccagagggcaaaaccacttgctcactgtg

SEQ ID NO: 561768 - DNA, 75 bp, synthetic construct
  source 1..75: mol_type = other DNA
gcctggcgctatgccagccaggtttggcaggtcagccactggttgggggatgggctggtgattctggcgatgatc

SEQ ID NO: 561769 - DNA, 75 bp, synthetic construct
  source 1..75: mol_type = other DNA
gacagggccgacttttcggcctttatggagagcaatggctattatgatgacgagtcgatgcaggatgatattctt

SEQ ID NO: 561770 - DNA, 75 bp, synthetic construct
  source 1..75: mol_type = other DNA
gacagggccgacttttcggcctttatggacagaactggctattatgatgacgagtcgatgcaggatgatattctt

SEQ ID NO: 561771 - DNA, 75 bp, synthetic construct
  source 1..75: mol_type = other DNA
gacagggccgacttttcggcctttatggaaagcagtggctattatgatgacgagtcgatgcaggatgatattctt

SEQ ID NO: 561772 - DNA, 75 bp, synthetic construct
  source 1..75: mol_type = other DNA
ggtatgttggtgatgcgcaacaacaagccctacgtctttgaagcggtcggtccggtaaaatacaccccgctcaag

SEQ ID NO: 561773 - DNA, 75 bp, synthetic construct
  source 1..75: mol_type = other DNA
ataccgaacaacagcaaaaactggcgcaagcgacaaaacgttatcttggtaaaccgtatgacttcagcttctcgt

SEQ ID NO: 561774 - DNA, 75 bp, synthetic construct
  source 1..75: mol_type = other DNA
agccctacgtttttgaagcggtcggcccggtgaaatacaccccgctcaagcagtggatcgcccatggtgaaaagg

SEQ ID NO: 561775 - DNA, 75 bp, synthetic construct
  source 1..75: mol_type = other DNA
ggcaaccaccggtttgcatttggggagtggcagcgataatggatttttccatacgctggcggtgccgctgtttat

SEQ ID NO: 561776 - DNA, 75 bp, synthetic construct
  source 1..75: mol_type = other DNA
atgcagagcgataaagtgctcaatttgccggcaggctactttggtattgtgttggggacgatagggatgggattt

SEQ ID NO: 561777 - DNA, 75 bp, synthetic construct
  source 1..75: mol_type = other DNA
tggttcaggcaaagctcaaagaacgctacggcaaaaatatcccgcttgaagaaacagtagtctcaccgcaagccg

SEQ ID NO: 561778 - DNA, 75 bp, synthetic construct
  source 1..75: mol_type = other DNA
attgaatcattacagaaattcacatatggcaaagctaaggggcttggtttcgaccgagtgttaattcttcctact

SEQ ID NO: 561779 - DNA, 75 bp, synthetic construct
  source 1..75: mol_type = other DNA
atgtgaaaatcggaagtaatgttaaaatcggggcaatgtcttttattatggatgatgtgcctgataactgtactt

SEQ ID NO: 561780 - DNA, 75 bp, synthetic construct
  source 1..75: mol_type = other DNA
tggtgataatgtcgatgtaggtgcccatacgtgtattatcgggcttaacgtaaaaataggcagtaatgtaaaaat

SEQ ID NO: 561781 - DNA, 75 bp, synthetic construct
  source 1..75: mol_type = other DNA
tgtgcgaagccagcgccgttagcggcgatgaacaggaagttcgcgacattctgataaacacgctggaaccttgca

SEQ ID NO: 561782 - DNA, 75 bp, synthetic construct
  source 1..75: mol_type = other DNA
gataggctacctggcaaagcagtccgtattcgaacatggcaatattgcgcagtggattgcacgaaatctgacgag

SEQ ID NO: 561783 - DNA, 75 bp, synthetic construct
  source 1..75: mol_type = other DNA
tcattgataaagtaaataatgcggaggaaggctcactggctgatggtattcagacattcccggatcgtaccgacc

SEQ ID NO: 561784 - DNA, 75 bp, synthetic construct
  source 1..75: mol_type = other DNA
tttctaaaaccagaacggatatttatcagaccgttaccgacagcatcattgcagcgctggaagccggtgtaaaac

SEQ ID NO: 561785 - DNA, 75 bp, synthetic construct
  source 1..75: mol_type = other DNA
cgcctgaaactggaatttaccgacggggaattccgccagttggcagcgcaacttccgaccgtacaacgtaccgat

SEQ ID NO: 561786 - DNA, 75 bp, synthetic construct
  source 1..75: mol_type = other DNA
agattgtgcgcatgtggatattatttcccctggttattttaaacatatagggccattaataaggacatcaattaa

SEQ ID NO: 561787 - DNA, 75 bp, synthetic construct
  source 1..75: mol_type = other DNA
tgacggctaccggacccgtgctcaacgttttgccgttgggtattcacattgcggcgcaagaaacgctgccggaac

SEQ ID NO: 561788 - DNA, 75 bp, synthetic construct
  source 1..75: mol_type = other DNA
tatttattaaaccctggtgtttcagattctgatattagcagaaaaataaaagaccagacaggattctggctggca

SEQ ID NO: 561789 - DNA, 75 bp, synthetic construct
  source 1..75: mol_type = other DNA
cagcgttaataaaagctgatgaatgcattatttcaaaaattgcttcatattctggttttgccgtaacagcctttt

SEQ ID NO: 561790 - DNA, 75 bp, synthetic construct
  source 1..75: mol_type = other DNA
gatctggcgtttgatcgcgaagagatcccactacaaccagcgggctggcagcctgaagaagatgaaaatcagttg

SEQ ID NO: 561791 - DNA, 75 bp, synthetic construct
  source 1..75: mol_type = other DNA
cgtgacggcaacatttcacttttagccctggcggtagcggaacgttggttgcgtcagatgcaactgacgccgggt

SEQ ID NO: 561792 - DNA, 75 bp, synthetic construct
  source 1..75: mol_type = other DNA
gaataaggcgctgtatgttgatagcgtcagttcggtggcaggcgcatttattggtacctcatctgttactgccta

SEQ ID NO: 561793 - DNA, 75 bp, synthetic construct
  source 1..75: mol_type = other DNA
gagcgtcaataaagtacatcgagtcaatttttggccctcccgtgaaggaagaacattctgaggatgggagggttc

SEQ ID NO: 561794 - DNA, 75 bp, synthetic construct
  source 1..75: mol_type = other DNA
cagtggatcgcccacggtgaagatagcaagtacatcgtgcgtcgcgttaaagacgagctaaatgccgaacaacag

SEQ ID NO: 561795 - DNA, 75 bp, synthetic construct
  source 1..75: mol_type = other DNA
caaaagtggaacagcacccaattggcgggaaaagttcgcattattcagtatatcgccgggcgtaagtcggcgaag

SEQ ID NO: 561796 - DNA, 75 bp, synthetic construct
  source 1..75: mol_type = other DNA
tggcgacaacaccgaggttatcgctgaggtggttgggcgagatggcgttcttgttattttggaggccatgaaggc

SEQ ID NO: 561797 - DNA, 75 bp, synthetic construct
  source 1..75: mol_type = other DNA
ggtggcccaagaatatgagtataaggatttcaaagcggcgcagagtgattgctgtatgcaccctggttcagacct

SEQ ID NO: 561798 - DNA, 75 bp, synthetic construct
  source 1..75: mol_type = other DNA
taccgggcgtctgcgtgaccttagcccgtgcgtaatcatcgttgcgctgatgtttatcctgaagattgtatttat

SEQ ID NO: 561799 - DNA, 75 bp, synthetic construct
  source 1..75: mol_type = other DNA
ggagatcgacccgcatcaggtggacgtcaacgtgcaccctgccaaacacgaagtgcgtttccatcagtcgcgtct

SEQ ID NO: 561800 - DNA, 75 bp, synthetic construct
  source 1..75: mol_type = other DNA
gttttggtcgggtactgactatcgtccattccgactgtgcgttgctggagcgcggcggcaacatttcacttttag

SEQ ID NO: 561801 - DNA, 75 bp, synthetic construct
  source 1..75: mol_type = other DNA
ccaccggcgataaccgggaagcaaacctgatggctcacgcagtctggggtgcacttgccgcacaactgggcggaa

SEQ ID NO: 561802 - DNA, 75 bp, synthetic construct
  source 1..75: mol_type = other DNA
gggcagttcgccgcagatggtggtacaggccatcacgggcgtgctgggcggactgaatgcagggaacccggggca

SEQ ID NO: 561803 - DNA, 75 bp, synthetic construct
  source 1..75: mol_type = other DNA
gggctggatgctgggtgatgtccactataatggcatcgtttctgcgccgccgagcgtaatgactgtcgtgggtca

SEQ ID NO: 561804 - DNA, 75 bp, synthetic construct
  source 1..75: mol_type = other DNA
aatttattgctactgtggccggtgatattaccgtgtttaacttcgagggtgagacgcgcgaatacctttcttcat

SEQ ID NO: 561805 - DNA, 75 bp, synthetic construct
  source 1..75: mol_type = other DNA
cggctcaacagaaaaaaaactcattgctggccgaggcgcaaagaactgtcagcctgtggcaaaccgagctgcagc

SEQ ID NO: 561806 - DNA, 75 bp, synthetic construct
  source 1..75: mol_type = other DNA
tgaaggtgccttctatggccctaaactggagtttgtgttacgcgacgcgattggtcgtgactggcagtgcggaac

SEQ ID NO: 561807 - DNA, 75 bp, synthetic construct
  source 1..75: mol_type = other DNA
gtcggtggccgcacggggctgactgcggttgtggttggcgttatgttcctgttggttatgttcttctcaccgctg

SEQ ID NO: 561808 - DNA, 75 bp, synthetic construct
  source 1..75: mol_type = other DNA
gttagttatgttcttctcaccgctggtggcgatggttcctccttacgcaaccgccggagcgttaatctttgttgg

SEQ ID NO: 561809 - DNA, 75 bp, synthetic construct
  source 1..75: mol_type = other DNA
cttaagtttacgtattggtatcaccagcggaattggattatttatcgccttaatgggattaaaaaatactggcgt

SEQ ID NO: 561810 - DNA, 75 bp, synthetic construct
  source 1..75: mol_type = other DNA
ttcgtctggacagtgagaaagccgcgggcaaatccatcagcctgaacttcaatctctctgacaacgataacctga

SEQ ID NO: 561811 - DNA, 75 bp, synthetic construct
  source 1..75: mol_type = other DNA
tattgcgttaactgccgccagcggcatgatggtaaataccgcttacgcaacagatgaagcgaaagccgccactca

SEQ ID NO: 561812 - DNA, 75 bp, synthetic construct
  source 1..75: mol_type = other DNA
tgcactcgaaaggaagggtaactacatttttgataagtcctttgtacctaagtcgattaaagatccaatgttaat

SEQ ID NO: 561813 - DNA, 75 bp, synthetic construct
  source 1..75: mol_type = other DNA
caggccgtggtcatgacgattaccgacaagcagcatcactatgcggagcaggttttgaaggcgcttcgcaagaaa

SEQ ID NO: 561814 - DNA, 75 bp, synthetic construct
  source 1..75: mol_type = other DNA
gtcatctatacccatagccataccgatcactatggtggcgtaaaaggtgtggtttctgaagaagatgtgaagtcc

SEQ ID NO: 561815 - DNA, 75 bp, synthetic construct
  source 1..75: mol_type = other DNA
acctgacgctgaacgatagcgtgcttaactaccgtaaaacgctgcaacctgaagccaacgcctctttctacatca

SEQ ID NO: 561816 - DNA, 75 bp, synthetic construct
  source 1..75: mol_type = other DNA
aaatacgtgagctgaggaaaaagctacaacgcattgaaatggagaatgaaatattaaaaaaggctactgtagatt

SEQ ID NO: 561817 - DNA, 75 bp, synthetic construct
  source 1..75: mol_type = other DNA
ctggctggggatgcgggagactgcggcaaaaagttttgtcgatgaggtggaggcggcctggtcggaatacgcaga

SEQ ID NO: 561818 - DNA, 75 bp, synthetic construct
  source 1..75: mol_type = other DNA
ttattcgtccgccacgggcgcgttttgatttttatcaggcgcgatcagcctggtcacgggctgagtggattggag

SEQ ID NO: 561819 - DNA, 75 bp, synthetic construct
  source 1..75: mol_type = other DNA
gaagaactgttcggcgaggagatcagcgaagaggacaaaagagacagaatctaccgatatgaccaagtggcagat

SEQ ID NO: 561820 - DNA, 75 bp, synthetic construct
  source 1..75: mol_type = other DNA
gcgaagaggataaagagacagaatctaccgatatgaccaagtggcagatctttgttgagtatgtgctgaaaaaca

SEQ ID NO: 561821 - DNA, 75 bp, synthetic construct
  source 1..75: mol_type = other DNA
ctctccgataacaccagaacaaatcgaaatacgtgagctgaggaaaaagctacaacgcattgaaatggagaatga

SEQ ID NO: 561822 - DNA, 75 bp, synthetic construct
  source 1..75: mol_type = other DNA
tcggcctttccacaatgacgcgatgggtgaaacaattacgtgatgagcggcagggcaaaacaccaaaagcctccc

SEQ ID NO: 561823 - DNA, 75 bp, synthetic construct
  source 1..75: mol_type = other DNA
cgatgacgccagaacaaatcgaaatacgtgagctgaggaaaaagctacaacgcattgaaatggagaatgaaatat

SEQ ID NO: 561824 - DNA, 75 bp, synthetic construct
  source 1..75: mol_type = other DNA
ttcaagtgcccgcgcctccgccaatgagtcgtggcgctattttatgggacgacgaaaatttattgcgtcccggct

SEQ ID NO: 561825 - DNA, 75 bp, synthetic construct
  source 1..75: mol_type = other DNA
gacgagagcgccaggggattgccccctctgccacaccgattactccagaccagcaacgtatccgcgagctggaaa

SEQ ID NO: 561826 - DNA, 75 bp, synthetic construct
  source 1..75: mol_type = other DNA
taaaaaaggctaccgcgctcttgatgtctgaaccgccccggaaatcctggagactaaactccctgagaaagaggt

SEQ ID NO: 561827 - DNA, 75 bp, synthetic construct
  source 1..75: mol_type = other DNA
aatactctcaactgttccaaatggagacaacgaagacgaccagcgagatgacgttgaaagtgacaatcatatacc

SEQ ID NO: 561828 - DNA, 75 bp, synthetic construct
  source 1..75: mol_type = other DNA
cagaatgatttaccgctgcaattttccactatgaaaaccggtgcgacggatggcgggcgctacaacgtgatgggc

SEQ ID NO: 561829 - DNA, 75 bp, synthetic construct
  source 1..75: mol_type = other DNA
cataacgatttaccgctgcaattttccaccatgaaaaccggagcgacggatggcgggcgctacaacgtgatgggc

SEQ ID NO: 561830 - DNA, 75 bp, synthetic construct
  source 1..75: mol_type = other DNA
agcatgggcgatatgccggatgatggctacaagacctttgtttgtgtagaaacggcttacgcttcagaaacgcaa

SEQ ID NO: 561831 - DNA, 75 bp, synthetic construct
  source 1..75: mol_type = other DNA
acttccggtcttatctggatggcggtgttgatggtgcaaatcgcccgtcgcggcctgaccagcactaaccgtacc

SEQ ID NO: 561832 - DNA, 75 bp, synthetic construct
  source 1..75: mol_type = other DNA
cgactgcccacgcgcacgaacacgggtaccacgatgcaggcggaaccaaaattttcggattttggatctacctga

SEQ ID NO: 561833 - DNA, 75 bp, synthetic construct
  source 1..75: mol_type = other DNA
caggtaaggacattttcgaactgccgttcgttctggttgaaactttcttgctgttgttcagctccatcacctacg

SEQ ID NO: 561834 - DNA, 75 bp, synthetic construct
  source 1..75: mol_type = other DNA
acaatccgggcgcgaaaatgctgccaacgcagttggttaacgtaaaagcgtttaaaccagcctcgaccaacaaaa

SEQ ID NO: 561835 - DNA, 75 bp, synthetic construct
  source 1..75: mol_type = other DNA
cccgtatacgccaggcccgccgccgcgcgcggctcaaggaagaaggcacaagcgtgacagtcacgctaacaaaac

SEQ ID NO: 561836 - DNA, 75 bp, synthetic construct
  source 1..75: mol_type = other DNA
cagcgttgcaactctgaccaccgttatctgtaaagtcgataccgacaacatcctcaactccagcaccttcaaagc

SEQ ID NO: 561837 - DNA, 75 bp, synthetic construct
  source 1..75: mol_type = other DNA
gcctgcgcacggttttgcccgcaacctgccgtggacgctgaaatcacatcgtgaagatgctgatggcgtagcgct

SEQ ID NO: 561838 - DNA, 75 bp, synthetic construct
  source 1..75: mol_type = other DNA
gtgaccgggctgccataactgaacgggaagccgcgctgccggagagtgtgctgcgtgaatcacaacgggagcggg

SEQ ID NO: 561839 - DNA, 75 bp, synthetic construct
  source 1..75: mol_type = other DNA
atgcaggatggcgtccggattgcccgtgataatcccgacagcggtgtggtggtaagaatcgccggtgaaggccgc

SEQ ID NO: 561840 - DNA, 75 bp, synthetic construct
  source 1..75: mol_type = other DNA
tcctcgatcggtggaattcctgccgttatagctgaaaatggttttttattcgaacattctaatgtaactgcaatt

SEQ ID NO: 561841 - DNA, 75 bp, synthetic construct
  source 1..75: mol_type = other DNA
tatgcttgataaagcattactaccagactcaatccaattaccattgattgttagcaccgaaaaaaaaacatacct

SEQ ID NO: 561842 - DNA, 75 bp, synthetic construct
  source 1..75: mol_type = other DNA
acgggtacttcactaatgtggctaactactggtaaaggcccaaagtttgacgatgcaagaaatgatgtaattgct

SEQ ID NO: 561843 - DNA, 75 bp, synthetic construct
  source 1..75: mol_type = other DNA
ggttcagatgatgacgagcaaatgccatccccttcaccagaacaacatgttgaaacacactccgaagatggttct

SEQ ID NO: 561844 - DNA, 75 bp, synthetic construct
  source 1..75: mol_type = other DNA
gtatccatcacgtggttagcctttgggaaaggagataaaatagaaaaaaatagcagtttaaactgtataaatata

SEQ ID NO: 561845 - DNA, 75 bp, synthetic construct
  source 1..75: mol_type = other DNA
tcatacagaatcgcggtggtcagaaagtaattgagcggatcctcatggcttatggcttcaagtcacgccaggcat

SEQ ID NO: 561846 - DNA, 75 bp, synthetic construct
  source 1..75: mol_type = other DNA
ttcgatagagaatttctaccgtcggcattcaagaatctttttgtaatcacagataataattctgaatttatttgt

SEQ ID NO: 561847 - DNA, 75 bp, synthetic construct
  source 1..75: mol_type = other DNA
ttggcgctgccgatggtattaaaggcaccttcgcttacctgattggtgacagctttgccaagttaggtctgggaa

SEQ ID NO: 561848 - DNA, 75 bp, synthetic construct
  source 1..75: mol_type = other DNA
tatcagcgcctttcttgtgaccgccccgagaaagtacaaagtttacaaaatccctaagcgtacgacggggtttag

SEQ ID NO: 561849 - DNA, 75 bp, synthetic construct
  source 1..75: mol_type = other DNA
gctccttgataatgaggataaagcttatctgaccgggctgttagcatttgccagccatatcgaacctaggttcat

SEQ ID NO: 561850 - DNA, 75 bp, synthetic construct
  source 1..75: mol_type = other DNA
aatggatttcatttggtacaggagaaatgaaaaacgcaaaaaataaagatactttaacattagtgaaaaagtatt

SEQ ID NO: 561851 - DNA, 75 bp, synthetic construct
  source 1..75: mol_type = other DNA
ttataaccactctcgaaaaagcggttgcattagcaaataccctaccaactccaatgggagattttgaggacgcta

SEQ ID NO: 561852 - DNA, 75 bp, synthetic construct
  source 1..75: mol_type = other DNA
gtgcagttactccaccatcaccaaatggacgccgcgtcgtaaacgcgggacgttcctcggtttctggaacatttc

SEQ ID NO: 561853 - DNA, 75 bp, synthetic construct
  source 1..75: mol_type = other DNA
gccatccgtgaagaccgcgaggaactgggtaataacactggtccacgctttaaatctgagctgataaacccgcgc

SEQ ID NO: 561854 - DNA, 75 bp, synthetic construct
  source 1..75: mol_type = other DNA
tgcgtttgagcaactccgtcggaaaagaaaccgccgtaaacccgtaccctatgaactcattccgggttcgctggc

SEQ ID NO: 561855 - DNA, 75 bp, synthetic construct
  source 1..75: mol_type = other DNA
tgtctggagcgactggattgtgtacgtgacagtcagctgtctgcttctttccgttttatggcaagccatcaaggg

SEQ ID NO: 561856 - DNA, 75 bp, synthetic construct
  source 1..75: mol_type = other DNA
tggtcaggcggcaaggcaacagggtgacaaaaaagcaggtgcgctgatactggatgacccgcgccttgatgccat

SEQ ID NO: 561857 - DNA, 75 bp, synthetic construct
  source 1..75: mol_type = other DNA
gtggtctggctggggagatcagcaaggaaacgggtaaatccctgcgtgataacgctgaatacgttaatgcctggg

SEQ ID NO: 561858 - DNA, 75 bp, synthetic construct
  source 1..75: mol_type = other DNA
aaatggagcaggataagctcattagtcgggcaaagctggcgcatgagcagcagcgttttaatccagatatggtca

SEQ ID NO: 561859 - DNA, 75 bp, synthetic construct
  source 1..75: mol_type = other DNA
aaattgacgaacttctgaatgcaataaaaacaggacattcaaaatttattctatcaatacccgtacatactaccc

SEQ ID NO: 561860 - DNA, 75 bp, synthetic construct
  source 1..75: mol_type = other DNA
taaaacgatttatccgcgttcctgatgttttaaatcgagtgggatttagtcgcacgaccttatatgaacgtatta

SEQ ID NO: 561861 - DNA, 75 bp, synthetic construct
  source 1..75: mol_type = other DNA
agcccctgttacagcaattccgctgtggaaaagcttccattgcctacacaggacagccgggacattattgccgca

SEQ ID NO: 561862 - DNA, 75 bp, synthetic construct
  source 1..75: mol_type = other DNA
aaccctgcgtctggatgtcatcccgcctgcgtttgagcaactccgtcggaaaagaaaccgccgtaaacccgtgcc

SEQ ID NO: 561863 - DNA, 75 bp, synthetic construct
  source 1..75: mol_type = other DNA
cgcgtttccattccacgctcaataacggcagacccaacccgacctggacaaactcgacggtaagacaaagcagcg

SEQ ID NO: 561864 - DNA, 75 bp, synthetic construct
  source 1..75: mol_type = other DNA
atgaagattgaacaaatcggaatagctgctttcaggcagcaggctgaaagcggtggcgtggatgagttcgttgtg

SEQ ID NO: 561865 - DNA, 75 bp, synthetic construct
  source 1..75: mol_type = other DNA
ggcaataacacggggccgcgctttcagtctgagctgattaatccgcgcaaaggaacgccgacaagctacatcgcg

SEQ ID NO: 561866 - DNA, 75 bp, synthetic construct
  source 1..75: mol_type = other DNA
caatgccctgcaacagcgcgcttctcattgcctgtataccattgccgaagaacaagcgacaaacagtgcttcgat

SEQ ID NO: 561867 - DNA, 75 bp, synthetic construct
  source 1..75: mol_type = other DNA
gctataaaggttttccggcacttaaattggcgttaagcgaagctctggcaagccaaccggaatcaccttccgtac

SEQ ID NO: 561868 - DNA, 75 bp, synthetic construct
  source 1..75: mol_type = other DNA
ttaaccgatctcctgtttattgcgttgatccagcaagatctggaactggcgccagaacgtattcgtcatagtgaa

SEQ ID NO: 561869 - DNA, 75 bp, synthetic construct
  source 1..75: mol_type = other DNA
gaccagagttaatgtgggatgccaaacattccatcaacggtactatagttgaatggagcgtaccgctaccaaatg

SEQ ID NO: 561870 - DNA, 75 bp, synthetic construct
  source 1..75: mol_type = other DNA
gaagaaagcattattactgacgatgaacccccttttgtggcacatcgaccgtcagcggtgcagagggaaggaaga

SEQ ID NO: 561871 - DNA, 75 bp, synthetic construct
  source 1..75: mol_type = other DNA
acggatttgctgttcattgcgctgattcagcaggatctggaactggcaccagaacgtattcgtcatagtgaagcg

SEQ ID NO: 561872 - DNA, 75 bp, synthetic construct
  source 1..75: mol_type = other DNA
cctgtccaccctggtagctgcgcatatgagcatgtgtcttgaggccgcttgtggtgatttgtataccaacgatga

SEQ ID NO: 561873 - DNA, 75 bp, synthetic construct
  source 1..75: mol_type = other DNA
aggagctgggtaataacacgggaccacgctttaagtctgagctgataaacccgcgcaaaggtacgccaacaagct

SEQ ID NO: 561874 - DNA, 75 bp, synthetic construct
  source 1..75: mol_type = other DNA
actcgtggcaataactatccccctgttgaaaatttgaaccaatcaggaggcgatttaccagaagccagtgggccg

SEQ ID NO: 561875 - DNA, 75 bp, synthetic construct
  source 1..75: mol_type = other DNA
gcgcctggttaaaccgaaaaggtgtaaagactacaaacagcgaattacagatcatcagcatcagcagctcgtcta

SEQ ID NO: 561876 - DNA, 75 bp, synthetic construct
  source 1..75: mol_type = other DNA
taccggaaattatggaagatgcgtagcgaatggcgggaagagcagttgcgtgctatttgcctggtcagcaaaaaa

SEQ ID NO: 561877 - DNA, 75 bp, synthetic construct
  source 1..75: mol_type = other DNA
gaatcccgtgatcctgtccaacgcgaaatagagcaggataagctcatgagccgggcaaagttggcgcatgagcag

SEQ ID NO: 561878 - DNA, 75 bp, synthetic construct
  source 1..75: mol_type = other DNA
cgcattttctattatcttaagtatgctattaattataattagtcttattgagtggggagttgcatcaggagctaa

SEQ ID NO: 561879 - DNA, 75 bp, synthetic construct
  source 1..75: mol_type = other DNA
ggagccgcgcccgaatacggtgaatgtggtgccgggcacgacgcgcaaattttcgcgcctcgcgtaccaacctgc

SEQ ID NO: 561880 - DNA, 75 bp, synthetic construct
  source 1..75: mol_type = other DNA
ggcaataacacggggccacgctttaagtctgagctgataaacccgcgcaaaggaacgccgacaagctacatcgcg

SEQ ID NO: 561881 - DNA, 75 bp, synthetic construct
  source 1..75: mol_type = other DNA
cgttaagccagaagaaatccgcaagacgtgggaaaaggtggcagcggaaaccctgcgtctggatgttatcccgcc

SEQ ID NO: 561882 - DNA, 75 bp, synthetic construct
  source 1..75: mol_type = other DNA
tacgctttcagtcgcatttgccatcagtcgatcgaaaaagcgaaaaagatgggcgacccgctggtgctgaccttt

SEQ ID NO: 561883 - DNA, 75 bp, synthetic construct
  source 1..75: mol_type = other DNA
cgctggttctgacctttggcaaagtagagccgcgcccgaatacggtgaatgtagtgccgggtaaaaaccacgttc

SEQ ID NO: 561884 - DNA, 75 bp, synthetic construct
  source 1..75: mol_type = other DNA
aagtagagccgcgcccgaatacggtaaatgtggtgccgggtaaaaccacgttcaccattgattgtcgtcataccg

SEQ ID NO: 561885 - DNA, 75 bp, synthetic construct
  source 1..75: mol_type = other DNA
aacgctgaatacgttaatgcctgggcgtctctgcatcgtgttcagcaattccgcttctttggtattccggggcgt

SEQ ID NO: 561886 - DNA, 75 bp, synthetic construct
  source 1..75: mol_type = other DNA
ccggtactggataacccgcgccttgatgccatcctggctgctgctgatgctggctgttttgccacctacattatg

SEQ ID NO: 561887 - DNA, 75 bp, synthetic construct
  source 1..75: mol_type = other DNA
ggtaaacgccagcagcagcaacccggcgcatcgccgcaatgagatgatggcctgtgttaaaggtctggagcttat

SEQ ID NO: 561888 - DNA, 75 bp, synthetic construct
  source 1..75: mol_type = other DNA
acagggggacaaaaaagcaggtgcaccggtactggataacccgcgccttgatgccatcttggctgctgctgatgc

SEQ ID NO: 561889 - DNA, 75 bp, synthetic construct
  source 1..75: mol_type = other DNA
atttcgtaaggctatgcacaaagccgggttgcgctggtatggcgtgcgggtggctgagccgcaccatgacggtac

SEQ ID NO: 561890 - DNA, 75 bp, synthetic construct
  source 1..75: mol_type = other DNA
tagtatgagcaaaaaagagcgccaggaactggcagcaagattacgcctggtgaaaccgaaacggcgtaaagacta

SEQ ID NO: 561891 - DNA, 75 bp, synthetic construct
  source 1..75: mol_type = other DNA
gccgggtaaaaccacgttcaccattgattgtcgtcataccgacgctgccgtgctgcgcgatttcacccaacagtt

SEQ ID NO: 561892 - DNA, 75 bp, synthetic construct
  source 1..75: mol_type = other DNA
gtgacgatggtatcccttatgttctggtgttgctgggcgtgtgtacggggagtaacagcgttgagcgttatctgc

SEQ ID NO: 561893 - DNA, 75 bp, synthetic construct
  source 1..75: mol_type = other DNA
atggcacccgtttctggtgagagaatgaacgataaaattctccggtatatgcagcgtgttgtgagaaattcccgc

SEQ ID NO: 561894 - DNA, 75 bp, synthetic construct
  source 1..75: mol_type = other DNA
gtgacgacggtatcccttatgttctggtgttgctgggtgtgtgtacggggtgtgccggtgttgagcgttatctgc

SEQ ID NO: 561895 - DNA, 75 bp, synthetic construct
  source 1..75: mol_type = other DNA
tggattaacagtaccaattattcggtagaagagattgccaccaagatcctcgatatcatgggccttagccgccga

SEQ ID NO: 561896 - DNA, 75 bp, synthetic construct
  source 1..75: mol_type = other DNA
ttcttccgttcgctctcatacaccatgggcgtgacgttgcacctgaaaaccaaaggtaaaaacgatcatcaccgt

SEQ ID NO: 561897 - DNA, 75 bp, synthetic construct
  source 1..75: mol_type = other DNA
ttatgcccacgtggtgcgcaacaccaaagagacgcagattgacgttcaggtgtggctggatcgcgagggtggcag

SEQ ID NO: 561898 - DNA, 75 bp, synthetic construct
  source 1..75: mol_type = other DNA
gtgtgcaaccattgtcggagataaaacgcagactgtacaggtaaacagtaatccgtctggtgcggattttattat

SEQ ID NO: 561899 - DNA, 75 bp, synthetic construct
  source 1..75: mol_type = other DNA
tatcccggtttgttgggggtgatttgattcaccgtgaactctccggcctgcatcagctctacattccgcatattt

SEQ ID NO: 561900 - DNA, 75 bp, synthetic construct
  source 1..75: mol_type = other DNA
atgaggggatctctcagaactcagcagcaatttaaaaaaagaatggcagcaagcgggctggaaacacgtttcgat

SEQ ID NO: 561901 - DNA, 75 bp, synthetic construct
  source 1..75: mol_type = other DNA
gttttgctttgaagcgccggatggttttctggtgctgcgttctgtgctcagtgacgatggtatcccttatgttct

SEQ ID NO: 561902 - DNA, 75 bp, synthetic construct
  source 1..75: mol_type = other DNA
cggcgatgaggcgcagccaaacgaagccgggctggccttctacgataagctgtttgatgaaatggcgaagcacaa

SEQ ID NO: 561903 - DNA, 75 bp, synthetic construct
  source 1..75: mol_type = other DNA
gcgagcaactcactaaacgagaccgttacgcccatgtagtgcgcaacaccaaagagacgcaaattgacgtccagg

SEQ ID NO: 561904 - DNA, 75 bp, synthetic construct
  source 1..75: mol_type = other DNA
agccaatccgtaacaaagatgggcagggctatgatgagatcctcgctcgtctgaaatacgacgacggtattatga

SEQ ID NO: 561905 - DNA, 75 bp, synthetic construct
  source 1..75: mol_type = other DNA
acgcaacagcagcaggcgctattgcataagctcggggtgcaatatctgcaagggtatttgattggtcgcccgcag

SEQ ID NO: 561906 - DNA, 75 bp, synthetic construct
  source 1..75: mol_type = other DNA
cagggtgatttgctgctctacgcccagccaattcgcaacaaagagggtgaaggttatgatgagatcctcgcgcga

SEQ ID NO: 561907 - DNA, 75 bp, synthetic construct
  source 1..75: mol_type = other DNA
tgaatggcttaaccgccgctggcatttgcaggcgctgaccgatccgttaacgctcctacccaactttcgtgcgtt

SEQ ID NO: 561908 - DNA, 75 bp, synthetic construct
  source 1..75: mol_type = other DNA
aacatcgagcagctgcataagtttggtttccggattgcgattgatgactttggcaccggctatgccaactacgaa

SEQ ID NO: 561909 - DNA, 75 bp, synthetic construct
  source 1..75: mol_type = other DNA
ctgctacttctgttgtgcacaccttatgaaaacgactttattgccggttacctggtacccgttttcttcatcatc

SEQ ID NO: 561910 - DNA, 75 bp, synthetic construct
  source 1..75: mol_type = other DNA
aactggtggtcgacagcgcttcggatgtccgttggcagtgggtgtttatcggcacggcggtggtctttttcttcc

SEQ ID NO: 561911 - DNA, 75 bp, synthetic construct
  source 1..75: mol_type = other DNA
tacacctttgcgctcctcaatcactattacggtctgggcttctggacctgcctgccaattgccgggttaatggca

SEQ ID NO: 561912 - DNA, 75 bp, synthetic construct
  source 1..75: mol_type = other DNA
tctggcgatcgttaccctcggtttcggcgaaattgtgcgcatattgctgctcaataacaccgaaattaccggcgg

SEQ ID NO: 561913 - DNA, 75 bp, synthetic construct
  source 1..75: mol_type = other DNA
ctgcaacccttgttggggcagttaagctggctggcggagcaatcctgcgcacatcatcatgtgctggcgctggat

SEQ ID NO: 561914 - DNA, 75 bp, synthetic construct
  source 1..75: mol_type = other DNA
tgctcaagcgaattcatgaaagtttgcgagttaaggcattgttgtgttcatcgatttggtaagttgggttcgaaa

SEQ ID NO: 561915 - DNA, 75 bp, synthetic construct
  source 1..75: mol_type = other DNA
tacccttcccggattatcattacaggattcatatcaactttttgttaatgcatataagcctaaacttcctgcaag

SEQ ID NO: 561916 - DNA, 75 bp, synthetic construct
  source 1..75: mol_type = other DNA
ctgctgttagtgctgagcgggccggaaacggaagggcgactccagcatatggttaacatcctgggtgatgctgcc

SEQ ID NO: 561917 - DNA, 75 bp, synthetic construct
  source 1..75: mol_type = other DNA
gggtatctatctggtgttcccggacacaaccgttatcactcaactccagaacctgattgaggcgctgaaccatga

SEQ ID NO: 561918 - DNA, 75 bp, synthetic construct
  source 1..75: mol_type = other DNA
gtcttccccttctcaacctgcccgcctccgcactggcggccctcagcaatgaaattcttggccccgtagatgata

SEQ ID NO: 561919 - DNA, 75 bp, synthetic construct
  source 1..75: mol_type = other DNA
gtgacttagtcgattccgcagtcattgtagagtgtatgttcgcaggcaggctggaaaacctgacaccgcccataa

SEQ ID NO: 561920 - DNA, 75 bp, synthetic construct
  source 1..75: mol_type = other DNA
tattttatatttctgatggtacggcaattactgcggaggttttgggtcatgcagtgatgtcgcaatttcccgtca

SEQ ID NO: 561921 - DNA, 75 bp, synthetic construct
  source 1..75: mol_type = other DNA
ccttaaccctaataatctcaataaatatgatgcgcgcattgcggcgattgattacaccctcgcccacgatgacgg

SEQ ID NO: 561922 - DNA, 75 bp, synthetic construct
  source 1..75: mol_type = other DNA
ctcaaccacgatgacacactccccgaagacccgctgctggcagtggcgctggctaacccggaatacgtcaccgca

SEQ ID NO: 561923 - DNA, 75 bp, synthetic construct
  source 1..75: mol_type = other DNA
taaagacggtgttcagcgtagaagcggaaatccatcccgaaccggtatctggcagacccatgtgtgtggtgaagt

SEQ ID NO: 561924 - DNA, 75 bp, synthetic construct
  source 1..75: mol_type = other DNA
atgaccccaggattgctgagagcagtattcagcgtggaagcggaaatccccccggagccggtatctggcaggccg

SEQ ID NO: 561925 - DNA, 75 bp, synthetic construct
  source 1..75: mol_type = other DNA
agcagtggcatccgcatatccatttatcgacaactgccggtggtgtgacgtcgggccacacctggaaaaaccttc

SEQ ID NO: 561926 - DNA, 75 bp, synthetic construct
  source 1..75: mol_type = other DNA
atgcaaaagtttgataccaggaccttccagggcttgatcctgaccttacaggattactgggctcgccagggctgc

SEQ ID NO: 561927 - DNA, 75 bp, synthetic construct
  source 1..75: mol_type = other DNA
atgttgcaaacatctcacgaaaccatatctgtttagatcagaaagatatcagtcctgatggacacacacaaatag

SEQ ID NO: 561928 - DNA, 75 bp, synthetic construct
  source 1..75: mol_type = other DNA
aagggttaacttttttgggcgagtcagcctcgggtcaccagattttaatggacggtaactctggcgataaagcgc

SEQ ID NO: 561929 - DNA, 75 bp, synthetic construct
  source 1..75: mol_type = other DNA
tttctggcctgctggtgctcggttacggcggcttttacgccattggcgcttatacctttgccctgctcaatcact

SEQ ID NO: 561930 - DNA, 75 bp, synthetic construct
  source 1..75: mol_type = other DNA
gcatccttcacagtaccaagtggatctattgccgctctggttggggtaaacggttccggaaaatcgacgttgttt

SEQ ID NO: 561931 - DNA, 75 bp, synthetic construct
  source 1..75: mol_type = other DNA
tagcgggcttaactgttgtttatcgtaacggccataaggcattacagaatgcatcattcagcgtccctaaaggtt

SEQ ID NO: 561932 - DNA, 75 bp, synthetic construct
  source 1..75: mol_type = other DNA
atgatgggccgctatgggcatatgggtatgttgcgtatcgccaaaaagagggatcgtcagattgtcaccgatgcg

SEQ ID NO: 561933 - DNA, 75 bp, synthetic construct
  source 1..75: mol_type = other DNA
acatggtgtcgctggtacgtaacctggaagagtttttcgcccgtgaatcctgtggctggtgtacgccgtgccgcg

SEQ ID NO: 561934 - DNA, 75 bp, synthetic construct
  source 1..75: mol_type = other DNA
catggggtaaaccaacctgcgtcaacaacgtcgaaaccctgtgtaacgttccggcgatcctcgctaacggcgtgg

SEQ ID NO: 561935 - DNA, 75 bp, synthetic construct
  source 1..75: mol_type = other DNA
gaaaaaagcattattactgacgatggacgcccttttgtggctcatcgaccgtcagcggggcagagggaagaaaga

SEQ ID NO: 561936 - DNA, 75 bp, synthetic construct
  source 1..75: mol_type = other DNA
gatacctggtggcagaccgaaactggcggtttcatgatcacgccgctgcctggcgctaccgagctgaaagccggt

SEQ ID NO: 561937 - DNA, 75 bp, synthetic construct
  source 1..75: mol_type = other DNA
tggccgacgcctgcccgtatggcgcaggtggtggacaagcatcaggtcaatattctctataccgcacccacggcg

SEQ ID NO: 561938 - DNA, 75 bp, synthetic construct
  source 1..75: mol_type = other DNA
tcacttccgacgaaggcgtgcgtgccgggcgtagtattccgctgaagaaaaacgttgatgacgcgctgaaaaacc

SEQ ID NO: 561939 - DNA, 75 bp, synthetic construct
  source 1..75: mol_type = other DNA
gtgatcaccgactcctggccgggtcaggcgcgtacgctgtttggcgatcacgaacgttttgaacagacctacttc

SEQ ID NO: 561940 - DNA, 75 bp, synthetic construct
  source 1..75: mol_type = other DNA
cgatgctggcctgcgcccgcattggcgcggtgcattcggtgattttcggcggcttctcgccggaagccgttgccg

SEQ ID NO: 561941 - DNA, 75 bp, synthetic construct
  source 1..75: mol_type = other DNA
cgacgtgctgaacgtctccggtcaccgtctgggaacggcagagattgagtcggcgctggtggcgcatccgaaaat

SEQ ID NO: 561942 - DNA, 75 bp, synthetic construct
  source 1..75: mol_type = other DNA
gttaatcaggtaaaagactccggtctgaaagggcgcggcggtgcaggcttttctaccggcctgaaatggagcctg

SEQ ID NO: 561943 - DNA, 75 bp, synthetic construct
  source 1..75: mol_type = other DNA
gggagatggtgaactctacgacaaatcagcattaacagaccctgtgaagctgattaagcacatcatcatagctga

SEQ ID NO: 561944 - DNA, 75 bp, synthetic construct
  source 1..75: mol_type = other DNA
agtgtgggcttgtaatgactcctacagggatacgtaaacccgtttatcaaggtacttaccgttgcaatggtaata

SEQ ID NO: 561945 - DNA, 75 bp, synthetic construct
  source 1..75: mol_type = other DNA
gttggagtactcgagagcaagactcaggagactccttaagacggcaaacaaacctcattgatgctttctactcta

SEQ ID NO: 561946 - DNA, 75 bp, synthetic construct
  source 1..75: mol_type = other DNA
ggcacggcggtggtctttttcttccagcttttgcgaccggctttccagaaagggctgaaaagcgtttccggaccg

SEQ ID NO: 561947 - DNA, 75 bp, synthetic construct
  source 1..75: mol_type = other DNA
gtacgtctgtatagcggtgtggaaagcaatgatgaaacagtcgctgcaacgccaaaagcagtgaaaatagcgatg

SEQ ID NO: 561948 - DNA, 75 bp, synthetic construct
  source 1..75: mol_type = other DNA
gtacaaaatccgttaaccgtcttggttatggcgcgatgcaactggctggtcctggggtttttggccccccaagag

SEQ ID NO: 561949 - DNA, 75 bp, synthetic construct
  source 1..75: mol_type = other DNA
ctccagcgatgtccggttaatcgctatcaaggttgagaactggacgcgtaaggccgctgccgggttagccaggat

SEQ ID NO: 561950 - DNA, 75 bp, synthetic construct
  source 1..75: mol_type = other DNA
cgatttacgctcctgggaaaccaggcataacctcgaaacactggcagaacgtgccggactggtgacacgcagtga

SEQ ID NO: 561951 - DNA, 75 bp, synthetic construct
  source 1..75: mol_type = other DNA
gtggctggacgaataccgcagcaaaacggttacgaaggggcgcgtaaggcgctgaccgggctgtctccggacgaa

SEQ ID NO: 561952 - DNA, 75 bp, synthetic construct
  source 1..75: mol_type = other DNA
atccaagactaagaaaccggatggtaactggtcagcattaagcgttaaacacatcctgacttcacgaagtgtatt

SEQ ID NO: 561953 - DNA, 75 bp, synthetic construct
  source 1..75: mol_type = other DNA
tgctggcagggctaatagagcaggcgtttcttacctttattgtgctacagatagttatactgcaattgcggaagt

SEQ ID NO: 561954 - DNA, 75 bp, synthetic construct
  source 1..75: mol_type = other DNA
gtgggaaacgcgcaataatcttgaaacgctggccgaacgtgctgggttggtaacgcgcagtgatttagggcataa

SEQ ID NO: 561955 - DNA, 75 bp, synthetic construct
  source 1..75: mol_type = other DNA
cgatgggtccggcatatctgctggacgtcgtggggattgataccgcgcatcacgcccaggccgtgatggcagcgg

SEQ ID NO: 561956 - DNA, 75 bp, synthetic construct
  source 1..75: mol_type = other DNA
gcatcggtctgccggaaaccaaactgggcatcatgccgggctttggcggttctgtacgtatgccacgtatgctgg

SEQ ID NO: 561957 - DNA, 75 bp, synthetic construct
  source 1..75: mol_type = other DNA
tatcgtctggcgacgccggatctgcgcatcggtctgccggaaaccaaactgggcatcatgccgggctttggcggt

SEQ ID NO: 561958 - DNA, 75 bp, synthetic construct
  source 1..75: mol_type = other DNA
ggcggtatcgcttaccagtccgcgtggaaaggcgtaccggttgtcatgaaagatatcaacgataagtcgttaact

SEQ ID NO: 561959 - DNA, 75 bp, synthetic construct
  source 1..75: mol_type = other DNA
cgatggtcaacgaagtggtgcgctgtctggaagaaggcattatcgccactccggcagaagcggatatggcgctgg

SEQ ID NO: 561960 - DNA, 75 bp, synthetic construct
  source 1..75: mol_type = other DNA
ctcggcatgaccgaagccgcgaaactgctgaacaagcagcttgagcgcggcaagatcgatggtctgaaactggct

SEQ ID NO: 561961 - DNA, 75 bp, synthetic construct
  source 1..75: mol_type = other DNA
ccagcaataaagtcggtacatatacggtgactgcatctttccataacggcgtaacaatacagacacagacaaccg

SEQ ID NO: 561962 - DNA, 75 bp, synthetic construct
  source 1..75: mol_type = other DNA
ccgaggtcaccatgacgcccgaaagaaacggttcgtatatggtgaaagcatccctgccgaatggagcctcacttg

SEQ ID NO: 561963 - DNA, 75 bp, synthetic construct
  source 1..75: mol_type = other DNA
tccgccattactgatatcaacggcaaggctgaagttacactgagcggtacaaaatccggcacctaccccgtgaca

SEQ ID NO: 561964 - DNA, 75 bp, synthetic construct
  source 1..75: mol_type = other DNA
tgccgaactggtatttgatgccccaggttcagttaataaactcgacactgcgaccgtcgccagcctcggcgaggc

SEQ ID NO: 561965 - DNA, 75 bp, synthetic construct
  source 1..75: mol_type = other DNA
tgttctgcacgatatatcaggcaatccgatcaaagtttctgaagggatggaatttgtgcaatcaggtactaacgt

SEQ ID NO: 561966 - DNA, 75 bp, synthetic construct
  source 1..75: mol_type = other DNA
gctggtggaatgcaaacagtagatataacgctggtggctggcccggcagacacctcgcagtccgtccttaagagc

SEQ ID NO: 561967 - DNA, 75 bp, synthetic construct
  source 1..75: mol_type = other DNA
gatcgacaaagtaatggaaaaacagtttggctggccgatgggtccggcatatctgctggatgtcgtgggcattga

SEQ ID NO: 561968 - DNA, 75 bp, synthetic construct
  source 1..75: mol_type = other DNA
atcgatacggtacgtaatctggcgctgatttgcgaaagcgatctgctcggtgaacgtgttgctcgtcgccgtcag

SEQ ID NO: 561969 - DNA, 75 bp, synthetic construct
  source 1..75: mol_type = other DNA
cggtggagttgggttcctggggcgttgatctcaattgcggttgtccgtcaaaaaccgttaacggcagcggcggag

SEQ ID NO: 561970 - DNA, 75 bp, synthetic construct
  source 1..75: mol_type = other DNA
cgcaacaatgcatggcgatcagcggctgcgacgcagtgatgattggtcgcggggcgctcaatattcccaacctga

SEQ ID NO: 561971 - DNA, 75 bp, synthetic construct
  source 1..75: mol_type = other DNA
gtcgatacggtacgtaatctggcgctgatctgcgaaagcgatctgctcggtgaacgcgttgcccgtcgtcgtcag

SEQ ID NO: 561972 - DNA, 75 bp, synthetic construct
  source 1..75: mol_type = other DNA
gcgttttgagaatcgcggcgtcgatccgatgcgcccgctgttgccaccacaatcgctctggctgcgggtggacga

SEQ ID NO: 561973 - DNA, 75 bp, synthetic construct
  source 1..75: mol_type = other DNA
attgaacgcgcagatcacttcggtctggcgcaactacaccagttgcgcggccgcgtcggacgttcgcatcaccag

SEQ ID NO: 561974 - DNA, 75 bp, synthetic construct
  source 1..75: mol_type = other DNA
gcgtcgtttaaatcaaaaaaaccggagccaggaccatttaaagatagtgtgattattgtagcagaaataaattga

SEQ ID NO: 561975 - DNA, 75 bp, synthetic construct
  source 1..75: mol_type = other DNA
acctgcgatcgtcaggggaaaacggcaattacgctggcaagtttatatcagcaatatgcttgcgttcaggcataa

SEQ ID NO: 561976 - DNA, 75 bp, synthetic construct
  source 1..75: mol_type = other DNA
tggaacgctacgggcgggagctgccgccggaatcgctggccgtgaagattgtcgcgtcgctgtttttgcagccgg

SEQ ID NO: 561977 - DNA, 75 bp, synthetic construct
  source 1..75: mol_type = other DNA
tggctggcagagaacgccgcccgtgcggtggagttaggttcctggggcgtggatcttaactgcggctgcccgtcg

SEQ ID NO: 561978 - DNA, 75 bp, synthetic construct
  source 1..75: mol_type = other DNA
gctgaatattccggtgattgccaacggtgaaatctgggactggcagagtgcgcaacaatgtatggcgatcagcgg

SEQ ID NO: 561979 - DNA, 75 bp, synthetic construct
  source 1..75: mol_type = other DNA
ccgggagccgcatcctacgtgtactcaaagctctacgcggtcatgctctgaacggtgtttctaacggtgaactgg

SEQ ID NO: 561980 - DNA, 75 bp, synthetic construct
  source 1..75: mol_type = other DNA
cgccacaatgaccgcgacagtccgggatgcaaaaggcaacctgctcaatgacgtcaaggtcactttcaatgttaa

SEQ ID NO: 561981 - DNA, 75 bp, synthetic construct
  source 1..75: mol_type = other DNA
gcatcattaactatgttatagaaaactataaactcaaatttatcaccccaggcgttatcgattttatctgtacgt

SEQ ID NO: 561982 - DNA, 75 bp, synthetic construct
  source 1..75: mol_type = other DNA
ccactgcccgccgcaacgcctggaaggcactgttcagcccgggcgaggagatgctgtttccggttaaaaaggaga

SEQ ID NO: 561983 - DNA, 75 bp, synthetic construct
  source 1..75: mol_type = other DNA
atgaaaaaattactaattgctttcgtagtcctaactttacctctgctctcattcgctaagggtattggttatgga

SEQ ID NO: 561984 - DNA, 75 bp, synthetic construct
  source 1..75: mol_type = other DNA
cgaaatggagatttgaaaagaatagtccccgtcagggagtgaagagacaatttatctttacgccatcacgtccct

SEQ ID NO: 561985 - DNA, 75 bp, synthetic construct
  source 1..75: mol_type = other DNA
atggggtgttcgcaacataaaactgatatgccacgacagttggttaaggcgttaccacaatatccggaatatgca

SEQ ID NO: 561986 - DNA, 75 bp, synthetic construct
  source 1..75: mol_type = other DNA
taatacctttaatgaaatactggatgccggatatcgaagtaatacgacccctctcagtccgtcaacaacttactg

SEQ ID NO: 561987 - DNA, 75 bp, synthetic construct
  source 1..75: mol_type = other DNA
atatctatattgatgattcctccggcctgacaccaacggaagtgcgctcccgcgcgcggcgtattgcccgagaac

SEQ ID NO: 561988 - DNA, 75 bp, synthetic construct
  source 1..75: mol_type = other DNA
taacggcccaatcgggacggtacgcctgacctttaacggtcaatggtcgcgcttcgacaactatgcggggccgca

SEQ ID NO: 561989 - DNA, 75 bp, synthetic construct
  source 1..75: mol_type = other DNA
cgactacctgcaactgatgcgcgtaccggcgctttccgataaccgtacgctggaaattgcagaaatctcccgctc

SEQ ID NO: 561990 - DNA, 75 bp, synthetic construct
  source 1..75: mol_type = other DNA
cgtccatttaacattggtgattggattcgttcaccggatagaaatatcgagggtgttgttgctgaaatcggctgg

SEQ ID NO: 561991 - DNA, 75 bp, synthetic construct
  source 1..75: mol_type = other DNA
tgtattattattttgatcggagattacttgtcttttttaatcgatggttttcacataaaatatctttccaggaca

SEQ ID NO: 561992 - DNA, 75 bp, synthetic construct
  source 1..75: mol_type = other DNA
atgagagaagcgcttggtctgatcgaaaccaaaggtctggtggcctgtattgaggcggcagacgcgatgtgtaaa

SEQ ID NO: 561993 - DNA, 75 bp, synthetic construct
  source 1..75: mol_type = other DNA
aagaggatctgctgatctccggtccgggcaaatacccggagtataacttctaccggatggcaggtatggcaatcg

SEQ ID NO: 561994 - DNA, 75 bp, synthetic construct
  source 1..75: mol_type = other DNA
gccacaaatctctggtggtcattgccggcggtaccggcgttgcaccagtcaaggggctgatgcgctatttcgtcg

SEQ ID NO: 561995 - DNA, 75 bp, synthetic construct
  source 1..75: mol_type = other DNA
ttgctatccagacccgacggcaggagcttgctgacgatgaagcatttaagcacttcgtgaagacgaaaagcgtct

SEQ ID NO: 561996 - DNA, 75 bp, synthetic construct
  source 1..75: mol_type = other DNA
cactgattgtctggtggctgatgtatggcggtttttttgctcttgagcgggttgaaacccggcaatggggcggct

SEQ ID NO: 561997 - DNA, 75 bp, synthetic construct
  source 1..75: mol_type = other DNA
atttttatcgcgctgatttatcttgtggcgtcgctgtttttccggctgatacgtaaagcctgtcgtcagcgtctt

SEQ ID NO: 561998 - DNA, 75 bp, synthetic construct
  source 1..75: mol_type = other DNA
tgacaagcaccgaggtcggactgaaaacagtttcagcctctctggcagataaacctactgaagtcatctcgcgat

SEQ ID NO: 561999 - DNA, 75 bp, synthetic construct
  source 1..75: mol_type = other DNA
gacggcaatttttacgcaagctttaccgctacaaaagccggggtttatcaagtgacggcaaccctcgaaaatggc

SEQ ID NO: 562000 - DNA, 75 bp, synthetic construct
  source 1..75: mol_type = other DNA
catcaacctctgcgttatctcgatcacgatcatctggtgccggaagccagccacgggcgcgatgtggcattgttg

SEQ ID NO: 562001 - DNA, 75 bp, synthetic construct
  source 1..75: mol_type = other DNA
ctgcaaattgaactggcagaaccgtggcagccatggcttgcggacatccgctcgcgtcttggcaacattatgcgc

SEQ ID NO: 562002 - DNA, 75 bp, synthetic construct
  source 1..75: mol_type = other DNA
aatctgctacgcaccaaagtgcgggaaaccgaaaccgtagcggcgcaggtctttatcacccgcagctttgaagta

SEQ ID NO: 562003 - DNA, 75 bp, synthetic construct
  source 1..75: mol_type = other DNA
agttcgggacgctgggtattttcattggcgtagcgggcctgcttattggtctggctgctgtggggggaattacct

SEQ ID NO: 562004 - DNA, 75 bp, synthetic construct
  source 1..75: mol_type = other DNA
cccacacgaccaacgctggcgaattaacctggcattactgattggccttgtgtcaatcgcaccaatgttctggaa

SEQ ID NO: 562005 - DNA, 75 bp, synthetic construct
  source 1..75: mol_type = other DNA
cactgattgtctggtggctgatgtatggcggttttttggtctggagcgggttgaaacccggcaatggggcgggct

SEQ ID NO: 562006 - DNA, 75 bp, synthetic construct
  source 1..75: mol_type = other DNA
tgggcaggccaaaggcttattcccgctatttgcgtgagacgattaagccatgtctggaacgactggagcatgtac

SEQ ID NO: 562007 - DNA, 75 bp, synthetic construct
  source 1..75: mol_type = other DNA
tcgggcaaagctggtgcatgagcagcagcgttttaatccggatatggtcattctggcggacgtcaacgcccagcc

SEQ ID NO: 562008 - DNA, 75 bp, synthetic construct
  source 1..75: mol_type = other DNA
ggcaacaacacggggccgcgcttcaaatccgagcttatcaacccgcgtaagggcacgccgaccagctatatcgcc

SEQ ID NO: 562009 - DNA, 75 bp, synthetic construct
  source 1..75: mol_type = other DNA
acctttatgagcattgaagagatcaacgcccttgaagaagaagataaaaacagcggtaaagcaccgcgcgcccag

SEQ ID NO: 562010 - DNA, 75 bp, synthetic construct
  source 1..75: mol_type = other DNA
tcgatctgacccgtcgtctgcatcaaaatcaggtgtttggtctgacagttccgctgattaccaaagctgatggca

SEQ ID NO: 562011 - DNA, 75 bp, synthetic construct
  source 1..75: mol_type = other DNA
ctaaattttctcttccggttaaaattttttatgaggagaataaagggttctatgcagggagcctagagataatga

SEQ ID NO: 562012 - DNA, 75 bp, synthetic construct
  source 1..75: mol_type = other DNA
gatattaaaactatggatgagagggagctgcaggaatatctccacaacatgggccagaaggaacggcgggagctg

SEQ ID NO: 562013 - DNA, 75 bp, synthetic construct
  source 1..75: mol_type = other DNA
ggatttacccgatattaaatccatggatgagaaggagttgcaggattacttgcacaacatgagccagaaggaacg

SEQ ID NO: 562014 - DNA, 75 bp, synthetic construct
  source 1..75: mol_type = other DNA
gtaatgaaatgatggcctgtgttaagggactggagctgatagcggaaatgcgcggagactgcgcagtgttctata

SEQ ID NO: 562015 - DNA, 75 bp, synthetic construct
  source 1..75: mol_type = other DNA
ggaccggctgattagtcgtgccaaaatggcgcgcgagcagcagcgttttaatcccgatctggtcattctggctga

SEQ ID NO: 562016 - DNA, 75 bp, synthetic construct
  source 1..75: mol_type = other DNA
ggtgaacgccagcagcagcaacccggcgcaccgtcgtaatgaaatgatggcctgtgtgaaagggctggagctgat

SEQ ID NO: 562017 - DNA, 75 bp, synthetic construct
  source 1..75: mol_type = other DNA
gcagagggcaagatttgcacgcatgcgatgaagtggaaaaaggttcgtaaggccgttgatattcaggaggcggca

SEQ ID NO: 562018 - DNA, 75 bp, synthetic construct
  source 1..75: mol_type = other DNA
atgatcaacaaagaagcggttaagcagcgtctcaaccgtgaagatgaagggatgtcgataactgagttttcctac

SEQ ID NO: 562019 - DNA, 75 bp, synthetic construct
  source 1..75: mol_type = other DNA
aagtggcacagttggaaatccaggaggtgacatataccgttacggctgccaaagaatttctggaagtcgtgttat

SEQ ID NO: 562020 - DNA, 75 bp, synthetic construct
  source 1..75: mol_type = other DNA
cctgtgttaaaggcctggagcttatcgcggaaatgcgtggtgactgcgccgttttctacaccattacctgtccgt

SEQ ID NO: 562021 - DNA, 75 bp, synthetic construct
  source 1..75: mol_type = other DNA
ctactaatgtgactcccagagctacgcgtttagttgttgaagacgtcaccacacaaaatgtactggccaccttca

SEQ ID NO: 562022 - DNA, 75 bp, synthetic construct
  source 1..75: mol_type = other DNA
gcatctccctatgtcagctatgaagccgtgatgcataaacgtgagcagcgccgtaagtcgctggagtttttccgt

SEQ ID NO: 562023 - DNA, 75 bp, synthetic construct
  source 1..75: mol_type = other DNA
tgtctggaacgactggagcatgtacgcgagagtcagctatccacttcttttcgctttatggcaagccatgaaggg

SEQ ID NO: 562024 - DNA, 75 bp, synthetic construct
  source 1..75: mol_type = other DNA
gctgccgataacgagcaggaacagctgcgccgcgaggcactgagtgatcaggcctgggagcgttatttctttaat

SEQ ID NO: 562025 - DNA, 75 bp, synthetic construct
  source 1..75: mol_type = other DNA
gctaaagcttctgcagtgaaacgtcacgcgaagaaactggctcccgaaaacgcacgccgcactcgtctgtactaa

SEQ ID NO: 562026 - DNA, 75 bp, synthetic construct
  source 1..75: mol_type = other DNA
gtgagtatgaagtgaatttacttttacgcggcggcagccttccgtcagggggagggctgcgcatcttttaccaga

SEQ ID NO: 562027 - DNA, 75 bp, synthetic construct
  source 1..75: mol_type = other DNA
acatgggaaaaggtggcagcagaaaccctgcgactggatgtcataccgcctgcgtttgagcaactccgccggaaa

SEQ ID NO: 562028 - DNA, 75 bp, synthetic construct
  source 1..75: mol_type = other DNA
gactgtcctgggtaaaggcatggggcgaaggccagcaagagaaattagatggtgcttataatgttcggaatatca

SEQ ID NO: 562029 - DNA, 75 bp, synthetic construct
  source 1..75: mol_type = other DNA
ctgaaaatttgaaccaacaggagaaagataaatcagctgatggggaccccagaacggacattacccgcatggatg

SEQ ID NO: 562030 - DNA, 75 bp, synthetic construct
  source 1..75: mol_type = other DNA
ttatgttttgtgattttaaatttattttatggataaattgcgaagcggaattaattcgcgaagaaaagcagaaaa

SEQ ID NO: 562031 - DNA, 75 bp, synthetic construct
  source 1..75: mol_type = other DNA
gcctttaatcgatgagaatgcgtatagcgatgaagaaaagtcactggttaaacaggcggatgcgctgtgtgcgta

SEQ ID NO: 562032 - DNA, 75 bp, synthetic construct
  source 1..75: mol_type = other DNA
tggcagccgctattcttcagcgaaccactgccgccactgttcagttattttcctgccaatacgctgctggtgaat

SEQ ID NO: 562033 - DNA, 75 bp, synthetic construct
  source 1..75: mol_type = other DNA
gctgcatattggtcagccggtggtccatctggagcacggcgtcggtcgttatgccggaatgaccacgctcgaagc

SEQ ID NO: 562034 - DNA, 75 bp, synthetic construct
  source 1..75: mol_type = other DNA
tgccacgccgccagcccgtcgtctggcagttaaaacctttgttcgtgagtacgatagtctggtggtacgggaggc

SEQ ID NO: 562035 - DNA, 75 bp, synthetic construct
  source 1..75: mol_type = other DNA
tgccattactggccttacacaaaaaagtacgcaactaaaaacagaatctacaccggatacgaaaccgatacgcgg

SEQ ID NO: 562036 - DNA, 75 bp, synthetic construct
  source 1..75: mol_type = other DNA
gctgcatatcggccagccggttgttcacctggaacatggcgtcgggcgctatgccggaatgaccacgctggaggc

SEQ ID NO: 562037 - DNA, 75 bp, synthetic construct
  source 1..75: mol_type = other DNA
ggcgaatacgccacgcgtggtgcgttgctggatctttttccaatgggcagcgaactgccttatcgtcttgatttt

SEQ ID NO: 562038 - DNA, 75 bp, synthetic construct
  source 1..75: mol_type = other DNA
cgcgcggatcacttcggtctggcgcagctgcaccagttacgcggtcgcgtcggacgttcgcatcatcaggcatat

SEQ ID NO: 562039 - DNA, 75 bp, synthetic construct
  source 1..75: mol_type = other DNA
cctgctgccggatccggcacgtactctgctggagattgcccgcctgcgccagcaagcgcagaagctggggatccg

SEQ ID NO: 562040 - DNA, 75 bp, synthetic construct
  source 1..75: mol_type = other DNA
tcgctgttgccggatgacttcattcctgatgtaaatatccgtctgtcgttctataaacgtattgccagcgccaaa

SEQ ID NO: 562041 - DNA, 75 bp, synthetic construct
  source 1..75: mol_type = other DNA
ggacaggtttattatctctacaatgatgtggaaaacattcagaaagccgccgaacggctggcggaactggtgcca

SEQ ID NO: 562042 - DNA, 75 bp, synthetic construct
  source 1..75: mol_type = other DNA
catctggagcacggcgtcgggcgctatgccggaatgaccacgctggaggctggcggcattaccggcgagtacctg

SEQ ID NO: 562043 - DNA, 75 bp, synthetic construct
  source 1..75: mol_type = other DNA
ctataaacgtattgccagcgccaaaacggaaaacgaactggaagagatcaaagtcgagcttatcgatcgcttcgg

SEQ ID NO: 562044 - DNA, 75 bp, synthetic construct
  source 1..75: mol_type = other DNA
cgcaaaaaagtacgcaaccaaaatccgaacctccaccagatacgaaaccgatacgcggggtgcgtaccgatccgc

SEQ ID NO: 562045 - DNA, 75 bp, synthetic construct
  source 1..75: mol_type = other DNA
tttattgctttaccaaaaccacggtatgggctgaatggcttgctgcacagcaagacgtttatttgaagattatcg

SEQ ID NO: 562046 - DNA, 75 bp, synthetic construct
  source 1..75: mol_type = other DNA
gaccgtccttttagtattggcgactggatccgttcaccggacagaaatatcgaaggtacagtagcggaaattggc

SEQ ID NO: 562047 - DNA, 75 bp, synthetic construct
  source 1..75: mol_type = other DNA
tttgaaaaacagcagattaaaaaaggtcgcgatatcaccagtgcgcggattatgtcgcgcatcatcaaaatcacc

SEQ ID NO: 562048 - DNA, 75 bp, synthetic construct
  source 1..75: mol_type = other DNA
atgaaacagagccatttttttgcccacctctcccgcctgaagctcattaaccgctggccgttgatgcgtaacgtg

SEQ ID NO: 562049 - DNA, 75 bp, synthetic construct
  source 1..75: mol_type = other DNA
atctctcccgcctgaaactcattaaccgttggccgctgatgcgtaatgtgcggacagaaaatgtgtctgaacaca

SEQ ID NO: 562050 - DNA, 75 bp, synthetic construct
  source 1..75: mol_type = other DNA
atctctcccgcctgaaactcattaaccgctggccgctcatgcgcaacgtgcggacggaaaatgtgtccgaacaca

SEQ ID NO: 562051 - DNA, 75 bp, synthetic construct
  source 1..75: mol_type = other DNA
aaatgatgatgtcatgggaaaatcatccgtgtgacagaagcagggttgtgctgcgcgtcatcattactctgcgtg

SEQ ID NO: 562052 - DNA, 75 bp, synthetic construct
  source 1..75: mol_type = other DNA
cttaatgacttctactctgacatccaaaccgaccctgaatccggccctaaggaacttctggacgacacaggctcg

SEQ ID NO: 562053 - DNA, 75 bp, synthetic construct
  source 1..75: mol_type = other DNA
tgatgacggtaatggagatcgtgaccttaatgacttctactctgacatccaaaccgaccctgaatccggccctaa

SEQ ID NO: 562054 - DNA, 75 bp, synthetic construct
  source 1..75: mol_type = other DNA
tacacgggcagtaatgctgtttttggtgtgatcactcatgtcatcaatgatgcccgaagtggggagtttgatgat

SEQ ID NO: 562055 - DNA, 75 bp, synthetic construct
  source 1..75: mol_type = other DNA
tcgctggcttcttccggtgctttgctttttgctcacatgttctttccggctttatcccctgattctgtggataac

SEQ ID NO: 562056 - DNA, 75 bp, synthetic construct
  source 1..75: mol_type = other DNA
ttctgggtctttgtcttttgctcacatgttctttccggttttatcccccgattctgtggataaccgtattaccgc

SEQ ID NO: 562057 - DNA, 75 bp, synthetic construct
  source 1..75: mol_type = other DNA
cggacgaggacggacagctacaattcatagcctagaggagctttctggggatttcccgcacccggtattctttaa

SEQ ID NO: 562058 - DNA, 75 bp, synthetic construct
  source 1..75: mol_type = other DNA
atgctgagtttctggctgaaagaaaacgcccctggcagacgacgtatcgtgattattggtctggtcatgctatta

SEQ ID NO: 562059 - DNA, 75 bp, synthetic construct
  source 1..75: mol_type = other DNA
gcgagcctcctgctcggcgaaaaaagtgattgcctccagcaaggtcgatgtattgctggttcctcttgcgggaga

SEQ ID NO: 562060 - DNA, 75 bp, synthetic construct
  source 1..75: mol_type = other DNA
atcgcccgtccggttaatgggcgcataagtttgatcactctcgcttccgacccggaaatcttcaatcaattagcc

SEQ ID NO: 562061 - DNA, 75 bp, synthetic construct
  source 1..75: mol_type = other DNA
tgcgtactgagccgacctacacgctctatgcgacgttcgataacatcggcggtctgaaagcgcgctctccggtga

SEQ ID NO: 562062 - DNA, 75 bp, synthetic construct
  source 1..75: mol_type = other DNA
atctgaacatgttcaatgacggcctgagctacatgggtgttgttgaatccgtgacgctgccaaaactgacccgca

SEQ ID NO: 562063 - DNA, 75 bp, synthetic construct
  source 1..75: mol_type = other DNA
actgcagtggtcttaaaccaactgggacaggcattaattcctgtaaaacgggccagcccaacattaacttttgcc

SEQ ID NO: 562064 - DNA, 75 bp, synthetic construct
  source 1..75: mol_type = other DNA
aatggctggttgcggtgaataaaccgtccggctggttggttcatcgtagttggctggatcgtgacgagaaagtgg

SEQ ID NO: 562065 - DNA, 75 bp, synthetic construct
  source 1..75: mol_type = other DNA
aatggttggtggcggtaaataaaccgtccggctggctggtccaccgtagctggctggatcgcgacgagaaagttg

SEQ ID NO: 562066 - DNA, 75 bp, synthetic construct
  source 1..75: mol_type = other DNA
catgccagtcagttgtcattgacgcatccttttactggcgagccgctgactattcacgcgggcctggacgacacc

SEQ ID NO: 562067 - DNA, 75 bp, synthetic construct
  source 1..75: mol_type = other DNA
ttattgcctacggtgagttaagcgaactgaaccgccccgggtttcctggagagtgttttatctgtgaactcaggc

SEQ ID NO: 562068 - DNA, 75 bp, synthetic construct
  source 1..75: mol_type = other DNA
gctctgacgccagtatcggttttccgggtacggacctgagtgcgctttcccgtagccagaacggacagtatgtac

SEQ ID NO: 562069 - DNA, 75 bp, synthetic construct
  source 1..75: mol_type = other DNA
ttaacagagcgggccagctgtttgacgcggcggcacaggtctgccggattattgacggcatccggcagtgttcgc

SEQ ID NO: 562070 - DNA, 75 bp, synthetic construct
  source 1..75: mol_type = other DNA
gcgtggtcattaccccggtctataaaattgatccccggaaacccgtaacggtaaaaaaaccggatcagatcactg

SEQ ID NO: 562071 - DNA, 75 bp, synthetic construct
  source 1..75: mol_type = other DNA
gatcattaattgtatatgttatatctgctgtcattgctttaattatgctcggtgttgccatatcacaattaagta

SEQ ID NO: 562072 - DNA, 75 bp, synthetic construct
  source 1..75: mol_type = other DNA
taaggaaaaatggtatcagtgcatttgcttactacagcggcgtgacttgtgaaggcgcggaagattctaatactg

SEQ ID NO: 562073 - DNA, 75 bp, synthetic construct
  source 1..75: mol_type = other DNA
tgctcaggtcgttgattaccgcgttgtgaagatgcctgttaccaaaggtgggaagctggaactgaccatcaccga

SEQ ID NO: 562074 - DNA, 75 bp, synthetic construct
  source 1..75: mol_type = other DNA
ggtctggtggcacacagtgaaggggtcacgctttctcaaccactaggtgaaacaattggcatagtttcagcacct

SEQ ID NO: 562075 - DNA, 75 bp, synthetic construct
  source 1..75: mol_type = other DNA
gttggggcgcgcatggagtaactaccgtgttaccactgatcaggatggtcgaactacgcaacaattaggcgtaag

SEQ ID NO: 562076 - DNA, 75 bp, synthetic construct
  source 1..75: mol_type = other DNA
tagttcgagggatagcgaaaagtaacgcggaagtcagtattgaacaaaatggttacgtgatttatcgagcatttg

SEQ ID NO: 562077 - DNA, 75 bp, synthetic construct
  source 1..75: mol_type = other DNA
gtgaatacttactacatcacaattccctggcccccgagcaataaccgctagtaccgccataatcgcgggcgcaca

SEQ ID NO: 562078 - DNA, 75 bp, synthetic construct
  source 1..75: mol_type = other DNA
gtgaatacttacaacatcacaataccctggcccccgagcaataaccgctagtaccgccataatcgcgggcgcacc

SEQ ID NO: 562079 - DNA, 75 bp, synthetic construct
  source 1..75: mol_type = other DNA
gctggtcgttgattaccgcgttgtgaagatgcttgttaccaaaggtgggaagctggaactgaccatcactgaact

SEQ ID NO: 562080 - DNA, 75 bp, synthetic construct
  source 1..75: mol_type = other DNA
taagtttcgagatcgaacacgtggaaaaggacaatccgcctcaggatctgattgacctcaacccaaatcagagcg

SEQ ID NO: 562081 - DNA, 75 bp, synthetic construct
  source 1..75: mol_type = other DNA
gtgaatacttaccacatcacaatcccctggcccccgagcaataaccgctagtaccgccataatcgcgggcgcacg

SEQ ID NO: 562082 - DNA, 75 bp, synthetic construct
  source 1..75: mol_type = other DNA
gtgaatacttactacatcacaatgccctggcccccgagcaataaccgctagtaccgccataatcgcgggcgcact

SEQ ID NO: 562083 - DNA, 75 bp, synthetic construct
  source 1..75: mol_type = other DNA
tggctggatcgcgacgagaaagtggtggttatgcaaaccgtgcgtgaccagattggtcagcatgtatttaccgcg

SEQ ID NO: 562084 - DNA, 75 bp, synthetic construct
  source 1..75: mol_type = other DNA
aaagcgtttatgaataataactatgttggtctggtactgtttttagggctggcaatgagttactggcatttctga

SEQ ID NO: 562085 - DNA, 75 bp, synthetic construct
  source 1..75: mol_type = other DNA
gatgcgggcgtcggcatgattggcgcgggcattgtgcatccacccttcgcctgcttcgagaaagccattcttggc

SEQ ID NO: 562086 - DNA, 75 bp, synthetic construct
  source 1..75: mol_type = other DNA
cagactatcgaacttgaagcgatgaccttacgaatagtgtcaccgctgaatgccccgacattactcccgacgata

SEQ ID NO: 562087 - DNA, 75 bp, synthetic construct
  source 1..75: mol_type = other DNA
tgtggggcttttgctccatggcgctctcaaatgtcacttttcacggttatttagtgcagccgcctaactgcacca

SEQ ID NO: 562088 - DNA, 75 bp, synthetic construct
  source 1..75: mol_type = other DNA
atgaccattctgttgtcgattgccgcgctagcgctggcgtgggtgtacccgtttatgaagcggtatacccatcta

SEQ ID NO: 562089 - DNA, 75 bp, synthetic construct
  source 1..75: mol_type = other DNA
tactggtgctgacgctgaatacgatgactattctgttgtcgattgccgcgctggcgctggcgtgggtatacccgt

SEQ ID NO: 562090 - DNA, 75 bp, synthetic construct
  source 1..75: mol_type = other DNA
catcagccgtggtgatctgctgctggcggcagacgaagcgctaccggcagtgcagagcgcgtcggtggatgtggt

SEQ ID NO: 562091 - DNA, 75 bp, synthetic construct
  source 1..75: mol_type = other DNA
ttcgaactggaattgaatgccctggttcgccgccactttccgcactggggcgcgcgcgatttgctgggggataaa

SEQ ID NO: 562092 - DNA, 75 bp, synthetic construct
  source 1..75: mol_type = other DNA
cagtacgttaaccgcccaaatctcgattttcgtggctacgccggaacgctggcatccggtcgcgtggaagtcggg

SEQ ID NO: 562093 - DNA, 75 bp, synthetic construct
  source 1..75: mol_type = other DNA
gtgtggaatcaaacgtcgcgcggatcgtgacttttgatggcgatcgcgaagaagcctttgccggagaagcgatca

SEQ ID NO: 562094 - DNA, 75 bp, synthetic construct
  source 1..75: mol_type = other DNA
cattggtttggtggatctcacttttgacgagccgctggtgttagatcgttatcagcaaaacccggttactggtgg

SEQ ID NO: 562095 - DNA, 75 bp, synthetic construct
  source 1..75: mol_type = other DNA
ttcgaactggaattgaatgctctggttcgtcgccactttccgcactggggcgcgcgcgatttgctgggggataaa

SEQ ID NO: 562096 - DNA, 75 bp, synthetic construct
  source 1..75: mol_type = other DNA
acggcatcgttccggtaatggcggttggtaaaaatattaccctcgccgcactcaataaatttaccggtggcatta

SEQ ID NO: 562097 - DNA, 75 bp, synthetic construct
  source 1..75: mol_type = other DNA
tcattcactttaccgattttatgtggtggagcgcggtagcgacaaacatgttgcgtatgctgcaagcaaagcggc

SEQ ID NO: 562098 - DNA, 75 bp, synthetic construct
  source 1..75: mol_type = other DNA
ccatgcgctggaaagattactgcgtgggcacggacacgccgccagcgatatcattcactttaccgattatgtggt

SEQ ID NO: 562099 - DNA, 75 bp, synthetic construct
  source 1..75: mol_type = other DNA
ggtggccaaactcacgcctgcggcaactgctcctgtaaccggcgatgccgaggacgaagaggagaaaaaggaaga

SEQ ID NO: 562100 - DNA, 75 bp, synthetic construct
  source 1..75: mol_type = other DNA
cagacgcaggccgtagatagaaattatattccgctggattattctctactttattgcaacatctttgagtttcag

SEQ ID NO: 562101 - DNA, 75 bp, synthetic construct
  source 1..75: mol_type = other DNA
tgccaaagggcaaaacacccgcgccaccaccggcgatgcacagcgcccaaacatgggcatgaccagtatcgcttc

SEQ ID NO: 562102 - DNA, 75 bp, synthetic construct
  source 1..75: mol_type = other DNA
gatagtcggtgacgcggatatccgcaaattaccgaaacaatcggtcaacatggcgtttaatgccgtgtctgagat

SEQ ID NO: 562103 - DNA, 75 bp, synthetic construct
  source 1..75: mol_type = other DNA
tgcgcgaccggctggcgctcgacggtaaaaaagcaggcggctattttaaccagcagattgtcgagccaattgcgg

SEQ ID NO: 562104 - DNA, 75 bp, synthetic construct
  source 1..75: mol_type = other DNA
gtgaaagccaatgatgcggcgctcagcgacggaaccttttctgcctacgcaacattacaggtggattaccaatga

SEQ ID NO: 562105 - DNA, 75 bp, synthetic construct
  source 1..75: mol_type = other DNA
taccggtgaaagccagtgatgcttcactcagcgaaggaaccttttctgcctgggcaacattacaggtggattacc

SEQ ID NO: 562106 - DNA, 75 bp, synthetic construct
  source 1..75: mol_type = other DNA
ccttgctgatatcaatgaatccatgctcaaaatgggacgcgagaagctgcgtaatttctatgtcgcaaattgccg

SEQ ID NO: 562107 - DNA, 75 bp, synthetic construct
  source 1..75: mol_type = other DNA
gtatgacgaacaaggcgatcttatcgcccgttctggcgaaagcgtcgaagtgcgtgaccggctggcgctcgacgg

SEQ ID NO: 562108 - DNA, 75 bp, synthetic construct
  source 1..75: mol_type = other DNA
tggcagcaatcgcccttcctgttaaccgccagtaaaccggtgccggaagaggaagaaagcgagaaaaaagagtga

SEQ ID NO: 562109 - DNA, 75 bp, synthetic construct
  source 1..75: mol_type = other DNA
atgaaacactttttcttacctttgggggtttgtgcgctgttgttgtcgggatgtggtgatgacgatgttacacag

SEQ ID NO: 562110 - DNA, 75 bp, synthetic construct
  source 1..75: mol_type = other DNA
gacgggcattaacgtcagcgttgatagcctcgacgcccgtcagtttcacgccattaccgggcaggataaattcaa

SEQ ID NO: 562111 - DNA, 75 bp, synthetic construct
  source 1..75: mol_type = other DNA
ttaaagtcaataccgtgctgatgcgggatgtcaatcatcatcaactcgacacctttctgaactggatccagcatc

SEQ ID NO: 562112 - DNA, 75 bp, synthetic construct
  source 1..75: mol_type = other DNA
ggaaaaagttcctatgacagatgatggtaagaccccgcgagcaggttgtttgaaagcttattcaccagagccaga

SEQ ID NO: 562113 - DNA, 75 bp, synthetic construct
  source 1..75: mol_type = other DNA
cagtgcccaggtctggataagtacgcgacaaacttcgattcgttcaaggtctacgatgatagccaacgtcccgtt

SEQ ID NO: 562114 - DNA, 75 bp, synthetic construct
  source 1..75: mol_type = other DNA
tatgactgctgataagaaaccaccacgcgaggggtgcctgatggtttactcgccagagccggatggggattactg

SEQ ID NO: 562115 - DNA, 75 bp, synthetic construct
  source 1..75: mol_type = other DNA
aattataaatcagatgcttggacaatcctacaaggaaaaagaagagcacaagaagaaagtaaatgaattaatgga

SEQ ID NO: 562116 - DNA, 75 bp, synthetic construct
  source 1..75: mol_type = other DNA
gtccgtggcgtttacgtaataacagtatctggaaccgtaccgatggcaaaaaccaatgggataacgttggtacat

SEQ ID NO: 562117 - DNA, 75 bp, synthetic construct
  source 1..75: mol_type = other DNA
cattgtggaattgcgtagcgacacgttggggcaaaacgttgaactacaggaagcgttccagaaagtcgtgcctac

SEQ ID NO: 562118 - DNA, 75 bp, synthetic construct
  source 1..75: mol_type = other DNA
tcaggttcggctgttacgctgagtgaaagcggtaataccattagtggcatgacaggcgcggatgggacggcaagt

SEQ ID NO: 562119 - DNA, 75 bp, synthetic construct
  source 1..75: mol_type = other DNA
aagtggtcgatataacatggagattatctgttaaggatagcggtacaaaaggcagtaaccctgagttatcgccaa

SEQ ID NO: 562120 - DNA, 75 bp, synthetic construct
  source 1..75: mol_type = other DNA
taaaagttgattatccacttcataattcaccagaggaacaaaaatgggtcgatgtaaaggtagacagaaaacaaa

SEQ ID NO: 562121 - DNA, 75 bp, synthetic construct
  source 1..75: mol_type = other DNA
gacgccgatgcgctggcgcaactgcgccgcgagcatttcggctttattttccagcgttaccatttgctttcgcat

SEQ ID NO: 562122 - DNA, 75 bp, synthetic construct
  source 1..75: mol_type = other DNA
gctggccagtggtgctgataaggatgcaattgtgcgggaggctcttcttcgtaattttaatactccaccctttaa

SEQ ID NO: 562123 - DNA, 75 bp, synthetic construct
  source 1..75: mol_type = other DNA
acagcacacacctgttcggagtgcaacgtctgtgccagcgtcgcctgcccggtaggtatttcaccaatgcgcata

SEQ ID NO: 562124 - DNA, 75 bp, synthetic construct
  source 1..75: mol_type = other DNA
ggtaggtatttcaccgatgcgcataaaccgcctgcttaagcaggaattacgcgccaaaaatctccgctatgaagg

SEQ ID NO: 562125 - DNA, 75 bp, synthetic construct
  source 1..75: mol_type = other DNA
agcgcaactttatggtcaacgtacagaaggtgaacaggagcaagcgcaatggcgtaagcaaattgcttcgttgat

SEQ ID NO: 562126 - DNA, 75 bp, synthetic construct
  source 1..75: mol_type = other DNA
taaccggccatcctttgttgtatacggagatggcgggaaaataaccatctcagaaaatgggaaattaacaccgcc

SEQ ID NO: 562127 - DNA, 75 bp, synthetic construct
  source 1..75: mol_type = other DNA
tccttcttcgtgatttcaatactccgccctttaagaaagagcctgatggctggatccagccggggctgaattatc

SEQ ID NO: 562128 - DNA, 75 bp, synthetic construct
  source 1..75: mol_type = other DNA
agttgctgcaaggtgaggtcgattgcttgctggtttccccggaacgtttggcaaaccaggactttatcgaaacgg

SEQ ID NO: 562129 - DNA, 75 bp, synthetic construct
  source 1..75: mol_type = other DNA
cgttgtggtaaatgtagcagttgtcttcagcatccgttgttgtcgcccgacattgatagcggcttactccatgcg

SEQ ID NO: 562130 - DNA, 75 bp, synthetic construct
  source 1..75: mol_type = other DNA
gcgcactgcatctctgattggggccacgattttcgcccggattaccgacgtatattagatattttgcgccaactg

SEQ ID NO: 562131 - DNA, 75 bp, synthetic construct
  source 1..75: mol_type = other DNA
agtactggcgctggcgggcggcgcaacagtggataatcctggttttatcaatggcggtccgatgatgggtagttt

SEQ ID NO: 562132 - DNA, 75 bp, synthetic construct
  source 1..75: mol_type = other DNA
cacccgctgcattacccgttagcgtcggtgtggtggtcaataatgttcaaaccgtacttaatattgccagagccg

SEQ ID NO: 562133 - DNA, 75 bp, synthetic construct
  source 1..75: mol_type = other DNA
aaggaaaggaagaccaccacgcagacccctcagagagcactggacacgggagttcaccgaccagtgcatggaaaa

SEQ ID NO: 562134 - DNA, 75 bp, synthetic construct
  source 1..75: mol_type = other DNA
tggcaagacgtcgcaacaggcctctgttagcggcacgttactggaagatcgtaacctgagctataacgttcagca

SEQ ID NO: 562135 - DNA, 75 bp, synthetic construct
  source 1..75: mol_type = other DNA
gttgtttatgactaccgctctgctgggctggtactacgttttgccgttcgtcctgtttttacaagggatggtcaa

SEQ ID NO: 562136 - DNA, 75 bp, synthetic construct
  source 1..75: mol_type = other DNA
ccggcgctcggcggtctgctggtggaatatgcgtcgtggcactggatctttttaatcaacattccggtggggatt

SEQ ID NO: 562137 - DNA, 75 bp, synthetic construct
  source 1..75: mol_type = other DNA
aagcccgctgcatatgcacatggtcattgtctcttatgtgctgaccgtggcggtgatgctgcctgccagcggctg

SEQ ID NO: 562138 - DNA, 75 bp, synthetic construct
  source 1..75: mol_type = other DNA
ggcactggttcccctcagcacagggcaacaggccgcatggcgggcggtggcggagacggaagccgcaggatatcg

SEQ ID NO: 562139 - DNA, 75 bp, synthetic construct
  source 1..75: mol_type = other DNA
acttccgtaatggctattccacgaaaaccgtcaccactaccgacgggccgatggaattacgtactccacctgatc

SEQ ID NO: 562140 - DNA, 75 bp, synthetic construct
  source 1..75: mol_type = other DNA
gccgggcaattgtccctttcaaagcgcaattaacgatgggggatacggcgaccgcgggggatatttttgacagcg

SEQ ID NO: 562141 - DNA, 75 bp, synthetic construct
  source 1..75: mol_type = other DNA
aacgtcgcaaggtggatattgaaccggatcagcaaaacagcctggggagctattctcttaaaaatggcgaaaaac

SEQ ID NO: 562142 - DNA, 75 bp, synthetic construct
  source 1..75: mol_type = other DNA
tctcgctttcccaacctttgggtgaaaccattggtatagtttcagcaccaggtgcccgggggggcgaaagtatta

SEQ ID NO: 562143 - DNA, 75 bp, synthetic construct
  source 1..75: mol_type = other DNA
tattgcttacagttggaataaaagccctgaatgggatgaaaacgaccagttatggtcatttaatgtttccattcc

SEQ ID NO: 562144 - DNA, 75 bp, synthetic construct
  source 1..75: mol_type = other DNA
ttattgctggcggttggcatggcggtattaaccctggcgctggacggcagtaaaggtacaggtttatcgccgctg

SEQ ID NO: 562145 - DNA, 75 bp, synthetic construct
  source 1..75: mol_type = other DNA
atggacggaaagaaccgggcagcatcctcttatctgagtccgggaaatcccccggcagataaagagcagaatgat

SEQ ID NO: 562146 - DNA, 75 bp, synthetic construct
  source 1..75: mol_type = other DNA
gtgggcgcaatgcgtctgggcgataacaaaagtgcgctgctgggctggaccagcttcctcggcacaccggaagaa

SEQ ID NO: 562147 - DNA, 75 bp, synthetic construct
  source 1..75: mol_type = other DNA
tgaagatctggcaagtggtaagcacaccacagtacatacccgtttcccgccggaaccgaatggctatctgcatat

SEQ ID NO: 562148 - DNA, 75 bp, synthetic construct
  source 1..75: mol_type = other DNA
agtcgcgggcgcgcttgttttcgttcggcgctaaaacgttgcgccggggcgtgctgcggtaaagagagccatgac

SEQ ID NO: 562149 - DNA, 75 bp, synthetic construct
  source 1..75: mol_type = other DNA
atgctgcggtaaagagagccatgacgatcatgcgctacgtttgcgccagtctctggaacgtttacgagtcgtttg

SEQ ID NO: 562150 - DNA, 75 bp, synthetic construct
  source 1..75: mol_type = other DNA
cgaaagtgacaccatgccgctctatatcggcaaaagcattaacatccgcagccgcgtcctttctcatttacgtac

SEQ ID NO: 562151 - DNA, 75 bp, synthetic construct
  source 1..75: mol_type = other DNA
cgacagtgattaccgccgttatcacaagcgcagccagatacagggcaatattacccagcaactgggagactacgg

SEQ ID NO: 562152 - DNA, 75 bp, synthetic construct
  source 1..75: mol_type = other DNA
attaacgatctctacgcaacctccggcagcggcgacctgacggtgatcattaaagaagccgacggaagtgaacaa

SEQ ID NO: 562153 - DNA, 75 bp, synthetic construct
  source 1..75: mol_type = other DNA
ccgaagcctttgccgagtgggtgaaagcctcgccgcatgatgatgataagccgattttgctaccgggcgagtggg

SEQ ID NO: 562154 - DNA, 75 bp, synthetic construct
  source 1..75: mol_type = other DNA
ccgtattaaatttgctgaacaccaccagactggcaacaagtggtgcatttacccgatgtacgacttcacccactg

SEQ ID NO: 562155 - DNA, 75 bp, synthetic construct
  source 1..75: mol_type = other DNA
ctgggtactggacaacatcaccattcctgttcacccgcgccagtatgagttctcgcgcctgaatctggaatacac

SEQ ID NO: 562156 - DNA, 75 bp, synthetic construct
  source 1..75: mol_type = other DNA
tccgattattttgatcaactccacgcctatgctgttgaactgatcaataaaggcctggcatatgttgatgaactg

SEQ ID NO: 562157 - DNA, 75 bp, synthetic construct
  source 1..75: mol_type = other DNA
atgatgtcagataccacactctcccgcccggaggtggtcagcgggcatacggacgttacctattccacctcagtc

SEQ ID NO: 562158 - DNA, 75 bp, synthetic construct
  source 1..75: mol_type = other DNA
acggcaccagcctggtctgaacctgaaaacaaacgaaaggaacttaatgatgacgacaaaactatcactccctga

SEQ ID NO: 562159 - DNA, 75 bp, synthetic construct
  source 1..75: mol_type = other DNA
gctgacgttacatacggcaccagcctggtctgaacctgaaaacaaacaaaaggaacttaatgatgacgacaaaac

SEQ ID NO: 562160 - DNA, 75 bp, synthetic construct
  source 1..75: mol_type = other DNA
gttgtttatgaccaccgcgctgctgggctggtactacgttttaccgttcgtcctgtttttacaaggaatggtcaa

SEQ ID NO: 562161 - DNA, 75 bp, synthetic construct
  source 1..75: mol_type = other DNA
catcgcccttccggcgctcgtctttgccagagttcctgatgatacgcatcaaaatgtggctatttcacggcgaaa

SEQ ID NO: 562162 - DNA, 75 bp, synthetic construct
  source 1..75: mol_type = other DNA
cggcatggagagataccgggagctgaaactacaaaggctgctatccctgcctgacaagaacaaaggggcatttga

SEQ ID NO: 562163 - DNA, 75 bp, synthetic construct
  source 1..75: mol_type = other DNA
gacaccggaaaataaagctgagcacgaagagatcaaagcggcgttgttccgggaaatcaggaagattgctgaaat

SEQ ID NO: 562164 - DNA, 75 bp, synthetic construct
  source 1..75: mol_type = other DNA
ggcactgatgacgatttacgaccaggaactcctgatggcggaattgcgcaagattgtgggccaggacaaaacctg

SEQ ID NO: 562165 - DNA, 75 bp, synthetic construct
  source 1..75: mol_type = other DNA
ggcgcatcgaaaaatctggctgaaagcatcgacaaggtgctgagacccaccagccttaaatgcggtgggcgacct

SEQ ID NO: 562166 - DNA, 75 bp, synthetic construct
  source 1..75: mol_type = other DNA
tgaaagtatgccgtggtacagcggtccgacactgctagaagtgctggaaaccgtggagatccagcgagtggtgga

SEQ ID NO: 562167 - DNA, 75 bp, synthetic construct
  source 1..75: mol_type = other DNA
tttgagctggaactgaatgcgttggtacgtcgccacttcccacactggggcgcgcgcgatttgctgggaggtaaa

SEQ ID NO: 562168 - DNA, 75 bp, synthetic construct
  source 1..75: mol_type = other DNA
cgcaaaataacaaaggtgctttcgaaatccccgactccatcgttgacaccgaatacaacggtaacggagaagaag

SEQ ID NO: 562169 - DNA, 75 bp, synthetic construct
  source 1..75: mol_type = other DNA
attaccgtgtcgaatttaaaaccggggacttttcaagaaacaaaatcttgaaagtttcttccctgagatccccgt

SEQ ID NO: 562170 - DNA, 75 bp, synthetic construct
  source 1..75: mol_type = other DNA
tctaccgggtgaactggcaggatatcaggccggagcatattttgatgatcctgtgttgctacgcgaccgtatacc

SEQ ID NO: 562171 - DNA, 75 bp, synthetic construct
  source 1..75: mol_type = other DNA
cctcgaaattggcgcagatgactacatcaccaaaccgttcaacccgcgtgaactgactatccgtgcacgcaacct

SEQ ID NO: 562172 - DNA, 75 bp, synthetic construct
  source 1..75: mol_type = other DNA
aacgtgatgaacagctgattagcagtcagaaaaagagaaggactatacgtggtatatatataaagataaagaact

SEQ ID NO: 562173 - DNA, 75 bp, synthetic construct
  source 1..75: mol_type = other DNA
tagcagtcagaaaaaagagaagggctatacgtggtatatatgcaaagataaaaaacttaataaacgtaagttagc

SEQ ID NO: 562174 - DNA, 75 bp, synthetic construct
  source 1..75: mol_type = other DNA
taataaatggattaagtgaagactttaaaaaacgtacagttatgcttgtcgatcagataccagagaagcaaaaga

SEQ ID NO: 562175 - DNA, 75 bp, synthetic construct
  source 1..75: mol_type = other DNA
tgtcggtgccgacgactatctggtgaagcctttcgcgctggaagagttgcacgcccgcatccgcgccctgctgcg

SEQ ID NO: 562176 - DNA, 75 bp, synthetic construct
  source 1..75: mol_type = other DNA
atacgctgttattgcagggactgattctggcggcgcaaaccgaaggctacgcgtgcgatggcgtgacaaccgcgc

SEQ ID NO: 562177 - DNA, 75 bp, synthetic construct
  source 1..75: mol_type = other DNA
tgaatatgggtcgccgtcaggtatggatgggcggtgaagagttgattctgacgcccaaagaatatgctctgctgt

SEQ ID NO: 562178 - DNA, 75 bp, synthetic construct
  source 1..75: mol_type = other DNA
ggcatatcctctcttcctttacgcctttatcgttgccgttgtgcataacgtgcgcagcgacagtaccagtgccgc

SEQ ID NO: 562179 - DNA, 75 bp, synthetic construct
  source 1..75: mol_type = other DNA
gttttcgtccgatgcgttcaacggcagacgccattgaacagtgctttgtggtgctcagccggggcaactcggcgc

SEQ ID NO: 562180 - DNA, 75 bp, synthetic construct
  source 1..75: mol_type = other DNA
actgtcagcgaagaacgtcgtagcgttgaaagctacaagttcaatggttgggaactggacatcaacagccgttcg

SEQ ID NO: 562181 - DNA, 75 bp, synthetic construct
  source 1..75: mol_type = other DNA
tcagaaaaaagagaaagactatacgtggtatatatataaagataaagagcttaataaacgtaagttagcgcttga

SEQ ID NO: 562182 - DNA, 75 bp, synthetic construct
  source 1..75: mol_type = other DNA
aagaattacatgctttagcaaaaacgacctttactctggaaggtttacaggaacgttatgatttacaggaagcaa

SEQ ID NO: 562183 - DNA, 75 bp, synthetic construct
  source 1..75: mol_type = other DNA
gagttttctgactgggaagatagtcgtcggcgaattgatttattggcaatcgataaacaggcaaatttagtggtt

SEQ ID NO: 562184 - DNA, 75 bp, synthetic construct
  source 1..75: mol_type = other DNA
acatgcgttatccctggaacgggagcgtcagccggaaatacaggaacgcacgctggatggtccttcgctgggatg

SEQ ID NO: 562185 - DNA, 75 bp, synthetic construct
  source 1..75: mol_type = other DNA
ggccgtctgcaccgcagcctggtctgtgagtgcgaagccgttaccgcaggcgaagtgcaatatgcagtagaaaat

SEQ ID NO: 562186 - DNA, 75 bp, synthetic construct
  source 1..75: mol_type = other DNA
tgccgtctgccgcaaactgggcaactcgcgcccctgcacaaccgccgacctggcactaccgggttcacaagaacc

SEQ ID NO: 562187 - DNA, 75 bp, synthetic construct
  source 1..75: mol_type = other DNA
tatccttaccgctcatgaagtcacgggactgattcgtgaaggcgcgacggtgtgcggcgttcgtgtacgtaacca

SEQ ID NO: 562188 - DNA, 75 bp, synthetic construct
  source 1..75: mol_type = other DNA
caagattgcgagcacatattcaaaagcattattcattactaccagagcaacgagtattgcttcgtttatctgaga

SEQ ID NO: 562189 - DNA, 75 bp, synthetic construct
  source 1..75: mol_type = other DNA
gacctaaagaaatcgaagcgatgttccagagtatgcctgaaggtccacggcaaggcatcgaaaagcgggacggca

SEQ ID NO: 562190 - DNA, 75 bp, synthetic construct
  source 1..75: mol_type = other DNA
tctgtcccctaaaggcgctgctgcgcttctacgcttgtgtcttcagaagctaatggtccatctcaaggagccggg

SEQ ID NO: 562191 - DNA, 75 bp, synthetic construct
  source 1..75: mol_type = other DNA
agttccggatggcaccgttgatccatttcgtctgaccgcagcaaatatgcttgatgccaaagaacacggtgccgt

SEQ ID NO: 562192 - DNA, 75 bp, synthetic construct
  source 1..75: mol_type = other DNA
cccgcatccagcaagcagcggacatctgtcgtattgttggtaaccaagctgtccaccccggggagattagccttg

SEQ ID NO: 562193 - DNA, 75 bp, synthetic construct
  source 1..75: mol_type = other DNA
gttgatgaccgcatcaccagacctaaagaaatcgaagcgatgttccagagtatgcctgaaggtccccgacaaaat

SEQ ID NO: 562194 - DNA, 75 bp, synthetic construct
  source 1..75: mol_type = other DNA
gcgtgaaggggaaaaactggcccccgtgatggcgcaaacgcgcattttgcgggcctactctggcgtgcgtccact

SEQ ID NO: 562195 - DNA, 75 bp, synthetic construct
  source 1..75: mol_type = other DNA
ctctccttccaggccacttttattcgcgcctgcgaagaagcagggatcagcgcagaagctatagacccgcagcaa

SEQ ID NO: 562196 - DNA, 75 bp, synthetic construct
  source 1..75: mol_type = other DNA
gtgagtgcgaagcggtaactgcgggtgaagtgcagtacgcagtagaaaatttaaatgttaacagcctgctggatt

SEQ ID NO: 562197 - DNA, 75 bp, synthetic construct
  source 1..75: mol_type = other DNA
tgcgaacattgcgatggtttaagtttctggttttcagaacaaatgatcgttcctgcgtcttctaatattgaaatg

SEQ ID NO: 562198 - DNA, 75 bp, synthetic construct
  source 1..75: mol_type = other DNA
gcaaaagaggttgatgtcagtgataaagaggcgcgctgcggtgtgcgttgtgccacccgcgatcatctgccaatg

SEQ ID NO: 562199 - DNA, 75 bp, synthetic construct
  source 1..75: mol_type = other DNA
aggttgaaggcgttacaggtgtagtaacaaattgtggcggtattacatatccgcaaggtggatggctgtgtccag

SEQ ID NO: 562200 - DNA, 75 bp, synthetic construct
  source 1..75: mol_type = other DNA
tgccagtacgctggcggcgttaaatccgaataggttatgggtgcggaaattgttgaagggtaaagcagttaaggc

SEQ ID NO: 562201 - DNA, 75 bp, synthetic construct
  source 1..75: mol_type = other DNA
ctggccggaactggctccgtgggcagaacaacttcaggcgcagtggccaatgcccttgcccggttgccatcgttt

SEQ ID NO: 562202 - DNA, 75 bp, synthetic construct
  source 1..75: mol_type = other DNA
ctggctgtagccgttgaggcaaatgcggttgaacaaattacgggcgttgcgacaaattgcagcggtattacttat

SEQ ID NO: 562203 - DNA, 75 bp, synthetic construct
  source 1..75: mol_type = other DNA
ccttcacttctgccggatttgtccgtcgcggtttgcaggaagccggattcacaatgcaaaagcgtaagggctttg

SEQ ID NO: 562204 - DNA, 75 bp, synthetic construct
  source 1..75: mol_type = other DNA
agttaaaaaaagaccccctattgtgccaacaggatgatcgttacaatggcaatcttcttttcccctatggatatg

SEQ ID NO: 562205 - DNA, 75 bp, synthetic construct
  source 1..75: mol_type = other DNA
ttacgaggccaaaagaaatcgaggcgatgttccagagtatgcctgaaggcccacggcagggaatcgaaaagcgcg

SEQ ID NO: 562206 - DNA, 75 bp, synthetic construct
  source 1..75: mol_type = other DNA
ttgaacatcattgtcgatgaccgaattacgaggccaaaagaaatcgaggcgatgttccagagtatgcctgaaggc

SEQ ID NO: 562207 - DNA, 75 bp, synthetic construct
  source 1..75: mol_type = other DNA
gttgttgaattttgcaggagatcagcaagcaacacacagtgtagtggtactggcgaacgggcatcaaatcagcgg

SEQ ID NO: 562208 - DNA, 75 bp, synthetic construct
  source 1..75: mol_type = other DNA
caggtgatgcatagcgtggtggtactggcgaacgggcatcaaatcagccgcttcagccagacgtcacctctaccg

SEQ ID NO: 562209 - DNA, 75 bp, synthetic construct
  source 1..75: mol_type = other DNA
caaaacattcttagcgtgcatattttgaaccagcaaacaggaaaacccgctgccgacgtggcagtcactcttgaa

SEQ ID NO: 562210 - DNA, 75 bp, synthetic construct
  source 1..75: mol_type = other DNA
aaaatgcaaaagcaccgcgtctcaacgttattggtgaccaacaaggcaaataaagtcactggccttgtgcgcatt

SEQ ID NO: 562211 - DNA, 75 bp, synthetic construct
  source 1..75: mol_type = other DNA
cgttgacttttccggttaaagccggggatgagtgtcttgtcgtttttgccgatcgttgtattgatttctggtggc

SEQ ID NO: 562212 - DNA, 75 bp, synthetic construct
  source 1..75: mol_type = other DNA
ccgacggtgacctgcgtcgctttatggaaaaagaggattctctgacatccgctacggctgcgcagatgatgacac

SEQ ID NO: 562213 - DNA, 75 bp, synthetic construct
  source 1..75: mol_type = other DNA
ccgcattaagtttgctgaacaccaccagactggcaacaagtggtgcatctacccgatgtacgacttcacccactg

SEQ ID NO: 562214 - DNA, 75 bp, synthetic construct
  source 1..75: mol_type = other DNA
caaccttctctattggtaaaggcaatgtactgcgtgaaggtactgacatcacgctgattgctaatggcattatgg

SEQ ID NO: 562215 - DNA, 75 bp, synthetic construct
  source 1..75: mol_type = other DNA
gcaagtaataaccgtatttctgaagatattaattggtttcccgggattagcctggaacacgcattacgcaacggg

SEQ ID NO: 562216 - DNA, 75 bp, synthetic construct
  source 1..75: mol_type = other DNA
ttttactattcatgattttcgacgtaccgcgcgatcgcatctggctgcgttaggagttgacccggtagttgcaga

SEQ ID NO: 562217 - DNA, 75 bp, synthetic construct
  source 1..75: mol_type = other DNA
tgacgagttgatgaagctcttccaggctatgcccatgacaaaaggcttctcacgtcaaaacgagctgacaatgaa

SEQ ID NO: 562218 - DNA, 75 bp, synthetic construct
  source 1..75: mol_type = other DNA
tgcaaaaaatagttcagcgtggtgcacctacagtcgctaatgatgtgctccgatggactcgtcgtatcttcgatt

SEQ ID NO: 562219 - DNA, 75 bp, synthetic construct
  source 1..75: mol_type = other DNA
gccgctatatggaaaaatgcgaagacttcgttaacggcaccgctcagtcgatgatgacccgcaatccgatcacca

SEQ ID NO: 562220 - DNA, 75 bp, synthetic construct
  source 1..75: mol_type = other DNA
gtttacaacatacaatctttcttgtaattttaagccatcagcaggacgcactgaccaccattgaaggtgatgctc

SEQ ID NO: 562221 - DNA, 75 bp, synthetic construct
  source 1..75: mol_type = other DNA
aagcgcttaaggccctccagtccggccaagcattaaccggcaaggatggtatcctaacgccattaatcaaacagt

SEQ ID NO: 562222 - DNA, 75 bp, synthetic construct
  source 1..75: mol_type = other DNA
aagcgcctataacggcggcttaggctgggtgaaccgcgataaaaaactggcgacgcagcgcggattaaatgctgc

SEQ ID NO: 562223 - DNA, 75 bp, synthetic construct
  source 1..75: mol_type = other DNA
ccaggactgcctggcattccactctctatcgtgcgtcctgaagcccatttcacgttgttggatagccttggtaaa

SEQ ID NO: 562224 - DNA, 75 bp, synthetic construct
  source 1..75: mol_type = other DNA
gtacgccatattctggacagcattgtcgtcgcaccttatctgcaaggtgaacgttttattgatgtcggcaccggc

SEQ ID NO: 562225 - DNA, 75 bp, synthetic construct
  source 1..75: mol_type = other DNA
ctctctgaacgatatggtgagctggtgccatcatcttcctggtgaacaaggtcgtttttatgcgctgaaaggcca

SEQ ID NO: 562226 - DNA, 75 bp, synthetic construct
  source 1..75: mol_type = other DNA
ctgcggatgatttcctgtcggtgattaacccggagtcgctggtgatcaaacagggctttgctgaaccgtcgctga

SEQ ID NO: 562227 - DNA, 75 bp, synthetic construct
  source 1..75: mol_type = other DNA
caagcaggacaacaccattgagatggcgtcactggaatcctgcatccgtgaagatctcaacgaaaatgcgccgcg

SEQ ID NO: 562228 - DNA, 75 bp, synthetic construct
  source 1..75: mol_type = other DNA
gtataaagaagaaccccgagaatgccctaagccaacataaacgtaattctatagatgctttagtggaaagtttgg

SEQ ID NO: 562229 - DNA, 75 bp, synthetic construct
  source 1..75: mol_type = other DNA
catttctgctggtggggccgctatcaacctggataagtgaactgattgctgccggttatctctggctttatcagg

SEQ ID NO: 562230 - DNA, 75 bp, synthetic construct
  source 1..75: mol_type = other DNA
atgaagcggggttagcgttttacgatcggctgtttgatgaaatggcgcaggcggggatcaagccgctggtaacgt

SEQ ID NO: 562231 - DNA, 75 bp, synthetic construct
  source 1..75: mol_type = other DNA
atcaccattgagatgactgaaagtgacgcagaagatttaaaacatactgtagatttcatctcttttagggaaggt

SEQ ID NO: 562232 - DNA, 75 bp, synthetic construct
  source 1..75: mol_type = other DNA
taacgtcgatgtcactatcatcgctcaggcaccgaagatgttgccgcacattccacaaatgcgcgtgtttattgc

SEQ ID NO: 562233 - DNA, 75 bp, synthetic construct
  source 1..75: mol_type = other DNA
atttaaaggagcagacagccgcgagctactgcgtgaagcctggcgacgcattcaggcgaaggggtataccctcgg

SEQ ID NO: 562234 - DNA, 75 bp, synthetic construct
  source 1..75: mol_type = other DNA
ttcaggcgaaaggttatgccctcggcaacgtcgatgtcactatcatcgctcaggcaccgaggatgttgccgcaca

SEQ ID NO: 562235 - DNA, 75 bp, synthetic construct
  source 1..75: mol_type = other DNA
ctccctgtagcattgagcaaggtgaagggtaacctccccgacgtacctaattttactatccatgattttcgacgt

SEQ ID NO: 562236 - DNA, 75 bp, synthetic construct
  source 1..75: mol_type = other DNA
gtggagagcctgtttaaagtctttggccgcacgctgcgccaggcgatccgcgtggacggcaatgcccttccctcc

SEQ ID NO: 562237 - DNA, 75 bp, synthetic construct
  source 1..75: mol_type = other DNA
cgcggtatttgccgctttggttttgtgctaccgatggacgaatgccttgcccgctgcgcgctggatatctctggt

SEQ ID NO: 562238 - DNA, 75 bp, synthetic construct
  source 1..75: mol_type = other DNA
gtgatgatcaccaaccaggacgggctgggcaccgacagcttcccgcaggcggatttcgacggcccgcacaacctg

SEQ ID NO: 562239 - DNA, 75 bp, synthetic construct
  source 1..75: mol_type = other DNA
gtggagagcctgtttaaagcctttggccgtacgctgcgtcaggcgattcgtgtagaaggcgacacgctgccctct

SEQ ID NO: 562240 - DNA, 75 bp, synthetic construct
  source 1..75: mol_type = other DNA
ctacgcacacgttgagcgtaatactaaagaaacgcagattgacgtcaaagtctggctggaccgcgaaggccgcag

SEQ ID NO: 562241 - DNA, 75 bp, synthetic construct
  source 1..75: mol_type = other DNA
caaaggtaaaaacgatcatcaccgtgtagagagcctgttcaaagcctttggtcgcaccctacgccaggccatccg

SEQ ID NO: 562242 - DNA, 75 bp, synthetic construct
  source 1..75: mol_type = other DNA
gactgacgacaaaagaagtcatacttattcttctggtcgttgctgctttaattctctgggttgggtgctccggat

SEQ ID NO: 562243 - DNA, 75 bp, synthetic construct
  source 1..75: mol_type = other DNA
tctgggctggttctgggcagtttactctattggtatcggcgtattcggcagctacatccccagttttaccattcc

SEQ ID NO: 562244 - DNA, 75 bp, synthetic construct
  source 1..75: mol_type = other DNA
ctttgtcctttgcgcattcattcgcgttgagcagccaggattcagttctgcgccagtgactgagaaggcattgaa

SEQ ID NO: 562245 - DNA, 75 bp, synthetic construct
  source 1..75: mol_type = other DNA
aggccgcgcggtactttgcaagggagcccgactgcagtaccgctttatcaatgagcaccgcactgtatggggtgt

SEQ ID NO: 562246 - DNA, 75 bp, synthetic construct
  source 1..75: mol_type = other DNA
gggatatatcgccatcgcagtatttatgactggtgatggtttcgaactcgcattcttatcgcactatattaaatc

SEQ ID NO: 562247 - DNA, 75 bp, synthetic construct
  source 1..75: mol_type = other DNA
tggctctggttgtattgtattttttccttcactatttttttgccagtggcacagcacatgtcacggcactgctac

SEQ ID NO: 562248 - DNA, 75 bp, synthetic construct
  source 1..75: mol_type = other DNA
gccgccgagcgatttccaggttgaccgtttcgacaaactggaatttgaaccggacgttattccgacgctgctgac

SEQ ID NO: 562249 - DNA, 75 bp, synthetic construct
  source 1..75: mol_type = other DNA
ccgccacgctctggaattatgggccgacctgctggtggctctggaacaggggagcgaatacaacgtaaccccatt

SEQ ID NO: 562250 - DNA, 75 bp, synthetic construct
  source 1..75: mol_type = other DNA
agcgctggccatgctgggcaacctgatggaagcgcttgaacggggcgaagagtacaacgttcaaccattgaggaa

SEQ ID NO: 562251 - DNA, 75 bp, synthetic construct
  source 1..75: mol_type = other DNA
agcaggcaatgccgggcgtaccgaacttcactattcacgaccttaggcgcaccgcacgcacccatctcgaagcgt

SEQ ID NO: 562252 - DNA, 75 bp, synthetic construct
  source 1..75: mol_type = other DNA
agtctggcatttacctgccgaacgggtaaaaaacggtgatgctatcgatatccccttacccgcgataaccgttga

SEQ ID NO: 562253 - DNA, 75 bp, synthetic construct
  source 1..75: mol_type = other DNA
tttcccgcgaccgctggttaacacgtggcgaactaatccgactgtttcaggctatgcgcacggctaagggattca

SEQ ID NO: 562254 - DNA, 75 bp, synthetic construct
  source 1..75: mol_type = other DNA
cgcgttaacacagtgggcgggattgctggtggcactggaacaggggcaggaatacaacgttacaccgctgagaaa

SEQ ID NO: 562255 - DNA, 75 bp, synthetic construct
  source 1..75: mol_type = other DNA
acaagcgatggatcgtgccaacagttatgtgattggcgatcgcgcgaccgatattcaactcgctgaaaacatggg

SEQ ID NO: 562256 - DNA, 75 bp, synthetic construct
  source 1..75: mol_type = other DNA
attgacgatcaccacaccgtcgaagataccggcctggctctgggcgaagcgttaaaaatggctcttggcgacaaa

SEQ ID NO: 562257 - DNA, 75 bp, synthetic construct
  source 1..75: mol_type = other DNA
atatccagttggcagaaaacatggatatcatcggcctgcgctataaccgtgaaacgctgaactgggcgacgattg

SEQ ID NO: 562258 - DNA, 75 bp, synthetic construct
  source 1..75: mol_type = other DNA
tcaggctattcgaggctatgcgcaccgcaaaaggattcagccgccagaacgaactgacatttaagctattgctgg

SEQ ID NO: 562259 - DNA, 75 bp, synthetic construct
  source 1..75: mol_type = other DNA
gggaagagttcgaccttgataacgccgtgtggcatttgccagaggaacgcagcaaaaacggcgaccccatagata

SEQ ID NO: 562260 - DNA, 75 bp, synthetic construct
  source 1..75: mol_type = other DNA
caaaggctttgaacaggctttctacacggtgatgatcgtttttacctttggttttcaggtgcagcgtcacgccca

SEQ ID NO: 562261 - DNA, 75 bp, synthetic construct
  source 1..75: mol_type = other DNA
gctggatccgcgtcagctacccgtgggcaggtaaaggattcgggatgatccagatcccgcgcatcggccaggaag

SEQ ID NO: 562262 - DNA, 75 bp, synthetic construct
  source 1..75: mol_type = other DNA
tggttgcatcaacaacaggcggcgctggactggctggcagcgcagggggagagaagcggttttacactgctggat

SEQ ID NO: 562263 - DNA, 75 bp, synthetic construct
  source 1..75: mol_type = other DNA
atttctgcaacgtctcagtcaggggtatggcaaaagccgggcgttcggctgtggtctgatgctgatcaaacccgg

SEQ ID NO: 562264 - DNA, 75 bp, synthetic construct
  source 1..75: mol_type = other DNA
aggtcgtgctgaagagcgctccagattagtgctcatgatgagacaaaggggaaaatctctggaggaaatcaaaga

SEQ ID NO: 562265 - DNA, 75 bp, synthetic construct
  source 1..75: mol_type = other DNA
tgcattcttcagcagaaaagaggaaaggtatccttgcgattggcgcacatcctgacgatatagaattaggttgtg

SEQ ID NO: 562266 - DNA, 75 bp, synthetic construct
  source 1..75: mol_type = other DNA
gatgaggtaaccggaaaaatgatcacgcgggataatcaaccgatcccgggtaaacaatcactggcgaaaggctca

SEQ ID NO: 562267 - DNA, 75 bp, synthetic construct
  source 1..75: mol_type = other DNA
aagaagtggttttacactgctggatacctcggtcgatgcctaccgacagcagcagctccggcgggaaaactcccg

SEQ ID NO: 562268 - DNA, 75 bp, synthetic construct
  source 1..75: mol_type = other DNA
ctttcgcctcgtcttctaccctggcccgtcagattgaagcgggtgcgcctgcggatctgtttatttctgccgatc

SEQ ID NO: 562269 - DNA, 75 bp, synthetic construct
  source 1..75: mol_type = other DNA
ggctctccctggcggcgttagttttctttctggggattgatttttggctggaagccttatttttattccgaccga

SEQ ID NO: 562270 - DNA, 75 bp, synthetic construct
  source 1..75: mol_type = other DNA
tatatcccttacctgatcgccggtttcctgtttgtttgctacatccaggtcagcaacctgttgccggttgccgta

SEQ ID NO: 562271 - DNA, 75 bp, synthetic construct
  source 1..75: mol_type = other DNA
tatccacacactatcccagccataagggggtgattatgacgatagcggaacaactggaagagaaaggtcgggttg

SEQ ID NO: 562272 - DNA, 75 bp, synthetic construct
  source 1..75: mol_type = other DNA
ccgtcgcatgagcgatatggggatgtcaacggaagttattaagcaggcacttcatctttctgatgaacagattca

SEQ ID NO: 562273 - DNA, 75 bp, synthetic construct
  source 1..75: mol_type = other DNA
cgagcagaaagatttcaccatcgacagcaaaaccaactggacttcactgctgaatggcggtcgcctggcggttgg

SEQ ID NO: 562274 - DNA, 75 bp, synthetic construct
  source 1..75: mol_type = other DNA
tacagtcagatcttccgccagccggttggtcgccatgtgatccgttattgtgacagcgtggtctgtcatatcaac

SEQ ID NO: 562275 - DNA, 75 bp, synthetic construct
  source 1..75: mol_type = other DNA
tgacggaggcggatattctgagctatctgtatgctctcgatctcaagccagccacccgcaaccgccatctggcgc

SEQ ID NO: 562276 - DNA, 75 bp, synthetic construct
  source 1..75: mol_type = other DNA
gtaatcccgatcatgaagctcttgctctgctcatgttccttgccctgacgggactgcgtctgggggaaacccgtc

SEQ ID NO: 562277 - DNA, 75 bp, synthetic construct
  source 1..75: mol_type = other DNA
tgacgtcagatagacgcgccatggatgactcccagcttcagtgctggatggatgtctgtgagcgctggcgtaatg

SEQ ID NO: 562278 - DNA, 75 bp, synthetic construct
  source 1..75: mol_type = other DNA
tgaggcaacccaaaaaagttctcgccagttttcaagcgctaatagctatgaacataataatgtaaatattcaaat

SEQ ID NO: 562279 - DNA, 75 bp, synthetic construct
  source 1..75: mol_type = other DNA
catctcgcactgatcaaagcgctgttcacctatgctgttcgcatgaatttcgtgagctgttcacctgcccgttat

SEQ ID NO: 562280 - DNA, 75 bp, synthetic construct
  source 1..75: mol_type = other DNA
aaataacccgagggatatcgaaagtttttatttccaaagcaattgagcaggctagggatgtcgggaaaactatcg

SEQ ID NO: 562281 - DNA, 75 bp, synthetic construct
  source 1..75: mol_type = other DNA
gttttctttcttattgttgctggagtcatttactttattctggttggtatttctgtagtagattattccaagagt

SEQ ID NO: 562282 - DNA, 75 bp, synthetic construct
  source 1..75: mol_type = other DNA
tgaattgtatcacgtccttactggtcctggtgactgtcgccggttgccagcagtttccttccacccgtaagcagg

SEQ ID NO: 562283 - DNA, 75 bp, synthetic construct
  source 1..75: mol_type = other DNA
ttgaagtggcactccagacggacacccacctggtacttatcgatctggatcagggagcatcagttacgaacgatg

SEQ ID NO: 562284 - DNA, 75 bp, synthetic construct
  source 1..75: mol_type = other DNA
cactatcaaagtaacggagctttacttgcacgcttccccggcgcgttaccacgaagtcgttaaccgggcgatggg

SEQ ID NO: 562285 - DNA, 75 bp, synthetic construct
  source 1..75: mol_type = other DNA
cggtacgattggttatgctgaaaatgtaactcacggtagtgcacctcaagtgttatcagaaaaaattcaacaata

SEQ ID NO: 562286 - DNA, 75 bp, synthetic construct
  source 1..75: mol_type = other DNA
ttgatgttgatgacattaactatgtcggtacgattggttatgctgaaaatgtaactcacggtagtgcacctcaag

SEQ ID NO: 562287 - DNA, 75 bp, synthetic construct
  source 1..75: mol_type = other DNA
atgaaacaagaaattatcctgaaatatggcaatgaaaagttaacactaactgaagatgtgttgaatgctacagcc

SEQ ID NO: 562288 - DNA, 75 bp, synthetic construct
  source 1..75: mol_type = other DNA
ctggcagaccgccgtcggttcccgtgcagcactgacggtggagaactacaaaaaagccaatgagttgctgcgggg

SEQ ID NO: 562289 - DNA, 75 bp, synthetic construct
  source 1..75: mol_type = other DNA
gtcgctgtaatgcgggcttcggcttctggcagaccgccgtcggttcccgtgcagcactgacggtggagaactaca

SEQ ID NO: 562290 - DNA, 75 bp, synthetic construct
  source 1..75: mol_type = other DNA
aggccagcaatctgctgctgggtatgaagaccaccaacggtgaaccgctgggcatccgcccgaccacccttgtgg

SEQ ID NO: 562291 - DNA, 75 bp, synthetic construct
  source 1..75: mol_type = other DNA
ggtatgcacaattacgctcagtacagcaaaatcaaagctctgcgtgaggctggcggcgatgtgatgctgtctatc

SEQ ID NO: 562292 - DNA, 75 bp, synthetic construct
  source 1..75: mol_type = other DNA
acagctaccgctgcggaattgagtcagtacggtaacccgactacctgtgaaattgataacggcggcgtcattgtt

SEQ ID NO: 562293 - DNA, 75 bp, synthetic construct
  source 1..75: mol_type = other DNA
gagcggcagctcatcttcttcaaattcaaatacgcctgcatccaatacgccggctaacagcgagccatcaacacc

SEQ ID NO: 562294 - DNA, 75 bp, synthetic construct
  source 1..75: mol_type = other DNA
tgggataaccccaatgtattccagatctgtagccttcgagagatgggaagtgaacgagaacgccgccagacttta

SEQ ID NO: 562295 - DNA, 75 bp, synthetic construct
  source 1..75: mol_type = other DNA
atttatcattgtggttccttccattgccatcaaggaaggcgtttataaaacactacaaatcactgaagaacattt

SEQ ID NO: 562296 - DNA, 75 bp, synthetic construct
  source 1..75: mol_type = other DNA
tcctgactgggccttagttattgaagacaatggtgaagaacatatttactttgttgtagaaacaaaaagtaaaca

SEQ ID NO: 562297 - DNA, 75 bp, synthetic construct
  source 1..75: mol_type = other DNA
tccttcacgcgctgaccacctgcctgagcgccgcctttacccgtggtctgagtggtgtcgagccgcaatggaagc

SEQ ID NO: 562298 - DNA, 75 bp, synthetic construct
  source 1..75: mol_type = other DNA
ctgaatactcagcaaatcaaggttcttaccctgtttttcatcgataaggttgatttctaccgtcagttcactgaa

SEQ ID NO: 562299 - DNA, 75 bp, synthetic construct
  source 1..75: mol_type = other DNA
ggataaatgattttattaaaaatcccaattccttcatcaaggaagtaattacaagaattaactatgtaaaaagtt

SEQ ID NO: 562300 - DNA, 75 bp, synthetic construct
  source 1..75: mol_type = other DNA
cagcgaacaccggagggggcagcctgggcaccacgaaaaagaccggataaagccagcggcaggtataaaaacaaa

SEQ ID NO: 562301 - DNA, 75 bp, synthetic construct
  source 1..75: mol_type = other DNA
gtgattttcgcttcccgtgccagttatcttgatgatgttgatacggttcgcccggacaacatgcaggctgcacag

SEQ ID NO: 562302 - DNA, 75 bp, synthetic construct
  source 1..75: mol_type = other DNA
atggctaccgccaaaaaaataaccattcatgatgttgcgctggctgcgggcgtgtcggtaagcaccgtttcgctg

SEQ ID NO: 562303 - DNA, 75 bp, synthetic construct
  source 1..75: mol_type = other DNA
gcaggggcggatggtttttttgcttcacggcggtaaagacggcgagcagttggcacagcggttctcactgttgct

SEQ ID NO: 562304 - DNA, 75 bp, synthetic construct
  source 1..75: mol_type = other DNA
tcgctgtcatgcgtcataatgctggcggtggatgggctgatggtgtgattaacgtagatggtttgaccgttgctc

SEQ ID NO: 562305 - DNA, 75 bp, synthetic construct
  source 1..75: mol_type = other DNA
aaaatccagattgcagtagagaagatatatccctcgcacttggaagaagcggagtttctatcagtaatgaattat

SEQ ID NO: 562306 - DNA, 75 bp, synthetic construct
  source 1..75: mol_type = other DNA
gatcgcctggctgggagggcaaagttcctcattaacccgtgcagaacgggttggggctattgtgcaactctacta

SEQ ID NO: 562307 - DNA, 75 bp, synthetic construct
  source 1..75: mol_type = other DNA
tggagtcgggggcggctatccgtaccgcagaaggcggcgcagagcacgttcagccgattactggcgacaacattg

SEQ ID NO: 562308 - DNA, 75 bp, synthetic construct
  source 1..75: mol_type = other DNA
cagaagatgattcctgcccgatgcgtacacgcgcacatgcttttacttgaactggcacatcgccgagttacatca

SEQ ID NO: 562309 - DNA, 75 bp, synthetic construct
  source 1..75: mol_type = other DNA
gcgatgcagcgtcattttgaacagcatcatgagctgtcgctggtgatcccgctgttgttctatcacggagagcgg

SEQ ID NO: 562310 - DNA, 75 bp, synthetic construct
  source 1..75: mol_type = other DNA
tgaattcagaaatgataaaatatcagttcttagaaaagtaattatgtcaaattttgatgccgatgtgatcattaa

SEQ ID NO: 562311 - DNA, 75 bp, synthetic construct
  source 1..75: mol_type = other DNA
ccgggtgatgagacgccggaaaaggccgatcacggtggcatcagtggtaaaagttttattgatccggaagttttg

SEQ ID NO: 562312 - DNA, 75 bp, synthetic construct
  source 1..75: mol_type = other DNA
ggcactgttccagagccgccccgaagcgattgttcgcgcctggtttattcagagcgtaacgccacgttttaaaga

SEQ ID NO: 562313 - DNA, 75 bp, synthetic construct
  source 1..75: mol_type = other DNA
tctttcgaaacttcagctcaaaagaaatctcttttcctgttaaaagataaagatatttattcatgtgatgttaag

SEQ ID NO: 562314 - DNA, 75 bp, synthetic construct
  source 1..75: mol_type = other DNA
ttgatggatttcagataggtacgacccaatcctatattaaaaatatcgaaaaatcaatatcatcgccagtaaccg

SEQ ID NO: 562315 - DNA, 75 bp, synthetic construct
  source 1..75: mol_type = other DNA
gggcgttctctaggtgttcatcgtgtattgacaacgcctactactgtgaaattttcatctgtagaggaaattcta

SEQ ID NO: 562316 - DNA, 75 bp, synthetic construct
  source 1..75: mol_type = other DNA
tcaccctgttactgactgcaactgccgtgcagggctccacccgggatgaaatagagcgactctggagtccgcagg

SEQ ID NO: 562317 - DNA, 75 bp, synthetic construct
  source 1..75: mol_type = other DNA
ttgatattgaggcaaatattagtcttacatgggttggacggagtattgatagatatggcaattcactatcggggg

SEQ ID NO: 562318 - DNA, 75 bp, synthetic construct
  source 1..75: mol_type = other DNA
tacttcatctttttatgggagaacgttttcttacatcctccaatactaaaggagaatattatcagaaaaacaaga

SEQ ID NO: 562319 - DNA, 75 bp, synthetic construct
  source 1..75: mol_type = other DNA
cattaaaacaaacacagttgcggttatcgtagatgatgttgaaaatgtacttaatctttttataggaaatgagtt

SEQ ID NO: 562320 - DNA, 75 bp, synthetic construct
  source 1..75: mol_type = other DNA
aatagcacacgttccttaccagatgaatttgtaaagaacccacgtgtgcaggatttgctggcaaagaatgataaa

SEQ ID NO: 562321 - DNA, 75 bp, synthetic construct
  source 1..75: mol_type = other DNA
agcttttatacaaagccagacaattaatgtctcagattctgggaagtataaaagtttgtctatttcagggaatag

SEQ ID NO: 562322 - DNA, 75 bp, synthetic construct
  source 1..75: mol_type = other DNA
gcgggaagattatgacgcaaactgggaaggccgctttacactggaggatctgaacattcacggtaagcgcgcact

SEQ ID NO: 562323 - DNA, 75 bp, synthetic construct
  source 1..75: mol_type = other DNA
atctggaccgcaaccgctttgacgaggtctacaaaggccccggcgataatttcttcgggacgctcagcgcttcac

SEQ ID NO: 562324 - DNA, 75 bp, synthetic construct
  source 1..75: mol_type = other DNA
tgataatggccgatatgttgaaaaacagaaaaaccataaatcagccattaatagtggattacgtttaccgttaac

SEQ ID NO: 562325 - DNA, 75 bp, synthetic construct
  source 1..75: mol_type = other DNA
atataggtgataacttaggaaaggcaggcagtgtactgtcaacgtttcaaaattttctgggtgctgcactttcct

SEQ ID NO: 562326 - DNA, 75 bp, synthetic construct
  source 1..75: mol_type = other DNA
ccaatgatattaacaagattatttcttcagtttcagggttcgattcaggtgatgaacgattagcatctttatata

SEQ ID NO: 562327 - DNA, 75 bp, synthetic construct
  source 1..75: mol_type = other DNA
gaattcactcatatcaatggtaaaaatttaacagagactgataacttatattccgtggaagaacttattgggacc

SEQ ID NO: 562328 - DNA, 75 bp, synthetic construct
  source 1..75: mol_type = other DNA
catgtataaagctgaaggtaatgttctttccattggccacaaaaatggtattacatttaaaaactggtttgaaaa

SEQ ID NO: 562329 - DNA, 75 bp, synthetic construct
  source 1..75: mol_type = other DNA
tttggtaatgatatttatgtttatcggcaaaactatggtcatcatacaattgcagatgaaggaggtaaaggagat

SEQ ID NO: 562330 - DNA, 75 bp, synthetic construct
  source 1..75: mol_type = other DNA
caggctatgtttgagcacgttgcagagaaattcgctgctcggatcaatgaatgggaaaaggagcatggcaaaaat

SEQ ID NO: 562331 - DNA, 75 bp, synthetic construct
  source 1..75: mol_type = other DNA
tgagtcacacctgggagacggggatgataaggtctttttatctgccggctcagccaatatctacgcaggtaaagg

SEQ ID NO: 562332 - DNA, 75 bp, synthetic construct
  source 1..75: mol_type = other DNA
ctcttgcaaaaaatgtattatccggtggaaaaggtaatgacaagctgtacggcagtgagggagcagatctgcttg

SEQ ID NO: 562333 - DNA, 75 bp, synthetic construct
  source 1..75: mol_type = other DNA
aattttctgggtactgcactttcctcaatgaaaatagacgaactgataaagaaacaaaaatctggtagcaatgtc

SEQ ID NO: 562334 - DNA, 75 bp, synthetic construct
  source 1..75: mol_type = other DNA
attacattcaggaactggtttgaaaaagagtcaggtgatatctctaatcaccagatagagcagatttttgataaa

SEQ ID NO: 562335 - DNA, 75 bp, synthetic construct
  source 1..75: mol_type = other DNA
acggcagggtaatcacaccagattctcttaaaaaagcatttgaatatcagcagagtaataacaaggtaagttatg

SEQ ID NO: 562336 - DNA, 75 bp, synthetic construct
  source 1..75: mol_type = other DNA
tcttaaaaaagcatttgaatatcagcagagtaataacaaggtaagttatgtgtatgggcatgatgcatcaactta

SEQ ID NO: 562337 - DNA, 75 bp, synthetic construct
  source 1..75: mol_type = other DNA
atgctaactccatattcagttttttccggagatatacccaactctttccgtgatttatggggagaacaagatgaa

SEQ ID NO: 562338 - DNA, 75 bp, synthetic construct
  source 1..75: mol_type = other DNA
gacctgctggacgcgcaccgcatcccctttcagttgatgggcggcaagccggagaacgtcgggtcgctgggtgat

SEQ ID NO: 562339 - DNA, 75 bp, synthetic construct
  source 1..75: mol_type = other DNA
actcgctggcgaaatacacacgccgtggttctgacctggacacttactggtttattcaggccgggctacaggatc

SEQ ID NO: 562340 - DNA, 75 bp, synthetic construct
  source 1..75: mol_type = other DNA
gctgctgggtggtctgttccttatctggaaagccagtaaggagatccacgagtctatcgaaggcgaagaagaagg

SEQ ID NO: 562341 - DNA, 75 bp, synthetic construct
  source 1..75: mol_type = other DNA
tgcgccgacaacgggcggtggtttgaaacgcccgttgactggtacggactggcacgggctgcccgccagacgtcc

SEQ ID NO: 562342 - DNA, 75 bp, synthetic construct
  source 1..75: mol_type = other DNA
tccagcagatcaccgcaaaagatgagttcatgaatgttaaggcggcatcccgtgatgatgtgctggctgcgcacc

SEQ ID NO: 562343 - DNA, 75 bp, synthetic construct
  source 1..75: mol_type = other DNA
gctgttccgccgcaagtattacgaaaacggcgctcatgccggatatatcatgtacgtcaccgatgccgtgcagga

SEQ ID NO: 562344 - DNA, 75 bp, synthetic construct
  source 1..75: mol_type = other DNA
agcagtgagttggcgaaagtatcaggagcaaaggagatttatgaagaattgatagttgctgtgccgagcagggaa

SEQ ID NO: 562345 - DNA, 75 bp, synthetic construct
  source 1..75: mol_type = other DNA
tataaccagattcaacgtctggttagaaatggattattaagtaaagtacgaaaagtaggcgtatatcaatattca

SEQ ID NO: 562346 - DNA, 75 bp, synthetic construct
  source 1..75: mol_type = other DNA
caaaagaaatttatgaagaattgataattgccgtaccgagcagggaaaatgaattccggaaactttctctagagc

SEQ ID NO: 562347 - DNA, 75 bp, synthetic construct
  source 1..75: mol_type = other DNA
ttttttatcgccaacgaagtctcgccacgttttgatcatctggtgaaagaagataccggttttatcggcttcaaa

SEQ ID NO: 562348 - DNA, 75 bp, synthetic construct
  source 1..75: mol_type = other DNA
ctctggaggagaatctggccgccctgcgtcggctgaaagaagattatccggacaaagtattgatagcttcgatca

SEQ ID NO: 562349 - DNA, 75 bp, synthetic construct
  source 1..75: mol_type = other DNA
ccctgaacgggtgctttgttcctcaccctctgctgtcccgccaggcgttttcagcgtttgcgctcgactggtttg

SEQ ID NO: 562350 - DNA, 75 bp, synthetic construct
  source 1..75: mol_type = other DNA
tccgctcctgtcccgccaggcgttttcagcgtttgcactcgactggtttgtgttcggtaatgcctatcttgaggt

SEQ ID NO: 562351 - DNA, 75 bp, synthetic construct
  source 1..75: mol_type = other DNA
atagcctcgtgctctctatggacaacgataacagggaggttatcgtcatggggaaaggcattggtttcaacagca

SEQ ID NO: 562352 - DNA, 75 bp, synthetic construct
  source 1..75: mol_type = other DNA
cataaatagctcaaacgttgaaacacatgcttatcctgactatgtttgtatggctgttcttaggtactatgccct

SEQ ID NO: 562353 - DNA, 75 bp, synthetic construct
  source 1..75: mol_type = other DNA
gctgtacggtaacccgaatgctctggaaagtgcgctggaaaacatcgttcgcaacgcgctgcgttattctcatac

SEQ ID NO: 562354 - DNA, 75 bp, synthetic construct
  source 1..75: mol_type = other DNA
accagccaagaacaaacgactggacagtgtgactaccggagcagcccagaatggaaggattttgcatcacgcatt

SEQ ID NO: 562355 - DNA, 75 bp, synthetic construct
  source 1..75: mol_type = other DNA
tcggtgaaaatgctgaaggatatttttaatctcgtgcagtaccactttaagcaacagatagacaccgaatcgata

SEQ ID NO: 562356 - DNA, 75 bp, synthetic construct
  source 1..75: mol_type = other DNA
ggagggtgaactggacggcgcgcgggacagctttctgctggtgcaggtaattaaggagtatccggatgcttaccg

SEQ ID NO: 562357 - DNA, 75 bp, synthetic construct
  source 1..75: mol_type = other DNA
ggtgatgtcacgtaatcagcagaaaaacgcgctggtaagcgagacattgaaagctaaccagttgtggggcgaagt

SEQ ID NO: 562358 - DNA, 75 bp, synthetic construct
  source 1..75: mol_type = other DNA
tcttcgccatcttctggctgacgctggcgctggtgttgatgttggttttgatgttacccaagctcgattcacgcc

SEQ ID NO: 562359 - DNA, 75 bp, synthetic construct
  source 1..75: mol_type = other DNA
ccgttgactggtacgggctggcgcgggcatcccggcagacctcgtggcatcagtcggcgctgtacttcaaacgaa

SEQ ID NO: 562360 - DNA, 75 bp, synthetic construct
  source 1..75: mol_type = other DNA
accgccattcagcagcaccgtggttgggttaaagcggaagacagcccgctgggcggtttacggctggtaatttgg

SEQ ID NO: 562361 - DNA, 75 bp, synthetic construct
  source 1..75: mol_type = other DNA
tcaccgctgctgttgtggttggcctggagtctggcgaaaccggcgcgtaagctgaaaaacgctgccgatgaggtc

SEQ ID NO: 562362 - DNA, 75 bp, synthetic construct
  source 1..75: mol_type = other DNA
acgatccacccaacgatttaatgtggtggcgccgtctgttccgtgccattgataagtgggcaccaccggggcagc

SEQ ID NO: 562363 - DNA, 75 bp, synthetic construct
  source 1..75: mol_type = other DNA
aaccaaccaatccggatgtggtttatattcccaactataacccgaccgtggtttacgggaactgggccaattccg

SEQ ID NO: 562364 - DNA, 75 bp, synthetic construct
  source 1..75: mol_type = other DNA
cccgcagaatcaacagcaaagagatgcagcacgtcagcgtatccagtctgcctcgcctgagcagcgtcaggtttt

SEQ ID NO: 562365 - DNA, 75 bp, synthetic construct
  source 1..75: mol_type = other DNA
cagcagcgcccactgaaccaagagcaacgtgataacgcccgccagcgtgttcaatcggcatcacctgaacaacgt

SEQ ID NO: 562366 - DNA, 75 bp, synthetic construct
  source 1..75: mol_type = other DNA
atgccagcgtcaaatcactggtggcttttccgcaattgatggcgttgatgggtgaaaacccgcagtgggtacaaa

SEQ ID NO: 562367 - DNA, 75 bp, synthetic construct
  source 1..75: mol_type = other DNA
cctcgcctgagcagcgccaggcagtccgcgagaaaatgcagactaacccacagatccagcagcgaagagacgcag

SEQ ID NO: 562368 - DNA, 75 bp, synthetic construct
  source 1..75: mol_type = other DNA
cgttatcagtcggcctctcctgagcagcgccaggcagtccgcgagagaatgcagactaacccgcagaaccagcag

SEQ ID NO: 562369 - DNA, 75 bp, synthetic construct
  source 1..75: mol_type = other DNA
atggataagaagcaagtaacggatttaaggtcggaactactcgattcacgttttggagctaagtctatttcaact

SEQ ID NO: 562370 - DNA, 75 bp, synthetic construct
  source 1..75: mol_type = other DNA
ttgtctctcgtgttggctgaacacgaaatccccgaatatctgagccgccttttggtgaggttgcatacccactac

SEQ ID NO: 562371 - DNA, 75 bp, synthetic construct
  source 1..75: mol_type = other DNA
ctcagcgcattatgacaattcctggtgttggtccgattactgccagcttactatcgtcgcaacttggtgacggga

SEQ ID NO: 562372 - DNA, 75 bp, synthetic construct
  source 1..75: mol_type = other DNA
gacacaacagactgcgcctgacatcaccgcagttacgcttcctgcaacggtttccgcaccgcccgtaacgcccgc

SEQ ID NO: 562373 - DNA, 75 bp, synthetic construct
  source 1..75: mol_type = other DNA
aaccgtgtcagatgattttatgcatgctgttctcagtaactgcgccacaagaatcgtacttcctgcaccggagaa

SEQ ID NO: 562374 - DNA, 75 bp, synthetic construct
  source 1..75: mol_type = other DNA
atggataagaagcaagtaacggatttaaggtcggaactactcgattcacgttttggtgctaagtcgatttcaact

SEQ ID NO: 562375 - DNA, 75 bp, synthetic construct
  source 1..75: mol_type = other DNA
gtgccaatcctgtttagtgggaaaaatgctgtgatagtacctgtgtatcttattgagcctgctacggccccgacg

SEQ ID NO: 562376 - DNA, 75 bp, synthetic construct
  source 1..75: mol_type = other DNA
gattctatatgaaacacctgcagcacctgcagcacctgcaaaatctgcaacatctgcaacatctgcaacatctgc

SEQ ID NO: 562377 - DNA, 75 bp, synthetic construct
  source 1..75: mol_type = other DNA
ttgaatgacggtttgattaagcgtgtactgaatctttttattcaccttatctctaatcccgataatctcgaatta

SEQ ID NO: 562378 - DNA, 75 bp, synthetic construct
  source 1..75: mol_type = other DNA
aaagatctttcagaatatgatcttactggtactgtctgcatatttaccaattttacaaacgctaatttaacaaaa

SEQ ID NO: 562379 - DNA, 75 bp, synthetic construct
  source 1..75: mol_type = other DNA
ctggatagtgaggctttattgttggtaatgagaacgcgttcggaacaaaaggcggcattttcaaagcaaagtatt

SEQ ID NO: 562380 - DNA, 75 bp, synthetic construct
  source 1..75: mol_type = other DNA
ctcatcaaaagccggtattatagggcgactggcagctttacgaaaaaaaaaaccagttatattcactgctcatgg

SEQ ID NO: 562381 - DNA, 75 bp, synthetic construct
  source 1..75: mol_type = other DNA
caattaaccatacgggataataataacgagactgaaactatctcgttgacaaacttacaatgggaaaatgtgctg

SEQ ID NO: 562382 - DNA, 75 bp, synthetic construct
  source 1..75: mol_type = other DNA
gtggattcttcatctgccaaggagataacaaagacatttactaccggcatgacagggtgggcgctcactgccaga

SEQ ID NO: 562383 - DNA, 75 bp, synthetic construct
  source 1..75: mol_type = other DNA
tatattgaaagaacaatatacaatcacgataatccatccggtgaaacacctgtaaaagcggctgttggtaatgca

SEQ ID NO: 562384 - DNA, 75 bp, synthetic construct
  source 1..75: mol_type = other DNA
acagatctgatggtctctggcgcaaaaggtattccggagacacagaaatatccggacgtttattgctgggtcccg

SEQ ID NO: 562385 - DNA, 75 bp, synthetic construct
  source 1..75: mol_type = other DNA
ccattaagtattatcgaggctatgcgtgcgtccttgccagtggtagctacagatgttggaggtgtctctgagtta

SEQ ID NO: 562386 - DNA, 75 bp, synthetic construct
  source 1..75: mol_type = other DNA
cggatttattatctgagagcaatgtatttttgcttatttctaactgggaaggttttcctcgtagtattcttgaag

SEQ ID NO: 562387 - DNA, 75 bp, synthetic construct
  source 1..75: mol_type = other DNA
gcagggcgtgaaaagcaataaaggactgaatgagcagacaagctggcaaaaaccaccgagattcaggcgcagctg

SEQ ID NO: 562388 - DNA, 75 bp, synthetic construct
  source 1..75: mol_type = other DNA
cagagataaggtgaaaacaaccaaccagatccacggtttcttgctggaatttggaatcagcctgccgataggtga

SEQ ID NO: 562389 - DNA, 75 bp, synthetic construct
  source 1..75: mol_type = other DNA
gttattcaaaccgggcaacaagtggggatgttaacgtttcagcagagttatcagcagcgagtggcggaagggcgt

SEQ ID NO: 562390 - DNA, 75 bp, synthetic construct
  source 1..75: mol_type = other DNA
cagcgattgcgtggcagcgcattcgcgcaacggcatggcatttcgctggcgttacggctgttaccttcgcactgc

SEQ ID NO: 562391 - DNA, 75 bp, synthetic construct
  source 1..75: mol_type = other DNA
cacacgcgcggcgcagcgcaggcagttgagcgactggtggattcgtttccggcgcaggaaaaagatcccgtgcgt

SEQ ID NO: 562392 - DNA, 75 bp, synthetic construct
  source 1..75: mol_type = other DNA
ctggtgtttaccatcgcggcttccgcgaatattccactgctgtatgttggtgtaccaatggcggctgcactgtct

SEQ ID NO: 562393 - DNA, 75 bp, synthetic construct
  source 1..75: mol_type = other DNA
attacggttgttaccttcgcactgtccacagctcgaacagcttggtgcgccaccggtattgccggaattactcaa

SEQ ID NO: 562394 - DNA, 75 bp, synthetic construct
  source 1..75: mol_type = other DNA
ttgagcgactggtggattcatttccggcgcaggaaaaagatcccgtgcgtaatcaactggcaggtagtttacggg

SEQ ID NO: 562395 - DNA, 75 bp, synthetic construct
  source 1..75: mol_type = other DNA
ggccttcagtggaaggcgacgcactccctttttttgccgaacccgttgcggccggctttcccagcccggcagcag

SEQ ID NO: 562396 - DNA, 75 bp, synthetic construct
  source 1..75: mol_type = other DNA
atgagtaccgtttatcaccgtccagctgacccctcaggcgatgacagttacctgcgaccgttgtttgccgatcgt

SEQ ID NO: 562397 - DNA, 75 bp, synthetic construct
  source 1..75: mol_type = other DNA
tatcctgatcccgacgagctggatatctttggcgtcgtcacgcatatcatccaccgcccgagggagatgtactga

SEQ ID NO: 562398 - DNA, 75 bp, synthetic construct
  source 1..75: mol_type = other DNA
aacccaccagttaccgcatgttattcaaaccgggcagcaggtggggatgataacgtttcagcagagttatcagca

SEQ ID NO: 562399 - DNA, 75 bp, synthetic construct
  source 1..75: mol_type = other DNA
ttttgcggtatcgctggctgaaaaccagcggctacgaggcagtgcgtttgcgcagcggcaaggcatttctctggc

SEQ ID NO: 562400 - DNA, 75 bp, synthetic construct
  source 1..75: mol_type = other DNA
tggctggatgacgatcaacgggcgatattgcttgagaatggccagcttgattttgcggtatcgctggctgaaaac

SEQ ID NO: 562401 - DNA, 75 bp, synthetic construct
  source 1..75: mol_type = other DNA
caggcgcaaaaaaatccggtaccgtgatgaaatgactggaaaaatgataacgcgggataatccaccaatcccggg

SEQ ID NO: 562402 - DNA, 75 bp, synthetic construct
  source 1..75: mol_type = other DNA
agtgggcagggggtaaatatcctctgcttgatgatattaaacggcatttgcccaagggcgagtgtctggttgagc

SEQ ID NO: 562403 - DNA, 75 bp, synthetic construct
  source 1..75: mol_type = other DNA
ttgcttgatgatattaaacggcatttgcctaagggtgaatgtctggttgaaccttttgtgggtgccgggtcggtg

SEQ ID NO: 562404 - DNA, 75 bp, synthetic construct
  source 1..75: mol_type = other DNA
ctttacggcgtatcacacaaacagttttacgcttgaacaacaagcgcatctggcggagatcgctgaaggtctggt

SEQ ID NO: 562405 - DNA, 75 bp, synthetic construct
  source 1..75: mol_type = other DNA
ttgataacacactttacgattgggtctcattttacgctcaatctttttctgctatgtttgataaattggttgaaa

SEQ ID NO: 562406 - DNA, 75 bp, synthetic construct
  source 1..75: mol_type = other DNA
attttctcttggttttagatgataaaattgatgctcaaacaaaaaaaattgacattataagaaaacacaaaaaag

SEQ ID NO: 562407 - DNA, 75 bp, synthetic construct
  source 1..75: mol_type = other DNA
tctgtcgtctattgtgatccgccttatgcgccgctttccgcgaccgctaattttacggcgtaccacacaaacagt

SEQ ID NO: 562408 - DNA, 75 bp, synthetic construct
  source 1..75: mol_type = other DNA
gccgatttatcctgaccccgacgagctggatatctttggcgtcgtcacgcatatcatccatcgaccgagggagat

SEQ ID NO: 562409 - DNA, 75 bp, synthetic construct
  source 1..75: mol_type = other DNA
ggaaagaactcccgccacaggcccatccattgtttgccgatctggcctgctgcggttttcccagccctgctgctg

SEQ ID NO: 562410 - DNA, 75 bp, synthetic construct
  source 1..75: mol_type = other DNA
gatgggttaccgggtgtgaggtctaccagagacaggagcttgccagactgtgtggagttaagcctgataactgga

SEQ ID NO: 562411 - DNA, 75 bp, synthetic construct
  source 1..75: mol_type = other DNA
tactgtttttatatctgaatcgctacgggtacaacggtctgtgccgttacaatctgcgcggtgaatttaatgtgc

SEQ ID NO: 562412 - DNA, 75 bp, synthetic construct
  source 1..75: mol_type = other DNA
cacaacacggggacatcgttatcgctgagatcgacggtgagttcaccgtcaaacgactgctgttgcgcccacacc

SEQ ID NO: 562413 - DNA, 75 bp, synthetic construct
  source 1..75: mol_type = other DNA
ccgggcatgttaattggtgcgctgagctttgagccgctttccggcccggcggcgcgaccttacaaccgccgtgaa

SEQ ID NO: 562414 - DNA, 75 bp, synthetic construct
  source 1..75: mol_type = other DNA
gctccgaactactcgattcacgttttggtgccaaggccatttcgactatcgcagaatcaaaacgctttccgctgc

SEQ ID NO: 562415 - DNA, 75 bp, synthetic construct
  source 1..75: mol_type = other DNA
gttctgaactactcgattcacgttttggtgccaaggccatttcgactatcgcagaatcaaaacgctttccgctgc

SEQ ID NO: 562416 - DNA, 75 bp, synthetic construct
  source 1..75: mol_type = other DNA
gatccgaactactcgattcacgttttggtgcaaaggccatttcgactatcgcagaatcaaaacgctttccgctgc

SEQ ID NO: 562417 - DNA, 75 bp, synthetic construct
  source 1..75: mol_type = other DNA
cggcttcgaaatggactttgctgaactgttgctggaagactacaaagcctccctgaaatatctcagcgatcaccc

SEQ ID NO: 562418 - DNA, 75 bp, synthetic construct
  source 1..75: mol_type = other DNA
ggtcggaactactcgattcacgttttggtgccaaggccatttcgactatcgcagaatcaaaacgctttccgctgc

SEQ ID NO: 562419 - DNA, 75 bp, synthetic construct
  source 1..75: mol_type = other DNA
ggtccgaactactcgattcacgttttggtgcgaaggccatttcgactatcgcagaatcaaaacgctttccgctgc

SEQ ID NO: 562420 - DNA, 75 bp, synthetic construct
  source 1..75: mol_type = other DNA
acctggccactttctgccagacctgggacgacgagaatgtccataaattgatggatttttcgattaaaaaaaact

SEQ ID NO: 562421 - DNA, 75 bp, synthetic construct
  source 1..75: mol_type = other DNA
acctggccactttctgccagacctgggacgacgagaaagtccataaattgatggatttttcgataaaaaaaaact

SEQ ID NO: 562422 - DNA, 75 bp, synthetic construct
  source 1..75: mol_type = other DNA
ttcaacgttgactacctcggtggtcagattggtactttcgccatcaacttctcccgcccggcgggtcaggtaatt

SEQ ID NO: 562423 - DNA, 75 bp, synthetic construct
  source 1..75: mol_type = other DNA
gatcagaactactcgattcacgttttggtgccaaggccatttcgactatcgcagaatcaaaacgctttccgctgc

SEQ ID NO: 562424 - DNA, 75 bp, synthetic construct
  source 1..75: mol_type = other DNA
acctggccactttctgccagacctgggacgacgagaaggtccataaattgatggatttttcgatgaaaaaaaact

SEQ ID NO: 562425 - DNA, 75 bp, synthetic construct
  source 1..75: mol_type = other DNA
acctggccactttctgccagacctgggacgacgagaacgtccataaattgatggatttttcgatcaaaaaaaact

SEQ ID NO: 562426 - DNA, 75 bp, synthetic construct
  source 1..75: mol_type = other DNA
tccgctcagaactactcgattcacgttttggtgccaagactatttccactatcgctgactcaaaacgatttccgc

SEQ ID NO: 562427 - DNA, 75 bp, synthetic construct
  source 1..75: mol_type = other DNA
atctgatgttttgcgaagatgctgcccgtcggctcaataacgtttttcgttgtgcacccttttgtgaagcatttg

SEQ ID NO: 562428 - DNA, 75 bp, synthetic construct
  source 1..75: mol_type = other DNA
atggataagaagcaagtaacggatttaaggtcggaactactcgattcacgttttggcgcgaagtcgatttcgact

SEQ ID NO: 562429 - DNA, 75 bp, synthetic construct
  source 1..75: mol_type = other DNA
atggataagaagcaagtaacggatttaaggtcggaactactcgattcacgttttggcgcgaagtccatttccact

SEQ ID NO: 562430 - DNA, 75 bp, synthetic construct
  source 1..75: mol_type = other DNA
gtttatcagtgaagctataggccgaatcaactactgcaaacgcctgtcaattgttgatggtattaaatattatcc

SEQ ID NO: 562431 - DNA, 75 bp, synthetic construct
  source 1..75: mol_type = other DNA
atttatcatcgtagttccttccgttgccatcaaggaaggcgtttataaaacactacaaattactgaagagcattt

SEQ ID NO: 562432 - DNA, 75 bp, synthetic construct
  source 1..75: mol_type = other DNA
taatttattgcgcaacgagccagctaccgggaactggctctgaagttgcgtcaggtcacgaagtactgcccgggg

SEQ ID NO: 562433 - DNA, 75 bp, synthetic construct
  source 1..75: mol_type = other DNA
tccgctcagaactactcgattcacgttttggtgccaaggccatttctactatcgctgactcaaaacgatttccgc

SEQ ID NO: 562434 - DNA, 75 bp, synthetic construct
  source 1..75: mol_type = other DNA
tccgctcagaactactcgattcacgttttggtgccaagcctatttcaactatcgctgactcaaaacgatttccgc

SEQ ID NO: 562435 - DNA, 75 bp, synthetic construct
  source 1..75: mol_type = other DNA
tccgctcagaactactcgattcacgttttggtgccaagtccatttcgactatcgctgactcaaaacgatttccgc

SEQ ID NO: 562436 - DNA, 75 bp, synthetic construct
  source 1..75: mol_type = other DNA
atggataagaagcaagtaacggatttaaggtcggaactactcgattcacgttttggcgcgaagtcaatttcaact

SEQ ID NO: 562437 - DNA, 75 bp, synthetic construct
  source 1..75: mol_type = other DNA
atggataagaagcaagtaacggatttaaggtcggaactactcgattcacgttttggcgccaagtccatttcgact

SEQ ID NO: 562438 - DNA, 75 bp, synthetic construct
  source 1..75: mol_type = other DNA
atggataagaagcaagtaacggatttaaggtcggaactactcgattcacgttttggcgcaaagtcaatttcgact

SEQ ID NO: 562439 - DNA, 75 bp, synthetic construct
  source 1..75: mol_type = other DNA
tgcgcgatgatgtcgcattccagattatcaatgacgaattatatcttgatggcaacgctcgtcagaacctggcca

SEQ ID NO: 562440 - DNA, 75 bp, synthetic construct
  source 1..75: mol_type = other DNA
tggagacaattccggatgttcttgaacgcgattgcgctctgactcctcaggccgtcggcgttgtacagcaggcca

SEQ ID NO: 562441 - DNA, 75 bp, synthetic construct
  source 1..75: mol_type = other DNA
tgtgatagcgtcagattgcatgaaaaagccgattttttattcctcaggggaacactggacgataataattacaat

SEQ ID NO: 562442 - DNA, 75 bp, synthetic construct
  source 1..75: mol_type = other DNA
ctgtagaacaggaaaaacatttgcactataacgatggccctcttcaagggaagcaaaaagaagtggggcaacaaa

SEQ ID NO: 562443 - DNA, 75 bp, synthetic construct
  source 1..75: mol_type = other DNA
agctcggcggtgggtgtcgcgctcgcggcaaccggtggcggtgatggttctaataccgggaccacaacaaccacg

SEQ ID NO: 562444 - DNA, 75 bp, synthetic construct
  source 1..75: mol_type = other DNA
ctggtataaacacgatgaaagtctcattgataatttcaaaaaacgtttaatgtcaaatgaattcaatgaacatcc

SEQ ID NO: 562445 - DNA, 75 bp, synthetic construct
  source 1..75: mol_type = other DNA
agttagagagaaaaataaaaactgctagagagatatttccacctaaaagatcagaggaatgtatcggaataataa

SEQ ID NO: 562446 - DNA, 75 bp, synthetic construct
  source 1..75: mol_type = other DNA
ctataaaaaaattagcagagcgggcagcattcatttgttcaaacccttcatgccctagattgaccattggcccat

SEQ ID NO: 562447 - DNA, 75 bp, synthetic construct
  source 1..75: mol_type = other DNA
ctcgtgataaccatcacagtggtgccgttgtgggaacacaggaacatcaggaggtgggggctttccgtaaggtga

SEQ ID NO: 562448 - DNA, 75 bp, synthetic construct
  source 1..75: mol_type = other DNA
cagtatgctgacgccgggaaactgccacagcctgtttccttatgtcagaaactcgtgtttacggggcgaagacta

SEQ ID NO: 562449 - DNA, 75 bp, synthetic construct
  source 1..75: mol_type = other DNA
atacaaatgactttaaaccaatcatcacccctgctcaatcattacgaatacactgtgtcagtgttcgattcaatc

SEQ ID NO: 562450 - DNA, 75 bp, synthetic construct
  source 1..75: mol_type = other DNA
gatttaataaagaagaattggatattctcaataaaaacagaggtgacaaaagcaaaggcgaatggcttcgtttaa

SEQ ID NO: 562451 - DNA, 75 bp, synthetic construct
  source 1..75: mol_type = other DNA
gcttctcttgataagcttcccatagtagttccttcaatcaacatagaagcttggaaatccctcagcgaaatatca

SEQ ID NO: 562452 - DNA, 75 bp, synthetic construct
  source 1..75: mol_type = other DNA
cccaaacgaaacattaaaaacagcagttacagcggaatggtttgaacgaaataaagcggaattagattattggta

SEQ ID NO: 562453 - DNA, 75 bp, synthetic construct
  source 1..75: mol_type = other DNA
ggttctatcaccgcaattttgctcaaaattcccggtacacctgccgccgctgccaccgccattgacggatatgag

SEQ ID NO: 562454 - DNA, 75 bp, synthetic construct
  source 1..75: mol_type = other DNA
tgtggtgtttgacgccgctgaacttaagctaccgctgcttggctatatggtggaaaacactgtcctgcaacaggc

SEQ ID NO: 562455 - DNA, 75 bp, synthetic construct
  source 1..75: mol_type = other DNA
cgaagctattctgtatcccggcgtggataattttgtgaaatatttccggctgcagaattactggactcagcaggc

SEQ ID NO: 562456 - DNA, 75 bp, synthetic construct
  source 1..75: mol_type = other DNA
gtgaaggctataccaaagtacagaacgcttcctaccaggttgccgcttatctggcggatgaaatcgccaaactgg

SEQ ID NO: 562457 - DNA, 75 bp, synthetic construct
  source 1..75: mol_type = other DNA
atatgagctgacgaagcagggaaaagcagggctggcattgagtgccgccacgttctcttcctttagtggcggaac

SEQ ID NO: 562458 - DNA, 75 bp, synthetic construct
  source 1..75: mol_type = other DNA
cggtacttgccagttgggcgctgaaatttagtgcctcggagtccttcgccctggcaaccttcggactgagcatta

SEQ ID NO: 562459 - DNA, 75 bp, synthetic construct
  source 1..75: mol_type = other DNA
gtggtgccgatcccggaagcgatggcatacgttctgctgcgtccgttgctggatgacgtaccggacgacgagctg

SEQ ID NO: 562460 - DNA, 75 bp, synthetic construct
  source 1..75: mol_type = other DNA
tctaataattataactttattgaagccataaaaagttaccatgcaaaaagttttctatttgttagaaaaattgat

SEQ ID NO: 562461 - DNA, 75 bp, synthetic construct
  source 1..75: mol_type = other DNA
tacctggaacacctggaacacctcaaataccgggaacacctaaagtaattcttactggcgcaatactaaattatt

SEQ ID NO: 562462 - DNA, 75 bp, synthetic construct
  source 1..75: mol_type = other DNA
agggctggacggcactttccgatatgttaccaggccaggggttgttacacgtggtgccgatcccggaagcgatgg

SEQ ID NO: 562463 - DNA, 75 bp, synthetic construct
  source 1..75: mol_type = other DNA
gatcgcgcaatgcttgactatcttgatgccaatcattttgatgatgtttataaaggtcccggcgacagcttcttt

SEQ ID NO: 562464 - DNA, 75 bp, synthetic construct
  source 1..75: mol_type = other DNA
atgacttttacctatgagacactgccaacagatgcgaaaacggctatccgtaagatgaaagcggagctgcgacaa

SEQ ID NO: 562465 - DNA, 75 bp, synthetic construct
  source 1..75: mol_type = other DNA
aaaaaacgctcggcagtcgagaggccttggcgcgtcaatatcaacagctgacccgtaaccttggattgccgcctg

SEQ ID NO: 562466 - DNA, 75 bp, synthetic construct
  source 1..75: mol_type = other DNA
gcgcggctgaagtggccaatagttttgatggtctgactgagattcatcaggaactggaaaccgctcgcaaacaac

SEQ ID NO: 562467 - DNA, 75 bp, synthetic construct
  source 1..75: mol_type = other DNA
tgctttgtgccaatcctcgctacaatctggcctcaactggcgggcatgaaagcgacagggatcttatctcttacg

SEQ ID NO: 562468 - DNA, 75 bp, synthetic construct
  source 1..75: mol_type = other DNA
agctctacctgatggatatatatcacaatctcgaagagaatatagtgatatcgcggcaagacaacgagtgttagg

SEQ ID NO: 562469 - DNA, 75 bp, synthetic construct
  source 1..75: mol_type = other DNA
tttatatcaagccctatagcgacaggatggacagtgtcaccttccagtcagtagctaaacgatctaaggtgttcc

SEQ ID NO: 562470 - DNA, 75 bp, synthetic construct
  source 1..75: mol_type = other DNA
cattatccttgatgaagccttctcccgcagttctcatgcggtggcgggtaggatcattgccgcgcttagagaatt

SEQ ID NO: 562471 - DNA, 75 bp, synthetic construct
  source 1..75: mol_type = other DNA
agaatgacgaaacccggcaccgtcgaggaagactatcagtatgaatcagttaggtatcctattctggttgatttg

SEQ ID NO: 562472 - DNA, 75 bp, synthetic construct
  source 1..75: mol_type = other DNA
agcaagatacggttaaccaaatacagagcaatagcaatgctgcggtaaagaatgccttaccaggcattatccgtt

SEQ ID NO: 562473 - DNA, 75 bp, synthetic construct
  source 1..75: mol_type = other DNA
gaccgcgcaggccattgccgattcggtgtctacccagatgcgcgtagcgatgcccggcatcattcagtcgttcga

SEQ ID NO: 562474 - DNA, 75 bp, synthetic construct
  source 1..75: mol_type = other DNA
tggcgcgtctgaagaaagagaatatcgacttcgtttactacggcggttaccacccggaaatggggcagatcctgc

SEQ ID NO: 562475 - DNA, 75 bp, synthetic construct
  source 1..75: mol_type = other DNA
gcctgaagaaaggcaatgctaatgtggtgttctttgatggtattaccgccggggaaaaagatttctcaacgctgg

SEQ ID NO: 562476 - DNA, 75 bp, synthetic construct
  source 1..75: mol_type = other DNA
cgaccaaacggccaacggtatcagccagattaaccatacccacggcggtgtacaatcaggcggcagcaacacagg

SEQ ID NO: 562477 - DNA, 75 bp, synthetic construct
  source 1..75: mol_type = other DNA
gtcaatgggaaaatggcaagtgtgccattcctgatcgtgtagtcgagcaactgttggctatgcgtcagcaaagaa

SEQ ID NO: 562478 - DNA, 75 bp, synthetic construct
  source 1..75: mol_type = other DNA
tttcttcagctgcatgatgctgatctggcttcgaccaccattgataagcactacgccatgcttaacatgctgctt

SEQ ID NO: 562479 - DNA, 75 bp, synthetic construct
  source 1..75: mol_type = other DNA
ccgttccgggaagctgccgacactggcaccgccgttactgcgtcagctggctgccatcgggaataacctgaatca

SEQ ID NO: 562480 - DNA, 75 bp, synthetic construct
  source 1..75: mol_type = other DNA
acgagcaccggcggctgctcgagcgctgcgacggcaggcagctggccgcgtggatgaggcagacctgcctgggcg

SEQ ID NO: 562481 - DNA, 75 bp, synthetic construct
  source 1..75: mol_type = other DNA
gccgtttactaagcaaaaaatgtgttggcgataccttccagtatcgccgcattttttgtcaatgggctacttttg

SEQ ID NO: 562482 - DNA, 75 bp, synthetic construct
  source 1..75: mol_type = other DNA
tgcagtgacgatgggaacgatggaattcagcgttcatggcgcaaccattgcgttttttgtcgttgcgttgggcgg

SEQ ID NO: 562483 - DNA, 75 bp, synthetic construct
  source 1..75: mol_type = other DNA
aatacaccgcagtaataaggccagaatcacgacaacgccccttactgcacctgcaatggagaaaatattcagcga

SEQ ID NO: 562484 - DNA, 75 bp, synthetic construct
  source 1..75: mol_type = other DNA
atgtggtggccgcactgatggccatcgagggtgaattgcgccagttgcggcaggctgtcagggaacagggggtac

SEQ ID NO: 562485 - DNA, 75 bp, synthetic construct
  source 1..75: mol_type = other DNA
ggctggcggaaattccattccttgcgcaccttatgcgacctttgggacacgcgaactttccgaacatgttgcgct

SEQ ID NO: 562486 - DNA, 75 bp, synthetic construct
  source 1..75: mol_type = other DNA
tatatttcctgctacgacggtgggcatcaggcgatggaatgggatgagaaatcgcgcacgccgcactgcaatacc

SEQ ID NO: 562487 - DNA, 75 bp, synthetic construct
  source 1..75: mol_type = other DNA
aggaaggtgaacagcaggcagtggtcttccggtgaccgggttcaggtggtggccgtactgatggccatcgagaga

SEQ ID NO: 562488 - DNA, 75 bp, synthetic construct
  source 1..75: mol_type = other DNA
cgggaataacctgaatcagactgcgaggaaggtgaacagcgggcagtggtcttccggtgaccgggttcaggtggt

SEQ ID NO: 562489 - DNA, 75 bp, synthetic construct
  source 1..75: mol_type = other DNA
ctgccatcgggaacaacctgaaccagacagcccggaaggtgaacagcggccagtggtcttcgattgaccgggttc

SEQ ID NO: 562490 - DNA, 75 bp, synthetic construct
  source 1..75: mol_type = other DNA
cgatgcttgggccggtgacggtgactaacgatgtgaaggctggaggtaagagcctcatccagcatacccatggcg

SEQ ID NO: 562491 - DNA, 75 bp, synthetic construct
  source 1..75: mol_type = other DNA
acccggcgcaggtctttatgggcgatgtcggttcgctggcattaggtggtgctttgggcattatcgctgtattgc

SEQ ID NO: 562492 - DNA, 75 bp, synthetic construct
  source 1..75: mol_type = other DNA
atgacaacattcttgattgctgtaaagaaaaggtatgggatcgagtaaaattactcccaggatattcttataaag

SEQ ID NO: 562493 - DNA, 75 bp, synthetic construct
  source 1..75: mol_type = other DNA
tggcgttactggatcaatacatccgatggtaaagacgtcgcggctttcgaccgcttacttgcgcaaaatattgaa

SEQ ID NO: 562494 - DNA, 75 bp, synthetic construct
  source 1..75: mol_type = other DNA
acgacgattatgatgactatgaggatgaagaaccgatgccgcgcaaaggtaagggcaaaggcaaagggcgtaagc

SEQ ID NO: 562495 - DNA, 75 bp, synthetic construct
  source 1..75: mol_type = other DNA
gtcgtttaaccggcaaacgcctgttcaacgctcaactttatccgcagggtaagaccgcgatgttcctggcgttta

SEQ ID NO: 562496 - DNA, 75 bp, synthetic construct
  source 1..75: mol_type = other DNA
taagcgcggcacgccgaccatgggtgggatcatgatcctgactgcgattgtcgtctccgtgatcttgtgggctta

SEQ ID NO: 562497 - DNA, 75 bp, synthetic construct
  source 1..75: mol_type = other DNA
ttcgcgagtgttgtgatggcgctgcaggaaaatacgcctaaaccgcaaaacgcatctgcttatcgacgtaaaaga

SEQ ID NO: 562498 - DNA, 75 bp, synthetic construct
  source 1..75: mol_type = other DNA
cagagagcgtccgtcatcttgagataagaggtcacgccacagacagcataaaaaatgttccaaacgggctatcat

SEQ ID NO: 562499 - DNA, 75 bp, synthetic construct
  source 1..75: mol_type = other DNA
aaaatgttactaagccggatgctcatcccctttattacactgtatctgcaggtcctccgggaacccgtgggaata

SEQ ID NO: 562500 - DNA, 75 bp, synthetic construct
  source 1..75: mol_type = other DNA
aatgacagcaattcattcctgaattttgataatacgataggttgggtctgggaactcaagcctctagctttttta

SEQ ID NO: 562501 - DNA, 75 bp, synthetic construct
  source 1..75: mol_type = other DNA
gtgattgatgacgatggctaccgcccaaacgtaggtattgtgatttgtaatcgtcaggggcaggtcatgtgggcc

SEQ ID NO: 562502 - DNA, 75 bp, synthetic construct
  source 1..75: mol_type = other DNA
cggagaatccgcagagcaggcgatgtaccgtgaattgtttgaagaagtaggattaagccgtaaagacgttcgaat

SEQ ID NO: 562503 - DNA, 75 bp, synthetic construct
  source 1..75: mol_type = other DNA
cggcgctgaagaaacagcgaaagctgagcgatctggaaacggcaattgtggttgtcgaccgctttagcggtgaag

SEQ ID NO: 562504 - DNA, 75 bp, synthetic construct
  source 1..75: mol_type = other DNA
cacattgccgactggataacggcaatttcagcgaattacgcctggcatttggtgttgccgcgccaacgccgattc

SEQ ID NO: 562505 - DNA, 75 bp, synthetic construct
  source 1..75: mol_type = other DNA
tggaaaaagtatcgcgtactgttgatgcgcgttgacacttcgacagcacccgatattgaatggcctacgcctccg

SEQ ID NO: 562506 - DNA, 75 bp, synthetic construct
  source 1..75: mol_type = other DNA
tggaaaaaatatcgcgtgctattgatgcgtgttaatacttcaacagcactcgatattgaatggcctacgtctccg

SEQ ID NO: 562507 - DNA, 75 bp, synthetic construct
  source 1..75: mol_type = other DNA
gccaaattgcttgccggtggcactgacgtactgatacagcttcaccatcacaatgaccgctatcgccatattgtt

SEQ ID NO: 562508 - DNA, 75 bp, synthetic construct
  source 1..75: mol_type = other DNA
cgctgccaacatgctgaacaggctgcacaaaacgcgccactgaacctgcaaacgctggaagccatcagcgagtct

SEQ ID NO: 562509 - DNA, 75 bp, synthetic construct
  source 1..75: mol_type = other DNA
cgcgctgcgaatcggctctgcgacaacatttactcagctcattgaagatcccgtaatccaacgcaatctcccggc

SEQ ID NO: 562510 - DNA, 75 bp, synthetic construct
  source 1..75: mol_type = other DNA
gcaacagcaacctgctcagcaagagcagaaagacagcgacggtgtagccggttggattaaggatatgtttggtag

SEQ ID NO: 562511 - DNA, 75 bp, synthetic construct
  source 1..75: mol_type = other DNA
ggtgaccattacctgggtaggccgtgataacaaccagccgacaaaactgtatggcgccagtggcgcaatgtcgat

SEQ ID NO: 562512 - DNA, 75 bp, synthetic construct
  source 1..75: mol_type = other DNA
ttattgatcaagaactctatgacatgttgagtgcgcgtccgctgggtgttcagccgcgcggtggggtgatctctc

SEQ ID NO: 562513 - DNA, 75 bp, synthetic construct
  source 1..75: mol_type = other DNA
gtgagcagcgtctgtttgtgccgcgcagtggtttccctgatttgctggtggatactttgctggcgacagaagacc

SEQ ID NO: 562514 - DNA, 75 bp, synthetic construct
  source 1..75: mol_type = other DNA
gcaggcggcgtatctgacactatggaccatgcagcaggtggtacaacgtggtacgggtcgtcagcttggggcgaa

SEQ ID NO: 562515 - DNA, 75 bp, synthetic construct
  source 1..75: mol_type = other DNA
cgatcagcaggcgctgttggtgggtatggtgaaaggggcgtccatctacaacccgtggcgtaacccgaaactggc

SEQ ID NO: 562516 - DNA, 75 bp, synthetic construct
  source 1..75: mol_type = other DNA
tttctgccgctgaccgtattacgaccgttcgcgcagcgattgccgatggcgcaaaaccttctgatctgaatcgtc

SEQ ID NO: 562517 - DNA, 75 bp, synthetic construct
  source 1..75: mol_type = other DNA
ctggccacgttttcccactgcgcgcgcaggcgggtggtgtgctgacgcgtggcggccatactgaagcgactattg

SEQ ID NO: 562518 - DNA, 75 bp, synthetic construct
  source 1..75: mol_type = other DNA
caataaacacaatatggcgctagtcaccatcgaagatttggtggcgtatcgtcaggcgcatgagcgtaaagctag

SEQ ID NO: 562519 - DNA, 75 bp, synthetic construct
  source 1..75: mol_type = other DNA
catgattctttttatcatgcctacactgtctacgtacctcatccctgcgcttaaaccctggcgttccatcggaaa

SEQ ID NO: 562520 - DNA, 75 bp, synthetic construct
  source 1..75: mol_type = other DNA
atgctcggcttaagtcaggcatagccggtctgatacacctcggtattcgatatgcagatgttgaggtcatgaaaa

SEQ ID NO: 562521 - DNA, 75 bp, synthetic construct
  source 1..75: mol_type = other DNA
cgctgtggcactgcaacagtatgaccggtgataaacccggagaagctcattcatcagcctggaccctggctgcaa

SEQ ID NO: 562522 - DNA, 75 bp, synthetic construct
  source 1..75: mol_type = other DNA
gcggaggtgctggttcgcctgggaaaggcggagtacatcacagcgcgacgtccggcgggtcagaaaaagaaacat

SEQ ID NO: 562523 - DNA, 75 bp, synthetic construct
  source 1..75: mol_type = other DNA
agatgctggacaacggcgcggacacgcggcatatccaggcgatcctcgggcatgagaagctggagacgacgcaga

SEQ ID NO: 562524 - DNA, 75 bp, synthetic construct
  source 1..75: mol_type = other DNA
atgaaaccacttttatccgcaatagcagctgcgtttattctcttttccacgcagggcattgcggaacaaaccacg

SEQ ID NO: 562525 - DNA, 75 bp, synthetic construct
  source 1..75: mol_type = other DNA
ggaacaaccaccgttcgatttaaatcacatgggtacaggcagtgacaaatcggatgcgctgggcgtgccctatta

SEQ ID NO: 562526 - DNA, 75 bp, synthetic construct
  source 1..75: mol_type = other DNA
atgatcgagcagatggtgaaggacgcagtgagtcatatccccgttccgcgcgacggtcgtgactacgatccggaa

SEQ ID NO: 562527 - DNA, 75 bp, synthetic construct
  source 1..75: mol_type = other DNA
ttaaaccctggcgttccatcggaaatctaattacgttgatcgtgggtattttgtgcgtttcggtaatgttcttta

SEQ ID NO: 562528 - DNA, 75 bp, synthetic construct
  source 1..75: mol_type = other DNA
aaattccgttcaacgatgaatggaaactgtcgatcaactacacctacaacgatggtcgtgatgtcagcaacggcg

SEQ ID NO: 562529 - DNA, 75 bp, synthetic construct
  source 1..75: mol_type = other DNA
cgttaccgtcgataccaccattcaggaacatcgcgatcgcggtgatacctataacggtcagttctttaccagcgg

SEQ ID NO: 562530 - DNA, 75 bp, synthetic construct
  source 1..75: mol_type = other DNA
agcgttaccgttttccgtaacgatgtgaaagatcgtatcagcatcagccgtacgtctgacgtcaacgctgcaccg

SEQ ID NO: 562531 - DNA, 75 bp, synthetic construct
  source 1..75: mol_type = other DNA
gtttataacgccaccgacaccgtaacggtgaaagggggctgggcgctgagagatcccctcataatttccccaaaa

SEQ ID NO: 562532 - DNA, 75 bp, synthetic construct
  source 1..75: mol_type = other DNA
ctttaaagcgccttctctgttacaacttagccccgactggacaagcaattcttgccgtggcgcatgtaagattgt

SEQ ID NO: 562533 - DNA, 75 bp, synthetic construct
  source 1..75: mol_type = other DNA
acaaccgcaagggcgttagtattcgtggtctggacagtagctacacgctgatcctggttgatggtaaacgtgtta

SEQ ID NO: 562534 - DNA, 75 bp, synthetic construct
  source 1..75: mol_type = other DNA
accagcgaaagttgggagctggggctttactacatgggtgaagaaggctggctggaaggggttgaatccagcgtt

SEQ ID NO: 562535 - DNA, 75 bp, synthetic construct
  source 1..75: mol_type = other DNA
ttccgtaacgatgtgaaagatcgtatcagcatcagccgtacgtctgacgtcaatgctgcaccgggctaccaaaac

SEQ ID NO: 562536 - DNA, 75 bp, synthetic construct
  source 1..75: mol_type = other DNA
ttttatcggcgctttctatgctgccgaacgccccagcatggttgtcaagggattattgtcgcagtagttgcgatg

SEQ ID NO: 562537 - DNA, 75 bp, synthetic construct
  source 1..75: mol_type = other DNA
gggggaaccagctccaaaacatctgccagccagtacgcgctgtttgtggaagatgaatggcggatcttcgagccg

SEQ ID NO: 562538 - DNA, 75 bp, synthetic construct
  source 1..75: mol_type = other DNA
ttgtcactgcatcttccgttgaacaaaaccttaaagatgcacctgccagtatcagcgtcattacccaggaagacc

SEQ ID NO: 562539 - DNA, 75 bp, synthetic construct
  source 1..75: mol_type = other DNA
atcgtatcagcatcagccgtacgtctgacgtcaatgctgcaccgggctaccaaaactttgttggttttgagacgg

SEQ ID NO: 562540 - DNA, 75 bp, synthetic construct
  source 1..75: mol_type = other DNA
gcgtaccagcgccatcttcgcagctaccgcaaggccgacggtaacacgctggcggtgggcgggcagcttagccgc

SEQ ID NO: 562541 - DNA, 75 bp, synthetic construct
  source 1..75: mol_type = other DNA
gtgcggcacctgtcgggtgctgtgcggtaacactattctcgaacagtggcaatatcccgcaggcaccttcggtat

SEQ ID NO: 562542 - DNA, 75 bp, synthetic construct
  source 1..75: mol_type = other DNA
taaatctaaatcctgatctggctcatgcacattttcatattgccatgctatcagagatgaatggcgatattaaaa

SEQ ID NO: 562543 - DNA, 75 bp, synthetic construct
  source 1..75: mol_type = other DNA
acccccatacttttttattactactgttgatcgaatagcaaatatcagttttgattgtatgagaaaggctttatt

SEQ ID NO: 562544 - DNA, 75 bp, synthetic construct
  source 1..75: mol_type = other DNA
atcgcgcagtgcgctggtagtggcggcatggctgttatgttacggacattgtaaaaccgttgatgaagcgattag

SEQ ID NO: 562545 - DNA, 75 bp, synthetic construct
  source 1..75: mol_type = other DNA
atggcgcatcgggatgtggctgtctatgcgttggtttgccttcgcctggagccggtgagcaaaattactgctggt

SEQ ID NO: 562546 - DNA, 75 bp, synthetic construct
  source 1..75: mol_type = other DNA
aatgttgatttttcaggttttttatttattattagtcgtctgttttcctttctgtgttttgtgctgtttaccctt

SEQ ID NO: 562547 - DNA, 75 bp, synthetic construct
  source 1..75: mol_type = other DNA
atgaaattaaatatatttactaaatctatgattggtatgggcctggtgtgttccgctctgcctgcatttgctatt

SEQ ID NO: 562548 - DNA, 75 bp, synthetic construct
  source 1..75: mol_type = other DNA
agctgataagtcaaacgacaactatgctgtcgtagcctggaaaggtcaggaaggttcttctacatggtacgttat

SEQ ID NO: 562549 - DNA, 75 bp, synthetic construct
  source 1..75: mol_type = other DNA
ctgacagcaacccgtggcgtgtttttgttgactggaccggaaccaaagagcgcgtaggtacgccgaagaaagcgt

SEQ ID NO: 562550 - DNA, 75 bp, synthetic construct
  source 1..75: mol_type = other DNA
gagagcagaactcttatgggttacttctcaaagattttcaccggtaacccttttttgattccagaagggcaactt

SEQ ID NO: 562551 - DNA, 75 bp, synthetic construct
  source 1..75: mol_type = other DNA
cgagagaggtgaagaagtggctggacatagatacataccgcggattcgaagagcttccactcatgcagctttatc

SEQ ID NO: 562552 - DNA, 75 bp, synthetic construct
  source 1..75: mol_type = other DNA
ctggaaaaaagctgtcgcgctgggctggtctgacggtcgccaaaaagctgatgagatattcactgctaatttcaa

SEQ ID NO: 562553 - DNA, 75 bp, synthetic construct
  source 1..75: mol_type = other DNA
tccgatgcttgaacagatggtgaaggaggctgtaagccatatccctgttccgcgcgacggtcgtgactatgatcc

SEQ ID NO: 562554 - DNA, 75 bp, synthetic construct
  source 1..75: mol_type = other DNA
gttgtcagatggtgcggtgaaagtaatggtttttattccgagcgtgtttcgctgaagcagcaattaactgacatc

SEQ ID NO: 562555 - DNA, 75 bp, synthetic construct
  source 1..75: mol_type = other DNA
gtagccagacgtggtcattctttaagttcgggacatcaaaaggttgtgtcgttgtcagatggtgcggtgaaagta

SEQ ID NO: 562556 - DNA, 75 bp, synthetic construct
  source 1..75: mol_type = other DNA
tgctcgggcgtacatttaaagaagtagttaagaatgaaaacgatgaacttgtttttcgtggtgattattcccggg

SEQ ID NO: 562557 - DNA, 75 bp, synthetic construct
  source 1..75: mol_type = other DNA
gatttggcagggctggtggtgaaagggttctttctaagctggcaactgagttgatgaattatggtcatgatgtaa

SEQ ID NO: 562558 - DNA, 75 bp, synthetic construct
  source 1..75: mol_type = other DNA
taccgcttaaaaaaatactaaatagtcctaatttgcttcctcataaacatgatgattttataggagtagttcctg

SEQ ID NO: 562559 - DNA, 75 bp, synthetic construct
  source 1..75: mol_type = other DNA
gtatcttcagcagcagaactacagtctggaagcgttgtcccgccgtgatgcccgtgaagatccgttcgcgtcgtc

SEQ ID NO: 562560 - DNA, 75 bp, synthetic construct
  source 1..75: mol_type = other DNA
ggatgttctgcagaaggcggtgaatgatgcggtcgcaaatattccgcagccggcggacggtaaaagtctcacccc

SEQ ID NO: 562561 - DNA, 75 bp, synthetic construct
  source 1..75: mol_type = other DNA
gcgtgatggtcgtgactacgatccggatgttctgcagaaggcggttctggatgcggtgagtgccctgccggctcc

SEQ ID NO: 562562 - DNA, 75 bp, synthetic construct
  source 1..75: mol_type = other DNA
ttgttctctgtggtggtccggcagagcagtggccagcgtacggaaaaaacattttccctgccggtgatgctctac

SEQ ID NO: 562563 - DNA, 75 bp, synthetic construct
  source 1..75: mol_type = other DNA
gagtacagaatttgatgtcaccacgctgctgagaatggacagtgagcggcgcatgaaaacgctgggggatgcggt

SEQ ID NO: 562564 - DNA, 75 bp, synthetic construct
  source 1..75: mol_type = other DNA
aaaaacattttccctgccggtgatgctctaccgcggtgtgttcagagccggtgaaacctaccaccccggcgatac

SEQ ID NO: 562565 - DNA, 75 bp, synthetic construct
  source 1..75: mol_type = other DNA
gtcaccgcaacgttttattctccccgctggcggaaggcatgttgttcgtctgctatcgaatggtatcccgtcaac

SEQ ID NO: 562566 - DNA, 75 bp, synthetic construct
  source 1..75: mol_type = other DNA
atgttcgttttcacaaatgcgaaaaaatttattagggtgtttgcaggatgttttacattactatttatggggtgc

SEQ ID NO: 562567 - DNA, 75 bp, synthetic construct
  source 1..75: mol_type = other DNA
cacatgtcacgacgagtcacgacagataaagatacagataaagatacagatcaagaagatcaaaacactatggtc

SEQ ID NO: 562568 - DNA, 75 bp, synthetic construct
  source 1..75: mol_type = other DNA
agtgaaaagcgccgtcattgccaatgcgcagtcgaaggtgttgattgtggagtttcatcagccgattgccgccag

SEQ ID NO: 562569 - DNA, 75 bp, synthetic construct
  source 1..75: mol_type = other DNA
tgctgatttcaatgacctgttggcactgaagcaggttgtcgacgagcaacaaccagatgccgcgctggtgcagca

SEQ ID NO: 562570 - DNA, 75 bp, synthetic construct
  source 1..75: mol_type = other DNA
atgaagacgtttcctctgcaaagcctgacgcttattgaggcgcagcaaaagcagtttgcgctggtggacacgatt

SEQ ID NO: 562571 - DNA, 75 bp, synthetic construct
  source 1..75: mol_type = other DNA
attacccaacgggtggagcaggtgctggctgatgcatttcacgcacaggccgcggcgctggtgcagggcgcgggg

SEQ ID NO: 562572 - DNA, 75 bp, synthetic construct
  source 1..75: mol_type = other DNA
tacttaatggtggcgcgttgtcggacgttaaaagcgcagttattgccaatgcgcaatcgaaagtgttgattgtgg

SEQ ID NO: 562573 - DNA, 75 bp, synthetic construct
  source 1..75: mol_type = other DNA
gcagtttgcgctggtggatagcatttgtcgccattttcctggtagcgaatttcttacctgcggtgatttgggctt

SEQ ID NO: 562574 - DNA, 75 bp, synthetic construct
  source 1..75: mol_type = other DNA
atgagccggacccgtcaatcaaagccgaaccgatccagaacggtcgccagcaacgtggcggcggcggtcgtgggc

SEQ ID NO: 562575 - DNA, 75 bp, synthetic construct
  source 1..75: mol_type = other DNA
tgtttggcggtgtcagcattaacccgcaaatgatgaagctgcgcggcggcgttgatgttctggtggcaacaccgg

SEQ ID NO: 562576 - DNA, 75 bp, synthetic construct
  source 1..75: mol_type = other DNA
tttgtggtgctctgacgctgacctttgcatccgcgcttggatttgcccctatatttccagacatctgttatcact

SEQ ID NO: 562577 - DNA, 75 bp, synthetic construct
  source 1..75: mol_type = other DNA
atggcgttctggttattttggaagcaatgaaggcaacaggaaatatgccagccaccgatgctttcctgtctgaag

SEQ ID NO: 562578 - DNA, 75 bp, synthetic construct
  source 1..75: mol_type = other DNA
gctgcgttcaatcacggatttatcaataagtctttgcgtgaagttttcgacgttacacgcatgattttgtcagcg

SEQ ID NO: 562579 - DNA, 75 bp, synthetic construct
  source 1..75: mol_type = other DNA
gaaggtggcgcaaaatctgcaagcgcgaaacctgcagaaaaaccgtctcgccgcctcggcgatgccaaaccggca

SEQ ID NO: 562580 - DNA, 75 bp, synthetic construct
  source 1..75: mol_type = other DNA
agtacggtaatcaagatgtttccggtgactcggggaagcataacggcttgacccagtcatggctgatgtcgtcgc

SEQ ID NO: 562581 - DNA, 75 bp, synthetic construct
  source 1..75: mol_type = other DNA
atgcctctgtaaaaaaacttgttgagtggcaggaaaattataaaacgcaagttgagcagatgtcagaacaatatc

SEQ ID NO: 562582 - DNA, 75 bp, synthetic construct
  source 1..75: mol_type = other DNA
tcattcttgcaaaatactgtaactggattcccattaaaaacattgctttatcttgaccctccatattatgttaaa

SEQ ID NO: 562583 - DNA, 75 bp, synthetic construct
  source 1..75: mol_type = other DNA
caagataaatgaaagtcgtccgcagggctggttcgtgggctgggctgaaaaaaacggacggcaagttgttttcgc

SEQ ID NO: 562584 - DNA, 75 bp, synthetic construct
  source 1..75: mol_type = other DNA
tcgggcgctgtgcagcaggtgatgacccaaaggccggaacaatcacaccaactgcagcagcctgaaaccgattcc

SEQ ID NO: 562585 - DNA, 75 bp, synthetic construct
  source 1..75: mol_type = other DNA
aagtgaatattaacgatcagaatgtgatcaccaatgctgtgtcctgcggcactatgtttcgcgggctggagatca

SEQ ID NO: 562586 - DNA, 75 bp, synthetic construct
  source 1..75: mol_type = other DNA
cttgccgggatggactggatcgatgtgttagatgcgctgaaagccgatccgcggaaaacctccgaactggcgcaa

SEQ ID NO: 562587 - DNA, 75 bp, synthetic construct
  source 1..75: mol_type = other DNA
aacctgaaaaacggcaatctcgccactgcttccactgaaaaatgggaacctgcaacctggccgacagagtgccgt

SEQ ID NO: 562588 - DNA, 75 bp, synthetic construct
  source 1..75: mol_type = other DNA
ctctggcttcagtctatgcaattgaggacgccatcggcattaaagtgccggacaacgccaatatcatccgtaata

SEQ ID NO: 562589 - DNA, 75 bp, synthetic construct
  source 1..75: mol_type = other DNA
tcatgaactgcgtcagtgtatgtccgaaagggctgaacccgacgcgcgctatcggccatatcaagtcgatgttgt

SEQ ID NO: 562590 - DNA, 75 bp, synthetic construct
  source 1..75: mol_type = other DNA
gaaagagaaagatcccagcctgtcgttccgccgctcctgccgtgaaggtgtgtgcggttccgacggtctgaacat

SEQ ID NO: 562591 - DNA, 75 bp, synthetic construct
  source 1..75: mol_type = other DNA
taggccactgggccgccattcgcgatggcaagattgatctctaccagtgcgtggtgccgaccacctggaacgcca

SEQ ID NO: 562592 - DNA, 75 bp, synthetic construct
  source 1..75: mol_type = other DNA
agagaacttccttgactggggctggcgtattccgttctttatcgcgctgccgctgggaattattgggctttatct

SEQ ID NO: 562593 - DNA, 75 bp, synthetic construct
  source 1..75: mol_type = other DNA
atcactattgtgattatgtcgatcagtacgttctgtatcggtttaataccgtcctacgcctctattggtatttgg

SEQ ID NO: 562594 - DNA, 75 bp, synthetic construct
  source 1..75: mol_type = other DNA
acccgttgcgtgccggggcaaacccgaagaaatccgctttcagtgcctggaaagccagattacgcgagggggtgc

SEQ ID NO: 562595 - DNA, 75 bp, synthetic construct
  source 1..75: mol_type = other DNA
ggctggtagaaagttcgcagaatctgatgatgccggcatattatctgatggtggtggcggtaattggtttgatta

SEQ ID NO: 562596 - DNA, 75 bp, synthetic construct
  source 1..75: mol_type = other DNA
gcgttccagcaacatgttgagaaactggaacagggtgaccgcgaaggtttgcaggatggcccgaaagtctcgttt

SEQ ID NO: 562597 - DNA, 75 bp, synthetic construct
  source 1..75: mol_type = other DNA
ccggcgtaaccatgaaagagacggcaaatcgtccgttgaaaggtgcgacaccggcggcgtcagatatacaggaag

SEQ ID NO: 562598 - DNA, 75 bp, synthetic construct
  source 1..75: mol_type = other DNA
cctcctgttcagctactgaaggcgtggtgcgtaacggtaaaagtactgccggacatcagcgttatctctgctctc

SEQ ID NO: 562599 - DNA, 75 bp, synthetic construct
  source 1..75: mol_type = other DNA
attgatatggccatgaatggcgtcggatgtcgcgccagtgcacgcattatgggcgttggcctcaacacggtttta

SEQ ID NO: 562600 - DNA, 75 bp, synthetic construct
  source 1..75: mol_type = other DNA
ccagaggccatgctggatggcgtgaggcgttacgcaagatacctggcggctaccgggaaaacgggaacggaattt

SEQ ID NO: 562601 - DNA, 75 bp, synthetic construct
  source 1..75: mol_type = other DNA
cgatggctgcgggaaccgtgcttagctgggccagttacagcatggttgctcacgttacatcaaaacggcagatca

SEQ ID NO: 562602 - DNA, 75 bp, synthetic construct
  source 1..75: mol_type = other DNA
cttgtggcataatgagaaaaagaaaacgattcaagcgtttggacatcaggctaacgccattaacagtcagggaat

SEQ ID NO: 562603 - DNA, 75 bp, synthetic construct
  source 1..75: mol_type = other DNA
aaacctgggaagatgcggcggagtttttattgctcggcgcagcaacgttacaggtcaccaccggcattatgcagt

SEQ ID NO: 562604 - DNA, 75 bp, synthetic construct
  source 1..75: mol_type = other DNA
tgccggttgcccgcccgtcatgggtgcattctcgtctggaatcacgcattgtgcatctcggttgcggggcgtttc

SEQ ID NO: 562605 - DNA, 75 bp, synthetic construct
  source 1..75: mol_type = other DNA
gcagaaaaattggctagattgacattagctaccttcgtttctggacaaatcattcaattcagtggctctttggca

SEQ ID NO: 562606 - DNA, 75 bp, synthetic construct
  source 1..75: mol_type = other DNA
tccgccaggtgttccgctgccgtggccatcagatacaccacctgcaggctatgcaattatgcaggggcagacgtt

SEQ ID NO: 562607 - DNA, 75 bp, synthetic construct
  source 1..75: mol_type = other DNA
tactaatggtgaaaccggtaaaacaggctttgacaacccatcgtttaatggcacatcaggagctgccgggaatca

SEQ ID NO: 562608 - DNA, 75 bp, synthetic construct
  source 1..75: mol_type = other DNA
catgactaacccggcttatcgcaaagcggcctttgccctgatgatgcaggaacaagcgccaacgctgtcgatgcc

SEQ ID NO: 562609 - DNA, 75 bp, synthetic construct
  source 1..75: mol_type = other DNA
cttccacaattttatcactctctccgggctccgtcgttctccgaagattatgggggttggtgagctccttaaccg

SEQ ID NO: 562610 - DNA, 75 bp, synthetic construct
  source 1..75: mol_type = other DNA
ggtttcattttcccgggcgaatcatgggtgtgtggttccgggtactggttgcctgaaagtgaagtactcaaaaac

SEQ ID NO: 562611 - DNA, 75 bp, synthetic construct
  source 1..75: mol_type = other DNA
ggaacagttcaggtatggtcattcctaatgttgtgatgaaagaacttaacttacggccggggcagagcgtggagg

SEQ ID NO: 562612 - DNA, 75 bp, synthetic construct
  source 1..75: mol_type = other DNA
aatagatacacttgaaataaacacatctcaagctagcgaagtgagtgtcaccaatagatttacaaaattccatga

SEQ ID NO: 562613 - DNA, 75 bp, synthetic construct
  source 1..75: mol_type = other DNA
caaaggaacggatctctaagttgggacaatccgaaattgttaactttatcaatgagatttctccaactttacgac

SEQ ID NO: 562614 - DNA, 75 bp, synthetic construct
  source 1..75: mol_type = other DNA
gaatttgttccggtccgttttacctcgtggatgggcggtgaccgcgacggcaacccgaacgtcactgccgatatc

SEQ ID NO: 562615 - DNA, 75 bp, synthetic construct
  source 1..75: mol_type = other DNA
actgtaggtattggtgcccatgcacacactgtagcattaggtgcgcacgggcacaccatcacggtaaatgctacg

SEQ ID NO: 562616 - DNA, 75 bp, synthetic construct
  source 1..75: mol_type = other DNA
ggatgtggattgccgcctggactgatgaacaggatgtatggcatcagccgtcactggtggcctttgaggtcacgc

SEQ ID NO: 562617 - DNA, 75 bp, synthetic construct
  source 1..75: mol_type = other DNA
cctgcgataacgtgcgtgaaaacggtcatgtggcgaaggttgccgttcttgggctggctcaggcgcgtgacccgc

SEQ ID NO: 562618 - DNA, 75 bp, synthetic construct
  source 1..75: mol_type = other DNA
ggtgcattccaccggccatgcttcgcgactggcgcgtgaaggcattgtttccacttcgaagaagttcggcgatcc

SEQ ID NO: 562619 - DNA, 75 bp, synthetic construct
  source 1..75: mol_type = other DNA
gcggggtaccttctgtatttagtatgtatctccgagagcgatacgtcatttggtgcctgccccaatgggggggat

SEQ ID NO: 562620 - DNA, 75 bp, synthetic construct
  source 1..75: mol_type = other DNA
gtaccggtgtggaaagatgtgcgttttggggggagcaacgtttatatgtatttaacatgtaactccaagagcgat

SEQ ID NO: 562621 - DNA, 75 bp, synthetic construct
  source 1..75: mol_type = other DNA
tggcactggctttattgctgagtggttgtgcgggaatgaagagtgaatttgactgcaatgccacagccagtaaca

SEQ ID NO: 562622 - DNA, 75 bp, synthetic construct
  source 1..75: mol_type = other DNA
caacaaagctgaaaacggcaaggacaattaacggcgtaaaatttgacggctcggcaaatattgaagcgtttccgc

SEQ ID NO: 562623 - DNA, 75 bp, synthetic construct
  source 1..75: mol_type = other DNA
taccagcctgacgtttatgaaaaacaatggcgaaatgccgcttgatgctgatctgaatacgtttggtcctgttaa

SEQ ID NO: 562624 - DNA, 75 bp, synthetic construct
  source 1..75: mol_type = other DNA
cgacggtatggactggggcgtcattgatggcaacctgataaacatcgcagttggtccgagtgatgattccggtac

SEQ ID NO: 562625 - DNA, 75 bp, synthetic construct
  source 1..75: mol_type = other DNA
agtcgtgcatttaaccgcgcactatcaattatgttggtatcgctgattaccttcattgtttgttgcattaacccg

SEQ ID NO: 562626 - DNA, 75 bp, synthetic construct
  source 1..75: mol_type = other DNA
ttgcctatttcttatttctttctatttacctggtcggtagttggcaacctgatctattaacaacccaggtagagt

SEQ ID NO: 562627 - DNA, 75 bp, synthetic construct
  source 1..75: mol_type = other DNA
tgctggcagacttcctgatcgattcaggaggaaaagagctcatcaaaacctatggcgaaaaggatgaaaacgata

SEQ ID NO: 562628 - DNA, 75 bp, synthetic construct
  source 1..75: mol_type = other DNA
tatgtcgcaggaggaatgggaagcgttgcctgcgcttttatccggatttacagcaggtaaagcatccagtgcgca

SEQ ID NO: 562629 - DNA, 75 bp, synthetic construct
  source 1..75: mol_type = other DNA
ctgttcttatggtggctattttaatactggggcatcagccggatttaaccagtttcagggggttaaggtcttttc

SEQ ID NO: 562630 - DNA, 75 bp, synthetic construct
  source 1..75: mol_type = other DNA
ccccagaccggcacgcctgccaccgatctggatgatgactactttgacatgttgcaggaagaactttgcagcgtg

SEQ ID NO: 562631 - DNA, 75 bp, synthetic construct
  source 1..75: mol_type = other DNA
ccccgttctgtttcagggcctgccatcgtcatgaccgtggctgttgtggttgcgctttgcacgtttattcaccgt

SEQ ID NO: 562632 - DNA, 75 bp, synthetic construct
  source 1..75: mol_type = other DNA
ctgtgtctaagttaattgtcgtgtcattgattaatataatcccattgatttactgtattttattgtctaatcgag

SEQ ID NO: 562633 - DNA, 75 bp, synthetic construct
  source 1..75: mol_type = other DNA
atcaacaagaaattgttgctgaattttcctcaagggatgagatgaatctcttctcattaaagcaggaagaaaggg

SEQ ID NO: 562634 - DNA, 75 bp, synthetic construct
  source 1..75: mol_type = other DNA
tgctattcgtggtgcggcaatgagggtcatcggtaacaagttcggtgcccataaccagcatgcaaaacagcagat

SEQ ID NO: 562635 - DNA, 75 bp, synthetic construct
  source 1..75: mol_type = other DNA
tggcggctggaagcgaaaaacactcgaaattctactctgtggcgctctgacgctgacttttgcatccgctcttga

SEQ ID NO: 562636 - DNA, 75 bp, synthetic construct
  source 1..75: mol_type = other DNA
atcgcatttgtcaaagaaggggaagtgttggtttgctgcgctaaagcaaaaaccgatgtgaccttggaaatttaa

SEQ ID NO: 562637 - DNA, 75 bp, synthetic construct
  source 1..75: mol_type = other DNA
tgtgccgggttcgtctaatcgaaggtcaggtagcctacgaagagacccccatcgcacttgtcaaagaaggggaag

SEQ ID NO: 562638 - DNA, 75 bp, synthetic construct
  source 1..75: mol_type = other DNA
gatggctggcgtgattgccgcaggcgtggtctttctgattatcatgggggtttatcatctgctgaaccgccacgc

SEQ ID NO: 562639 - DNA, 75 bp, synthetic construct
  source 1..75: mol_type = other DNA
gctgctgcggttgctgggcgataaagccggaggcggcgacagccagctgagtctgcagacctacctcacccgcgt

SEQ ID NO: 562640 - DNA, 75 bp, synthetic construct
  source 1..75: mol_type = other DNA
gagctggttaacggcagtaagcgactcggtttccaggccccactctatttgtggcagggctgtgacaacggtgat

SEQ ID NO: 562641 - DNA, 75 bp, synthetic construct
  source 1..75: mol_type = other DNA
acccgcgtcacccgcgtgcgcctcaaactgcaacaggtgaccaacgcccccgacccgcaggagatgacccagcaa

SEQ ID NO: 562642 - DNA, 75 bp, synthetic construct
  source 1..75: mol_type = other DNA
cctccgggcacatgccagaaggcacggaatatcattgtgtgcataccgaatcagtgaacacgacaaatatttgtg

SEQ ID NO: 562643 - DNA, 75 bp, synthetic construct
  source 1..75: mol_type = other DNA
atgataatccctcgcaaaagatggtcacgcgaagaccgggaatttatcgaagccaacgtcgggaaactgaccgtt

SEQ ID NO: 562644 - DNA, 75 bp, synthetic construct
  source 1..75: mol_type = other DNA
acaaatatttgtgtcgtgaactttataaagaagggctggctattcatgtcattgcccaaaagatggaattaagca

SEQ ID NO: 562645 - DNA, 75 bp, synthetic construct
  source 1..75: mol_type = other DNA
cgtaccggaggccgcacctcatgcgtggctgccgtcaccggtctgggcgggcgtcaccggcgataacgcgcgggg

SEQ ID NO: 562646 - DNA, 75 bp, synthetic construct
  source 1..75: mol_type = other DNA
gggtggctgacgccatgaacacgcaggggctgacggtcaatccggactttatccgcgccctgaaccgcctgcgcg

SEQ ID NO: 562647 - DNA, 75 bp, synthetic construct
  source 1..75: mol_type = other DNA
ggggatatttaattctgattattggtttggcagggatttgcgctctgttaattattattaatcaggatgttctga

SEQ ID NO: 562648 - DNA, 75 bp, synthetic construct
  source 1..75: mol_type = other DNA
ggaaaccagcatccagactgcacgtgcgcttgatacccggctgccgctgtctgaacaactggtggcgctgcatac

SEQ ID NO: 562649 - DNA, 75 bp, synthetic construct
  source 1..75: mol_type = other DNA
caggcggcgcattctcttccctgcgcctgcgcggcctgatgttcagcccgccgcttaccgccgtaccggaggccg

SEQ ID NO: 562650 - DNA, 75 bp, synthetic construct
  source 1..75: mol_type = other DNA
gcaatcccgtgaaggtgacgacgtgcctgtcgggccgctggataaaaccttcacgccgctgctgcgtttgctggg

SEQ ID NO: 562651 - DNA, 75 bp, synthetic construct
  source 1..75: mol_type = other DNA
gcggtgaactctcatcaaacggtaaggtactgcatacccacaaacacccaggcgacagcggcggcacaaccggga

SEQ ID NO: 562652 - DNA, 75 bp, synthetic construct
  source 1..75: mol_type = other DNA
aactcgcgcgcgcactgcgcaacatgatacgccccggcattatcgtcgaaaccgaccttaacgccggtcgctgcc

SEQ ID NO: 562653 - DNA, 75 bp, synthetic construct
  source 1..75: mol_type = other DNA
aactcgcccgcgcgatacgcaacatgattcgtaccggcattgtcgtcgaaactgacctcgacgccgggcgctgtc

SEQ ID NO: 562654 - DNA, 75 bp, synthetic construct
  source 1..75: mol_type = other DNA
tataatagaaggaaagatttaaggaattatttaatgggttggtcaaaggagtcaataatgtgtgatagatacaac

SEQ ID NO: 562655 - DNA, 75 bp, synthetic construct
  source 1..75: mol_type = other DNA
ctggaaggtaaaaagtacacctatgatgaagtcagtaacgaatccatcctgactactcatattgagtatcagtat

SEQ ID NO: 562656 - DNA, 75 bp, synthetic construct
  source 1..75: mol_type = other DNA
caatacagccccaccaacctgcttgccatacatcatgcactgctgacatccggccttcagccacaggatgtagaa

SEQ ID NO: 562657 - DNA, 75 bp, synthetic construct
  source 1..75: mol_type = other DNA
gttggcgtaacgccaaaaaactggtcagagacctttactgaccgctgggttgagatgcgcagcatcttcctgcga

SEQ ID NO: 562658 - DNA, 75 bp, synthetic construct
  source 1..75: mol_type = other DNA
ttcattgccggaagcctttacagcgaagacgcaccgccgccagatgctggcgctaccacctgcgtgatcctgcac

SEQ ID NO: 562659 - DNA, 75 bp, synthetic construct
  source 1..75: mol_type = other DNA
ttgagtacgagcccgagaccagtgcgctgacggtcagcggcataaaaacggccgacgtgacggcatcggaatcca

SEQ ID NO: 562660 - DNA, 75 bp, synthetic construct
  source 1..75: mol_type = other DNA
attacccattcaggcggatcgctttcgtctaatggtgtcgttgtccattctcacaaacatagcggcgtccagtac

SEQ ID NO: 562661 - DNA, 75 bp, synthetic construct
  source 1..75: mol_type = other DNA
atgaacactctcgcaaatattcaggaactcgggcgcgtactgcgcaacatgatacgccctggcattatcgtcgaa

SEQ ID NO: 562662 - DNA, 75 bp, synthetic construct
  source 1..75: mol_type = other DNA
atgaaaggcaacatcgagcatacaggcgggtcactgtcatctaatggcaaggtgctccacacccataaacacccc

SEQ ID NO: 562663 - DNA, 75 bp, synthetic construct
  source 1..75: mol_type = other DNA
tggagagttgctcaatcttaaaatagatgattttgatctcagagacaacactttaagtgtagtcagaagacatga

SEQ ID NO: 562664 - DNA, 75 bp, synthetic construct
  source 1..75: mol_type = other DNA
agttatgcttgtgccagaggatatgtctgtcggatggttcagcaaggctctggagagtgttgacgaagttcgcat

SEQ ID NO: 562665 - DNA, 75 bp, synthetic construct
  source 1..75: mol_type = other DNA
cgctgattgatgggcaaacggtagcagaaaaagcgcaaaagctatggcagaactatttacgccaaaggatgcagc

SEQ ID NO: 562666 - DNA, 75 bp, synthetic construct
  source 1..75: mol_type = other DNA
gcggcggggaaagcggagattacccgcgaaactcttgtcgcagaagcgccagcgatacagtgcctgcaactggaa

SEQ ID NO: 562667 - DNA, 75 bp, synthetic construct
  source 1..75: mol_type = other DNA
agttatgcttgtaccagaggatatgtcagtcggatggttcagcaaggctctggagagtgttgacgaagttcgtat

SEQ ID NO: 562668 - DNA, 75 bp, synthetic construct
  source 1..75: mol_type = other DNA
gtaaaaaaatccggtaccgcgatgaagtgactggaaaaatgataacgcgggataatccaccaatcccgggaaagc

SEQ ID NO: 562669 - DNA, 75 bp, synthetic construct
  source 1..75: mol_type = other DNA
atgattaagcataaatcagaaacaccaaaagaagttagagactgctggcaaacgccgctttggctttttgatgca

SEQ ID NO: 562670 - DNA, 75 bp, synthetic construct
  source 1..75: mol_type = other DNA
cacggcgttcgttctgccggggatttattccggcgataaccccgcgccgtctgcgtcggcggatgccctgcatat

SEQ ID NO: 562671 - DNA, 75 bp, synthetic construct
  source 1..75: mol_type = other DNA
ctgttactgccacggtgccggtggtcacggtgaaagcatcaacccgcgtcaccctggacacaccggaggtggtct

SEQ ID NO: 562672 - DNA, 75 bp, synthetic construct
  source 1..75: mol_type = other DNA
ctgccacggtgccggtggtcatggtgaaagcatcaacccgcatcaccctggacacaccggaggtggtctgcacca

SEQ ID NO: 562673 - DNA, 75 bp, synthetic construct
  source 1..75: mol_type = other DNA
aagtggatgacctgatacgttatgcaaggcagagatttgataagcaaaagattacaaatgtaagattaataaaag

SEQ ID NO: 562674 - DNA, 75 bp, synthetic construct
  source 1..75: mol_type = other DNA
aaatcctttccagaaggaggttcaggtgagaaacaggctcatttttaccttactattgaattgtggtttaagagc

SEQ ID NO: 562675 - DNA, 75 bp, synthetic construct
  source 1..75: mol_type = other DNA
tacttcattctattaagggaattcatgctagatatgaagtcgagagtttcatcgaaagtattagagcacatctcc

SEQ ID NO: 562676 - DNA, 75 bp, synthetic construct
  source 1..75: mol_type = other DNA
cttgataccgctttcgtgctgccgggtattttctccgacgataaccccgccccgtctgcctcggcggatgcgtgg

SEQ ID NO: 562677 - DNA, 75 bp, synthetic construct
  source 1..75: mol_type = other DNA
atgcctgtaaaagagcaaggattttctctgttggaagttttgattgctatggcgatcagtagcgtactgttgctg

SEQ ID NO: 562678 - DNA, 75 bp, synthetic construct
  source 1..75: mol_type = other DNA
ccgtaagctggcgctggaagatgaaatctggctgcggatatttacagtcgcgaagcatctccagagagcaggtta

SEQ ID NO: 562679 - DNA, 75 bp, synthetic construct
  source 1..75: mol_type = other DNA
tgctgaccgtcaatatgcgcggcgccagcaagaccaatccgcaaatcgtggtggatgccagctacagcataacgg

SEQ ID NO: 562680 - DNA, 75 bp, synthetic construct
  source 1..75: mol_type = other DNA
ctcgcgcagttaaaatcggtacgtcgcatccgtgaatttgacgatctaatcaccgccaggattcacggctacgct

SEQ ID NO: 562681 - DNA, 75 bp, synthetic construct
  source 1..75: mol_type = other DNA
ccagttggtttttacgctggctgcaacgcgaatttggtcatgcgccaacggctgccgtcggctattcgctcggcg

SEQ ID NO: 562682 - DNA, 75 bp, synthetic construct
  source 1..75: mol_type = other DNA
gtatggcgattttcttcatcttctcgatgttgctgggtgcggaactgcagattaccaacatgttcggtaatacct

SEQ ID NO: 562683 - DNA, 75 bp, synthetic construct
  source 1..75: mol_type = other DNA
taccacgtacgcactattcagcagcatcgactgggatgacgacgatcatgaccatcatcatcatgacgatgatga

SEQ ID NO: 562684 - DNA, 75 bp, synthetic construct
  source 1..75: mol_type = other DNA
tttccgcacctcccgtaacacccgccgtcgtcaaatctgcattcagcactgcacaaatagatcaatgggtcgcgc

SEQ ID NO: 562685 - DNA, 75 bp, synthetic construct
  source 1..75: mol_type = other DNA
aaaccggttcgctgaagtcatcaaccgaacaaaaagttattaccacaacgaagaaagctgtaccggtaaaacaga

SEQ ID NO: 562686 - DNA, 75 bp, synthetic construct
  source 1..75: mol_type = other DNA
aaactggcgcaacaaactggatcactgaagtcgtcggtggagcaaaagatcatcacaacaacgaaaaaagccgta

SEQ ID NO: 562687 - DNA, 75 bp, synthetic construct
  source 1..75: mol_type = other DNA
aatcgctggtggcttttccacagttaatggcattgatgggcgagaatcctgagtgggtacaaaatctgggggatg

SEQ ID NO: 562688 - DNA, 75 bp, synthetic construct
  source 1..75: mol_type = other DNA
cttcccgcaacagtttcagcgccgcccgtaacgcccgccgtcgtcaaaagtgccttcagcactgcgcaaatcgat

SEQ ID NO: 562689 - DNA, 75 bp, synthetic construct
  source 1..75: mol_type = other DNA
ccaatgaatttagcagcagtgctgaattcacccctatgcgcggctttagcaattgtcatctacaaaccatgctgc

SEQ ID NO: 562690 - DNA, 75 bp, synthetic construct
  source 1..75: mol_type = other DNA
cacatcgacagctacctcatgaataaacacttcatgcgtaagcacggtcctaacgcttattacgggcagaagtaa

SEQ ID NO: 562691 - DNA, 75 bp, synthetic construct
  source 1..75: mol_type = other DNA
gcggtgaactctcatcaaacggtaaggtactgcatacccataaacaccccggcgacagtggcggcacaaccgggg

SEQ ID NO: 562692 - DNA, 75 bp, synthetic construct
  source 1..75: mol_type = other DNA
cggtgctgaagaaaaatccataagcgttatgaaatcaacgacaaagcatagcgaacacaaggagaaagaaaaatg

SEQ ID NO: 562693 - DNA, 75 bp, synthetic construct
  source 1..75: mol_type = other DNA
gttatccgtcgcttggcggcattgtccatacccattccacgcatgccaccgcatgggcgcaggcggggctggcta

SEQ ID NO: 562694 - DNA, 75 bp, synthetic construct
  source 1..75: mol_type = other DNA
aggtgcagggtgagtatgaactgaacaccggcaaagtgattatcgaaacgctgggcaacgccgagccgctgcata

SEQ ID NO: 562695 - DNA, 75 bp, synthetic construct
  source 1..75: mol_type = other DNA
cagcggcgttgcctacgaaaccatgaaagcggacgatatggtggtggttgatatgagcggcaaggtggtggaagg

SEQ ID NO: 562696 - DNA, 75 bp, synthetic construct
  source 1..75: mol_type = other DNA
atttacgcattccattgttgaagtttttgttctcaggaaaaccggccattaagcgcgagaatgataaagcgcctg

SEQ ID NO: 562697 - DNA, 75 bp, synthetic construct
  source 1..75: mol_type = other DNA
gatcccgatgttaacggctattcccctgctcaccttgccgcaattcattatgctgcaatatgtcaaaggcaaagc

SEQ ID NO: 562698 - DNA, 75 bp, synthetic construct
  source 1..75: mol_type = other DNA
ttcggtgcttacatcactccgcacattacatcaaatctgctgggtttcctctgcggtctgatatttgtggtaggg

SEQ ID NO: 562699 - DNA, 75 bp, synthetic construct
  source 1..75: mol_type = other DNA
ggtccgggtggcagatattgccacactctctccccatatccggccacgatcccggacctggtggcaactcttccg

SEQ ID NO: 562700 - DNA, 75 bp, synthetic construct
  source 1..75: mol_type = other DNA
ggaaagtacgtgtcgaacgtgtaggtatcccgatgttaacagccatccccctactgacattgccgcaatttatta

SEQ ID NO: 562701 - DNA, 75 bp, synthetic construct
  source 1..75: mol_type = other DNA
gcatcagaaataatttagaaaattcagataaggcgaataaatctttctcgatggttaagctatcgatattatttt

SEQ ID NO: 562702 - DNA, 75 bp, synthetic construct
  source 1..75: mol_type = other DNA
agggacttcggcggtaagtctgggattaacggcaaattacgcacgtaccggagggcaggtgactgcagggaatgt

SEQ ID NO: 562703 - DNA, 75 bp, synthetic construct
  source 1..75: mol_type = other DNA
gaccgggtattgttaattgaagagggaaaaattggtctggatttgacggtggatatcccccgtccgcgccggtta

SEQ ID NO: 562704 - DNA, 75 bp, synthetic construct
  source 1..75: mol_type = other DNA
gctgagattcaggatgatacgcgaatgatgtttcaggatgcgcgtctgctaccgtggaaatcggtgattgataac

SEQ ID NO: 562705 - DNA, 75 bp, synthetic construct
  source 1..75: mol_type = other DNA
ccaaaacatttactcgtcactgggttgcaatgaaacacatttttcaccgactggatagtgaggctttattatttg

SEQ ID NO: 562706 - DNA, 75 bp, synthetic construct
  source 1..75: mol_type = other DNA
gaccactcgattttcaccaacacggcgtcgttttcgccagcacagggagtcggcgtgcagttgacgcgtaatggc

SEQ ID NO: 562707 - DNA, 75 bp, synthetic construct
  source 1..75: mol_type = other DNA
aatagctatcctttccctacgaccagcgaaacgccacgcattgtttatgattcgcgagcggataaaccctggcct

SEQ ID NO: 562708 - DNA, 75 bp, synthetic construct
  source 1..75: mol_type = other DNA
cggagcggtaccggaaactgcacaagagcaattcgttcaggtagttgtctgctgcaatattggcaatggttacgg

SEQ ID NO: 562709 - DNA, 75 bp, synthetic construct
  source 1..75: mol_type = other DNA
tgcctccaggtgacgttaaccagttaacaattaacgccggatacagagaatccacccataacactgtttttggtt

SEQ ID NO: 562710 - DNA, 75 bp, synthetic construct
  source 1..75: mol_type = other DNA
ttaacatccccaaagccatggcatagcactattaaagaatcatcgcctagcttctttaagctccatgaaaatggt

SEQ ID NO: 562711 - DNA, 75 bp, synthetic construct
  source 1..75: mol_type = other DNA
tgaggaagtcaaacagcggctacgtactggtactgtggtaaccacagatgacaggaactgggagttacgttactc

SEQ ID NO: 562712 - DNA, 75 bp, synthetic construct
  source 1..75: mol_type = other DNA
acattggttttttagataataatacaggatacaaagaatatttctctgaaaaaatctcctctgactacatttcag

SEQ ID NO: 562713 - DNA, 75 bp, synthetic construct
  source 1..75: mol_type = other DNA
cgatgcgttcgttatgctctagctgatgcatcctctccgaaaggggtagacattggggcatttatctcggcagtc

SEQ ID NO: 562714 - DNA, 75 bp, synthetic construct
  source 1..75: mol_type = other DNA
gtgttgatccctcaatgagcaactttgggcttgctgtgggcactttagaccttgagacggacgaacttgagattc

SEQ ID NO: 562715 - DNA, 75 bp, synthetic construct
  source 1..75: mol_type = other DNA
tgcgatgatcagcctgtataagggactcgattcccagtcgctacatcatatttcgcgatcacgttcacaacaaaa

SEQ ID NO: 562716 - DNA, 75 bp, synthetic construct
  source 1..75: mol_type = other DNA
tgcggctgggttatctggcgtgacgaagaagcgctgccgcaggaactggtgttcaacgttgactacctgggtggt

SEQ ID NO: 562717 - DNA, 75 bp, synthetic construct
  source 1..75: mol_type = other DNA
tactttcgccatcaacttctcccgcccggcgggtcaggtgattgcacagtactatgaattcctgcgcctcggtcg

SEQ ID NO: 562718 - DNA, 75 bp, synthetic construct
  source 1..75: mol_type = other DNA
gacgtcaactttaccccagactcctatcgcaaattgcttacgaaaacgctgtttgttggacgcatccttgaaaaa

SEQ ID NO: 562719 - DNA, 75 bp, synthetic construct
  source 1..75: mol_type = other DNA
gatgtggtaactggcaagatgattacgctggataatacgccgacttccggtaagcagtcgtacgcaaaaggttca

SEQ ID NO: 562720 - DNA, 75 bp, synthetic construct
  source 1..75: mol_type = other DNA
acagcgagaatgtgcgctgggataatcaggtgttgattactcagtgggcgtggtcgaaattctgcgagcatctgg

SEQ ID NO: 562721 - DNA, 75 bp, synthetic construct
  source 1..75: mol_type = other DNA
acaaagcctccctgaaatatctcagcgaccacccgaaactgcagggtattgcccagcagaacagctttaaacaca

SEQ ID NO: 562722 - DNA, 75 bp, synthetic construct
  source 1..75: mol_type = other DNA
ttgatggcaacgctcgtcagaacctggccactttctgccagacctgggacgacgaaaacgtccataaattgatgg

SEQ ID NO: 562723 - DNA, 75 bp, synthetic construct
  source 1..75: mol_type = other DNA
cgtgtgaacagtgacgatctgcgccgcgccagtgaaatatggcgtgttgcgaagccaatcattgataaggcaaat

SEQ ID NO: 562724 - DNA, 75 bp, synthetic construct
  source 1..75: mol_type = other DNA
gctgcttatctggcggatgaaatcgccaaactggggccgtatgagttcatctgtacgggtcgcccggacgaaggc

SEQ ID NO: 562725 - DNA, 75 bp, synthetic construct
  source 1..75: mol_type = other DNA
gtaattgcacagtactatgaattcctgcgccttggtcgtgaaggctataccaaagtacagaacgcgtcctaccag

SEQ ID NO: 562726 - DNA, 75 bp, synthetic construct
  source 1..75: mol_type = other DNA
ttgctggaagactacaaagcctccctgaaatatctcagcgatcacccgaaactgcagggtattgcccagcagaac

SEQ ID NO: 562727 - DNA, 75 bp, synthetic construct
  source 1..75: mol_type = other DNA
cagcatccagcctgctgggtattttcctttcgccattgctggttggtctggtgatgaatgttcacggtgcagagg

SEQ ID NO: 562728 - DNA, 75 bp, synthetic construct
  source 1..75: mol_type = other DNA
aggtggaccacgggttcgcccagccgctggagttcctgctcggtgggctggataaggtgccagttctgcctgtgt

SEQ ID NO: 562729 - DNA, 75 bp, synthetic construct
  source 1..75: mol_type = other DNA
aacgctacttccttgaaatgcggtttaagccgatgccgcagtaccacgccggggcgctggtgcgtgaaggcgacg

SEQ ID NO: 562730 - DNA, 75 bp, synthetic construct
  source 1..75: mol_type = other DNA
cgcgtcgtaacgcctttattcagccgcaggtcgatgcggtgatgctggaagggttatcgcggtttccgaatgtgc

SEQ ID NO: 562731 - DNA, 75 bp, synthetic construct
  source 1..75: mol_type = other DNA
gcaacctttaccggaacccactgatgtactgttttatgaaggtttacacggcggcgtagtcacgccacagcataa

SEQ ID NO: 562732 - DNA, 75 bp, synthetic construct
  source 1..75: mol_type = other DNA
gaccaccaccaccagcctcgagtttcgtaaaatattcgcgcagttaaatctgcatgcacccgaggtggaaggcga

SEQ ID NO: 562733 - DNA, 75 bp, synthetic construct
  source 1..75: mol_type = other DNA
cacacaacaaggactgctggcaaacgccgctttggctttttgatgcactggatattgagtttggattctggctgg

SEQ ID NO: 562734 - DNA, 75 bp, synthetic construct
  source 1..75: mol_type = other DNA
cgttctctggttcagggaatgaaaaattgcgatcaaaccggtggcttaagtggtcgtccgcttcagttaaaaagc

SEQ ID NO: 562735 - DNA, 75 bp, synthetic construct
  source 1..75: mol_type = other DNA
cgctcatgagtttacttttcagcaattacgccgcattaccggaaggccgtttgaagcactgattcggcaaaaagt

SEQ ID NO: 562736 - DNA, 75 bp, synthetic construct
  source 1..75: mol_type = other DNA
tcagtcggatggttcagcaaggctctggagagtgttgacgaagttcgtattatcactgatggacggattaatttt

SEQ ID NO: 562737 - DNA, 75 bp, synthetic construct
  source 1..75: mol_type = other DNA
gtctggctgccggtcttgataaagacggggggtgtattgacgctttaggcgcaatgggatttggatcgatcgaga

SEQ ID NO: 562738 - DNA, 75 bp, synthetic construct
  source 1..75: mol_type = other DNA
caaaatgatttacaggcgatccaccataaatatgtgccaattgcagtgaagatcgcgccggatctttctgaagag

SEQ ID NO: 562739 - DNA, 75 bp, synthetic construct
  source 1..75: mol_type = other DNA
caaaatgatttgcaagcgatgtaccataaatatgtgccgatcgcagtgaagatcgcgccggatctttctgaagaa

SEQ ID NO: 562740 - DNA, 75 bp, synthetic construct
  source 1..75: mol_type = other DNA
tggaagactatatcaactacatcacaccgcagttttcccgcacccatcttaacttccagcgcgttcccaccgtcg

SEQ ID NO: 562741 - DNA, 75 bp, synthetic construct
  source 1..75: mol_type = other DNA
aatgagaaggtcggtgagtttattgaaaccggctaccgtaccgtgcgacgtcatcgtggcgcgttcatcaccatc

SEQ ID NO: 562742 - DNA, 75 bp, synthetic construct
  source 1..75: mol_type = other DNA
cgacgtacgtgtcggcaaatttgatgaactgcatcagcgctgtattgatcagcgtatcggcatcgatgtccgtcc

SEQ ID NO: 562743 - DNA, 75 bp, synthetic construct
  source 1..75: mol_type = other DNA
ctcgatcatatgctgcgcaccaaactgccgcgcggtattccgttgtgtatccatctgatgtccagtcagctggtt

SEQ ID NO: 562744 - DNA, 75 bp, synthetic construct
  source 1..75: mol_type = other DNA
gcatttgtgggtaatgtgcagcaccttcgtattgtttccgattctgggcgtgctgtttgcctggtggaaaccggt

SEQ ID NO: 562745 - DNA, 75 bp, synthetic construct
  source 1..75: mol_type = other DNA
cctttcaccgttgctggttggcctggtgatgaatgttcacggtgcagggggcagccttgagcaggtaggtaagat

SEQ ID NO: 562746 - DNA, 75 bp, synthetic construct
  source 1..75: mol_type = other DNA
tgctctgctgttctttatgcacggcgcgaagttatcgcgagaggccattattgcaggcggtggtcattggcgact

SEQ ID NO: 562747 - DNA, 75 bp, synthetic construct
  source 1..75: mol_type = other DNA
atgctgtacgacttcgatacggtacgcctgttcatccaccagccgcgacttaaccacgtttcagagtgggccctg

SEQ ID NO: 562748 - DNA, 75 bp, synthetic construct
  source 1..75: mol_type = other DNA
tcagtcggatggttcagcaaggctctggagagtgttgacgaagttcgcatcatcactgatggacggattaatttt

SEQ ID NO: 562749 - DNA, 75 bp, synthetic construct
  source 1..75: mol_type = other DNA
cacacgacaaggactgctggcaaacgccgctttggctttttgatgcactggatattgaatttggattctggctgg

SEQ ID NO: 562750 - DNA, 75 bp, synthetic construct
  source 1..75: mol_type = other DNA
gcgtaatcatcgcgggcaacgagctgcagatccacgatctgaaatacggtaagggtgtgcgggtcgacgccgagc

SEQ ID NO: 562751 - DNA, 75 bp, synthetic construct
  source 1..75: mol_type = other DNA
taccgctggaaaacttcatacctggagaaaagcagtgccgcttctgtaaagcaaaagctatttgcactgcccaga

SEQ ID NO: 562752 - DNA, 75 bp, synthetic construct
  source 1..75: mol_type = other DNA
gacagaagatggcagtttcgttttgaacatcgggggctcttggaatcccggtgagccaactagatctatctatca

SEQ ID NO: 562753 - DNA, 75 bp, synthetic construct
  source 1..75: mol_type = other DNA
tggctacgcctctggcaaagagaaagacgtatttctcgtagaatgcctccaactattgtaggccctacagtacca

SEQ ID NO: 562754 - DNA, 75 bp, synthetic construct
  source 1..75: mol_type = other DNA
acttccactcagaccagagtcagtgccagttcctgcaaggtggaattccgtcacggtaacatgacgctggaaaat

SEQ ID NO: 562755 - DNA, 75 bp, synthetic construct
  source 1..75: mol_type = other DNA
atgaacattgtcgatcaacaaacctttcgcgatgcgatgtcctgtatgggcgcggcggtcaatatcatcaccacg

SEQ ID NO: 562756 - DNA, 75 bp, synthetic construct
  source 1..75: mol_type = other DNA
tgttggtggcgctggagggggtattgcaggcgctgccgcgggtgctttagttggcgctgggttaaaaggcgctgt

SEQ ID NO: 562757 - DNA, 75 bp, synthetic construct
  source 1..75: mol_type = other DNA
cctcatcgtgttattgaggtaaaaggcaacccatataaaatcacaacttcagtggagctaagacatatgcaataa

SEQ ID NO: 562758 - DNA, 75 bp, synthetic construct
  source 1..75: mol_type = other DNA
aaagagcaacagtttattagtaaatatcaacatttgttattcaagaaaaaactagagcataaaatcacccgaaac

SEQ ID NO: 562759 - DNA, 75 bp, synthetic construct
  source 1..75: mol_type = other DNA
tggttccagtggaacttatcgacaccccgcgctgtgctacagatggtaagcgtcaacggagcaccgtattgacgc

SEQ ID NO: 562760 - DNA, 75 bp, synthetic construct
  source 1..75: mol_type = other DNA
ccattacggtaaaatgatgctggaaaatccttcaccagagctgctcacggtgttgaaccgtgagctgaccgggag

SEQ ID NO: 562761 - DNA, 75 bp, synthetic construct
  source 1..75: mol_type = other DNA
tgcgcgttctggttctatcaagagtccgatctggcgttctggtggcgtgacctttgctgctcgtccgcaggacca

SEQ ID NO: 562762 - DNA, 75 bp, synthetic construct
  source 1..75: mol_type = other DNA
atgtcctgcatgggcgcggcggtcaatattatcaccacggacggtccagccgggcgcgccgggttcaccgccagc

SEQ ID NO: 562763 - DNA, 75 bp, synthetic construct
  source 1..75: mol_type = other DNA
tcagttgcttgtgcggcttcctgctatgtggaattccattacggtaaaatgacgctggaaaatccttcaccagag

SEQ ID NO: 562764 - DNA, 75 bp, synthetic construct
  source 1..75: mol_type = other DNA
cgtggcgccagaaaggcaccggccgtgcgcgttctggttctatcaagagcccgatctggcgttctggtggcgtga

SEQ ID NO: 562765 - DNA, 75 bp, synthetic construct
  source 1..75: mol_type = other DNA
agtgttaaatgcaattgccaactcaacatcaggtgccattgttggtggcgctggagggggcattgcaggcgctgc

SEQ ID NO: 562766 - DNA, 75 bp, synthetic construct
  source 1..75: mol_type = other DNA
ctaagctgtctaaagtagagacagaaagagaatcccttgaattacaactttcagtattaaaaggagttaagggag

SEQ ID NO: 562767 - DNA, 75 bp, synthetic construct
  source 1..75: mol_type = other DNA
aaagtggccattaacgaagcgatcgaactggcgaaatcgttcggcgcagaagacagccataagttcgtcaacggc

SEQ ID NO: 562768 - DNA, 75 bp, synthetic construct
  source 1..75: mol_type = other DNA
tcgccgacctgctggcgctgattcagttgctgcaggcgcaactgggaattgtcgcccggccacggaagccagtga

SEQ ID NO: 562769 - DNA, 75 bp, synthetic construct
  source 1..75: mol_type = other DNA
attcgctttgaacatattggtgatgacacccttgaagcgacaatgccagtagactcgcggacaaagcagcctttc

SEQ ID NO: 562770 - DNA, 75 bp, synthetic construct
  source 1..75: mol_type = other DNA
gctgggagaaaaaataactgcgtttgatgcggctgatattcacaactggctggcggagcgccggggaaaggtggc

SEQ ID NO: 562771 - DNA, 75 bp, synthetic construct
  source 1..75: mol_type = other DNA
cattgaggattatgaaaaaatccttattggcatggcagacaataacaaagataaaacggtgatgatgccaactta

SEQ ID NO: 562772 - DNA, 75 bp, synthetic construct
  source 1..75: mol_type = other DNA
gctgtgcattgtgtcaactctcgtctggatctgggctgtagctcaggcaaaagaagcctggtacatttcacgaaa

SEQ ID NO: 562773 - DNA, 75 bp, synthetic construct
  source 1..75: mol_type = other DNA
agattaagaaaacgccacgcgggcagatccgtgttgtcccttccgattttaaacccgcacgtgttccaccagttc

SEQ ID NO: 562774 - DNA, 75 bp, synthetic construct
  source 1..75: mol_type = other DNA
gggaaaaagtgacttacaaaaccaagaaaaacgataaaaatggcggagaaccgcaatccgaaacacccccagcac

SEQ ID NO: 562775 - DNA, 75 bp, synthetic construct
  source 1..75: mol_type = other DNA
ttgccggcgcaatgactgacgatcagctcagggatgcgcttgcgaaagctcagcaggcgtacattgatttagcaa

SEQ ID NO: 562776 - DNA, 75 bp, synthetic construct
  source 1..75: mol_type = other DNA
tttttgttggccctccgggtgtaggtaaaacacttacggcaagctggttagctcagaaattaggggttccttttt

SEQ ID NO: 562777 - DNA, 75 bp, synthetic construct
  source 1..75: mol_type = other DNA
ggcgttgataacaacctgatttttaaatggctacgcctctggcaaagagaaggacgtatttctcgtagaatgcca

SEQ ID NO: 562778 - DNA, 75 bp, synthetic construct
  source 1..75: mol_type = other DNA
agttggcggggcggggaatatccgcaccctcatgacgggttacacctttacattgatgaatcatccaacggcaga

SEQ ID NO: 562779 - DNA, 75 bp, synthetic construct
  source 1..75: mol_type = other DNA
attttgatttcatccagcgcctgatgcaggagtggggaatttactggtggtttgagcacagcgagaacagccata

SEQ ID NO: 562780 - DNA, 75 bp, synthetic construct
  source 1..75: mol_type = other DNA
aagcacagcgcagccccggcagccgtgttggcggggcgggaaatatccgcaccctcatgacgggctacaccttca

SEQ ID NO: 562781 - DNA, 75 bp, synthetic construct
  source 1..75: mol_type = other DNA
caatcagggcagcttgatttaaatatgaatgaccgagcggcagatatacctccacctggaacatcggagaaaaca

SEQ ID NO: 562782 - DNA, 75 bp, synthetic construct
  source 1..75: mol_type = other DNA
cccacactaaaggcccgcaaagtgccatcgtcaccggcccggcagggcagggcaggaaatctggacagataaata

SEQ ID NO: 562783 - DNA, 75 bp, synthetic construct
  source 1..75: mol_type = other DNA
tgaatgacagagcggcagatatacctccgcctggaacatcggagaaaacaactcttcagttggcgatagacgtca

SEQ ID NO: 562784 - DNA, 75 bp, synthetic construct
  source 1..75: mol_type = other DNA
cagaccacgctgtttttacgggataatgcgcagcacagcggtcaggatcagcattttacctatgtcaccacgttt

SEQ ID NO: 562785 - DNA, 75 bp, synthetic construct
  source 1..75: mol_type = other DNA
cagtatcgaactggacggcggcggcaaacggcatatcagcgggctggtgacagcggcgcgggtggtgggccatga

SEQ ID NO: 562786 - DNA, 75 bp, synthetic construct
  source 1..75: mol_type = other DNA
gatcgctacggaaagaatgacgaaaacagctcctgctggatccgagtgagctacccgtgggcagggaaaggattc

SEQ ID NO: 562787 - DNA, 75 bp, synthetic construct
  source 1..75: mol_type = other DNA
caatattgaactggagggcggcggcaaacggcatatcagcgggctggtgacggctgcgagggtagtcggtcacga

SEQ ID NO: 562788 - DNA, 75 bp, synthetic construct
  source 1..75: mol_type = other DNA
tggctggtgcagctcaggatgcggcggcatcgcttgctgccgctggttcgggggcgcataacgtcacagtaagtg

SEQ ID NO: 562789 - DNA, 75 bp, synthetic construct
  source 1..75: mol_type = other DNA
ctacccgtgggcggggaaaggattcgggatgatccagatcccacgcatcggccaggaagtgctggtggatttcaa

SEQ ID NO: 562790 - DNA, 75 bp, synthetic construct
  source 1..75: mol_type = other DNA
tatgctcgccagtgtttgtcttcaatcacaacgatgcgtgtcgcaaccgctacagaattcctcgatcctttcctt

SEQ ID NO: 562791 - DNA, 75 bp, synthetic construct
  source 1..75: mol_type = other DNA
gaagggcgcgatatggatgtgacggtcaaacctgccgcccatccggtggggacgacgctggaagtgttggatctg

SEQ ID NO: 562792 - DNA, 75 bp, synthetic construct
  source 1..75: mol_type = other DNA
gaaaacaatcagacagccttccgcgagagtatggtcagtctgttactgatgagtgtctttcatggcaacagacag

SEQ ID NO: 562793 - DNA, 75 bp, synthetic construct
  source 1..75: mol_type = other DNA
gtttccatcagtcgcgtctggtgcatgactttatctatcagggcgtgctgagcgtgctacaacagcaactggaaa

SEQ ID NO: 562794 - DNA, 75 bp, synthetic construct
  source 1..75: mol_type = other DNA
tgcgcaccgagaaaaccgaatttaaccatatcgatgaaatcatccgccgcattgcgctggcgcgtttcgacgtca

SEQ ID NO: 562795 - DNA, 75 bp, synthetic construct
  source 1..75: mol_type = other DNA
gatttaacgatcatggcaaagaggcggggctttccgatctcagtctgaaagattcctggggagctgccgggcagg

SEQ ID NO: 562796 - DNA, 75 bp, synthetic construct
  source 1..75: mol_type = other DNA
cactgaagtttgcacttgataactatttagtaacatttggtgtgacacctacgcgagcagaaacttgttatgggt

SEQ ID NO: 562797 - DNA, 75 bp, synthetic construct
  source 1..75: mol_type = other DNA
ttgtatatatgacatctctaacaaaatgtatatctaccctattaaccgatggcaatccacatggacatctcatat

SEQ ID NO: 562798 - DNA, 75 bp, synthetic construct
  source 1..75: mol_type = other DNA
gctgccagccgggcattattctgacaatgtccgcctcgatccgtgggtatttatgttctctgcagggtatcggtt

SEQ ID NO: 562799 - DNA, 75 bp, synthetic construct
  source 1..75: mol_type = other DNA
cacagcctttgcgcatgaagcaggcgagttttttatgcgtgcaggttctgcgactgtgcgtccgacagaaggcgc

SEQ ID NO: 562800 - DNA, 75 bp, synthetic construct
  source 1..75: mol_type = other DNA
tgggggttgattatctgattaaccgtgactggttggttaacatgtcagtgtggtacatggatatcgataccaccg

SEQ ID NO: 562801 - DNA, 75 bp, synthetic construct
  source 1..75: mol_type = other DNA
ggcttctacagcaaggaaagcttgcagtatcttattcagcagcgtgaaacccgtctgccactcaacagcgtaccg

SEQ ID NO: 562802 - DNA, 75 bp, synthetic construct
  source 1..75: mol_type = other DNA
gcggtatcatgcacctgatggaaaaagacgcgacgccgaaatttggttcgatacaggtggatattaccgaagatg

SEQ ID NO: 562803 - DNA, 75 bp, synthetic construct
  source 1..75: mol_type = other DNA
ttcctgtcattgctgaaaaaccacattcgcgattacggcaccattgaaatgcggcagctctttgaacagcctttt

SEQ ID NO: 562804 - DNA, 75 bp, synthetic construct
  source 1..75: mol_type = other DNA
ggagtaaactaagcccttatcagatagaagaagagcagattacagaccacaggtatcttctgaagtggcgtaata

SEQ ID NO: 562805 - DNA, 75 bp, synthetic construct
  source 1..75: mol_type = other DNA
agccagaaagtcgatcaccgtaaagtatcgttcccgaaccgatatggcatcaccttagtgggcgatctttacctg

SEQ ID NO: 562806 - DNA, 75 bp, synthetic construct
  source 1..75: mol_type = other DNA
cagcctggataaacttttgcgtaccatcatcgggatggacagcgacgcggtggaagtgcgctttgctcagttcgc

SEQ ID NO: 562807 - DNA, 75 bp, synthetic construct
  source 1..75: mol_type = other DNA
tattgggtgaattgtcgctgcgtggggtagaaaatcctgctcgtaaaggttttgccaaattaggtattgtggcgc

SEQ ID NO: 562808 - DNA, 75 bp, synthetic construct
  source 1..75: mol_type = other DNA
gggtgttacgtctccagcctgtatttatggtggaaataaagttaaagcaattttacttggtgatagtcatgctga

SEQ ID NO: 562809 - DNA, 75 bp, synthetic construct
  source 1..75: mol_type = other DNA
actggaactcaccacccgcaagctggaaaacctgaccgatattgaacgccagctctcgacccgcaaaccggctgg

SEQ ID NO: 562810 - DNA, 75 bp, synthetic construct
  source 1..75: mol_type = other DNA
ggcttctacagcaaggaaagcctgcaatatcttattcagcagcgtgaaacccgtctgccgctgaacagtgtgccg

SEQ ID NO: 562811 - DNA, 75 bp, synthetic construct
  source 1..75: mol_type = other DNA
cgcagcagggcagtcgccctaaaacaaagttagccattaagggagttaaattgaaaatatcattgatttctgcag

SEQ ID NO: 562812 - DNA, 75 bp, synthetic construct
  source 1..75: mol_type = other DNA
ataagaaaaatttcaagccatgtcattacagcaattgtcttcttatcaaacataaaattctggaaagaatctgga

SEQ ID NO: 562813 - DNA, 75 bp, synthetic construct
  source 1..75: mol_type = other DNA
atatattccaacactggaaaggttcttggattaggaagttttctggcatccaggctatttgcaaagcacccagat

SEQ ID NO: 562814 - DNA, 75 bp, synthetic construct
  source 1..75: mol_type = other DNA
cactggcaaagtgattatcgaaacgctgggcaacgccgagccgctgcatacgccgggaattgtggtgtatcagca

SEQ ID NO: 562815 - DNA, 75 bp, synthetic construct
  source 1..75: mol_type = other DNA
ccacaattgaatcacatcgacagctatcttatgaataaacacttcatgcgtaagcatggtcccaacgcttattac

SEQ ID NO: 562816 - DNA, 75 bp, synthetic construct
  source 1..75: mol_type = other DNA
tcccggcgttaggcaccacgcacgccgattacttctttggcgacatccccgtgcacgcgcggattaagcgaagaa

SEQ ID NO: 562817 - DNA, 75 bp, synthetic construct
  source 1..75: mol_type = other DNA
ctttccacaattgatggcattgatgggcgaaaacccgcaatgggtgcaaaacctgggcgatgcttttctggcgca

SEQ ID NO: 562818 - DNA, 75 bp, synthetic construct
  source 1..75: mol_type = other DNA
gccagcgttaaatcactggtggcctttccacaattgatggcattgatgggcgaaaacccgcaatgggtgcaaaac

SEQ ID NO: 562819 - DNA, 75 bp, synthetic construct
  source 1..75: mol_type = other DNA
tttcacaagtgttaatggcatcaacctatccggcaaacgttgctcaagcagtgcaatggtcgcacgataatccac

SEQ ID NO: 562820 - DNA, 75 bp, synthetic construct
  source 1..75: mol_type = other DNA
aataccgacgtcagatttttgaccatgacgcgacagaaaaactacgcacttacttttcaaatgtatgtgctgatt

SEQ ID NO: 562821 - DNA, 75 bp, synthetic construct
  source 1..75: mol_type = other DNA
gcatgggcgcaggcggggctggcgatcccggcgttaggcactacgcatgccgactacttctttggcgacatcccg

SEQ ID NO: 562822 - DNA, 75 bp, synthetic construct
  source 1..75: mol_type = other DNA
ttgaagccaacatggatctgccgcgctatgggctggtgacctttacctggggcaacgtcagcgctatcgaccgcg

SEQ ID NO: 562823 - DNA, 75 bp, synthetic construct
  source 1..75: mol_type = other DNA
aagtgcagggcgaatacgagctaaacactggcaaagtgattatcgaaacgctgggtgacgccgagccgctgcata

SEQ ID NO: 562824 - DNA, 75 bp, synthetic construct
  source 1..75: mol_type = other DNA
ggagtatcgtccgtcttccgacactgcgacgcatctcgaactctaccgtcgttatccgtcgcttggtggcattgt

SEQ ID NO: 562825 - DNA, 75 bp, synthetic construct
  source 1..75: mol_type = other DNA
gatcgaatacccaccaacagtgcagctttcggtactggttaactcactgaaagcagtgacatcccgccgtctgcg

SEQ ID NO: 562826 - DNA, 75 bp, synthetic construct
  source 1..75: mol_type = other DNA
agtgacaacgaactggataccttgcgtcagcaacatcaactcttgcagcagcaactggaactgacgacccgcaag

SEQ ID NO: 562827 - DNA, 75 bp, synthetic construct
  source 1..75: mol_type = other DNA
gattgtcgtcttattcgcggttttgttcatcatgacgtttgccgttaccagcatcaacgcacgcaaaaagggaaa

SEQ ID NO: 562828 - DNA, 75 bp, synthetic construct
  source 1..75: mol_type = other DNA
tgtggctgggggaaacgctttatcctgcgcgatttgctgatgtggatatacgcaaagagacgcgtgagttttatc

SEQ ID NO: 562829 - DNA, 75 bp, synthetic construct
  source 1..75: mol_type = other DNA
atgaaactctcccgtttatttccgctgctggcgctgctgctggcggccagcctgcacgcagaaaatacgcacaag

SEQ ID NO: 562830 - DNA, 75 bp, synthetic construct
  source 1..75: mol_type = other DNA
atggctgcattatgggctgctgtgcatggtctccctgaccattgtggcgacgctgaaagcggtaggtatcattct

SEQ ID NO: 562831 - DNA, 75 bp, synthetic construct
  source 1..75: mol_type = other DNA
gaaagcggtaggtatcattctctccatttctctgctcattgcgcctggcgccattgcggtattcctgacacaacg

SEQ ID NO: 562832 - DNA, 75 bp, synthetic construct
  source 1..75: mol_type = other DNA
attgtcgtcttattcgcggttttgttcatcatgacgtttgccgttaccagcatcaacgcacgcaaaaagggaaac

SEQ ID NO: 562833 - DNA, 75 bp, synthetic construct
  source 1..75: mol_type = other DNA
gttggctgaagcgaagctgcatggcgaagatgtttctctggatgcgctaaaacgtatcttacgcccgtggttaag

SEQ ID NO: 562834 - DNA, 75 bp, synthetic construct
  source 1..75: mol_type = other DNA
cgttgccggttatttatgtaccgaaggtgagcaaaaagtcgttggtctggaaatcaatgctaaccatgttcgatc

SEQ ID NO: 562835 - DNA, 75 bp, synthetic construct
  source 1..75: mol_type = other DNA
tggtactggccgaaagtatcggttccgttgccggttatttatgtaccgaaggtgagcaaaaagtggttggtctgg

SEQ ID NO: 562836 - DNA, 75 bp, synthetic construct
  source 1..75: mol_type = other DNA
aaaaaacttgtggaagatctgattaagaaccacgactttcacaataacagactgacgttctgcgcctggtggtaa

SEQ ID NO: 562837 - DNA, 75 bp, synthetic construct
  source 1..75: mol_type = other DNA
tcggcagtcaggagtacgatgaaggttactggcatgacgtggataagctgaaaaaacttgtggaagacctgatca

SEQ ID NO: 562838 - DNA, 75 bp, synthetic construct
  source 1..75: mol_type = other DNA
tatgggcgatttcaagaaacgcctgaaggaaagagccgagatggtcagaaagcaaaacgcctcttctgtcatcag

SEQ ID NO: 562839 - DNA, 75 bp, synthetic construct
  source 1..75: mol_type = other DNA
aatacttacatagtaaacacagatgccattatgagtttacccatcccacccttagggagatacgaaacctatctt

SEQ ID NO: 562840 - DNA, 75 bp, synthetic construct
  source 1..75: mol_type = other DNA
ccgtctgacgcgtccgtggggagaaaccaccgcacggctggtgtcggatgaagtggggaaaaatctctaccaaga

SEQ ID NO: 562841 - DNA, 75 bp, synthetic construct
  source 1..75: mol_type = other DNA
ttccatggagcccgctggcgcggggccgtctgacgcgtccgtggggagaaactaccgcacgactggtgtctgatg

SEQ ID NO: 562842 - DNA, 75 bp, synthetic construct
  source 1..75: mol_type = other DNA
ggaagatattcgttacctcagacaccacaggatttaaccctccattcatgcattaatattcgcatgccgagttct

SEQ ID NO: 562843 - DNA, 75 bp, synthetic construct
  source 1..75: mol_type = other DNA
gggattacaacacgccgatcgaagagacgctggaagccctcaacgacgtggtaaaagccgggaaagcgcgttata

SEQ ID NO: 562844 - DNA, 75 bp, synthetic construct
  source 1..75: mol_type = other DNA
gtagatatcactctccaaccgaagcagattgctgaactggaaacgccatataaaccgcacccggtggtagggttt

SEQ ID NO: 562845 - DNA, 75 bp, synthetic construct
  source 1..75: mol_type = other DNA
atcactttgaagccggaacagattgccgaactggaaacgccgtataaaccgcatccggtcgtaggatttaaataa

SEQ ID NO: 562846 - DNA, 75 bp, synthetic construct
  source 1..75: mol_type = other DNA
tgacgccagaagcagaacaattattgcccgttttacagcgttatggcttcaaaacgctcgaaaaattggcagttt

SEQ ID NO: 562847 - DNA, 75 bp, synthetic construct
  source 1..75: mol_type = other DNA
tattgttgagcgcgtagtggaaattgtcactgcggtgcaagagcgttatccccttgcgctgactgtggtggcctg

SEQ ID NO: 562848 - DNA, 75 bp, synthetic construct
  source 1..75: mol_type = other DNA
tcccggttgtcggcgtcgtgccggcgattaaacccgcagcgcgtttgaccgctaatggcattgttggattgctgg

SEQ ID NO: 562849 - DNA, 75 bp, synthetic construct
  source 1..75: mol_type = other DNA
gtccttcccgggttatcatatttattatccgaatcgtcgcttactttcaccggcatttcaggcgttcctgcaaac

SEQ ID NO: 562850 - DNA, 75 bp, synthetic construct
  source 1..75: mol_type = other DNA
aacctcgcaggagccctaatggcgctctggatgctgaccttggctgcgcttccggccgatgagaaccatgcatat

SEQ ID NO: 562851 - DNA, 75 bp, synthetic construct
  source 1..75: mol_type = other DNA
gatgccggatatcgccgctgatgcgaaagccattgcatttggtaacttcaaacggggttacaccatcgttgaccg

SEQ ID NO: 562852 - DNA, 75 bp, synthetic construct
  source 1..75: mol_type = other DNA
tacagtgttgaaggcgaacgcatcggcttaatgctgcccaatgcaggcatcagtgcggcagtgatttttggggcc

SEQ ID NO: 562853 - DNA, 75 bp, synthetic construct
  source 1..75: mol_type = other DNA
gacgctgacgacctggcagcatcattttattgatgtcatcacagggctggcggtaggtatgttgattgactggat

SEQ ID NO: 562854 - DNA, 75 bp, synthetic construct
  source 1..75: mol_type = other DNA
tgttacggacactgtaaaacagttgatgaagcgattagctttattcgagccagacgctcgcatattgtgcttaag

SEQ ID NO: 562855 - DNA, 75 bp, synthetic construct
  source 1..75: mol_type = other DNA
gatggcgccgggtcatctgctgctgcagattctccagtgtctggtcattgtccagtccatttcgctagcctgcgc

SEQ ID NO: 562856 - DNA, 75 bp, synthetic construct
  source 1..75: mol_type = other DNA
ttttattgatgtcatcacagggctggcggtaggtatgttaattgactggatggtgcccgtcgaccgtcgttggaa

SEQ ID NO: 562857 - DNA, 75 bp, synthetic construct
  source 1..75: mol_type = other DNA
gtgataggtagtggggttggctctacaactgaatacgccactaaaaaaataataaatgatgtaacagaggggaaa

SEQ ID NO: 562858 - DNA, 75 bp, synthetic construct
  source 1..75: mol_type = other DNA
gtcgctatagctatgaactgatgaagaaagcaagtgaatatagtgagttatatggagataatcttatccaattag

SEQ ID NO: 562859 - DNA, 75 bp, synthetic construct
  source 1..75: mol_type = other DNA
tgcggtttttttctctatccgctgaagtttagttttatccgtcctgaagtgagtggggtgacaggatggctattt

SEQ ID NO: 562860 - DNA, 75 bp, synthetic construct
  source 1..75: mol_type = other DNA
tattctggcaacggtaatggcctgctgcggtttttttctctatccgctgaagtttagttttatccgtcctgaagt

SEQ ID NO: 562861 - DNA, 75 bp, synthetic construct
  source 1..75: mol_type = other DNA
acggcgcgtttggcgcactggcctttggcatcggtacttccgaagttgaacacgtactggcaacgcaaaccctga

SEQ ID NO: 562862 - DNA, 75 bp, synthetic construct
  source 1..75: mol_type = other DNA
ctgtggcaggcgcaaatggccgcgcgcgtgtggcgcgacgacggggggggccgcgtctggagagtgggtgcatga

SEQ ID NO: 562863 - DNA, 75 bp, synthetic construct
  source 1..75: mol_type = other DNA
atggcgatgtttatcagctacacctcggttgtggaactgatcgccagcgccctgcaacggattgagcagtttatg

SEQ ID NO: 562864 - DNA, 75 bp, synthetic construct
  source 1..75: mol_type = other DNA
ttgctctcacatcatggacgttatcaggcgctgtggcaggcgcaaatggccgcgcgcgtgtggcgcgacgacggg

SEQ ID NO: 562865 - DNA, 75 bp, synthetic construct
  source 1..75: mol_type = other DNA
tcattgtgagaaaacatttatcactctggaacatgtaattaccacaccacgaggagcccagttagcattgatgat

SEQ ID NO: 562866 - DNA, 75 bp, synthetic construct
  source 1..75: mol_type = other DNA
tcaacaaggtaaatctcggcgttgccagtgtccgcgatgatgacatggggcgtgcatacgagtacctgatcaaac

SEQ ID NO: 562867 - DNA, 75 bp, synthetic construct
  source 1..75: mol_type = other DNA
cgcactgaccggtttacccgataacttcaccgtgcaggcatttgtgatcctgctttccggcggcattggttggct

SEQ ID NO: 562868 - DNA, 75 bp, synthetic construct
  source 1..75: mol_type = other DNA
aagccccttggtcagcccgggcaatttgcggcagagcagaccgtttccttaatcggtccacgaggtcagttgaaa

SEQ ID NO: 562869 - DNA, 75 bp, synthetic construct
  source 1..75: mol_type = other DNA
gaccaagaagtgatttatgacttacccaataacgagtttaataaagaaataatttactggctcagtcagtacctt

SEQ ID NO: 562870 - DNA, 75 bp, synthetic construct
  source 1..75: mol_type = other DNA
aattcgaaccaaattgctgcaagaaaatcgcattgtggcgattattggtgtcgcatccaacctgttctacggcac

SEQ ID NO: 562871 - DNA, 75 bp, synthetic construct
  source 1..75: mol_type = other DNA
atgcagagcttgccaagggcaagatgtttcaccgtattcagatacctgaaaattgccactggcgcgatgttttcg

SEQ ID NO: 562872 - DNA, 75 bp, synthetic construct
  source 1..75: mol_type = other DNA
gtggataaacaaaccttgcaggaaacagtgagccagattctggatgagatgcgtgagcgccctatcccactgggc

SEQ ID NO: 562873 - DNA, 75 bp, synthetic construct
  source 1..75: mol_type = other DNA
aaaaaagcacatcgcacatcgtatggcgaatgtgttactggccttgtctgaacaaaagccatctgcgtttgtaat

SEQ ID NO: 562874 - DNA, 75 bp, synthetic construct
  source 1..75: mol_type = other DNA
atcaatatgcatcaagttatgaagagcgtttgtctccaggtacactggcgcatcacgtacaacgcaaggagttac

SEQ ID NO: 562875 - DNA, 75 bp, synthetic construct
  source 1..75: mol_type = other DNA
cgtgtatcggcagatatgcggctcgagatgcatattgatactgacgaagccaacgcggcgggagcggataatcca

SEQ ID NO: 562876 - DNA, 75 bp, synthetic construct
  source 1..75: mol_type = other DNA
gctaccagttgatgcaacagctgttggatatgccttcgccacccacagcggtgatttgttataacgatttaatgg

SEQ ID NO: 562877 - DNA, 75 bp, synthetic construct
  source 1..75: mol_type = other DNA
tgcgcaaccagacgcaccgctcagccattacatctatcgcccgaccctgcaaattcgcgcttccaccggaaagcg

SEQ ID NO: 562878 - DNA, 75 bp, synthetic construct
  source 1..75: mol_type = other DNA
gcatctggtcagcccggcaatggctgccgctgctgcggtgaccggacatttcgccgacattcgcaacattaaata

SEQ ID NO: 562879 - DNA, 75 bp, synthetic construct
  source 1..75: mol_type = other DNA
gctaagtggcataacattccgcagggtgtttcgttaagcgaagaacaacaacgttatatcgtggcggtaatctat

SEQ ID NO: 562880 - DNA, 75 bp, synthetic construct
  source 1..75: mol_type = other DNA
gctccggcattaccggctaatgacggtaagcaaacccccatgcgcgggcatccggtgtttatcgctcagcacgcc

SEQ ID NO: 562881 - DNA, 75 bp, synthetic construct
  source 1..75: mol_type = other DNA
ccggggtgcctcaggatgcgcgtctttcagagcagtacctgaaactggccggtctgtttggtgcacgctactccc

SEQ ID NO: 562882 - DNA, 75 bp, synthetic construct
  source 1..75: mol_type = other DNA
gctccggcgtttccgacaaatgacggtaagcaaacacccatgcgcggacatccagtgtttatcgcccaacatgcc

SEQ ID NO: 562883 - DNA, 75 bp, synthetic construct
  source 1..75: mol_type = other DNA
tggctaagtggcataacattccgcagggtgtttcgttaagtgaggaacaacaacgttatatcgtgacggttatct

SEQ ID NO: 562884 - DNA, 75 bp, synthetic construct
  source 1..75: mol_type = other DNA
ggcagattttgtcgctaagcgtcttgcgccggcattaccggcgaacgacgggaagcaaacccccatgcgagggca

SEQ ID NO: 562885 - DNA, 75 bp, synthetic construct
  source 1..75: mol_type = other DNA
tctccgcactgttggtactggtgctgggtgtatggccgcaaccgctgattagcattgtacgtttggcaatgccgc

SEQ ID NO: 562886 - DNA, 75 bp, synthetic construct
  source 1..75: mol_type = other DNA
tgctggtggcgctgattgcgctgcaaacgggcgagatgtcgatggaagcggtaggagtttacctggccggttatc

SEQ ID NO: 562887 - DNA, 75 bp, synthetic construct
  source 1..75: mol_type = other DNA
tatcggtaagttctacgtgctggcggtcggtgtccaggcacacttgtggtggctggtgggtgccgtggttgtcgg

SEQ ID NO: 562888 - DNA, 75 bp, synthetic construct
  source 1..75: mol_type = other DNA
actgatgaagagccgatccttggtcagacctacctgccgcgtaaattcaaaaccacggtagtgatcccgccgcag

SEQ ID NO: 562889 - DNA, 75 bp, synthetic construct
  source 1..75: mol_type = other DNA
cggggtgcctcaggatgcgcgtctttcagagcagtacctgaaactggccggtctgtttggtgcacgctactccca

SEQ ID NO: 562890 - DNA, 75 bp, synthetic construct
  source 1..75: mol_type = other DNA
ccgctgttgctggcaggtttcggcctgatgattgttggcctcggcttcaaactctctctggtgccgttccacctg

SEQ ID NO: 562891 - DNA, 75 bp, synthetic construct
  source 1..75: mol_type = other DNA
aagcgggttaatgaatgccgtcacgccgcagcgtgaaaactcaatggcctgcgtgtcattcccgacttgcccgct

SEQ ID NO: 562892 - DNA, 75 bp, synthetic construct
  source 1..75: mol_type = other DNA
atgaaccgtaacgtactctgcacctcgaacccttacgagtcgcagctacacgcggaagcgtacgagtgggcgaag

SEQ ID NO: 562893 - DNA, 75 bp, synthetic construct
  source 1..75: mol_type = other DNA
cgaagcgggtgaaggcttcggcgactttacggtgcgtgcaggcatcattcgcccggtgctcgatccggcgcgcga

SEQ ID NO: 562894 - DNA, 75 bp, synthetic construct
  source 1..75: mol_type = other DNA
tgatgcgttggcgaccgccaacgatatgaaccgtaacgtgttgtgcacctcgaacccgtatgagtcgcaactgca

SEQ ID NO: 562895 - DNA, 75 bp, synthetic construct
  source 1..75: mol_type = other DNA
ttgcgtgtaccttgataacagctatctatcattttcctgcatattcttcattagaatataaaggaacctttggtt

SEQ ID NO: 562896 - DNA, 75 bp, synthetic construct
  source 1..75: mol_type = other DNA
caaggccggtgccatatttcctttgtgaaagagcgcggcgagaaaacgactcattatgatacgccgccgcggtta

SEQ ID NO: 562897 - DNA, 75 bp, synthetic construct
  source 1..75: mol_type = other DNA
tggtaaagcctgtacttcccacttatcgccattttgaactggtcagaatactgacccatgagcacaccctaaatg

SEQ ID NO: 562898 - DNA, 75 bp, synthetic construct
  source 1..75: mol_type = other DNA
tccgtccgtatgaatttacagggcgcggcgatcgcatcggctgggtaaaagggatcgacgacaaatggcacctga

SEQ ID NO: 562899 - DNA, 75 bp, synthetic construct
  source 1..75: mol_type = other DNA
taatcggctatgcgcgtaaatcgacacatcttcaggatgtaacgcatcaggttgatgaactgacaaaagcgggtt

SEQ ID NO: 562900 - DNA, 75 bp, synthetic construct
  source 1..75: mol_type = other DNA
cgccgagcgcatgaagcttgaaagcaactacctgcgcggcaccattgcagaagatttaaacgacggtctgaccgg

SEQ ID NO: 562901 - DNA, 75 bp, synthetic construct
  source 1..75: mol_type = other DNA
agacctacctgccgcgtaaattcaaacccacggtagtgatcccgccacagaacgatatcgatctgcacgccaacg

SEQ ID NO: 562902 - DNA, 75 bp, synthetic construct
  source 1..75: mol_type = other DNA
cagctgcgcgcgcaaggggccgcgttggaggaagaaaaccggcgctttcagaagatgatattaagcaaataaata

SEQ ID NO: 562903 - DNA, 75 bp, synthetic construct
  source 1..75: mol_type = other DNA
gagaactgcctgaaggcactgcgtgaaggcgatacgctcattgtatgggcgctggacaggctcggcggctcactg

SEQ ID NO: 562904 - DNA, 75 bp, synthetic construct
  source 1..75: mol_type = other DNA
agtatggttcccgttttaccccttgcgagcgtttggtcgagatgggtgcgcgtggggaaagtttttggaaaacaa

SEQ ID NO: 562905 - DNA, 75 bp, synthetic construct
  source 1..75: mol_type = other DNA
ggttgctgaacggtgtgtgatgttgatgctgaatgaagcagtacgttgtgttgatgagcaggttatccgtagcgt

SEQ ID NO: 562906 - DNA, 75 bp, synthetic construct
  source 1..75: mol_type = other DNA
ttaatctccggaacgacggactatcgcggctttgcccatcgcgatctgattattgaagcggtgtttgaaaatctc

SEQ ID NO: 562907 - DNA, 75 bp, synthetic construct
  source 1..75: mol_type = other DNA
agtttgcctcgcaggtgcgcgccattattaagcaactccgcgaaaacaaagagttgcgcggcgtggtctttattt

SEQ ID NO: 562908 - DNA, 75 bp, synthetic construct
  source 1..75: mol_type = other DNA
tacagttgggatcagttggaggggaaagtgcgccgccggcatatcaaagccagtgaacgcgacaaacaattggcg

SEQ ID NO: 562909 - DNA, 75 bp, synthetic construct
  source 1..75: mol_type = other DNA
cgcaaggcaccagtagcggctatgacgctgaagcccgtgcttttggcgaactggcgatgacgccgcaatcgcagg

SEQ ID NO: 562910 - DNA, 75 bp, synthetic construct
  source 1..75: mol_type = other DNA
ttttatgcctggctgacgggaatgcaacctcctgcattgcgtaccgtggtggcgcttgctacgtggggaatgctt

SEQ ID NO: 562911 - DNA, 75 bp, synthetic construct
  source 1..75: mol_type = other DNA
cactcattacggtcaaattactcatctacaaggtcgacgtatattccctgcgccaggcctcgtactgtatggcga

SEQ ID NO: 562912 - DNA, 75 bp, synthetic construct
  source 1..75: mol_type = other DNA
cactcattacggtcaaatcactcatctacaaggtcgacgtatattccctgcgccaggccttgtgctgtatggcga

SEQ ID NO: 562913 - DNA, 75 bp, synthetic construct
  source 1..75: mol_type = other DNA
gttttatgtcaatcgcattttagcgccttacatcaatgaagctatccgcatgttgactgaaggtgaacgggttga

SEQ ID NO: 562914 - DNA, 75 bp, synthetic construct
  source 1..75: mol_type = other DNA
tatccggcgggtatccgtaaggtgatttacacgaccaatgctatcgagtcagttcaccggcagttcagaaagctg

SEQ ID NO: 562915 - DNA, 75 bp, synthetic construct
  source 1..75: mol_type = other DNA
tctggctgtcagtattaagtgatctgcaaaaccgtggcgttgaagacattctgattgcctgcgtggatgggctga

SEQ ID NO: 562916 - DNA, 75 bp, synthetic construct
  source 1..75: mol_type = other DNA
atggaaatggcatcagcgtttactcttaatgttcgtctggacaacattgccgttatcaccattgatgttcctggt

SEQ ID NO: 562917 - DNA, 75 bp, synthetic construct
  source 1..75: mol_type = other DNA
cgagaaaggtttttatggactggctttcttcttaagcttgtttggtgcagtagcggtgcagaagaatattcgtga

SEQ ID NO: 562918 - DNA, 75 bp, synthetic construct
  source 1..75: mol_type = other DNA
aatagactgtctgtaatatgcccagcaaagtcggcaagtggaactcttttaataaaaaaagcatcctacgagttt

SEQ ID NO: 562919 - DNA, 75 bp, synthetic construct
  source 1..75: mol_type = other DNA
tggctgtaggactgccattaaactcctttgcgaagccagtaacggaaaagcagcttgctacatactttatagata

SEQ ID NO: 562920 - DNA, 75 bp, synthetic construct
  source 1..75: mol_type = other DNA
ggtaaacgcactggataagcctgtctcactcgcccttaaatctggcaacttcggtgatgacgcctttttttcacg

SEQ ID NO: 562921 - DNA, 75 bp, synthetic construct
  source 1..75: mol_type = other DNA
aaaactcgctcctgcccggtggcagaagccacacagcaatcgctggcggctctgcgctggttgcaacaacaaggt

SEQ ID NO: 562922 - DNA, 75 bp, synthetic construct
  source 1..75: mol_type = other DNA
ggtttgttttccgcggcgtcttatcaaaagaccgttcgggacaagtatgaaggcatacctaccaccccatttatt

SEQ ID NO: 562923 - DNA, 75 bp, synthetic construct
  source 1..75: mol_type = other DNA
acggcgcttgcctgggcggtggactggagttggcgctggcgtgccacggtcgtgtttgtactgacgatcctaaaa

SEQ ID NO: 562924 - DNA, 75 bp, synthetic construct
  source 1..75: mol_type = other DNA
gcggctttgcccatcgcgatctgattattgaagcagtatttgaaaatctcgaattaaaacaacagatggtggcag

SEQ ID NO: 562925 - DNA, 75 bp, synthetic construct
  source 1..75: mol_type = other DNA
ctttgcgtagtatcttttttgccagtacggacgtgaagaaagatcccggcagtgatgcgccgcctgcgccattaa

SEQ ID NO: 562926 - DNA, 75 bp, synthetic construct
  source 1..75: mol_type = other DNA
tatcggcctgcatttcttcagtccggtcgaaaaaatgccgctggtagaaattattcctcatgccggaacatcggc

SEQ ID NO: 562927 - DNA, 75 bp, synthetic construct
  source 1..75: mol_type = other DNA
gttttatgtcaatcgcattttagcgccgtacattaacgaagctatccgcatgttgactgaaggcgagcgtgtgga

SEQ ID NO: 562928 - DNA, 75 bp, synthetic construct
  source 1..75: mol_type = other DNA
aacttttggatgaggtaggaatcgacacagggactaaaattattcctgtactggaagccgcttatggagaacgtt

SEQ ID NO: 562929 - DNA, 75 bp, synthetic construct
  source 1..75: mol_type = other DNA
ccaactggtttcctgtatggcggctaaaaatattagctcgctggatgtacgtctgcgaggttttctgaaaaacac

SEQ ID NO: 562930 - DNA, 75 bp, synthetic construct
  source 1..75: mol_type = other DNA
ggagttgttgcctggaatgtgcacggcagtcgtcagtacgacgccgggtatgcacaggcgaaagaagaccgcaaa

SEQ ID NO: 562931 - DNA, 75 bp, synthetic construct
  source 1..75: mol_type = other DNA
ggtgcttgctgttctggtcatatcaggagttgttgcctggaatgtacacggtagtcgtcagtacgacgccgggta

SEQ ID NO: 562932 - DNA, 75 bp, synthetic construct
  source 1..75: mol_type = other DNA
gaggcgaaagaaaccagcgacagccgtctggcggtactgaaaggaacacaggcggttctgtccggtgtacaggcc

SEQ ID NO: 562933 - DNA, 75 bp, synthetic construct
  source 1..75: mol_type = other DNA
atgcaggatgatggcctgaatgatttgctggcgtcagtgaaaaggctggtagcggataatttccctgatggcgtg

SEQ ID NO: 562934 - DNA, 75 bp, synthetic construct
  source 1..75: mol_type = other DNA
gggacggatgcttgcactgaaagaaggtgggcgcaccacgggcgtggcatatcgcctgccggaagagacgctgga

SEQ ID NO: 562935 - DNA, 75 bp, synthetic construct
  source 1..75: mol_type = other DNA
actggaaacagttgcttatagtgtcgatgcttgctgctcttgtcatcagcggcgtggctgcctggaatgtccacg

SEQ ID NO: 562936 - DNA, 75 bp, synthetic construct
  source 1..75: mol_type = other DNA
tatttacattttatttcgcttaaaaaaccctaaactctcaattggaagaacagggatatttctagagttagtgga

SEQ ID NO: 562937 - DNA, 75 bp, synthetic construct
  source 1..75: mol_type = other DNA
tttggtgttatgattgctttgatgacatataacgctggagttaaaaataataataatagtaattacactagtcat

SEQ ID NO: 562938 - DNA, 75 bp, synthetic construct
  source 1..75: mol_type = other DNA
cccgcgactgggcgcagcgccatggcgccaggggggaaagcgctcaggccggcatgccgctggccggtccggcgg

SEQ ID NO: 562939 - DNA, 75 bp, synthetic construct
  source 1..75: mol_type = other DNA
gggcacaggcaggaactcggttgagaataatgcgctgggtaacaagaatgacaagctgccacccattattccgat

SEQ ID NO: 562940 - DNA, 75 bp, synthetic construct
  source 1..75: mol_type = other DNA
cgcaggtggcagcttcacgtttggttcaatgtccggcagcggctatgccagcatcagtcaggacaaaattaaaag

SEQ ID NO: 562941 - DNA, 75 bp, synthetic construct
  source 1..75: mol_type = other DNA
ctttgtgataagatagctaacaatctccgctctctaatcgcgagacagctgctgaacatgcacatgaagcattgt

SEQ ID NO: 562942 - DNA, 75 bp, synthetic construct
  source 1..75: mol_type = other DNA
gctgaagcgacgcgggcggttctgcgtcgtgtacctgatcatgtttttgttcgccagatggatgacccggatgtt

SEQ ID NO: 562943 - DNA, 75 bp, synthetic construct
  source 1..75: mol_type = other DNA
aaaggcgttttatccatcccgacttattatcgtcaccgtcttctttcatcgctaaagcgagccgctctgacagtt

SEQ ID NO: 562944 - DNA, 75 bp, synthetic construct
  source 1..75: mol_type = other DNA
ttttggtgttttatctcgtttgatagttgacatgtacgtacgtaaccttatagcatggattttgttatgtacgta

SEQ ID NO: 562945 - DNA, 75 bp, synthetic construct
  source 1..75: mol_type = other DNA
ataccatgggtatgctggaaacctatgccgaaatcgataagtctctggccgacctgaacggtaacaccgctgaat

SEQ ID NO: 562946 - DNA, 75 bp, synthetic construct
  source 1..75: mol_type = other DNA
tacgcaaatgcgcatgtgggtcaccattggcggcgtcagcgccctggttgcagtggtatgtaaaattttatcttc

SEQ ID NO: 562947 - DNA, 75 bp, synthetic construct
  source 1..75: mol_type = other DNA
accctgtcgccttgccagtgaaatgggtattcacacgaagacggtgaatacctttctgtatacgggaatggcgaa

SEQ ID NO: 562948 - DNA, 75 bp, synthetic construct
  source 1..75: mol_type = other DNA
taacgctggctgactggggtaagcgcgtcgatccaaacgggaaagtcgataagattatcgagcttctcggtcaaa

SEQ ID NO: 562949 - DNA, 75 bp, synthetic construct
  source 1..75: mol_type = other DNA
tcgcccccggcatgccgaaatgggcagatggttaaaagcgcattatgatctttccgctgtcgacgggtttgtgct

SEQ ID NO: 562950 - DNA, 75 bp, synthetic construct
  source 1..75: mol_type = other DNA
acaagtcgcgacgttatcgcgttcctggccgatgaatttaaagtggacagcgtcaatcgtattaaacccggtatt

SEQ ID NO: 562951 - DNA, 75 bp, synthetic construct
  source 1..75: mol_type = other DNA
agagcggcatggtaccagcggtattgtctttgttgacggatggacaggtaaaggcgcaattaccggagagcttgt

SEQ ID NO: 562952 - DNA, 75 bp, synthetic construct
  source 1..75: mol_type = other DNA
gtgtggggtgaaaacaccgttcacggcatcttccctaaaggccagaaggcaggattgcagactcagaaccttggc

SEQ ID NO: 562953 - DNA, 75 bp, synthetic construct
  source 1..75: mol_type = other DNA
tgacgctggctgactgggctaagcgtactgatccaaacgggaaggtcgataagatcgtcgaactcctttcccaga

SEQ ID NO: 562954 - DNA, 75 bp, synthetic construct
  source 1..75: mol_type = other DNA
cagggttatctcttccgctgtctcggtaatgactccaacttattgatagtgttttatgttcagataatgcccgat

SEQ ID NO: 562955 - DNA, 75 bp, synthetic construct
  source 1..75: mol_type = other DNA
gcacagtactatgaattcctgcgcctcggtcgtgaaggctatacaaaagtacagaacgcctccgatcgcacgttc

SEQ ID NO: 562956 - DNA, 75 bp, synthetic construct
  source 1..75: mol_type = other DNA
gcacagtactatgaattcctgcgcctcggtcgtgaaggctatacaaaagtacagaacgcttccaagcgcacgttc

SEQ ID NO: 562957 - DNA, 75 bp, synthetic construct
  source 1..75: mol_type = other DNA
gcacagtactatgaattcctgcgcctcggtcgtgaaggctatacaaaagtacagaacgcatcctagcgcacgttc

SEQ ID NO: 562958 - DNA, 75 bp, synthetic construct
  source 1..75: mol_type = other DNA
gttccgaactactcgattcacgttttggcgctaagccgatttcgactatcgcagaatcaaaacgttttccgctgc

SEQ ID NO: 562959 - DNA, 75 bp, synthetic construct
  source 1..75: mol_type = other DNA
gatccgaactactcgattcacgttttggcgctaagccgatttcgactatcgcagaatcaaaacgatttccgctgc

SEQ ID NO: 562960 - DNA, 75 bp, synthetic construct
  source 1..75: mol_type = other DNA
gcacagtactatgaattcctgcgcctcggtcgtgaaggctatacaaaagtacagaacgcgtcccatcgcacgttc

SEQ ID NO: 562961 - DNA, 75 bp, synthetic construct
  source 1..75: mol_type = other DNA
atcgtcgccatcgccgatgtgaccgctttcggtatttatatgggcgtctggttcccgacagtaccgcactggatt

SEQ ID NO: 562962 - DNA, 75 bp, synthetic construct
  source 1..75: mol_type = other DNA
gctgtttgcggtgtatctgaactacatcatgccggaaaacgtcttcctagtgatcgcttcgctggcaaccttcgc

SEQ ID NO: 562963 - DNA, 75 bp, synthetic construct
  source 1..75: mol_type = other DNA
atcatgccggaaaatgtcttcctggtgatcgcttcgctggcaaccttcgccacggtgtgggtatggattatgatc

SEQ ID NO: 562964 - DNA, 75 bp, synthetic construct
  source 1..75: mol_type = other DNA
acctggccactttctgccagacctgggacgacgagaaggtccataaattgatggatttttcgataaagaaaaact

SEQ ID NO: 562965 - DNA, 75 bp, synthetic construct
  source 1..75: mol_type = other DNA
acctggccactttctgccagacctgggacgacgagaacgtccataaattgatggatttctctataaagaaaaact

SEQ ID NO: 562966 - DNA, 75 bp, synthetic construct
  source 1..75: mol_type = other DNA
acctggccactttctgccagacctgggacgacgagaatgtccataaattgatggatttctccataaagaaaaact

SEQ ID NO: 562967 - DNA, 75 bp, synthetic construct
  source 1..75: mol_type = other DNA
gctccgaactactcgattcacgttttggcgctaagccgatttcgactatcgcagaatcaaaacgctttccgctgc

SEQ ID NO: 562968 - DNA, 75 bp, synthetic construct
  source 1..75: mol_type = other DNA
actggctgttgtgggtgattattaacgtgattagcgtcgttatttttgcacttcaggcgtttacgccatgtctct

SEQ ID NO: 562969 - DNA, 75 bp, synthetic construct
  source 1..75: mol_type = other DNA
ggagaagatcagcaactacttttttggcctgatcaacgtcaccttgtttggcattattttctttcagattcagct

SEQ ID NO: 562970 - DNA, 75 bp, synthetic construct
  source 1..75: mol_type = other DNA
atgcctgaactacagccggacgctttcccgttctgggattcctgcatgatggtgttatctatcgtggcaatgatt

SEQ ID NO: 562971 - DNA, 75 bp, synthetic construct
  source 1..75: mol_type = other DNA
ctctactgccctgccctactcgttagagatgattgccctgacccgcctgccgacgcgaacttttggtacgctgat

SEQ ID NO: 562972 - DNA, 75 bp, synthetic construct
  source 1..75: mol_type = other DNA
tgaattatcttttttatctttctattcagacagtaccgctgggtattgcggtggcgctggagttcaccggaccac

SEQ ID NO: 562973 - DNA, 75 bp, synthetic construct
  source 1..75: mol_type = other DNA
tttattgccctcaacggcagccggatgtggatcaacagcgcacgcgaaagaggttcacgcgcgctgtctcattaa

SEQ ID NO: 562974 - DNA, 75 bp, synthetic construct
  source 1..75: mol_type = other DNA
ggtggtcaaattggtacttttgccatcaacttctcccgcccggcgggtcaggtaattgcacagtactatgaattc

SEQ ID NO: 562975 - DNA, 75 bp, synthetic construct
  source 1..75: mol_type = other DNA
tgcggtccggtacaaatctgctggcataaattcgcccgctactgggatgtggagttgcgtgagatcccaatgcgc

SEQ ID NO: 562976 - DNA, 75 bp, synthetic construct
  source 1..75: mol_type = other DNA
ggtccgaactactcgattcacgttttggcgctaagccgatttcgactatcgcagaatcaaaacggtttccgctgc

SEQ ID NO: 562977 - DNA, 75 bp, synthetic construct
  source 1..75: mol_type = other DNA
attgcacagtactatgaattcctgcgcctcggtcgtgaaggctacaccaaagtacagaacgcctcttaccaggtt

SEQ ID NO: 562978 - DNA, 75 bp, synthetic construct
  source 1..75: mol_type = other DNA
tgggacgacgaaaatgtccacaagttgatggatttatccattaacaaaaactggatcgacaaagaagaatatccg

SEQ ID NO: 562979 - DNA, 75 bp, synthetic construct
  source 1..75: mol_type = other DNA
ggcatgacacctggtacgataccaaatccaccggcggtaaatttcaacgttcagcttccgcatttcgtaactggc

SEQ ID NO: 562980 - DNA, 75 bp, synthetic construct
  source 1..75: mol_type = other DNA
tgtttgcttatggtgggatcgaaattatcgggattaccgccggtgaagcgaaagatcctgagaaatcgattccgc

SEQ ID NO: 562981 - DNA, 75 bp, synthetic construct
  source 1..75: mol_type = other DNA
attaacggcggggtggatgagaagctgaagattcaggtcgggccgaaaacagcaccgctgatggacgacgtgctg

SEQ ID NO: 562982 - DNA, 75 bp, synthetic construct
  source 1..75: mol_type = other DNA
atcgacctacgttgcgtaaatatggttgccgatctgtggcatgcgcctgcgccgaaaaatggtcaggccgttggc

SEQ ID NO: 562983 - DNA, 75 bp, synthetic construct
  source 1..75: mol_type = other DNA
tcttaccaggttgccgcttatctggcggatgaaatcgccaaactggggccgtatgagttcatctgtaccggtcgc

SEQ ID NO: 562984 - DNA, 75 bp, synthetic construct
  source 1..75: mol_type = other DNA
gatcggcgggatggggctggatggccgcactctggtgactaaaaactccttccgctatctgcataccctacacac

SEQ ID NO: 562985 - DNA, 75 bp, synthetic construct
  source 1..75: mol_type = other DNA
ccaccattaccgctcatgatgcgggatatattaaccagccgctggaaaaaattgttggcctgcaaacggatgcgc

SEQ ID NO: 562986 - DNA, 75 bp, synthetic construct
  source 1..75: mol_type = other DNA
tgacgatcacctcaaacgtcgtgtatggacagaagaccggtaacacgccggacggtcgtcgtgcgggtactccgt

SEQ ID NO: 562987 - DNA, 75 bp, synthetic construct
  source 1..75: mol_type = other DNA
tttgttcctctcgacccgacgcaacctatggcgattaaacatctggttcgtctggtggaacaaggccgtccggtg

SEQ ID NO: 562988 - DNA, 75 bp, synthetic construct
  source 1..75: mol_type = other DNA
tggtggcaggcgcagaaaaattacaagaaagtaccaaacagctttggcaggataaatttggcctgcgcatccttg

SEQ ID NO: 562989 - DNA, 75 bp, synthetic construct
  source 1..75: mol_type = other DNA
gcattaccgcattgtgccggagttggtgtatgaccgcagttgcaccgtgttgttcggcacctcgactttcctcgg

SEQ ID NO: 562990 - DNA, 75 bp, synthetic construct
  source 1..75: mol_type = other DNA
tgcgtgagcagctcattatcgccaccgctgatttgagtgaggcaacaaaaggtcagcttgaagcctggcaggaga

SEQ ID NO: 562991 - DNA, 75 bp, synthetic construct
  source 1..75: mol_type = other DNA
gtctgcgtctgcgcggctggcaggttccggccttcactctcggcggtgaagccaccgacatcgtggtgatgcgca

SEQ ID NO: 562992 - DNA, 75 bp, synthetic construct
  source 1..75: mol_type = other DNA
ggttccggccttcactctcggcggtgaagccactgacatcgtggtgatgcgcattatgtgtcgtcgcggcttcga

SEQ ID NO: 562993 - DNA, 75 bp, synthetic construct
  source 1..75: mol_type = other DNA
tctttgcagtatgaaaacgacgatctgatgcgtactgacttcaacagcgacgattacgcgattgcctgctgcgtc

SEQ ID NO: 562994 - DNA, 75 bp, synthetic construct
  source 1..75: mol_type = other DNA
gcgggggaatggcctgccgcactttctggcgggcagaaacagcgtgtggcgctggcaagagcgttgattcatcga

SEQ ID NO: 562995 - DNA, 75 bp, synthetic construct
  source 1..75: mol_type = other DNA
gctggcaagagcgttgattcatcgaccgggtttattgttgcttgatgaaccgctcggggcactggacgccttaac

SEQ ID NO: 562996 - DNA, 75 bp, synthetic construct
  source 1..75: mol_type = other DNA
tcccggcggtttgcttcaaactgaaagatggtgaagatccgggatacaccctgtacgacctctctgaacgtctgc

SEQ ID NO: 562997 - DNA, 75 bp, synthetic construct
  source 1..75: mol_type = other DNA
gcttgcaagagcgttgattcatcgaccaagtttattgttgcttgatgaaccactcggggcgctggatgccttaac

SEQ ID NO: 562998 - DNA, 75 bp, synthetic construct
  source 1..75: mol_type = other DNA
gaaaaattggtctggatttgacggtggatattcctcgtccgcgccggttagggtcggtacgattagcggagctgg

SEQ ID NO: 562999 - DNA, 75 bp, synthetic construct
  source 1..75: mol_type = other DNA
gaaaaattggtctggatttgacggtggatatcccccgtccgcgccgattagggtcggtgcgattagcggagctgg

SEQ ID NO: 563000 - DNA, 75 bp, synthetic construct
  source 1..75: mol_type = other DNA
cggctggcaggttccggccttcactctcggcggtgaagccaccgacatcgtggtgatgcgcattatgtgtcgtcg

SEQ ID NO: 563001 - DNA, 75 bp, synthetic construct
  source 1..75: mol_type = other DNA
tgaaggctataccaaagtacagaacgcctcttaccaggttgccgcttatctggcggatgaaatcgccaaactggg

SEQ ID NO: 563002 - DNA, 75 bp, synthetic construct
  source 1..75: mol_type = other DNA
attaacggcggggtggacgagaagctgaagattcaggtcggcccaaaaacagcaccgctgatggacgacgtgttg

SEQ ID NO: 563003 - DNA, 75 bp, synthetic construct
  source 1..75: mol_type = other DNA
gtacagaacgcctcttaccaggttgccgcttatctggcggatgaaatcgccaaactggggccgtatgagttcatc

SEQ ID NO: 563004 - DNA, 75 bp, synthetic construct
  source 1..75: mol_type = other DNA
ccgctgggctgcggctgggttatctggcgtgacgaagaagcgctgccgcaggaactggtgttcaacgttgactac

SEQ ID NO: 563005 - DNA, 75 bp, synthetic construct
  source 1..75: mol_type = other DNA
ccgaccaacaaaccaaacctggtgtgcggtccggtacaaatctgctggcataaatttgcccgctactgggatgtg

SEQ ID NO: 563006 - DNA, 75 bp, synthetic construct
  source 1..75: mol_type = other DNA
agaccatgcttgaaagcaaggaaactcaggaaggtttacgccttggagagcttttcggctattacggtcacggtc

SEQ ID NO: 563007 - DNA, 75 bp, synthetic construct
  source 1..75: mol_type = other DNA
ctcttttggtctgactgttggcctgtttacgccactgctgactggggcggaagtgttcctttatccaagcccgtt

SEQ ID NO: 563008 - DNA, 75 bp, synthetic construct
  source 1..75: mol_type = other DNA
tatccaagcccgctgcattaccgcattgtgccggagttggtgtatgaccgcagttgcaccgtgttgttcggcacc

SEQ ID NO: 563009 - DNA, 75 bp, synthetic construct
  source 1..75: mol_type = other DNA
catgattttcatcatgggctccacctgggttgttgcctacgccaacccgaacatcctcgacctgattgaagccat

SEQ ID NO: 563010 - DNA, 75 bp, synthetic construct
  source 1..75: mol_type = other DNA
ggtggctggagctgggccactggcgggcgcgagtccgggaaaatcgctgtaaccaccagcttccatggtgtggat

SEQ ID NO: 563011 - DNA, 75 bp, synthetic construct
  source 1..75: mol_type = other DNA
gtggaaggtcgcccggtcgtaatcgacaatgttccagcgtgccgcacagtggctatatctgttgacgacaacggc

SEQ ID NO: 563012 - DNA, 75 bp, synthetic construct
  source 1..75: mol_type = other DNA
atgctttttagcttttttcgtaatttgtgccgtgtcctgtaccgtgttcgcgtgacaggcgacaccaaggcactg

SEQ ID NO: 563013 - DNA, 75 bp, synthetic construct
  source 1..75: mol_type = other DNA
ccaccacaggctcgctgatgaaaatctacgatggcgcgggttttgtcgcggcgaagtctggtgcaacggttattc

SEQ ID NO: 563014 - DNA, 75 bp, synthetic construct
  source 1..75: mol_type = other DNA
tcgcaatagtcattttttcagaaaacaaacccgaaattggcagatgcgttgagttaatcgaaaaagtaacaaacg

SEQ ID NO: 563015 - DNA, 75 bp, synthetic construct
  source 1..75: mol_type = other DNA
agaaagcaccaaacagctttggcaggataaatttggcctgcgcattcttgaaggttacggtgtgacggaatgtgc

SEQ ID NO: 563016 - DNA, 75 bp, synthetic construct
  source 1..75: mol_type = other DNA
aggtaaaacagcagccagaagaagaggcgctgatcctctttacctccggttctgaaggtcatccgaaaggtgttg

SEQ ID NO: 563017 - DNA, 75 bp, synthetic construct
  source 1..75: mol_type = other DNA
gcattaccgtattgtgccggagttggtgtatgaccgcagttgcaccgtgttgttcggcacttcgactttcctcgg

SEQ ID NO: 563018 - DNA, 75 bp, synthetic construct
  source 1..75: mol_type = other DNA
ttctgggaaaaccagctcggctttgcgccactgaatcgcggctttgtggcgctgttcctgctgctgttgatggcc

SEQ ID NO: 563019 - DNA, 75 bp, synthetic construct
  source 1..75: mol_type = other DNA
caggtcatagcgccgttgattgcggcggcgagcggtccgctgggaaccaatgcacaatacctgttttcactggaa

SEQ ID NO: 563020 - DNA, 75 bp, synthetic construct
  source 1..75: mol_type = other DNA
ttcgcccgtatgagtttaccggacgcggagatcgtattggctgggttaagggcattgatgataactggcacctga

SEQ ID NO: 563021 - DNA, 75 bp, synthetic construct
  source 1..75: mol_type = other DNA
tccgtccgtatgagttcaccggacgtggagatcgtattggctgggttaagggcattgatgataactggcacctga

SEQ ID NO: 563022 - DNA, 75 bp, synthetic construct
  source 1..75: mol_type = other DNA
ctgcgcgtggcggtgagcttgtacctgcacgccccggaacaaccgggtcgcgatgcaccatcaaactggcagtac

SEQ ID NO: 563023 - DNA, 75 bp, synthetic construct
  source 1..75: mol_type = other DNA
acaccatcctttctgccgcagcgtcttctttcctgctgtttggtatggcgctggtgtatgcgcagtctggcgacc

SEQ ID NO: 563024 - DNA, 75 bp, synthetic construct
  source 1..75: mol_type = other DNA
cggcgagcggtccgctgggaaccaacgcacaatacctgttttcactggaacaggagcttatcaaactgggaatgc

SEQ ID NO: 563025 - DNA, 75 bp, synthetic construct
  source 1..75: mol_type = other DNA
ccctgccggcactgctgctgacagggtgcgccatgctccccggacagcccaccgattatgaccgcttctgtaacg

SEQ ID NO: 563026 - DNA, 75 bp, synthetic construct
  source 1..75: mol_type = other DNA
tggtattcagtgaagatgaaggtcagtctggtcagcagatttacaacaaaagtcgtggtacaggattcagttaca

SEQ ID NO: 563027 - DNA, 75 bp, synthetic construct
  source 1..75: mol_type = other DNA
tggagaatgcctggctgaaacacgcaatggtcgtggcccttgagcacgtgtcagttacggatgcagggcaggccg

SEQ ID NO: 563028 - DNA, 75 bp, synthetic construct
  source 1..75: mol_type = other DNA
gggtgtttcgttaagcgaggaacaacaacgttatatcgtggcggtaatctatcactggttggttatacagatgaa

SEQ ID NO: 563029 - DNA, 75 bp, synthetic construct
  source 1..75: mol_type = other DNA
catatcatcaggaaccgccaggtaaagaaaatgaaacagaccgagaaactggaaaatctatcactattcaattaa

SEQ ID NO: 563030 - DNA, 75 bp, synthetic construct
  source 1..75: mol_type = other DNA
gcaattagtctgaacgaggttgaaaaaaatgaaataataagcaaataccgagaaataaccgcaaagaaatcagaa

SEQ ID NO: 563031 - DNA, 75 bp, synthetic construct
  source 1..75: mol_type = other DNA
ctgagacggcgcgttccacggcatcggtcatgttaatcattatggcgagtgccgcgctgggctggatattttccc

SEQ ID NO: 563032 - DNA, 75 bp, synthetic construct
  source 1..75: mol_type = other DNA
ggcatcccggcggtttgcttcaaactgaaagagggtgaagatccgggatacaccctctacgacctctctgaacgt

SEQ ID NO: 563033 - DNA, 75 bp, synthetic construct
  source 1..75: mol_type = other DNA
tgcgcggctggcaggttccggccttcactctcggcggtgaagccaccgacatcgtggtgatgcgcattatgtgtc

SEQ ID NO: 563034 - DNA, 75 bp, synthetic construct
  source 1..75: mol_type = other DNA
accattggttcttccgaggcctgtatgctcggcgggatggcgatgaaatggcgttggcgcaagcgtatggaagct

SEQ ID NO: 563035 - DNA, 75 bp, synthetic construct
  source 1..75: mol_type = other DNA
gaaagtggcgtgccacgtcatgaactctacatcaccactaaaatctggattgaaaatctcagcaaagacaaattg

SEQ ID NO: 563036 - DNA, 75 bp, synthetic construct
  source 1..75: mol_type = other DNA
ctgacgcgtgagatcggtatttccaacttcacgatcccattgatggaaaaggcgattgctgctgttggcgctgaa

SEQ ID NO: 563037 - DNA, 75 bp, synthetic construct
  source 1..75: mol_type = other DNA
ttctgccagacctgggacgacgaaaatgtccataagttgatggatttatccattaacaaaaactggatcgacaaa

SEQ ID NO: 563038 - DNA, 75 bp, synthetic construct
  source 1..75: mol_type = other DNA
gaactgttgctggaagactacaaagcctccctgaaatatctcagcgaacacccgaaactgcagggtattgcccag

SEQ ID NO: 563039 - DNA, 75 bp, synthetic construct
  source 1..75: mol_type = other DNA
cggtgtggttaccgatattaatattgctcgttgccatggcatctattcagggtggagcctcattagcaaaatctc

SEQ ID NO: 563040 - DNA, 75 bp, synthetic construct
  source 1..75: mol_type = other DNA
aaacactgacacccatacagctgctggcgctcggcgctatcatcgccgcttcaatgggttctacgctgacagtac

SEQ ID NO: 563041 - DNA, 75 bp, synthetic construct
  source 1..75: mol_type = other DNA
taaggtcggaattactcgattcacgttttggtgcgaagtctatttccactattgcagaatcaaaacgatttccgc

SEQ ID NO: 563042 - DNA, 75 bp, synthetic construct
  source 1..75: mol_type = other DNA
gcctcttaccaggttgccgcttatctggcggatgaaatcgccaaactggggccgtatgagttcatctgtacgggt

SEQ ID NO: 563043 - DNA, 75 bp, synthetic construct
  source 1..75: mol_type = other DNA
gttcaacgttgactacctcggcggtcagattggtactttcgccatcaacttctcccgcccggcgggtcaggtgat

SEQ ID NO: 563044 - DNA, 75 bp, synthetic construct
  source 1..75: mol_type = other DNA
tctgacgctaatccactggccgtcaccaaacgatgaagtctctgttgaagagtttatgcaggcgctgctggaagc

SEQ ID NO: 563045 - DNA, 75 bp, synthetic construct
  source 1..75: mol_type = other DNA
gccttgattcagctaaattgacagtccccattcaggcttatatttaccgtatgaacacccgactgaatagaaccg

SEQ ID NO: 563046 - DNA, 75 bp, synthetic construct
  source 1..75: mol_type = other DNA
aaagagcgtaatctttcacaacccgcattcagccgacgaattaaggcgctggaagcggcgatcggcgttgcttta

SEQ ID NO: 563047 - DNA, 75 bp, synthetic construct
  source 1..75: mol_type = other DNA
tccgatacacgggggaatcccgtattcgatatcactcagccccatgctccttttctcaactataccgcaacgtct

SEQ ID NO: 563048 - DNA, 75 bp, synthetic construct
  source 1..75: mol_type = other DNA
tgcactgatcctttacggactggtggcggatgtctccatcggctccatgtttatggccgggatcctgccaggtct

SEQ ID NO: 563049 - DNA, 75 bp, synthetic construct
  source 1..75: mol_type = other DNA
tataatcagtcaacttgagattattctttccagactaaaaaatggagaaaatacaggttttgagcatgacgatga

SEQ ID NO: 563050 - DNA, 75 bp, synthetic construct
  source 1..75: mol_type = other DNA
tgatttaacccgttttctgaataatatttcggcacaaaaaaatttaaatatggctggtttaaatgaatctggaga

SEQ ID NO: 563051 - DNA, 75 bp, synthetic construct
  source 1..75: mol_type = other DNA
atgaactctatatcacacactaaaatctggattgaaaatctcagcaaagacaaactgatcccgagtctgaaagag

SEQ ID NO: 563052 - DNA, 75 bp, synthetic construct
  source 1..75: mol_type = other DNA
tgcactgaaagataaggttattgctcgtattgcagctaaacacaatgcgactccggctcaagtgattctggcgtg

SEQ ID NO: 563053 - DNA, 75 bp, synthetic construct
  source 1..75: mol_type = other DNA
agacaaaaaagcgatcgccacgctggattgcaacgaccgcctcgtaagtccggaaggtctggctcctgaatggga

SEQ ID NO: 563054 - DNA, 75 bp, synthetic construct
  source 1..75: mol_type = other DNA
tttgcccaatattaagattgcagctgctcactcattatccctcagcatattacctaaactggtgtactcactcac

SEQ ID NO: 563055 - DNA, 75 bp, synthetic construct
  source 1..75: mol_type = other DNA
caacttctcccgcccggcgggtcaggtaattgcacagtactatgaattcctgcgcctcggtcgtgaaggctatac

SEQ ID NO: 563056 - DNA, 75 bp, synthetic construct
  source 1..75: mol_type = other DNA
aggttattgctcgtattgcagctaaacacaatgcgactccggcacaagtgattctggcgtgggctatgggggaag

SEQ ID NO: 563057 - DNA, 75 bp, synthetic construct
  source 1..75: mol_type = other DNA
atcggtaacggcggtccattacacgcagaaagtgcccaggagttgttcctcggtaacgccggaacggcaatgcgt

SEQ ID NO: 563058 - DNA, 75 bp, synthetic construct
  source 1..75: mol_type = other DNA
tcgcccgtgtcgatggcactattaatctgcccggttccaagagcgtttctaaccgcgctttattgctggcggcat

SEQ ID NO: 563059 - DNA, 75 bp, synthetic construct
  source 1..75: mol_type = other DNA
tttgctgatgtgctggaaaaatgggcgcgaccatttgctggggcgatgattatatttcctgcacgcgtggtgaac

SEQ ID NO: 563060 - DNA, 75 bp, synthetic construct
  source 1..75: mol_type = other DNA
ctggagatttacgccgacgaggggatgcgggtggatacgccggaagccacctttacgggcaatgtgacggtggat

SEQ ID NO: 563061 - DNA, 75 bp, synthetic construct
  source 1..75: mol_type = other DNA
atcatcaatggcaaatcgacggataagcatatccaccgtggcgacagcggcggaaccacggggccaatgcaatga

SEQ ID NO: 563062 - DNA, 75 bp, synthetic construct
  source 1..75: mol_type = other DNA
acgggggtgtatcaccatgaggggcaccggatacggttaacaaaggatggtcgcattattgtgacatgcaaaatg

SEQ ID NO: 563063 - DNA, 75 bp, synthetic construct
  source 1..75: mol_type = other DNA
aagaaggctcaaaagctaagggcagaaagattacaacggttgcttaagaaaatggagcgtgatcgtgtatcacca

SEQ ID NO: 563064 - DNA, 75 bp, synthetic construct
  source 1..75: mol_type = other DNA
atgattgatgaatttcatgtgatgtatatgtataaaaaaatccaagcggaagccgcaactaccgacatcaaaaca

SEQ ID NO: 563065 - DNA, 75 bp, synthetic construct
  source 1..75: mol_type = other DNA
tctcaacgctgaaaaatctctggtggcggctcgatcgcgcccttgatgaagagtcgctctattacagcgggctga

SEQ ID NO: 563066 - DNA, 75 bp, synthetic construct
  source 1..75: mol_type = other DNA
ggatttgaaagcgatttaggctctaccgcgggaaagtggttaggggcactggtcggatttttatttatggctctg

SEQ ID NO: 563067 - DNA, 75 bp, synthetic construct
  source 1..75: mol_type = other DNA
gttaggggcactggtcggatttttatttatggctctggtcggggcattgttaggcagcattgcctggtacacccg

SEQ ID NO: 563068 - DNA, 75 bp, synthetic construct
  source 1..75: mol_type = other DNA
ccctggcggcaaactggctttgtgggctttctatacatggtgtggctatttcgtctgggcaatggcgcgttacat

SEQ ID NO: 563069 - DNA, 75 bp, synthetic construct
  source 1..75: mol_type = other DNA
gaagcggttattgccgggatcacctattcaggtcatgtgcatcacgataacggtgaaggcagcaaacgcggaggc

SEQ ID NO: 563070 - DNA, 75 bp, synthetic construct
  source 1..75: mol_type = other DNA
ataaagtgattttcgccgcatatcaaaccagcggtagcgccatcatcaccaactacttctcttccggcgtcgcgg

SEQ ID NO: 563071 - DNA, 75 bp, synthetic construct
  source 1..75: mol_type = other DNA
ttttccgggacagacagctggtggcgcgtttttgatttttccgttctgaacggatcgtttgggcaactgcctggt

SEQ ID NO: 563072 - DNA, 75 bp, synthetic construct
  source 1..75: mol_type = other DNA
ttctttcgatatcacgcaggccaatacgacacttgcagatggcacccgtcacagtgggcaatcggttaaatccgt

SEQ ID NO: 563073 - DNA, 75 bp, synthetic construct
  source 1..75: mol_type = other DNA
cagccgctgggcgacacaatggttctggttaaggctcctggcgctgataatgtcaaaatagagaaccagaccgga

SEQ ID NO: 563074 - DNA, 75 bp, synthetic construct
  source 1..75: mol_type = other DNA
ttgtcatatcagttaccagcttaccgaacaacaaattaactctgcgattacgcgaatggatgccatatgcagata

SEQ ID NO: 563075 - DNA, 75 bp, synthetic construct
  source 1..75: mol_type = other DNA
tgttgggcattccagggatctgctcgctggcgctgatcgctaacctgcaaaacaccgatgccgccgccggtatga

SEQ ID NO: 563076 - DNA, 75 bp, synthetic construct
  source 1..75: mol_type = other DNA
cgattacaccgcgcgactggcgttgctggaagagcagaaatcgttgccgtggcaggcggtatgggaaatgtattg

SEQ ID NO: 563077 - DNA, 75 bp, synthetic construct
  source 1..75: mol_type = other DNA
cgattacactgccggatgcggcgcgagcgccttatccggcctacaggtcggcaacagttgtaggcctgataagac

SEQ ID NO: 563078 - DNA, 75 bp, synthetic construct
  source 1..75: mol_type = other DNA
gatacgccagcgggtagcgaatggctggagagcgtgcgggcttatgagaaagcgattttgagccagcgtgggtaa

SEQ ID NO: 563079 - DNA, 75 bp, synthetic construct
  source 1..75: mol_type = other DNA
tgttcattatctattagttcgcctgaccctgtaacatatactattccaactgataaaggagataaatatataaat

SEQ ID NO: 563080 - DNA, 75 bp, synthetic construct
  source 1..75: mol_type = other DNA
cagctcggtctggattttaacccctcctgtttctcgcatccgctaagcgccgatggctttacgctctcccatgcc

SEQ ID NO: 563081 - DNA, 75 bp, synthetic construct
  source 1..75: mol_type = other DNA
ccctgcgcaccatatcgacgccgttgagagcaaattgtttggcattggcgcagagagctacacggttggctccaa

SEQ ID NO: 563082 - DNA, 75 bp, synthetic construct
  source 1..75: mol_type = other DNA
attcacgctgctgaagacctttacgacgtttctcacagtcaccactggtacggcaaagatctgctggcacgactg

SEQ ID NO: 563083 - DNA, 75 bp, synthetic construct
  source 1..75: mol_type = other DNA
ggcaagattttcgtgatgaatatcgaatgggcgtttgccaattttgtcggtgcgccgggtgcggtttgccatcat

SEQ ID NO: 563084 - DNA, 75 bp, synthetic construct
  source 1..75: mol_type = other DNA
agtaacagctttcagactaacggtgtgctgctcgatgatgaatggtgtgcatttctggcagaaaatcattttctg

SEQ ID NO: 563085 - DNA, 75 bp, synthetic construct
  source 1..75: mol_type = other DNA
atcttaaagcaatgtctgatttgctggcgcatggccgcccggccagcgacattatgcatgcgcatttgctggtgg

SEQ ID NO: 563086 - DNA, 75 bp, synthetic construct
  source 1..75: mol_type = other DNA
gtttatccgcagtatcgactagggaatatgcttcagcagacgattgcagaaatgattgattccccgcaacagcag

SEQ ID NO: 563087 - DNA, 75 bp, synthetic construct
  source 1..75: mol_type = other DNA
gctcggtgattgttgagcacaacggtgacgtttatgcctgcgatcactatgtttatccgcagtatcgactaggga

SEQ ID NO: 563088 - DNA, 75 bp, synthetic construct
  source 1..75: mol_type = other DNA
gtggtcgaacgcctggctgatgaaacggctgttcatgctggacttaagctacatgctcccggcgatattcagggc

SEQ ID NO: 563089 - DNA, 75 bp, synthetic construct
  source 1..75: mol_type = other DNA
cagaaatataatcagaagaatgagtgatgattcttctgtatcatcatatgtaaatgatgtttttacttatatagc

SEQ ID NO: 563090 - DNA, 75 bp, synthetic construct
  source 1..75: mol_type = other DNA
atactcatatcagccttatgaacgtttttgtgcacaattaaaaaatattttagatgtaatgattgaagaggatga

SEQ ID NO: 563091 - DNA, 75 bp, synthetic construct
  source 1..75: mol_type = other DNA
aaaggatgttctgctgataggtgccggtgctgtcctgctgaaacatgacctgaaaagatatttagctatcaggag

SEQ ID NO: 563092 - DNA, 75 bp, synthetic construct
  source 1..75: mol_type = other DNA
tcgatgccagcggcaaaccggggctgaattatttgtgtgccgggtatcagcgttatttccgccatctaccgccat

SEQ ID NO: 563093 - DNA, 75 bp, synthetic construct
  source 1..75: mol_type = other DNA
accgccgtgccgtaaagttacaggcgaaatacggtgctggcaggaagataagtaacagcttccagactaacggcg

SEQ ID NO: 563094 - DNA, 75 bp, synthetic construct
  source 1..75: mol_type = other DNA
tgttgtcggggatggcgggagcgaccggttatgaaggtatcggcggcttcccgcagggcttcaccgattttgcca

SEQ ID NO: 563095 - DNA, 75 bp, synthetic construct
  source 1..75: mol_type = other DNA
cagagatccataatcaataccgcgttaccaaaggcggcagaccaacgcataaactggtaatgcgcgcgcttaaac

SEQ ID NO: 563096 - DNA, 75 bp, synthetic construct
  source 1..75: mol_type = other DNA
aaaaacacgatcgtcaaatagaactgctggaaaacctgattgttgttattaatcattttccaaatccagcgtgta

SEQ ID NO: 563097 - DNA, 75 bp, synthetic construct
  source 1..75: mol_type = other DNA
gagccgggcaaactcagcgaactgaagtttggtctggagtgcggcggttctgacggcctttctggtattacggcg

SEQ ID NO: 563098 - DNA, 75 bp, synthetic construct
  source 1..75: mol_type = other DNA
cccatgaccagccgatctacgaaaacccatcaccggggaacaaagcgggcggtatcactacgttggaagacaaat

SEQ ID NO: 563099 - DNA, 75 bp, synthetic construct
  source 1..75: mol_type = other DNA
attcacgctgcggaagacctttacgacgtttcctacagtcaccactggtacggcaaagacctgctggcacgactg

SEQ ID NO: 563100 - DNA, 75 bp, synthetic construct
  source 1..75: mol_type = other DNA
tctgctcgcacaaccatttttactcggggctttcccgcggaattatggcaaacatcgccccctgcccggatttca

SEQ ID NO: 563101 - DNA, 75 bp, synthetic construct
  source 1..75: mol_type = other DNA
tcatttcttaatggacacagaaatattattctgtggcaattttatgatgctgctcatgttcgtcataaagactga

SEQ ID NO: 563102 - DNA, 75 bp, synthetic construct
  source 1..75: mol_type = other DNA
gtggcgctgtatagcgctatcccggtgaaccggacgttgtacgcgctgtatgcaatgaccggctttgcgtcagcg

SEQ ID NO: 563103 - DNA, 75 bp, synthetic construct
  source 1..75: mol_type = other DNA
gaagcgtatatccgtcactatatcgccgccagcgaactgcaaaacgaagtggcttttacctggcagggcggcgaa

SEQ ID NO: 563104 - DNA, 75 bp, synthetic construct
  source 1..75: mol_type = other DNA
accagcgtgctgcaaccgttgcagatctatgaatttttgcgtgatgcgggcgttgagttcatccagtttattccg

SEQ ID NO: 563105 - DNA, 75 bp, synthetic construct
  source 1..75: mol_type = other DNA
tgcgccacccgaacgcaggtgcggtgctggtgattggtctgggctgtgaaaacaatcaggtcgatgtcttccgtg

SEQ ID NO: 563106 - DNA, 75 bp, synthetic construct
  source 1..75: mol_type = other DNA
agatttggctgaaggcacagaagtcagtgtcgataaccaaaccgttacgctgcgccaggatgtcgctcgaggaca

SEQ ID NO: 563107 - DNA, 75 bp, synthetic construct
  source 1..75: mol_type = other DNA
attacagcggtcgtcctgggcggcgccaatatctacggcggctccgggtcaattctcggtactgccatcgccgcg

SEQ ID NO: 563108 - DNA, 75 bp, synthetic construct
  source 1..75: mol_type = other DNA
tgattattgagggttttcgtggcgcagatgatgaagatgaagaaccgcgccgtcgacacggtttctggctactgg

SEQ ID NO: 563109 - DNA, 75 bp, synthetic construct
  source 1..75: mol_type = other DNA
tttatggtggttccggttccattatcggcaccgccattgcggttttattagtgggatatttgcaacaaggtttgc

SEQ ID NO: 563110 - DNA, 75 bp, synthetic construct
  source 1..75: mol_type = other DNA
agagctttctactcctaccatagaactggtgattttaaattgttattagatagaatttcttttttaacaagcaat

SEQ ID NO: 563111 - DNA, 75 bp, synthetic construct
  source 1..75: mol_type = other DNA
gtacttcggggtgatggaattgcatgtaaagccataccaaatggcgatgagagtatacattttcttaataccgct

SEQ ID NO: 563112 - DNA, 75 bp, synthetic construct
  source 1..75: mol_type = other DNA
taaaacgactggctcggcttcaggcgtggctgtaaaagtaaattcaacttatgacaatagcaaagtattgttaaa

SEQ ID NO: 563113 - DNA, 75 bp, synthetic construct
  source 1..75: mol_type = other DNA
ttggggatagtaaggcagttcactttcttaatacagctgacccaagtttaatatccacgtacaccacaacgaatg

SEQ ID NO: 563114 - DNA, 75 bp, synthetic construct
  source 1..75: mol_type = other DNA
agcgcataacagcggtcacgaagtattgattcatctaccgatggcaccgttgagtaagcagccgctggagaaaaa

SEQ ID NO: 563115 - DNA, 75 bp, synthetic construct
  source 1..75: mol_type = other DNA
attgcaacagatggtttataacctgccgccagacattacgctggtgaaagccagcagcttgctgaatgaaccgca

SEQ ID NO: 563116 - DNA, 75 bp, synthetic construct
  source 1..75: mol_type = other DNA
gtgtttctcgatgattcccagaacgaagcggacatccgtatgcagttcaatcgcgcaattgacctggcgcgtcgc

SEQ ID NO: 563117 - DNA, 75 bp, synthetic construct
  source 1..75: mol_type = other DNA
attcctgaaaacaaaatatgtagctctgtaattaataattataatcagattttcacatatgattatatatctttg

SEQ ID NO: 563118 - DNA, 75 bp, synthetic construct
  source 1..75: mol_type = other DNA
tcagtttgctcgagacatccatcagcatgctgttgtctactctttttatagcatcagtacacattgaagtattat

SEQ ID NO: 563119 - DNA, 75 bp, synthetic construct
  source 1..75: mol_type = other DNA
tggcgtgaaagttattaaacggaaggtattcctcgacgattcgcaaaacgaagcggatattcgtgtgcagtttaa

SEQ ID NO: 563120 - DNA, 75 bp, synthetic construct
  source 1..75: mol_type = other DNA
tgcttcatatatgcagcgcaatgttattatttttgacatcgtcctggtgtgtgtttgctggcacgggttctgaat

SEQ ID NO: 563121 - DNA, 75 bp, synthetic construct
  source 1..75: mol_type = other DNA
agtatacagtcagcgatggtcacagtcccggaagaaatatccttcgcgacctgggattctcatattgatcttcgg

SEQ ID NO: 563122 - DNA, 75 bp, synthetic construct
  source 1..75: mol_type = other DNA
gcattggcgactgaatgttatatagagagcaatgctgcaggggcttatgatattgttataaacccaactcccttc

SEQ ID NO: 563123 - DNA, 75 bp, synthetic construct
  source 1..75: mol_type = other DNA
cgcgggaaatccctttttctatccgtgctgaatactgttatgccagtaaaattacggttaagttgaaagcggcaa

SEQ ID NO: 563124 - DNA, 75 bp, synthetic construct
  source 1..75: mol_type = other DNA
ctggagatgcagaagaagaatgctgagaaacaggcgatggaagacaataaatctgacatcggctggggcagccag

SEQ ID NO: 563125 - DNA, 75 bp, synthetic construct
  source 1..75: mol_type = other DNA
gtaaattagaaacaggtattgaaacaccaattgcatggaaacaatactcgtaccgcattcacattgacccgaaag

SEQ ID NO: 563126 - DNA, 75 bp, synthetic construct
  source 1..75: mol_type = other DNA
ctgggattctcatattaatcttcggggcgataagattggttgtaaatccttaggtagtaacacaagctctgtgca

SEQ ID NO: 563127 - DNA, 75 bp, synthetic construct
  source 1..75: mol_type = other DNA
gcagttcgccacaatgggtgagcgtcgccgtttctgggaaaaactgttcgtcaatgaccgtctggcgcagtcgct

SEQ ID NO: 563128 - DNA, 75 bp, synthetic construct
  source 1..75: mol_type = other DNA
ccctcgtcgaagggccatttgatgaaagccttctcgacacctgctggctggcgattgcagcgacggatgatgacg

SEQ ID NO: 563129 - DNA, 75 bp, synthetic construct
  source 1..75: mol_type = other DNA
aaagctgattgaacacggtatgcctggcgaaatgccggtagcaattgtcgaaaacggaacagcagtcacgcagcg

SEQ ID NO: 563130 - DNA, 75 bp, synthetic construct
  source 1..75: mol_type = other DNA
ttagctgaacttgcgcaacaaatgaatagcccatcgctgattattattggtcgggttgttggtctgcgcgaaaag

SEQ ID NO: 563131 - DNA, 75 bp, synthetic construct
  source 1..75: mol_type = other DNA
gtggatcatttgcctatattttgccaattacgcgatcgcgactgtctgattgtcggcggggggggtggtgatgtc

SEQ ID NO: 563132 - DNA, 75 bp, synthetic construct
  source 1..75: mol_type = other DNA
ggcaattacgcgggcgagtgaaacaacagttcgccacgatgagtgagcgtcgccgtttctgggagaaattgttcg

SEQ ID NO: 563133 - DNA, 75 bp, synthetic construct
  source 1..75: mol_type = other DNA
agggggcgcagctcccgcgcgtactggatgatcccaaagttgatgtagcgattatcagcaccacttacattcagc

SEQ ID NO: 563134 - DNA, 75 bp, synthetic construct
  source 1..75: mol_type = other DNA
tgcagccgcagctaaaagactacggcggtcaactggtggcctgctttgctgttgatcaggatgaaaatccgcagc

SEQ ID NO: 563135 - DNA, 75 bp, synthetic construct
  source 1..75: mol_type = other DNA
cccacttgatgatgccgggaggccgacactatgagtacgcaagaggccacctcgcaacaaccgctgttgcaggct

SEQ ID NO: 563136 - DNA, 75 bp, synthetic construct
  source 1..75: mol_type = other DNA
ggcgcagaagctgcgtcggcagaaaatccagatcgtcttccagaacccttacggttcgctgaatccgcgtaaaaa

SEQ ID NO: 563137 - DNA, 75 bp, synthetic construct
  source 1..75: mol_type = other DNA
tgatgtacctgggccgctgcgtggagaagggaacgaaggaccaaatcttcaataacccgcgtcatccgtacactc

SEQ ID NO: 563138 - DNA, 75 bp, synthetic construct
  source 1..75: mol_type = other DNA
gagcacattgccgatgaagtgatggtgatgtacctgggccgctgcgtggagaagggaacgaaggaccaaatcttc

SEQ ID NO: 563139 - DNA, 75 bp, synthetic construct
  source 1..75: mol_type = other DNA
aagaacagcgtcgggaaaaagccctgtcgatgatggcgaaagtcggcctgaaaaccgagcattatgaccgctatc

SEQ ID NO: 563140 - DNA, 75 bp, synthetic construct
  source 1..75: mol_type = other DNA
gcaaaagatgcaaaagtcgaaaaccagacgggggtgcgtaccgactggcgtggttatgccgtgctgccttatgcc

SEQ ID NO: 563141 - DNA, 75 bp, synthetic construct
  source 1..75: mol_type = other DNA
caatgagtcaggcacgaatattcagttagtgggttaccgttattcgaccagcggatattttaatttcgctgatac

SEQ ID NO: 563142 - DNA, 75 bp, synthetic construct
  source 1..75: mol_type = other DNA
cgcgtcagaatttgtcggcaacaatgatgaaagccgttgaagatcatgccccgatcctcattactcgtcagaatg

SEQ ID NO: 563143 - DNA, 75 bp, synthetic construct
  source 1..75: mol_type = other DNA
agaacaagatgtcgcggaagtcgctaaaaaggtggcaaaagagaaatatggcctcgatgttgaattggtaggatt

SEQ ID NO: 563144 - DNA, 75 bp, synthetic construct
  source 1..75: mol_type = other DNA
atgggcgcgaaagcgccttttttattatgtggcgtgatccgggggaatatcatgggcggagcaattaaaggtgta

SEQ ID NO: 563145 - DNA, 75 bp, synthetic construct
  source 1..75: mol_type = other DNA
caaatgctgccagcgggatacttggtggaataggtgccaattctgcgagcaaagagtacaaaaaagctaatgaca

SEQ ID NO: 563146 - DNA, 75 bp, synthetic construct
  source 1..75: mol_type = other DNA
gcggtaaatcgaccctcggtcggttgctgacgatgattgaaacgcccaccggcggcgagctgtattaccaggggc

SEQ ID NO: 563147 - DNA, 75 bp, synthetic construct
  source 1..75: mol_type = other DNA
atcgcctgggggtcaaacgtgccgcagacgcgtaccccggatgctcacttctttactgaagtgcgttacaaaggg

SEQ ID NO: 563148 - DNA, 75 bp, synthetic construct
  source 1..75: mol_type = other DNA
ccgtttatgatctgacgctggcaaactacggtctggaacgtggcctgaacgacgttaactgtgcaaccagctatg

SEQ ID NO: 563149 - DNA, 75 bp, synthetic construct
  source 1..75: mol_type = other DNA
tgacggaaaagtacctgatgtccgcagccaggagacactaccaaaagaggaaaactgccaggagtggaagtagtg

SEQ ID NO: 563150 - DNA, 75 bp, synthetic construct
  source 1..75: mol_type = other DNA
ggtgacgctggacttccgtctgtcgagcacctgtctctattccgacatcattttgccgacggcgacctggtacga

SEQ ID NO: 563151 - DNA, 75 bp, synthetic construct
  source 1..75: mol_type = other DNA
aaagaggtccgcgacgctgccaatcaaaaaatgatgtctgacccacgaatgaaagagttcggcgaatcaatgccg

SEQ ID NO: 563152 - DNA, 75 bp, synthetic construct
  source 1..75: mol_type = other DNA
agcagattaccggcgtttctcgcagccagattattcgcatcgcccgtgaatttgccgataacgctgataaaacgc

SEQ ID NO: 563153 - DNA, 75 bp, synthetic construct
  source 1..75: mol_type = other DNA
gcgctgtcttcgtttatttgccgttcagaatccccgacgtttgaacctgatgaatcccctaatgattttggtaaa

SEQ ID NO: 563154 - DNA, 75 bp, synthetic construct
  source 1..75: mol_type = other DNA
ccgactcaaccgttcacgggcagtttgtatgaggttttgagcagggatattgattcggctaagctggacgcatgg

SEQ ID NO: 563155 - DNA, 75 bp, synthetic construct
  source 1..75: mol_type = other DNA
tgcagccgcagctaaaagactacggcggtcaactggtagcctgttttgccgttgatcaggatgaaaatccgcagc

SEQ ID NO: 563156 - DNA, 75 bp, synthetic construct
  source 1..75: mol_type = other DNA
gccttttatgctgatcccgcgtaatatccggagaaaagtggatggattcagacaatcagaaggtaaaacaacaaa

SEQ ID NO: 563157 - DNA, 75 bp, synthetic construct
  source 1..75: mol_type = other DNA
cgccatttgcagataatggagctggaaggggcacagttgccacgtgtactggacgacccgaaagtggatgtagcg

SEQ ID NO: 563158 - DNA, 75 bp, synthetic construct
  source 1..75: mol_type = other DNA
cgaacaagatgtggcggaagtcgcaaaaaaagtggctaaagagaagtatggccttgaggttgaactgattggatt

SEQ ID NO: 563159 - DNA, 75 bp, synthetic construct
  source 1..75: mol_type = other DNA
gagcaagtcaaagaaacgggcgagagtactgcgcagtttatcgttacagccatgcgtggcgagatcaaacgccgc

SEQ ID NO: 563160 - DNA, 75 bp, synthetic construct
  source 1..75: mol_type = other DNA
tcttaattttcattatttttggttttcccaaaatgatgggctttgacggtacggtccaatatatggcctcgctgg

SEQ ID NO: 563161 - DNA, 75 bp, synthetic construct
  source 1..75: mol_type = other DNA
ggtccaatatatggcctcgctgggcgcgccaatgccgatgctggcagcgattattgcggtagttatggaagtgcc

SEQ ID NO: 563162 - DNA, 75 bp, synthetic construct
  source 1..75: mol_type = other DNA
cagacgcgcagtttatcgttacagccatgcgtggtgagatcaaacgccgccagcggcgcaaggccaaagagcagg

SEQ ID NO: 563163 - DNA, 75 bp, synthetic construct
  source 1..75: mol_type = other DNA
gatgagatgctggagcgtatccgcgatattcgcgccagcgaacgtcgggtttatttacgggtgcgagagatcttt

SEQ ID NO: 563164 - DNA, 75 bp, synthetic construct
  source 1..75: mol_type = other DNA
aatcgaaaagaatagatgcacgtgtcccactccatatcgttgatgcaatggataaggtcaaagaagaaggcgaaa

SEQ ID NO: 563165 - DNA, 75 bp, synthetic construct
  source 1..75: mol_type = other DNA
tatcaccgtgaatgagattgaactgacgatgaattcgttaattgtccgcatgggcccacaacacttttctgttct

SEQ ID NO: 563166 - DNA, 75 bp, synthetic construct
  source 1..75: mol_type = other DNA
atgatcatctcaccaccaaaacgcggaatggcactggccgtggtgctggtattgctggcggtaatgatgctggta

SEQ ID NO: 563167 - DNA, 75 bp, synthetic construct
  source 1..75: mol_type = other DNA
aaatacaggatgttgatagcgaagcgatgtacaagagttggctagcgacccattccgatggattcgttattaatc

SEQ ID NO: 563168 - DNA, 75 bp, synthetic construct
  source 1..75: mol_type = other DNA
ctggtttattgcctggtgggcgctctgaggcagcaagaatcgctgataactttcgaaaaactcagttagggagct

SEQ ID NO: 563169 - DNA, 75 bp, synthetic construct
  source 1..75: mol_type = other DNA
agccgaaagcctgtgggagtttattgacgaagaccgcagcgtgcagacgcgtctgggccgtgaagacagcgagta

SEQ ID NO: 563170 - DNA, 75 bp, synthetic construct
  source 1..75: mol_type = other DNA
gcacaggcctgctttaacctgaatgccctcgctcagccgacgacggcgtcgcgtcctatcgcggtacaacaactg

SEQ ID NO: 563171 - DNA, 75 bp, synthetic construct
  source 1..75: mol_type = other DNA
ccgctgtggctgtaaagccccgccgtcatacgcgtatcaggcgcgccgatatccccgcaaaggccattgacccgg

SEQ ID NO: 563172 - DNA, 75 bp, synthetic construct
  source 1..75: mol_type = other DNA
ccaaacatggcaccagcaatactgacagcaaaatcaccaacgtactggcaggcacagtatcttccaccagcaccg

SEQ ID NO: 563173 - DNA, 75 bp, synthetic construct
  source 1..75: mol_type = other DNA
gccgttcatgatgaaaaactgattaaccatactgtctgtattctgaatgaattacgaagcatagcgataaattaa

SEQ ID NO: 563174 - DNA, 75 bp, synthetic construct
  source 1..75: mol_type = other DNA
agaacatgccgttcacgatgaaaaactgattaaccatactgtctgtattctgaatgaattacgaagcatagcgat

SEQ ID NO: 563175 - DNA, 75 bp, synthetic construct
  source 1..75: mol_type = other DNA
gaagacggtcaacgtcagatcaccaacgtcgcagcaggttcggcggataccgatgcggttaacgtgggtcagttg

SEQ ID NO: 563176 - DNA, 75 bp, synthetic construct
  source 1..75: mol_type = other DNA
gctcacgggaaagataaaactgccagtgtaatcactaacgtcgctaacggtgcagtctctgccaccagcaacgat

SEQ ID NO: 563177 - DNA, 75 bp, synthetic construct
  source 1..75: mol_type = other DNA
tcatcaacgtcgcggatggttctgaagcccatgatgcggtcactgttcgccagttgcaaaacgccattggtgcag

SEQ ID NO: 563178 - DNA, 75 bp, synthetic construct
  source 1..75: mol_type = other DNA
atggcgacaaaagcagtaaacgcaaaatcacaaaccgttgcggcaagggttccgcatgaagttatgaacaatgtt

SEQ ID NO: 563179 - DNA, 75 bp, synthetic construct
  source 1..75: mol_type = other DNA
gtacacatccccgccatgaaaaacacggccttcgggcatgtgctccgcacactcaaactggaacgcacttttaac

SEQ ID NO: 563180 - DNA, 75 bp, synthetic construct
  source 1..75: mol_type = other DNA
cctcagcggctgtaaagccccgccatacccgtttcagacgcggtgatatccccgtgtcggagattgaccccgaac

SEQ ID NO: 563181 - DNA, 75 bp, synthetic construct
  source 1..75: mol_type = other DNA
gtatacagagagagttacagcctgattattgagtttaatcatcttattgcagaacatgccgttcacgatgaaaaa

SEQ ID NO: 563182 - DNA, 75 bp, synthetic construct
  source 1..75: mol_type = other DNA
cagacgcgcaattcatcgttacagccatgcgcggcgaaatcaaacgccgccaacggaaaaaaaccaaagaatcag

SEQ ID NO: 563183 - DNA, 75 bp, synthetic construct
  source 1..75: mol_type = other DNA
gtacagggcagtttgttacagctgcattaaagcgggaagttgaataccgccagcgtcgcaaggccaaagaatcag

SEQ ID NO: 563184 - DNA, 75 bp, synthetic construct
  source 1..75: mol_type = other DNA
aatggacgccggactttatcaaaaactcaaaccgctggtctgtgcgctaccgatgacccaccaacaaatcaacat

SEQ ID NO: 563185 - DNA, 75 bp, synthetic construct
  source 1..75: mol_type = other DNA
cacccgtggcaacagccgcgatatcgtaaaagcagtagaagctgccgttacgcgtgatatgaccattgtggcatt

SEQ ID NO: 563186 - DNA, 75 bp, synthetic construct
  source 1..75: mol_type = other DNA
taatgttccgcctcatgtacgcgccgctcgccttgccgatgaagaaaaccataagcgcggtcgccccttgcaata

SEQ ID NO: 563187 - DNA, 75 bp, synthetic construct
  source 1..75: mol_type = other DNA
aaagaccctaacgatccattagaacgagctgatatagctcctgttttcagtgaagccatagcgctttgtgaataa

SEQ ID NO: 563188 - DNA, 75 bp, synthetic construct
  source 1..75: mol_type = other DNA
atggacgaaatgaatttaggtcctgaagcacaggaactgcgtgacagtattgtggcagagcttcagtccggtgtg

SEQ ID NO: 563189 - DNA, 75 bp, synthetic construct
  source 1..75: mol_type = other DNA
aagatgtcgatcagtttctttctaatccgatactaactcgtgtcgatgagtatacaaaaagaaaagtaaaagacg

SEQ ID NO: 563190 - DNA, 75 bp, synthetic construct
  source 1..75: mol_type = other DNA
taatgatacgaacaccgccaaaacgaggtattgcacttgtcgtagtgctggtgttattggcaacaatgatgctga

SEQ ID NO: 563191 - DNA, 75 bp, synthetic construct
  source 1..75: mol_type = other DNA
atgtccggttttgcaaatacaaaagccgatatcgccttcctgaaatcccggtttaataaaaacctggcagcaggc

SEQ ID NO: 563192 - DNA, 75 bp, synthetic construct
  source 1..75: mol_type = other DNA
tacaacccaagaaggtgatagtgggagtattaatgaagttaacttcgagcagattgctgttgtgttggtgtgcca

SEQ ID NO: 563193 - DNA, 75 bp, synthetic construct
  source 1..75: mol_type = other DNA
atacatctactgagttgttctatgatcttgcaaaacgttcttttgaagcaagctggaaaacaatgcaagatatgt

SEQ ID NO: 563194 - DNA, 75 bp, synthetic construct
  source 1..75: mol_type = other DNA
atgaaaaagtttttatttggaataatctgtattgcactctcttcctcaacctttgccgctgaaaagttcaaagag

SEQ ID NO: 563195 - DNA, 75 bp, synthetic construct
  source 1..75: mol_type = other DNA
atactgtttggaaagatagcccggagtatgcaggcgtaaaaattcctttggatcctgtaatggatgctgcaacag

SEQ ID NO: 563196 - DNA, 75 bp, synthetic construct
  source 1..75: mol_type = other DNA
cagttaccggaaatgacgcgtgaagacgtagaagattacgcaccaggcggtatgaagttcaaccaacacggtccg

SEQ ID NO: 563197 - DNA, 75 bp, synthetic construct
  source 1..75: mol_type = other DNA
gtcgctggctacagagatgcacgacatggctgtggcggcatcgctgacacaagaacgggggcgagtggctgcggt

SEQ ID NO: 563198 - DNA, 75 bp, synthetic construct
  source 1..75: mol_type = other DNA
gtcagataaaatatctgttattgaaaggctaatagacgaaagggttcagggaatagaaacaagattatcccgtgg

SEQ ID NO: 563199 - DNA, 75 bp, synthetic construct
  source 1..75: mol_type = other DNA
atgatcagctcaccaccaaaacgcggaatggcactggttgtggtgctggtattactggcagttatgatgctggtg

SEQ ID NO: 563200 - DNA, 75 bp, synthetic construct
  source 1..75: mol_type = other DNA
ccgcagcggctgtaaagccccgtcgtcatacccgtttcagacgcgaagacatccccgcgccggaaattgaccctg

SEQ ID NO: 563201 - DNA, 75 bp, synthetic construct
  source 1..75: mol_type = other DNA
agccgaaagcctgtgggagtttattgacgaggatcgcagcgtgcagacgcggctggggcgtgaagacagcgagta

SEQ ID NO: 563202 - DNA, 75 bp, synthetic construct
  source 1..75: mol_type = other DNA
ctcgtttcttccctctgccgcaggggcaaattgcggtcaccctgcgtgacgcacaggcttgctttaacctgaatg

SEQ ID NO: 563203 - DNA, 75 bp, synthetic construct
  source 1..75: mol_type = other DNA
atggccgttaatgtgcgctcatcaatagcagtgaaggacatccgaaccagcaggttcctcttctggtacatcagg

SEQ ID NO: 563204 - DNA, 75 bp, synthetic construct
  source 1..75: mol_type = other DNA
gttatatttttaacggttataaatttcacttattaccagtagaatcaataagtagcctatcatcgatttatgaat

SEQ ID NO: 563205 - DNA, 75 bp, synthetic construct
  source 1..75: mol_type = other DNA
aaaattggtactgagtactttacaccagagaatagaaataaaataatacagaataatttttttattgttctttgt

SEQ ID NO: 563206 - DNA, 75 bp, synthetic construct
  source 1..75: mol_type = other DNA
ataaatttcttgagctaggattgaaaatattattgagcaggcattcttttaaaattggtactgagtactttacac

SEQ ID NO: 563207 - DNA, 75 bp, synthetic construct
  source 1..75: mol_type = other DNA
ggttatgagggcgataccagggaagactcagagtttactaatatgtttgataaaatgtacccacctgaaaattga

SEQ ID NO: 563208 - DNA, 75 bp, synthetic construct
  source 1..75: mol_type = other DNA
ctgatatgcatgtatgtcctatggtgacgccaggtttgccgcctgttccccatgtagggggaccattgttaccac

SEQ ID NO: 563209 - DNA, 75 bp, synthetic construct
  source 1..75: mol_type = other DNA
ctgatatgcatgtatgtcctatggtgacgcctggtttaccacctgttccccatgttggggggccattgttaccac

SEQ ID NO: 563210 - DNA, 75 bp, synthetic construct
  source 1..75: mol_type = other DNA
aggctgccgaactgaaaccgatgccgcaaagttggcgcggcgtgctgccgtgtgccgattgcgaaggaatcgaaa

SEQ ID NO: 563211 - DNA, 75 bp, synthetic construct
  source 1..75: mol_type = other DNA
ataccggtgcgccaaccaaagtattagcgcccgatacggcaggtaaattttacccaaaccaggattgcagtagtt

SEQ ID NO: 563212 - DNA, 75 bp, synthetic construct
  source 1..75: mol_type = other DNA
caattcagttgtttgaccctcactatgattcaggtagttcgacctggacactgggagtggctgaagggatcgaga

SEQ ID NO: 563213 - DNA, 75 bp, synthetic construct
  source 1..75: mol_type = other DNA
tggaactacctatattaacagaagttagtataggaacaatccactcgaacacgagaagtgtccaacacactgctc

SEQ ID NO: 563214 - DNA, 75 bp, synthetic construct
  source 1..75: mol_type = other DNA
atactggtgcgccgaccaaagtatttgcgcccgatacggcaggtaaattttacccgcaccaggattgcagtagtt

SEQ ID NO: 563215 - DNA, 75 bp, synthetic construct
  source 1..75: mol_type = other DNA
cgctggaaccggcacaatccagtttacctatgacgccgatgaccctgcgaggcatgtatttttatatggctgatg

SEQ ID NO: 563216 - DNA, 75 bp, synthetic construct
  source 1..75: mol_type = other DNA
cggcatgggcatcgtgatggtgttgatggggctggcacaaaatatctggcagtttttgatcctgcgggcgcttct

SEQ ID NO: 563217 - DNA, 75 bp, synthetic construct
  source 1..75: mol_type = other DNA
cgctggcggcctggctggtcgaaagctcgcagaatctgatgatgcctgcctattacctgatggtagtggcggtgg

SEQ ID NO: 563218 - DNA, 75 bp, synthetic construct
  source 1..75: mol_type = other DNA
tgctgttttcagccgttttgctttccggttgtgacgacaaacaagagaaaattgatttctataagaaggctgaaa

SEQ ID NO: 563219 - DNA, 75 bp, synthetic construct
  source 1..75: mol_type = other DNA
ataaatcagcagttcgtgccacagaaactcttgaccgagaggaagtggcaaagcgaatgcgaaaacttgatgtga

SEQ ID NO: 563220 - DNA, 75 bp, synthetic construct
  source 1..75: mol_type = other DNA
atgacttatgcatcccaggctgttaagcgtacaccacatgaagtcactgaccactttataaaaatggttcacgct

SEQ ID NO: 563221 - DNA, 75 bp, synthetic construct
  source 1..75: mol_type = other DNA
cgcaatgcattgctaaagctatcgccgctatccagatattcagtttgtcctgcacgatcgtccgcagcagtgggt

SEQ ID NO: 563222 - DNA, 75 bp, synthetic construct
  source 1..75: mol_type = other DNA
cacctggtggcgtcaggccatcaagtacgtacgcatctcccccgagtgggttaaggggcaggcatcatggattat

SEQ ID NO: 563223 - DNA, 75 bp, synthetic construct
  source 1..75: mol_type = other DNA
gggacagcgatcacgtagtgctgctggatgatgaaacccaggcgattgccagtgagattgttcgtcacgatctgt

SEQ ID NO: 563224 - DNA, 75 bp, synthetic construct
  source 1..75: mol_type = other DNA
gtttgccagagtggcacgaaaatcaggaaaacaactgatagtcgcagtaagagaacaggatatgaaaaaatggaa

SEQ ID NO: 563225 - DNA, 75 bp, synthetic construct
  source 1..75: mol_type = other DNA
tttaattgtgttggatggcctgatttagggggggcagcagtatcacagtttgcaatgatggcaagaaaatttggt

SEQ ID NO: 563226 - DNA, 75 bp, synthetic construct
  source 1..75: mol_type = other DNA
cgtgccgatctggaacaagctatgcggctgattccggggccgaaacggcttaatttacatgccatctatctggaa

SEQ ID NO: 563227 - DNA, 75 bp, synthetic construct
  source 1..75: mol_type = other DNA
ccgtttcaatgcactgctggcagggcgatgatgtttccggttttgaaaacccggaaggttcgctgaccgggggga

SEQ ID NO: 563228 - DNA, 75 bp, synthetic construct
  source 1..75: mol_type = other DNA
cgtcagcgtctgctggcagctctggatgaggtgatcagcgagaagctggatcctgcgcaccatatcgacgccgtt

SEQ ID NO: 563229 - DNA, 75 bp, synthetic construct
  source 1..75: mol_type = other DNA
gatggcattgcaaatatttatgttccgaactctaatttgaaagttctatattatgatgatgactataatgtaaag

SEQ ID NO: 563230 - DNA, 75 bp, synthetic construct
  source 1..75: mol_type = other DNA
cgccatacggagtatcaccatttatgggccgatatacaggtggtgattactggttgtgagggcattaatgcggga

SEQ ID NO: 563231 - DNA, 75 bp, synthetic construct
  source 1..75: mol_type = other DNA
atattctgctgcgcccggagtgttcgttatcggcgttatccaccagagaggacggtcgctggcaacctgaaggat

SEQ ID NO: 563232 - DNA, 75 bp, synthetic construct
  source 1..75: mol_type = other DNA
taatgattaagtgtgaacacaatattcttattgtggggaattctgcctctcacattgataagttttttaaggggg

SEQ ID NO: 563233 - DNA, 75 bp, synthetic construct
  source 1..75: mol_type = other DNA
cccggaagctcgccgtgctgcaattcagggggtggcattttgcgtgacttgtcagcaaatcgcagagctaaaaaa

SEQ ID NO: 563234 - DNA, 75 bp, synthetic construct
  source 1..75: mol_type = other DNA
ggttttcaaaatggggctgcgatgcaatattccagtggttttgtgtgatattactaatgtcatacgtcatgggga

SEQ ID NO: 563235 - DNA, 75 bp, synthetic construct
  source 1..75: mol_type = other DNA
tttgctcttaaatatatttttgaaaatgaattattttattcactattaaatactgataatttcaaaaaaccattt

SEQ ID NO: 563236 - DNA, 75 bp, synthetic construct
  source 1..75: mol_type = other DNA
gaacgccgagtacaacaacgtcggtgacgccctggatgcgcttgatgataacgccctgctgtgggatgagactgc

SEQ ID NO: 563237 - DNA, 75 bp, synthetic construct
  source 1..75: mol_type = other DNA
aaactgaaagcaagttgagcggtggtatcgcttctgcaatggcaatgaccggtctgccgcaggcttatacaccgg

SEQ ID NO: 563238 - DNA, 75 bp, synthetic construct
  source 1..75: mol_type = other DNA
cagaactctgtaggtgagttttctgttggtagtgaagacggtcaacgtcagatcaccaacgtcgcagctggttca

SEQ ID NO: 563239 - DNA, 75 bp, synthetic construct
  source 1..75: mol_type = other DNA
atgaatacatttaaaaataaaaacactgaaatcttttatgttgtgtccttgcatatctatgcggagctttttaac

SEQ ID NO: 563240 - DNA, 75 bp, synthetic construct
  source 1..75: mol_type = other DNA
ctatcgactatagcaatatcaccctcggtggtggcaacggcagtacgactcgtatcagcaacgtctccgctggcg

SEQ ID NO: 563241 - DNA, 75 bp, synthetic construct
  source 1..75: mol_type = other DNA
atgttgttgatgcgctgggggggtggtgccgaagtcaatgcagacggcaccatcactgcgccgacgtacaccatt

SEQ ID NO: 563242 - DNA, 75 bp, synthetic construct
  source 1..75: mol_type = other DNA
aatggtgcatttagcgccgctcacggaaaagataaaacagccagtgtaatcactaacgtcgctaacggtgcaatt

SEQ ID NO: 563243 - DNA, 75 bp, synthetic construct
  source 1..75: mol_type = other DNA
aacacggcattaataatgctcccagtgtaatcactgatgttgcaaacggtgcagtctcgtccaccagcagcgacg

SEQ ID NO: 563244 - DNA, 75 bp, synthetic construct
  source 1..75: mol_type = other DNA
caacgatgccagcgcttcaggtattggcgctacggctgtgggttataacgctgtcgcctcaggcgaaagcagcgt

SEQ ID NO: 563245 - DNA, 75 bp, synthetic construct
  source 1..75: mol_type = other DNA
tcatcaatcagcttgctggtaacaccgacgcaacctatatcgaagaaaatggcgctggtatcaactacgttcgta

SEQ ID NO: 563246 - DNA, 75 bp, synthetic construct
  source 1..75: mol_type = other DNA
aaatatcgtcaaatcatcaacgtcgcggatggttctgaagcccatgacgctgttacggttcgccagttgcagaac

SEQ ID NO: 563247 - DNA, 75 bp, synthetic construct
  source 1..75: mol_type = other DNA
ttaggaaaagattttttatcgattacccgaagtttatagttagatttatatctgaaaatttaatgaaaatattca

SEQ ID NO: 563248 - DNA, 75 bp, synthetic construct
  source 1..75: mol_type = other DNA
atcttctgaaaaagcatggaaaaagaacgcggctgaaaaactatctgaggtggattttaaagaggttaggcaggc

SEQ ID NO: 563249 - DNA, 75 bp, synthetic construct
  source 1..75: mol_type = other DNA
cttaacaatatagcactgaaacgtactgaaacaacaaaggatcttttcgacgatcttaaagaaattcgagaggat

SEQ ID NO: 563250 - DNA, 75 bp, synthetic construct
  source 1..75: mol_type = other DNA
agcggcgaatattccggtaaatatggcgctgtgcgaaaagctgaatctggatcgtgatacctattccgtttctat

SEQ ID NO: 563251 - DNA, 75 bp, synthetic construct
  source 1..75: mol_type = other DNA
tgcagcgaacattccggtgaatatggcgctgtgtgaaaagctgaatctggatcgcgatacctattccgtttctat

SEQ ID NO: 563252 - DNA, 75 bp, synthetic construct
  source 1..75: mol_type = other DNA
gatcctccgtataatactgcggcttcagaaattttatataaaaatgaatataagcacagcagctggaattcatta

SEQ ID NO: 563253 - DNA, 75 bp, synthetic construct
  source 1..75: mol_type = other DNA
cggacacagcaaaagataaccgtaaagataatgaattagatcgctgctttgtacttattgagccacatgttcgta

SEQ ID NO: 563254 - DNA, 75 bp, synthetic construct
  source 1..75: mol_type = other DNA
taataagctgaaggccaaaatccagtctgcgctggcggatgcaggaaatgccaataaatcagaattagaacatca

SEQ ID NO: 563255 - DNA, 75 bp, synthetic construct
  source 1..75: mol_type = other DNA
gcgaaatacaggtaccgagccatttgtgttagtctcggttgtggcatcagccaatgccggtttcgtattggctga

SEQ ID NO: 563256 - DNA, 75 bp, synthetic construct
  source 1..75: mol_type = other DNA
ctgtagccgagtatgttcagccgtccgaaggcgagcctattcgttccgttgtgcttgaaacccgagactcaatta

SEQ ID NO: 563257 - DNA, 75 bp, synthetic construct
  source 1..75: mol_type = other DNA
atgaatacatttaaaaataaaaatactgaaatcttttatgttgtgtccttgcatatctacgcggagctttttaac

SEQ ID NO: 563258 - DNA, 75 bp, synthetic construct
  source 1..75: mol_type = other DNA
cgaaaccaccaaaaacctggtcaacgatatgtcgaatgccgtcacctttatggtgaaactggtgattcgcttcgc

SEQ ID NO: 563259 - DNA, 75 bp, synthetic construct
  source 1..75: mol_type = other DNA
gtcggcgcgctgaaagctgtagcgccaatcctggtgctgatgctggtaatggcttccatcgctaaccaccagcac

SEQ ID NO: 563260 - DNA, 75 bp, synthetic construct
  source 1..75: mol_type = other DNA
taccattaacttaaatttcaaccccggcggaatgcattctaatgaatgcattcattatgcaaaaaatgataatga

SEQ ID NO: 563261 - DNA, 75 bp, synthetic construct
  source 1..75: mol_type = other DNA
cccgcattaaagatctgcgcaccggggttgaaacccgcaacacgcaggcagtgctggatggcagcctggatcaat

SEQ ID NO: 563262 - DNA, 75 bp, synthetic construct
  source 1..75: mol_type = other DNA
ggtaactatctgggcctgacggtagaaaccatcagccgtctgctgggtcgcttccagaaaagcggtatgctggca

SEQ ID NO: 563263 - DNA, 75 bp, synthetic construct
  source 1..75: mol_type = other DNA
ctcccggacccggcccgcgacttttcccgatactggaacatcatcagcagtatggtcaaacctgcctatctggcc

SEQ ID NO: 563264 - DNA, 75 bp, synthetic construct
  source 1..75: mol_type = other DNA
ttcatcatattttgaaaaattcacagaggtttcttttctcaataacaatagcacaggaatgatatccttggtagg

SEQ ID NO: 563265 - DNA, 75 bp, synthetic construct
  source 1..75: mol_type = other DNA
ggtattgttattgaagatcttcagtttactcttgccggaaacgaagagatcaccctcaggcatttgtccttcagg

SEQ ID NO: 563266 - DNA, 75 bp, synthetic construct
  source 1..75: mol_type = other DNA
gtctcgcccttcactgtggcggtttgtgcaacgtcaggctatggcaatggattttagctggcaggtcgcggcgaa

SEQ ID NO: 563267 - DNA, 75 bp, synthetic construct
  source 1..75: mol_type = other DNA
tggtgctggaagccttaccgggtcttctggaacagggcggacaactggcactgctcggtgcgggcgatccggtat

SEQ ID NO: 563268 - DNA, 75 bp, synthetic construct
  source 1..75: mol_type = other DNA
agtgcagcaacagctgggtgtcgatcaaccggacttcggtacgctgtttgctgatatgtgttatggcgataacga

SEQ ID NO: 563269 - DNA, 75 bp, synthetic construct
  source 1..75: mol_type = other DNA
ttagacctgaaaaactgcgccatgaagatgacgcgtaataacgaagaggtttccagcgggcgcggcagcgaatgc

SEQ ID NO: 563270 - DNA, 75 bp, synthetic construct
  source 1..75: mol_type = other DNA
gtggacagcaaactggaacgaaacacgctcactgctcttctgaatgtggccagctggcttaaaagaaagccaggt

SEQ ID NO: 563271 - DNA, 75 bp, synthetic construct
  source 1..75: mol_type = other DNA
cagaaagatgggaaagacagcctcgattaatgatgtcgatatggctgtgatcccgggagaaacactggcagagct

SEQ ID NO: 563272 - DNA, 75 bp, synthetic construct
  source 1..75: mol_type = other DNA
ctgcgcgatctgattggtatcgataacgctgaagcggcctacgccattcagcacatcaatgtgcaacatgacgtt

SEQ ID NO: 563273 - DNA, 75 bp, synthetic construct
  source 1..75: mol_type = other DNA
cgatcgtttcgaagcccatatcgacggtattggttcagtcgccgccaccttttcagcggcggttacaaaaggaag

SEQ ID NO: 563274 - DNA, 75 bp, synthetic construct
  source 1..75: mol_type = other DNA
gctcactacggcacagattacatacggaatgccatggcctatcacctctcgccgttggaggataaaacggcgtta

SEQ ID NO: 563275 - DNA, 75 bp, synthetic construct
  source 1..75: mol_type = other DNA
cccagtcgagcaaacaggcgaaaaccaacttcggtaaaagcaacaccgtcgatatcggcgcaccgaccatttttg

SEQ ID NO: 563276 - DNA, 75 bp, synthetic construct
  source 1..75: mol_type = other DNA
gagttcaggaactggaaaacctgactatcagtgaactaccaccgctgcgattgggctttcacgtttctcgccgtt

SEQ ID NO: 563277 - DNA, 75 bp, synthetic construct
  source 1..75: mol_type = other DNA
ctgctttatgccgacgttagtgcgtcgtcattctgtagccacacgacagaatgcggcagcgatcactaactcaac

SEQ ID NO: 563278 - DNA, 75 bp, synthetic construct
  source 1..75: mol_type = other DNA
cggacaaatctctttcctgaaggccggtctgtactatgccgatcacattacggcggtcagtccaacctacgctcg

SEQ ID NO: 563279 - DNA, 75 bp, synthetic construct
  source 1..75: mol_type = other DNA
ttacccgcagcacaaatcgcagacggcgttgacgctcgcgtactgttgcctgcatttcccgatattcgccgtggc

SEQ ID NO: 563280 - DNA, 75 bp, synthetic construct
  source 1..75: mol_type = other DNA
tttgcaacttcaggaaacagcccgcagcagcaaagtagtaaccagcagaacactcctgtatacgacgattccatc

SEQ ID NO: 563281 - DNA, 75 bp, synthetic construct
  source 1..75: mol_type = other DNA
ctggctacaaatgcgctttcagaaccgggccaacttcgaagcaatgattgatgcgaatatgcgaccttgtgggat

SEQ ID NO: 563282 - DNA, 75 bp, synthetic construct
  source 1..75: mol_type = other DNA
gtatctgcacgagttcaggaactggaaaacctgactatcagtgaactaccaccgctgcgattaggctttctcgtt

SEQ ID NO: 563283 - DNA, 75 bp, synthetic construct
  source 1..75: mol_type = other DNA
ctcccctcgaaaacgtctcccgctggctcactacggcacagataacatacggtattgtggtaatgactccaactt

SEQ ID NO: 563284 - DNA, 75 bp, synthetic construct
  source 1..75: mol_type = other DNA
cccatcgctcgttacaccgacccacagttaacaaccgtgcgttatcccattgcctcgatggcgaaaatggcgact

SEQ ID NO: 563285 - DNA, 75 bp, synthetic construct
  source 1..75: mol_type = other DNA
tcgcccagcaacaccagaaatatgtgctaatcggcaatagctatcatgaagcggaaaaagagcggcacgccattg

SEQ ID NO: 563286 - DNA, 75 bp, synthetic construct
  source 1..75: mol_type = other DNA
catgcgtaaagcaggctggatgagtgcgttgaaagagcaggatattattccgccggaaagctggattggcactgg

SEQ ID NO: 563287 - DNA, 75 bp, synthetic construct
  source 1..75: mol_type = other DNA
aacatatacatgtgttacttcctgatacaaataagaacataaatataaatgttgatggtaaaaatgtcataatta

SEQ ID NO: 563288 - DNA, 75 bp, synthetic construct
  source 1..75: mol_type = other DNA
aacagcatcataaatctgccatcaccgccgacacgctgcccaggctgtctggaagacgaactgaaatttctgaag

SEQ ID NO: 563289 - DNA, 75 bp, synthetic construct
  source 1..75: mol_type = other DNA
gcgctgcgagaacgacgtgattgcgcacttcaccactccggaccttttgatcatcgacgaagttggcgtccagtt

SEQ ID NO: 563290 - DNA, 75 bp, synthetic construct
  source 1..75: mol_type = other DNA
gtaatcacctgctcaccaataccaatacctggacgcccgacagccagtggctggtgtttgacgttcgtccctctg

SEQ ID NO: 563291 - DNA, 75 bp, synthetic construct
  source 1..75: mol_type = other DNA
cactctacttgttaattgccgaatggatgatggcagaaaacagatggattatcgcaagagagatctctattcatt

SEQ ID NO: 563292 - DNA, 75 bp, synthetic construct
  source 1..75: mol_type = other DNA
ctgccgctattgcctggaaaattatccgggcactgtggtactggctgcgcaaacctcagcaacctcataaggagc

SEQ ID NO: 563293 - DNA, 75 bp, synthetic construct
  source 1..75: mol_type = other DNA
tgcaacgccaaaatataagtacagatatatagaaaaagtaaagaaagtttataataaacattctttaaaaacagg

SEQ ID NO: 563294 - DNA, 75 bp, synthetic construct
  source 1..75: mol_type = other DNA
cctcaaggaacacaaattgcgtttttaatgcgcgatgataacggcattgtgcaactgtggcttatctcgccacag

SEQ ID NO: 563295 - DNA, 75 bp, synthetic construct
  source 1..75: mol_type = other DNA
tgcgagaaacacggtaaatatacttcctatgagaaatatctgaccatctcaggaaaaagaattacttcaagtaaa

SEQ ID NO: 563296 - DNA, 75 bp, synthetic construct
  source 1..75: mol_type = other DNA
tttaagaatgcttttattaaacataatattcctttcagatttgtacgcaaacaagcagattataaactcgataaa

SEQ ID NO: 563297 - DNA, 75 bp, synthetic construct
  source 1..75: mol_type = other DNA
ccgcgtgaatacagcggtagccactggtgcgtgctggtgagtaaaaccacgcccacgccgcagcctggcagtgat

SEQ ID NO: 563298 - DNA, 75 bp, synthetic construct
  source 1..75: mol_type = other DNA
gcgccgttaagcggaacggaaacaaccctgcccgcgccaccgcgtggcgtcgtgcagcgacgtttaacctttacc

SEQ ID NO: 563299 - DNA, 75 bp, synthetic construct
  source 1..75: mol_type = other DNA
gtcttctcgccggatggtcagtggctggcgtggatggaaggcggccagctgtggatcaccgaaactgatcgctaa

SEQ ID NO: 563300 - DNA, 75 bp, synthetic construct
  source 1..75: mol_type = other DNA
agaaaggaaaaaagtttttttatgggtattgacccgtcttctgaaagaagggcgtatcaaactcgccaagcacgg

SEQ ID NO: 563301 - DNA, 75 bp, synthetic construct
  source 1..75: mol_type = other DNA
gctagagtatcagcccggcagcaagcatatttacagtgatgtcgattatatgctgcttggatttatcgtcgagtc

SEQ ID NO: 563302 - DNA, 75 bp, synthetic construct
  source 1..75: mol_type = other DNA
gttggtcacccacggtaatccgacatcgttatcgatctctcctgccgcgctgttctgggggatagcttcagcctt

SEQ ID NO: 563303 - DNA, 75 bp, synthetic construct
  source 1..75: mol_type = other DNA
gtaattggaacttcgctaacctttagtctgtatctgaaaggcgcacagttaattggcgggccaaaagccagcatt

SEQ ID NO: 563304 - DNA, 75 bp, synthetic construct
  source 1..75: mol_type = other DNA
aaaccacgctgcacgatatccgctggggcagcgagtacaacggcacgttttactgggatctggaaatctccggcg

SEQ ID NO: 563305 - DNA, 75 bp, synthetic construct
  source 1..75: mol_type = other DNA
cgcttcgtgaagcgcttcggactgtcggcgataggcgtccagtatcaacaggggctgaaagacagctgcgctgcg

SEQ ID NO: 563306 - DNA, 75 bp, synthetic construct
  source 1..75: mol_type = other DNA
aaatcaaaagatttagaaaacgatgcaaatttacaggggcgcacaatagcacatccatatgcacatactttaggc

SEQ ID NO: 563307 - DNA, 75 bp, synthetic construct
  source 1..75: mol_type = other DNA
ccgcacgggggattttttatgtcggttaccgccgtatcaacgatatcggtcgtgagctctggctgagtatggatg

SEQ ID NO: 563308 - DNA, 75 bp, synthetic construct
  source 1..75: mol_type = other DNA
aaaaccatgaacatcctgcgtcgtgcggccggccaggaagcccacgcccggatggagacgctgaaaagaaaggat

SEQ ID NO: 563309 - DNA, 75 bp, synthetic construct
  source 1..75: mol_type = other DNA
tcaactatctcgatgagattggtgcctactacacagagcgaattaccgccatggcaacgcaggtccgttccctct

SEQ ID NO: 563310 - DNA, 75 bp, synthetic construct
  source 1..75: mol_type = other DNA
tgttctggggcattgcctcggcatttgctgctgcattctataccacctatccctcaacgctgattgcccgctatg

SEQ ID NO: 563311 - DNA, 75 bp, synthetic construct
  source 1..75: mol_type = other DNA
gcgataaagtcttctcaatcattaaaaatcataaagatgccatcagcctgctgattttttccgttgttggcgcac

SEQ ID NO: 563312 - DNA, 75 bp, synthetic construct
  source 1..75: mol_type = other DNA
atcgtggatacattccagcaacgcattgcaggacgtcaggcggctatggcaatgctggaagagtacgacacggat

SEQ ID NO: 563313 - DNA, 75 bp, synthetic construct
  source 1..75: mol_type = other DNA
gtggtcagcgtcgtcgccgctatcgtgatgagcgttatccggttcagtcaccaatgccattaaccgtagcgtgtg

SEQ ID NO: 563314 - DNA, 75 bp, synthetic construct
  source 1..75: mol_type = other DNA
agccatcaaaaaagccgctgaaagccgcccagctccgttcctgatccatcaggagagcaatgttatcgttcgcgc

SEQ ID NO: 563315 - DNA, 75 bp, synthetic construct
  source 1..75: mol_type = other DNA
gaactggtgaaagtcccgctgccagtcgtagcgcaaactgcaccagaacagcaagaagagaacaatgctgataac

SEQ ID NO: 563316 - DNA, 75 bp, synthetic construct
  source 1..75: mol_type = other DNA
tctggcgatttacgccctgcgtaatcaactgaccgatgagtggccgcaatatcccggtgacgagataaaacaaat

SEQ ID NO: 563317 - DNA, 75 bp, synthetic construct
  source 1..75: mol_type = other DNA
ccacaggtgattgccgaggctgatgttgctgtagcgcaggacgttgcagaacacgcggaaccggtagttgaaccg

SEQ ID NO: 563318 - DNA, 75 bp, synthetic construct
  source 1..75: mol_type = other DNA
ttgccttcgaaggtaaaggtgccgcaggtggtcatacggcaacgcatcatgcctctgccgctcctgcgcgtccgc

SEQ ID NO: 563319 - DNA, 75 bp, synthetic construct
  source 1..75: mol_type = other DNA
gtactggcaccgtgcgtgacaacgaatccctgtcgctctctattctgcgtctgattgaagaagaagccctgaaag

SEQ ID NO: 563320 - DNA, 75 bp, synthetic construct
  source 1..75: mol_type = other DNA
tgttcctgtgccaatcgcttcttacctgctgaacgaaaaacgctctgcggtaaatgccattgaaactcgtcagga

SEQ ID NO: 563321 - DNA, 75 bp, synthetic construct
  source 1..75: mol_type = other DNA
acgttatccggcccagtcgccaatgccgttaaccgtcgcctgtgcgtctccagaactggcttctggcaaagtctg

SEQ ID NO: 563322 - DNA, 75 bp, synthetic construct
  source 1..75: mol_type = other DNA
acacgggtgaaattccactgttcagccactaccagatcgaatcgcagatcgagtccgctttccagcgtgaagtcc

SEQ ID NO: 563323 - DNA, 75 bp, synthetic construct
  source 1..75: mol_type = other DNA
tggttgaaacgacgcatcctgaagtgattgccgccgcggtaactgaacagccgcaggtgattaccgagtctgatg

SEQ ID NO: 563324 - DNA, 75 bp, synthetic construct
  source 1..75: mol_type = other DNA
tgttgaagccgaggtagtcgtagagcataaccacgctaccgcgccgatgacacgtgctccggcaccggaatatgt

SEQ ID NO: 563325 - DNA, 75 bp, synthetic construct
  source 1..75: mol_type = other DNA
aatgtactggcgttgctgcaaagagtgccgggcatcacctcattgaatattatcgatgcgcaattggtcgagaat

SEQ ID NO: 563326 - DNA, 75 bp, synthetic construct
  source 1..75: mol_type = other DNA
gagctaccgcaatctgatccgctttgcgcgtcgcaataaccttagcgtttccgccagcccgcaggatatcggtgt

SEQ ID NO: 563327 - DNA, 75 bp, synthetic construct
  source 1..75: mol_type = other DNA
tgaacaggtgattccgttccgcacaaaatctatcggtaacatgccgcctgccaatcaggatcacgatacgccgct

SEQ ID NO: 563328 - DNA, 75 bp, synthetic construct
  source 1..75: mol_type = other DNA
gctcgataaccgcgctaactggaagattgatcaggtgcgtgaggcgcacaacgagttgctcgacgcgatgatgca

SEQ ID NO: 563329 - DNA, 75 bp, synthetic construct
  source 1..75: mol_type = other DNA
ccatttgccagcgatgaaacatctaagtatttaaatgaacaacagcaaaagtataaagattcgttgtttctgact

SEQ ID NO: 563330 - DNA, 75 bp, synthetic construct
  source 1..75: mol_type = other DNA
attcgaaatatcactttattgaagaagtgaagaagatggttatcgatcgtagcgaacaggagataattcccctga

SEQ ID NO: 563331 - DNA, 75 bp, synthetic construct
  source 1..75: mol_type = other DNA
aaagttgttcctctgatctggatatctgggtctgccatcaatcgtggctggatagcgaagagcgtcagttactgc

SEQ ID NO: 563332 - DNA, 75 bp, synthetic construct
  source 1..75: mol_type = other DNA
gacgtgtcgcaccatttcccgctgcgcttacctgcaccgacaccgaaggcgctctacagcccgtgtgagatccgc

SEQ ID NO: 563333 - DNA, 75 bp, synthetic construct
  source 1..75: mol_type = other DNA
ttttattaccctcgcccaaccagttgaggtgaataacgaagtcattaaccatgtcttgatcgcctgcgccgccgc

SEQ ID NO: 563334 - DNA, 75 bp, synthetic construct
  source 1..75: mol_type = other DNA
cggcatttattcgccaacagccggagcgttttttctctgcccccggaagttttcattattcgaatgtacgcggtg

SEQ ID NO: 563335 - DNA, 75 bp, synthetic construct
  source 1..75: mol_type = other DNA
gaaagatattaaacagcgtttgcacgacggcgaaatcgtgtcgtttggtctcgacccgtattgcatgatgctgga

SEQ ID NO: 563336 - DNA, 75 bp, synthetic construct
  source 1..75: mol_type = other DNA
tgaacaggtgattccgttccgcaccaaatcgattggcaacatgccgcctgccaatcaggagcatgacgcgccgct

SEQ ID NO: 563337 - DNA, 75 bp, synthetic construct
  source 1..75: mol_type = other DNA
tgaacaggtgattccgttccgcacaaaatctatcggtaacatgccgcccgccaatcaggacaacgatacgccgct

SEQ ID NO: 563338 - DNA, 75 bp, synthetic construct
  source 1..75: mol_type = other DNA
cggcaacaccagcagctcctgcacaacctgggctgttgagccgcttcttcggcgcactgaaagcgctgttcagcg

SEQ ID NO: 563339 - DNA, 75 bp, synthetic construct
  source 1..75: mol_type = other DNA
tgctgccatgctgccgggttttcagcagcttcacacctccgtggaagggctgaaactgattgccgattacgaagg

SEQ ID NO: 563340 - DNA, 75 bp, synthetic construct
  source 1..75: mol_type = other DNA
ttggtaatacgtcgggcgtcattcccggcaaaactattacggaacgacaggcagcagaagggctgctctccaacg

SEQ ID NO: 563341 - DNA, 75 bp, synthetic construct
  source 1..75: mol_type = other DNA
gccttgtcggggttgtgctggctattgctgccacgctgccgggttttcagcagcttcacacctccgtggagggac

SEQ ID NO: 563342 - DNA, 75 bp, synthetic construct
  source 1..75: mol_type = other DNA
atgaatccatcagtcgttaaacgctgccttgtcggggctgtgctggctattgctaccacgctgccgggttttcag

SEQ ID NO: 563343 - DNA, 75 bp, synthetic construct
  source 1..75: mol_type = other DNA
gcattggtaatacgtcgggcgtcattcccggcaaaattattacggaacgacaggcagctgaagggctgatctcca

SEQ ID NO: 563344 - DNA, 75 bp, synthetic construct
  source 1..75: mol_type = other DNA
cgtatcagcgacagttgaaagcctgggtgatgcagttaatcaatttgccgcgaatatgcgtaatgagatcggcaa

SEQ ID NO: 563345 - DNA, 75 bp, synthetic construct
  source 1..75: mol_type = other DNA
tgctgccacgctgccgggttttcagcagtttcacacctccgtggaagggctgaaactgattgccgattacgaagg

SEQ ID NO: 563346 - DNA, 75 bp, synthetic construct
  source 1..75: mol_type = other DNA
tatatcaagcgtcatcagtggtggcaggcatgcgaccagcttacccgctgggtgtacgtcaacgggcagcgtaat

SEQ ID NO: 563347 - DNA, 75 bp, synthetic construct
  source 1..75: mol_type = other DNA
tttgcagcttcaggaaatggcccgcagcagcaaagtagtaatcatcaaaatcatcctgaatacgacgattcaatt

SEQ ID NO: 563348 - DNA, 75 bp, synthetic construct
  source 1..75: mol_type = other DNA
ctgggtgtatgtaaaaggtgtgtttaatcaggggctggataaccgccgagcgcgggagatggcctggtgccttaa

SEQ ID NO: 563349 - DNA, 75 bp, synthetic construct
  source 1..75: mol_type = other DNA
aaaggtgtgtttaatcaggggctggataaccgccgtgcgcgggagatggcctggtgtttacagggagcaaactga

SEQ ID NO: 563350 - DNA, 75 bp, synthetic construct
  source 1..75: mol_type = other DNA
cagaaggtgtatgacgctacggtgtcgtttgccttcaacgtgggaactagcaatgcctgcagctccacgctggtg

SEQ ID NO: 563351 - DNA, 75 bp, synthetic construct
  source 1..75: mol_type = other DNA
gaaaggtgtgtgaagcaacagccgccgcagaaggtgtatgactcggtggtgtcgtttgccttcaacgtgggaacg

SEQ ID NO: 563352 - DNA, 75 bp, synthetic construct
  source 1..75: mol_type = other DNA
gctttctgccacgcctggcattcactgaatggttatgccgcagcacagggcgttatggtgtggctacccgacctt

SEQ ID NO: 563353 - DNA, 75 bp, synthetic construct
  source 1..75: mol_type = other DNA
ctggtagattttactggttgtgaccttgcaagcggcgtcgtagatgggctttctactaaattaccattagataat

SEQ ID NO: 563354 - DNA, 75 bp, synthetic construct
  source 1..75: mol_type = other DNA
ttatgccatccgctccggtacgattaaaagttataccatcactgagcaaggcgacgagcaaatcactggtttcca

SEQ ID NO: 563355 - DNA, 75 bp, synthetic construct
  source 1..75: mol_type = other DNA
tatcgacagcaccgaagcgttaactgccatcgacatcaactccgcacgcgcgacccgcggcggcgatatcgaaga

SEQ ID NO: 563356 - DNA, 75 bp, synthetic construct
  source 1..75: mol_type = other DNA
aaccattgaaaatgggaaagtaatttactcaaaacatctgttggataatgaattcgttggttgcatggatacatt

SEQ ID NO: 563357 - DNA, 75 bp, synthetic construct
  source 1..75: mol_type = other DNA
agatccataactcagggcgtcgttcacgtgaaattgtgattggtatcgataatacttatccgacaattatttttg

SEQ ID NO: 563358 - DNA, 75 bp, synthetic construct
  source 1..75: mol_type = other DNA
attgatgatatcatcaacgtggctattttagaaacttcttatctacaaataaaaaaaccaataatgatgatagtg

SEQ ID NO: 563359 - DNA, 75 bp, synthetic construct
  source 1..75: mol_type = other DNA
attcaagaactctctctgataaggtctccgctccaacgccaggtagccttttcgaaactactccagaaccaatac

SEQ ID NO: 563360 - DNA, 75 bp, synthetic construct
  source 1..75: mol_type = other DNA
aagatgtgtgaagcaacagccgccacaaaaggtgtatgactcggtggtgtcgtttgccttcaacgtggggacagg

SEQ ID NO: 563361 - DNA, 75 bp, synthetic construct
  source 1..75: mol_type = other DNA
ccaggttgacgcaatgaaatttgtccgctgccggaaggtaaaaagagggcgattgtttatcaaggtacgcgaacg

SEQ ID NO: 563362 - DNA, 75 bp, synthetic construct
  source 1..75: mol_type = other DNA
ttaccgacattcacgaggttttcactatatcagcgaagtggggaaggaataccgggaacaagtaaaagacatcat

SEQ ID NO: 563363 - DNA, 75 bp, synthetic construct
  source 1..75: mol_type = other DNA
tttatgccgcgccgcctgataaccggaccagggatcttgataatatccctaaatgcctatttgacagccttactt

SEQ ID NO: 563364 - DNA, 75 bp, synthetic construct
  source 1..75: mol_type = other DNA
tccctggactatgaccggtggttgctggaactggatccgaaagagcggaaccgtcgtcatcattttggtgagccg

SEQ ID NO: 563365 - DNA, 75 bp, synthetic construct
  source 1..75: mol_type = other DNA
gtatctgtacccctggatccccgatttgctggagtcaggactggggcgtccacagattacagcactcctcgccct

SEQ ID NO: 563366 - DNA, 75 bp, synthetic construct
  source 1..75: mol_type = other DNA
gcatgccgggaagttactccgtctgcttggggtgttgcgtcgtctgcgggggctgcagcgccaggtggaagaaga

SEQ ID NO: 563367 - DNA, 75 bp, synthetic construct
  source 1..75: mol_type = other DNA
ggatccccgggagcgtaatcgacgtcaccattttggtgaacccgaaccggtactcatgccggcggacagcccccc

SEQ ID NO: 563368 - DNA, 75 bp, synthetic construct
  source 1..75: mol_type = other DNA
ttggcgatcaactcccgcaccgggcgtacgcaaaaccattttcatattcatatctcttgtattcgtcctgatgtg

SEQ ID NO: 563369 - DNA, 75 bp, synthetic construct
  source 1..75: mol_type = other DNA
tccgtgacagtggcacagggcagcccggtgcaccggtatcccgtacccggtctgaggcaccggagtgtctgccgg

SEQ ID NO: 563370 - DNA, 75 bp, synthetic construct
  source 1..75: mol_type = other DNA
agcggttacggaggaatggccgcagcaagatgaaaatttacgggtaccgccagaggacaataaagaggcaccttt

SEQ ID NO: 563371 - DNA, 75 bp, synthetic construct
  source 1..75: mol_type = other DNA
gggctatctgcgatggttgtttaacaaccttgacagcatgagcccggaactgcgtttaacattaaaacattatct

SEQ ID NO: 563372 - DNA, 75 bp, synthetic construct
  source 1..75: mol_type = other DNA
catcgtattactgaatccatggtcgccgacaaaccgtggattgaggacgtgatcccacactattacggtagtgaa

SEQ ID NO: 563373 - DNA, 75 bp, synthetic construct
  source 1..75: mol_type = other DNA
acagggaaagcgaactgtctgcgggattcggcgcggcagaggcgaattgttctccggtcatggcatttcttgtca

SEQ ID NO: 563374 - DNA, 75 bp, synthetic construct
  source 1..75: mol_type = other DNA
ccgcagacagtgatgcgatgccagagcctgtgactcacggtacgtcggcagtgacggtggagaaggacagcggaa

SEQ ID NO: 563375 - DNA, 75 bp, synthetic construct
  source 1..75: mol_type = other DNA
aagtccgtggcgatttgtcctttattgaaaaggccagggggatccataaggcgcggattatctatgaagaacaac

SEQ ID NO: 563376 - DNA, 75 bp, synthetic construct
  source 1..75: mol_type = other DNA
agcgtcatgccggcggctgaaatgcccatggtcctgacgctcgaccagttaagcccgaatcctgataatccgcga

SEQ ID NO: 563377 - DNA, 75 bp, synthetic construct
  source 1..75: mol_type = other DNA
gaaaatccgcgaaaaaatgctgctcggtgtctttgtgctggcgctactgggctggattttggctttgttgaataa

SEQ ID NO: 563378 - DNA, 75 bp, synthetic construct
  source 1..75: mol_type = other DNA
tggtcaccccactggtgatttataccatgtatccgccagaaattaagaaggtggataataaaaccatcgctaaag

SEQ ID NO: 563379 - DNA, 75 bp, synthetic construct
  source 1..75: mol_type = other DNA
gagaatacgccgcttgagttaaaagccgttgatgcgccagttgttcaaacgcgagccgatgccagtgtggtcgag

SEQ ID NO: 563380 - DNA, 75 bp, synthetic construct
  source 1..75: mol_type = other DNA
tgacgcgcatcatgacgatggctgttgaagatcaccaaccgccgctggtacgcggtcgtcgtgtgaagctgaaat

SEQ ID NO: 563381 - DNA, 75 bp, synthetic construct
  source 1..75: mol_type = other DNA
gttactcttccggtacaacctggctggtgttctctgcgttcaccttaagcgccgcgtttgttaccaccggcttag

SEQ ID NO: 563382 - DNA, 75 bp, synthetic construct
  source 1..75: mol_type = other DNA
atcaagcctttcccggaacctgtcgtactgttaattgccgttgctgcctcaatggtggtggtcggtaacttatcc

SEQ ID NO: 563383 - DNA, 75 bp, synthetic construct
  source 1..75: mol_type = other DNA
atgaataatttaccggtcgttcgttctccctggcggattgtgattttgctgctgggtttcacctttctctatgcg

SEQ ID NO: 563384 - DNA, 75 bp, synthetic construct
  source 1..75: mol_type = other DNA
tgtctccggccccggagccaccacattgccgatgctggttttctctagcgtacggatgggagtgaatccagaaat

SEQ ID NO: 563385 - DNA, 75 bp, synthetic construct
  source 1..75: mol_type = other DNA
atggtcattaattacaagcagttacgagaaaaacgagagcaggtaaaggaaagttttcgccgcaatgaagatctg

SEQ ID NO: 563386 - DNA, 75 bp, synthetic construct
  source 1..75: mol_type = other DNA
cttctggcacggtttatcaccgatgagaatacgccgcttgagttaaaagccgttgatgcgccagttgttcaaacg

SEQ ID NO: 563387 - DNA, 75 bp, synthetic construct
  source 1..75: mol_type = other DNA
ctgaaacctgggttacccgtaaaccgaccagcgatggctacgtaaccagtctggaattgtttgcccatgatggta

SEQ ID NO: 563388 - DNA, 75 bp, synthetic construct
  source 1..75: mol_type = other DNA
agttaaaagaacaaaatcccggaaagtacgcgcgtgacatcgcaggcttaatgaatatcagtgaagctgaactgg

SEQ ID NO: 563389 - DNA, 75 bp, synthetic construct
  source 1..75: mol_type = other DNA
tgagattgcctctgttgatgtcattgacggaaaaatcgtcaaccccatgagccacctggtgcgccccgatcgtcc

SEQ ID NO: 563390 - DNA, 75 bp, synthetic construct
  source 1..75: mol_type = other DNA
agaaagtgccggagctgtttattgtcgagttgccgaaagatgaagctggctggaaagcggcaggtgaagtgccgt

SEQ ID NO: 563391 - DNA, 75 bp, synthetic construct
  source 1..75: mol_type = other DNA
tgattcttcattaactgatacatattttgaagctgtcaaacaaatatcacctaatgaagtaggtatgcctgtcat

SEQ ID NO: 563392 - DNA, 75 bp, synthetic construct
  source 1..75: mol_type = other DNA
ggctattccggcagtagcggcggccaccaccgcacattcactgttccctccgcaaccgggtccggtggcgctggt

SEQ ID NO: 563393 - DNA, 75 bp, synthetic construct
  source 1..75: mol_type = other DNA
tatgtgactcaacccgtattcgtgaacgtcatatagggaaaagacaggagctgttgctggtggcgtatcaggcgc

SEQ ID NO: 563394 - DNA, 75 bp, synthetic construct
  source 1..75: mol_type = other DNA
ctaaagtcgtcaatggctttaaagaaaccttcaaagttcgtccgcaggcaaccgccggtgtatcctggcataatg

SEQ ID NO: 563395 - DNA, 75 bp, synthetic construct
  source 1..75: mol_type = other DNA
ggattgcttgtgcccatgcgcaaagcggcgaggttgagtatttaaccgaaaaccacgccaatccaccttctgcgg

SEQ ID NO: 563396 - DNA, 75 bp, synthetic construct
  source 1..75: mol_type = other DNA
tggcgattctgttgcaggcgctgccgctgtttgctctgactatcatcatcgggctgattgatgggttggtaagac

SEQ ID NO: 563397 - DNA, 75 bp, synthetic construct
  source 1..75: mol_type = other DNA
tgattagccatcgtactaaccctgagtgttacccatcgtttgaggtaacaacatgccgcacagaatataattttg

SEQ ID NO: 563398 - DNA, 75 bp, synthetic construct
  source 1..75: mol_type = other DNA
gaggatgcggcgaaagagattgactttaaccgtgataatgattattcgcgtgattatcgcaatatggcgcaagct

SEQ ID NO: 563399 - DNA, 75 bp, synthetic construct
  source 1..75: mol_type = other DNA
ccagcatcaccagtatcaggtctgggtgctgtctgcaaagactatgaagaaaacgcaatggcagcagaaaagaaa

SEQ ID NO: 563400 - DNA, 75 bp, synthetic construct
  source 1..75: mol_type = other DNA
aagggcagaagtgccagcgacatgatgacgggaatgcccaaatcggcccctaactattatctgctcttcaaaaca

SEQ ID NO: 563401 - DNA, 75 bp, synthetic construct
  source 1..75: mol_type = other DNA
ccaaaacagcccctaactattaccttttatttaaaacctctgatacgagttactgcggcggtatggtctggctgg

SEQ ID NO: 563402 - DNA, 75 bp, synthetic construct
  source 1..75: mol_type = other DNA
ctgaagttcatcggcagaacagtcagcagctgccgcgcgcaaatgcgcccgaatataataaatccggagatgagc

SEQ ID NO: 563403 - DNA, 75 bp, synthetic construct
  source 1..75: mol_type = other DNA
ggtgttaactgtacaggctcctgcagctggaaaatctacgttaaaaaaggtctggtaacctgggaaacccaacag

SEQ ID NO: 563404 - DNA, 75 bp, synthetic construct
  source 1..75: mol_type = other DNA
cggcgattgaaggcaagctcgacctgctggtgacgctcgatttccgtatgtccagcacctgtctgttctccgata

SEQ ID NO: 563405 - DNA, 75 bp, synthetic construct
  source 1..75: mol_type = other DNA
ctgcccgcgtggcgcaagttactcctggtatctctacagcgcgaaccgcctgaaatacccgctcattcgtaaacg

SEQ ID NO: 563406 - DNA, 75 bp, synthetic construct
  source 1..75: mol_type = other DNA
ggtgttaactgtacaggctcctgcagctggaaaatctacgttaaaaagggtctggtgacctgggaaagccaacag

SEQ ID NO: 563407 - DNA, 75 bp, synthetic construct
  source 1..75: mol_type = other DNA
ggtgttaactgtacaggctcctgcagctggaaaatctacgttaaaaacggtctggtaacctgggaaaaccaacag

SEQ ID NO: 563408 - DNA, 75 bp, synthetic construct
  source 1..75: mol_type = other DNA
ggtgttaactgtacaggctcctgcagctggaaaatctacgttaaaaaaggtctggtcacctgggaaaaccaacag

SEQ ID NO: 563409 - DNA, 75 bp, synthetic construct
  source 1..75: mol_type = other DNA
caagtgcgtggacgcggtggctttatccgctccaactggcaggagctaaatcagctgattgccgccgctaacgtc

SEQ ID NO: 563410 - DNA, 75 bp, synthetic construct
  source 1..75: mol_type = other DNA
tgaaatacccgctcattcgtaaacgactgattgaactgtggcgcgaagccctcaagcaacacagcgatccggtac

SEQ ID NO: 563411 - DNA, 75 bp, synthetic construct
  source 1..75: mol_type = other DNA
gaatatttccatgaacggctccgcgtacatcgactgaacagtcagcagctgccgcgcgcaaatgcgcccgaatat

SEQ ID NO: 563412 - DNA, 75 bp, synthetic construct
  source 1..75: mol_type = other DNA
atattgtggcggtggagcgcgactaccctgctacctatgaacgctttacctcgctcgggccattgatggacaaac

SEQ ID NO: 563413 - DNA, 75 bp, synthetic construct
  source 1..75: mol_type = other DNA
ccagaagaagtcgagtggcaaactgcggcgattgaaggcaagctcgatctgctggtgacgctcgacttccgcatg

SEQ ID NO: 563414 - DNA, 75 bp, synthetic construct
  source 1..75: mol_type = other DNA
acgcatggcctgcgaacagccggacaacggcagcaaccatccgcgtaacctgtttgtctggcgttcaaacctgct

SEQ ID NO: 563415 - DNA, 75 bp, synthetic construct
  source 1..75: mol_type = other DNA
ggaaactaatgaaacgcaggagtacggctttggactgcgttttgatgacctgatgttgcctaatgatgccctgga

SEQ ID NO: 563416 - DNA, 75 bp, synthetic construct
  source 1..75: mol_type = other DNA
ttaccctgcttggcggaacccgctatgacagttatcgcggtagcagcgacggctacaaagatgttgatgccgaca

SEQ ID NO: 563417 - DNA, 75 bp, synthetic construct
  source 1..75: mol_type = other DNA
cgatctgctgcgtcatgttcctggaattactcttgatggtaccggacgaaccaacggtcaggatgtaaatatgcg

SEQ ID NO: 563418 - DNA, 75 bp, synthetic construct
  source 1..75: mol_type = other DNA
atcaacttcgacctggtaatggctacggcgctgattaactttggtgcgttggtggcgttcaccttcgttaacctg

SEQ ID NO: 563419 - DNA, 75 bp, synthetic construct
  source 1..75: mol_type = other DNA
cgatgcggatcgcgtgctttatatcggcataaccctgcgactgaaagatgaagctacccgctcgcggctgagtga

SEQ ID NO: 563420 - DNA, 75 bp, synthetic construct
  source 1..75: mol_type = other DNA
aaagagtactggtcgccgcagggtatcccgcaggatggtcgtaacggaaaaattttcgtgagttatcaatggtaa

SEQ ID NO: 563421 - DNA, 75 bp, synthetic construct
  source 1..75: mol_type = other DNA
gagcttgatcagtggatggaaagccggatttatccggggatgattgcgatcccggcactggctggactgattacc

SEQ ID NO: 563422 - DNA, 75 bp, synthetic construct
  source 1..75: mol_type = other DNA
ggctattccggcagtagcagcagctaccaccgcgcattcgctgttcccaccgcaaccgggtccggtggcactggt

SEQ ID NO: 563423 - DNA, 75 bp, synthetic construct
  source 1..75: mol_type = other DNA
gcagtgctggatgcactcgagcagcatgaacacggggcgacgctgtttgatggtcgccccgttgtttttgacgaa

SEQ ID NO: 563424 - DNA, 75 bp, synthetic construct
  source 1..75: mol_type = other DNA
tcccggcactggcagacctgattaccacgatggttacgcagggctatgagtatcgtcgtgatgacgatatggcgt

SEQ ID NO: 563425 - DNA, 75 bp, synthetic construct
  source 1..75: mol_type = other DNA
tcgcttactgtggcgtctgccattccgatatccaccaggtccgttccgagtgggcggggacggtttacccctgcg

SEQ ID NO: 563426 - DNA, 75 bp, synthetic construct
  source 1..75: mol_type = other DNA
tgacggcgtgttcccgaaaagcttcttcggttatgttcacccgaaatggcgtactccggcgatgaacatcatcct

SEQ ID NO: 563427 - DNA, 75 bp, synthetic construct
  source 1..75: mol_type = other DNA
aacattctgacagaagaaaatattttgctttattagcagtggttttatttattgcgttttcaggagcctatgcct

SEQ ID NO: 563428 - DNA, 75 bp, synthetic construct
  source 1..75: mol_type = other DNA
gaatgccgctatccaggcttataaagcgaataaagctttagtaatgaacacaccattaaaccgtcagccacaagt

SEQ ID NO: 563429 - DNA, 75 bp, synthetic construct
  source 1..75: mol_type = other DNA
ggatcaatatgggaaccggcaatgcgttctccttattacctgcacaaaatgcgacagggaactggatcaaaatcg

SEQ ID NO: 563430 - DNA, 75 bp, synthetic construct
  source 1..75: mol_type = other DNA
ccaacatgggaaggaggtgttccggaagaaaattattgctcaattagtatcctgacagcaaaggatatagttgaa

SEQ ID NO: 563431 - DNA, 75 bp, synthetic construct
  source 1..75: mol_type = other DNA
atgattgcatttaatattcctgatatttacggacgctttcacctggtgaatttcgataacgtgaaggtgatttca

SEQ ID NO: 563432 - DNA, 75 bp, synthetic construct
  source 1..75: mol_type = other DNA
aaggtgatttcactggccgaaaataaagaatgtggcgatttactttttgaatttaatgaccgcacacgaatggtg

SEQ ID NO: 563433 - DNA, 75 bp, synthetic construct
  source 1..75: mol_type = other DNA
gaagacggcagctacgaggtgtggtggtacagcacgaaagtgggggggatcgacctgaagaaaaagtcgatcacc

SEQ ID NO: 563434 - DNA, 75 bp, synthetic construct
  source 1..75: mol_type = other DNA
tcgcggtttatctgacggatgcagagtataccggtgaagagctggatgcagatacctggcgggccacactgcata

SEQ ID NO: 563435 - DNA, 75 bp, synthetic construct
  source 1..75: mol_type = other DNA
cgtatttgaaggtgaaggcgctggtacgctggcgagcactcgtccgttctggtctggcgatgcgcatgttatccc

SEQ ID NO: 563436 - DNA, 75 bp, synthetic construct
  source 1..75: mol_type = other DNA
gatccgaaaaagagcgattttgaagaatgtacccagatagcaactcgctattggcaagctatttataatgtaatg

SEQ ID NO: 563437 - DNA, 75 bp, synthetic construct
  source 1..75: mol_type = other DNA
ctgcacttaaaacttttaactggcgcagaaacaacccggatctcgtcaaacgtgcgatgcagcacggcaaactga

SEQ ID NO: 563438 - DNA, 75 bp, synthetic construct
  source 1..75: mol_type = other DNA
tacctggatttgaaggtgtttatgccgtaacagaagatggcagggtgtattctcactcacgtgttgttaaggctg

SEQ ID NO: 563439 - DNA, 75 bp, synthetic construct
  source 1..75: mol_type = other DNA
atgcatgtgcttaacattctttgggtagtattcggtatcggtctgatgctggtactgaatttgaagttcaaaatc

SEQ ID NO: 563440 - DNA, 75 bp, synthetic construct
  source 1..75: mol_type = other DNA
aagcgatatcgctaccgtagtgcaggcgcaaaaagccggaaaaccgctggtggtagaagcctgggatcgcaccaa

SEQ ID NO: 563441 - DNA, 75 bp, synthetic construct
  source 1..75: mol_type = other DNA
atgaaaggcagttataaatcccgttgggtaatcgtaatcgtggtggttatcgccgccatcgccgcattctggttc

SEQ ID NO: 563442 - DNA, 75 bp, synthetic construct
  source 1..75: mol_type = other DNA
ggctggctggtggtgccctgacgggtgccagtgtttatggactgctgaccggaactgattacggcgttgtatttg

SEQ ID NO: 563443 - DNA, 75 bp, synthetic construct
  source 1..75: mol_type = other DNA
tggctcccgtgcaggcagcaactgccgttgaacaggcagttccgcgttatctcaccgggcttggcaccattaccg

SEQ ID NO: 563444 - DNA, 75 bp, synthetic construct
  source 1..75: mol_type = other DNA
ccaacaagcgctggtcagtgaaaccgaaggcaccattaaggctgatgaagcaagcgtcgccagcgcgcagttgca

SEQ ID NO: 563445 - DNA, 75 bp, synthetic construct
  source 1..75: mol_type = other DNA
ctgttaagcctcgataaccaaatcgatgccactaccggtacgattaaagtgaaagcacgctttaataatcaggat

SEQ ID NO: 563446 - DNA, 75 bp, synthetic construct
  source 1..75: mol_type = other DNA
tcgacccgcaaagtctgccgatcaaactggcgattgtgggtcgtccgaacgtaggtaagtctacactcactaacc

SEQ ID NO: 563447 - DNA, 75 bp, synthetic construct
  source 1..75: mol_type = other DNA
atgcccacgccggtggttacaacccgccgattgtggtgattcacggcaaccaggtgaaagacctgcctgattcgt

SEQ ID NO: 563448 - DNA, 75 bp, synthetic construct
  source 1..75: mol_type = other DNA
caagcgtaacaccctgacgccgacccagatgcgtaagcgcaagcgtctgatgaagcacatcaaaaaaaataagta

SEQ ID NO: 563449 - DNA, 75 bp, synthetic construct
  source 1..75: mol_type = other DNA
tgagagaaaacaggatgactggagcctatatggctatggcaccaggacaaataaaaacggatatagcctttacac

SEQ ID NO: 563450 - DNA, 75 bp, synthetic construct
  source 1..75: mol_type = other DNA
acgggctgggcatggaggtggtagccgagggtgtggaaacacccgactgccttgcgtggttgcggcaggcgggtt

SEQ ID NO: 563451 - DNA, 75 bp, synthetic construct
  source 1..75: mol_type = other DNA
caggatctctccctgctgggctttattctcaatagtgggcgctcacttgtcattgtagtgaacaagtgggacggc

SEQ ID NO: 563452 - DNA, 75 bp, synthetic construct
  source 1..75: mol_type = other DNA
aaggagcgaaagtggaagtggtggaagcccagagcgccacctcgccggaagagaaagccaccagccgtgaatacg

SEQ ID NO: 563453 - DNA, 75 bp, synthetic construct
  source 1..75: mol_type = other DNA
tgactatccccagcgtaatctgcgctggcctgatcctgccgaagttcctcggtaatcttgaacgcccaacgccgt

SEQ ID NO: 563454 - DNA, 75 bp, synthetic construct
  source 1..75: mol_type = other DNA
gatggatattacccggcgtgaaccgggaccgcatgatgtcaaaattgaaatcgcttactgtggcgtctgccattc

SEQ ID NO: 563455 - DNA, 75 bp, synthetic construct
  source 1..75: mol_type = other DNA
cgcagccgggtccggtggcgctggtgaatgcttatggcgcagatatggggatggtttatatctatggcgtactgg

SEQ ID NO: 563456 - DNA, 75 bp, synthetic construct
  source 1..75: mol_type = other DNA
ggcatttccattcttgtgccgttgatcccggcgatcattatgatctccaccaccatcgctaatatttggttagta

SEQ ID NO: 563457 - DNA, 75 bp, synthetic construct
  source 1..75: mol_type = other DNA
ttaactttatcggttcctcgccgattgcaatgtttattgcgatggtggttgcattcgtactctttggcaccgcgc

SEQ ID NO: 563458 - DNA, 75 bp, synthetic construct
  source 1..75: mol_type = other DNA
gcaggttgtcgatgatgccccggaggtcaatcatcgtgattggcagcttaagtgggatgaactggtttccaaata

SEQ ID NO: 563459 - DNA, 75 bp, synthetic construct
  source 1..75: mol_type = other DNA
tctacttattcccaggtgttgagcttactgttcaggggaatatccatattctggccattttcggcgaagacaaga

SEQ ID NO: 563460 - DNA, 75 bp, synthetic construct
  source 1..75: mol_type = other DNA
tatcaacaactggcaaaaaccaatctcgtttcccgtcaggaactggatgcccaacaggcgctggtcagtgaaacc

SEQ ID NO: 563461 - DNA, 75 bp, synthetic construct
  source 1..75: mol_type = other DNA
gcggtctggggcatatggggataaagctggcccactcgatgggggcgcatgtagtggcgtttaccacgtctgagt

SEQ ID NO: 563462 - DNA, 75 bp, synthetic construct
  source 1..75: mol_type = other DNA
tgcccgggctatctggatggcggttcagcagcctggtaaagaaattgccgtaaaaacagaagaacagcagtcagt

SEQ ID NO: 563463 - DNA, 75 bp, synthetic construct
  source 1..75: mol_type = other DNA
tgagatatgccgagtgatggaaggtggcaaagaggcctttacccaaagatataaacgaatcaatgcagcaatcaa

SEQ ID NO: 563464 - DNA, 75 bp, synthetic construct
  source 1..75: mol_type = other DNA
ttcacgacccactctgacggtttctaacctggacggtatggtcaccggaatggcggaagatgtgcagagtctggt

SEQ ID NO: 563465 - DNA, 75 bp, synthetic construct
  source 1..75: mol_type = other DNA
ttcacgacccacactgacggtttctaacctggacggtatggtcaccggaatggcggaagatttgcagagtctggt

SEQ ID NO: 563466 - DNA, 75 bp, synthetic construct
  source 1..75: mol_type = other DNA
ttcacgacctacactgacggtttctaacctggacggtatggtcaccggaatggcggaagatctgcagagtctggt

SEQ ID NO: 563467 - DNA, 75 bp, synthetic construct
  source 1..75: mol_type = other DNA
tggcaggggcggaagtaccaggcatacccgattgacggcagcggctttgagatgaacgggaaagggagcagtgcc

SEQ ID NO: 563468 - DNA, 75 bp, synthetic construct
  source 1..75: mol_type = other DNA
tttgtggctattacaaatggaatgatgttataccttgcgattcctgatagtttcagaaaggattcaaaaataata

SEQ ID NO: 563469 - DNA, 75 bp, synthetic construct
  source 1..75: mol_type = other DNA
ttcacgaccgactctgacggtttctaacctggacggtatggtcaccggaatggcggaagatctgcagagtctggt

SEQ ID NO: 563470 - DNA, 75 bp, synthetic construct
  source 1..75: mol_type = other DNA
ggtgtataccatagatataaatcgttataatctctcagctatagcctcagtaataggactgttcaaaaaagagtc

SEQ ID NO: 563471 - DNA, 75 bp, synthetic construct
  source 1..75: mol_type = other DNA
acgcccgttttctggatgcggtgaatttcgcaaacggaaacagcgaagccgatccggagcaggagattatcagcc

SEQ ID NO: 563472 - DNA, 75 bp, synthetic construct
  source 1..75: mol_type = other DNA
ttgcaggcagataaagttgatatccgagatgccggatttgatatatgttttagtggcgtaatgggttttatcctt

SEQ ID NO: 563473 - DNA, 75 bp, synthetic construct
  source 1..75: mol_type = other DNA
tggcaggggcggcagtatcaggcctatcccattcagggaagcggatttgagatgaacggcaaaggagccagtgca

SEQ ID NO: 563474 - DNA, 75 bp, synthetic construct
  source 1..75: mol_type = other DNA
gattgcctttgcagactgcgttattgttccttcaaaagactccctgactgaacgtattggtttgatgcattttga

SEQ ID NO: 563475 - DNA, 75 bp, synthetic construct
  source 1..75: mol_type = other DNA
gccgctgatgacttccgcacaaggcatccttccggccatggcggtttatgctggcgggattctggtggcatgggt

SEQ ID NO: 563476 - DNA, 75 bp, synthetic construct
  source 1..75: mol_type = other DNA
atgcaggatattcatgaagaaagcctgatcgagtcggttaaatcggagcagtcaccgcgggtggtgctctgggaa

SEQ ID NO: 563477 - DNA, 75 bp, synthetic construct
  source 1..75: mol_type = other DNA
taccggggagatgaatgcgggtataacggtcctgcggtggcggatgagttcgacaaccccaccacggatatccgt

SEQ ID NO: 563478 - DNA, 75 bp, synthetic construct
  source 1..75: mol_type = other DNA
gctgacagccatgacggcctcgtttgtgctggcgacaccgaccgagacggaaggggcgctgtttcccggtcgaat

SEQ ID NO: 563479 - DNA, 75 bp, synthetic construct
  source 1..75: mol_type = other DNA
gctgacagccatgacggcctcgtttgtgctggccacaccgaccgagacggagggggcgctgtttcccggtcggat

SEQ ID NO: 563480 - DNA, 75 bp, synthetic construct
  source 1..75: mol_type = other DNA
gagcaggagctgacggaccggtgggtggtggagcagatgtcagcgctgacagccatgacggcctcgtttgtgctg

SEQ ID NO: 563481 - DNA, 75 bp, synthetic construct
  source 1..75: mol_type = other DNA
tgaatgagtgtacaaaagcggagcaatccgcgctgatcgtgctctgggaagtcgatctgacagaggtcggcggag

SEQ ID NO: 563482 - DNA, 75 bp, synthetic construct
  source 1..75: mol_type = other DNA
tgagcgagtcggttaaatcagagcagtcaccgcgggtggtactctgggaaatcgacctgacggtacagggcggtg

SEQ ID NO: 563483 - DNA, 75 bp, synthetic construct
  source 1..75: mol_type = other DNA
tgttcggtctggtcaccgggatggctgaagacctgcagagcctggtgggtgccacggtggtccgccgccgggtgt

SEQ ID NO: 563484 - DNA, 75 bp, synthetic construct
  source 1..75: mol_type = other DNA
tggttgctggctataaccgcggctttttgcgtgaggaattcgtgactatgtgctttataaaattcgatttacgga

SEQ ID NO: 563485 - DNA, 75 bp, synthetic construct
  source 1..75: mol_type = other DNA
ctgccggaaagtgaagctcccgccgtgacggaagaaaacagtgataacgacatggcgatgaatgccgacccggtt

SEQ ID NO: 563486 - DNA, 75 bp, synthetic construct
  source 1..75: mol_type = other DNA
tggagacacagaaactaaaggatgtactctctgtagagggggttaatatcccgccattattacaggtcataaagc

SEQ ID NO: 563487 - DNA, 75 bp, synthetic construct
  source 1..75: mol_type = other DNA
gtgtctctgcatcatggtaagccatcctagccatctctatgtgacaacggattacatcgttacgcacaatacgga

SEQ ID NO: 563488 - DNA, 75 bp, synthetic construct
  source 1..75: mol_type = other DNA
aaaggaacagaaccctcttttaaaatagcctgccttatctcagataaagagcaggtgagtttaaattggctcgct

SEQ ID NO: 563489 - DNA, 75 bp, synthetic construct
  source 1..75: mol_type = other DNA
atgacggtaatcgtatacggaaaatcaacatttgcaggaaatgccaaaactcgccgtcatgagcggcgcagaaag

SEQ ID NO: 563490 - DNA, 75 bp, synthetic construct
  source 1..75: mol_type = other DNA
acatatgtacgttttaacagcgggttaaatttattggggtggcaactgcattctgatgccagtttcagtaaaaca

SEQ ID NO: 563491 - DNA, 75 bp, synthetic construct
  source 1..75: mol_type = other DNA
tgcggcgggtcgtagccatattgaaggggcgagcaaacaaagtgattttgtccaggcgggttatcagtatggttt

SEQ ID NO: 563492 - DNA, 75 bp, synthetic construct
  source 1..75: mol_type = other DNA
gtggctaccgttactgttcattgtccgcgctgtcattccgatgaagtttatcgacatggtcgtagttgttcccgg

SEQ ID NO: 563493 - DNA, 75 bp, synthetic construct
  source 1..75: mol_type = other DNA
tgcagatagcgataatattgttatccatagttcagttgggtatccggttgctaaatacaaaaatacggggattag

SEQ ID NO: 563494 - DNA, 75 bp, synthetic construct
  source 1..75: mol_type = other DNA
gatgatgcccccggcacaccagctcagccattaacaccgctggtagcagaagcccagagtaaagcggaagtcatc

SEQ ID NO: 563495 - DNA, 75 bp, synthetic construct
  source 1..75: mol_type = other DNA
gacgatacgcttctggttcccgtctctttacaagggcgcgtaacaggcaacagcggcgttgatattttcgcctaa

SEQ ID NO: 563496 - DNA, 75 bp, synthetic construct
  source 1..75: mol_type = other DNA
gcagcatcactcggaagccttcgctgcaagaaggcagatgaatgcagtggaagtatttgcctgccaaacgtagct

SEQ ID NO: 563497 - DNA, 75 bp, synthetic construct
  source 1..75: mol_type = other DNA
gctgacggccatgacagcctcgtttgtgctggcaacaccgacggaaacggacggcgctgtttttccgggacgtat

SEQ ID NO: 563498 - DNA, 75 bp, synthetic construct
  source 1..75: mol_type = other DNA
gcgctgtttcccggtcgcatcatgctggcgaacacctgtatgtgggattaccggggcgatgaatgcgggtataac

SEQ ID NO: 563499 - DNA, 75 bp, synthetic construct
  source 1..75: mol_type = other DNA
cagcggtgtgcggttgtttcgtgatatgcagatgttgcctaactcgaaacaaaattttacgccacgagtgcaggg

SEQ ID NO: 563500 - DNA, 75 bp, synthetic construct
  source 1..75: mol_type = other DNA
ttagtcagtgaaaggttttcggtcacggacaatattggcgtcgacgaatatgatttttatcctgactataaccta

SEQ ID NO: 563501 - DNA, 75 bp, synthetic construct
  source 1..75: mol_type = other DNA
tgttcggtctggtcaccgggatggcggaggacctgcagagcctggtgggggccacggtggtccgccgccgggtgt

SEQ ID NO: 563502 - DNA, 75 bp, synthetic construct
  source 1..75: mol_type = other DNA
ttctcgccgtctttactctgttggcgataacccacggtattcatggcgtagcccgactgatgcaatggtttgtcc

SEQ ID NO: 563503 - DNA, 75 bp, synthetic construct
  source 1..75: mol_type = other DNA
ttaaacccgcagcgggaaaagccatccgtgacccgctcacgatgaaattactggcgtctgagggggaagaaaagc

SEQ ID NO: 563504 - DNA, 75 bp, synthetic construct
  source 1..75: mol_type = other DNA
tgttcggtcttgtcaccggtatggcggaggacctgcagagtctggtgggggccacggtagtccgccgtcgggtgt

SEQ ID NO: 563505 - DNA, 75 bp, synthetic construct
  source 1..75: mol_type = other DNA
acctggcaggggcgggaatatcaggcatacccgattgacggcagcggttttgagatgaacgggaagggcagcagt

SEQ ID NO: 563506 - DNA, 75 bp, synthetic construct
  source 1..75: mol_type = other DNA
ctgctctgttggggatgcaggccacctctgaggctgagcggatttactggctgagtcgtgaaaaggccgctgtga

SEQ ID NO: 563507 - DNA, 75 bp, synthetic construct
  source 1..75: mol_type = other DNA
aatagaattaccccctgacaaagtttattcactaaggaattattcaacagaaccattccctgttagctttgagca

SEQ ID NO: 563508 - DNA, 75 bp, synthetic construct
  source 1..75: mol_type = other DNA
atgcacccgtgcggagcagtcagccaggtggtgctctgggaaatcgatctgacagaggtcggtggtgaacgttat

SEQ ID NO: 563509 - DNA, 75 bp, synthetic construct
  source 1..75: mol_type = other DNA
atggtgccgtttttccgggccgcatcatgctggctaatacctgcacctggacctatcgcggcgatgagtgcggtt

SEQ ID NO: 563510 - DNA, 75 bp, synthetic construct
  source 1..75: mol_type = other DNA
gtggccgtctttccaaagtggatttactcccggacagcatccgggagcagttacatcagatgctgcgggaaaagc

SEQ ID NO: 563511 - DNA, 75 bp, synthetic construct
  source 1..75: mol_type = other DNA
ttcccggccgaccctgacggtttctaacctgcacggtatggtcaccgggatggcggaagagctgcagagtctggt

SEQ ID NO: 563512 - DNA, 75 bp, synthetic construct
  source 1..75: mol_type = other DNA
ttcccgaccaaccctgacggtttctaacctggacggtatggtcaccgggatggcggaagagctgcagagtctggt

SEQ ID NO: 563513 - DNA, 75 bp, synthetic construct
  source 1..75: mol_type = other DNA
gaaacggacggcgctgtttttccggggcgcatcatgcttgctaatacctgcacctggacctatcgcggtgatgag

SEQ ID NO: 563514 - DNA, 75 bp, synthetic construct
  source 1..75: mol_type = other DNA
actgagtgcggtcagtgcttcttttgtactgtccacgccgacggaaacggacggcgctgtttttccggggcgcat

SEQ ID NO: 563515 - DNA, 75 bp, synthetic construct
  source 1..75: mol_type = other DNA
cgtccgacactgacggtctctaacctgcacggcatgatcaccgggatggcggaagatctgcagagtctggtcggc

SEQ ID NO: 563516 - DNA, 75 bp, synthetic construct
  source 1..75: mol_type = other DNA
agcggtattttttctgtaatgagctgaatgaaaaaggggaggcggttacctggcaggggcggcaatatcaggcat

SEQ ID NO: 563517 - DNA, 75 bp, synthetic construct
  source 1..75: mol_type = other DNA
actggcgtattgaacagtgcagcgacctgacggcggtgacggcaacgtttgttctggcctcgccagcggagacag

SEQ ID NO: 563518 - DNA, 75 bp, synthetic construct
  source 1..75: mol_type = other DNA
tggcaggggcggcagtatcaggcctatcccattcaggggacgggatttgagatgaacggtaaaggagccagcgcc

SEQ ID NO: 563519 - DNA, 75 bp, synthetic construct
  source 1..75: mol_type = other DNA
aagggcagcagtgcctgaccgtcgctgacggtgtcgaatctgtttggtctggtcaccgggatggcggaggacctg

SEQ ID NO: 563520 - DNA, 75 bp, synthetic construct
  source 1..75: mol_type = other DNA
tgtttggtcttgtcaccggaatggcggaggatttgcagagcctggtgggggccacggtggtccgccgccgggtgt

SEQ ID NO: 563521 - DNA, 75 bp, synthetic construct
  source 1..75: mol_type = other DNA
gctgacggccatgacggcctcgtttgtgctggcaacaccgacggagacggacggggcgctgtttcccggtcgcat

SEQ ID NO: 563522 - DNA, 75 bp, synthetic construct
  source 1..75: mol_type = other DNA
cacggtggtccgccgccgggtgtatgcccgttttctggatgcggtgaattttgtggcgggcaatccggaagcgga

SEQ ID NO: 563523 - DNA, 75 bp, synthetic construct
  source 1..75: mol_type = other DNA
atcatgagacgacacgcctcactcagtcagcccaggtggtgctctgggaaatcgacctgaccgaggtaggcgggg

SEQ ID NO: 563524 - DNA, 75 bp, synthetic construct
  source 1..75: mol_type = other DNA
tgggggccacggtggtccgccgccgggtgtatgcccgttttctggatgcggtgaattttgttgcgggcaatccgg

SEQ ID NO: 563525 - DNA, 75 bp, synthetic construct
  source 1..75: mol_type = other DNA
ggctgaccgccatgacggcctcgtttgtgctggccacaccgaccgagacggacggggcgctgtttcccggtcgta

SEQ ID NO: 563526 - DNA, 75 bp, synthetic construct
  source 1..75: mol_type = other DNA
cgctgacggccatgacggcctcgtttgtgctggccacaccgaccgagacggacggggcgctgtttcccggtcgta

SEQ ID NO: 563527 - DNA, 75 bp, synthetic construct
  source 1..75: mol_type = other DNA
gatgaacgggaagggcagcagtgccagaccgtcgctgacggtgtccaatctgttcggtctggtcaccgggatggc

SEQ ID NO: 563528 - DNA, 75 bp, synthetic construct
  source 1..75: mol_type = other DNA
gactccctacaagaacagcgataagacgttacttattgactgtgggggatttgactcagatcttacccgtactgc

SEQ ID NO: 563529 - DNA, 75 bp, synthetic construct
  source 1..75: mol_type = other DNA
attgcagggcagcgcctcgccggatgcgcggattttactggcgctaccggtcgatattgatgaattagtacaacg

SEQ ID NO: 563530 - DNA, 75 bp, synthetic construct
  source 1..75: mol_type = other DNA
ctgaacgatcagcgaaaagcgatcctccccgcaccacaaggaatgcgcaaagtggtgctggcgaccaatattgct

SEQ ID NO: 563531 - DNA, 75 bp, synthetic construct
  source 1..75: mol_type = other DNA
cgtccgacactgacggtctctaacctgtacggtatggtcaccgggatggcggaagatctgcagagtctggtcggc

SEQ ID NO: 563532 - DNA, 75 bp, synthetic construct
  source 1..75: mol_type = other DNA
atcgacctgacggtgcagggcggtgagcggtattttttctgcaatgagctgaatgaaaaaagggagccggtgacc

SEQ ID NO: 563533 - DNA, 75 bp, synthetic construct
  source 1..75: mol_type = other DNA
gggatgcagcgatccggcgcagatgagctggctggatcaaccgccaacggtgaatctacaggccgcgaaacggct

SEQ ID NO: 563534 - DNA, 75 bp, synthetic construct
  source 1..75: mol_type = other DNA
gatggcggaggatttgcagagcctggtgggtgccacggtggtccgccgccgggtgtatgcgcgttttctggatgc

SEQ ID NO: 563535 - DNA, 75 bp, synthetic construct
  source 1..75: mol_type = other DNA
agcagtcaccgcgggtggtgctctgggaaatcgacctgacggtgcagggcggtgagcggtattttttctgcaatg

SEQ ID NO: 563536 - DNA, 75 bp, synthetic construct
  source 1..75: mol_type = other DNA
tctcgaagagccgccccgcatggggaatagcgacctggaagtggcgttttcccgcaatcaaccggcctggcaaca

SEQ ID NO: 563537 - DNA, 75 bp, synthetic construct
  source 1..75: mol_type = other DNA
tccgcgtttagcgacaatgttggtgagcgcgaagagcgacgacgaagcggctaccgccgcaaaaattgccgccat

SEQ ID NO: 563538 - DNA, 75 bp, synthetic construct
  source 1..75: mol_type = other DNA
caccgttattattgcagggcagcgcctcgccggatgcgcggattttactggcgctgccggtcgatattgatgaat

SEQ ID NO: 563539 - DNA, 75 bp, synthetic construct
  source 1..75: mol_type = other DNA
gattaccggggagatgaatgcgggtataacggtcctgcggtggcggatgagttcgacaaccccaccaccgatatc

SEQ ID NO: 563540 - DNA, 75 bp, synthetic construct
  source 1..75: mol_type = other DNA
gcattgaaataccaccgatttattgtacttatctggaatggttacaaaaacaagatgccagccatcttcaacgtt

SEQ ID NO: 563541 - DNA, 75 bp, synthetic construct
  source 1..75: mol_type = other DNA
gtgcagaaattggtgaggcgatggctcgggctgtcgtaaaacctgcctcccgtgcacgtaggcgtctttcgtttg

SEQ ID NO: 563542 - DNA, 75 bp, synthetic construct
  source 1..75: mol_type = other DNA
caagtttgctgatccagactggagccaacgcatagctgaaccgccccgggtttcctggagagtgttttatctgtg

SEQ ID NO: 563543 - DNA, 75 bp, synthetic construct
  source 1..75: mol_type = other DNA
ccgggcctacggggatctacaccttattctcgcttctacagcaacaaacgccactttctatttctatcttcgagc

SEQ ID NO: 563544 - DNA, 75 bp, synthetic construct
  source 1..75: mol_type = other DNA
ttgagcggactggatgcggcaatggcagtggctattcaacatggttcatttattgaagatgataaacaacatgtt

SEQ ID NO: 563545 - DNA, 75 bp, synthetic construct
  source 1..75: mol_type = other DNA
atgaaaaaaatcgccattgtgggtgcggggccaacagggatctacactctcttctcgctattacagcaaccaacg

SEQ ID NO: 563546 - DNA, 75 bp, synthetic construct
  source 1..75: mol_type = other DNA
agaggatttgcagagtctggtgggggccacggtggtccgccgccgggtgtatgcccgttttctcgatgccgtgaa

SEQ ID NO: 563547 - DNA, 75 bp, synthetic construct
  source 1..75: mol_type = other DNA
gcgcgggtgtgagatgcgcagcatggtggctaattttggcggtttcctttccattaataaactttcgcagtaaat

SEQ ID NO: 563548 - DNA, 75 bp, synthetic construct
  source 1..75: mol_type = other DNA
tcgataattatgcggcaatcccttcagagtctattcgtcgactactggccttacgtgaagcgggaatcattcata

SEQ ID NO: 563549 - DNA, 75 bp, synthetic construct
  source 1..75: mol_type = other DNA
tattgaagaagataatcaacacgttcgctttcaacgcgatagtaacagtgaaaatctgcatattacgttgatgtc

SEQ ID NO: 563550 - DNA, 75 bp, synthetic construct
  source 1..75: mol_type = other DNA
gatttctattgccctattccctacgagcccttacacatcgtcaccgatcaggcattaggtgatgctgccaactta

SEQ ID NO: 563551 - DNA, 75 bp, synthetic construct
  source 1..75: mol_type = other DNA
tacctcttcaggcgcaacatcttgcattactggatacgctcagcgcgctgctgacccaggaaggcacgccgtctg

SEQ ID NO: 563552 - DNA, 75 bp, synthetic construct
  source 1..75: mol_type = other DNA
gcattttaccccgcaaacaacatttagcacgcccgtctggataagcctggcgcaaggcatccgtgcaggccctca

SEQ ID NO: 563553 - DNA, 75 bp, synthetic construct
  source 1..75: mol_type = other DNA
tgaatacgatcgggatggcaataacgtgagtggaatactgacgcgctggcgacagtttggtaaacgctacttctg

SEQ ID NO: 563554 - DNA, 75 bp, synthetic construct
  source 1..75: mol_type = other DNA
gctgcgtcagacccgcacccgcaaaccgttccctgaatcactcccccgcgatgaaaaacggctgctgccgacgga

SEQ ID NO: 563555 - DNA, 75 bp, synthetic construct
  source 1..75: mol_type = other DNA
aggctatacatctaaaagtgtttctgccattttggatgctgaatataaaacctgtaaatgtaaaattaataacta

SEQ ID NO: 563556 - DNA, 75 bp, synthetic construct
  source 1..75: mol_type = other DNA
ttggtcagttggccttgctggaagcaaacacgcgccgcccgagctcgaattactccgttgattactggcatcaac

SEQ ID NO: 563557 - DNA, 75 bp, synthetic construct
  source 1..75: mol_type = other DNA
aacttcggcagccgctccgaaaaagtctcccgccgtatcgcgcagatggaagccgaccttaagcagttgcagaaa

SEQ ID NO: 563558 - DNA, 75 bp, synthetic construct
  source 1..75: mol_type = other DNA
tgtcgggctgggtggatgcatgctgccggctgctgtctccgctggaagaggcgcttcatggctatgtcatgactg

SEQ ID NO: 563559 - DNA, 75 bp, synthetic construct
  source 1..75: mol_type = other DNA
gtgttggattccaccaccttaagcattgagcaagtaattgaaaaagcgttacactacgcgcgccaaaaattggct

SEQ ID NO: 563560 - DNA, 75 bp, synthetic construct
  source 1..75: mol_type = other DNA
cagaaagctacctccgctatgtccttgacgtcatagccgactggccgataaaccgggtcggcgaactgctccccc

SEQ ID NO: 563561 - DNA, 75 bp, synthetic construct
  source 1..75: mol_type = other DNA
ctctgatcatggtggtgagcggggagcgctactgtacagcctgatcgggacgtgcaaactgaatgacgtggatcc

SEQ ID NO: 563562 - DNA, 75 bp, synthetic construct
  source 1..75: mol_type = other DNA
gagttgctgacggacatgaataaccgaccaatgaagggatacggtaatcaaacccgcgcagaacgcttccgcatg

SEQ ID NO: 563563 - DNA, 75 bp, synthetic construct
  source 1..75: mol_type = other DNA
tattcctgctgaaacagcgcctggccgaacaggaagcgctgatccacgccctgcaggaaaagctgagcaaccggg

SEQ ID NO: 563564 - DNA, 75 bp, synthetic construct
  source 1..75: mol_type = other DNA
gccacggttcagataccaaattcaatctgttcaacagccgtcgtatcgatgccatcgacgtgaccagtaaaacgg

SEQ ID NO: 563565 - DNA, 75 bp, synthetic construct
  source 1..75: mol_type = other DNA
cgcgggcgagttgggcagcaacggtattctgccggacgtcgaaagtctgcgtattccggtacagtatctggcaaa

SEQ ID NO: 563566 - DNA, 75 bp, synthetic construct
  source 1..75: mol_type = other DNA
cgcgggcgagctgggcagcaacggtattttgccagacgtcgaaagcctgcgtatcccggtacagtatctggcgaa

SEQ ID NO: 563567 - DNA, 75 bp, synthetic construct
  source 1..75: mol_type = other DNA
cgtgacgaaaagcgactgttgccagcggcgccgtgctgcccgaactgcggcggttcactgagctatctgggctag

SEQ ID NO: 563568 - DNA, 75 bp, synthetic construct
  source 1..75: mol_type = other DNA
cagcgccttccgggttatccggactgtacgtgaaaaagcatgcctgtactcagtgcgatgccatcgtgcaggccc

SEQ ID NO: 563569 - DNA, 75 bp, synthetic construct
  source 1..75: mol_type = other DNA
tatgacccggcagtacagcgtccgttgcgtcagacccgcacccgtaagccgttccctgaatcactaccccgtgac

SEQ ID NO: 563570 - DNA, 75 bp, synthetic construct
  source 1..75: mol_type = other DNA
agaccgggcggttatggacctacgttcgtgacgaccataacgccgggtcaacgctggcgccggcggtgtggttcg

SEQ ID NO: 563571 - DNA, 75 bp, synthetic construct
  source 1..75: mol_type = other DNA
gctgcgtcaaacccgcactcgcaaaccgttccccgaatcactcccccgcgatgaaaaacggctgctgccggcagc

SEQ ID NO: 563572 - DNA, 75 bp, synthetic construct
  source 1..75: mol_type = other DNA
tacggcccggaacggctggaaaaggcctgttacgttgccctgcactataacgccccggacagacgctttatcgac

SEQ ID NO: 563573 - DNA, 75 bp, synthetic construct
  source 1..75: mol_type = other DNA
acaccctgtcacgacactcagagctggcgaaagcgttcgcgtacgcccttaaccagtggccggccctgacgcact

SEQ ID NO: 563574 - DNA, 75 bp, synthetic construct
  source 1..75: mol_type = other DNA
aggtaattcatctaaaagtatatctgctattttggatgttgaatataaaacctgcaaatgtaagctaaatagcta

SEQ ID NO: 563575 - DNA, 75 bp, synthetic construct
  source 1..75: mol_type = other DNA
tggcgtcatagcagactggccggtcaaccgggtcagcgaactgcttccgtggcgcatagcactgccagctgaata

SEQ ID NO: 563576 - DNA, 75 bp, synthetic construct
  source 1..75: mol_type = other DNA
tcccgccagggcgaacaacatccggcatatgcttcagagcatgaaaacctgcgtggtcctggctactaccactga

SEQ ID NO: 563577 - DNA, 75 bp, synthetic construct
  source 1..75: mol_type = other DNA
cgactgttgcctgcggcgccgtgctgcccgaactgcggcggttcactgagctatctgggcgaggataccgccgaa

SEQ ID NO: 563578 - DNA, 75 bp, synthetic construct
  source 1..75: mol_type = other DNA
acaaaaagcgactgttgcctgcggcgccgtgctgcccgaactgcggcggttcactgagctatctgggcgaggata

SEQ ID NO: 563579 - DNA, 75 bp, synthetic construct
  source 1..75: mol_type = other DNA
attcaggggctggagcatttcgataaagtcatcgatatcgaccaaagcccaattggtcgtactccgcgttccaac

SEQ ID NO: 563580 - DNA, 75 bp, synthetic construct
  source 1..75: mol_type = other DNA
gaagctgcctgctgggctcatgcccgccgaaagatccacgatgtgcacgtccgcatcccgtcagcactgacggaa

SEQ ID NO: 563581 - DNA, 75 bp, synthetic construct
  source 1..75: mol_type = other DNA
atggcgcgagggaaagctgctattaccttcttcagagagcccccagctacttcctgtgactctcgatgcagctgc

SEQ ID NO: 563582 - DNA, 75 bp, synthetic construct
  source 1..75: mol_type = other DNA
ccgccgacaggcctgtaatacgggatctctccctgaaactacatcccttgttatgcaggaccataacctctgtcc

SEQ ID NO: 563583 - DNA, 75 bp, synthetic construct
  source 1..75: mol_type = other DNA
caacgcgcgaagattgcggaaaaaatccttaaagagattggcgatcgcctgaaattcctcgttaacgtcgggctg

SEQ ID NO: 563584 - DNA, 75 bp, synthetic construct
  source 1..75: mol_type = other DNA
attggtgcgggcctggttggcgttatgtacgtgctggatgagccgtctatcggcctgcaccagcgcgataacgag

SEQ ID NO: 563585 - DNA, 75 bp, synthetic construct
  source 1..75: mol_type = other DNA
atcagcaatcgcccgtgcgccagctgcgaagggacgcgtctgcgtcgggaagcgcgccacgtgtatgtcgagaat

SEQ ID NO: 563586 - DNA, 75 bp, synthetic construct
  source 1..75: mol_type = other DNA
ctcgcgccaatcatcaaagagcgcaaaggcgaacacactaaaacgctggagaatctggcgagtcagggttatatc

SEQ ID NO: 563587 - DNA, 75 bp, synthetic construct
  source 1..75: mol_type = other DNA
cggcggtgaagtggtcgcggaaggtccgctggaagcgattatggcggtgccggagtcgttgaccgggcagtacat

SEQ ID NO: 563588 - DNA, 75 bp, synthetic construct
  source 1..75: mol_type = other DNA
cctgacgtacattcgcctggggcagtccgcaaccaccctttcaggcggtgaagcccagcgcgtgaagctggcgcg

SEQ ID NO: 563589 - DNA, 75 bp, synthetic construct
  source 1..75: mol_type = other DNA
gcaccttcgcggcccatcgagcggggtatcgccggaccggggctgctggcccgcgtgctgacctcgaagtatgca

SEQ ID NO: 563590 - DNA, 75 bp, synthetic construct
  source 1..75: mol_type = other DNA
atctcctctggcgagcagaaatggggtcggatgtgtggcctggtgatgctactgccgcacggttacgaagggcag

SEQ ID NO: 563591 - DNA, 75 bp, synthetic construct
  source 1..75: mol_type = other DNA
tctttccacgatctgaccgaagcagacttccaggagaccttcaacgtcggttcatttgccagcggcaaagagacc

SEQ ID NO: 563592 - DNA, 75 bp, synthetic construct
  source 1..75: mol_type = other DNA
gcgttccgcgtctgggactccgtactgtctgaagaagccgtgctggcgtttgaatacggttatgccaccgcagaa

SEQ ID NO: 563593 - DNA, 75 bp, synthetic construct
  source 1..75: mol_type = other DNA
gcgaaaagctctttatcgacttctgtggtcctacggttcctgttattaatccggacaccggagagatacgccgcg

SEQ ID NO: 563594 - DNA, 75 bp, synthetic construct
  source 1..75: mol_type = other DNA
actaccacgttgaatatgcccgtcactggtactccgttccacacgaactggtcggtcagcgtctgtcactgaagg

SEQ ID NO: 563595 - DNA, 75 bp, synthetic construct
  source 1..75: mol_type = other DNA
actgaaccagtggccagcgctgacgtactatgcgaacgatggctgggctgaggcggacaataacatcgctgaaaa

SEQ ID NO: 563596 - DNA, 75 bp, synthetic construct
  source 1..75: mol_type = other DNA
agctgacctgaaggcacttcagaaagaaagtgatacccttaccggtcgggttgacgacccggccgtgcagcgccc

SEQ ID NO: 563597 - DNA, 75 bp, synthetic construct
  source 1..75: mol_type = other DNA
aacggagtggagccagaaagctacctccgctatgtccttgacgtcatagccgactggtcgataaaccgggtcggc

SEQ ID NO: 563598 - DNA, 75 bp, synthetic construct
  source 1..75: mol_type = other DNA
aggataccgccgaacagctggagttgatgcgtagcgccttccgggttatccggacggtacgggaaaaacatgcct

SEQ ID NO: 563599 - DNA, 75 bp, synthetic construct
  source 1..75: mol_type = other DNA
atgaacatgcactctttcacctggtcgccgtacctcaaccacgaatgggacgaagagtacccgaacaaagttgag

SEQ ID NO: 563600 - DNA, 75 bp, synthetic construct
  source 1..75: mol_type = other DNA
ccggcggtagggtatatgtccgttcatcagaaacagcaacaagatctggttaatgacgcgctgaacgtcgaataa

SEQ ID NO: 563601 - DNA, 75 bp, synthetic construct
  source 1..75: mol_type = other DNA
gctgctggcccgtgtgctgacctcgaagtatgcagagcacaccccgctgtatcgccagtcagaaatatacggccg

SEQ ID NO: 563602 - DNA, 75 bp, synthetic construct
  source 1..75: mol_type = other DNA
cgggttcaacgagctctaccgcgacggccatataaaggaagccgcgtgctgggcccatgcccgccgaaaaatcca

SEQ ID NO: 563603 - DNA, 75 bp, synthetic construct
  source 1..75: mol_type = other DNA
aagcagataacaacatcgctgaaaatgcgctgcggacggtcagtctgggacgtaaaaactggctgttcttcggct

SEQ ID NO: 563604 - DNA, 75 bp, synthetic construct
  source 1..75: mol_type = other DNA
cgacggcccgacgccgaaagcggtacttgatcgttatacccgctttactggtcgtccggcgctgccgcccgcgtg

SEQ ID NO: 563605 - DNA, 75 bp, synthetic construct
  source 1..75: mol_type = other DNA
atatccccgtcccggtccaggagccgggcagtggtaaaacaaggactgcccggctgtgggtctacgtccgtgatg

SEQ ID NO: 563606 - DNA, 75 bp, synthetic construct
  source 1..75: mol_type = other DNA
ctaaatacaaaaacacggggattagcataggtatagaaccattgaatccaatgataagacaagatctgactcttg

SEQ ID NO: 563607 - DNA, 75 bp, synthetic construct
  source 1..75: mol_type = other DNA
cgcatcccgtcagcactgacggaagaagccctggagcagatcggtcagttgtacgccatagaggcggatataagg

SEQ ID NO: 563608 - DNA, 75 bp, synthetic construct
  source 1..75: mol_type = other DNA
gtttcagtggtgtcctgcatgcggatgcgtacgccgggttcaacgagctgtatcgcaatggtgggataacggaag

SEQ ID NO: 563609 - DNA, 75 bp, synthetic construct
  source 1..75: mol_type = other DNA
gtttcagaggtgtcctgcaggcggatgcgtacgccgggttcaacgagctgtatcgcaatggtgggataacggaag

SEQ ID NO: 563610 - DNA, 75 bp, synthetic construct
  source 1..75: mol_type = other DNA
ccatcgagcggggtatcgccggaccggggctgctggcccgcgtgctgacctcgaagtatgcagagcacaccccgc

SEQ ID NO: 563611 - DNA, 75 bp, synthetic construct
  source 1..75: mol_type = other DNA
tgcgggaagaactttatcaggttaaacaggcggttaaggggatacgtgacgggatgtttagtgcgctgaacgaaa

SEQ ID NO: 563612 - DNA, 75 bp, synthetic construct
  source 1..75: mol_type = other DNA
aacgaagaccgggcggttatggacctgcgttcgtgacgaccgtaacgccgggtcaacgctggcgccggcggtgtg

SEQ ID NO: 563613 - DNA, 75 bp, synthetic construct
  source 1..75: mol_type = other DNA
gtttcaggggtgtcctgcaagcggatgcgtacgccgggttcaacgagctgtatcgcaatggtgggataacggaag

SEQ ID NO: 563614 - DNA, 75 bp, synthetic construct
  source 1..75: mol_type = other DNA
aaagcctgtacaaaatgtgactgcatcgttgaagcaccggtgccgtcccgcccgatagagcgtggtatcgcgggc

SEQ ID NO: 563615 - DNA, 75 bp, synthetic construct
  source 1..75: mol_type = other DNA
ctgccgccagcccgctaatcactccacaccagacacagccactgcccaccgtcgccgcgcctgttttgagtgcac

SEQ ID NO: 563616 - DNA, 75 bp, synthetic construct
  source 1..75: mol_type = other DNA
cgctgggttctcacgaatggcaacaatcattaagccagcatatttcgctgttcacccgccaggggcaacaaagtg

SEQ ID NO: 563617 - DNA, 75 bp, synthetic construct
  source 1..75: mol_type = other DNA
atgcctgttgtaaactgtgaagcaaagcgttgtttaaccaaggtgggactcgtggaattgttgtctgaatatggt

SEQ ID NO: 563618 - DNA, 75 bp, synthetic construct
  source 1..75: mol_type = other DNA
agccattaacaccgctgattgctgaagcccagagtaaagcggaagtcatcagcacgccatcgccggtgaccgctg

SEQ ID NO: 563619 - DNA, 75 bp, synthetic construct
  source 1..75: mol_type = other DNA
ctgaaagcggtattcagttggggcagagcaatatcagcggcgagaattttaacggtcagcagcaggccgcgtccc

SEQ ID NO: 563620 - DNA, 75 bp, synthetic construct
  source 1..75: mol_type = other DNA
gacgacgatacgcttccggttcccgtctctttacaagtacgtgtaacaggcaacagcggcgttgatattttcgcc

SEQ ID NO: 563621 - DNA, 75 bp, synthetic construct
  source 1..75: mol_type = other DNA
gcacaccccgctgtatcgccagtcagaaatatacggccggcaaggtgtggagctgaggcgttcactgctgtcggg

SEQ ID NO: 563622 - DNA, 75 bp, synthetic construct
  source 1..75: mol_type = other DNA
atgcagagcacaccccgctgtaccgccagtctgaaatgttacggccgccagggcgtggagctgagtcgttcactg

SEQ ID NO: 563623 - DNA, 75 bp, synthetic construct
  source 1..75: mol_type = other DNA
tgttgaaatccctggaaagctggttgcgtgaaaagatgaagaccctgtcgcgacactcagagttggcgaaggcgt

SEQ ID NO: 563624 - DNA, 75 bp, synthetic construct
  source 1..75: mol_type = other DNA
gcgtaaacgactcattgaccgattcaccggcagcgcggcagagagcgccgatcgattgttgctacgctggtggca

SEQ ID NO: 563625 - DNA, 75 bp, synthetic construct
  source 1..75: mol_type = other DNA
gtggtgagcggggagcgctactgtacgggctgatcggcacctgccgactgaacggtatcgatccggaagcgtatc

SEQ ID NO: 563626 - DNA, 75 bp, synthetic construct
  source 1..75: mol_type = other DNA
atgtgctgatgcccggtaaagtccatgctgatgatatccccgtcccggtccaggagccgggcagcggtaaaaccc

SEQ ID NO: 563627 - DNA, 75 bp, synthetic construct
  source 1..75: mol_type = other DNA
tatgagtgaagaagcgatggtcgaaaacgatctcaccggaccgtttatgccgcatggtatcggccatccgctggg

SEQ ID NO: 563628 - DNA, 75 bp, synthetic construct
  source 1..75: mol_type = other DNA
tccagcaagctgcgggtcgggattttgctggaacagcgtagcgaagcggcgctggatttcacccacaccatgacc

SEQ ID NO: 563629 - DNA, 75 bp, synthetic construct
  source 1..75: mol_type = other DNA
gctttatttttcagatagacagtatgcccgcggtgatccgcgcggtgacgtacattattcccgcacgttatttcg

SEQ ID NO: 563630 - DNA, 75 bp, synthetic construct
  source 1..75: mol_type = other DNA
tttattctcggcgtgccgtatcgcgggtcgctgctgattctgtttttatctccagcctgtttttactcagtaccc

SEQ ID NO: 563631 - DNA, 75 bp, synthetic construct
  source 1..75: mol_type = other DNA
aacgcgaaatagaccatctgcaggcacagctggataagctgcgccggatgaacttcggcagcagctcggaaaaag

SEQ ID NO: 563632 - DNA, 75 bp, synthetic construct
  source 1..75: mol_type = other DNA
cgaagggatctggcagatctggcaaatgcagcgggcggaggataacgggcagacttttgagccgcttattgatgt

SEQ ID NO: 563633 - DNA, 75 bp, synthetic construct
  source 1..75: mol_type = other DNA
tccagcaagctgcgggtcgggattttactggaacagcgtagcgaagcagcgctggatttcacccacaccatgacc

SEQ ID NO: 563634 - DNA, 75 bp, synthetic construct
  source 1..75: mol_type = other DNA
caatattacatgaacttctcccctgaagtttcatcattaatagccaatctatcaacacttgaaggctcacttgtt

SEQ ID NO: 563635 - DNA, 75 bp, synthetic construct
  source 1..75: mol_type = other DNA
tatgtccttgacgtcatagccgactggccgataaaccgggtcggcgaattgctcccctggcgcgtagcactgccg

SEQ ID NO: 563636 - DNA, 75 bp, synthetic construct
  source 1..75: mol_type = other DNA
ccgggttcaacgagctgtaccgggatggccggataacggaagccgcctgttgggctcacgcccgccgtaaaatcc

SEQ ID NO: 563637 - DNA, 75 bp, synthetic construct
  source 1..75: mol_type = other DNA
aacgcggcaccatggaggctctgctctctacggagattacccgcacggaactgctgctgtgtaagctgatcccct

SEQ ID NO: 563638 - DNA, 75 bp, synthetic construct
  source 1..75: mol_type = other DNA
cgcacaagttgccctgaacgccgcttttctgccgtcgattatgctttccggctttatttttcagatcgacagtat

SEQ ID NO: 563639 - DNA, 75 bp, synthetic construct
  source 1..75: mol_type = other DNA
atgaacgacatctcttctgacgacatcttcctgctaaaacagcgcctggccgaacaggaagcgctgaaccgtgcc

SEQ ID NO: 563640 - DNA, 75 bp, synthetic construct
  source 1..75: mol_type = other DNA
aacgcgaaatagaccatctgcaggcacagctggataagctgcgccggatgaacctcggcagctgctcagaaaaag

SEQ ID NO: 563641 - DNA, 75 bp, synthetic construct
  source 1..75: mol_type = other DNA
aagaccgggcggttatggacctgcgttcgtgacgaccgtaacgccgggtcaacgctggcgccggcggtgtggttc

SEQ ID NO: 563642 - DNA, 75 bp, synthetic construct
  source 1..75: mol_type = other DNA
gctgtatgatgaactgaagcactatgtgctgatgccgggtaaagtgcatgccgatgacacgccggtaaatgtact

SEQ ID NO: 563643 - DNA, 75 bp, synthetic construct
  source 1..75: mol_type = other DNA
catccttaaccatctgtatgatgaagggaaagtaacggaacgttttatgctggagttttttgcacagccacacca

SEQ ID NO: 563644 - DNA, 75 bp, synthetic construct
  source 1..75: mol_type = other DNA
tgcgggaggaactttatctggttaaacagtcggttaaggggatgcggaacgggatgtttagtgtgctgaacaaga

SEQ ID NO: 563645 - DNA, 75 bp, synthetic construct
  source 1..75: mol_type = other DNA
aacgggggatcgccggaccggggctgctggcccgagtgctgacctcaaagtatgcagagcacataccgctgtatc

SEQ ID NO: 563646 - DNA, 75 bp, synthetic construct
  source 1..75: mol_type = other DNA
gtacagtcttatcgggacgtgcaaattaaacggcgtggatccggaacgctatctgcattatgtacttgatgtcat

SEQ ID NO: 563647 - DNA, 66 bp, synthetic construct
  source 1..66: mol_type = other DNA
atgaacgacatctcttctgacgacatcttcctgctgaaacagcgcctggccgaacaggaagcgctg

SEQ ID NO: 563648 - DNA, 75 bp, synthetic construct
  source 1..75: mol_type = other DNA
aacgcgaaatagaccatctgcaggcacagctggataagctgcgccggatgaacgtcggcagccgctctgaaaaag

SEQ ID NO: 563649 - DNA, 75 bp, synthetic construct
  source 1..75: mol_type = other DNA
aacgcgaaatagaccatctgcaggcacagctggataagctgcgccggatgaacctcggcagcggctctgaaaaag

SEQ ID NO: 563650 - DNA, 75 bp, synthetic construct
  source 1..75: mol_type = other DNA
gctgaaaatgccctgcgggcggtcagtctgggtcgtaaaaacttcctgttcttcggctctgaccatggtggtgag

SEQ ID NO: 563651 - DNA, 75 bp, synthetic construct
  source 1..75: mol_type = other DNA
ccgtaagccgttccctgaatcactaccccgtgacgaaaagcgactgttgcctgcggcgccgtgctgcccgaactg

SEQ ID NO: 563652 - DNA, 75 bp, synthetic construct
  source 1..75: mol_type = other DNA
gacgacatcttcctgctgaaacagcgcctggccgaacaggaagcgctgatccacgccctgcaggaaaagctgagc

SEQ ID NO: 563653 - DNA, 75 bp, synthetic construct
  source 1..75: mol_type = other DNA
aagggcagcagtgcctgtccgtcgctgacggtgtcgaatctgttgggtctggtcaccgggatggcggaggacctg

SEQ ID NO: 563654 - DNA, 75 bp, synthetic construct
  source 1..75: mol_type = other DNA
gatgccggaatatgaaggcggcttctggcacttcatccgcctgccggacggtggcggttacatgatgccggatgg

SEQ ID NO: 563655 - DNA, 75 bp, synthetic construct
  source 1..75: mol_type = other DNA
attggcgtgctggtgctggaagtgctgctcgcccttaccgttatactatggggctacggttatcgtttgttctag

SEQ ID NO: 563656 - DNA, 75 bp, synthetic construct
  source 1..75: mol_type = other DNA
aaagcggtaatctgttattcatcatgccaggcggtggcgtgaacgcacaaggccagccgttgccctcgttcgcca

SEQ ID NO: 563657 - DNA, 75 bp, synthetic construct
  source 1..75: mol_type = other DNA
ggatcgggggcgcaaagaagtgctgaagcatgtgcatcgcctgtggggatttgatgtgatgctggaacagcaaaa

SEQ ID NO: 563658 - DNA, 75 bp, synthetic construct
  source 1..75: mol_type = other DNA
gctgacacacctgtaccggatgcgtgatgcgcagttgtggagccacatcgaatttcaccccgaatgtaacgcgat

SEQ ID NO: 563659 - DNA, 75 bp, synthetic construct
  source 1..75: mol_type = other DNA
tgaatgttgaagaatccgatcgcctgtcctttctgccgtatctcttcggaaatgacttcatgattgccgagatgc

SEQ ID NO: 563660 - DNA, 75 bp, synthetic construct
  source 1..75: mol_type = other DNA
cggacattctccattaaaaagaaaagcaaagggatggcttgaggatgacgttaaaaaaagccttaaggagatgct

SEQ ID NO: 563661 - DNA, 75 bp, synthetic construct
  source 1..75: mol_type = other DNA
ttgttgctcagggcgataaaaagaagaaaagtcttgtagacgaagttcttacggtaaagaagatggtgcctatcc

SEQ ID NO: 563662 - DNA, 75 bp, synthetic construct
  source 1..75: mol_type = other DNA
atgaaaataatatataacacactttggatgatatttgaaaaattagtattgtccctatctttactaatcattaat

SEQ ID NO: 563663 - DNA, 75 bp, synthetic construct
  source 1..75: mol_type = other DNA
ttgtggctgtaccacgacagcggggatgcgggactgacacacctgtaccggatgcgcgatgcgcagttgtggagc

SEQ ID NO: 563664 - DNA, 75 bp, synthetic construct
  source 1..75: mol_type = other DNA
gcagaaccaaatcacacaagcacaacgatagtcggtctggatgctggcgtggctaaactcgccacgctgtcagat

SEQ ID NO: 563665 - DNA, 75 bp, synthetic construct
  source 1..75: mol_type = other DNA
ggcgagacttcagcgacagttaagccgcagggtcaaattcagcaacaactggcagaagcagaaacgcaaaataca

SEQ ID NO: 563666 - DNA, 75 bp, synthetic construct
  source 1..75: mol_type = other DNA
cggacggtggcggctacatgatgccggatggcgaccgtttccacatagtgaacggtgcaaactggtttgaccgta

SEQ ID NO: 563667 - DNA, 75 bp, synthetic construct
  source 1..75: mol_type = other DNA
gtggcggttacatgatgccggatggcgaccgttttcatctggtcaacggtgaaaactggtttgaccgcactgtga

SEQ ID NO: 563668 - DNA, 75 bp, synthetic construct
  source 1..75: mol_type = other DNA
tggcacttcatccgcctgccggacggtggcggttacatgatgccggatggcgaccgttttcatcatggtcaacgg

SEQ ID NO: 563669 - DNA, 75 bp, synthetic construct
  source 1..75: mol_type = other DNA
gcgccgatgccgcaggcattattctgacctcccttgtgattaaccgccagttgtggctgtaccacgacagcggtg

SEQ ID NO: 563670 - DNA, 75 bp, synthetic construct
  source 1..75: mol_type = other DNA
cagaaaatcagtacaccggactttatatcaaatgtgccataagaccagcgtggttctggctgacggtggtgaata

SEQ ID NO: 563671 - DNA, 75 bp, synthetic construct
  source 1..75: mol_type = other DNA
ttgtagggaaaacgctggaagccgaattgtctcttcacactgatattacagcggaaagaaatttacacctgttga

SEQ ID NO: 563672 - DNA, 75 bp, synthetic construct
  source 1..75: mol_type = other DNA
atgcagtatgcaaaatctgtcaccttaaacgttgaagagtgcgaccgcctttcctttctgccttacatgtttggc

SEQ ID NO: 563673 - DNA, 75 bp, synthetic construct
  source 1..75: mol_type = other DNA
gatgcgcgatgcgcagttgtggcgtcacatcgaatttcaccccgaatgcaacgcgatttacgcggccctggactg

SEQ ID NO: 563674 - DNA, 75 bp, synthetic construct
  source 1..75: mol_type = other DNA
ggacggtggcggttacatgatgccggatggcgaccgttttcatctggtcaacggtgaaaactggtttgaccgcac

SEQ ID NO: 563675 - DNA, 75 bp, synthetic construct
  source 1..75: mol_type = other DNA
cattctgacttcccttgtgattaaccgccagttgtggctgtaccacgacagcggggatgcaggactgacccagct

SEQ ID NO: 563676 - DNA, 75 bp, synthetic construct
  source 1..75: mol_type = other DNA
ccttggggtatcatcacgcatctgattttattcggctggtttctctggtgtctgcgttttcgcattaaggccgcc

SEQ ID NO: 563677 - DNA, 75 bp, synthetic construct
  source 1..75: mol_type = other DNA
gcgacctggcttgcgcagcgtatttgtgggccattaacaccaccgccggacgaaaatcgcgaaatagcgcaacga

SEQ ID NO: 563678 - DNA, 75 bp, synthetic construct
  source 1..75: mol_type = other DNA
ggctggaaaaaacacatcatattccggttgatgagttctacactttaaagcgagcagaacgcggaaatttagtga

SEQ ID NO: 563679 - DNA, 75 bp, synthetic construct
  source 1..75: mol_type = other DNA
aggggagggctggacctccccaacgggaggggggcaacaaggaatagtaagatccgggcaggaagagcaggttat

SEQ ID NO: 563680 - DNA, 75 bp, synthetic construct
  source 1..75: mol_type = other DNA
gatatcgaaatcgaccacgccgaccagaccgaagaaagcgacatgtccttccttacgcgcatggcggaaatgctg

SEQ ID NO: 563681 - DNA, 75 bp, synthetic construct
  source 1..75: mol_type = other DNA
gagccgcatcattctccatcacgctggcgcgtggacgtgcagaactctaccccgaaatgcatggtacggtaacag

SEQ ID NO: 563682 - DNA, 75 bp, synthetic construct
  source 1..75: mol_type = other DNA
atcaggactggattattgcgaaagccgatcacaccattgataacagtggctttaccacgcagcttgagcttgaag

SEQ ID NO: 563683 - DNA, 75 bp, synthetic construct
  source 1..75: mol_type = other DNA
ctggcgtcggtgcgctgaaacagacttctggcgatctctatcagatggagcagatccgtcgtgaacatcctgatc

SEQ ID NO: 563684 - DNA, 75 bp, synthetic construct
  source 1..75: mol_type = other DNA
cattgataacagcggctttaccacacagcttgagcttgaagcaaaaatcccggaatggatagcagaaacagaatg

SEQ ID NO: 563685 - DNA, 75 bp, synthetic construct
  source 1..75: mol_type = other DNA
gaagcgcagattttcgggatgaatttaacgttaaacgtgaggtgtcctggcatgatgtgaccgttgagcgcgtgg

SEQ ID NO: 563686 - DNA, 75 bp, synthetic construct
  source 1..75: mol_type = other DNA
caggaaaacagtgaaaaactggccgccgatatgataatcagtcagaaacgcatgggtggcctgcaggccgtgcgt

SEQ ID NO: 563687 - DNA, 75 bp, synthetic construct
  source 1..75: mol_type = other DNA
caggaaaacagtgaaaaactggcagccgatatgatcatcagtcagaaacgcatgggtggcctgcaggccgtgcgt

SEQ ID NO: 563688 - DNA, 75 bp, synthetic construct
  source 1..75: mol_type = other DNA
taaaagcatcaaatcatttatatttgaaaaaaaggaacatacactaaaagttatatcttactttataatttcagg

SEQ ID NO: 563689 - DNA, 75 bp, synthetic construct
  source 1..75: mol_type = other DNA
atatggatccggtttcgagttatcttcttctatattacctgtacttattcttggctcagtattctctcttttagg

SEQ ID NO: 563690 - DNA, 75 bp, synthetic construct
  source 1..75: mol_type = other DNA
agcattgtggcaggagaaacacgaggacagaacgcatcagtcctgcgatgtaaattgtggatggtttagcccact

SEQ ID NO: 563691 - DNA, 75 bp, synthetic construct
  source 1..75: mol_type = other DNA
gacgctgatggtcgatgtggaatacaaatgcgaacagaccaactttgacacagtgctgacctacgcgaagctgga

SEQ ID NO: 563692 - DNA, 75 bp, synthetic construct
  source 1..75: mol_type = other DNA
gagtggggtaaaactgaccctggatcagatcaacacacttgttacgttgcctggcgtcggtgcgctgaaacagac

SEQ ID NO: 563693 - DNA, 75 bp, synthetic construct
  source 1..75: mol_type = other DNA
tactggcttgatctcaactttggcaaaaaaccatccactaccgtgaagaaaaccacccgcagacgacgaaccagc

SEQ ID NO: 563694 - DNA, 75 bp, synthetic construct
  source 1..75: mol_type = other DNA
ctggacgacagcgacggcctgctggcgtttccggcaaagggcgaaaagctaacggtttctctgggctggaagggt

SEQ ID NO: 563695 - DNA, 75 bp, synthetic construct
  source 1..75: mol_type = other DNA
gatctggagctggacgatgccgacgggaaaatcgtgctgccgcgccgtggtgcggtcattacgctggcgctgggc

SEQ ID NO: 563696 - DNA, 75 bp, synthetic construct
  source 1..75: mol_type = other DNA
gccaggtggtggcgtgaatgcacagggccagccgttgccctcgttcgccattacacgcagcagcggcgatcgcca

SEQ ID NO: 563697 - DNA, 75 bp, synthetic construct
  source 1..75: mol_type = other DNA
cagcatgacgttgatagcaacggatttactacacagcttaactttgaagcaaaaatatctgactggatcgcagaa

SEQ ID NO: 563698 - DNA, 75 bp, synthetic construct
  source 1..75: mol_type = other DNA
gccagaagcgcagatttccgcgatacctttaacgtgaagagggaatatagctggcacgatattaccgtgggggat

SEQ ID NO: 563699 - DNA, 75 bp, synthetic construct
  source 1..75: mol_type = other DNA
attgccggaaccactgataccacagctaaagagcgtgagcctgtcgatccgtcgctgatggtcgatgtggaatac

SEQ ID NO: 563700 - DNA, 75 bp, synthetic construct
  source 1..75: mol_type = other DNA
cagtgactgagcagtccggtcagctgctggggctgggtgttggtagcaccattgccggaaccactgacaccaccg

SEQ ID NO: 563701 - DNA, 75 bp, synthetic construct
  source 1..75: mol_type = other DNA
aatcttcgcctctggtcttctggcgggcgctgatggtggtatcggtagtacctacaacatcatgggctggcgtta

SEQ ID NO: 563702 - DNA, 75 bp, synthetic construct
  source 1..75: mol_type = other DNA
gtccatctactggcaggaagatacccgccgccgttcagttatggacaacccgaaacgtgaccggattgaaaattt

SEQ ID NO: 563703 - DNA, 75 bp, synthetic construct
  source 1..75: mol_type = other DNA
cagtgactgagcaatccggtcagctgctggggttgggtgttggcagcaccattgctggaaccactgataccaccg

SEQ ID NO: 563704 - DNA, 75 bp, synthetic construct
  source 1..75: mol_type = other DNA
caggagaacagtgaaaaactggctgcagatatgatcatcagccaaaaacgcatgggtggcctgcaggcagtgcgt

SEQ ID NO: 563705 - DNA, 75 bp, synthetic construct
  source 1..75: mol_type = other DNA
ataatgtacttaacaatatacttttatctttaggcggagtcactcctcagacaattagtatgacaggcctggcat

SEQ ID NO: 563706 - DNA, 75 bp, synthetic construct
  source 1..75: mol_type = other DNA
gaacagggggttctgggtcattgccagtatacgctgggggaaggtcctgtcatcggtaatgttcgctgggtggtg

SEQ ID NO: 563707 - DNA, 75 bp, synthetic construct
  source 1..75: mol_type = other DNA
ttattatcatcactatatcaaatcaaggtatccattactcctttttgtggcacgttggaaaatatagctcccaac

SEQ ID NO: 563708 - DNA, 75 bp, synthetic construct
  source 1..75: mol_type = other DNA
tctcgcatggcaaaaaatgcatctgtcaggagatgaaaacagaagagataataatgttcttaacaatgttctttt

SEQ ID NO: 563709 - DNA, 75 bp, synthetic construct
  source 1..75: mol_type = other DNA
ttgatgaacatttcagatttacatcaagtctgtctttggatgcacccgatggtcagatagataatttgtatcagg

SEQ ID NO: 563710 - DNA, 75 bp, synthetic construct
  source 1..75: mol_type = other DNA
tatcgggaatgttcgttgggtggttgattcacattttgatgttgtattgggccccatagactataaaaaagcaat

SEQ ID NO: 563711 - DNA, 75 bp, synthetic construct
  source 1..75: mol_type = other DNA
accaagttcatctggttcttcaagttcaggtgcaagttcctcatcgtcctcttcctcggtgcgtgcacttcgttc

SEQ ID NO: 563712 - DNA, 75 bp, synthetic construct
  source 1..75: mol_type = other DNA
tcaggaacaagttcctcatcgtcctcttcctctgtgcgttcgcttcgttctaacgacaataacaactctactact

SEQ ID NO: 563713 - DNA, 75 bp, synthetic construct
  source 1..75: mol_type = other DNA
cagttcactgctgcaaaatggtacagggcggctgtacagtgcaggcaacctgctgcttgacgctcaggacttcag

SEQ ID NO: 563714 - DNA, 75 bp, synthetic construct
  source 1..75: mol_type = other DNA
ggtcagatagatgagctgtatcaggacggtaaggacggaaagtatcatctcacattatttgataatggattgacc

SEQ ID NO: 563715 - DNA, 75 bp, synthetic construct
  source 1..75: mol_type = other DNA
atgaaaaaatttaattttgctgctctacttccgggatttttggcgctcaataattctgtatgggcaagtgattca

SEQ ID NO: 563716 - DNA, 75 bp, synthetic construct
  source 1..75: mol_type = other DNA
accgcattgcgaatggattaccgattcctgcaactgaaacactcgacacacaattgttaaattctttgaatatat

SEQ ID NO: 563717 - DNA, 75 bp, synthetic construct
  source 1..75: mol_type = other DNA
gttcagatcaacaccgggcgaaagctggtcaagaccatgaacaaaaccggcagggccaaaggctttgcccgtggc

SEQ ID NO: 563718 - DNA, 75 bp, synthetic construct
  source 1..75: mol_type = other DNA
cgatctgaattctggtgtggtcgttgttcgtccgattgaaacttcattcccgccgtcactgagcacgcaggatgg

SEQ ID NO: 563719 - DNA, 75 bp, synthetic construct
  source 1..75: mol_type = other DNA
atgaactggaatctttcgccagtgcagtcaccggacgtttccgtaatccgtacatcaagcatcagctgctgtcta

SEQ ID NO: 563720 - DNA, 75 bp, synthetic construct
  source 1..75: mol_type = other DNA
atggcaggtgaggctgacaacgtttttgccctgaccacggtatatgccacgaaagcgcaggccatgcgcgccgct

SEQ ID NO: 563721 - DNA, 75 bp, synthetic construct
  source 1..75: mol_type = other DNA
gtttgtttatcacatgccatttaaccgcgcattggggatggaactggagcgttacgaaaaagagttcgcacagct

SEQ ID NO: 563722 - DNA, 75 bp, synthetic construct
  source 1..75: mol_type = other DNA
cactgcccaagagggtaataacggtgatattaatcaggttaactttgaaatggttgctgctatgttggttagata

SEQ ID NO: 563723 - DNA, 75 bp, synthetic construct
  source 1..75: mol_type = other DNA
ttgatgatgcgccagctgtaagctatccggccaaactgacgcgcctgttgtttgaacgcttcagccatttcaacg

SEQ ID NO: 563724 - DNA, 75 bp, synthetic construct
  source 1..75: mol_type = other DNA
tagcggaactctcacgcgtgcggtcgccgtcgtcacagctcccccaaccgcaaacggtctttgcaaacacgcaag

SEQ ID NO: 563725 - DNA, 75 bp, synthetic construct
  source 1..75: mol_type = other DNA
aaaaattcttgaagaatacagaaggctcatgcaaactgaatgaactggtttctgttgtggatctcaacagtttcc

SEQ ID NO: 563726 - DNA, 75 bp, synthetic construct
  source 1..75: mol_type = other DNA
gaagatgtgaccactggacgcaagctggttaagacgatgaacaaaacgggacgtgccaaaggtttttcccgtggc

SEQ ID NO: 563727 - DNA, 75 bp, synthetic construct
  source 1..75: mol_type = other DNA
aagagcaatggatggattcgaattaatggattacgattatttagcctctcgattccagaaccttcagttaaaaac

SEQ ID NO: 563728 - DNA, 75 bp, synthetic construct
  source 1..75: mol_type = other DNA
gctggcaaattgtctccagcatgatgtgtttaatatacaattagctgcaagacatctttatcaattggctgaaaa

SEQ ID NO: 563729 - DNA, 75 bp, synthetic construct
  source 1..75: mol_type = other DNA
gccgtcgtcacagctcccccaaccgcaaacggtctttgcaaacacgcaagcatctgcaaaaaaaggatttttttc

SEQ ID NO: 563730 - DNA, 75 bp, synthetic construct
  source 1..75: mol_type = other DNA
acgttacgctgaagcactggataaggtaatggaaaataacgaaccggagaaaaagctctttggctcacgtagggg

SEQ ID NO: 563731 - DNA, 75 bp, synthetic construct
  source 1..75: mol_type = other DNA
tattcgggatttttacacgcaacactgcattaaggaagcaatggttaaagtcttcctggggcgggatggtttacc

SEQ ID NO: 563732 - DNA, 75 bp, synthetic construct
  source 1..75: mol_type = other DNA
ggccgcacatatatcgcttcagcaaacaatattgaaaagagaaagctctatattcgtagcctgactacaaaaaca

SEQ ID NO: 563733 - DNA, 75 bp, synthetic construct
  source 1..75: mol_type = other DNA
tggtgtattttgatcgatttatagtgtcaaatattatgggggcagataaagttgcattttattctgcaccagcgg

SEQ ID NO: 563734 - DNA, 75 bp, synthetic construct
  source 1..75: mol_type = other DNA
ttagcaccgggtcaaaaacagcgtctggggctggcgcgcgcgctaatattgcgaccaaaagtgatcatcgccgat

SEQ ID NO: 563735 - DNA, 75 bp, synthetic construct
  source 1..75: mol_type = other DNA
ttgaatccgcgtcagcgtatctcgcagatccttgattttcctctgcgtttgaacaccgatctggaacctgaacag

SEQ ID NO: 563736 - DNA, 75 bp, synthetic construct
  source 1..75: mol_type = other DNA
acaatattaaaaagcgaaaactatatattcgaaacctgaccacaaaaacatgcattactgaccgcatgattaaag

SEQ ID NO: 563737 - DNA, 75 bp, synthetic construct
  source 1..75: mol_type = other DNA
gtgcgcccgtgtcaatggtgcgtcggataatgactatctctttgatgtctgcctgtacagcgagcattacagtcc

SEQ ID NO: 563738 - DNA, 75 bp, synthetic construct
  source 1..75: mol_type = other DNA
ggttatctcaggagtgtggttttcaggtatctccacatcgcttcaggcatacactggcgagcacactgatgagtt

SEQ ID NO: 563739 - DNA, 75 bp, synthetic construct
  source 1..75: mol_type = other DNA
aaggatgtctgtccggcagaaaaatggatcgatttacgggctgaaggcagtaaaactcacagagaatggcgtatt

SEQ ID NO: 563740 - DNA, 75 bp, synthetic construct
  source 1..75: mol_type = other DNA
taaatcaattatggtcagccattcttgagggggatgaaaaatttggcattgtaaatattcaaaaatctatatcaa

SEQ ID NO: 563741 - DNA, 75 bp, synthetic construct
  source 1..75: mol_type = other DNA
aagtcaccgctgaatgtgcgcacggtgccgtattccgcagagtccgtcagcgaactggcggagtccattaagggc

SEQ ID NO: 563742 - DNA, 75 bp, synthetic construct
  source 1..75: mol_type = other DNA
gtgggttatgctagtgtgtttgattttggattaaccagagcaataatcagagaaatagctatttatagagatgat

SEQ ID NO: 563743 - DNA, 75 bp, synthetic construct
  source 1..75: mol_type = other DNA
cgaagcgtaccggaaaaacgccaggcacgcgccacccccggcagcagccgtaaacagacgccgcagacgcccggc

SEQ ID NO: 563744 - DNA, 75 bp, synthetic construct
  source 1..75: mol_type = other DNA
aacaacgagaaaaaatttggccctaccatcggtaaattcatgacgtttaaaaacgacattgaaaaggcgaccgcc

SEQ ID NO: 563745 - DNA, 75 bp, synthetic construct
  source 1..75: mol_type = other DNA
ctcaggggagcattgcggcggctgcggccccggcagcggcggcaactgcggcggcaactggcggtagctgggcgg

SEQ ID NO: 563746 - DNA, 75 bp, synthetic construct
  source 1..75: mol_type = other DNA
atggctaccagtgtaggtacaatttattacgaagttgatgcaaaaactggtcaacttctcgttgcacaacgacag

SEQ ID NO: 563747 - DNA, 75 bp, synthetic construct
  source 1..75: mol_type = other DNA
ctcattttatggaaaagcaaaagagcataaaattccagaagcgcaccggactcaggaaacagcaatctggcgcgg

SEQ ID NO: 563748 - DNA, 75 bp, synthetic construct
  source 1..75: mol_type = other DNA
tctggtttatcgtatacatcccctcgtttaccatacaaagacaaaccatccacaaccattcagctaaatccgtcg

SEQ ID NO: 563749 - DNA, 75 bp, synthetic construct
  source 1..75: mol_type = other DNA
caaaagagcgaattggctcgacgtaaatcaagcctgtttcgatggttttataaacgtcgcattgcagaacttgaa

SEQ ID NO: 563750 - DNA, 75 bp, synthetic construct
  source 1..75: mol_type = other DNA
cgccgcgaaagaaagcgatcagaagctgacgtggtttgaaagcaaggtattgaaccccgtcaataatgcgcttgg

SEQ ID NO: 563751 - DNA, 75 bp, synthetic construct
  source 1..75: mol_type = other DNA
ccagggcaagcgggaaaacggccgcaacgaaacagactgccggtaatggaaccgcaggcggagccgggcagggtg

SEQ ID NO: 563752 - DNA, 75 bp, synthetic construct
  source 1..75: mol_type = other DNA
atgacttcgatcccgacactggcgcttaatggcgaggccatccagctgaaaaacatgcgggtgactgtttcacag

SEQ ID NO: 563753 - DNA, 75 bp, synthetic construct
  source 1..75: mol_type = other DNA
gcgctgatttcgctaaaacctgctttaacaccctgaagacggctggtggcgaattcatcgacatgtttgaagatg

SEQ ID NO: 563754 - DNA, 75 bp, synthetic construct
  source 1..75: mol_type = other DNA
gcgaggtttttgccaacctgggaagtagcatacttaacaccgttggcaacaaactatcagaaattgccgctaact

SEQ ID NO: 563755 - DNA, 75 bp, synthetic construct
  source 1..75: mol_type = other DNA
gaaattgacccaatcaaacaggcgcaaaatgaatgggccgtaagaaagcaaatgctattggacctgggcgctaca

SEQ ID NO: 563756 - DNA, 75 bp, synthetic construct
  source 1..75: mol_type = other DNA
cgatatatcccactacgcatatccaggtagtttattagaaaaattacagttaagtggctacgttttttctgacat

SEQ ID NO: 563757 - DNA, 75 bp, synthetic construct
  source 1..75: mol_type = other DNA
cccattatgcagaaaacccttctccggtgttaatgccgcgtatatgtccgaacttaaaacactggcagaaacttt

SEQ ID NO: 563758 - DNA, 75 bp, synthetic construct
  source 1..75: mol_type = other DNA
tggttgtatataacattccggcactgagtggtgttaagttatctcttgagcaaatcagtacactggtgacgatgc

SEQ ID NO: 563759 - DNA, 75 bp, synthetic construct
  source 1..75: mol_type = other DNA
gaggtgatgtgattttagaaagtgacactttacaaaaaataaatacattttcaaaaaatataacaatacagacag

SEQ ID NO: 563760 - DNA, 75 bp, synthetic construct
  source 1..75: mol_type = other DNA
aatatcaggagggacgggcggaataaaattaatggttggtggtattggtgattacaacatagaatgtacccccgg

SEQ ID NO: 563761 - DNA, 75 bp, synthetic construct
  source 1..75: mol_type = other DNA
tgtaaccaacgtagtagtgtaattggtggaaaagaaccattaacaataatcattcctgctgttgaacatggtatg

SEQ ID NO: 563762 - DNA, 75 bp, synthetic construct
  source 1..75: mol_type = other DNA
aatgatcgcgggcatggcctgtttaatcctgctgctgatatcaagccttcatcaatagccatgttcaagccgcgc

SEQ ID NO: 563763 - DNA, 75 bp, synthetic construct
  source 1..75: mol_type = other DNA
acgtcatcctggctgaaagtacccgcgcaatgaagcaggcggtgatcgaccgtgacatacttccggttcttggca

SEQ ID NO: 563764 - DNA, 75 bp, synthetic construct
  source 1..75: mol_type = other DNA
ccatctgactggattgaaaaggcgctggcgcatgaacagaagggagtgcgcgcggtgtacaacaaagcggagtat

SEQ ID NO: 563765 - DNA, 75 bp, synthetic construct
  source 1..75: mol_type = other DNA
gattttaaaaaatggacatggacaattccttcagaccgcatgaagggaagccgggcgcacgttatttacctgcct

SEQ ID NO: 563766 - DNA, 75 bp, synthetic construct
  source 1..75: mol_type = other DNA
cttccggttcttggcaacaaaatgatggctgaaattaccacatcgatggttcgtgatttgtgtgaccggattgtc

SEQ ID NO: 563767 - DNA, 75 bp, synthetic construct
  source 1..75: mol_type = other DNA
atatgcgtcgagctaccttcgagcgcgagcttaagccgaagttcggtaaccagaagctgacagaaatcacccatg

SEQ ID NO: 563768 - DNA, 75 bp, synthetic construct
  source 1..75: mol_type = other DNA
agaatatcatggacatcagttaacaaatgctatgacagttgcttcagtggttaagccatatgactttagtaatct

SEQ ID NO: 563769 - DNA, 75 bp, synthetic construct
  source 1..75: mol_type = other DNA
acagctatgccaacaagggccatttcagaaagtcagaatcgatgacttcaaaacgttattgaagcatatggggga

SEQ ID NO: 563770 - DNA, 75 bp, synthetic construct
  source 1..75: mol_type = other DNA
ttccttcttcatattcacatgaattatttggtttggttgaggcatatagaaatccaacgtattcgtatttacaga

SEQ ID NO: 563771 - DNA, 75 bp, synthetic construct
  source 1..75: mol_type = other DNA
tagcgcaatagatcatgcaggagcagtatcagatattaaaaatattgtagacaaatttttaggcggaattttaac

SEQ ID NO: 563772 - DNA, 75 bp, synthetic construct
  source 1..75: mol_type = other DNA
cagagtttgagcttgctgcagttgttcctgacaagtatctggataaatatgacgagtatttaccagagactttgc

SEQ ID NO: 563773 - DNA, 75 bp, synthetic construct
  source 1..75: mol_type = other DNA
ttcgcactctgattttcatcgttcttgttcttagcttcctggttgcagcacaaaacactttgtctgcaatcacag

SEQ ID NO: 563774 - DNA, 75 bp, synthetic construct
  source 1..75: mol_type = other DNA
acctcagcaaacacgcctttattgcatttttgggcgcgatgctgtttttcatggcagctgaacctgctctggcgt

SEQ ID NO: 563775 - DNA, 75 bp, synthetic construct
  source 1..75: mol_type = other DNA
cgtattatccttcaaaaatactttatagattcatttgctaaagcaagtatctctgacagagaaaataatatatat

SEQ ID NO: 563776 - DNA, 75 bp, synthetic construct
  source 1..75: mol_type = other DNA
ttcaatcaggacagaaaaaacaatatttagaacttcagcgcatcagagataatataagttataataatttctttt

SEQ ID NO: 563777 - DNA, 75 bp, synthetic construct
  source 1..75: mol_type = other DNA
ccgagttagatgctacaatatcagactcattttcatatctatatgataattttcagattgttgatggtgatgttc

SEQ ID NO: 563778 - DNA, 75 bp, synthetic construct
  source 1..75: mol_type = other DNA
taaagaaaaacaaattatctgtcgttagtttaaatagcaacatcaaaaatgatgttgtattgtctggagtaatga

SEQ ID NO: 563779 - DNA, 75 bp, synthetic construct
  source 1..75: mol_type = other DNA
ggtaaaaaatagttataagttaagtaaatttacatgggaaacgtatggtgatatcgtggtatcacctgaagatag

SEQ ID NO: 563780 - DNA, 75 bp, synthetic construct
  source 1..75: mol_type = other DNA
tacaattcaacaatggaaaaaaatgtattccttcgagaggttatatcatgtgttctatggactaaaaaagtagac

SEQ ID NO: 563781 - DNA, 75 bp, synthetic construct
  source 1..75: mol_type = other DNA
ccgcactgaacaggctgatcaatgtcactgtcgaatcagtgaataatgcaggcgggcatctggatgacttctctg

SEQ ID NO: 563782 - DNA, 75 bp, synthetic construct
  source 1..75: mol_type = other DNA
acgtccggcaaaggccggatcgtcggaaatggtcaccgtggaaaatgaagatcaggcccacgcgatggtgcgctt

SEQ ID NO: 563783 - DNA, 75 bp, synthetic construct
  source 1..75: mol_type = other DNA
tgttttaaagagaccgccggactgggggctctgggtgacctggcggcacatatcgtcaatatggcccagtatctg

SEQ ID NO: 563784 - DNA, 75 bp, synthetic construct
  source 1..75: mol_type = other DNA
ctcaacgaactggacgcagatgaacaggccgatatttgtgaatctcttcacgaccacgccgatgagctttaccgc

SEQ ID NO: 563785 - DNA, 75 bp, synthetic construct
  source 1..75: mol_type = other DNA
aagggcagcagtgcctgcccgtcgctgacggtgtcgaatctgttaggtctggtcaccggtatggcggaggacctg

SEQ ID NO: 563786 - DNA, 75 bp, synthetic construct
  source 1..75: mol_type = other DNA
gatgaacgggaagggcagcagtgcccgcccgtcgctgacggtgtccaatctgttcggtctggtcaccgggatggc

SEQ ID NO: 563787 - DNA, 75 bp, synthetic construct
  source 1..75: mol_type = other DNA
gcagtcacttggcaagtttggaccgcacgacttgcggcgcacagccagcacgctgttgcatgaggcgggctataa

SEQ ID NO: 563788 - DNA, 75 bp, synthetic construct
  source 1..75: mol_type = other DNA
aggaaactgatagaaattacccacgaggacttgcgggcgctgactgatgccatcgtggaacaaggcaggccatca

SEQ ID NO: 563789 - DNA, 75 bp, synthetic construct
  source 1..75: mol_type = other DNA
ccatctacaacaaggccgagtaccgcgatcagcgccgggcaatgctacaggattgggcggacatgattgacgagt

SEQ ID NO: 563790 - DNA, 75 bp, synthetic construct
  source 1..75: mol_type = other DNA
aacgggtacattacccaccatcaagctggccattaaattggttttattaacgatggtgcgtaaaagcgaaccgaa

SEQ ID NO: 563791 - DNA, 75 bp, synthetic construct
  source 1..75: mol_type = other DNA
agctgctgtcagagataaccccctctctcctgcgtgagtattgcgacaagattaaagcgcgtggtgcgccagcga

SEQ ID NO: 563792 - DNA, 75 bp, synthetic construct
  source 1..75: mol_type = other DNA
aatgcaggaatatcgcccgctggagagaagcgtgacggtaaaacaaagcgaaaagaagaaaagacactccacgat

SEQ ID NO: 563793 - DNA, 75 bp, synthetic construct
  source 1..75: mol_type = other DNA
ccgcgctgaactctctgatcgacagaacggtgaaaataataaatgaagatggtgagcatattcagggcttcaccg

SEQ ID NO: 563794 - DNA, 75 bp, synthetic construct
  source 1..75: mol_type = other DNA
ccatcgcgctatgactcggacttgccgatgagcagcgccacgctcaatcaggtgctcacgctgacctatcgtctg

SEQ ID NO: 563795 - DNA, 75 bp, synthetic construct
  source 1..75: mol_type = other DNA
gtgtaaccggaatgggtgacagcatcagtggctggttcagcgaaaagctgggcattcattcgccgagccgcgtgt

SEQ ID NO: 563796 - DNA, 75 bp, synthetic construct
  source 1..75: mol_type = other DNA
caccaatgcaacgtgggatgaaatagattttaaaaaatggacatggacaattccttcagaccgtatgaagggaag

SEQ ID NO: 563797 - DNA, 75 bp, synthetic construct
  source 1..75: mol_type = other DNA
atgcgttttgccatcgtggtgaccggaccagcatacggtacgcaacaggcgagtagtgcttttcagtttgcacag

SEQ ID NO: 563798 - DNA, 75 bp, synthetic construct
  source 1..75: mol_type = other DNA
ttccttcagaccgcatgaagggaagccgggcgcacgttatttacctgcctaaacaggctcaggatatattggtcg

SEQ ID NO: 563799 - DNA, 75 bp, synthetic construct
  source 1..75: mol_type = other DNA
cattaacaaagatacaggcataatcgatttatcaaataatcaggtgttaggtaatatttatttagatatgagaga

SEQ ID NO: 563800 - DNA, 75 bp, synthetic construct
  source 1..75: mol_type = other DNA
agattttgtaaatgactggtggaaatataaccttactttgataacagttcctcttgataacaaactggcagataa

SEQ ID NO: 563801 - DNA, 75 bp, synthetic construct
  source 1..75: mol_type = other DNA
aacacaatacatttttcagtgttaccggcatagatgagtctctctatgaaaagcatataatctttatcactctta

SEQ ID NO: 563802 - DNA, 75 bp, synthetic construct
  source 1..75: mol_type = other DNA
ttatgctagtgttatttatggtaatcatggggcaaaatatacattcctcgactcaggaagtaaacctataaccat

SEQ ID NO: 563803 - DNA, 75 bp, synthetic construct
  source 1..75: mol_type = other DNA
ttaactaattggaggatacataactcatgctctttattttatgataaatatcaagttgacattgaagccaataaa

SEQ ID NO: 563804 - DNA, 75 bp, synthetic construct
  source 1..75: mol_type = other DNA
ttttgtctttacctataaatcaaaatttaacgctgccttttatgtatcgctacttcgagatgttatatgacattc

SEQ ID NO: 563805 - DNA, 75 bp, synthetic construct
  source 1..75: mol_type = other DNA
aaggtcatgaagatttacgaaaactcgggtatgaccaaagaagatctggccgatattctcaaacggctgccgtaa

SEQ ID NO: 563806 - DNA, 75 bp, synthetic construct
  source 1..75: mol_type = other DNA
tgaaaaggtcatgaagatttacgaaaactcgggtatgaccaaagaagatctggccgatattctaaaacgcctcga

SEQ ID NO: 563807 - DNA, 75 bp, synthetic construct
  source 1..75: mol_type = other DNA
aaacgcgtgcagccatattagtgtttccattctttgcgttaatattaatcgtaatggatagttatattaataagc

SEQ ID NO: 563808 - DNA, 75 bp, synthetic construct
  source 1..75: mol_type = other DNA
agttgttaaatggagttgatagaaataccatcccttttcagaaaataagtgagctcaatgatatcatacattcat

SEQ ID NO: 563809 - DNA, 75 bp, synthetic construct
  source 1..75: mol_type = other DNA
tcatgaagttgacagaacaaaaatcatcagttattggcattaaatactctgttgattttgatagatacaatgaga

SEQ ID NO: 563810 - DNA, 75 bp, synthetic construct
  source 1..75: mol_type = other DNA
caggatgaagtgctgaggctcaaacagattagcgggctgacagagctgtttcaggaagagaatttcagcccggca

SEQ ID NO: 563811 - DNA, 75 bp, synthetic construct
  source 1..75: mol_type = other DNA
atagtattgtcaatagatatatacatactgtttctgagcataatggaaaagacggtgtagctcagatgtcattac

SEQ ID NO: 563812 - DNA, 75 bp, synthetic construct
  source 1..75: mol_type = other DNA
caggatcgctgaactggaaaaaatcgccactgaccatgcactgaaattccagaaagcacaggacgcattaaagta

SEQ ID NO: 563813 - DNA, 75 bp, synthetic construct
  source 1..75: mol_type = other DNA
cctctaaattgcaacataaagcccccaaaaattcaataatgcttgggcagaatctggttgaaaaacttggtctta

SEQ ID NO: 563814 - DNA, 75 bp, synthetic construct
  source 1..75: mol_type = other DNA
aacgcaatttgggtatgtggttaccatgtttatggatattataggctcgactaaacttggtctttcatatagtcc

SEQ ID NO: 563815 - DNA, 75 bp, synthetic construct
  source 1..75: mol_type = other DNA
cgaaacgtgaccggattgaaaattttgaatccgttaacgaagcctatgtggttgaggactaccgctgtgccgcac

SEQ ID NO: 563816 - DNA, 75 bp, synthetic construct
  source 1..75: mol_type = other DNA
atgaagaagaatacccgctttgcttttaacgcttacctgcagcagctggcgcgtctgaatggtgtggcagttgaa

SEQ ID NO: 563817 - DNA, 75 bp, synthetic construct
  source 1..75: mol_type = other DNA
gacgtatttcagcccttgcgatacgagcgggatgttgaaagagccatcataaaggctggcggaaaagcattgtgg

SEQ ID NO: 563818 - DNA, 75 bp, synthetic construct
  source 1..75: mol_type = other DNA
tgtgatattaaaaatacaaaacatacaaaatgaaacagtagattttaatgaaacaagagagagggtaaaggaact

SEQ ID NO: 563819 - DNA, 75 bp, synthetic construct
  source 1..75: mol_type = other DNA
catagtcaaattcaagagataaaaaggaattttacctataaaaaaaatgatgacatatcatccagatttaaattt

SEQ ID NO: 563820 - DNA, 75 bp, synthetic construct
  source 1..75: mol_type = other DNA
cactgacagagaaaagaatatatatcctgtgatttgtgattcacctgatcacttcacaagcgacatatataggca

SEQ ID NO: 563821 - DNA, 75 bp, synthetic construct
  source 1..75: mol_type = other DNA
gatgctggagttacaggaaaaacagggcatttcgtatatttatgttacccagcatatcggaatgatgaagcacat

SEQ ID NO: 563822 - DNA, 75 bp, synthetic construct
  source 1..75: mol_type = other DNA
gccaggtggcattgtccgataaggccaatgacaaacttggaaagtttcaaatgaaactaaaagaaaaaaacatca

SEQ ID NO: 563823 - DNA, 75 bp, synthetic construct
  source 1..75: mol_type = other DNA
aaaaaaagtgatggagatatgttttttgaagatttaaaactaagaaggattatatcagaagctattctgtcccta

SEQ ID NO: 563824 - DNA, 75 bp, synthetic construct
  source 1..75: mol_type = other DNA
atgtcgttttgttggaatgaaattaattctggtataaagtctttaattctcatattatgtattttttctttaatg

SEQ ID NO: 563825 - DNA, 75 bp, synthetic construct
  source 1..75: mol_type = other DNA
gcttcagatattcatttcttaatttcagagtctattttcaaagttcgcatgagaatattcggtgaactgcagact

SEQ ID NO: 563826 - DNA, 75 bp, synthetic construct
  source 1..75: mol_type = other DNA
caggatgagaaaaacagaggcccgaaagaacgaattattcatctgaaagaccttgctgatgtcagtgaaagtgag

SEQ ID NO: 563827 - DNA, 75 bp, synthetic construct
  source 1..75: mol_type = other DNA
ttaccttgagcggcactgcaataaagattcactctgcagtacagataatatctggttccgaaatcatcacggatg

SEQ ID NO: 563828 - DNA, 75 bp, synthetic construct
  source 1..75: mol_type = other DNA
aaatccgcagccgcgccgcagccgcagccagtaccctcacagggcgagtacccgccgatggattttgacgacgat

SEQ ID NO: 563829 - DNA, 75 bp, synthetic construct
  source 1..75: mol_type = other DNA
atccggttctgcaggcgatggtggatgacgctgtggggaccattcggtaccgcgtgatggtcgtgattatgatcc

SEQ ID NO: 563830 - DNA, 75 bp, synthetic construct
  source 1..75: mol_type = other DNA
tggagccagcatcgtgaccgtgttatcggtacccaggaactggtagcgattgtgttggcagaaaaagaccactgg

SEQ ID NO: 563831 - DNA, 75 bp, synthetic construct
  source 1..75: mol_type = other DNA
tggtggtgtacaacattccagccctgagcggggtaaaactgaccctggatcagatcaacaccctggttacgctgc

SEQ ID NO: 563832 - DNA, 75 bp, synthetic construct
  source 1..75: mol_type = other DNA
gttcagggcggcgcgattccccatcggtgctgagaatgttaattactgaacctgaacttaccgcaaccagcagca

SEQ ID NO: 563833 - DNA, 75 bp, synthetic construct
  source 1..75: mol_type = other DNA
accgtatcgtggtaggcagcaagagagtcgattatgctgatgcggctgccagaagcctctttgcggaagccagta

SEQ ID NO: 563834 - DNA, 75 bp, synthetic construct
  source 1..75: mol_type = other DNA
tcgtgctatttcatcggcaatgcgacttgaccccgatgccatcatggaaggggaaatgcgcgatcttgtctcgat

SEQ ID NO: 563835 - DNA, 75 bp, synthetic construct
  source 1..75: mol_type = other DNA
gttattcactttgcgcaacagccattctgtcaatggctgatgtcactgaaaccagtttcttccctcaaagggaac

SEQ ID NO: 563836 - DNA, 75 bp, synthetic construct
  source 1..75: mol_type = other DNA
cctggcgggcagcatcaacgagaatttttatcttgcacagcttgctgccctgggcagaccagatgccaacatcac

SEQ ID NO: 563837 - DNA, 75 bp, synthetic construct
  source 1..75: mol_type = other DNA
ttcaggcattaatccgaattcaggaacgcaataacaacggtggtgaattacgcgagtttatttgcgcccgaaaag

SEQ ID NO: 563838 - DNA, 75 bp, synthetic construct
  source 1..75: mol_type = other DNA
gggcgcgctgctgttattcctcgcttgccctgaaagcggttcagttatcgctgctgcatattccggcatcactgc

SEQ ID NO: 563839 - DNA, 75 bp, synthetic construct
  source 1..75: mol_type = other DNA
ttgatgattgtggtgaaaagacttacctgattgctttcgaccattacagcatctgtgcgcgttattgcggcgaaa

SEQ ID NO: 563840 - DNA, 75 bp, synthetic construct
  source 1..75: mol_type = other DNA
ttaacgcgtttatctgctcggtgatcgtcgtcgttctgatgttctaccagcgccatggtgcccggcaccgtcctt

SEQ ID NO: 563841 - DNA, 75 bp, synthetic construct
  source 1..75: mol_type = other DNA
ttcagtgacggtgtccgtacccagctggcgaacggccaggcactgaaagaggctcagtgcagttgcggggccaac

SEQ ID NO: 563842 - DNA, 75 bp, synthetic construct
  source 1..75: mol_type = other DNA
atttgtgcgcgttattgtggtgaaaacatctctaatgccatcacgtttggcggtgcgtttaacgaggatttatgg

SEQ ID NO: 563843 - DNA, 75 bp, synthetic construct
  source 1..75: mol_type = other DNA
acttctccggcaagtgacgaatatgacctcgtacgcgcctggcaacatctgaatgcgcaacatggggtggcactg

SEQ ID NO: 563844 - DNA, 75 bp, synthetic construct
  source 1..75: mol_type = other DNA
ggagcagtggcagaacatctggcgcgagtaccggcaaatggcgaaaggctggacgcagggggcgtattcttccct

SEQ ID NO: 563845 - DNA, 75 bp, synthetic construct
  source 1..75: mol_type = other DNA
agcaactctggagccagtatcgtgaccgtgttatcgggacccaggaactggtagcgattgtgttggcagaaaaag

SEQ ID NO: 563846 - DNA, 75 bp, synthetic construct
  source 1..75: mol_type = other DNA
tgactaacccacatggacttccatcaattccggagggctcaatcgttattgttgagccacattacggacaacttg

SEQ ID NO: 563847 - DNA, 75 bp, synthetic construct
  source 1..75: mol_type = other DNA
cagctggcggtggcgctgcagacaactccagaatggattctttacggtcgaggtgaggaaacgccggatgataca

SEQ ID NO: 563848 - DNA, 75 bp, synthetic construct
  source 1..75: mol_type = other DNA
atgcgttttgccatcgtggtgaccgggccagcatacggtacgcaacaggcgagtagtgcttttcagtttgcgcag

SEQ ID NO: 563849 - DNA, 75 bp, synthetic construct
  source 1..75: mol_type = other DNA
ggtgagacggcagaaattctggcaacgttgcccagcctaaaaaaaatgggtaattatttggtctcctttactcgc

SEQ ID NO: 563850 - DNA, 75 bp, synthetic construct
  source 1..75: mol_type = other DNA
tcctgccatgggaagagatgaaactgcgtatgcttaatggcagccactcttttctcgcttatctgggttacctct

SEQ ID NO: 563851 - DNA, 75 bp, synthetic construct
  source 1..75: mol_type = other DNA
ggccttgcaccgtttaccgtgctctcctgcgacaatattcccgacaatggccatgtggtgaaaaacgcggtgctg

SEQ ID NO: 563852 - DNA, 75 bp, synthetic construct
  source 1..75: mol_type = other DNA
gatctacaaaaccctgaagaacctcactccgcgccaggtattctcgtcgaagcactgaaacgccgccgtgaacgc

SEQ ID NO: 563853 - DNA, 75 bp, synthetic construct
  source 1..75: mol_type = other DNA
tggcggtatgttgttacaggtaatgcctgcgcaaaatgcccagcaggacgacttcgaccacctggcgacgctaac

SEQ ID NO: 563854 - DNA, 75 bp, synthetic construct
  source 1..75: mol_type = other DNA
gtgagcaagattgactatcaggtactgcgtgctaaggcagaaaaagcaacgtgtggcgagtggtcgctcgaatat

SEQ ID NO: 563855 - DNA, 75 bp, synthetic construct
  source 1..75: mol_type = other DNA
aaatgatgagagccgttcagattagaagtgagcttggagggtatgccacttccaatctatctggtgcatacaata

SEQ ID NO: 563856 - DNA, 75 bp, synthetic construct
  source 1..75: mol_type = other DNA
aagcctgaaacagactaaaacggatagtttggaaccaaaaagctcccaccataaagcccataaacccctacttcc

SEQ ID NO: 563857 - DNA, 75 bp, synthetic construct
  source 1..75: mol_type = other DNA
gacaagaatgggtttttctgaaacgcatctcagatgctacgtcctacatgacgacgaagatggccagcacatcca

SEQ ID NO: 563858 - DNA, 75 bp, synthetic construct
  source 1..75: mol_type = other DNA
aaaatctcatcagtacacgtattatccaagaactggaagaagattataaattaacccgaactagagggccatcag

SEQ ID NO: 563859 - DNA, 75 bp, synthetic construct
  source 1..75: mol_type = other DNA
agcgccgacactacaaattaaagatgtcgatttaacacaatatgcggacaagttaattgcacgttttgctaatcc

SEQ ID NO: 563860 - DNA, 75 bp, synthetic construct
  source 1..75: mol_type = other DNA
gaactggaagccgaacccgtaagccaaacttacaacttgccagaattaatcgagggcatggaagtttccattgat

SEQ ID NO: 563861 - DNA, 75 bp, synthetic construct
  source 1..75: mol_type = other DNA
agaacctggcaagcactagaataattcagcaacttgaaagagattacaatctgacaagaaccaaaggatcgaaag

SEQ ID NO: 563862 - DNA, 75 bp, synthetic construct
  source 1..75: mol_type = other DNA
gtgatgatatcagcatccctgaatgcgatgtaacccactggatgcctctaccagaaccgcctcgattaaaggagc

SEQ ID NO: 563863 - DNA, 75 bp, synthetic construct
  source 1..75: mol_type = other DNA
tgaccattgaatttaaaaccggtgatgagtgggttaaagccgtcgaccgggtaagtatgaccttaaccgaaggtg

SEQ ID NO: 563864 - DNA, 75 bp, synthetic construct
  source 1..75: mol_type = other DNA
gcaatttgcaaaaactgatcgaacaactgcttgattacaaccgtaaacaggcggacagtgcggtggaactggaga

SEQ ID NO: 563865 - DNA, 75 bp, synthetic construct
  source 1..75: mol_type = other DNA
ttcagtgtaacaacagcggtcccgatgccgccgccgccgcacgtcttgaagcctttgccagtgccaataccgaaa

SEQ ID NO: 563866 - DNA, 75 bp, synthetic construct
  source 1..75: mol_type = other DNA
gcaagctggttgggcacaatgtatcgatgatctttcaggaaccgcaatcgtgtctcgacccttctgaacgtgtgg

SEQ ID NO: 563867 - DNA, 75 bp, synthetic construct
  source 1..75: mol_type = other DNA
gcacaacgagaatgcattgtgacgccacgtttgacgggggcgaaaaatcatctctatgcctgtcatttcccgctg

SEQ ID NO: 563868 - DNA, 75 bp, synthetic construct
  source 1..75: mol_type = other DNA
tccgcgcgataccggatttcggcagcgcgatgccgcataaaagtcgcctcaatacgctgcctggtgcaatcccgc

SEQ ID NO: 563869 - DNA, 75 bp, synthetic construct
  source 1..75: mol_type = other DNA
gtctctgatgaggttgttagtgagatcaaaacaaagaaatccggccttttgtttgacgtcaattatgaggaatat

SEQ ID NO: 563870 - DNA, 75 bp, synthetic construct
  source 1..75: mol_type = other DNA
agtaaaagagtctactgttcggcgtgatgagtcggatctcggaggaatgtttacactcctggcaaatgccgggga

SEQ ID NO: 563871 - DNA, 75 bp, synthetic construct
  source 1..75: mol_type = other DNA
gagcgagctatcgggcaactctccggtaactccggatggttggataagctgtagtgatcgaatgcctgaaaaggg

SEQ ID NO: 563872 - DNA, 75 bp, synthetic construct
  source 1..75: mol_type = other DNA
gcgttacagcgaaatgctcgacgcccacgcaggcgtgctgccggacgataaactctaccaggcattgcgtcagga

SEQ ID NO: 563873 - DNA, 75 bp, synthetic construct
  source 1..75: mol_type = other DNA
atcttcaagatgctgtttccctcaatccgctacgtggtggtgttgactcccagagtgtccacataatgtccacgc

SEQ ID NO: 563874 - DNA, 75 bp, synthetic construct
  source 1..75: mol_type = other DNA
cagagtgtccacagtagggtagtttattatggctttcagtggtcttgcgtgccgcacaaacccgcattgcaccgc

SEQ ID NO: 563875 - DNA, 75 bp, synthetic construct
  source 1..75: mol_type = other DNA
ctatagggcttcaacgttcagatggttagagaccatcccctatctcaataccattattaccatcttcaaaaacct

SEQ ID NO: 563876 - DNA, 75 bp, synthetic construct
  source 1..75: mol_type = other DNA
gcaactacaaagtgaaggcgtggccggcgctggtggatgaacgcgacagcgtggcgatcaaactgtttgataatc

SEQ ID NO: 563877 - DNA, 75 bp, synthetic construct
  source 1..75: mol_type = other DNA
tcaaattgtttgataatccactggagcagaagcaagcaatgtggaacggtctgcgccgtctactgttgctgaata

SEQ ID NO: 563878 - DNA, 75 bp, synthetic construct
  source 1..75: mol_type = other DNA
ggcgatgattatcacgtccgcgctctccattcaggatccgcgcgagcgtccgatggataaacagcaggcatcgga

SEQ ID NO: 563879 - DNA, 75 bp, synthetic construct
  source 1..75: mol_type = other DNA
gaaagatgccgataaacaagaatataccggcgcacgtaacgcgcgtttctccatcttccccggttctggtttatt

SEQ ID NO: 563880 - DNA, 75 bp, synthetic construct
  source 1..75: mol_type = other DNA
aggacattctcgaagcgattcgtgatcaccaggtggtgatcgtcgccggggaaacgggttctggtaaaacgactc

SEQ ID NO: 563881 - DNA, 75 bp, synthetic construct
  source 1..75: mol_type = other DNA
gcaactacaaagtgaaggcgtggccggcgctggtggatgaacgcgacagtgtggcgatcaaactgtttgataacc

SEQ ID NO: 563882 - DNA, 75 bp, synthetic construct
  source 1..75: mol_type = other DNA
gggtacctcagggtgtcggtggtctggaagggagagcgtgggaggctttacgtgaaaccgatagcagcatccttg

SEQ ID NO: 563883 - DNA, 75 bp, synthetic construct
  source 1..75: mol_type = other DNA
atcgcctgcgcgttcaggctgagcaggccgcccgtgagggtggcagtgttcgccacgcgtcgggctatgacctga

SEQ ID NO: 563884 - DNA, 75 bp, synthetic construct
  source 1..75: mol_type = other DNA
caaccgcaacgtgcagaccgtgctgacagaggaaatggcagatgcagcgcagagcgcaatgcttgccgccaccgg

SEQ ID NO: 563885 - DNA, 75 bp, synthetic construct
  source 1..75: mol_type = other DNA
acgaccggaaattacttatcctgacaatttaccggttagtcagaaaaagcaggacattctcgaagcaattcgtga

SEQ ID NO: 563886 - DNA, 75 bp, synthetic construct
  source 1..75: mol_type = other DNA
acgatgatttcggtgaggccaccaccaccgcgctgcgggcccgcacagaggacgcatttattgcccgttaccgtc

SEQ ID NO: 563887 - DNA, 75 bp, synthetic construct
  source 1..75: mol_type = other DNA
atattttatgggctcgacaatcagacttggtggagccttacgccgcaacggggtgaagagctaaacacttttttt

SEQ ID NO: 563888 - DNA, 75 bp, synthetic construct
  source 1..75: mol_type = other DNA
ggtgaacagcgaaccggcggagtatcgcgaaattcacatcgccttactgaccggtttgctttcgcatatcggcat

SEQ ID NO: 563889 - DNA, 75 bp, synthetic construct
  source 1..75: mol_type = other DNA
agaacctcatcagcactcgtgtcattcaacagctagaaagagactaccatctaaccaaaacgaaaagtcctgatg

SEQ ID NO: 563890 - DNA, 75 bp, synthetic construct
  source 1..75: mol_type = other DNA
ttgtggcacttctcaggcgcagaggcatgtctctgttacatgccactgcacatcctttccaccaaatcctccacc

SEQ ID NO: 563891 - DNA, 75 bp, synthetic construct
  source 1..75: mol_type = other DNA
tatcatccagctcaggagcaatctgcacaatacagctcgtcagataccccgccagcgtcgtctgtattcatggct

SEQ ID NO: 563892 - DNA, 75 bp, synthetic construct
  source 1..75: mol_type = other DNA
tatcatcgccagcagagtgtctcttgatgccggaaagctctacctcggtaggaatgagaacctggcaagtacgag

SEQ ID NO: 563893 - DNA, 75 bp, synthetic construct
  source 1..75: mol_type = other DNA
aaaagctgttcctaacagagcgtcaacagggaagatgaatggtttttcctttgagtacgccaatatttcattcaa

SEQ ID NO: 563894 - DNA, 75 bp, synthetic construct
  source 1..75: mol_type = other DNA
gcaatgctggaagacagaaccggagagaaatgcgcaaagacgatcatacaggaagctatagatacactgctcaca

SEQ ID NO: 563895 - DNA, 75 bp, synthetic construct
  source 1..75: mol_type = other DNA
taaaatggttcaacgctgacaaaggcttcggcttcatcactcctgacgatggctctaaagacgtgttcgtacact

SEQ ID NO: 563896 - DNA, 75 bp, synthetic construct
  source 1..75: mol_type = other DNA
taaaatggtttaacgctgataaaggttttggctttatttctcctgttgatggtagtaaagatgtgtttgtgcatt

SEQ ID NO: 563897 - DNA, 75 bp, synthetic construct
  source 1..75: mol_type = other DNA
gaagcgttcttaggccgcgtcacgccactggagctgccgttgctcgacagccttgagcgcgagctgcggcggatg

SEQ ID NO: 563898 - DNA, 75 bp, synthetic construct
  source 1..75: mol_type = other DNA
tgcgaaatcatacgctctaccgtgctgttcgtacttctgtggatggcaggaaggatcaacctgcccaggcgatgc

SEQ ID NO: 563899 - DNA, 75 bp, synthetic construct
  source 1..75: mol_type = other DNA
gcctgtattagcggtaatcagatcaactgcgagcaaggtgcggtgccgacgattatgaatcgcggtggctttgcc

SEQ ID NO: 563900 - DNA, 75 bp, synthetic construct
  source 1..75: mol_type = other DNA
ttgacatgcattgtgattactgcggtaaccactatctgttcaatgcgatggatattgccgagatccgcaacaacg

SEQ ID NO: 563901 - DNA, 75 bp, synthetic construct
  source 1..75: mol_type = other DNA
agaggaactgttatcgcagggagccacacagcgtgtgctggacgcgactcagctttacctggtgagattggttat

SEQ ID NO: 563902 - DNA, 75 bp, synthetic construct
  source 1..75: mol_type = other DNA
tgtctgatgtgctgaatctgaaagcggaatccatgtttacgctgctgtcacgagtgacatcaccgcgactggatg

SEQ ID NO: 563903 - DNA, 75 bp, synthetic construct
  source 1..75: mol_type = other DNA
atgaaagagacgaaaaataccgatactgaaaacgctgtggtggttgctgatactgcgaaagaaaccagcgagcgc

SEQ ID NO: 563904 - DNA, 75 bp, synthetic construct
  source 1..75: mol_type = other DNA
ttaaagcgggaaatgtgcgtgcgttagcggtcgaacgttttgacaggcgttggaatactactagattctcccttg

SEQ ID NO: 563905 - DNA, 75 bp, synthetic construct
  source 1..75: mol_type = other DNA
ccagacttgaagaagtattaacggcttataaagcagatatcccgctaggcatgattagagaagaaaatgactttc

SEQ ID NO: 563906 - DNA, 75 bp, synthetic construct
  source 1..75: mol_type = other DNA
gacgaaaaggccttagtagaagaggaacccagtgataacgatttggccgaagaggaactgttatcgcagggagcc

SEQ ID NO: 563907 - DNA, 75 bp, synthetic construct
  source 1..75: mol_type = other DNA
gcgtatggcgcagcatacggagcagggggggattgtgattctgactacccaccagccgctcaacgttgctgaaag

SEQ ID NO: 563908 - DNA, 75 bp, synthetic construct
  source 1..75: mol_type = other DNA
ctgaacgcaggagagtgggtacaaatcaccggtagcaacggcgcggggaagacaacgcttctccgtttgctgacg

SEQ ID NO: 563909 - DNA, 75 bp, synthetic construct
  source 1..75: mol_type = other DNA
gcttgccggattcgaagatattcctgttaatcaactttctgccgggcaacagcgtcgtgttgctctggcgcgttt

SEQ ID NO: 563910 - DNA, 75 bp, synthetic construct
  source 1..75: mol_type = other DNA
tggtgtggctgcaatgaatctgctggtgaatgccggcatcccggtacgtaccgtcagccagttcaaaatcatgca

SEQ ID NO: 563911 - DNA, 75 bp, synthetic construct
  source 1..75: mol_type = other DNA
ctgtgtgttcattcgtttgacaggcaaagcattaaaattgtttccttttgcactggtgatgctattcacggtgtt

SEQ ID NO: 563912 - DNA, 75 bp, synthetic construct
  source 1..75: mol_type = other DNA
gtaaggagtggtcgaatagaagaaaacttcatcctactttgagatattatcttcgtctaatgcctcaaataattc

SEQ ID NO: 563913 - DNA, 75 bp, synthetic construct
  source 1..75: mol_type = other DNA
gaggaagtcgttcgcacagtagcagcacaaaaaaggccaaatctcgcttcatcgcttgatgaactagatatcaat

SEQ ID NO: 563914 - DNA, 75 bp, synthetic construct
  source 1..75: mol_type = other DNA
ggtcacggcattcatcaggatgtgccgccagaacatgctggcgtgttcgtggaggcagtgcatcgattgtctgaa

SEQ ID NO: 563915 - DNA, 75 bp, synthetic construct
  source 1..75: mol_type = other DNA
gggcagagcgtcgatcaaaaatggtttgtggtttacggcgactccccacagcaaacattgcggcggctggagaaa

SEQ ID NO: 563916 - DNA, 75 bp, synthetic construct
  source 1..75: mol_type = other DNA
ctggcgacctacatggtggaaggcggtagcagcaaagcgttcaccgtgatcaaaaaaatgatgtatgccgatccg

SEQ ID NO: 563917 - DNA, 75 bp, synthetic construct
  source 1..75: mol_type = other DNA
ggcggtggacagtggctggaagctatggcggaaacgggttgcgatgcgctgggtctcgactggacaacggatatc

SEQ ID NO: 563918 - DNA, 75 bp, synthetic construct
  source 1..75: mol_type = other DNA
cgattatcttgggcgcgtctaccggcgggtgtttcatctgacgttaacagaagcaatccatcgccagcgagtgcg

SEQ ID NO: 563919 - DNA, 75 bp, synthetic construct
  source 1..75: mol_type = other DNA
aactcacttccagaatcagataagaaaaccatatcaaggctaggcatcatgtactggatgaacagtgatgataac

SEQ ID NO: 563920 - DNA, 75 bp, synthetic construct
  source 1..75: mol_type = other DNA
aaccgagctactgggaacaggtcttcgggatatgctttcgaacggaaaacgtggcgctgattttaatcctgcagg

SEQ ID NO: 563921 - DNA, 75 bp, synthetic construct
  source 1..75: mol_type = other DNA
caaaaaaagtgaggaagcgtttgcttcagtttatcagttaattgagcaagccggcatgcgttgggttgataaatt

SEQ ID NO: 563922 - DNA, 75 bp, synthetic construct
  source 1..75: mol_type = other DNA
acgccatgtctgtgaacgttgatgaatggctggcaagccccgccagtgaaggctggcgtctgctgtggctgacgc

SEQ ID NO: 563923 - DNA, 75 bp, synthetic construct
  source 1..75: mol_type = other DNA
atggaattgtgctggttattggtaagcgtaaagccaatgccgtctgtaacacctgctccttgcagactaaattag

SEQ ID NO: 563924 - DNA, 75 bp, synthetic construct
  source 1..75: mol_type = other DNA
gatttacgctcccctccggggaaccgatacgaagagttgtccgggaaattacaggaatattcctccattagagtg

SEQ ID NO: 563925 - DNA, 75 bp, synthetic construct
  source 1..75: mol_type = other DNA
atgaattctattaccaaagaacgtatcgaattattcattaacaatccgcttgaaaacgggcttacccgtggcgaa

SEQ ID NO: 563926 - DNA, 75 bp, synthetic construct
  source 1..75: mol_type = other DNA
aaatggttacatcctcctagttcaggacgcagagccaaacttcgatgtaaatggcaactctccgggaactccgga

SEQ ID NO: 563927 - DNA, 75 bp, synthetic construct
  source 1..75: mol_type = other DNA
aatcgctatttcggtaccgtcaccgaggcgttagaacttgatacagccaaaaatggttacatcctcctagttcag

SEQ ID NO: 563928 - DNA, 75 bp, synthetic construct
  source 1..75: mol_type = other DNA
acttccgcatgcctttggaagtgagagaaaaattgaaattcagagcagaggcgaatgggagatctatgaactccg

SEQ ID NO: 563929 - DNA, 75 bp, synthetic construct
  source 1..75: mol_type = other DNA
acttccgtatgcctttggaagtaagagaaaaattgaaattaagagcagaggctaacggaaggtcaatgaactcag

SEQ ID NO: 563930 - DNA, 75 bp, synthetic construct
  source 1..75: mol_type = other DNA
gctttacgcagcgccgtcagcgccggtaattccggatggttggataagctgtagtgagcggatgcctgaaaagaa

SEQ ID NO: 563931 - DNA, 75 bp, synthetic construct
  source 1..75: mol_type = other DNA
tcagcacgttgataaagctggaagagttcaggaaggaaaacccctgtaagggtctggaaccactgaaagaagcac

SEQ ID NO: 563932 - DNA, 75 bp, synthetic construct
  source 1..75: mol_type = other DNA
gcttggtgatccagccgttaaccgactgaacaagcgaatgattgcacagcaccgtagccaacggctggaagacgg

SEQ ID NO: 563933 - DNA, 75 bp, synthetic construct
  source 1..75: mol_type = other DNA
atgccattattggatattcgtaacctgactattgaatttaaaaccggtgatgaatgggttaaagccgtcgaccgc

SEQ ID NO: 563934 - DNA, 75 bp, synthetic construct
  source 1..75: mol_type = other DNA
atttcggcaccgtcaccgaggcgttagaacttgatactgccaagaatggttacatcctcctagttcaggacgcag

SEQ ID NO: 563935 - DNA, 75 bp, synthetic construct
  source 1..75: mol_type = other DNA
ttcaattcttttacatgaacggtgttgagggggtatgtgagccgtcacactggatgccgctaccagagcctccac

SEQ ID NO: 563936 - DNA, 75 bp, synthetic construct
  source 1..75: mol_type = other DNA
tctggtcattctgcatggatacgaaaagatccgctggccggatgcaccggggtgggcgagccgggaaacctggct

SEQ ID NO: 563937 - DNA, 75 bp, synthetic construct
  source 1..75: mol_type = other DNA
tcgctgatgagcaatcagagcttgttaagaagatggtgtttgatacgctgaaggatttgtacaaaaaacccacct

SEQ ID NO: 563938 - DNA, 75 bp, synthetic construct
  source 1..75: mol_type = other DNA
aaccccggcagatccgtgaccggaacgacgcgctggaacgtttacgagttatacgtcgatggtttgagcacagcg

SEQ ID NO: 563939 - DNA, 75 bp, synthetic construct
  source 1..75: mol_type = other DNA
aactggtcggagctggagcgggacgcccgccgcctgctggcacgcagtaaagatatccgcatcctggttgtcctg

SEQ ID NO: 563940 - DNA, 75 bp, synthetic construct
  source 1..75: mol_type = other DNA
cgcaagttttcagaaagaatggatgccatgaatgagcaagtcagcgaggaacgccaagagcaacttcgttcgtac

SEQ ID NO: 563941 - DNA, 75 bp, synthetic construct
  source 1..75: mol_type = other DNA
aataaacagtaccgactgatatttaaatgggttaatggcaaggccgaagaattgtttttagatccacacaactac

SEQ ID NO: 563942 - DNA, 75 bp, synthetic construct
  source 1..75: mol_type = other DNA
cgccgaagaggcggcagtggcacgtagtaacgccctggcggcgttgctggaccatgaaggcgtaatagcggatat

SEQ ID NO: 563943 - DNA, 75 bp, synthetic construct
  source 1..75: mol_type = other DNA
agatatccgcattctggttgtcctgctgcgctgccgtatccagcaggccggtgccaggggactggcggaggcgct

SEQ ID NO: 563944 - DNA, 75 bp, synthetic construct
  source 1..75: mol_type = other DNA
gcgaaaagttgacgaagaaaacctaaaaaaagaatgctcgttacttcgtgatatgattcaagctgatttgggaag

SEQ ID NO: 563945 - DNA, 75 bp, synthetic construct
  source 1..75: mol_type = other DNA
atactacgaacgataacgttgcggctgaattgactcacttgaaaaaacagctgattgaagagcatgccaagcttt

SEQ ID NO: 563946 - DNA, 75 bp, synthetic construct
  source 1..75: mol_type = other DNA
gtttgttgatggtgctcgcaaacttgttttagctcgttacgcgccagctaaaacatttagtacaaaaacgaacaa

SEQ ID NO: 563947 - DNA, 75 bp, synthetic construct
  source 1..75: mol_type = other DNA
agatcaagactatggcgacgcaaataaaggtgcgccgaccgtctaaaaagagcagaaacagtacattgcaagaca

SEQ ID NO: 563948 - DNA, 75 bp, synthetic construct
  source 1..75: mol_type = other DNA
cattcagcaaaaagggtttgaggccgctttggcattgcaggaaggtaatggcactcgcttgccaaaggacatgaa

SEQ ID NO: 563949 - DNA, 75 bp, synthetic construct
  source 1..75: mol_type = other DNA
actctaaagcctatatagaatccaataaacgtaatgacgagtttcttgatgaaatttttgggaggaattttaggg

SEQ ID NO: 563950 - DNA, 75 bp, synthetic construct
  source 1..75: mol_type = other DNA
gtgtagaagattgggaagatcttgaggattttggggaaacacatctcgattttttgaatcaatatggtgatattg

SEQ ID NO: 563951 - DNA, 75 bp, synthetic construct
  source 1..75: mol_type = other DNA
atgacggtcagatattatatcagttctgctgatttaaccgcagaaaagttcgccacagcaatccgaaaccactgg

SEQ ID NO: 563952 - DNA, 75 bp, synthetic construct
  source 1..75: mol_type = other DNA
actggcacgtggaaaataagctgcactggcgcctggacgtgataatgaatgaagacgactgcagaataagaagag

SEQ ID NO: 563953 - DNA, 75 bp, synthetic construct
  source 1..75: mol_type = other DNA
tgtgcgacgtgttaacttacgttgagcgttttgagccggaagcggtgattgacgtggcgacgctgaccggtgcct

SEQ ID NO: 563954 - DNA, 75 bp, synthetic construct
  source 1..75: mol_type = other DNA
cattcagaaaaccattaacacgctgaatgatactggctcaatggaagcggtctgtttcctgaccgaactgcacgt

SEQ ID NO: 563955 - DNA, 75 bp, synthetic construct
  source 1..75: mol_type = other DNA
actgccattcttcagatgataaagacgtcatcgcaattgatggaaaaacgctccggcactcttatgacaagagtc

SEQ ID NO: 563956 - DNA, 75 bp, synthetic construct
  source 1..75: mol_type = other DNA
accgctatcccggcttcatttttatggctgcataaccatttcacatgcgtgattgatgagatgtgtcgtcgttaa

SEQ ID NO: 563957 - DNA, 75 bp, synthetic construct
  source 1..75: mol_type = other DNA
cagctaaagtctccaccgctatccctgcttcgtttttatggctgcataaccatttcacgtgtttgattgatgaga

SEQ ID NO: 563958 - DNA, 75 bp, synthetic construct
  source 1..75: mol_type = other DNA
ctccaccactatcccggcgtcgtttttatggctgcataaccatttcacatgcgtaattgatgagatgtgtcgtcg

SEQ ID NO: 563959 - DNA, 75 bp, synthetic construct
  source 1..75: mol_type = other DNA
caatgcacagtctggtcatcggacagatcaggacggatgagaaatcaaatgagattacagctatccctgaacttc

SEQ ID NO: 563960 - DNA, 75 bp, synthetic construct
  source 1..75: mol_type = other DNA
ctggatgcgtgactgccattcttcagatgataaagacgtcatcgcaattgatggaaaaacactccggcattctta

SEQ ID NO: 563961 - DNA, 75 bp, synthetic construct
  source 1..75: mol_type = other DNA
cggctaaagtctctaccgctatcccggcttcatctttatggctgcataaccatttcacatgcatgtttgatgaga

SEQ ID NO: 563962 - DNA, 75 bp, synthetic construct
  source 1..75: mol_type = other DNA
tgtgcgatgtgttaacttacgttgagcgttttgagccggaagcggtaattgacgtagcgacgttgaccggtgcct

SEQ ID NO: 563963 - DNA, 75 bp, synthetic construct
  source 1..75: mol_type = other DNA
gaagaaattatgcgtggcagtctcctttcggtcaataatagcagaacaaaagaaagagcccgaaatgacggtcag

SEQ ID NO: 563964 - DNA, 75 bp, synthetic construct
  source 1..75: mol_type = other DNA
tgggttgccagaaagatattgcagagaagatacaaaaacagggaggtgattatttattcgcggtaaaaggaaacc

SEQ ID NO: 563965 - DNA, 75 bp, synthetic construct
  source 1..75: mol_type = other DNA
aaaacagggcggtgattatttattcgcggtaaaaggaaaccagggtcggcttaataaagcctttgaggaaaaatt

SEQ ID NO: 563966 - DNA, 75 bp, synthetic construct
  source 1..75: mol_type = other DNA
gaaattacagctatccctgaacttcttaacatgctggatattaaaggaaaaatcatcacaactgatgcgatgggt

SEQ ID NO: 563967 - DNA, 75 bp, synthetic construct
  source 1..75: mol_type = other DNA
atccgaaatcactggcacgtggagaataagctgcactggcgtctggacgtggtaatgaatgaagacgactgcaaa

SEQ ID NO: 563968 - DNA, 75 bp, synthetic construct
  source 1..75: mol_type = other DNA
cagggatacggcacatcgctattaatattttgactaatgataaggtattcaaggcagggttaagacgtaagatgc

SEQ ID NO: 563969 - DNA, 75 bp, synthetic construct
  source 1..75: mol_type = other DNA
gtcttcatattgtttgcgatgtccctgatgaacttattgatttcacgtttgaatggaaaggactgaagaaattat

SEQ ID NO: 563970 - DNA, 75 bp, synthetic construct
  source 1..75: mol_type = other DNA
taaaggtcgcaataattactggaaagtgcgtcaggcggtcgagacagcaaaagagacgctctacagctttgacca

SEQ ID NO: 563971 - DNA, 75 bp, synthetic construct
  source 1..75: mol_type = other DNA
cagcagatgaaagagctgggaatgcactcttatctggcggtcggtcagggttcgcagaacgaatcgctgatgtcg

SEQ ID NO: 563972 - DNA, 75 bp, synthetic construct
  source 1..75: mol_type = other DNA
caggctttcagcgataaaggtaagcgcgtaaccaccgttctggtgccgtcgcagttgcaggataaaaacaacaaa

SEQ ID NO: 563973 - DNA, 75 bp, synthetic construct
  source 1..75: mol_type = other DNA
cttcccagatgcattacgaactggcgaaagattttgtcgttctgaccggtaatgcttatctgcagcaggtcgata

SEQ ID NO: 563974 - DNA, 75 bp, synthetic construct
  source 1..75: mol_type = other DNA
agacgactgcaaaataagaagaggaaacgccgcagaattattttcagggatacggcacatcgctattaatatttt

SEQ ID NO: 563975 - DNA, 75 bp, synthetic construct
  source 1..75: mol_type = other DNA
aaaatccaccagcagcacgttgatgccagccaactgaccttcgtgaagctcgacgaatgggtagatttaccatta

SEQ ID NO: 563976 - DNA, 75 bp, synthetic construct
  source 1..75: mol_type = other DNA
cactataccgatcgctatctgcaaaacccggttgcgctggcgttgttggggtcaattctgaaaccgctaaaaaca

SEQ ID NO: 563977 - DNA, 75 bp, synthetic construct
  source 1..75: mol_type = other DNA
gagggagtgcctgtcggtgaatatgagttgagctcaatcgttaacaaaaacggaccatggttggttgttcctaaa

SEQ ID NO: 563978 - DNA, 75 bp, synthetic construct
  source 1..75: mol_type = other DNA
ctgattgtgctccctcgggacaatagcactgttgctggttttgatggccaatcgagtgcagtaaacgtattagga

SEQ ID NO: 563979 - DNA, 75 bp, synthetic construct
  source 1..75: mol_type = other DNA
tacagcgcgccgggcgagccgggcgtagtaaagaatcacgcgcgatctcttacaccctatgtaaaggtaacccac

SEQ ID NO: 563980 - DNA, 75 bp, synthetic construct
  source 1..75: mol_type = other DNA
tagtcaaaatggctcaggcctgtcaggaagggaatgtggctaacagcgaagatagctgggcaacggatgtactgg

SEQ ID NO: 563981 - DNA, 75 bp, synthetic construct
  source 1..75: mol_type = other DNA
cggtacaccgctcgaaaaaggctggccctttggctatgtgtatgtgaaccagcgacaaaattgcgactgtggaag

SEQ ID NO: 563982 - DNA, 75 bp, synthetic construct
  source 1..75: mol_type = other DNA
tagtcaaaatggctcaggcctgtcaggaagggaatgtcgccaacagcgaagagagctgggcaacggatgtgctgg

SEQ ID NO: 563983 - DNA, 75 bp, synthetic construct
  source 1..75: mol_type = other DNA
cggtgattatttattcgctgtaaaaggaaatcaggggcggcttaataaagcctttgaggaaaaattcccactgaa

SEQ ID NO: 563984 - DNA, 75 bp, synthetic construct
  source 1..75: mol_type = other DNA
caggttgggaaaaaaatcgagtttcggtaatgaaatggtgtgtctgcgttaagctttgccagaactgggaatcgt

SEQ ID NO: 563985 - DNA, 75 bp, synthetic construct
  source 1..75: mol_type = other DNA
cactataccgatcgctatctgcaaaacccggttgcgctggcgttgttgggatcaattctgagaccgctaaaaaca

SEQ ID NO: 563986 - DNA, 75 bp, synthetic construct
  source 1..75: mol_type = other DNA
ccgtcaggtgctgcagcctgccgggtttgtcaccgatgcacatgcaccggtaacgaataatattgaaaccatgaa

SEQ ID NO: 563987 - DNA, 75 bp, synthetic construct
  source 1..75: mol_type = other DNA
tgagcggaaaacaaccctttcggcgtgcattattaggtgggccattttacgttactaacatcgtgcctaccgttc

SEQ ID NO: 563988 - DNA, 75 bp, synthetic construct
  source 1..75: mol_type = other DNA
acgagccagccggagggctgatgctgaaaggcccacagggcgaggaaaaagagattgaaagccgactggaggaag

SEQ ID NO: 563989 - DNA, 75 bp, synthetic construct
  source 1..75: mol_type = other DNA
aaatttccgctgaaagaattaaataatccagagcatgacagttacgcaatgagtgaaaagagtcacggcagagaa

SEQ ID NO: 563990 - DNA, 75 bp, synthetic construct
  source 1..75: mol_type = other DNA
gatatctggcttaacagcgccaactttacgctgccgctggatttttcgctgttcgcgcacttgtgcgaggtgccg

SEQ ID NO: 563991 - DNA, 75 bp, synthetic construct
  source 1..75: mol_type = other DNA
aacagcaccaaccaactgaaaattcaggcattcgatgacttcttcggttatcgggcattaatcgacgaagttaac

SEQ ID NO: 563992 - DNA, 75 bp, synthetic construct
  source 1..75: mol_type = other DNA
ccgatgctgcaccacgcatggtaatgctggcccgcgtgaatatggcattgcaaggtgcccccaaagcgcagattt

SEQ ID NO: 563993 - DNA, 75 bp, synthetic construct
  source 1..75: mol_type = other DNA
tgccagagttgtatcctgtatcagtcctgcaaaatttcacgagtgctttattaattggatgcgtgactgccattc

SEQ ID NO: 563994 - DNA, 75 bp, synthetic construct
  source 1..75: mol_type = other DNA
ataatagcagaacaaaagaaagagccaaaaatgacggtcagatattatatcagttctgctgatttaaccgcagag

SEQ ID NO: 563995 - DNA, 75 bp, synthetic construct
  source 1..75: mol_type = other DNA
gcgcaatggcgagatgaatctggcgaactggtgccagcaactggtcgccagcaaagcgatggtgccattattgca

SEQ ID NO: 563996 - DNA, 75 bp, synthetic construct
  source 1..75: mol_type = other DNA
ctgtggttcccggcttatggactgctcccccgttggcaccatgcccgcccgacacattgcgaaaaacccgccggg

SEQ ID NO: 563997 - DNA, 75 bp, synthetic construct
  source 1..75: mol_type = other DNA
ttttgccgaagaacagtaccagcaactgtggtttccggcctacggaatgctgccgcgctggcatcatgcccgcac

SEQ ID NO: 563998 - DNA, 75 bp, synthetic construct
  source 1..75: mol_type = other DNA
agccagatcgctggttgccgttactgttggcgcaagttccggcgatgatcctgccgcgcgaatgggaaaccctca

SEQ ID NO: 563999 - DNA, 75 bp, synthetic construct
  source 1..75: mol_type = other DNA
caagtcagggactgggtaagctatgtgctttctccaactaatctggtctatttcgctgaggaacaataccagcaa

SEQ ID NO: 564000 - DNA, 75 bp, synthetic construct
  source 1..75: mol_type = other DNA
gagattgaaagccgcctggaggaaggttgctattatttactgttcgacagccgcacccatcgcggggcgaatcag

SEQ ID NO: 564001 - DNA, 75 bp, synthetic construct
  source 1..75: mol_type = other DNA
gagctgatcatcgccctgattaaatcgttgccgaagccggtacgccgtaattttgtacctgcgccaaactacgcc

SEQ ID NO: 564002 - DNA, 75 bp, synthetic construct
  source 1..75: mol_type = other DNA
agaatataccggcgcacgtaacgcgcgtttctccatcttccccggttctggtttattcaaaaaccgcctaaatgg

SEQ ID NO: 564003 - DNA, 75 bp, synthetic construct
  source 1..75: mol_type = other DNA
aatcagcaagctggattacccgaacttctggcatcagggcaatttcaagctgcgtttgagctatcagtttgagcc

SEQ ID NO: 564004 - DNA, 75 bp, synthetic construct
  source 1..75: mol_type = other DNA
ctggagatcgggcgtcatgccctgcgtcatggctgggtgatgccgctgggtaaccgcaatgtgcagaccgtgctg

SEQ ID NO: 564005 - DNA, 75 bp, synthetic construct
  source 1..75: mol_type = other DNA
ggagcctgtcgctcagcatttgattaaacgcacctacagcgaaccgcactgggaacgggcgcagggcgcggtgat

SEQ ID NO: 564006 - DNA, 75 bp, synthetic construct
  source 1..75: mol_type = other DNA
ttgctgcgctgcatgaaaaagtgcgcgctgaactgaacgacacggtggtggatattgcgaagcaggtcgagcaaa

SEQ ID NO: 564007 - DNA, 75 bp, synthetic construct
  source 1..75: mol_type = other DNA
gtcgcctgtgtcgtaccgattatctcaactatctgcgcgtgcgcgaatggcaggatatctacacccagttgcgtc

SEQ ID NO: 564008 - DNA, 75 bp, synthetic construct
  source 1..75: mol_type = other DNA
caggattctgtgtaaataccttttctcagaagtggccgtccaggcggtcaccgaactcgataataaagcggctca

SEQ ID NO: 564009 - DNA, 75 bp, synthetic construct
  source 1..75: mol_type = other DNA
acaacaggccattttccaggagatggcgaaagagattgaccaggcggtagggaaagtcctgctacgtgaagcggc

SEQ ID NO: 564010 - DNA, 75 bp, synthetic construct
  source 1..75: mol_type = other DNA
cgcaaaaacatggctgcgtgcgtgaggcgatgattatcacgtctgcgctctccattcaggatccgcgcgaacgtc

SEQ ID NO: 564011 - DNA, 75 bp, synthetic construct
  source 1..75: mol_type = other DNA
gttgctcagcatttgattaaacgcacctacagcgaaccgcactgggaacgggcgcagggcgcggtgatggcaacg

SEQ ID NO: 564012 - DNA, 75 bp, synthetic construct
  source 1..75: mol_type = other DNA
aaagcgccctgattgccgcaacgggctttgacgctgagccgcttctgcagacgctggaccttaccgccgatcacg

SEQ ID NO: 564013 - DNA, 75 bp, synthetic construct
  source 1..75: mol_type = other DNA
gacggtgcttggagttccccgctggcgcagacggttgatgtattttgcggtaaggttgttcgggaaagggaaata

SEQ ID NO: 564014 - DNA, 75 bp, synthetic construct
  source 1..75: mol_type = other DNA
cggcgtctgatgatgtactgtgctgtacgtctcttcgggcggggtaactacgaaccgatacatcaaaaaacaatg

SEQ ID NO: 564015 - DNA, 75 bp, synthetic construct
  source 1..75: mol_type = other DNA
cgcatggtcgttatgcgaaagcggcgattattcatgactggctgtatgacaatgccctgcgcacgaaggcggaag

SEQ ID NO: 564016 - DNA, 75 bp, synthetic construct
  source 1..75: mol_type = other DNA
gcagaggaaatggcagacgcggcgcagagcgcaacgcttgccgccaccggctttgatgccgatctgttgctgcag

SEQ ID NO: 564017 - DNA, 75 bp, synthetic construct
  source 1..75: mol_type = other DNA
ctgcgggtgaagatccgcgaggacggcgtggtgcgcaacaaggcggtgtatctggcgctgggcgtgctggccgac

SEQ ID NO: 564018 - DNA, 75 bp, synthetic construct
  source 1..75: mol_type = other DNA
ctggatgcgttcgaggccggcgactggggcgagcgcttcccgacggtggtcgccgcctggcgccgtgcctggacg

SEQ ID NO: 564019 - DNA, 75 bp, synthetic construct
  source 1..75: mol_type = other DNA
taatttccctaagtgagattaataatgttgtcaaatataaccctatttctggtgagttcacatggctaaaatctt

SEQ ID NO: 564020 - DNA, 75 bp, synthetic construct
  source 1..75: mol_type = other DNA
atgctatgggttgccagaaagatattgcagagaagatacaaaaacagggaggtgattatttattcgcgtaaaagg

SEQ ID NO: 564021 - DNA, 75 bp, synthetic construct
  source 1..75: mol_type = other DNA
ccgccgtcttaagggcgttcagtccatggtgaaaaaagcggaaatcaaggtggagctgctgccgaaatatgccgc

SEQ ID NO: 564022 - DNA, 75 bp, synthetic construct
  source 1..75: mol_type = other DNA
ttgagtaaattcacgacaccggcggttctggagatgcttgacgattaccgctggcggctggttgagccgtttgaa

SEQ ID NO: 564023 - DNA, 75 bp, synthetic construct
  source 1..75: mol_type = other DNA
gcagaggaaatggcagacgcggcacagagcgcaatgcttgccactaccggcttcgatgtcgatctgttgctgcag

SEQ ID NO: 564024 - DNA, 75 bp, synthetic construct
  source 1..75: mol_type = other DNA
gaaacgcagcagaattattttcagggatacggcacattgctattattcttttgacgaatgagcaggtattcaagg

SEQ ID NO: 564025 - DNA, 75 bp, synthetic construct
  source 1..75: mol_type = other DNA
agagttgtatcctgtatcagtcctgcaaaatttcacgagtgctttattaactggatgcgagactgccatacttca

SEQ ID NO: 564026 - DNA, 75 bp, synthetic construct
  source 1..75: mol_type = other DNA
atggaaaaacactccggcattcttatgacaagagtcgccgcaagggagcgattcatgtcattagtgcgttctcaa

SEQ ID NO: 564027 - DNA, 75 bp, synthetic construct
  source 1..75: mol_type = other DNA
atatttctattatccccgattacagacaagcctggaaagtagaacataaattatcggatattctactgttgacta

SEQ ID NO: 564028 - DNA, 75 bp, synthetic construct
  source 1..75: mol_type = other DNA
ttaacatgctggatattaaaggaaaaatcatcacaactgatgtgatgggttgccagaaagatattgcagagaaga

SEQ ID NO: 564029 - DNA, 75 bp, synthetic construct
  source 1..75: mol_type = other DNA
aaccactggcatgtggagaataagctgcactggcgtctggacgtggtaatgaatgaagacgactgcaaaataaga

SEQ ID NO: 564030 - DNA, 75 bp, synthetic construct
  source 1..75: mol_type = other DNA
atatcagttctgctgatttaagcgctgagaagttcgccacagcaatccgaaaccactggcacgtggagaataagc

SEQ ID NO: 564031 - DNA, 75 bp, synthetic construct
  source 1..75: mol_type = other DNA
atgtcattagtgcgttctcaacaatgcacagtctgtgtcatcggacagatcaggacggatgagaaatccaatgaa

SEQ ID NO: 564032 - DNA, 75 bp, synthetic construct
  source 1..75: mol_type = other DNA
tgtccctgatgaacttattgatttcacgtttgaatggaaaggtctgaagaaattatgcgtggcagtctcctttcg

SEQ ID NO: 564033 - DNA, 75 bp, synthetic construct
  source 1..75: mol_type = other DNA
gggcggcttaataaagcctttgaggaaaaattcccactgaaagaattaaataatccagagcatgacagttacgca

SEQ ID NO: 564034 - DNA, 75 bp, synthetic construct
  source 1..75: mol_type = other DNA
agagtcacggcagagaagaaatccgtcttcatattgtttgcgatgtccctgatgaacttattgattttacgtttg

SEQ ID NO: 564035 - DNA, 75 bp, synthetic construct
  source 1..75: mol_type = other DNA
cagatgataaagacgtcattgcaattgatggaaaaacgctccggcactcttatgacaagagtcgccgcaggggag

SEQ ID NO: 564036 - DNA, 75 bp, synthetic construct
  source 1..75: mol_type = other DNA
tccagcatcaaatgaaggttaatttatggacgaaaaacagttacaggctctggctaacgaactggccaaaaacct

SEQ ID NO: 564037 - DNA, 75 bp, synthetic construct
  source 1..75: mol_type = other DNA
cgaaatttcatgagagctttattaactggatgcttgactaccattcttcagatgataaagacgtcatcgcaattg

SEQ ID NO: 564038 - DNA, 75 bp, synthetic construct
  source 1..75: mol_type = other DNA
gaaagaattaaataatccagagcatgacagttacgcaattagtgaaaagagtcacagcagagaagaaatccgtct

SEQ ID NO: 564039 - DNA, 75 bp, synthetic construct
  source 1..75: mol_type = other DNA
gtggtggtgttgtttgtgactacgctggcgatgttgttcctggcgggagcgaaattgtggcagttcattgccatt

SEQ ID NO: 564040 - DNA, 75 bp, synthetic construct
  source 1..75: mol_type = other DNA
cgtggcttcctgaaaccgatgggcgtgattctggtgctggcggtgttgctgctggcgcagccagacctcggtacg

SEQ ID NO: 564041 - DNA, 75 bp, synthetic construct
  source 1..75: mol_type = other DNA
ttcatgtcattagtgcgttctcaacaatgcacagtctggtcatcggacagatcaggacggatgagaaatctaatg

SEQ ID NO: 564042 - DNA, 75 bp, synthetic construct
  source 1..75: mol_type = other DNA
ttatcggatattctactgttgactatttgtgccgttatttctggtgcagaaggctgggaagatatagaggattta

SEQ ID NO: 564043 - DNA, 75 bp, synthetic construct
  source 1..75: mol_type = other DNA
atcggcatggggatttcagcggtcgtgctgttgatcctcgccgaaccgtaccgtatccgccgtgttaccgcgttc

SEQ ID NO: 564044 - DNA, 75 bp, synthetic construct
  source 1..75: mol_type = other DNA
gtggtggtgctgtttgtgaccacgttggcgatgttgttcctggctggcgcgaaattgtggcagttcattgccatt

SEQ ID NO: 564045 - DNA, 75 bp, synthetic construct
  source 1..75: mol_type = other DNA
gtaagccgcgcgagctccatggaaacatcatcacaaccgatgtgagtaagttcgcggaagttcttgcagagaaga

SEQ ID NO: 564046 - DNA, 75 bp, synthetic construct
  source 1..75: mol_type = other DNA
tcaggacggatgagaaatccaatgagattacagctatccctgaacttcttaacatgctggatattaaaggaaaaa

SEQ ID NO: 564047 - DNA, 75 bp, synthetic construct
  source 1..75: mol_type = other DNA
atccaatgaaattacagctatccctgaacttcttaacatgctggatattaaaggaaaaatcatcacaactgatgc

SEQ ID NO: 564048 - DNA, 75 bp, synthetic construct
  source 1..75: mol_type = other DNA
agccctacaaaatttcatgagtgctttattaactggatgcgtgattgtcattcttcagatgataaagacgtcatt

SEQ ID NO: 564049 - DNA, 75 bp, synthetic construct
  source 1..75: mol_type = other DNA
attcttatgacaagagtcgccgcaggggagcgattcatgtcattagtgcgttctcaacaatgcacagtctggtca

SEQ ID NO: 564050 - DNA, 75 bp, synthetic construct
  source 1..75: mol_type = other DNA
atatttctattatccccgattacagacaagcctggaaagtggaacataagttatcggatattctactgttgacta

SEQ ID NO: 564051 - DNA, 75 bp, synthetic construct
  source 1..75: mol_type = other DNA
actggcgatcgcgctggcaatgctcaccaccttgctgacgctgggtatgctggtattcagcgccacccaggccat

SEQ ID NO: 564052 - DNA, 75 bp, synthetic construct
  source 1..75: mol_type = other DNA
agacgagcatttgccatccgcgggccagtgtcacagttgatgaggcatgttcgcaagtggtggatttactgcaac

SEQ ID NO: 564053 - DNA, 75 bp, synthetic construct
  source 1..75: mol_type = other DNA
ctgggtatccccgcgttgcgggatcgtataagcatccgtgccaaggtggagcacccgtttcgcatcatcaagcgg

SEQ ID NO: 564054 - DNA, 75 bp, synthetic construct
  source 1..75: mol_type = other DNA
ctacgcgcccggctggcaaagcgtattggtctggctgcgggtgaggtggtggaagaggcgttattacgtttgcag

SEQ ID NO: 564055 - DNA, 75 bp, synthetic construct
  source 1..75: mol_type = other DNA
tgcatcccaccaccattgtcaatttcgttgaaggctcccgtttcacgcaagaaaaacatcagcaaacccactcca

SEQ ID NO: 564056 - DNA, 75 bp, synthetic construct
  source 1..75: mol_type = other DNA
taagcacattccgatgaataaatatttccttaaacagcaactggcctgggtgccttttcttggcctggcatgttg

SEQ ID NO: 564057 - DNA, 75 bp, synthetic construct
  source 1..75: mol_type = other DNA
ctggtgaagtatggctgtcaatggcgcgtgaagtgtacggttcagagcgtgaagtgcgcatcgttaacgaagatg

SEQ ID NO: 564058 - DNA, 75 bp, synthetic construct
  source 1..75: mol_type = other DNA
gacgttgccgttatttccggtctggaccgttatattacgctcagtctgctgaaaagtgacgggagcctcatctgg

SEQ ID NO: 564059 - DNA, 75 bp, synthetic construct
  source 1..75: mol_type = other DNA
tttgattcagtacaacagccattttattggcctggacataaaccaggcgttgcctggcgatatgatttttttcga

SEQ ID NO: 564060 - DNA, 75 bp, synthetic construct
  source 1..75: mol_type = other DNA
aaaatattattttctcccccgaattcctccgtgaaggtaaagccctttacgataatctccatccgtcacgtattg

SEQ ID NO: 564061 - DNA, 75 bp, synthetic construct
  source 1..75: mol_type = other DNA
gcggccatgaacagcaaggtgctggtcgacctgcgcttgtgctctccgttcaagcctttaatcaactgggaatga

SEQ ID NO: 564062 - DNA, 75 bp, synthetic construct
  source 1..75: mol_type = other DNA
taacccgttgtatcggattttccctgttactcagcaaatccgcagaagttacgtaataaatctcgcacaggatgt

SEQ ID NO: 564063 - DNA, 75 bp, synthetic construct
  source 1..75: mol_type = other DNA
agctactgggataccaaagttttcgaagccacccttaaaaatgcccggggggaacctttcacgctgaagcctgtg

SEQ ID NO: 564064 - DNA, 75 bp, synthetic construct
  source 1..75: mol_type = other DNA
ttcagcaatggctgaactcattgtggcaggaaaaagaccgacttctgacgtctctcatgtcatcacagcgtcaga

SEQ ID NO: 564065 - DNA, 75 bp, synthetic construct
  source 1..75: mol_type = other DNA
agcaatgtgcaagctgttttcgtaagaaaagttttggcagtcagatcagagactctctgaaagcatccagagaaa

SEQ ID NO: 564066 - DNA, 75 bp, synthetic construct
  source 1..75: mol_type = other DNA
aaagaaaaaactaccgagtcggtaatggtattgtggggcagtctaatatctggaacgaaatgatcatgaggcgga

SEQ ID NO: 564067 - DNA, 75 bp, synthetic construct
  source 1..75: mol_type = other DNA
cggcctgccgcaggcggcactgaactacatcaagcgcattgaagagctgaccggtgtgccgatcgatatcatctc

SEQ ID NO: 564068 - DNA, 75 bp, synthetic construct
  source 1..75: mol_type = other DNA
atgctggggatgaatagcgcccgtgaattgatgcgccagaaagaggatctttataaagaactgaacctggctgac

SEQ ID NO: 564069 - DNA, 75 bp, synthetic construct
  source 1..75: mol_type = other DNA
aacagataaaaaaatactggagcggagatataaaaaggaaatggaaagatccccggaaaatgctgctgctgctgc

SEQ ID NO: 564070 - DNA, 75 bp, synthetic construct
  source 1..75: mol_type = other DNA
ttgacataactaaactgcctgacaggtgccaggcattacttgatgaaatgcatgaagaaacgggaataagccgtg

SEQ ID NO: 564071 - DNA, 75 bp, synthetic construct
  source 1..75: mol_type = other DNA
actaccaatgggaagctcaaatccgtaaacgtggttttccctctcaaaccaaaacctttaacaccaaagtggaag

SEQ ID NO: 564072 - DNA, 75 bp, synthetic construct
  source 1..75: mol_type = other DNA
atgcacgagctgacaaaaatcacaggacataaagacccgagaatgttaatgcgttattatcatcctaaagctgag

SEQ ID NO: 564073 - DNA, 75 bp, synthetic construct
  source 1..75: mol_type = other DNA
cattggtgcggatactaaaaggcactcagctggcgaaaaactatatggccagcatcaggagtgccgatgtcgcca

SEQ ID NO: 564074 - DNA, 75 bp, synthetic construct
  source 1..75: mol_type = other DNA
acgttctggacggcctgaaagaggtgaaactctgcgtggcctaccgtatgccggatggtcgcgaagtgaccacca

SEQ ID NO: 564075 - DNA, 75 bp, synthetic construct
  source 1..75: mol_type = other DNA
accggttccggcctggggccgcgttatgttgattacgttctgggtatcctcaaagcttactccactcgcgttggc

SEQ ID NO: 564076 - DNA, 75 bp, synthetic construct
  source 1..75: mol_type = other DNA
gcgtgagaaagcgcgcggcgcgaaagcgatcggcaccacgggtcgtggtatcgggcctgcttatgaagataaagt

SEQ ID NO: 564077 - DNA, 75 bp, synthetic construct
  source 1..75: mol_type = other DNA
tctacgaaccggtgatgaaagaagattcattcttcaactctcggctggaacgtgatctcgccaccttcaaacaac

SEQ ID NO: 564078 - DNA, 75 bp, synthetic construct
  source 1..75: mol_type = other DNA
aatctcgccgggattcagaatacacaggatgatgtgattatcaatttggtgatggggtcgatgtttctggtgctg

SEQ ID NO: 564079 - DNA, 75 bp, synthetic construct
  source 1..75: mol_type = other DNA
catagcggtgttcccggcattcgacagcgtgcgtcaggctctgccaatggtacaggcgctgctgcaaatggcact

SEQ ID NO: 564080 - DNA, 75 bp, synthetic construct
  source 1..75: mol_type = other DNA
gcgtaatgaccgatggggaggagatcttgaaggacgtatgcgctttgaagtggtcaacaaaaactggccaccgag

SEQ ID NO: 564081 - DNA, 75 bp, synthetic construct
  source 1..75: mol_type = other DNA
gctgacagcgctatacagttctgatacccactcacacttcaatatgatgggattccagaatacatcggatgatct

SEQ ID NO: 564082 - DNA, 75 bp, synthetic construct
  source 1..75: mol_type = other DNA
ttgtccataagttatccaaaggcgtgactcagtcatctgtggccagcattccctgccggccggatctgcggcaac

SEQ ID NO: 564083 - DNA, 75 bp, synthetic construct
  source 1..75: mol_type = other DNA
ggatacccctactgttctgagtggtggtcggcagcagacactggcctgaaggccagggtgatgaagcaggttgat

SEQ ID NO: 564084 - DNA, 75 bp, synthetic construct
  source 1..75: mol_type = other DNA
acgggtaatcgccgcagcaaaatacacacaccgtctcaggctcaagaagcaatttcccgctggactgccacttgt

SEQ ID NO: 564085 - DNA, 75 bp, synthetic construct
  source 1..75: mol_type = other DNA
acgggtaatcgccgcagtaaaatacacacaccgcctcaggctcaagaagcaatttcccgctggactgccacttgt

SEQ ID NO: 564086 - DNA, 75 bp, synthetic construct
  source 1..75: mol_type = other DNA
acgggtaatcgccgcagaaaaatacacacaccgactcaggctcaagaagcaattacccgctggactgccacttgt

SEQ ID NO: 564087 - DNA, 75 bp, synthetic construct
  source 1..75: mol_type = other DNA
cgttcacaaaatgttggcctagtaataacaggatgtacctatgtcactccaagcggtattggatttactaatgaa

SEQ ID NO: 564088 - DNA, 75 bp, synthetic construct
  source 1..75: mol_type = other DNA
tttgccgcgtatgacgaccgtttcattaacagccttgaaaagttagcagctgcagccaaaagtggcggtgctccg

SEQ ID NO: 564089 - DNA, 75 bp, synthetic construct
  source 1..75: mol_type = other DNA
ccacaacttgttcctgaattaaccattccggataaactatgggatcaaattcaggcatcgaaaggaactggctgg

SEQ ID NO: 564090 - DNA, 75 bp, synthetic construct
  source 1..75: mol_type = other DNA
gattccagaacacgtcggacgatctgataatgaatctggtaatggggacgatgtttatggtgttgccggctgtct

SEQ ID NO: 564091 - DNA, 75 bp, synthetic construct
  source 1..75: mol_type = other DNA
agaacattattttttccccagaatttctccgcgaaggcaaagccctttacgataaccttcatccatcccgcattg

SEQ ID NO: 564092 - DNA, 75 bp, synthetic construct
  source 1..75: mol_type = other DNA
cgcaggaactgcctctgaactccttaaagctatgttagcagagaaatgggaaagcttcttacgtagtagcaagct

SEQ ID NO: 564093 - DNA, 75 bp, synthetic construct
  source 1..75: mol_type = other DNA
gataagcccaaagaagagatcattgaggaagttctaaaacgacctgtaaaatcagtttctataggtgcccctgta

SEQ ID NO: 564094 - DNA, 75 bp, synthetic construct
  source 1..75: mol_type = other DNA
gcgttgctatgctaaatgatcggatatctcctattgttgatatggaaattcagcagtttttgcaatcagatcaaa

SEQ ID NO: 564095 - DNA, 75 bp, synthetic construct
  source 1..75: mol_type = other DNA
ctctttcttcaattctcgcctggaacgtaatctcgccaccttcaaacaacaagccgatgtcattatctccaatcg

SEQ ID NO: 564096 - DNA, 75 bp, synthetic construct
  source 1..75: mol_type = other DNA
gctatgcataagaaataccacaccgaaaatattattttctcccccgaattccttcgcgaaggtaaagccctttac

SEQ ID NO: 564097 - DNA, 75 bp, synthetic construct
  source 1..75: mol_type = other DNA
ggggaggatgagggtaacaaaggctcgctggcgattgtgcgcatcgagaacgccctctacggggcttttgtggtg

SEQ ID NO: 564098 - DNA, 75 bp, synthetic construct
  source 1..75: mol_type = other DNA
agttggtcttcttcagcaaagttttatgaagggagcatctacatcaacatccagtaaatctgaaaataaacacaa

SEQ ID NO: 564099 - DNA, 75 bp, synthetic construct
  source 1..75: mol_type = other DNA
gatcagcagtataggggatcagactgctgctgccccggtatggtgggtggtggttcataaattgtcgaaaggtgt

SEQ ID NO: 564100 - DNA, 75 bp, synthetic construct
  source 1..75: mol_type = other DNA
ggccagcgtgggtgtcgctgttagcgctgcctttcaaaagggtactgaaactgctcagaatacaggcgggaaact

SEQ ID NO: 564101 - DNA, 75 bp, synthetic construct
  source 1..75: mol_type = other DNA
gaagggatgtggctgcgtgcccggggggcgatgaagctgattaatcaaaactcgaaagcgtttgaggaagcgata

SEQ ID NO: 564102 - DNA, 75 bp, synthetic construct
  source 1..75: mol_type = other DNA
cctgcctttgattcgatgcgtcagtccttaccgatggtgcaggggctgatattaatggcggtgtatatcatgatc

SEQ ID NO: 564103 - DNA, 75 bp, synthetic construct
  source 1..75: mol_type = other DNA
tgagacgtatgtggaaaaccttctcgcggcaaaacgaatcttcccagcgatgattgcaggtcagaagcaccttgc

SEQ ID NO: 564104 - DNA, 75 bp, synthetic construct
  source 1..75: mol_type = other DNA
aacagggagaccgggatattgaccgcccgacctggcgctcaattgttggcggttaccagcggtggcaccattccg

SEQ ID NO: 564105 - DNA, 75 bp, synthetic construct
  source 1..75: mol_type = other DNA
cggtagtcaatcctccagcagcaaggcatccgcagatccgcatcgtcgtaccggtcgccaatatggatgatgtct

SEQ ID NO: 564106 - DNA, 75 bp, synthetic construct
  source 1..75: mol_type = other DNA
ccgcgcgggcattgctgatgcctggtcgcacgccggggcgtcgcacgccactgtggcaacaacgactacgggcca

SEQ ID NO: 564107 - DNA, 75 bp, synthetic construct
  source 1..75: mol_type = other DNA
cccgcgtacgcgactattcgccagaaatgctcgatgaattactggcaaccggtgcggttatctggtcggggcaaa

SEQ ID NO: 564108 - DNA, 75 bp, synthetic construct
  source 1..75: mol_type = other DNA
gctgaccgtctgactattgaccgtctgcgcgatttggtcacatctgccacacagccgcaacaatacacaccagtg

SEQ ID NO: 564109 - DNA, 75 bp, synthetic construct
  source 1..75: mol_type = other DNA
gccacgacctatgcgcgattgctgctggaacgtcagggcgtattacccgccaccgatggtagcccggcgctcttt

SEQ ID NO: 564110 - DNA, 75 bp, synthetic construct
  source 1..75: mol_type = other DNA
gcaacgccgctttctgttgccagtgggttacaacgcattggtcgtgccggacatcaggttggcggtgtatctaaa

SEQ ID NO: 564111 - DNA, 75 bp, synthetic construct
  source 1..75: mol_type = other DNA
cgctgaaactgtccggaaaaatccacaaacagcatgaaagtattgcccgaagtcgtggcgaccccccgcccaaaa

SEQ ID NO: 564112 - DNA, 75 bp, synthetic construct
  source 1..75: mol_type = other DNA
ttacccgcctcactctgggaaagccagatcttgcctgcccgcgtacacgactattcgccagaaatgctcgatgaa

SEQ ID NO: 564113 - DNA, 75 bp, synthetic construct
  source 1..75: mol_type = other DNA
ggattgatatgggcgcagtggatctggtgattcaggtggcaacgccgctttctgttgccagtgggttacaacgca

SEQ ID NO: 564114 - DNA, 75 bp, synthetic construct
  source 1..75: mol_type = other DNA
tctggcactgagcctggagcgactcgatgcgttgctaaacacctctgcacaacgaattggtctttccgccaccgt

SEQ ID NO: 564115 - DNA, 75 bp, synthetic construct
  source 1..75: mol_type = other DNA
gcagagtttatgtaccagagcgacgccccgctggcagagcgccgggcgtccgtactgtcgctggacagcgagctg

SEQ ID NO: 564116 - DNA, 75 bp, synthetic construct
  source 1..75: mol_type = other DNA
ggggacgttatggtgccttgtgagttccgctgctggggccaatacctgtcatggcagttcaccattggtctttgt

SEQ ID NO: 564117 - DNA, 75 bp, synthetic construct
  source 1..75: mol_type = other DNA
agtgaccacattttcgctgagtatcatggtcacagcctacggttcagccactactaatgtgactcccagagctac

SEQ ID NO: 564118 - DNA, 75 bp, synthetic construct
  source 1..75: mol_type = other DNA
tagataaaaatggtctttttgttggaaatcatcagatagaactatttgatgagattgattatctcagagaggttt

SEQ ID NO: 564119 - DNA, 75 bp, synthetic construct
  source 1..75: mol_type = other DNA
tgccgaagccggttttgatccgcaaggacgcaccagtgaagacctgctcgaccttgctgagtctcgcgtctttaa

SEQ ID NO: 564120 - DNA, 75 bp, synthetic construct
  source 1..75: mol_type = other DNA
cactgttcagcgatggcgcagtagagacaggcactgccactgtccagtcggcaaaagcgaacactttgccactgc

SEQ ID NO: 564121 - DNA, 75 bp, synthetic construct
  source 1..75: mol_type = other DNA
cacttcaaaaactcagcgggcgagtggtggctggtgatttcaccgtggggaagactccggctttgtcagcaagga

SEQ ID NO: 564122 - DNA, 75 bp, synthetic construct
  source 1..75: mol_type = other DNA
ttttcgcgttgttaattttagcaacgctgataaaccgttttctgctatggcggttaccggagagaaaagggggtg

SEQ ID NO: 564123 - DNA, 75 bp, synthetic construct
  source 1..75: mol_type = other DNA
gtaacgtatatcggtttacgacacaatttctccacttcattcatgtagcaatggagatagggggtaagcagggca

SEQ ID NO: 564124 - DNA, 75 bp, synthetic construct
  source 1..75: mol_type = other DNA
tgaatgatctaccagtccgacaaacgccgatgtttacgctgctgcgtgaggcgggattttcaagttcgccacaag

SEQ ID NO: 564125 - DNA, 75 bp, synthetic construct
  source 1..75: mol_type = other DNA
ggacgcagtatttctactgtgcgccgggcatttgctgaagcgacgaagtgcggaatgcttgttaagcaacatcag

SEQ ID NO: 564126 - DNA, 75 bp, synthetic construct
  source 1..75: mol_type = other DNA
gcatggtctggcgagcctggaacgttgagccggatggcggttactggctgaaccggtatatcgctcgttatggcc

SEQ ID NO: 564127 - DNA, 75 bp, synthetic construct
  source 1..75: mol_type = other DNA
attagccaccgggcaagttttagtgggtgacccctctggttttctgcataccgtgagcgccattttttgggctgg

SEQ ID NO: 564128 - DNA, 75 bp, synthetic construct
  source 1..75: mol_type = other DNA
ccctgaaactgtccggaaaaatccacaaacagcatgaaagtattgcccgaagtcgtggcgaccccccccccaaaa

SEQ ID NO: 564129 - DNA, 75 bp, synthetic construct
  source 1..75: mol_type = other DNA
aatatattgatgatgtattcaccgaaggtcatggaacgctgtatgccagcgatggccgtacccgcaaagatccgt

SEQ ID NO: 564130 - DNA, 75 bp, synthetic construct
  source 1..75: mol_type = other DNA
agcctgccacggcctgtttccaaaacgcctcgtgatggaagcagcctgtatctttgcccaacgcttacaggttga

SEQ ID NO: 564131 - DNA, 75 bp, synthetic construct
  source 1..75: mol_type = other DNA
taaaaaacgggctgaataccgtcggcgctatgagatgctcgacgctattcagccacaaatggccacgatgtttcg

SEQ ID NO: 564132 - DNA, 75 bp, synthetic construct
  source 1..75: mol_type = other DNA
gcctcatcgctaactttgcaacagtgccttctgaacatactggcatcgagtatgctggcggtgaccacattttca

SEQ ID NO: 564133 - DNA, 75 bp, synthetic construct
  source 1..75: mol_type = other DNA
cgcaaagatccgtcgaaaaaatacggttccggcggcctggtacagggcaaaaaatatatgctttctctgacctgg

SEQ ID NO: 564134 - DNA, 75 bp, synthetic construct
  source 1..75: mol_type = other DNA
gttccggcggcctggtacagggcaaaaaatatatgctttctctaacctggaacgcaccaatggaagccttcaccg

SEQ ID NO: 564135 - DNA, 75 bp, synthetic construct
  source 1..75: mol_type = other DNA
ttgcgacggattacaacgctttaatcaacagcaaccagtcaccaaaggttatttataataaagcggaaaaaacag

SEQ ID NO: 564136 - DNA, 75 bp, synthetic construct
  source 1..75: mol_type = other DNA
gcttgcgaacgcaatagcacccattaaaaatgcgtttccgcttttattgttggttattgtctttattactaatta

SEQ ID NO: 564137 - DNA, 75 bp, synthetic construct
  source 1..75: mol_type = other DNA
gctaatggagcgcccgattgtggtcgcgaatggcaaagcgcggattggtcgtccaccggagcaggtactggaaat

SEQ ID NO: 564138 - DNA, 75 bp, synthetic construct
  source 1..75: mol_type = other DNA
atgtatacctcgtggcgcagccaggcagtttcatacatccgtccatgccagttttgtacctgagtcagggccagg

SEQ ID NO: 564139 - DNA, 75 bp, synthetic construct
  source 1..75: mol_type = other DNA
tggacggtgaaaaaatacattgatgatgtgttcaccgaaggtcacggtacgctgtatgccagcgatggtcgtacc

SEQ ID NO: 564140 - DNA, 75 bp, synthetic construct
  source 1..75: mol_type = other DNA
ggcatcgggtgaccgaaataataacccgcttaaattcgttgtaacgagctatgtacgcgataaagaagtgaaagg

SEQ ID NO: 564141 - DNA, 75 bp, synthetic construct
  source 1..75: mol_type = other DNA
acaggttgaagaagttctgttcggtgaaaatggttgtaccaaagcctcgctgaagggcaaaaccattgttgatat

SEQ ID NO: 564142 - DNA, 75 bp, synthetic construct
  source 1..75: mol_type = other DNA
cactgaaactgtccggaaaaatccacaaacagcatgaaagtattgcccgaagtcgtggcgaccccccacccaaaa

SEQ ID NO: 564143 - DNA, 75 bp, synthetic construct
  source 1..75: mol_type = other DNA
cccaaaagcaacaactcccgttcactcccggtggcactcactgcccggaacctgatgtcacccttcgggacttaa

SEQ ID NO: 564144 - DNA, 75 bp, synthetic construct
  source 1..75: mol_type = other DNA
cataaacaatgattacccctcccccttttcgtgggtggacagcagggacagtgaacagtgtgactggttatggaa

SEQ ID NO: 564145 - DNA, 75 bp, synthetic construct
  source 1..75: mol_type = other DNA
ctctgaaactgtccggaaaaatccacaaacagcttgaaagtattgcccgaagtcgtggcgaccccccgcccaaaa

SEQ ID NO: 564146 - DNA, 75 bp, synthetic construct
  source 1..75: mol_type = other DNA
cactgaaactgtccggaaaaatccacaaacagcgtgaaagtattgcccgaagtcgtggcgaccccccgcccaaaa

SEQ ID NO: 564147 - DNA, 75 bp, synthetic construct
  source 1..75: mol_type = other DNA
cactgaaactgtccggaaaaatccacaaacagcctgaaagtattgcccgaagtcgtggcgaccccccccccaaaa

SEQ ID NO: 564148 - DNA, 75 bp, synthetic construct
  source 1..75: mol_type = other DNA
atccgcgaaaataaactcgacgccattatgcctgcgcatgtgatctacagtgatgtcgatccgcgtccggcgagc

SEQ ID NO: 564149 - DNA, 75 bp, synthetic construct
  source 1..75: mol_type = other DNA
tccggcaggcactaatgctcgacctgctaaaagtctcatcaccgccaggcgatggcggaccatggcgaccgctgg

SEQ ID NO: 564150 - DNA, 75 bp, synthetic construct
  source 1..75: mol_type = other DNA
cgccgttagtgttgaaactgcgcgccaggtaacggatgcatcggacatcatttttattatggtgccggatacacc

SEQ ID NO: 564151 - DNA, 75 bp, synthetic construct
  source 1..75: mol_type = other DNA
acacaaaatgtactggccaccttcatcggttcttttctcttcagtctggtagggattattgccctcaatatggga

SEQ ID NO: 564152 - DNA, 75 bp, synthetic construct
  source 1..75: mol_type = other DNA
gcagcatcgcgcaatcatctggtggtggcggtagatcaggaaggtggacgcgtccagcgttttcgcgaaggtttt

SEQ ID NO: 564153 - DNA, 75 bp, synthetic construct
  source 1..75: mol_type = other DNA
actggctgaaaaccgttttgcgtcaggaactgggttttgacggcgtgattttctctgacgatttatcgatggaag

SEQ ID NO: 564154 - DNA, 75 bp, synthetic construct
  source 1..75: mol_type = other DNA
agcagttattggctaactaccaggaagtaccgaacaacctgatccgcgccattgtcgatgctaataccacccgta

SEQ ID NO: 564155 - DNA, 75 bp, synthetic construct
  source 1..75: mol_type = other DNA
cgtatttcaacgagctggatacctacgctcagtctcatgggttagatagccgtcagattatcgaaggtattggtc

SEQ ID NO: 564156 - DNA, 75 bp, synthetic construct
  source 1..75: mol_type = other DNA
gaaggtgccatcaagaaagatgtccaggtgctgttaaccggtagtaccgaagccgaggccattaagctttttgct

SEQ ID NO: 564157 - DNA, 75 bp, synthetic construct
  source 1..75: mol_type = other DNA
gctgagtatctggcgaccaagcaccttaatctaagggcaaccctagataaattctcagcctatgagatggccgac

SEQ ID NO: 564158 - DNA, 75 bp, synthetic construct
  source 1..75: mol_type = other DNA
atccatcgcttagtaatgaaagcgggttccgataatttccgtttttctgccattcagggagtaatgaagcgaatt

SEQ ID NO: 564159 - DNA, 75 bp, synthetic construct
  source 1..75: mol_type = other DNA
gctacgtcggcctttccaatgccgttcttctggcacagcatcatcaagtcatagctctggacgtcgtccctgaaa

SEQ ID NO: 564160 - DNA, 75 bp, synthetic construct
  source 1..75: mol_type = other DNA
gaagactatctagccaacaagcctcttaatctgcgggccacgctggacaaagtcgaagcctatcaggacgccgag

SEQ ID NO: 564161 - DNA, 75 bp, synthetic construct
  source 1..75: mol_type = other DNA
ttacttaaagaacggttaggtatcgacaatatattcttttcgccagaattcctgcgtgaaggtcgtgcactgtac

SEQ ID NO: 564162 - DNA, 75 bp, synthetic construct
  source 1..75: mol_type = other DNA
tttatgaacccgtcatggtagaggatgagtttttccattctcgggtagtgcgtgatcttactgcgttcaaaaatg

SEQ ID NO: 564163 - DNA, 75 bp, synthetic construct
  source 1..75: mol_type = other DNA
tcagtgatgtgattctttgcaaccggatggctcgcgagctagctgatgtcactgacaaagtttatacccgtgatc

SEQ ID NO: 564164 - DNA, 75 bp, synthetic construct
  source 1..75: mol_type = other DNA
agaacctgatcttctccccggagttcctgcgcgaagggcgtgcgctttatgacaacctgtatccatcacgtattg

SEQ ID NO: 564165 - DNA, 75 bp, synthetic construct
  source 1..75: mol_type = other DNA
caataccagtaccgtcgaagccgtcattcgcgatgtgatcagcattaacccgcatgcggttatggtcatcaagtc

SEQ ID NO: 564166 - DNA, 75 bp, synthetic construct
  source 1..75: mol_type = other DNA
gcgatgcataagaaatatcgcactgaaaatattattttctctccggaatttctccgtgaaggtaaagctctttac

SEQ ID NO: 564167 - DNA, 75 bp, synthetic construct
  source 1..75: mol_type = other DNA
tcgtaaaagccgtgatgcgtttgacgcggtgtacgcattacttgaacggtctgcccgccaatgggctcaggcact

SEQ ID NO: 564168 - DNA, 75 bp, synthetic construct
  source 1..75: mol_type = other DNA
aatcagccgccgcctgtgtcgcaactacgacctgattttgaccatggaaaagcgccatatcgaacgcttatgcga

SEQ ID NO: 564169 - DNA, 75 bp, synthetic construct
  source 1..75: mol_type = other DNA
tcattatttccgtggaataatgtatttaaggaccggaaagtaccgaagataaccattaatggcaatacggtgacg

SEQ ID NO: 564170 - DNA, 75 bp, synthetic construct
  source 1..75: mol_type = other DNA
gcgatgcataagaaatatcgtactgaaaatattattttctctccggaatttctccgtgaaggtaaagccctttac

SEQ ID NO: 564171 - DNA, 75 bp, synthetic construct
  source 1..75: mol_type = other DNA
ttattgtctgttttgttgttctcctgcttatgccttttccgggcgtccccctggcggggcgggctgtcgtgaacg

SEQ ID NO: 564172 - DNA, 75 bp, synthetic construct
  source 1..75: mol_type = other DNA
ctgcttatgccttttccgggcgtccccctggcggggcgggctgtcgtgaacggagccagcgaagctgtctccgcc

SEQ ID NO: 564173 - DNA, 75 bp, synthetic construct
  source 1..75: mol_type = other DNA
agcaacgccgaacgggcagcgaaaatgcagtgggaacgcctgcaacgcggcgttgcatcattctcgctacaaccg

SEQ ID NO: 564174 - DNA, 75 bp, synthetic construct
  source 1..75: mol_type = other DNA
caataatccgtcatttggttatggtggttattgtctgccgaaagatactaagcagttactggcaaactatcagtc

SEQ ID NO: 564175 - DNA, 75 bp, synthetic construct
  source 1..75: mol_type = other DNA
aagctgatgtcattatctccaatcgtatggcagaagagcttaaggatgtggcagataaggtatacacccgcgatc

SEQ ID NO: 564176 - DNA, 75 bp, synthetic construct
  source 1..75: mol_type = other DNA
tgacgtgttgtctggacttaaaactttaaaactctgtgtaggatataaatatgaaggtcaaattatagatttctt

SEQ ID NO: 564177 - DNA, 75 bp, synthetic construct
  source 1..75: mol_type = other DNA
attttcagcagcccgcggagatgcgctttaaccgcgcccgtgtccggcgggcgtttgtcacgattggtcagcgtc

SEQ ID NO: 564178 - DNA, 75 bp, synthetic construct
  source 1..75: mol_type = other DNA
cctccgcgaaggtaaagccctttacgataaccttcatccgtcacgtattgtcatcggtgagcgttcagaacgcgc

SEQ ID NO: 564179 - DNA, 75 bp, synthetic construct
  source 1..75: mol_type = other DNA
taatacccatactgtagaatcagtagttaaagatgtaatggcgattaaccccgctgcagtcatggtgataaaatc

SEQ ID NO: 564180 - DNA, 75 bp, synthetic construct
  source 1..75: mol_type = other DNA
gctgattaatatcggctatggcgatagcagcaaactttatgcgcgcctgccacgtctgtcctttgaagaagcctg

SEQ ID NO: 564181 - DNA, 75 bp, synthetic construct
  source 1..75: mol_type = other DNA
cccaaggacgagggggaagacaccgacgcgccggttgaacaagagaagctccccagggttagccagggcgaacct

SEQ ID NO: 564182 - DNA, 75 bp, synthetic construct
  source 1..75: mol_type = other DNA
cgccaaagtgaccgcgcaccacgcgatcattccaacaccggccagaacagacatcagtgccatgtctgagatcga

SEQ ID NO: 564183 - DNA, 75 bp, synthetic construct
  source 1..75: mol_type = other DNA
acaaacaatttaaccaggtctttgctgaaatggttgcctggcataatgtgacaggccgtaccggtcacgaagact

SEQ ID NO: 564184 - DNA, 75 bp, synthetic construct
  source 1..75: mol_type = other DNA
tatccacccggatttgacgttatccagggctgagctgcaggcagggccatttgagattgcaggtgcagatatatt

SEQ ID NO: 564185 - DNA, 75 bp, synthetic construct
  source 1..75: mol_type = other DNA
ggcgattaattgcctaccgttactttgcatggtgtggctacctggttaagaggcagttcgattacgcgcgtcaag

SEQ ID NO: 564186 - DNA, 75 bp, synthetic construct
  source 1..75: mol_type = other DNA
gcctgtattagcggtaatcagatcaactgcgagcaaggtgcggtgccaacaattatgaatcgcggtggctttgcc

SEQ ID NO: 564187 - DNA, 75 bp, synthetic construct
  source 1..75: mol_type = other DNA
aaaaagacggccttatcagcaactaccgcaccattccgctgaactccctggcgcggcaggaggaagatttagacc

SEQ ID NO: 564188 - DNA, 75 bp, synthetic construct
  source 1..75: mol_type = other DNA
gtgctggcgatgagcgggcaggcggtgaatctcttttcgctgctggcgctggtgctggtgcttggcatcggcatc

SEQ ID NO: 564189 - DNA, 75 bp, synthetic construct
  source 1..75: mol_type = other DNA
gagcaaacgatggggatacacagctcagcaggtactggatgcagctcaagctctgtacgagacgcacaaagcgac

SEQ ID NO: 564190 - DNA, 75 bp, synthetic construct
  source 1..75: mol_type = other DNA
atgcgaggtgacagcctttagttctaatccggcgaaagagcaggaagtactggcgatgggtgccgataaagtggt

SEQ ID NO: 564191 - DNA, 75 bp, synthetic construct
  source 1..75: mol_type = other DNA
tcgcgtggtggcgctcgggagtgccgcacaggataaaggtttgcaggtcggtcagcgtgtcgggattggctggac

SEQ ID NO: 564192 - DNA, 75 bp, synthetic construct
  source 1..75: mol_type = other DNA
attgcgccagaagaggccgtgcggctattcgcatatcgtgacagccagacaaaaagctcgggtaatagctcaaat

SEQ ID NO: 564193 - DNA, 75 bp, synthetic construct
  source 1..75: mol_type = other DNA
gcacgacgcgtaccgcaatgccgactacgtgatcattgccacgccgaccgattacgatcccaagactaactactt

SEQ ID NO: 564194 - DNA, 75 bp, synthetic construct
  source 1..75: mol_type = other DNA
gaaggggccatcaagaaagatgttccggtgctgtttactgacagcacagaagccgaagcgattaaactgtttgca

SEQ ID NO: 564195 - DNA, 75 bp, synthetic construct
  source 1..75: mol_type = other DNA
cctgcgtgaaggccgtgcgctgtacgacaacctgtacccgtcgcgtattgtcattggtgagcgctctgcacgtgc

SEQ ID NO: 564196 - DNA, 75 bp, synthetic construct
  source 1..75: mol_type = other DNA
atttatcgtctggtaatgaaagcaggttctgacaatttccgagcttcagctattcaaggcgtcatgaagcgaata

SEQ ID NO: 564197 - DNA, 75 bp, synthetic construct
  source 1..75: mol_type = other DNA
gttcagataacttccgtgcatcttccattcaagggattatgaagcgtatcaaagcgaaaggtgttgaagtgatta

SEQ ID NO: 564198 - DNA, 75 bp, synthetic construct
  source 1..75: mol_type = other DNA
agaacgttttgctgcgttgttacaggaaggcgcgattaagcaaaatatccctacactgtttaccgactccactga

SEQ ID NO: 564199 - DNA, 75 bp, synthetic construct
  source 1..75: mol_type = other DNA
attgctctagatatagatcttgagaaagttaagttaattaataaaaggctatcaccaatatgtgatcctgaaata

SEQ ID NO: 564200 - DNA, 75 bp, synthetic construct
  source 1..75: mol_type = other DNA
gatgatgtctggaaagaggacttgcgtcgatatggtatatccgaaggcgcgattgctaacattcagaaagtactt

SEQ ID NO: 564201 - DNA, 75 bp, synthetic construct
  source 1..75: mol_type = other DNA
accagaaatgagctgaagaacctcattgctcacggttttgtccgtcaccgtagcgggaaaggctatcagttggct

SEQ ID NO: 564202 - DNA, 75 bp, synthetic construct
  source 1..75: mol_type = other DNA
aattatgaccctattaataataacttcgatacacactctgtcgaatcagttgcatgtgacgtactaagtataaat

SEQ ID NO: 564203 - DNA, 75 bp, synthetic construct
  source 1..75: mol_type = other DNA
cgtgatattaattcttttaaagaacgtgttgatgttatagtagccaatcgccgcacgtcagaattagaagatgta

SEQ ID NO: 564204 - DNA, 75 bp, synthetic construct
  source 1..75: mol_type = other DNA
tgaatctatatgctacaacagaaaaatacgaagcgtatagagatgctgattatgttataatcgcaacaccaacca

SEQ ID NO: 564205 - DNA, 75 bp, synthetic construct
  source 1..75: mol_type = other DNA
agccgtgaccgcagaggttgaagctgcgctgggcaaccgtggacgcgtgttgctgcgtaaatccggcaccgaacc

SEQ ID NO: 564206 - DNA, 75 bp, synthetic construct
  source 1..75: mol_type = other DNA
acggtgtaaacatcaatgccgaagtgggggctaccgacgttcgcgcgctccaggctcgtgtgctggctgaaaaag

SEQ ID NO: 564207 - DNA, 75 bp, synthetic construct
  source 1..75: mol_type = other DNA
atgctcaagcttcacgatttttgcaacagagcccatcgcaggggtgtcgaaagagtcaactgcggtccaaagctg

SEQ ID NO: 564208 - DNA, 75 bp, synthetic construct
  source 1..75: mol_type = other DNA
actggcccgatgccaacaccggccgtggcttatctgacgcgtactttccgcgcagaggctgggattgtgatatct

SEQ ID NO: 564209 - DNA, 75 bp, synthetic construct
  source 1..75: mol_type = other DNA
gggggcaactgatgttcgtgcgttacaggcgcgcgtactggctgaaaaagcagatcttggtatcgcctttgacgg

SEQ ID NO: 564210 - DNA, 75 bp, synthetic construct
  source 1..75: mol_type = other DNA
gcgctgggtagccgtggacgtgtgctgttgcgtaaatccggcaccgagccgttaattcgcgtgatggtggaaggt

SEQ ID NO: 564211 - DNA, 75 bp, synthetic construct
  source 1..75: mol_type = other DNA
agttatatttattctaaagaaagatttattgcatgtatcggtgtcgatgatattattgttgtagatacaagtgac

SEQ ID NO: 564212 - DNA, 75 bp, synthetic construct
  source 1..75: mol_type = other DNA
gtggcaccggtagtcgactttggccactgtctcgagagtcttttccaaagcaatatctaaaactttatggtgaca

SEQ ID NO: 564213 - DNA, 75 bp, synthetic construct
  source 1..75: mol_type = other DNA
tgaacaattaaaacaaattggttcaaatactaacggtatcatactagaaccttgtggaaggaatactgcaccagc

SEQ ID NO: 564214 - DNA, 75 bp, synthetic construct
  source 1..75: mol_type = other DNA
tgcaaccgtgtattaacggtatttactttgaaaaaaactggccagactttttaaagggagacatttacacacaat

SEQ ID NO: 564215 - DNA, 75 bp, synthetic construct
  source 1..75: mol_type = other DNA
catgtgggtgaagttgccgagctgtttatgtggcggcatatgacgctgacttctgccgcggtattaacacaatta

SEQ ID NO: 564216 - DNA, 75 bp, synthetic construct
  source 1..75: mol_type = other DNA
attccagctggagttaaacataatttttctaacccaggaaaaattgatttagaaattattgaggtgcaaacaggc

SEQ ID NO: 564217 - DNA, 75 bp, synthetic construct
  source 1..75: mol_type = other DNA
ataaaaccactaccggtgacggcatcgttgctggtttgcaggtgctggcggcgatggcgcgtaaccatatgagcc

SEQ ID NO: 564218 - DNA, 75 bp, synthetic construct
  source 1..75: mol_type = other DNA
cgcagaaaaatacacacaccgtctcaggctcaagaagcaattacccgctggcctgccacttgttgcgatccgtca

SEQ ID NO: 564219 - DNA, 75 bp, synthetic construct
  source 1..75: mol_type = other DNA
gtatttcgtatatacatacctcgctggtcagtattatcatagctaccctgttgagcctgccaaatggcccccgaa

SEQ ID NO: 564220 - DNA, 75 bp, synthetic construct
  source 1..75: mol_type = other DNA
atgggacactgtcactttatggcatggcacacactccgggacgcactgaaaatgacgggaagatcgcgttcacag

SEQ ID NO: 564221 - DNA, 75 bp, synthetic construct
  source 1..75: mol_type = other DNA
cgcaggaaaatacacacaccgtctcaggctcaagaagcaattacccgctggtctgccacttgttgcgatccgaca

SEQ ID NO: 564222 - DNA, 75 bp, synthetic construct
  source 1..75: mol_type = other DNA
cgcagtaaaatacacacaccgtctcaggctcaagaagcaattacccgctgggctgccacttgttgcgatccgcca

SEQ ID NO: 564223 - DNA, 75 bp, synthetic construct
  source 1..75: mol_type = other DNA
cgcagtaaaatacacacaccgtctcaggctcaagaagcaattacccgctggcctgccacttgttgcgatccggca

SEQ ID NO: 564224 - DNA, 75 bp, synthetic construct
  source 1..75: mol_type = other DNA
catgcagggtgactacggaacactgcagtcgaaaatgccacgtgcggcattcccgtggaatagcgcccgtgacag

SEQ ID NO: 564225 - DNA, 75 bp, synthetic construct
  source 1..75: mol_type = other DNA
atgggacactgtaactttatggcatggcacacactccgggacgcactgaaaatgacgggcagatcgcgttcacag

SEQ ID NO: 564226 - DNA, 75 bp, synthetic construct
  source 1..75: mol_type = other DNA
cacatgatcagcagacagaacgcattctccgggagctgaatgagctgaaacaatgcctgacgctgatgcttgagg

SEQ ID NO: 564227 - DNA, 75 bp, synthetic construct
  source 1..75: mol_type = other DNA
ccacatgatcagcagacagaacgcattctccgggagctgaatgagctgaaacaatgcctgacgctgatgcttgag

SEQ ID NO: 564228 - DNA, 75 bp, synthetic construct
  source 1..75: mol_type = other DNA
acgcattcccgagtgaacatgatggggctgcagaacacgtcggatgatatcatcatgaattttgtgatgggcacg

SEQ ID NO: 564229 - DNA, 75 bp, synthetic construct
  source 1..75: mol_type = other DNA
acctgaccctgtcacagggtggtgaggtgtaccgcggctatggcggtaatgcagatatgacggcggcgaatgcgg

SEQ ID NO: 564230 - DNA, 75 bp, synthetic construct
  source 1..75: mol_type = other DNA
tggctggtggttctggtacaagactttggccgctatctcgaacagaatatcctaaacagtttttggcattaataa

SEQ ID NO: 564231 - DNA, 75 bp, synthetic construct
  source 1..75: mol_type = other DNA
aaaaggcgcatgagattggtgagattggtgcgggcatccagttggggccaaacgcgttttcggcgctggacagtc

SEQ ID NO: 564232 - DNA, 75 bp, synthetic construct
  source 1..75: mol_type = other DNA
cgcgccagatgctggataaaccgacctcctggcgacgctggtcaaccgccgaccgtgaaccggtagcgaagtggg

SEQ ID NO: 564233 - DNA, 75 bp, synthetic construct
  source 1..75: mol_type = other DNA
cgcactgtcacctggtgcattaccctttgcgcggcggcacgcagtataacctggtggtgacattccacagccgcc

SEQ ID NO: 564234 - DNA, 75 bp, synthetic construct
  source 1..75: mol_type = other DNA
gtgggaggcgggatcggcggtgcggcaactgcgctgtcactggcccgccaggggatcaaagtggtgctgctggaa

SEQ ID NO: 564235 - DNA, 75 bp, synthetic construct
  source 1..75: mol_type = other DNA
aaaaggcgcatgagatcggtgagattggcgcgggcatccagttggggccaaatgcgttttcggcgctggacagcc

SEQ ID NO: 564236 - DNA, 75 bp, synthetic construct
  source 1..75: mol_type = other DNA
agcggtactgacgcatccggacgtggaatatcatacctctacaaatgtcgttgatattcgcgagacgccggacga

SEQ ID NO: 564237 - DNA, 75 bp, synthetic construct
  source 1..75: mol_type = other DNA
atttatcgtctgattatgaagagcggttcagataacttccgtgcgtcttctattcaggggattatgaagcgtatc

SEQ ID NO: 564238 - DNA, 75 bp, synthetic construct
  source 1..75: mol_type = other DNA
gcgttgcaatgctaaacgatcgaatatctcctattgttgataaagaaattcagcaatttttgcaatcagacaaaa

SEQ ID NO: 564239 - DNA, 75 bp, synthetic construct
  source 1..75: mol_type = other DNA
tctccgtgaaggtaaagccctttacgataatctccatccgtcacgtattgtcatcggtgagcgttcagaacgcgc

SEQ ID NO: 564240 - DNA, 75 bp, synthetic construct
  source 1..75: mol_type = other DNA
ttataaagacagctcattgttcaacctttcagacgtgccgaatagcgacagattagcttgttcaataaatgataa

SEQ ID NO: 564241 - DNA, 75 bp, synthetic construct
  source 1..75: mol_type = other DNA
aactcatgctgggaaatcctttttattaggttaccggttatcgccggaagagtcaggagacggaggattacggat

SEQ ID NO: 564242 - DNA, 75 bp, synthetic construct
  source 1..75: mol_type = other DNA
ggttttcttatccagaacttcttctccccctggtttaaccagcgtactgacgaatggggtggttcattagcaaac

SEQ ID NO: 564243 - DNA, 75 bp, synthetic construct
  source 1..75: mol_type = other DNA
ggggaacgaagcgcataacgcttgtgggcgatgcggcccatccggtggcgcaatatatggcgcagggagcctgta

SEQ ID NO: 564244 - DNA, 75 bp, synthetic construct
  source 1..75: mol_type = other DNA
ggctatggttacattaagtcaggtgaatatctggatggaaaaggttacaaagttgcggcttttgttgaaaaacca

SEQ ID NO: 564245 - DNA, 75 bp, synthetic construct
  source 1..75: mol_type = other DNA
actggagatgatcctattctgttggttcttgctgctgatcatgaaatccaggatgaggataatttcattgctgca

SEQ ID NO: 564246 - DNA, 75 bp, synthetic construct
  source 1..75: mol_type = other DNA
attgaggttagatcaggagtctacctggaagaggatgatgttataagagtttcttcttctggagtaggatactaa

SEQ ID NO: 564247 - DNA, 75 bp, synthetic construct
  source 1..75: mol_type = other DNA
tttagctgcttttcaagcgattcgtgatgagcaagaccctttattattagttttagctgctgatcatgtcattac

SEQ ID NO: 564248 - DNA, 75 bp, synthetic construct
  source 1..75: mol_type = other DNA
taaccaacttaaacaagacgatcgttctgaattccgacagcaccaagaggtttatcgtccttggggtaaacatga

SEQ ID NO: 564249 - DNA, 75 bp, synthetic construct
  source 1..75: mol_type = other DNA
gtggttcaggctctcgcctttggcctctgtctcgaactcaatatccgaagcaatttatctctctagttaataatg

SEQ ID NO: 564250 - DNA, 75 bp, synthetic construct
  source 1..75: mol_type = other DNA
gattgctttttatatatgaccttaaatcgctatgtagaaatcgaaggttcaaatgaacctaaattaatctggtgc

SEQ ID NO: 564251 - DNA, 75 bp, synthetic construct
  source 1..75: mol_type = other DNA
tatccggtcatgctacgcatggataatggtccagaatttatctctctggcgctggctgaatgggcagagatacac

SEQ ID NO: 564252 - DNA, 75 bp, synthetic construct
  source 1..75: mol_type = other DNA
caatccgggctgtttcgcgcctggtttgtacgcattgcacaggaacagctccgccagggtccaagtccacgctgg

SEQ ID NO: 564253 - DNA, 75 bp, synthetic construct
  source 1..75: mol_type = other DNA
aaccgggcatctcttcttttttccggcgaatgacggctcagttgcgggtgtttttttcccgcaataacctgtcat

SEQ ID NO: 564254 - DNA, 75 bp, synthetic construct
  source 1..75: mol_type = other DNA
gttactaccaataccggatttatcggttacatttcttaattaactctgctggctgtattgtcaccagtcagcatt

SEQ ID NO: 564255 - DNA, 75 bp, synthetic construct
  source 1..75: mol_type = other DNA
tgcctggcgatatgatttttttcgatcagggcgatgcccagcacttaatggtctggatggggcgttacatcatct

SEQ ID NO: 564256 - DNA, 75 bp, synthetic construct
  source 1..75: mol_type = other DNA
aagagtggtggttcgatctattacaagccgattcaatgtccgactggatacattatgactggaacacgcatgtac

SEQ ID NO: 564257 - DNA, 75 bp, synthetic construct
  source 1..75: mol_type = other DNA
cattgatgccttaatcactgacccgccttacagttcgggtgcgacacacaaggccggacgcaccaaccagggcag

SEQ ID NO: 564258 - DNA, 75 bp, synthetic construct
  source 1..75: mol_type = other DNA
gctttacatggcgcggcatcattgcgtggaacaaggggagggggtcacgaacaccccatacggggtatttcaggc

SEQ ID NO: 564259 - DNA, 75 bp, synthetic construct
  source 1..75: mol_type = other DNA
gccggtggtttgaccgtggtgttctgcgggaggtggtccgggaagcccgggccgaaatccgcagcatggcggatg

SEQ ID NO: 564260 - DNA, 75 bp, synthetic construct
  source 1..75: mol_type = other DNA
tatcctgtccagtgggctggcctgcgatgtgctgcgtataccggatgaaccgccccgccgctggtttgaccgtgg

SEQ ID NO: 564261 - DNA, 75 bp, synthetic construct
  source 1..75: mol_type = other DNA
gtgaactattctgcctgtaaatggtatgaagcgacctccgcacattttatcggtggcaaaagcggcggttctatt

SEQ ID NO: 564262 - DNA, 75 bp, synthetic construct
  source 1..75: mol_type = other DNA
cttctttactagccagaaagatgttgtgctgatccactattccgatcagtacaccagttgtgcaggctacgatgc

SEQ ID NO: 564263 - DNA, 75 bp, synthetic construct
  source 1..75: mol_type = other DNA
ttaatcactacccgtgaaggtgaattgccattggctgaacgctaccgggtaccagataaataccgtcttaagcca

SEQ ID NO: 564264 - DNA, 75 bp, synthetic construct
  source 1..75: mol_type = other DNA
cttggttttcctcattatgccgcatggaaaatcgccgatcagatggcaaaaacgccagaagcagcactcaacttt

SEQ ID NO: 564265 - DNA, 75 bp, synthetic construct
  source 1..75: mol_type = other DNA
ggatcgatgtcgttccccagcgccaggtgagccacgattacgtaaaacgtttggtaaaagacaagctcaatgaat

SEQ ID NO: 564266 - DNA, 75 bp, synthetic construct
  source 1..75: mol_type = other DNA
agcaacagtcaataccacggacaagggattggattggccgtaagcggcaattttaaacagctactcaattattct

SEQ ID NO: 564267 - DNA, 75 bp, synthetic construct
  source 1..75: mol_type = other DNA
cgaaaaagaacagaaccgcgaacaaaaactggtactggatgatatcacggtcgaaaatggcgtgatttggcaacg

SEQ ID NO: 564268 - DNA, 75 bp, synthetic construct
  source 1..75: mol_type = other DNA
cgctggcggggaaaaatctccgccttttcctgcctgtccccggacagagcaaaaggaagtcgccggcggctccgc

SEQ ID NO: 564269 - DNA, 75 bp, synthetic construct
  source 1..75: mol_type = other DNA
aactcgaataccacgaggttacggaccctttcacgaaggaaaaatacttcgaatattcccatgatggcaaactga

SEQ ID NO: 564270 - DNA, 75 bp, synthetic construct
  source 1..75: mol_type = other DNA
aaaaaccgtccagccactgatgaatgcgctgtgtattgccgataacatcaaactggaataccaggaggtgacgga

SEQ ID NO: 564271 - DNA, 75 bp, synthetic construct
  source 1..75: mol_type = other DNA
tcgcataaatccgatattgcccgggaatgggtaaagaaggatgccttcggtacaccgcaatatacggtgatgaaa

SEQ ID NO: 564272 - DNA, 75 bp, synthetic construct
  source 1..75: mol_type = other DNA
aacagggcacctggtcctttccaccctacataccaacacggccattggagccataacccgtctgcaagatatggg

SEQ ID NO: 564273 - DNA, 75 bp, synthetic construct
  source 1..75: mol_type = other DNA
tacggcaaatcgacgaggctgaatttgaacagcgactgaatgcggtctggcagcgggactcttccgaggcgcgtc

SEQ ID NO: 564274 - DNA, 75 bp, synthetic construct
  source 1..75: mol_type = other DNA
agcaaggaagatgctggcgtgaaagcgatagccaggtttaaggacctgactccaccaccgttcagcaaggttgtc

SEQ ID NO: 564275 - DNA, 75 bp, synthetic construct
  source 1..75: mol_type = other DNA
ctgctggaagcgttacggggtttaaccctgaacgaagatatgccggatgaggtgcgctcaaagctgcttaaggcg

SEQ ID NO: 564276 - DNA, 75 bp, synthetic construct
  source 1..75: mol_type = other DNA
ccacacgtaacggtcgcgattcagaagctaaacgcctgggcgttaagcgtttcggtggcgaatccgttctggcgg

SEQ ID NO: 564277 - DNA, 75 bp, synthetic construct
  source 1..75: mol_type = other DNA
aaatcggtggtgtactcacacgatggtaaggaaatggggaagctctatctgccggagaatcaggagaaaaatcca

SEQ ID NO: 564278 - DNA, 75 bp, synthetic construct
  source 1..75: mol_type = other DNA
caggcaattattactacattgctgacatgcagcagaaaacggtgcagccactgatggcagccctgtgccttgcgg

SEQ ID NO: 564279 - DNA, 75 bp, synthetic construct
  source 1..75: mol_type = other DNA
agccagcatccgtgccaaggtggagcacccgtttcgcatcatcaagcggcagttcggcttcgtgaaagccagata

SEQ ID NO: 564280 - DNA, 75 bp, synthetic construct
  source 1..75: mol_type = other DNA
ctacgcccggcattatcagagcggggccgcaatgcctgacgaacttcaacagaaaatgcgtaatgccagcctgtt

SEQ ID NO: 564281 - DNA, 75 bp, synthetic construct
  source 1..75: mol_type = other DNA
gccagtcgccccggcttaggtcattacataaatgagacgcaagagaaacgcattattttgctggcgaatctttta

SEQ ID NO: 564282 - DNA, 75 bp, synthetic construct
  source 1..75: mol_type = other DNA
cagactggcgtttcaggcaggaccatcctgcgtgatattgactatctcaactttacccttaacggcaaagcccgc

SEQ ID NO: 564283 - DNA, 75 bp, synthetic construct
  source 1..75: mol_type = other DNA
gaacaaataaaacattttctggcgacggcatttattcgccaacagccggagcgttttttctctgcccccggggta

SEQ ID NO: 564284 - DNA, 75 bp, synthetic construct
  source 1..75: mol_type = other DNA
tacgccggagactctgcgtgtctgggttcgccagcatgagcgggataccgggggcggtggatggtgggctcacca

SEQ ID NO: 564285 - DNA, 75 bp, synthetic construct
  source 1..75: mol_type = other DNA
ggggcggtgatggtgggttcaccagtgctgaatgtcagcgtctgaaagagctggaacgtgaaaatcgtgaactgc

SEQ ID NO: 564286 - DNA, 75 bp, synthetic construct
  source 1..75: mol_type = other DNA
gcgaaggcgaaggtgaaaacctgattgttaatcgcctcgccatcccacattgctggagcgaacaggagcgacgtt

SEQ ID NO: 564287 - DNA, 75 bp, synthetic construct
  source 1..75: mol_type = other DNA
tatggttctggaaagtcagagcgaatatgactcacaatgggcgacaatttgttccattgctccaaagactggctg

SEQ ID NO: 564288 - DNA, 75 bp, synthetic construct
  source 1..75: mol_type = other DNA
gttccattgctccaaagactggctgtacgcctgagactctgcgtgtctgggttcgccagaatgagcgggataccg

SEQ ID NO: 564289 - DNA, 75 bp, synthetic construct
  source 1..75: mol_type = other DNA
gttccattgctccaaagactggctgtacgccagagactctgcgtgtctgggttcgccagtatgagcgggataccg

SEQ ID NO: 564290 - DNA, 75 bp, synthetic construct
  source 1..75: mol_type = other DNA
cggcatttattcgccagcaaccggagcgttttttctctgcccccggaagttttcattattcgaatgtacgcggtg

SEQ ID NO: 564291 - DNA, 75 bp, synthetic construct
  source 1..75: mol_type = other DNA
aacagccattatttactggatgacgcggtaaataattacatcaccgtaaaaatatcattacggctgccggtatcg

SEQ ID NO: 564292 - DNA, 75 bp, synthetic construct
  source 1..75: mol_type = other DNA
tgccgggcatcgcgtcattgaatattattgatacgcagctggttgagaatattaccgggcatttattacgttgcc

SEQ ID NO: 564293 - DNA, 75 bp, synthetic construct
  source 1..75: mol_type = other DNA
cgtaaaggtgcgatctctgatgatgtgctctttgttggtttcaaagaaaaccgcctctatctgttgccgctggaa

SEQ ID NO: 564294 - DNA, 75 bp, synthetic construct
  source 1..75: mol_type = other DNA
gaagtaatggggagtgtgaatgaaaaccccgtgctgaccatgaagcctggagtgaaccaaataatcccgattgca

SEQ ID NO: 564295 - DNA, 75 bp, synthetic construct
  source 1..75: mol_type = other DNA
gaggttgtgggcagcatgaatgaaaaccccttactgacgatgaagccgggggttaaccagatcatcccgatagcc

SEQ ID NO: 564296 - DNA, 75 bp, synthetic construct
  source 1..75: mol_type = other DNA
ttgttcctgcgtctccttcaaacaggacaatccaccgttgatagccagcaactacttgctgaatttaatgccttt

SEQ ID NO: 564297 - DNA, 75 bp, synthetic construct
  source 1..75: mol_type = other DNA
tcaatcatatggcgattgtgatgttaagcaacaagccacattcgccagttgccgatccacaaaaaaatcccaata

SEQ ID NO: 564298 - DNA, 75 bp, synthetic construct
  source 1..75: mol_type = other DNA
ggtcacgaacaccccataccgggtatttccggcatcagtgcgaatacatcgtctgggacagtaaaggccatttag

SEQ ID NO: 564299 - DNA, 75 bp, synthetic construct
  source 1..75: mol_type = other DNA
gccgatccacaaaaaaatcccaatatgttcgaaagcggtcagctaccgattgcaacttatggttgggtggttgat

SEQ ID NO: 564300 - DNA, 75 bp, synthetic construct
  source 1..75: mol_type = other DNA
gtggactatcggaaacgatggcgaaagcctatggactgggccataaacagcagctcaaattagaaaatctgattt

SEQ ID NO: 564301 - DNA, 75 bp, synthetic construct
  source 1..75: mol_type = other DNA
ggaaaagctcattaccactgacagtaaccgttcggaattgtcccgctgtttgctggaggatcaactggcaacggt

SEQ ID NO: 564302 - DNA, 75 bp, synthetic construct
  source 1..75: mol_type = other DNA
ggcgtgtttgcccaaacagcgttgttaattattcacaatagtatgctcgataccctgattaatagcacgaaagat

SEQ ID NO: 564303 - DNA, 75 bp, synthetic construct
  source 1..75: mol_type = other DNA
agtaatggtagtgagtttgcactggatgagcttctggcgagctatcccgacctccataatgcgtaccaccaattg

SEQ ID NO: 564304 - DNA, 75 bp, synthetic construct
  source 1..75: mol_type = other DNA
caacctggaacaagttgaaaggtcgcgtcatcctggacaatatcgaacataatgtggttggtgttcgccagcagt

SEQ ID NO: 564305 - DNA, 75 bp, synthetic construct
  source 1..75: mol_type = other DNA
agcttgatttctccgtctacctgaatgaaaaagcacaaaacagtgaacagaaactggtgttggaaaacattactg

SEQ ID NO: 564306 - DNA, 75 bp, synthetic construct
  source 1..75: mol_type = other DNA
gtacaaaccggatatgccggaggtggcgatgggaatagcggaagtacaggctacgcagcgctgaattatcgcggc

SEQ ID NO: 564307 - DNA, 75 bp, synthetic construct
  source 1..75: mol_type = other DNA
ccgcgctttttagcggatgatcctcaggctgttgccgatttatcgagttttgaaaatggacaagaattaccgccg

SEQ ID NO: 564308 - DNA, 75 bp, synthetic construct
  source 1..75: mol_type = other DNA
atgccgtgctgccttatgccactgaatatcgggaaaacagagtggcgctggataccaataccctggctgataacg

SEQ ID NO: 564309 - DNA, 75 bp, synthetic construct
  source 1..75: mol_type = other DNA
gatcagatgttagcgcttaacgtcaatattcctttcagccactggctgcgttctgacagtaaatctcagtggcga

SEQ ID NO: 564310 - DNA, 75 bp, synthetic construct
  source 1..75: mol_type = other DNA
gtgcgagcagagtttaaagcgcgcgttgggataaaactgctcatgacgctaacccacaataataagccgctgccg

SEQ ID NO: 564311 - DNA, 75 bp, synthetic construct
  source 1..75: mol_type = other DNA
gcgatcgctctacacgtgaaaaactgttcactgcggggtggacacgcgcggaaaaaaacgatggcaatgataccc

SEQ ID NO: 564312 - DNA, 75 bp, synthetic construct
  source 1..75: mol_type = other DNA
caataaagggtatgagatgagcgaactgcttagcgccgcacttctcgatatgcgctggcattgcctggaagaaaa

SEQ ID NO: 564313 - DNA, 75 bp, synthetic construct
  source 1..75: mol_type = other DNA
gtttggtagaagttattcatcagcgttttgttcttgccggtgccaaacttgaagatgccgataaagaaaaattaa

SEQ ID NO: 564314 - DNA, 75 bp, synthetic construct
  source 1..75: mol_type = other DNA
attgagcatctcgccctgctgaaacgacaggcagagcgggcgggaggtggcgataacctgctggtgagcgtggaa

SEQ ID NO: 564315 - DNA, 75 bp, synthetic construct
  source 1..75: mol_type = other DNA
ggcaacctgcaggtaagcgtggaagatctcgtcagaaccggcgcgtttctggtggcgatgtccctgtggcataac

SEQ ID NO: 564316 - DNA, 75 bp, synthetic construct
  source 1..75: mol_type = other DNA
ttgacgtgatgctggaacagcaaaacgaagacggtagcgtagagttgctggaacgttgcccgccgagaatgggca

SEQ ID NO: 564317 - DNA, 75 bp, synthetic construct
  source 1..75: mol_type = other DNA
ggcgcggtatgctttcaacaaccaatggtgggatcttagcgttcaggcaacgatcgccgggaagctgtgggatca

SEQ ID NO: 564318 - DNA, 75 bp, synthetic construct
  source 1..75: mol_type = other DNA
cagcccaggacaattgctggatccggaaacgaacatcaacattggcaccagttacctgcaatatgtttatcagca

SEQ ID NO: 564319 - DNA, 75 bp, synthetic construct
  source 1..75: mol_type = other DNA
gaaagagccagcctaacgcttgtgacaagttatttagcgtctggcgcgcgtccggcaaacaagatccgcgggcgt

SEQ ID NO: 564320 - DNA, 75 bp, synthetic construct
  source 1..75: mol_type = other DNA
ggatcacgctagcggaagctcgcgaacggctgggcgaagccaagaagatgatcgccgcagggaaatctccagcca

SEQ ID NO: 564321 - DNA, 75 bp, synthetic construct
  source 1..75: mol_type = other DNA
ggcggctgttggctgtcggtgtctgtctgctgacggtcagcagcgtggcgcgagccgactcactggatgagcagc

SEQ ID NO: 564322 - DNA, 75 bp, synthetic construct
  source 1..75: mol_type = other DNA
taagttgtttagcgtctggcgcgcgtccggtaagcaagaaccactggcttatttagagcgtatccgcctggcgat

SEQ ID NO: 564323 - DNA, 75 bp, synthetic construct
  source 1..75: mol_type = other DNA
aatcatttcactggcgaacaaccctaatacggtactgaccttcgcgcgtacaaccggagcgaccgattttacccg

SEQ ID NO: 564324 - DNA, 75 bp, synthetic construct
  source 1..75: mol_type = other DNA
ccccacgcttcctcccgctcgcacgctgcaatctcgtttcgtcaatgaactggcgcggcgtgaagactggcgtgg

SEQ ID NO: 564325 - DNA, 75 bp, synthetic construct
  source 1..75: mol_type = other DNA
aatctcgctgcaagaagagaaagcccggcagaaaagtcgcgaagagtatctgcaaagtcaggtcaatatgctctg

SEQ ID NO: 564326 - DNA, 75 bp, synthetic construct
  source 1..75: mol_type = other DNA
gacctgatgaatcaaccggcggtgacggtcactaactttgttcgcgctaaccccacgcttcctcccgctcgcacg

SEQ ID NO: 564327 - DNA, 75 bp, synthetic construct
  source 1..75: mol_type = other DNA
aatacggtactgaccttcgcgcgtacaaccggagcgaccgattttacccgtcaaatggcggcggtggcgtttgcc

SEQ ID NO: 564328 - DNA, 75 bp, synthetic construct
  source 1..75: mol_type = other DNA
gatcagattcaggagctgcgcgatatcgtcgcctggcgtttgatgggcaacgatgtcaccgacgagcaggcgaaa

SEQ ID NO: 564329 - DNA, 75 bp, synthetic construct
  source 1..75: mol_type = other DNA
gcgatcgcgcgacgcgtgaaaaactattcactgcgggctggacgcgggcagaaaaaaatgacgctaacgataccc

SEQ ID NO: 564330 - DNA, 75 bp, synthetic construct
  source 1..75: mol_type = other DNA
tcgtggctgctgtttgcacaatgggtcttacaggctgcgatcgtgttgagcctgggtacgttggcatcaaagtaa

SEQ ID NO: 564331 - DNA, 75 bp, synthetic construct
  source 1..75: mol_type = other DNA
tgaacgtcgtcgtgttgagtatgaaattttcctgctggtggaggaaatgcatgttctgggtatggttcagtctgg

SEQ ID NO: 564332 - DNA, 75 bp, synthetic construct
  source 1..75: mol_type = other DNA
tctcctggcagaacaaagtataagcttccacccgaatggactcaccacttcccttcaggaagggagattattagt

SEQ ID NO: 564333 - DNA, 75 bp, synthetic construct
  source 1..75: mol_type = other DNA
acgccctgctaaatacaaatatacagatgaaaatggcaatgagcagacttggacgggtcagggccgtactcctaa

SEQ ID NO: 564334 - DNA, 75 bp, synthetic construct
  source 1..75: mol_type = other DNA
gatgaaaatggtaatgagcagacttggacaggtcaaggccgtactcctaaagcgatcgctgctgctatcgaagct

SEQ ID NO: 564335 - DNA, 75 bp, synthetic construct
  source 1..75: mol_type = other DNA
tgccaccgcccagcctacgggaaaagaagatgaatgggatccggcaatctggctggaagaactggctacccttcc

SEQ ID NO: 564336 - DNA, 75 bp, synthetic construct
  source 1..75: mol_type = other DNA
gtcaacacccgcgtcggcatgaccttcgcccgtggcctgcgcgcgattttgcgtcaggacccggatgtggtgatg

SEQ ID NO: 564337 - DNA, 75 bp, synthetic construct
  source 1..75: mol_type = other DNA
cagcgggactcttccgaggctcgccagctgatggaagatctcggttctgccgaggacttttttaccctcgcagaa

SEQ ID NO: 564338 - DNA, 75 bp, synthetic construct
  source 1..75: mol_type = other DNA
gctggccagtggtgcattcgtcctgtcccccttcctcttttatcacgccaggaccacattatcgctgtggcgtcc

SEQ ID NO: 564339 - DNA, 75 bp, synthetic construct
  source 1..75: mol_type = other DNA
agtacacctgttcaccgtacagcagggcgtctctgtggcccagttcagggaaatgcagtctgaggggatacggct

SEQ ID NO: 564340 - DNA, 75 bp, synthetic construct
  source 1..75: mol_type = other DNA
atgcgctgaactatctggatgataacgctatgtcgaaaggggcagacatcattgatgtgatgcaacgtctgggcg

SEQ ID NO: 564341 - DNA, 75 bp, synthetic construct
  source 1..75: mol_type = other DNA
ctcggtgaatcgttgacttccagaatggtattttcagccctcgccgtactggttggtatagtgatggtgactcag

SEQ ID NO: 564342 - DNA, 75 bp, synthetic construct
  source 1..75: mol_type = other DNA
ggacgggtcagggccgtactcctaaagcgatagctgctgccatcgaagctggtaaaacgctggaagactttgcga

SEQ ID NO: 564343 - DNA, 75 bp, synthetic construct
  source 1..75: mol_type = other DNA
tgtctggtgaaataaatgctgagggtgaaatccgcacactggcccagctttttgcccttgaataccaacaattaa

SEQ ID NO: 564344 - DNA, 75 bp, synthetic construct
  source 1..75: mol_type = other DNA
tgaccgcaccaatacgcagtcatctgacctatctacgggcgaaatcttttactgattacctgccacaggccatca

SEQ ID NO: 564345 - DNA, 75 bp, synthetic construct
  source 1..75: mol_type = other DNA
acatcacacagaattatcactatcaacatttggcgcttgccgaacggcgaaaagcagcctcgttgatccccctga

SEQ ID NO: 564346 - DNA, 75 bp, synthetic construct
  source 1..75: mol_type = other DNA
attgcgctggcggcagaggcggctcgcgagaaaggtctggataacaaatggctgattccgctgctgaataccacc

SEQ ID NO: 564347 - DNA, 75 bp, synthetic construct
  source 1..75: mol_type = other DNA
gacgccatcagaaccggtgcttttgtggtggcgatgtccctgtggcataaccatccgcagaagacaaagctgcct

SEQ ID NO: 564348 - DNA, 75 bp, synthetic construct
  source 1..75: mol_type = other DNA
atcattacatcaagaccgaatttggcctgacgaatgccaacgaaccctgtacacacgcctggatggaaaatggca

SEQ ID NO: 564349 - DNA, 75 bp, synthetic construct
  source 1..75: mol_type = other DNA
agagcttcgggggcgtgcaggcttacgtgataaagcttcgaaagcattagagaaacgtggctttataccggcaaa

SEQ ID NO: 564350 - DNA, 75 bp, synthetic construct
  source 1..75: mol_type = other DNA
ccgtgcactcatgcatggagggaaaatggcaaacagtacaatgttaactacgaagatcttttgtttcttcacgca

SEQ ID NO: 564351 - DNA, 75 bp, synthetic construct
  source 1..75: mol_type = other DNA
aaatacgtgatgctgaaggccctgagcgggcaacagcgatggtggaaaggcatgctgtattgtatccgctaaaat

SEQ ID NO: 564352 - DNA, 75 bp, synthetic construct
  source 1..75: mol_type = other DNA
attcgaagttgacccaacttacacaacatcgtaagcgtaaactgaccgccgtatgtagccatcagacgagaattg

SEQ ID NO: 564353 - DNA, 75 bp, synthetic construct
  source 1..75: mol_type = other DNA
cgcagtcatctgacctatctacgggcgaaatcttttactgattacctgccacaggccatcagcgccctgcccggt

SEQ ID NO: 564354 - DNA, 75 bp, synthetic construct
  source 1..75: mol_type = other DNA
atgaaaaaacactttgcgcagttttacgcctttatcaccgagcaacaaagctggtttgaacagcatctggcagca

SEQ ID NO: 564355 - DNA, 75 bp, synthetic construct
  source 1..75: mol_type = other DNA
gcaataaagaacaacaatgggatttacaccaggcgctggaagattttactcaggttattcctgtcttaattaatc

SEQ ID NO: 564356 - DNA, 75 bp, synthetic construct
  source 1..75: mol_type = other DNA
atgagcagttgttcagcctggcggaattacccgaagagcaggtggcttatctggaagagcatctctgcgacggcg

SEQ ID NO: 564357 - DNA, 75 bp, synthetic construct
  source 1..75: mol_type = other DNA
attacccgaagagcagattgcttatctggaagagcatctttgcgacggcgagcaattaattatctcccgcttcga

SEQ ID NO: 564358 - DNA, 75 bp, synthetic construct
  source 1..75: mol_type = other DNA
aagacggcaagctggaaatccacaccacctatgtgagtctgccgatgattcctcttgagatctccggcatctcat

SEQ ID NO: 564359 - DNA, 75 bp, synthetic construct
  source 1..75: mol_type = other DNA
aggaggcgttaaaagaggcgctgatttctggtttgtccgatctcgcacaaaatcagccagaaatctggcggcggg

SEQ ID NO: 564360 - DNA, 75 bp, synthetic construct
  source 1..75: mol_type = other DNA
ctggcaaaagaggtcacggtgttgaccacatcctggcaaacgccggatcagagctggaaataccactctaccgac

SEQ ID NO: 564361 - DNA, 75 bp, synthetic construct
  source 1..75: mol_type = other DNA
ggcgcttgaacatgatttgtcacgattgccggaaaagtgaagttatgcagcgtgtgctggctttttatcagggaa

SEQ ID NO: 564362 - DNA, 75 bp, synthetic construct
  source 1..75: mol_type = other DNA
gattactgtcagcaaaaaatgcattactcaggacgaaatggatgagttatatgctttgtctgaaagactgaaaga

SEQ ID NO: 564363 - DNA, 75 bp, synthetic construct
  source 1..75: mol_type = other DNA
tgattaatccgctgttgccggattcccggactgaccaggggcaggcgcagcgcctcggcgtgaaatatttcccgg

SEQ ID NO: 564364 - DNA, 75 bp, synthetic construct
  source 1..75: mol_type = other DNA
tattaatgcgccataacgaagcgttgcttggcgcggcgttgtgcgatgaccgtctgtttgatttgctcaaagacc

SEQ ID NO: 564365 - DNA, 75 bp, synthetic construct
  source 1..75: mol_type = other DNA
accagcgataaccgcaacctgtcgctgtttttgcgcggcatgttactcgatgacgaagcgcgtgagctgttaccg

SEQ ID NO: 564366 - DNA, 75 bp, synthetic construct
  source 1..75: mol_type = other DNA
attcaagcatatctatatacttatggtagttggtttctattaataattccttcactatggctatatctgagaacc

SEQ ID NO: 564367 - DNA, 75 bp, synthetic construct
  source 1..75: mol_type = other DNA
attcaagcatatctatatacttatggcagttggtttctattaataattccttcactatggctatatctgagaact

SEQ ID NO: 564368 - DNA, 75 bp, synthetic construct
  source 1..75: mol_type = other DNA
cgcagcgagatccccgccgaagtgattgaacaactggtttttggtcaggtcgtacaaatgccggaagcccccaac

SEQ ID NO: 564369 - DNA, 75 bp, synthetic construct
  source 1..75: mol_type = other DNA
ggcggtggatttggtttagttaccgcctgtgctgccggtgggcttggcgcggcaatggttctggaggcggaataa

SEQ ID NO: 564370 - DNA, 75 bp, synthetic construct
  source 1..75: mol_type = other DNA
tgagcgatctgacattgatcgatatgcacgaagcctttgcagctcagacactggcgaatattcagttgctgggta

SEQ ID NO: 564371 - DNA, 75 bp, synthetic construct
  source 1..75: mol_type = other DNA
cgtttgatcgtaaacatggcacagtgactgcggcgaacagtacgccgctgaccgatggcgcagccgctgtgatcc

SEQ ID NO: 564372 - DNA, 75 bp, synthetic construct
  source 1..75: mol_type = other DNA
cagcaagatgcattagcgcaccgttcgcatcagcgtgccgctcaggcgtggtcagacggtaaactcaaagaagag

SEQ ID NO: 564373 - DNA, 75 bp, synthetic construct
  source 1..75: mol_type = other DNA
ggggcgcgcacatgccactggtgaagtggacgacagcaaatttaacgtgcttggcggttcgattgcttacgggca

SEQ ID NO: 564374 - DNA, 75 bp, synthetic construct
  source 1..75: mol_type = other DNA
catcacgctgggctgggatattggcgatacggaaggagatatcgacgatggaccagcgggtgccgatgcgaaaac

SEQ ID NO: 564375 - DNA, 75 bp, synthetic construct
  source 1..75: mol_type = other DNA
catgggtctttaacggtaacagtaaacaactcggtgcggcgggcggtattgctaatgccagcttcgataacaatg

SEQ ID NO: 564376 - DNA, 75 bp, synthetic construct
  source 1..75: mol_type = other DNA
gacgaacgtgggcgttatatcggtgttgaaatccagcccatcacccagaccggtaatcctttccagggaacgtcg

SEQ ID NO: 564377 - DNA, 75 bp, synthetic construct
  source 1..75: mol_type = other DNA
ttggcgtcagtaaaaaactggcgcgcgtgctggttgatgtcaacaaagctcgaaccatgagccagcgactgaaac

SEQ ID NO: 564378 - DNA, 75 bp, synthetic construct
  source 1..75: mol_type = other DNA
cgaccaacgacgaagccagaaccaaccttaacggccctgcgcgcgatggaaaagaggcactttccatcccgacca

SEQ ID NO: 564379 - DNA, 75 bp, synthetic construct
  source 1..75: mol_type = other DNA
gttacactcttaccgatgccgaccgtggtcgttatatcggtattgaaattacgccaaccacgcagaccggtacgc

SEQ ID NO: 564380 - DNA, 75 bp, synthetic construct
  source 1..75: mol_type = other DNA
tttgatggcgaaaatgtgagtgcggattttatggatatccgtgatcaacccgcaatgcaggaaagggaatcattc

SEQ ID NO: 564381 - DNA, 75 bp, synthetic construct
  source 1..75: mol_type = other DNA
agtcctcgaccatagcggtgcgccactggatgaaaaacagaaaatgggcaccgtgggggccgtggcgttggattt

SEQ ID NO: 564382 - DNA, 75 bp, synthetic construct
  source 1..75: mol_type = other DNA
gctggaagcgggcgaaagtgcgctggatgtggtgacggaagcggtgcgtctgctggaagagtgtccactgtttaa

SEQ ID NO: 564383 - DNA, 75 bp, synthetic construct
  source 1..75: mol_type = other DNA
actgacagccacgacgtataaactggcaaaaatgaacctcgccattcgcggtctttcagctaacctcggcgaacg

SEQ ID NO: 564384 - DNA, 75 bp, synthetic construct
  source 1..75: mol_type = other DNA
cgtcattttgctgatgagtacggcaaacattagctgtatgacggcgcgtaatacaatctttctcgaaccgttacg

SEQ ID NO: 564385 - DNA, 75 bp, synthetic construct
  source 1..75: mol_type = other DNA
cgccggtattttcattgggtaaccccattcatgattcagaacaaaaaatcattgatgccgggaaagaattactgg

SEQ ID NO: 564386 - DNA, 75 bp, synthetic construct
  source 1..75: mol_type = other DNA
ttacgctacatcgaggcgttgtctgccattgttgaaaccgggcagaaaatgctggaagcgggcgaaagtgcgctg

SEQ ID NO: 564387 - DNA, 75 bp, synthetic construct
  source 1..75: mol_type = other DNA
aaaaaacagcaactgaaaatgcatttgttctgcaatataaaatgtcaccggtgttcaccccatatatagaatatg

SEQ ID NO: 564388 - DNA, 75 bp, synthetic construct
  source 1..75: mol_type = other DNA
atggcttctacgaagcgttgctggtgctggcgggatatctgctgattaatctggtcttcggcaatattctggagc

SEQ ID NO: 564389 - DNA, 75 bp, synthetic construct
  source 1..75: mol_type = other DNA
gattcccctctttcggaggtcgcaaatttaattaaaatattacaatcttgccagggaaaagttgtttttattggt

SEQ ID NO: 564390 - DNA, 75 bp, synthetic construct
  source 1..75: mol_type = other DNA
acaaaatgccaaacaggacgatattgcggttcgtattgacaccgccctctcgaccattgagaaacgtaacccaac

SEQ ID NO: 564391 - DNA, 75 bp, synthetic construct
  source 1..75: mol_type = other DNA
tgtgtttatggtttatgaccaaatcgaaggctgccgacccggccaaaggttatcgtgatcgtcagggcgagacgc

SEQ ID NO: 564392 - DNA, 75 bp, synthetic construct
  source 1..75: mol_type = other DNA
tcagcaaaagcaaaaaagccaatcctcaatatggctaccgcgatcgtcgcggcgagaccctgtttattgatgctc

SEQ ID NO: 564393 - DNA, 75 bp, synthetic construct
  source 1..75: mol_type = other DNA
atcctgcaaaaaccccccttgctttctctgggcaatcccattcacgattctgaacagaaaatcatcgatgccggg

SEQ ID NO: 564394 - DNA, 75 bp, synthetic construct
  source 1..75: mol_type = other DNA
gcccgcaggattaacaatgtgctgtttgatggcagtggcgatatcacgattcctgcaggaatgagtcagtcaaca

SEQ ID NO: 564395 - DNA, 75 bp, synthetic construct
  source 1..75: mol_type = other DNA
tgaggttcacagatggttcgtcaataaagatcctaacttgatcaccgccattctcggtgatgctgccaacttact

SEQ ID NO: 564396 - DNA, 75 bp, synthetic construct
  source 1..75: mol_type = other DNA
ccgattgctggaagaagtggtgtacgtcataacagaaacagtgagaaaaacggcgaggcaaatcaccttgagagg

SEQ ID NO: 564397 - DNA, 75 bp, synthetic construct
  source 1..75: mol_type = other DNA
accggagtcaggcagtcaggctgccgaaagctgtagccctgcctgaagacgtaaaaaaagtcgacgttattgctg

SEQ ID NO: 564398 - DNA, 75 bp, synthetic construct
  source 1..75: mol_type = other DNA
attgtgttagagatgcgtattaccggcgtctattttggggcgatgagcggcacttttgtggctgcgttgttggcg

SEQ ID NO: 564399 - DNA, 75 bp, synthetic construct
  source 1..75: mol_type = other DNA
acaacggcacgccgaacgatgagctgttcacggtggcgggtatgtttgacggctcgctgtataaattactcctgc

SEQ ID NO: 564400 - DNA, 75 bp, synthetic construct
  source 1..75: mol_type = other DNA
atcttattttaagacacacaacatcaacaaaatcacaaaaggcaagaaatgaaggtattgcaattgatcattgca

SEQ ID NO: 564401 - DNA, 75 bp, synthetic construct
  source 1..75: mol_type = other DNA
tcagtgttgaagacactattttaccaaaaggtaaaattgatggtgatattttctctgaagttgataaattaatta

SEQ ID NO: 564402 - DNA, 75 bp, synthetic construct
  source 1..75: mol_type = other DNA
tgaacagaaaatcattgatgccgggaaagaactactggaaaacggtgcggatgtcatcatgctggattgtttggg

SEQ ID NO: 564403 - DNA, 75 bp, synthetic construct
  source 1..75: mol_type = other DNA
atgaaaattaccgtattgggatgcggtgccttagggcaattatggcttacaacactttgtaaacagggtcacgac

SEQ ID NO: 564404 - DNA, 75 bp, synthetic construct
  source 1..75: mol_type = other DNA
gttcagggctggctgcgcgtaccgcaaccttattgtagcgtgaatctggttgagacagatggttcgatatttaac

SEQ ID NO: 564405 - DNA, 75 bp, synthetic construct
  source 1..75: mol_type = other DNA
aaaaaacattcaacctaaagttattggcgaaaacttcgccattacaaggccacgttccccagtatctcccaccac

SEQ ID NO: 564406 - DNA, 75 bp, synthetic construct
  source 1..75: mol_type = other DNA
tgactggcgcaaaggcgaatgtgaactcatccccggcaaaaccgcgccaaatattgtgacggtggagcgcgacta

SEQ ID NO: 564407 - DNA, 75 bp, synthetic construct
  source 1..75: mol_type = other DNA
gcgcagcgtcagcgaaatgcgccagataccgccaaacggcttcccggaaaaagcacttaacttcctgacaccgca

SEQ ID NO: 564408 - DNA, 75 bp, synthetic construct
  source 1..75: mol_type = other DNA
gctgattgaactgtggcgcgaagcacttaaacaacacagcgatccggtactggcgtgggcatcaattatgaatga

SEQ ID NO: 564409 - DNA, 75 bp, synthetic construct
  source 1..75: mol_type = other DNA
ccgcagtgtcagtgaaatgcgccagatcccgccaaacggcttcccggaaaaagcacttaacttcctgacgccgca

SEQ ID NO: 564410 - DNA, 75 bp, synthetic construct
  source 1..75: mol_type = other DNA
actactacggcaccgtcggctcgaaccgcgacgaattcattatgatccgcaagatgaagaatattaactggctgg

SEQ ID NO: 564411 - DNA, 75 bp, synthetic construct
  source 1..75: mol_type = other DNA
gccgataccgcccataaaacccacggacgttcgatgattatcctcggtgctggtgttaaccactggtatcacatg

SEQ ID NO: 564412 - DNA, 75 bp, synthetic construct
  source 1..75: mol_type = other DNA
cttcgtcagtatgaacgggataccggtggcggtgatggcggactgagcaccgctgaacgtcagcatctgaaagag

SEQ ID NO: 564413 - DNA, 75 bp, synthetic construct
  source 1..75: mol_type = other DNA
gccgcagtaacgatatccttcgccaggcttccgcttatttgcgaaggcggagttcgacctcctctggaaaaagtg

SEQ ID NO: 564414 - DNA, 75 bp, synthetic construct
  source 1..75: mol_type = other DNA
tacgccggagactctgcgtgtctgggttcgccagcatgagcgggataccgggggcggtgagtggtgggctcacca

SEQ ID NO: 564415 - DNA, 75 bp, synthetic construct
  source 1..75: mol_type = other DNA
ttccattgccccaaagattggctgtacaccggagactctgcgtgtctgggtacgccagcatgagcgggataccgg

SEQ ID NO: 564416 - DNA, 75 bp, synthetic construct
  source 1..75: mol_type = other DNA
cccaagtccgtcaacgggcagttcgtatggttctggaaagtcagggtcaatatcactcacaatggggggcaattt

SEQ ID NO: 564417 - DNA, 75 bp, synthetic construct
  source 1..75: mol_type = other DNA
ctgcgtgtctgggttcgccagtatgagcgggataccggaggcggtgatggtgggcttaccaccgctgaacgtcag

SEQ ID NO: 564418 - DNA, 75 bp, synthetic construct
  source 1..75: mol_type = other DNA
cgctctctcgtggtgggccgattgtttggatcagcgaaaccgatgcccgtgaactgaccattgtcgataacgatt

SEQ ID NO: 564419 - DNA, 75 bp, synthetic construct
  source 1..75: mol_type = other DNA
acgatatccttcgccaggcttccgcttattttgcgaaggcggagttcgaccgcctctggaaaaaaatgatgccac

SEQ ID NO: 564420 - DNA, 75 bp, synthetic construct
  source 1..75: mol_type = other DNA
atggttctggaaagtcagggcgaatatgactcacaatgggcggcaatttgttccattaccccaaagattggctgt

SEQ ID NO: 564421 - DNA, 75 bp, synthetic construct
  source 1..75: mol_type = other DNA
gttcgtcagcatgagcgggataccgggagtggtgatggtgggctcaccagcgctgaacgtcagcgtctgaaagag

SEQ ID NO: 564422 - DNA, 75 bp, synthetic construct
  source 1..75: mol_type = other DNA
gttccattgctccaaagattggctgtacgcccgagactctgcgtgtctgggttcgccagcatgagcgggataccg

SEQ ID NO: 564423 - DNA, 75 bp, synthetic construct
  source 1..75: mol_type = other DNA
ggggcggtgatggagggctcaccaccgctgaacgtcagcgtctgaaagagctggaacgtgaaaatcgtgaactgc

SEQ ID NO: 564424 - DNA, 75 bp, synthetic construct
  source 1..75: mol_type = other DNA
ggggcggtgatggtgggctcaccagcgctgaacgtcagcgcctgaaagagctggaacgtgaaaatcgtgaactgc

SEQ ID NO: 564425 - DNA, 75 bp, synthetic construct
  source 1..75: mol_type = other DNA
tggttgtctggagattcagggggccagtctaatgactaaaaatactcgtttttcccccgaagtccgtcagagggc

SEQ ID NO: 564426 - DNA, 75 bp, synthetic construct
  source 1..75: mol_type = other DNA
ggcctttgcactcgactggaaccgaccaccgcgccagatgaacagcacctcatttttctacaatcactccagtca

SEQ ID NO: 564427 - DNA, 75 bp, synthetic construct
  source 1..75: mol_type = other DNA
cgcggtggaccgattgtctggatcagcgaaacagatgcccgagaactgaccattgtcgataacgactgggtggaa

SEQ ID NO: 564428 - DNA, 75 bp, synthetic construct
  source 1..75: mol_type = other DNA
gtacttggcgcaggttggccgggcgtgctgttacatgaggcggtgggtcacggtctggaaggcgacttcaaccgc

SEQ ID NO: 564429 - DNA, 75 bp, synthetic construct
  source 1..75: mol_type = other DNA
gtgggtgtctgcggtaaagaagggcaaagtttgccggttggcgtgggccagccaacgttgaaagtcgataacctg

SEQ ID NO: 564430 - DNA, 75 bp, synthetic construct
  source 1..75: mol_type = other DNA
gccgcagtaacgatatccttcgccaggcttccgcttattttgcgaaggcggagttcgaccgcctctggaaaaata

SEQ ID NO: 564431 - DNA, 75 bp, synthetic construct
  source 1..75: mol_type = other DNA
tacgccagagactctgcgtgtgtgggttcatcagcaatgtagcgggataccgggggcggtgatggtgggctcacc

SEQ ID NO: 564432 - DNA, 75 bp, synthetic construct
  source 1..75: mol_type = other DNA
gaaagagctgaaacgggttaccgacgaacgggacatattaaaaaaagcggcgtacttcgcaaagctgtccgactg

SEQ ID NO: 564433 - DNA, 75 bp, synthetic construct
  source 1..75: mol_type = other DNA
ggaaaagtacgggctggtgcgtattgatcgcaggggatttgactggcaagaacactccccatatctgcgggcagt

SEQ ID NO: 564434 - DNA, 75 bp, synthetic construct
  source 1..75: mol_type = other DNA
gatttctcctacggctggctgacgacgctcattcagacgttaaagctggggttgggggagtcgccgttttacgcg

SEQ ID NO: 564435 - DNA, 75 bp, synthetic construct
  source 1..75: mol_type = other DNA
cgtgcacttaacaccagactatcagcgattcgatgctgaagcgcatttccgcccggcgccgcagcaggtttgtga

SEQ ID NO: 564436 - DNA, 75 bp, synthetic construct
  source 1..75: mol_type = other DNA
tatcgatgcgttcctcgcgccgggtcacgtcagtatggttatcggcaccgacgcctataattttatcgccagcga

SEQ ID NO: 564437 - DNA, 75 bp, synthetic construct
  source 1..75: mol_type = other DNA
gccagcgttgcaacatgtctcgatatcaccacccacagcctttatgcctggataaagaagtacggtccggattct

SEQ ID NO: 564438 - DNA, 75 bp, synthetic construct
  source 1..75: mol_type = other DNA
ggactgtttcgttaggcgcgatagatgagtgggtggcgtcgccattgcagcaacaggcgctgcaaatcaaatcga

SEQ ID NO: 564439 - DNA, 75 bp, synthetic construct
  source 1..75: mol_type = other DNA
atgaatgtcttcagtcgctatttaatccgtcacctgtttctcggttttgccgctgctgcagggctactgctgccg

SEQ ID NO: 564440 - DNA, 75 bp, synthetic construct
  source 1..75: mol_type = other DNA
ctggtggcgctggtcgccggaatactgtggactgtttcgttaggcgcgattgatgagtgggttgcgtcgccattg

SEQ ID NO: 564441 - DNA, 75 bp, synthetic construct
  source 1..75: mol_type = other DNA
atgagaacatggggccgcgtcaccgacgcgaacggcaacaaaaaatgggttgcagtagaatctgacgccaacggt

SEQ ID NO: 564442 - DNA, 75 bp, synthetic construct
  source 1..75: mol_type = other DNA
atattgggccgttggtggagatataagtggatcacttttcatccgtcgttgacacttggcaaacaggggcaacca

SEQ ID NO: 564443 - DNA, 75 bp, synthetic construct
  source 1..75: mol_type = other DNA
gaacgcctctaacgctccctgacggctttgttagggtcgaggcgttattacccgcctctaaagcatttatcgccc

SEQ ID NO: 564444 - DNA, 75 bp, synthetic construct
  source 1..75: mol_type = other DNA
atgggtagaatcgacacctgcgtggagattgccagccatccggaagtcatcttctgtacctttggcgacgccatg

SEQ ID NO: 564445 - DNA, 75 bp, synthetic construct
  source 1..75: mol_type = other DNA
ccagcaagctgttaccgctggcgaaattgtgcgatgaagtgttatttgatttaaagattatggacccgaaccagg

SEQ ID NO: 564446 - DNA, 75 bp, synthetic construct
  source 1..75: mol_type = other DNA
gcggtttcccggcagatccgcaatacccgaataaagcggtcgcgggcgcgttatattcccaggataaaggccaga

SEQ ID NO: 564447 - DNA, 75 bp, synthetic construct
  source 1..75: mol_type = other DNA
ttatatcgatatttctgccgagcagtttggatacccttctttcattgtcaaaaatgtcaatgatgtgtcaggctg

SEQ ID NO: 564448 - DNA, 75 bp, synthetic construct
  source 1..75: mol_type = other DNA
atggttacgccagtaagcatcagcaatttcatctcacttcctgatgattttcccgttcgcaatattgcacctcag

SEQ ID NO: 564449 - DNA, 75 bp, synthetic construct
  source 1..75: mol_type = other DNA
ccgcaatgatgtggcgcgcattttcaacattcagcgttattcactgaatgacggcgagggcattcgtacggtggt

SEQ ID NO: 564450 - DNA, 75 bp, synthetic construct
  source 1..75: mol_type = other DNA
tgcgccatcgttaaccgatgttgcaacgatgcgtgaaatggcagaacgggccgggtttcaggttaccgtgggagg

SEQ ID NO: 564451 - DNA, 75 bp, synthetic construct
  source 1..75: mol_type = other DNA
cggtcatacccacgccatttttaaattcggcctcgaccagttactgccggaaaacgttgagtttatccacggtcc

SEQ ID NO: 564452 - DNA, 75 bp, synthetic construct
  source 1..75: mol_type = other DNA
cggccatacccacgccatctttaaattcggtctcgaccagttgctgccggaaaacgttgagtttatccacggccc

SEQ ID NO: 564453 - DNA, 75 bp, synthetic construct
  source 1..75: mol_type = other DNA
tgacccgcgtgcgcgttgtggtgaagtattaacgggcaaatgtaagccgcatcaatgcccgctgtttggtaacac

SEQ ID NO: 564454 - DNA, 75 bp, synthetic construct
  source 1..75: mol_type = other DNA
cgtctccagaaagagctgaagcgggttaccgacgaacgggacatattaaaaaaagccgttgtagattcaatctgt

SEQ ID NO: 564455 - DNA, 75 bp, synthetic construct
  source 1..75: mol_type = other DNA
cacccctttcaattatctctttcggtgttttgaactgaaccgccccgggtttcctggagagtgttttatctgtga

SEQ ID NO: 564456 - DNA, 75 bp, synthetic construct
  source 1..75: mol_type = other DNA
gtcaacggcgacagcgaatggcgcggcttaggcgtgattgaatcttctggcgtacacctgacgccggattatcaa

SEQ ID NO: 564457 - DNA, 75 bp, synthetic construct
  source 1..75: mol_type = other DNA
gatcgagcactgacgcccgaggaaattggcttgatgtaccagtacatggagcgtatcggcaccacaccttcaatt

SEQ ID NO: 564458 - DNA, 75 bp, synthetic construct
  source 1..75: mol_type = other DNA
ctggtttttgacgttgaccgcgagggggcagcgattgactggagcgaccagaacgcccccgcgccgaacatcacc

SEQ ID NO: 564459 - DNA, 75 bp, synthetic construct
  source 1..75: mol_type = other DNA
cgggctattggcaagagcattgcgaaatacacgcacaggaacctcacgccggaaagtttcgcacagtatgtggct

SEQ ID NO: 564460 - DNA, 75 bp, synthetic construct
  source 1..75: mol_type = other DNA
atgcacgcaataattattgatgaccatcctcttgctattgcagctattcgtaatttattgatcaaaaatgatatt

SEQ ID NO: 564461 - DNA, 75 bp, synthetic construct
  source 1..75: mol_type = other DNA
cttcgtatctccggtaaagggcgcgcgcttcttgcacggtatatccagcagaaccagcctcatgcacagttctgg

SEQ ID NO: 564462 - DNA, 75 bp, synthetic construct
  source 1..75: mol_type = other DNA
gacgaactggcggattatcttgatttgagcgcctcagcgcgccgtcgcgtcgataaagattacgggatggggcga

SEQ ID NO: 564463 - DNA, 75 bp, synthetic construct
  source 1..75: mol_type = other DNA
gaagaacctgacggctgcctctccggcagttgtaaaagctgcccggaaggaaaagcctgtctgcgcgagtggtgg

SEQ ID NO: 564464 - DNA, 75 bp, synthetic construct
  source 1..75: mol_type = other DNA
cgtctgaacagtctggcgaccgcgcatggcgtttaccgctgggtgacgagtaccaggaacagttggagtccaatt

SEQ ID NO: 564465 - DNA, 75 bp, synthetic construct
  source 1..75: mol_type = other DNA
agctcgataaaatcagcgatgggtacatcagcgccctgctacgtcggggcgaactggaaggaaaaccggggcaga

SEQ ID NO: 564466 - DNA, 75 bp, synthetic construct
  source 1..75: mol_type = other DNA
cacgctgaaaccgtgggaggcattagggatcagtcgcgcctggtattaccaactgaaaaaacgaggtctcgtaga

SEQ ID NO: 564467 - DNA, 75 bp, synthetic construct
  source 1..75: mol_type = other DNA
taccggtctgatggcgaaccataacccactggcccatgaactgattgccgcgtctgaacaatccggtgaccgcgc

SEQ ID NO: 564468 - DNA, 75 bp, synthetic construct
  source 1..75: mol_type = other DNA
atggcgtttaccgctgggtgacgagtatcaggaacagctggagtccaattttgccgatatggcgaacattggcgg

SEQ ID NO: 564469 - DNA, 75 bp, synthetic construct
  source 1..75: mol_type = other DNA
cgtcgcccgctgcgtaagatggtgttcaacgtgccgacccgccgtgaactgaccagcggtgagcgcgcgatccag

SEQ ID NO: 564470 - DNA, 75 bp, synthetic construct
  source 1..75: mol_type = other DNA
aactgccatctgttcgaaatgacgcgcaaatgggcttacagggcgattcgtcagggctggccagcattctcacag

SEQ ID NO: 564471 - DNA, 75 bp, synthetic construct
  source 1..75: mol_type = other DNA
atcactatgactgggaagatgatgccccgccgcgcacgccgtggggcagcaccatcatttatgaagcccatgtca

SEQ ID NO: 564472 - DNA, 75 bp, synthetic construct
  source 1..75: mol_type = other DNA
cgttggtgtgccctggtttcagatgggctatcaaccaggacgatatctggtgcaatggagccacggtaaaccact

SEQ ID NO: 564473 - DNA, 75 bp, synthetic construct
  source 1..75: mol_type = other DNA
accgtggtgtcgttttacctttcacatcaggtctatcgtggcctgaagcggggaagagtgattatggccgccagc

SEQ ID NO: 564474 - DNA, 75 bp, synthetic construct
  source 1..75: mol_type = other DNA
cgggccattggcaagagcgttgcgaaatatacacataggaaattctcaccagagggattttccgcagtacaggct

SEQ ID NO: 564475 - DNA, 75 bp, synthetic construct
  source 1..75: mol_type = other DNA
agcggcctgatctgcaaaaatccgtgccaccctgaatggcaggaagtggaatggcgcgaggaaccctacactctc

SEQ ID NO: 564476 - DNA, 75 bp, synthetic construct
  source 1..75: mol_type = other DNA
atttccctccgctgtttgccgagtggaacgatcatttccgcgatgccgcccgccgtttctggctgcattatgatt

SEQ ID NO: 564477 - DNA, 75 bp, synthetic construct
  source 1..75: mol_type = other DNA
acgcgcatggaaactgtgcgcgctttatcccagtctgaaagattcatactggttatcgttgaactatggtatgca

SEQ ID NO: 564478 - DNA, 75 bp, synthetic construct
  source 1..75: mol_type = other DNA
aacaggcgcttaccctgaacgacaatcttacactgccgggcaatattggctggctggattatgatccggtttgtg

SEQ ID NO: 564479 - DNA, 75 bp, synthetic construct
  source 1..75: mol_type = other DNA
atagctggccgtggacgtgggtggtttccgactcttaccgccaggcggttaaggaaggtgcgaacaagtccctga

SEQ ID NO: 564480 - DNA, 75 bp, synthetic construct
  source 1..75: mol_type = other DNA
accgtggtgtcgttttatctttcacatcaggtgtatcgcgggttgaagcggggaagagtgattatggctgccagc

SEQ ID NO: 564481 - DNA, 75 bp, synthetic construct
  source 1..75: mol_type = other DNA
gagagcatacgcagcagacgttcacggctgagaatttcgccgggattggtcacaaacgccaccagcatttcatac

SEQ ID NO: 564482 - DNA, 75 bp, synthetic construct
  source 1..75: mol_type = other DNA
tgacgccgaaaaatgccgaccgtaaacatattcgccgctcgctgtcaccagggggatttcgtccggtctattttt

SEQ ID NO: 564483 - DNA, 75 bp, synthetic construct
  source 1..75: mol_type = other DNA
ttaaccgtctggccgtttcatgcggatgtaacttcttgatgccgggtatttgccggcaaaaaacacaaaatcccc

SEQ ID NO: 564484 - DNA, 75 bp, synthetic construct
  source 1..75: mol_type = other DNA
taaaacgaatccgcaaaatatgcgatcgcgaaggtatcttgctgattgccgacgagatcgccactggatttggtc

SEQ ID NO: 564485 - DNA, 75 bp, synthetic construct
  source 1..75: mol_type = other DNA
accacattacagaaaaagttttatctattttcaatataaaacgggatttcgttgctgtaagaatccaaagtaatc

SEQ ID NO: 564486 - DNA, 75 bp, synthetic construct
  source 1..75: mol_type = other DNA
cattaattggtaatgcattaagaaacgaaacaacatcatattccctaacaaaaacagaacaggtgggaaagatgt

SEQ ID NO: 564487 - DNA, 75 bp, synthetic construct
  source 1..75: mol_type = other DNA
cagacgcctggttgacggtatgtcgtcctggtgggcggcgatccacggttacaatcacccgcagcttaatgcggc

SEQ ID NO: 564488 - DNA, 75 bp, synthetic construct
  source 1..75: mol_type = other DNA
tttggtcgtaccggcaaactgtttgcctgtgaacatgcagaaatcgcgccggacattttgtgcctcggtaaagcc

SEQ ID NO: 564489 - DNA, 75 bp, synthetic construct
  source 1..75: mol_type = other DNA
tcattgaaccgattgtccagggcgcaggcgggatgcgcatgtaccatccggaatggttaaaacgaatccgcaaaa

SEQ ID NO: 564490 - DNA, 75 bp, synthetic construct
  source 1..75: mol_type = other DNA
atcaccagaaacaaaacggatcagggtcacaataacgggcggcggtggcggagggggcggctgcaaggctacatc

SEQ ID NO: 564491 - DNA, 75 bp, synthetic construct
  source 1..75: mol_type = other DNA
tatgggtattttcctacttctcaaatcagtgatgataattgggaatacttaggccatgaactcgatgcagctcaa

SEQ ID NO: 564492 - DNA, 75 bp, synthetic construct
  source 1..75: mol_type = other DNA
tttaaaaggcaaaggccgcagtgcagagcttcgcgggggtaatgccctttggcttaaaaccggagttgaggctga

SEQ ID NO: 564493 - DNA, 75 bp, synthetic construct
  source 1..75: mol_type = other DNA
gaagaacctgacggctgcctctctggcagttgtaaaagctgcccggaaggcaaagtctgtctgcgcgagtggtgg

SEQ ID NO: 564494 - DNA, 75 bp, synthetic construct
  source 1..75: mol_type = other DNA
gccgtttcgcgtcaggatgctggaaggattttcacgcaaaaatccttgaaaaagcattgtaaggatcctgcatgt

SEQ ID NO: 564495 - DNA, 75 bp, synthetic construct
  source 1..75: mol_type = other DNA
ctacaccgttctcgccctgaatctggaaggtaaaaaagagatactgggtctgtatctgtctgaaagtgaaggcgc

SEQ ID NO: 564496 - DNA, 75 bp, synthetic construct
  source 1..75: mol_type = other DNA
cccgccccgcaaagccgcatggatggcgaatgggatgagcgcgatatggtgggctttgcccgcctgatggcggcg

SEQ ID NO: 564497 - DNA, 75 bp, synthetic construct
  source 1..75: mol_type = other DNA
aagcctggccgttacataccccgtttgttattgcgcgaggcagtcgcagtgaagcgagagtagtggtcgttgaac

SEQ ID NO: 564498 - DNA, 75 bp, synthetic construct
  source 1..75: mol_type = other DNA
ggtcagttttgccgatcttgatggaccgacctggctggcggtggatgtggagccggcgctacagtttacgaccgg

SEQ ID NO: 564499 - DNA, 75 bp, synthetic construct
  source 1..75: mol_type = other DNA
gcaactggaaaaagggctgacacgtgaagaactgcaaaaaatacttccagcgggcgcggcgcgtaatgcgctgga

SEQ ID NO: 564500 - DNA, 75 bp, synthetic construct
  source 1..75: mol_type = other DNA
acacaaactggacgccctggcaggctggcgcgtaagccatcattttgatgaacgcgagcgagcggcgctggcatg

SEQ ID NO: 564501 - DNA, 75 bp, synthetic construct
  source 1..75: mol_type = other DNA
atggcaatcgtggtctggcgttgctggacctgatcgaagagggcaacctggggctgatccgcgcgggtagagaag

SEQ ID NO: 564502 - DNA, 75 bp, synthetic construct
  source 1..75: mol_type = other DNA
ggtaaagttggtatgccgctgcgtgtcgccgtaaccggtgcggggcagtctccagcactggatgttaccgttcac

SEQ ID NO: 564503 - DNA, 75 bp, synthetic construct
  source 1..75: mol_type = other DNA
tccgtagagtttaccgctgaagatggcacacgcctgcaaggctggtttattccgtcatcgactggccccgctgaa

SEQ ID NO: 564504 - DNA, 75 bp, synthetic construct
  source 1..75: mol_type = other DNA
atgtcagtgcttgccgatggcgtgctggtggcgatggcgctggtcgtgctccgccctttactgcgcaaatctgaa

SEQ ID NO: 564505 - DNA, 75 bp, synthetic construct
  source 1..75: mol_type = other DNA
catccagtcacttcgaacagactggatatccgcgaagtggcaaaggctgcagatgcaacgctgaaacgcatggga

SEQ ID NO: 564506 - DNA, 75 bp, synthetic construct
  source 1..75: mol_type = other DNA
ctgtcatcctgttgtttctggtagtggtggttgatttcaccggacgactgatatcggtgctggcagatggtgtgc

SEQ ID NO: 564507 - DNA, 75 bp, synthetic construct
  source 1..75: mol_type = other DNA
gttggttacccgagcgtaatttcaacgtttttatgtttgattatcgcgggtttggtaaatcaaaaggcacgccgt

SEQ ID NO: 564508 - DNA, 75 bp, synthetic construct
  source 1..75: mol_type = other DNA
cggccccgatccctggtcagccgaatcagtagaattcaccgctaaagatggcactcgcctacatggttggtttat

SEQ ID NO: 564509 - DNA, 75 bp, synthetic construct
  source 1..75: mol_type = other DNA
tctcctttcgctcaataatagcagagcaaaagaaagagcccgaaatgatggtcagatattatatcagttctgctg

SEQ ID NO: 564510 - DNA, 75 bp, synthetic construct
  source 1..75: mol_type = other DNA
ctgtggctaaactttggcttgatggttaaccgcatcgtgcagcgggtgattttcgtcactggctactacggtctg

SEQ ID NO: 564511 - DNA, 75 bp, synthetic construct
  source 1..75: mol_type = other DNA
aaagaattaaataatccagagcatgacagttacgcaatgagtgaaaagagtcacggcagagaagaaatccgtctt

SEQ ID NO: 564512 - DNA, 75 bp, synthetic construct
  source 1..75: mol_type = other DNA
tcggacagatcaagacggatgagaaatccaatgagattacagctatcccagaacttcttaacatgctggatatta

SEQ ID NO: 564513 - DNA, 75 bp, synthetic construct
  source 1..75: mol_type = other DNA
tttacatgttggacattaaaggaaaaatcatcacaactgatgcgatgggttgccagaaagatattgcagagaaga

SEQ ID NO: 564514 - DNA, 75 bp, synthetic construct
  source 1..75: mol_type = other DNA
aaggcagggttaagacgtaagatgcgaaaagcagccatggacagaaagtatctggcgtcagtccttgcggggagc

SEQ ID NO: 564515 - DNA, 75 bp, synthetic construct
  source 1..75: mol_type = other DNA
tcctctcgcacctgctgtacaccatctatttcgccagtcagatgacgctctctttcttctggcctctgccactgg

SEQ ID NO: 564516 - DNA, 75 bp, synthetic construct
  source 1..75: mol_type = other DNA
caaaaaaccgccgaagtggacgatggttgccgaactggtggaaaccagtcgcttatgggggcgtatcgccgcgcg

SEQ ID NO: 564517 - DNA, 75 bp, synthetic construct
  source 1..75: mol_type = other DNA
ccggagattctgcgtaccaacctggcctcggttattttgcagatgaccgcactgggcttgggcgatatcgccgca

SEQ ID NO: 564518 - DNA, 75 bp, synthetic construct
  source 1..75: mol_type = other DNA
gagattacagctcccccagaacttcttaacatgctggatattaaaggaaaaatcatcacaactgatgcgatgggt

SEQ ID NO: 564519 - DNA, 75 bp, synthetic construct
  source 1..75: mol_type = other DNA
tggtgatttacaggcgcagacagactggtttgcaactggtgtggatattatcgcgactgactgggaggctttctg

SEQ ID NO: 564520 - DNA, 75 bp, synthetic construct
  source 1..75: mol_type = other DNA
gatatgacggtagtcagtgttggattacatggtgtgagcgtgtccgcagccaatcatgagccatacgtagcgtta

SEQ ID NO: 564521 - DNA, 75 bp, synthetic construct
  source 1..75: mol_type = other DNA
aactgagccaggaaagccctggcgacattctgatctttatgagtggtgagcgggaaattcgcgataccgccgatg

SEQ ID NO: 564522 - DNA, 75 bp, synthetic construct
  source 1..75: mol_type = other DNA
gaaagacgccctgaaaggcaaagtgcaggaaacgctgtctgccgtggcggatgacggtatcgagcagagcggttt

SEQ ID NO: 564523 - DNA, 75 bp, synthetic construct
  source 1..75: mol_type = other DNA
cagggttaagacgtaagatgcgaaaagcagccatggacagaaactatctggcgtcagtccttgcggggagcgggc

SEQ ID NO: 564524 - DNA, 75 bp, synthetic construct
  source 1..75: mol_type = other DNA
aacttattgatttcacgtttgaatggaaagggctgaagaaattatgcgtggcagtctcctttcggtccataatag

SEQ ID NO: 564525 - DNA, 75 bp, synthetic construct
  source 1..75: mol_type = other DNA
ttaacatgctggatattaaaggaaaaattatcacaactgatgcgatgggttgccagaaagatattgcagaggaga

SEQ ID NO: 564526 - DNA, 75 bp, synthetic construct
  source 1..75: mol_type = other DNA
caggttcaacaggaatgggatgcactgtttgctgactacgcgaagcagtggccggaactggcggcggagtttact

SEQ ID NO: 564527 - DNA, 75 bp, synthetic construct
  source 1..75: mol_type = other DNA
gcaactacaaagtgaaggcgtggccagcgctggtggatgagcgtgacagcgtagcgatcaaactgtttgataacc

SEQ ID NO: 564528 - DNA, 75 bp, synthetic construct
  source 1..75: mol_type = other DNA
cgaatggcaggatatctacacccagttgcgccaggtagtaaaagaacttggcattccagttaacagcgaaccggc

SEQ ID NO: 564529 - DNA, 75 bp, synthetic construct
  source 1..75: mol_type = other DNA
cgaaaaacatcgtcgcttccacgacaaagaatccgacttcctcgcgtttgtaaatctgtggaattatcttggcga

SEQ ID NO: 564530 - DNA, 75 bp, synthetic construct
  source 1..75: mol_type = other DNA
taccgaaatcttgccgctttatgcgcggctttcgaacagcgaacagaaccgcgtgttccagtcgcacagtggacg

SEQ ID NO: 564531 - DNA, 75 bp, synthetic construct
  source 1..75: mol_type = other DNA
aaaatcaccttccgcgtggtggacgacaaaaataagaagctaaaagaagggcgctcattacaggatctgaaagac

SEQ ID NO: 564532 - DNA, 75 bp, synthetic construct
  source 1..75: mol_type = other DNA
gatagaagagctgcgcgttagttacttcgctcaacaacttggtacgccttatccgatttcggataagcgtatttt

SEQ ID NO: 564533 - DNA, 75 bp, synthetic construct
  source 1..75: mol_type = other DNA
gtggcagatccccggcctgcgtcgtgaactgatcatcgcactgattaaatcattgccgaaaccagtacgccgtaa

SEQ ID NO: 564534 - DNA, 75 bp, synthetic construct
  source 1..75: mol_type = other DNA
atatgtgatcgatccgggtacggctcgaatcagtcgctacagttatcgcactaaagtacaacgtctgccgatcga

SEQ ID NO: 564535 - DNA, 75 bp, synthetic construct
  source 1..75: mol_type = other DNA
ggtaaatcaggttacaacgttccggcaattctcgaagccttaggcggtgccgacaatattgtcagcctggataac

SEQ ID NO: 564536 - DNA, 75 bp, synthetic construct
  source 1..75: mol_type = other DNA
gcattacagttaagtgagaacgctcgctcagccatgctgaccgaaaacgaaagaattaaagcactggaaaaggag

SEQ ID NO: 564537 - DNA, 75 bp, synthetic construct
  source 1..75: mol_type = other DNA
ggaaccataaccacaccattttagcccataaatggttacaaattggtacacatatcacaccaacaaaaaatctga

SEQ ID NO: 564538 - DNA, 75 bp, synthetic construct
  source 1..75: mol_type = other DNA
atgaacaccaacggggccggagacggggcactggcggcgctgttgcatgacattaccgccaacagttatcaccgt

SEQ ID NO: 564539 - DNA, 75 bp, synthetic construct
  source 1..75: mol_type = other DNA
gtggaactattcatcttgcaggttgcgttattgaggttatgggtaataaaggtgccatgactatccgtgtaacca

SEQ ID NO: 564540 - DNA, 75 bp, synthetic construct
  source 1..75: mol_type = other DNA
tcgttcagcgcgtgatggttatggctttgaagctaactggtcagagttttacaccacaacccgcaaaccctctgc

SEQ ID NO: 564541 - DNA, 75 bp, synthetic construct
  source 1..75: mol_type = other DNA
atcagcaggtgccccggcaggcgcaaacacgagtgccgcgacgtcaacgctgatacctcgtccggtgtccgctgt

SEQ ID NO: 564542 - DNA, 75 bp, synthetic construct
  source 1..75: mol_type = other DNA
tcgcatgtgatgtttggcggtatcacccatgcgcccgccatcgagctgtgccgcaaactggtggcaatgacgccg

SEQ ID NO: 564543 - DNA, 75 bp, synthetic construct
  source 1..75: mol_type = other DNA
ccgcaaattggtggcaatgacgccgcaaccgctggagtgcgtttttctcgcggactccggctccgtagcggtaga

SEQ ID NO: 564544 - DNA, 75 bp, synthetic construct
  source 1..75: mol_type = other DNA
gatgccacaacgtctgatacctgcatgaccatgacgaaagccaatcaactggcacgggacagggcggcaaaaaat

SEQ ID NO: 564545 - DNA, 75 bp, synthetic construct
  source 1..75: mol_type = other DNA
cgcgccctgggtggacagcgataacgctttccatcagcccggtcgtgtctcttttgtggtcagccctgctgactg

SEQ ID NO: 564546 - DNA, 75 bp, synthetic construct
  source 1..75: mol_type = other DNA
acaccagtttcgcgtccggctgtgtccgtgggcaatccggctccctcatgccagaccgtgcgttgtgataatccc

SEQ ID NO: 564547 - DNA, 75 bp, synthetic construct
  source 1..75: mol_type = other DNA
attgagaaagatagactgcagaatctttcagattcaaagctaacaaacataatatcggaaattatcaagctaaaa

SEQ ID NO: 564548 - DNA, 75 bp, synthetic construct
  source 1..75: mol_type = other DNA
aaagagtctgacttcctcgcgtttgtgaatctgtggaattatcttggcgagcagcaaaaggcgctttcttcaaac

SEQ ID NO: 564549 - DNA, 75 bp, synthetic construct
  source 1..75: mol_type = other DNA
cgatacagaactttatggttttgtttctgctgttgacggcatcctggtcagtgacctggtgggaacccgggagga

SEQ ID NO: 564550 - DNA, 75 bp, synthetic construct
  source 1..75: mol_type = other DNA
ggaacagggctgctgctattgggtaaacacgttttatccgcatacgcgcgcgggacgcacatggcttcgcgatgc

SEQ ID NO: 564551 - DNA, 75 bp, synthetic construct
  source 1..75: mol_type = other DNA
gattatcgtccggtactatgggggttgacatcgctgggggatggtgaaacacgtttcatcgcttcaccacaggtg

SEQ ID NO: 564552 - DNA, 75 bp, synthetic construct
  source 1..75: mol_type = other DNA
cagcaggcgcttaacgacgtgaccggccagggatggtggattggccgaccggttgagatgcccggttcgtatccg

SEQ ID NO: 564553 - DNA, 75 bp, synthetic construct
  source 1..75: mol_type = other DNA
ccgcacgtcacttcgacagctggtggaaaaaagtcagccgcgaaacgcctgatttgctcaactttgaaaagagca

SEQ ID NO: 564554 - DNA, 75 bp, synthetic construct
  source 1..75: mol_type = other DNA
gtcccgggtcgtcaacaatgtcagttttacattaggcaatgaacgtctggcgctggtcggtgagtcgggttcagg

SEQ ID NO: 564555 - DNA, 75 bp, synthetic construct
  source 1..75: mol_type = other DNA
ttcgataaagcaggcatggcatggacaagaaacccggcgttgcttggcgaaacgttatggaatgttattaagtaa

SEQ ID NO: 564556 - DNA, 75 bp, synthetic construct
  source 1..75: mol_type = other DNA
tgaaagttatgtcattaaaatatgttcaagagttcaagagcgaagatatgataaaagagttggctatgcacttga

SEQ ID NO: 564557 - DNA, 75 bp, synthetic construct
  source 1..75: mol_type = other DNA
tccagtctgtatgtcgcagaccatcagcagaacccccacagtctctggcgcagaccggagatcctgcgcgatctg

SEQ ID NO: 564558 - DNA, 75 bp, synthetic construct
  source 1..75: mol_type = other DNA
atgctaatgcctcaaaaggccctgcaagcattattactgacacatattttccagctgcattattagctcatgttg

SEQ ID NO: 564559 - DNA, 75 bp, synthetic construct
  source 1..75: mol_type = other DNA
tttaaaagccttgagtcacttagaaatgacataattcaccccaagacaacaaagaaaaacacagaaacaaaagaa

SEQ ID NO: 564560 - DNA, 75 bp, synthetic construct
  source 1..75: mol_type = other DNA
ccggactggatctggcttcgtctgccgcacagtcggtggtgttgatgttcctcgtcatcgtgctgacggtggtgc

SEQ ID NO: 564561 - DNA, 75 bp, synthetic construct
  source 1..75: mol_type = other DNA
gggcgagacgatcctgacaataaaccatcatatgccttcggtggctcggtgaatacccttgcgatgggtaacccg

SEQ ID NO: 564562 - DNA, 75 bp, synthetic construct
  source 1..75: mol_type = other DNA
ctccatacaggcggttatcgataagcagcagggcgggtttagcgcgcagccgtgggactgggcattttatgccga

SEQ ID NO: 564563 - DNA, 75 bp, synthetic construct
  source 1..75: mol_type = other DNA
cagtcgtttctatcaaaccttgatgctgctgccgtatgccgtggctcccgccgttgccgccgtattgtggatctt

SEQ ID NO: 564564 - DNA, 75 bp, synthetic construct
  source 1..75: mol_type = other DNA
cgccgcttctttaagattgcgctgccgcttatcgccccggtgagtttcttcctgctggtggtgaacctggtctac

SEQ ID NO: 564565 - DNA, 75 bp, synthetic construct
  source 1..75: mol_type = other DNA
agccatcgacggtgcaggcccgattcgccgcttctttaagattgcgctgccgctgattgcgccggtgagcttctt

SEQ ID NO: 564566 - DNA, 75 bp, synthetic construct
  source 1..75: mol_type = other DNA
ttcttctgtcgcagagggtgtttcagcccgtcctcagactgccaggacgaaggctaagaacctcaaggccatacc

SEQ ID NO: 564567 - DNA, 75 bp, synthetic construct
  source 1..75: mol_type = other DNA
aggctgaaaaactgaaaaacctggtggattctgccagattacaaacttcttcttctgccgtaacagcaacagtcc

SEQ ID NO: 564568 - DNA, 75 bp, synthetic construct
  source 1..75: mol_type = other DNA
agcccatccgaaaggggtgtaaagccatttataggcgatagtattgatattcagctgagagataaaaccggaaaa

SEQ ID NO: 564569 - DNA, 75 bp, synthetic construct
  source 1..75: mol_type = other DNA
tgaagccatgcaggatgtggatgattttgaacgacgggcgctggtagcagaaaatatggagcttcccgcggtacc

SEQ ID NO: 564570 - DNA, 75 bp, synthetic construct
  source 1..75: mol_type = other DNA
ctcgatgaagtccagatcaaaccttatttcgaattaaacacggtgttgaatgaaggtgtattctggaccgctaat

SEQ ID NO: 564571 - DNA, 75 bp, synthetic construct
  source 1..75: mol_type = other DNA
aattactgccatcgcgcttaacccgcaaacgcctgatttcaacaatactattctggcactggaacaaagcggaga

SEQ ID NO: 564572 - DNA, 75 bp, synthetic construct
  source 1..75: mol_type = other DNA
attcacactgccagaggatattttaaaaggagagctgagagctctaaatttaaatataaacaacgaattatctcc

SEQ ID NO: 564573 - DNA, 75 bp, synthetic construct
  source 1..75: mol_type = other DNA
ggtggaaattgagaagtacaacggaacagtggagcaggtgacggcgtttaacggccccgtggagatggtggcgca

SEQ ID NO: 564574 - DNA, 75 bp, synthetic construct
  source 1..75: mol_type = other DNA
tgaagcacattgcggttaacccgcaaactgatgtgccgctgcaactggcgctggcgtatacgctgtacagtgaaa

SEQ ID NO: 564575 - DNA, 75 bp, synthetic construct
  source 1..75: mol_type = other DNA
agaccaaaagctgaacgcgatatgccttcagtggatcttctttccggtgtttcttcggcaagtgagagtgaaaaa

SEQ ID NO: 564576 - DNA, 75 bp, synthetic construct
  source 1..75: mol_type = other DNA
gaactggtggtgcccggatcacgatgtttatgaatattacgagcagctaaaagcgaaagtcgccgccggtgaaat

SEQ ID NO: 564577 - DNA, 75 bp, synthetic construct
  source 1..75: mol_type = other DNA
gacaaaggcggtgagccaggtgcgctgtgcaaatacggcaaccccaatgtgttgaccattgacatcggcacttcg

SEQ ID NO: 564578 - DNA, 75 bp, synthetic construct
  source 1..75: mol_type = other DNA
tgccggatcacgtacacaacgcggcgcgtattcgttatccgatggtacgcgtggactggctgcgtaagcgccatc

SEQ ID NO: 564579 - DNA, 75 bp, synthetic construct
  source 1..75: mol_type = other DNA
atcgtcggcgttattcgtcaggaaaatgggcgcttccctccactaggtgtgaatgtcacggataaagcgacaggt

SEQ ID NO: 564580 - DNA, 75 bp, synthetic construct
  source 1..75: mol_type = other DNA
gataccgatggcatctccggcattgaaatcaactctaaccgtaccgttaccaacgggctgggcatcgccgtgata

SEQ ID NO: 564581 - DNA, 75 bp, synthetic construct
  source 1..75: mol_type = other DNA
accgagaacggtcgtctctatctctccgggacatcacagcgagacagttattattctctgaatgccagttggaat

SEQ ID NO: 564582 - DNA, 75 bp, synthetic construct
  source 1..75: mol_type = other DNA
cttgatgctttttccgatcgtcacggcgatgtttatcgcgaacagatggtggactttatccttagcgcgttgaat

SEQ ID NO: 564583 - DNA, 75 bp, synthetic construct
  source 1..75: mol_type = other DNA
aagtcaattatttaaaaacgactctggataacctggttgtagaattactgcaaaatgatgaaacgaccccactta

SEQ ID NO: 564584 - DNA, 75 bp, synthetic construct
  source 1..75: mol_type = other DNA
acctggggtgataatacctgtgaagtcacgccgccaaaccaaagtaacattagcgaaagcgcaataattttacct

SEQ ID NO: 564585 - DNA, 75 bp, synthetic construct
  source 1..75: mol_type = other DNA
gccatgaaagaacgcggttttaagaagcagaataaacacccacgccgtcgctttaaggggcatgtcacgccccgc

SEQ ID NO: 564586 - DNA, 75 bp, synthetic construct
  source 1..75: mol_type = other DNA
gggggcaatacatcgtaccgacgatcgtactcagtcaaatattggttttggctggcgtcatttttcagaaaatga

SEQ ID NO: 564587 - DNA, 75 bp, synthetic construct
  source 1..75: mol_type = other DNA
tggttcagacatcaggatatggctgagggttacctggtgatgaagtctcttgatcaggagatctgctcaagagac

SEQ ID NO: 564588 - DNA, 75 bp, synthetic construct
  source 1..75: mol_type = other DNA
gtcaaatcttaataaagaagaattaatacatatattatctgcaagaactttggatggaaccatacctggtttata

SEQ ID NO: 564589 - DNA, 75 bp, synthetic construct
  source 1..75: mol_type = other DNA
atgctgacatgccaaaagagtggacaacgacccgaggactttatgcctctttccgttatgaaggaaactgggaaa

SEQ ID NO: 564590 - DNA, 75 bp, synthetic construct
  source 1..75: mol_type = other DNA
tcaaggctgccagtttgtgttctttggcatttgcgttgaccggatgtatcaccgcaggactggtttttaataccg

SEQ ID NO: 564591 - DNA, 75 bp, synthetic construct
  source 1..75: mol_type = other DNA
ggccagtcactcattaaatttggacctcatgatctccgtagaactgcgagcactctgctgcatgaggccgggtac

SEQ ID NO: 564592 - DNA, 75 bp, synthetic construct
  source 1..75: mol_type = other DNA
atcagaagctgaccgaaatcacccacgaggacttgcgagcacttaccgacgccatcgtagagcgcggtgcgccag

SEQ ID NO: 564593 - DNA, 75 bp, synthetic construct
  source 1..75: mol_type = other DNA
ccaacgcccgaactggagctggcgaaatttgtccgtctcaaatcggtgcgccggattgcacagtttgatgacggg

SEQ ID NO: 564594 - DNA, 75 bp, synthetic construct
  source 1..75: mol_type = other DNA
ggggaagcgttatatataacctttttcttcaacttgagaaagagaataaatctcacacatcattagaagttcatt

SEQ ID NO: 564595 - DNA, 75 bp, synthetic construct
  source 1..75: mol_type = other DNA
ggttgacagcgtcacgctggtggtacttttttcgcactcatcaactgcgcctattccgtttttgccacagtgttg

SEQ ID NO: 564596 - DNA, 75 bp, synthetic construct
  source 1..75: mol_type = other DNA
ggatcatacatccgcaaacgaagactttgtcgggcagccattcttgtcagacttacagctaaatcaatgcttgat

SEQ ID NO: 564597 - DNA, 75 bp, synthetic construct
  source 1..75: mol_type = other DNA
ggcgtgaactgcgcggctatgatgccatgacggcggcttatgcccgtgcaagaaaaacacggagactggcacaat

SEQ ID NO: 564598 - DNA, 75 bp, synthetic construct
  source 1..75: mol_type = other DNA
acaactcgacgacgacacttaccgcgcttttctgatgcagaaaacgggcaaaatcagttgccgcgagctgacggt

SEQ ID NO: 564599 - DNA, 75 bp, synthetic construct
  source 1..75: mol_type = other DNA
gccatgaaagagcgcggttttaagaagcagaaaaaacatccccgccgtcgctttaaggggcatgtcacaccacgc

SEQ ID NO: 564600 - DNA, 75 bp, synthetic construct
  source 1..75: mol_type = other DNA
atgaatcgcacatccctgattaaattaattcatgtcgcccgtcgtgatctacaactcgacgatgacacttaccgc

SEQ ID NO: 564601 - DNA, 75 bp, synthetic construct
  source 1..75: mol_type = other DNA
tcgttgcaggttgtgctcgaaacgctcaaacagtggcatatgcgctgcatccgggaagcctttgcccgacatggt

SEQ ID NO: 564602 - DNA, 75 bp, synthetic construct
  source 1..75: mol_type = other DNA
gaaagtgtttcagcgatacaagcggtgtggtagcaccgctttttaaaggtatgatcatgagtcgcacatccctga

SEQ ID NO: 564603 - DNA, 75 bp, synthetic construct
  source 1..75: mol_type = other DNA
acacagggcaaaaaaatgcagatagttaaattgaagacagaaggtgcaggattacatggcgtcgctcgtctgaca

SEQ ID NO: 564604 - DNA, 75 bp, synthetic construct
  source 1..75: mol_type = other DNA
atttaaacactagagagtgtcgttggtatttaatgggggaaggtgagatgaaaaagatagctgctatatcattaa

SEQ ID NO: 564605 - DNA, 75 bp, synthetic construct
  source 1..75: mol_type = other DNA
aactacgacgtcatcatttagccagatgtatgaagaattttagtaagcgtcaacggagcaccgtattgacgctta

SEQ ID NO: 564606 - DNA, 75 bp, synthetic construct
  source 1..75: mol_type = other DNA
gtgcctttacctgtgagcgaaaccgggcgggaactgcgcggatatgatgcactgaccagtgcgtatgcccgcgcc

SEQ ID NO: 564607 - DNA, 75 bp, synthetic construct
  source 1..75: mol_type = other DNA
agaagatttggagccagagcttctggaattgctggacgagatggataatgtggcgcgagaagccagcaaaattct

SEQ ID NO: 564608 - DNA, 75 bp, synthetic construct
  source 1..75: mol_type = other DNA
ggcattcgggcatgcgaactcatccaccagctcccacatcagcagcaaacgccggttatcgcggtaacggcacat

SEQ ID NO: 564609 - DNA, 75 bp, synthetic construct
  source 1..75: mol_type = other DNA
cattcttctcacgataaagggttggaactgacgctcaatattaaaagcgacgtgcctgataacgtgatcggcgac

SEQ ID NO: 564610 - DNA, 75 bp, synthetic construct
  source 1..75: mol_type = other DNA
cttgctgttccacgctcagtttgatggtgaaaagataagtgcaggctcgactgccgacaaacgccttggaacact

SEQ ID NO: 564611 - DNA, 75 bp, synthetic construct
  source 1..75: mol_type = other DNA
tgccataaacaaacagagccatttcttccaattgactggaactcaaacgattacgattggctaccttatgaagat

SEQ ID NO: 564612 - DNA, 75 bp, synthetic construct
  source 1..75: mol_type = other DNA
cactacgacatgatgttgctaggaatcgccgtgacattccgcgaaccgctaacgatgcaacatgcccggttgcta

SEQ ID NO: 564613 - DNA, 75 bp, synthetic construct
  source 1..75: mol_type = other DNA
gaatcaagaatgtaattctggaaaactcgacttatgaagaactggccgagaagactggcattagcgtgagtacgc

SEQ ID NO: 564614 - DNA, 75 bp, synthetic construct
  source 1..75: mol_type = other DNA
atgggcaaagaaattagagcggaaagaatcaagaatgtaattctggaaaactcgacttatgaagaactggccgag

SEQ ID NO: 564615 - DNA, 75 bp, synthetic construct
  source 1..75: mol_type = other DNA
tgtatacgctggatgaactttcctgccctgctgcacgggaaaaagcccgcgactggtaccgtgtgcaccattctg

SEQ ID NO: 564616 - DNA, 75 bp, synthetic construct
  source 1..75: mol_type = other DNA
gagatctttatttccagcgtgatgatgctgttttgtattggtattgcgcttatttttggctggcgcttaatgcgc

SEQ ID NO: 564617 - DNA, 75 bp, synthetic construct
  source 1..75: mol_type = other DNA
caacaaatgaccagaatacggaattgcagcgtaacgcgctggagtgcgcaggatgtgagctgatttttgatattg

SEQ ID NO: 564618 - DNA, 75 bp, synthetic construct
  source 1..75: mol_type = other DNA
gatatatagagacattagaaatgaaaaagaatctctttttaatgagaagtttacttttaaccatgtcattatcaa

SEQ ID NO: 564619 - DNA, 75 bp, synthetic construct
  source 1..75: mol_type = other DNA
aatatcttttgcaggagctgaccaatactctacgtttgtatgcctttagttggtgcgcacaactggcgctcaatc

SEQ ID NO: 564620 - DNA, 75 bp, synthetic construct
  source 1..75: mol_type = other DNA
aaattaatcaaaccagcgtgatgcctgaaaaaactggtgtttactggaattctcggtttagcattgctccaatgc

SEQ ID NO: 564621 - DNA, 75 bp, synthetic construct
  source 1..75: mol_type = other DNA
atgaaacgctttccgctatttcttttattcacgctgttcacgctgttcacgctgttcacgctgttcaccgttccg

SEQ ID NO: 564622 - DNA, 75 bp, synthetic construct
  source 1..75: mol_type = other DNA
tgaccgtgggcgagactatgaagattcgcgcgacgacggctggcagcgtgaagtgagcgacgatcggcgcaggca

SEQ ID NO: 564623 - DNA, 75 bp, synthetic construct
  source 1..75: mol_type = other DNA
gcgcgatgtggtgtcgattccggtgacagtgaagacgcgtattggcattgacgatcaggacagctatgaatttct

SEQ ID NO: 564624 - DNA, 75 bp, synthetic construct
  source 1..75: mol_type = other DNA
caacatatggatggcgtgatggtcgggcgcgaggcgtatcagaatccgggtattctggcggcggtagaccgagag

SEQ ID NO: 564625 - DNA, 75 bp, synthetic construct
  source 1..75: mol_type = other DNA
ttccggtgacggtgaaaacgcgtattggcatcgatgatcaggacagctatgaatttctctgtgatttcatcaaca

SEQ ID NO: 564626 - DNA, 75 bp, synthetic construct
  source 1..75: mol_type = other DNA
ctctagaggttttgcagtggggaaaaggacagaaaaagcgtccgttatggcagatttatcaagacactctgaatg

SEQ ID NO: 564627 - DNA, 75 bp, synthetic construct
  source 1..75: mol_type = other DNA
cctgaccaattccgtgaagattgtaaaacacatatgcaggagctgcttgatgagcctgcattctggtccgtgctg

SEQ ID NO: 564628 - DNA, 75 bp, synthetic construct
  source 1..75: mol_type = other DNA
gattttattgtggatcgaggcctcccgcttcgtgaccgcgcaacaaacctagaaagtgctttcaaacagctatta

SEQ ID NO: 564629 - DNA, 75 bp, synthetic construct
  source 1..75: mol_type = other DNA
cgtaccggcccaggccgatattatcgatgacaccattggcaatattcagcaggcgattaacgacgcttctaaccc

SEQ ID NO: 564630 - DNA, 75 bp, synthetic construct
  source 1..75: mol_type = other DNA
gtttgctaatctgatgggggatttcagtctggaatatcccatccaggataagctgaacttcattgagcagcaaat

SEQ ID NO: 564631 - DNA, 75 bp, synthetic construct
  source 1..75: mol_type = other DNA
agatctcaataattatttgcaggaatttatcgaaaagcgcgagctttcggcatcgaagtatacgcaagccgttac

SEQ ID NO: 564632 - DNA, 75 bp, synthetic construct
  source 1..75: mol_type = other DNA
gtgagctccatcgtatcgcggatgccctgcaggcggtgcagaaacgtaacttctggcagttacaggctgaaatca

SEQ ID NO: 564633 - DNA, 75 bp, synthetic construct
  source 1..75: mol_type = other DNA
atgtattgtgatataacagacttggttccgaaaactattcagtataaatatatcaaatcctatggacccctaaat

SEQ ID NO: 564634 - DNA, 75 bp, synthetic construct
  source 1..75: mol_type = other DNA
aaataaagaactggtacagatacctgacaatccatgctattacataagtgcaaaaaacggtaagcaaagtgaagc

SEQ ID NO: 564635 - DNA, 75 bp, synthetic construct
  source 1..75: mol_type = other DNA
taaaccgtgataatgagtggttatccgcggtaaaggggaaacaggtcgtattgattgcggccagaaagtcagaag

SEQ ID NO: 564636 - DNA, 75 bp, synthetic construct
  source 1..75: mol_type = other DNA
tggctgacgtcggtatgttggggatgccaaacgcgggtaaatcgacatttatccgcgctgtctcggcggctaaac

SEQ ID NO: 564637 - DNA, 75 bp, synthetic construct
  source 1..75: mol_type = other DNA
agatcgatctgctggataaggcagaagccgaagagaaagcgaaagcgatcgctgaggcgctgggctgggaagata

SEQ ID NO: 564638 - DNA, 75 bp, synthetic construct
  source 1..75: mol_type = other DNA
cgcgactgtaccggtaagcgcggtaaagacgtcacgattaaagtgccggtaggtacgcgtgtaatcgaccagggt

SEQ ID NO: 564639 - DNA, 75 bp, synthetic construct
  source 1..75: mol_type = other DNA
acctcccagcgcggtgataaccgttttgtgcgcgtgagctgggatgaagccctcgacatgttctatgaagaactg

SEQ ID NO: 564640 - DNA, 75 bp, synthetic construct
  source 1..75: mol_type = other DNA
acagatcattgctggctggtgtgtacagcgtatgcagcacggtgaacagtgggcgtggatggttgtggttctggc

SEQ ID NO: 564641 - DNA, 75 bp, synthetic construct
  source 1..75: mol_type = other DNA
gatgaacaactgacgcaaatctccagtgcgcagatggctgaatggttttcgttgctgaaaagcgaaccgccgctc

SEQ ID NO: 564642 - DNA, 75 bp, synthetic construct
  source 1..75: mol_type = other DNA
gcctgtaatcacaaaggtttccgcggacggactgccatccatgagctgacgtggtggatgccacattgcgtgatt

SEQ ID NO: 564643 - DNA, 75 bp, synthetic construct
  source 1..75: mol_type = other DNA
tttgcaggatatgggcgtggagcctttcctgctctcttccagtctgacgggcgtgatggcgcagcgactggtccg

SEQ ID NO: 564644 - DNA, 75 bp, synthetic construct
  source 1..75: mol_type = other DNA
cgacaacagtgactacaaaggctacagcagcactattccgattgcccgttttatcgatgcgatcctcgaaccggg

SEQ ID NO: 564645 - DNA, 75 bp, synthetic construct
  source 1..75: mol_type = other DNA
ggatgatgaggactgggatgatgactgggatgatgactgggacgaagacgacgaagaaggcgttgagttcattta

SEQ ID NO: 564646 - DNA, 75 bp, synthetic construct
  source 1..75: mol_type = other DNA
gtgatctccatcgtatcgcggatgccctgcaggcggttcagaaacgtaacttctggcagttacaggctgaaatca

SEQ ID NO: 564647 - DNA, 75 bp, synthetic construct
  source 1..75: mol_type = other DNA
gtgaactccatcgtatcgcggatgccctgcaggcggtacagaaacgtaacttctggcagttacaggctgaaatca

SEQ ID NO: 564648 - DNA, 75 bp, synthetic construct
  source 1..75: mol_type = other DNA
atgagcagcattatcaccaccacagtgtatacgctggatgaactttcctgcccttctgcacgggaaaaagcccgc

SEQ ID NO: 564649 - DNA, 75 bp, synthetic construct
  source 1..75: mol_type = other DNA
gtgacctgcatcgtatcgcggatgccctgcaggcggtgcagaaacgtaacttctggcagttacaggctgaaatca

SEQ ID NO: 564650 - DNA, 75 bp, synthetic construct
  source 1..75: mol_type = other DNA
gtgacctccatcgtatcgcggatgccctgcaggcggtccagaaacgtaacttctggcagttacaggctgaaatca

SEQ ID NO: 564651 - DNA, 75 bp, synthetic construct
  source 1..75: mol_type = other DNA
gtgacctacatcgtatcgcggatgccctgcaggcggtacagaaacgtaacttctggcagttacaggctgaaatca

SEQ ID NO: 564652 - DNA, 75 bp, synthetic construct
  source 1..75: mol_type = other DNA
cccgtgccgttaacaagcgcggctataccatcggcatcacgcagaacgtgaaggctgcgaacgtccaggccgcaa

SEQ ID NO: 564653 - DNA, 75 bp, synthetic construct
  source 1..75: mol_type = other DNA
tcagcacggtaattaacaaatcagctaaagccggtttatccggtgtgatgatccactccgttatatgtattcagg

SEQ ID NO: 564654 - DNA, 75 bp, synthetic construct
  source 1..75: mol_type = other DNA
atgaaaatcatcacccgtggtgaagccatgcgtattcaccgtcagcatcatgctgacagcaactggtatgaaaac

SEQ ID NO: 564655 - DNA, 75 bp, synthetic construct
  source 1..75: mol_type = other DNA
ttctggcaactgcaggctgaaatccaccacaggggacgctactgccatccgtacagcatggatatcaccgtcacc

SEQ ID NO: 564656 - DNA, 75 bp, synthetic construct
  source 1..75: mol_type = other DNA
atgagcagaattatcaccaccaccgtgtatacgctgaatgagctatcctccaccgcacagcaaaaagcccgcgac

SEQ ID NO: 564657 - DNA, 75 bp, synthetic construct
  source 1..75: mol_type = other DNA
tcaggacatgtacgctgccattgatggcttaattgataagctggcacgccagttgaccaaacataaagataaact

SEQ ID NO: 564658 - DNA, 75 bp, synthetic construct
  source 1..75: mol_type = other DNA
atgccgtatttagatatgccaccggctcaggttgaacgtgtagtttgctcaattactgcagcgataaaatatcag

SEQ ID NO: 564659 - DNA, 75 bp, synthetic construct
  source 1..75: mol_type = other DNA
ctgtttggttagagggagcaaatattgtttattttgaacggaaatctgataataataaaaaaacattgaatacaa

SEQ ID NO: 564660 - DNA, 75 bp, synthetic construct
  source 1..75: mol_type = other DNA
aacctaaatctagggggattcgctcatatcgtctactacgtgcaattgaaagattaaggatgaatgagtattact

SEQ ID NO: 564661 - DNA, 75 bp, synthetic construct
  source 1..75: mol_type = other DNA
cctgtttcgtgatggcttcctggaagtgctttcacccgcagcagtgaaactactcctgtttatcggcagcaagtg

SEQ ID NO: 564662 - DNA, 75 bp, synthetic construct
  source 1..75: mol_type = other DNA
gttttctggtttcattgcaggactttttcaaaggaaaattgacattgttgttgcgacttctccacaatttttctg

SEQ ID NO: 564663 - DNA, 75 bp, synthetic construct
  source 1..75: mol_type = other DNA
cgataaccttgataaagtcaggagctaccgcaaatttgaaacagaacgctacgttaatgatcgcctgttccgtga

SEQ ID NO: 564664 - DNA, 75 bp, synthetic construct
  source 1..75: mol_type = other DNA
ttagtagatgaggttgtaacatgttcgtcatctcttgggttacaagggatttcttggggacgacaacttaaagtt

SEQ ID NO: 564665 - DNA, 75 bp, synthetic construct
  source 1..75: mol_type = other DNA
cgaccgttgcagcaatatctgggcgtcgttacccggtgcaggttacggtcagtatgaacataaaatcggtgacct

SEQ ID NO: 564666 - DNA, 75 bp, synthetic construct
  source 1..75: mol_type = other DNA
ctttctcaaaagaaatataaaaaatacgttcgagatcgaaatctttttattgaagatataaaatcaccattggta

SEQ ID NO: 564667 - DNA, 75 bp, synthetic construct
  source 1..75: mol_type = other DNA
cctacggataaagatttttcaaaagactctgtatggcgtcagggggctgctgttttatattcaaaaaaagcagtg

SEQ ID NO: 564668 - DNA, 75 bp, synthetic construct
  source 1..75: mol_type = other DNA
gagctaatatgcaaggtgcactttcatctctaataaataaaccattagatggttattattatgcaaccttacaag

SEQ ID NO: 564669 - DNA, 75 bp, synthetic construct
  source 1..75: mol_type = other DNA
aattacacagcattgataccacctctgtcacccttgccggactggcgattatgctgctgccggggattggcgtta

SEQ ID NO: 564670 - DNA, 75 bp, synthetic construct
  source 1..75: mol_type = other DNA
aagagagcgagcgcctgctgcgcctgccgttgttctacaacctgtcgcccgtcaatcagcgtacggtaattgcga

SEQ ID NO: 564671 - DNA, 75 bp, synthetic construct
  source 1..75: mol_type = other DNA
cgtatcgagctgccgtcgattcccgatggctgcgtgcagaacgcgcatatgttctacattaaactgcgggatatt

SEQ ID NO: 564672 - DNA, 75 bp, synthetic construct
  source 1..75: mol_type = other DNA
cctgtgggcgcaactggaagccgccgaacgtatcaaccagcaacgtctggcgttgtggcaaaactactatgatgc

SEQ ID NO: 564673 - DNA, 75 bp, synthetic construct
  source 1..75: mol_type = other DNA
actgctgcaggcgcagctaaaattgtctttgtcgtcgggattattctgttcctggtgagtttgttcatgggccga

SEQ ID NO: 564674 - DNA, 75 bp, synthetic construct
  source 1..75: mol_type = other DNA
gtcgctgccagcagtggctggagcaacgttttggcagcgccaaagtgttactgacgccatcctgcaccgcttcgc

SEQ ID NO: 564675 - DNA, 75 bp, synthetic construct
  source 1..75: mol_type = other DNA
tcctgaaagaagcggaaatcatggcggtgttccactatattccgctacacgcaagcccggcgggtgaacactttg

SEQ ID NO: 564676 - DNA, 75 bp, synthetic construct
  source 1..75: mol_type = other DNA
actgctccgcgatgaccagcaggcacggataaatgtccgcttgcagtccttcgacgggagtgcgtggaataccaa

SEQ ID NO: 564677 - DNA, 75 bp, synthetic construct
  source 1..75: mol_type = other DNA
cagcagcgggtaataatgtaccggtgaaatatcgtctgacggaccttatgcagaacggtacgcaatatattgcta

SEQ ID NO: 564678 - DNA, 75 bp, synthetic construct
  source 1..75: mol_type = other DNA
gttcccgtaccagtgccggtgaatttgaagaagccctgcaaatgttatcaacgctgaatattaatccggctgata

SEQ ID NO: 564679 - DNA, 75 bp, synthetic construct
  source 1..75: mol_type = other DNA
cgcccggacaccatgaacatcgacgaaacgcttattgaatcggcgatcaccgacaaaacgcgtgttattgtgccg

SEQ ID NO: 564680 - DNA, 75 bp, synthetic construct
  source 1..75: mol_type = other DNA
ttgacgccgtcctgcaccgcttctctggagatggcggcgctgttgttggatatccagcctggcgatgaagtgatc

SEQ ID NO: 564681 - DNA, 75 bp, synthetic construct
  source 1..75: mol_type = other DNA
tcgtagtcgtggacggggacaacgtggacaaaccggccgggtcctacatactgaacctggacgggggctactggg

SEQ ID NO: 564682 - DNA, 75 bp, synthetic construct
  source 1..75: mol_type = other DNA
tatgaacataaaatcggtgacctgattgcccgatttaaagaggctggtggggtggtaaatgaagttgagctataa

SEQ ID NO: 564683 - DNA, 75 bp, synthetic construct
  source 1..75: mol_type = other DNA
gctaacgcgggcttcccgttcagccggatggcggatctgtcgcaaaccatcaccgtgatgccgaaaacgccaaac

SEQ ID NO: 564684 - DNA, 75 bp, synthetic construct
  source 1..75: mol_type = other DNA
gcgccagtcgtggcgcagaacggtccttcgcgtgatgtgaagctgacctttgcgcaaattgcgccgccgccgggc

SEQ ID NO: 564685 - DNA, 75 bp, synthetic construct
  source 1..75: mol_type = other DNA
cggaatcagccagcagcatgacgaacaggccacgcagccggacagcgtgaccgccgaaaattatgtgcgtgttgt

SEQ ID NO: 564686 - DNA, 75 bp, synthetic construct
  source 1..75: mol_type = other DNA
gtcgcagttaaaggtttatctcaatgatgaactgatgggcgtgctgccagtgaccaaagaacagttgggtaaaaa

SEQ ID NO: 564687 - DNA, 75 bp, synthetic construct
  source 1..75: mol_type = other DNA
cgcggttatgaaatgcttaacgatgcggtgaacgatagcggcaaacgcgccaccatgttcggttcggtcgcggtg

SEQ ID NO: 564688 - DNA, 75 bp, synthetic construct
  source 1..75: mol_type = other DNA
ggtcttgagccagcagcgattaacgtttcgctaaacctgccgccggatctctacctgatgcgcagtaccggcatt

SEQ ID NO: 564689 - DNA, 75 bp, synthetic construct
  source 1..75: mol_type = other DNA
tagagccggtaataaaaaaagcaaaaataaaacacttaattggattaacatcatcttctttggtatatgcacctt

SEQ ID NO: 564690 - DNA, 75 bp, synthetic construct
  source 1..75: mol_type = other DNA
gtaactatcttattgttttggcaactgaaaaaaatactgagatgccaaaaattattgttgaacaaataaataata

SEQ ID NO: 564691 - DNA, 75 bp, synthetic construct
  source 1..75: mol_type = other DNA
atgcaatcttcgtatatttgttcaaaaaaaactaatataagatgttcattaattgaagaggggacagggacttat

SEQ ID NO: 564692 - DNA, 75 bp, synthetic construct
  source 1..75: mol_type = other DNA
cgctgtggcattgcagcagattaaagagcgtggcgctttaccgatgattgatcgcggtgatatccgtcaggctat

SEQ ID NO: 564693 - DNA, 75 bp, synthetic construct
  source 1..75: mol_type = other DNA
agtatgaacataaaattagcgacctgatttcccggtttaaagaggctggtggggtggtaaatgaagctgagatat

SEQ ID NO: 564694 - DNA, 75 bp, synthetic construct
  source 1..75: mol_type = other DNA
gtggtttggttcgcgttctggctggcgtgggcagaacttcccggtgctctataaccaactgccggatcgcaatgc

SEQ ID NO: 564695 - DNA, 75 bp, synthetic construct
  source 1..75: mol_type = other DNA
aaacttgtcatgctaaatccgaaactcaaatcaacagctgccggacgttaccagcttctttcccgttggtgggat

SEQ ID NO: 564696 - DNA, 75 bp, synthetic construct
  source 1..75: mol_type = other DNA
gtatgaacataaaatcggtgacctgatttccaggtttaaagatgctggtggggtggtaaatgaagctgacttata

SEQ ID NO: 564697 - DNA, 75 bp, synthetic construct
  source 1..75: mol_type = other DNA
agtatgaacataaaatcggtgacctgatttcccggtttaaagaggctggtgggggggtaaatgaagttgagctat

SEQ ID NO: 564698 - DNA, 75 bp, synthetic construct
  source 1..75: mol_type = other DNA
tcaaatcaacagccgccggacgttaccagcttctttctcgctggtgggattcctaccgcaagcaacttggcctga

SEQ ID NO: 564699 - DNA, 75 bp, synthetic construct
  source 1..75: mol_type = other DNA
caaacgcgccaccatgttcggttcggtcgcggtgatccgcgagtccggtatcaacagcctacgtgttggcgacgt

SEQ ID NO: 564700 - DNA, 75 bp, synthetic construct
  source 1..75: mol_type = other DNA
gacttcctgcgcgatcatccggcagtaaaagccccggtgattgagatgatcaaccatccggaaaatccttacgtc

SEQ ID NO: 564701 - DNA, 75 bp, synthetic construct
  source 1..75: mol_type = other DNA
gcttaccgtaagcagcttgctctgaaagacttctctccgaaaagccaggatgctgtggcattgcagcagattaag

SEQ ID NO: 564702 - DNA, 75 bp, synthetic construct
  source 1..75: mol_type = other DNA
tacgaaccagagtccttgagttgctggcataccgtcgccgttctcaacaacggagggagagcgcgaaaaatactt

SEQ ID NO: 564703 - DNA, 75 bp, synthetic construct
  source 1..75: mol_type = other DNA
aagctttccttgatatggtggcttggtcagaaggaacggataacgggcgacaaccgacacgtaaccacggttatg

SEQ ID NO: 564704 - DNA, 75 bp, synthetic construct
  source 1..75: mol_type = other DNA
ggccttgcgctgctgctgcaacttcaccgtcgtcgccagaacctgaacatcgattcagtaagtgagatgcgcgga

SEQ ID NO: 564705 - DNA, 75 bp, synthetic construct
  source 1..75: mol_type = other DNA
ctacggcgcgcagttttgacgggcgaatgacggttacgttaaccggccggcacaacgacactggccagccacttt

SEQ ID NO: 564706 - DNA, 75 bp, synthetic construct
  source 1..75: mol_type = other DNA
ttacatggcagtgctgaaatgggaaccccgcgtcaccctgtcatccgtcaccactgagcgcagttttgacgggcg

SEQ ID NO: 564707 - DNA, 75 bp, synthetic construct
  source 1..75: mol_type = other DNA
attgatatgccgcagaccgacgcgctgaggctgcaaattatgtgcgcctgttatatggcgctgctgaagtgggag

SEQ ID NO: 564708 - DNA, 75 bp, synthetic construct
  source 1..75: mol_type = other DNA
cggtcgaacgtcagtttaacggtcagatgattgttgagctgaccggcgagacccgggacaccggcaaaaccctgt

SEQ ID NO: 564709 - DNA, 75 bp, synthetic construct
  source 1..75: mol_type = other DNA
agctactggggccagaccgacggtcaggtgatgtacattcttgccatcagcctcgcggcggcagaagcgagtatc

SEQ ID NO: 564710 - DNA, 75 bp, synthetic construct
  source 1..75: mol_type = other DNA
cctgtactttttctcttgtaaattgtgatttgagatttgttgattttattagtttacggttacagaaatctattt

SEQ ID NO: 564711 - DNA, 75 bp, synthetic construct
  source 1..75: mol_type = other DNA
tgatttgagatttgttgattttattagtttacggttacagaaatctatttttttatccagtcgcttccgtgattg

SEQ ID NO: 564712 - DNA, 75 bp, synthetic construct
  source 1..75: mol_type = other DNA
cgttgtcaaggcagtacaatgtactctttgtcgtttctgcaggaaacttcgctggtagtgacgagcctccggtac

SEQ ID NO: 564713 - DNA, 75 bp, synthetic construct
  source 1..75: mol_type = other DNA
gcgaataacattgagtcagcgattgccaaacaggcaactgaaatgggctcgcttgttgttcacgatacccgcgca

SEQ ID NO: 564714 - DNA, 75 bp, synthetic construct
  source 1..75: mol_type = other DNA
gttatcgatgccacacacattgaaatcacgccgaagccgatcgccctggacgacaccgcattactgccggaagag

SEQ ID NO: 564715 - DNA, 75 bp, synthetic construct
  source 1..75: mol_type = other DNA
ttcaagcaacaccgtgtggatgcctgttgagcaggaagcgccaacccagactggctgggatttaactggcaacgc

SEQ ID NO: 564716 - DNA, 75 bp, synthetic construct
  source 1..75: mol_type = other DNA
tgcattaactttatataaagaacaaatgataatgaatgctttactttgtttactaaacgttatttttttcttttt

SEQ ID NO: 564717 - DNA, 75 bp, synthetic construct
  source 1..75: mol_type = other DNA
ccgggctgccgaaagcgccttccaccttcaacccgctctactcaatggatcgtgccgtcgcgcggcgtaacgtcg

SEQ ID NO: 564718 - DNA, 75 bp, synthetic construct
  source 1..75: mol_type = other DNA
aggcgttagtggcgaagactggcgcgcaggagtacgcaccgcacgtcatcaacactccgctggcattcctgatta

SEQ ID NO: 564719 - DNA, 75 bp, synthetic construct
  source 1..75: mol_type = other DNA
gccagaatacgctccacacgtcatcagcacaccgctggcgttcctgattaagagcgccctgaacaccaatatttt

SEQ ID NO: 564720 - DNA, 75 bp, synthetic construct
  source 1..75: mol_type = other DNA
agatgcgtggttttcgggttacggtccgggcgttgtgacctcggtctggattggctttgatgatcaccgtcgtaa

SEQ ID NO: 564721 - DNA, 75 bp, synthetic construct
  source 1..75: mol_type = other DNA
aagtagcctgcccggaatgtgatattccggtgatttacggtgatacgcaaaaatcgaacgtgctggaaaacagcg

SEQ ID NO: 564722 - DNA, 75 bp, synthetic construct
  source 1..75: mol_type = other DNA
ctcaatacggtgaaaaacgtcgtattccggttacattggatcaaatcccgccggagatggtgaaagcctttattg

SEQ ID NO: 564723 - DNA, 75 bp, synthetic construct
  source 1..75: mol_type = other DNA
ttgttgcgttctggttgttcgcatcatgtatgcccatcatcttcacagcaaggtatatggaaaaaattgatggta

SEQ ID NO: 564724 - DNA, 75 bp, synthetic construct
  source 1..75: mol_type = other DNA
gttcacggcaacggtccacagatcgggctgctggcgctgcagaacagcgcctacgacaaagtaaccccttatcca

SEQ ID NO: 564725 - DNA, 75 bp, synthetic construct
  source 1..75: mol_type = other DNA
tttattattggctacgctttatgtagttgggtttgatacgttatatggtaaaatatgtttttttattgctgtatc

SEQ ID NO: 564726 - DNA, 75 bp, synthetic construct
  source 1..75: mol_type = other DNA
gcgtaaccctggcgctggaagaacagcgtgctaatggcgcagagatcgacgacggtgctatcaacggtatcaaag

SEQ ID NO: 564727 - DNA, 75 bp, synthetic construct
  source 1..75: mol_type = other DNA
ctgcttctctatggtaccggcaattcgtcgcctctaccctgagaacaacgaagctcgtaaacaagctattcgccg

SEQ ID NO: 564728 - DNA, 75 bp, synthetic construct
  source 1..75: mol_type = other DNA
ttaatccgctgtggatcatcgttggcttcttcgtcatcggtatcgcgggttatgcttgcggcctactgggactgt

SEQ ID NO: 564729 - DNA, 75 bp, synthetic construct
  source 1..75: mol_type = other DNA
tcctgtgctgaccagatccaccgcaactggtatcactgtatccggcgctcagtccttcaagcctgtcgcatggca

SEQ ID NO: 564730 - DNA, 75 bp, synthetic construct
  source 1..75: mol_type = other DNA
cagaaaccttaatgagctgttaccggttctgaaacggcggtgggatgtgacaccggcaatcatccgtgcagtgga

SEQ ID NO: 564731 - DNA, 75 bp, synthetic construct
  source 1..75: mol_type = other DNA
tatcttgaaggtcatacttcgatgatccgtcgcgatccgttgggggtcgtggcttctatcgcaccgtggaattat

SEQ ID NO: 564732 - DNA, 75 bp, synthetic construct
  source 1..75: mol_type = other DNA
gctgaaactggctgatgttatcgaagaaaatggtcaggtttttgccgaactggagtcccgtaattgtggcaaacc

SEQ ID NO: 564733 - DNA, 75 bp, synthetic construct
  source 1..75: mol_type = other DNA
acctccgatcgcgccattaaactggtacgcggcctgaaagatctcaacatcgttgggatggacgtagtggaagtg

SEQ ID NO: 564734 - DNA, 75 bp, synthetic construct
  source 1..75: mol_type = other DNA
tgtcatatcaccattacctgtaatcagtccggttttcatttaacccgggacggacaacggctgttcactgagcgt

SEQ ID NO: 564735 - DNA, 75 bp, synthetic construct
  source 1..75: mol_type = other DNA
tatatattggtaacgatgcctgccatcttaccattacctgtaatcagtccggttttcatttaaccagagacggac

SEQ ID NO: 564736 - DNA, 75 bp, synthetic construct
  source 1..75: mol_type = other DNA
gttcatgcgttatctgctggtatgcaagatggtttttcatggttaggaaatgtaccggtcaataaaataattgag

SEQ ID NO: 564737 - DNA, 75 bp, synthetic construct
  source 1..75: mol_type = other DNA
cacaagaacttggtagtactccatatataaatgcagacacatcttggctctattatacttggcttattgagtacg

SEQ ID NO: 564738 - DNA, 75 bp, synthetic construct
  source 1..75: mol_type = other DNA
cctttattttctcagttatttcaagacattatggtaataggatggttacaagtgcagtggctgtcggtgctgata

SEQ ID NO: 564739 - DNA, 75 bp, synthetic construct
  source 1..75: mol_type = other DNA
ttttgttagcattttctgcatatgttcatgcggaaacatcagctccaatattttttgaagatgttggcagtatag

SEQ ID NO: 564740 - DNA, 75 bp, synthetic construct
  source 1..75: mol_type = other DNA
atgattaaaacctacgatgtgcatatggatcccctcgaacgcacaagccagatcatcacactgacagaagtgatt

SEQ ID NO: 564741 - DNA, 75 bp, synthetic construct
  source 1..75: mol_type = other DNA
ggtaatcgtattcttcgctgggacagaagttatgcttctcatacaaaaaaccactggcgtaaagttgcacctgac

SEQ ID NO: 564742 - DNA, 75 bp, synthetic construct
  source 1..75: mol_type = other DNA
ttggtattcgtaccgagtttgataaagacaacggctttaccgtgctggacgcctgccaggtgaacgatcgcagcg

SEQ ID NO: 564743 - DNA, 75 bp, synthetic construct
  source 1..75: mol_type = other DNA
gcaatgccaaaatggaaatggtttactgcctacctgctgaactgggcgtaccaaccacgtccagcccgctgaaaa

SEQ ID NO: 564744 - DNA, 75 bp, synthetic construct
  source 1..75: mol_type = other DNA
gtactcgtgtatatactaccactcctaaaaaaccgaactccgcgctgcgtaaagtatgccgtgttcgtctgacta

SEQ ID NO: 564745 - DNA, 75 bp, synthetic construct
  source 1..75: mol_type = other DNA
gaaacaaagtcagcaattaatgagatgaaggctgagcttggtgcccgcctcgtaaaaatagccaaaaacaactat

SEQ ID NO: 564746 - DNA, 75 bp, synthetic construct
  source 1..75: mol_type = other DNA
atgaataatgtcgtgccactgttgccaggcgataaggtgaaaattcacagcggtcatttgcaaggttggggacag

SEQ ID NO: 564747 - DNA, 75 bp, synthetic construct
  source 1..75: mol_type = other DNA
gctggtgatgacaccatctttaccacccctgccaaaggtttcaccgtcaaagacctgtatgaagcgatcttagag

SEQ ID NO: 564748 - DNA, 75 bp, synthetic construct
  source 1..75: mol_type = other DNA
accacccctgctaacggtttcaccgtcaaagacctgtacgaagcgattttagagctgttcgaccaggagctttaa

SEQ ID NO: 564749 - DNA, 75 bp, synthetic construct
  source 1..75: mol_type = other DNA
ccctgcatgatgccaccctgcaggcctttctggacggtgttcctcccgatgatcccaccgtgcgtcggctgaaat

SEQ ID NO: 564750 - DNA, 75 bp, synthetic construct
  source 1..75: mol_type = other DNA
gaatatcaccagtggtgaaaccgacaccaataccctgagtcaggagatcgacagccgtctggatctgcgcattcc

SEQ ID NO: 564751 - DNA, 75 bp, synthetic construct
  source 1..75: mol_type = other DNA
ttttcaattacatggatacggtcacaaaggaatttgtggcctctaatctcggagttgttatatccaccatttcac

SEQ ID NO: 564752 - DNA, 75 bp, synthetic construct
  source 1..75: mol_type = other DNA
cgtaaaaatagccaaaaacaactatagactcaagatatttaatagagggaaagttgaggctaaaaatatagaaat

SEQ ID NO: 564753 - DNA, 75 bp, synthetic construct
  source 1..75: mol_type = other DNA
tgctagttctgatggaaactcaagttcgccagggcttaaaatagcaactattgaattaaatactcctgatgtgga

SEQ ID NO: 564754 - DNA, 75 bp, synthetic construct
  source 1..75: mol_type = other DNA
cactgcttattgtgtgcggcactgccacagctgcagataacccgggctggaaaaatgcccgaagcccacagacca

SEQ ID NO: 564755 - DNA, 75 bp, synthetic construct
  source 1..75: mol_type = other DNA
gccgttcacgttcgaatggaacggccgcacctggaacgctggccccgactcaatggcccgtctttatccggtagt

SEQ ID NO: 564756 - DNA, 75 bp, synthetic construct
  source 1..75: mol_type = other DNA
atgaaaatcagagcggtaaaaggcatcagaaacgcccattatctcgaaaatggtgcggttgactgcgaggtgtta

SEQ ID NO: 564757 - DNA, 75 bp, synthetic construct
  source 1..75: mol_type = other DNA
atgaaatttatcagcgccagcgtgaaatgaaggagcagctttcccggctgtccatactggacgaggtgagagcgt

SEQ ID NO: 564758 - DNA, 75 bp, synthetic construct
  source 1..75: mol_type = other DNA
atccgggcaaccgcatctgcaaaaaatgcttaaccagcagctggcacgcgcctcggcggtactggcggtgctgga

SEQ ID NO: 564759 - DNA, 75 bp, synthetic construct
  source 1..75: mol_type = other DNA
gcatgattatcaatgatcgaaatcgtgcgatacgtaagctgtcgcaggttggatattatcgattgtcaggttttt

SEQ ID NO: 564760 - DNA, 75 bp, synthetic construct
  source 1..75: mol_type = other DNA
atcaacaggtgaaactgtcgatggctgagctggaagaactggcgacagcactggcacaggctcaggtcgatcgca

SEQ ID NO: 564761 - DNA, 75 bp, synthetic construct
  source 1..75: mol_type = other DNA
ctgggatggggggatgcagcaaataaccttgtcactctgacaatggcacagcttcaggagctggcagccgcaatg

SEQ ID NO: 564762 - DNA, 75 bp, synthetic construct
  source 1..75: mol_type = other DNA
atcgcaacgacgagatttatcgtcggcagcgggagatgaaagaagaactgaataacttggatgatttgcgctcaa

SEQ ID NO: 564763 - DNA, 75 bp, synthetic construct
  source 1..75: mol_type = other DNA
cagagtggcagatggggcgaaatcgctccgtttactgtcacgccggaacttatcgcagtggcaaaagatgccaaa

SEQ ID NO: 564764 - DNA, 75 bp, synthetic construct
  source 1..75: mol_type = other DNA
acgggatttatcagcgccagcgtgaaatgaaggagcagctttcccggctgtccacactggacgaggtaagagcgt

SEQ ID NO: 564765 - DNA, 75 bp, synthetic construct
  source 1..75: mol_type = other DNA
gttcgaatggaacggtcgtacctggaacgctggccccgattcactggctcgcctttatccggtagtaatggcggc

SEQ ID NO: 564766 - DNA, 75 bp, synthetic construct
  source 1..75: mol_type = other DNA
acgagatttatcgccgtcagcgtgagatgaagcaaaaactgaatagtctggaggatttggtttcaatcaggaaac

SEQ ID NO: 564767 - DNA, 75 bp, synthetic construct
  source 1..75: mol_type = other DNA
gtcgagctgacggacgccggccgggccgtggcacagcctctgctgctggcagaacaggaccgcctccgggcagaa

SEQ ID NO: 564768 - DNA, 75 bp, synthetic construct
  source 1..75: mol_type = other DNA
atgagtgccattgaagttaagaacctggtgaaaaaattccacggtcagacggtgctgcacggtatcgacctcgag

SEQ ID NO: 564769 - DNA, 75 bp, synthetic construct
  source 1..75: mol_type = other DNA
gccgcaaaagcgttatttgccgatcccgagcagcctcgcacccgccagttcctcgagaagtttctgctgcaataa

SEQ ID NO: 564770 - DNA, 75 bp, synthetic construct
  source 1..75: mol_type = other DNA
ttttcctggaaagattttaaataacgtgaaaggctggcaggtcccccggctcatcaacactgataaatccccgac

SEQ ID NO: 564771 - DNA, 75 bp, synthetic construct
  source 1..75: mol_type = other DNA
cgatccgggttatctggaaagtcatggctatacggtgatgcgcggctggaacagcaaagaagcgattgatccgtg

SEQ ID NO: 564772 - DNA, 75 bp, synthetic construct
  source 1..75: mol_type = other DNA
ggcaacgcgggactggttaaatgtaacgccagcccagcgtgcaggtgtgctggcactcaacatccagcgtttacg

SEQ ID NO: 564773 - DNA, 75 bp, synthetic construct
  source 1..75: mol_type = other DNA
tggcgggcaaagaaacccgctatccacgtcgtttgtccggcggccaacagcaacgcgtggcgattgcgcgtgcgc

SEQ ID NO: 564774 - DNA, 75 bp, synthetic construct
  source 1..75: mol_type = other DNA
gtcgaactgacggacgccggccggaccgtggcacagcctctgctgctggcagagcaggaccacctccgggcagaa

SEQ ID NO: 564775 - DNA, 75 bp, synthetic construct
  source 1..75: mol_type = other DNA
agggatggcgttaccgcgcaaattattatcctgaccgtatcagatgcctccagcgatgtctttgcactgatagac

SEQ ID NO: 564776 - DNA, 75 bp, synthetic construct
  source 1..75: mol_type = other DNA
aaggcagagtggtacgccgggagggcgatccgctggaagtggcgcagtggctgcaggcctgtcatgacgcaggaa

SEQ ID NO: 564777 - DNA, 75 bp, synthetic construct
  source 1..75: mol_type = other DNA
catggcgtatcaggcctgccgtggggattttgtgatacgtctcgacggcagtacctgtctgcagttatggaacag

SEQ ID NO: 564778 - DNA, 75 bp, synthetic construct
  source 1..75: mol_type = other DNA
ctggctgtcgagctgacggacgccggccgggccgtggcacagcctctgctgctggcagaacaggaccgcctccgg

SEQ ID NO: 564779 - DNA, 75 bp, synthetic construct
  source 1..75: mol_type = other DNA
gggacatagaacgggtgctggagcgaagcggggaagccccggtctacggaccaaacctgcgcgcctcctgccggc

SEQ ID NO: 564780 - DNA, 75 bp, synthetic construct
  source 1..75: mol_type = other DNA
aacggtatcttgaaagcggagatgttgactgcatggtcgtgttttcaggtatggaaacgccggttccatacaccg

SEQ ID NO: 564781 - DNA, 75 bp, synthetic construct
  source 1..75: mol_type = other DNA
gcgaaaggcgtgccgttccgcgaggcacaccatattgtgggtgaagctgtggtggaagccattcgtcagggcaaa

SEQ ID NO: 564782 - DNA, 75 bp, synthetic construct
  source 1..75: mol_type = other DNA
cgcaccatattgttggtgaagcggtggtggaagccattcgtcagggcaaaccgctggaagatctgccgctcagtg

SEQ ID NO: 564783 - DNA, 75 bp, synthetic construct
  source 1..75: mol_type = other DNA
gtaatgatcaggtagcgactgacctgaaactgtggtgcaaagataccgttagcgagttgctgacggctaaccggc

SEQ ID NO: 564784 - DNA, 75 bp, synthetic construct
  source 1..75: mol_type = other DNA
tggtgcggttgactgcgaggtgttatttgaaggtgaaacggagtttgccctgtataccgccatacaggatgacac

SEQ ID NO: 564785 - DNA, 75 bp, synthetic construct
  source 1..75: mol_type = other DNA
gtcagcggcagatgaaagaggctgttgagcgtctgacggggacagaggaaattaaccggtttgttgtcggatggg

SEQ ID NO: 564786 - DNA, 75 bp, synthetic construct
  source 1..75: mol_type = other DNA
cggtttaccgttacgcctgaacttattgccgcagaaaaagaggctaaagtgtgtgagatcgaagtatggcgtcag

SEQ ID NO: 564787 - DNA, 75 bp, synthetic construct
  source 1..75: mol_type = other DNA
tcgtgggaaatgtggtcgtgtccagggcgcattaaccggcatgatgatgactctgaaagggttaccgctggccta

SEQ ID NO: 564788 - DNA, 75 bp, synthetic construct
  source 1..75: mol_type = other DNA
attcgaatggaacagcagcacatggaatggaggaaaatcctcactggaacgcttattcccggcagtgatggcagc

SEQ ID NO: 564789 - DNA, 75 bp, synthetic construct
  source 1..75: mol_type = other DNA
tgctggcctaccgtcgccggatacagacgtacagggaaaaagccaaaataacgtaccagtggaagaagccggagc

SEQ ID NO: 564790 - DNA, 75 bp, synthetic construct
  source 1..75: mol_type = other DNA
aaaaaactgcacaccgggcgtagccgtaatgatcaggtagcgactgacctgaaactgtggtgcaaagataccgtt

SEQ ID NO: 564791 - DNA, 75 bp, synthetic construct
  source 1..75: mol_type = other DNA
gatcgacaaagtgggtcagttaggcaaaaaactgcataccgggcgtagccgtaatgatcaggtagcaactgacct

SEQ ID NO: 564792 - DNA, 75 bp, synthetic construct
  source 1..75: mol_type = other DNA
ggtggaagccattcgtcagggcaaaccgctggaagatctgccgctcgacgagttgcagaaattcagcccggtgat

SEQ ID NO: 564793 - DNA, 75 bp, synthetic construct
  source 1..75: mol_type = other DNA
catggtggcggagggctttaaaatccacgaacgccagcgcgagatgaaggaacaactgaataatctgaatgactt

SEQ ID NO: 564794 - DNA, 75 bp, synthetic construct
  source 1..75: mol_type = other DNA
tcgaacagatctgcctgattgccgaagaagagcaaccgaagctgatggtaattgactcgatccaggtgatgcata

SEQ ID NO: 564795 - DNA, 75 bp, synthetic construct
  source 1..75: mol_type = other DNA
ggcggtaacccaggcgcggggaaatccacgctgttgctgcaaacgctgtgcaaactggcccagcagatgaaaacg

SEQ ID NO: 564796 - DNA, 75 bp, synthetic construct
  source 1..75: mol_type = other DNA
taccgaaaaaagcgccggaagggatgcagatttttggcgttaaaaaactctccgacgcgcttagcgtgttcgacg

SEQ ID NO: 564797 - DNA, 75 bp, synthetic construct
  source 1..75: mol_type = other DNA
atggacgagacgaaaacaaaagcgccactggacagccctgcgttcaccgtcacgccagaacttatcgccgtggga

SEQ ID NO: 564798 - DNA, 75 bp, synthetic construct
  source 1..75: mol_type = other DNA
agagatgaaagacgcgctggaaaacctgaataatcttgccgacatccgcgcttttcaggctggagagccacaatg

SEQ ID NO: 564799 - DNA, 75 bp, synthetic construct
  source 1..75: mol_type = other DNA
tggtgcggttgactgcgaggtgttatttgaaggtgaaacggaattcgtcccgtataccgccatgcaggatgatac

SEQ ID NO: 564800 - DNA, 75 bp, synthetic construct
  source 1..75: mol_type = other DNA
aaaatagccgcggctgaagtggaatcggcactgctgcgtttagcggaagtgcaagattgcgcggtggtcgccgcg

SEQ ID NO: 564801 - DNA, 75 bp, synthetic construct
  source 1..75: mol_type = other DNA
atgcggataataacaacgtcgtactgaccagggagaaacttattgcgctgaacgatgccatgatggtggccatgg

SEQ ID NO: 564802 - DNA, 75 bp, synthetic construct
  source 1..75: mol_type = other DNA
agcgacaggcatggccgcagcctgatgtttccgccaccgcgttgttgttgctctcaggcggcacaaccggcacgc

SEQ ID NO: 564803 - DNA, 75 bp, synthetic construct
  source 1..75: mol_type = other DNA
attgactccatccaggtgatgcatatggcggatgttcagtcatcgcctggcagtgtggcgcaggtgcgtgaaacg

SEQ ID NO: 564804 - DNA, 75 bp, synthetic construct
  source 1..75: mol_type = other DNA
attgactcgatccaggtgatgcatatggcggatgtacaatcatcgcctggcagcgtggcgcaggtgcgtgaaacg

SEQ ID NO: 564805 - DNA, 75 bp, synthetic construct
  source 1..75: mol_type = other DNA
aatcagcaggtgcagctgacgacgcaggaacttgaggaactggccacagcgatgatacaggccattgttgagcgc

SEQ ID NO: 564806 - DNA, 75 bp, synthetic construct
  source 1..75: mol_type = other DNA
ctgtggcatccggtgttatcaggctaccccgcgatcttgaccgttcttcactgtataccgcggtgtattccggac

SEQ ID NO: 564807 - DNA, 75 bp, synthetic construct
  source 1..75: mol_type = other DNA
ctggcgcgcgttaactgggatgattttaccgaatcggtgcctgcgtttgttaccacggtgatgatgccctttact

SEQ ID NO: 564808 - DNA, 75 bp, synthetic construct
  source 1..75: mol_type = other DNA
accattccgcaaagccacatatacccacttccatgaaattgacccgcgcctgcgtaattaccgctcacgctatgg

SEQ ID NO: 564809 - DNA, 75 bp, synthetic construct
  source 1..75: mol_type = other DNA
gctgattctggcatcgtttacaccctgctgcgcaacggctggtacaccgaaaactacctcgccagcgccccggca

SEQ ID NO: 564810 - DNA, 75 bp, synthetic construct
  source 1..75: mol_type = other DNA
tgctgcgcaacggctggtacaccgaaaactacctcgccagcgccccggcagcactggagcacggcgtatttatcg

SEQ ID NO: 564811 - DNA, 75 bp, synthetic construct
  source 1..75: mol_type = other DNA
cagattcgtggtggagcagcgacagaatcagactgggtacgtgcaggtggtcgtaatccggatgatgtcaaacgt

SEQ ID NO: 564812 - DNA, 75 bp, synthetic construct
  source 1..75: mol_type = other DNA
ggccataattcctggaaggacccgacgacaccagactatcagaacgatgggggcacaatgacagaagccgaacta

SEQ ID NO: 564813 - DNA, 75 bp, synthetic construct
  source 1..75: mol_type = other DNA
gatgtggggcacctggtgggtatgggatgcacgtctgacttctgaactggtgctgctgtttctgtatgttggtgt

SEQ ID NO: 564814 - DNA, 75 bp, synthetic construct
  source 1..75: mol_type = other DNA
cgcatggagataagttgcatgcgctagcggataatgcaaaactccccgcaagtgacaaaccgcgggttgaggcgc

SEQ ID NO: 564815 - DNA, 75 bp, synthetic construct
  source 1..75: mol_type = other DNA
tttcgtcaccgtggaagctaaagagcagctggaaaaagcacaatcgctatttaacgtgctcaaacagcaagaaga

SEQ ID NO: 564816 - DNA, 75 bp, synthetic construct
  source 1..75: mol_type = other DNA
ctatgtggcgctgtgttcaccactgcttggccagcaattgcgtgaaattcaatcggtcgcacgccgctttgagtt

SEQ ID NO: 564817 - DNA, 75 bp, synthetic construct
  source 1..75: mol_type = other DNA
gaacccgtgttaacacctgagcaacagaaaggacttgtagacaaaggcattgtaaaaatgcgccttacctttgcc

SEQ ID NO: 564818 - DNA, 75 bp, synthetic construct
  source 1..75: mol_type = other DNA
acagcaaaacgcttagcaaattgattggccgcccaacgacaacgttagccgaaagcgtaagccatctttttaatg

SEQ ID NO: 564819 - DNA, 75 bp, synthetic construct
  source 1..75: mol_type = other DNA
tatccagaaataggggattccaccattgtctcttttagaggcaaagactatgctgttcactttattaaagatggc

SEQ ID NO: 564820 - DNA, 75 bp, synthetic construct
  source 1..75: mol_type = other DNA
aatgatgtggatatgcgcaacatacggatccgcgttcttgaaatgctggcctacaatcgccgcgtggcactgtat

SEQ ID NO: 564821 - DNA, 75 bp, synthetic construct
  source 1..75: mol_type = other DNA
atgaccgaagccgaaatgctcaaaatgattcgccagattgccgggatcagaccaccagcaggcaaacaggaggcc

SEQ ID NO: 564822 - DNA, 75 bp, synthetic construct
  source 1..75: mol_type = other DNA
aagccttcctcgatatgctggcgtggtcagaaggaactgataacggatggcagaagaccagaaatcatggttatg

SEQ ID NO: 564823 - DNA, 75 bp, synthetic construct
  source 1..75: mol_type = other DNA
cgggtttttccagacattgatgactattcagttatcaattttcggggaaaagagtatgctgtccgcttcattaaa

SEQ ID NO: 564824 - DNA, 75 bp, synthetic construct
  source 1..75: mol_type = other DNA
atgtcgtcatcattatcaggtataacattcgcgacttctttgacaagcaatcaagcgtcatggagtaagttgacc

SEQ ID NO: 564825 - DNA, 75 bp, synthetic construct
  source 1..75: mol_type = other DNA
atgatcgctattactggtgccactggccaacttggtcactatgttattgaatccttgaagaaaacggttcctgtc

SEQ ID NO: 564826 - DNA, 75 bp, synthetic construct
  source 1..75: mol_type = other DNA
tacctatcaaaacctgagcgaagccgatttcgctgcggcgctgaaaagcgttggcctgcctgacggactggcgga

SEQ ID NO: 564827 - DNA, 75 bp, synthetic construct
  source 1..75: mol_type = other DNA
cttagcaaattgattggccgcccaacgacaacgttagccgaaagcgtaagccatctttttaatgttaataactag

SEQ ID NO: 564828 - DNA, 75 bp, synthetic construct
  source 1..75: mol_type = other DNA
tacctaccagaacctgagcgaagccgatttcgccactgcgctgaaaggcgttggtcttcctgtcggactggcgga

SEQ ID NO: 564829 - DNA, 75 bp, synthetic construct
  source 1..75: mol_type = other DNA
aaaactactgctgatctcttccagcgaagtaggacagcgtgccccgcagcatcgtaatgttataaatgcagcaaa

SEQ ID NO: 564830 - DNA, 75 bp, synthetic construct
  source 1..75: mol_type = other DNA
aaaactactgctgatctcttccagcgaagtaggtcaacgtgccccgcagcatcgtaatgttattaatgccgcaaa

SEQ ID NO: 564831 - DNA, 75 bp, synthetic construct
  source 1..75: mol_type = other DNA
tggcttgcagagaaagaagagcgcgagcgaatttaccagacatcaatccgaccattccgcaaagccacatatacc

SEQ ID NO: 564832 - DNA, 75 bp, synthetic construct
  source 1..75: mol_type = other DNA
accgacagattaagtaccggaacaacgtgattgaatgcgatcatggcaaactgaaacggataatcggcgccacgc

SEQ ID NO: 564833 - DNA, 75 bp, synthetic construct
  source 1..75: mol_type = other DNA
cgccacgctgggatttaaatccatgaagacggcttacgccaccatcaaaggtattgaggtgatgcgtgcactacg

SEQ ID NO: 564834 - DNA, 75 bp, synthetic construct
  source 1..75: mol_type = other DNA
accggaacaacgtgattgaatgcgatcatggcaaactgaaacggataatcggcgccacgctgggatttaaatcca

SEQ ID NO: 564835 - DNA, 75 bp, synthetic construct
  source 1..75: mol_type = other DNA
cgccggggtgacgctgtcgggcactgtcatgcagaccatgcagaatgttgaatttaaccatcacgctgagggagt

SEQ ID NO: 564836 - DNA, 75 bp, synthetic construct
  source 1..75: mol_type = other DNA
gccagaatgcgccaaaaggacatttctttctgcatccccgcgcacgttcgccccactatattgtgatggacgata

SEQ ID NO: 564837 - DNA, 75 bp, synthetic construct
  source 1..75: mol_type = other DNA
cggataatatccagggtgactctaccgatatgtatgttgaattactggtcgttagtttcctggtggtacttgccc

SEQ ID NO: 564838 - DNA, 75 bp, synthetic construct
  source 1..75: mol_type = other DNA
gggcgtatctgtaccgggccgtcgacagccggggccgcactgtcgatttttatctctcctcccgtcgtaacagca

SEQ ID NO: 564839 - DNA, 75 bp, synthetic construct
  source 1..75: mol_type = other DNA
gtgcgatcatggtaagctgaaaaggataatcagtgccacgctgggatttaagtccatgaagacggcttacgccac

SEQ ID NO: 564840 - DNA, 75 bp, synthetic construct
  source 1..75: mol_type = other DNA
cagcaaactacgtctcgtagtaaacctgcgcctgccgttcgtgccgcctacaataatgaattggtagaagccgtt

SEQ ID NO: 564841 - DNA, 75 bp, synthetic construct
  source 1..75: mol_type = other DNA
gtgcactacgcaaaggccaggcctcagcattttattatggtgatcccctgggcgaaatgcgcctggtaagcagag

SEQ ID NO: 564842 - DNA, 75 bp, synthetic construct
  source 1..75: mol_type = other DNA
ttattctgaccgtttcagatgcctccagtgatgtgtttgcgttgatagacgcaggcgctgacggttatctgttga

SEQ ID NO: 564843 - DNA, 75 bp, synthetic construct
  source 1..75: mol_type = other DNA
ccggaacaatgtgattgaatgcgatcatggcaaactgaaacggataatcggcgccacgctgggatttaaatccat

SEQ ID NO: 564844 - DNA, 75 bp, synthetic construct
  source 1..75: mol_type = other DNA
cgctggtcccgccaccgcgcgcccacctgacccgcttccacggggtgtttgccccgaacgccgccctgcgcgcac

SEQ ID NO: 564845 - DNA, 75 bp, synthetic construct
  source 1..75: mol_type = other DNA
atcacattcaagcgactggatctggtggataagatgaatgatatcgtggcgaagcactttccggggatgttacct

SEQ ID NO: 564846 - DNA, 75 bp, synthetic construct
  source 1..75: mol_type = other DNA
ctactttcagaaaggcaacgggcatatcacgtttaagcgtctggacctggtggagaagatgaatgacattgtggc

SEQ ID NO: 564847 - DNA, 75 bp, synthetic construct
  source 1..75: mol_type = other DNA
gcgacgcatagtgcgtaacctgctgaaagagctgggattcaataatgttgaggaagcggaagatggcctcgacgc

SEQ ID NO: 564848 - DNA, 75 bp, synthetic construct
  source 1..75: mol_type = other DNA
ggtgcgggctggcttatgggttccccgtaaacaacgtgccgcaaggatccctcaaccacggtaccggcgtccgtg

SEQ ID NO: 564849 - DNA, 75 bp, synthetic construct
  source 1..75: mol_type = other DNA
ttactgttttaattgcaatgaacatttcgctttataccatcaccgtatggataccgaccatatttgttaactccg

SEQ ID NO: 564850 - DNA, 75 bp, synthetic construct
  source 1..75: mol_type = other DNA
atgcaaacagaagctgaagtcttaaccgatcataacgagctaattttctcgaccagcattgaacgtatcgtgacg

SEQ ID NO: 564851 - DNA, 75 bp, synthetic construct
  source 1..75: mol_type = other DNA
tgactgctggctgatgcagccaaccgacaaagcgatgccggtgatcacccgcaatatcgaccgcagcatctggcg

SEQ ID NO: 564852 - DNA, 75 bp, synthetic construct
  source 1..75: mol_type = other DNA
gtggcaaagaattactatgacatcaccctcgctctggccggtatttgtcagtcagcgcgcctggtgcaacaactc

SEQ ID NO: 564853 - DNA, 75 bp, synthetic construct
  source 1..75: mol_type = other DNA
cgatgcggcgccagtggacgtcagcgcccacgacgcgccgcgcagccccgaggagaagcgccgtgcgatgagctg

SEQ ID NO: 564854 - DNA, 75 bp, synthetic construct
  source 1..75: mol_type = other DNA
tctcaataagttgcaggcaggcggttatggatttgttatctccgactggaacatgcccaacatggatggcctgga

SEQ ID NO: 564855 - DNA, 75 bp, synthetic construct
  source 1..75: mol_type = other DNA
tggttgtggatgacttttccaccatgcgacgcatagtgcgtaacctgctgaaagagctaggattcaataatgttg

SEQ ID NO: 564856 - DNA, 75 bp, synthetic construct
  source 1..75: mol_type = other DNA
gaagccaacatcctgagtacctttgaacaactccaccacaataaacgggatgttttcgaacgtgggattatcaat

SEQ ID NO: 564857 - DNA, 75 bp, synthetic construct
  source 1..75: mol_type = other DNA
tttcaagaaacattatttatcaatgaaactaaagatcgtgaactaagagcaggaaagcttaagtacggtgacatt

SEQ ID NO: 564858 - DNA, 75 bp, synthetic construct
  source 1..75: mol_type = other DNA
cagttgggccgtctgctgtaccagggacgttggtttgactcccaggcgctgatgctgcgtgactccctgcaacgc

SEQ ID NO: 564859 - DNA, 75 bp, synthetic construct
  source 1..75: mol_type = other DNA
ggtaaaacctttagcgacgacgtagaaatgatgctggaagctaaccgcatcggcggtgcgtcacggcctgggcat

SEQ ID NO: 564860 - DNA, 75 bp, synthetic construct
  source 1..75: mol_type = other DNA
gtaaccgatataaagaagttcagcgtgtaaatgtgccgcctggtgggaatgtggtactgccagtttcacgaggac

SEQ ID NO: 564861 - DNA, 75 bp, synthetic construct
  source 1..75: mol_type = other DNA
gatgaaattatgcagtaccgcaaacagtcgttcagtcctttatgttacccgttatggcaacaatctgttggtaat

SEQ ID NO: 564862 - DNA, 75 bp, synthetic construct
  source 1..75: mol_type = other DNA
gacgttggttcgattcccaggcattgatgctacgtgactctctgcaacgctgggttgccagccagattacaggtg

SEQ ID NO: 564863 - DNA, 75 bp, synthetic construct
  source 1..75: mol_type = other DNA
ctgcagatttacaaaccgtggcttgatactgactttattgatgaactgggcggccgtcatgaaatgtctgaattt

SEQ ID NO: 564864 - DNA, 75 bp, synthetic construct
  source 1..75: mol_type = other DNA
agcgctccgcgcgtctttcgctggtccgtgattatgtgctctccctctctgcacgcctgcctgccggggaggtga

SEQ ID NO: 564865 - DNA, 75 bp, synthetic construct
  source 1..75: mol_type = other DNA
ctccggcgatagcagttatttgctactcgaaggagactgccttatggctacaacccttaccccctcacaccctga

SEQ ID NO: 564866 - DNA, 75 bp, synthetic construct
  source 1..75: mol_type = other DNA
ccttaataacgctgacggggtgtacggttactcgccaggcccatgtgagcgaagttgacgcggcaacaggtattg

SEQ ID NO: 564867 - DNA, 75 bp, synthetic construct
  source 1..75: mol_type = other DNA
gcctttgccagcggcgatgccggaatacattttgaactgcgggcaaaaccggcgcgtgacgtgatgaaaacgcat

SEQ ID NO: 564868 - DNA, 75 bp, synthetic construct
  source 1..75: mol_type = other DNA
gtggtggtgatacgcaactcagcctgcaaacgtatctgacccgcgtcacccgcgtgcgtctcaaactgcaacagg

SEQ ID NO: 564869 - DNA, 75 bp, synthetic construct
  source 1..75: mol_type = other DNA
ccttatggctacgaccctcaccccgtcacacccgcagtttgtctttgtgtttgccgccgttcgtcgcgcagaccg

SEQ ID NO: 564870 - DNA, 75 bp, synthetic construct
  source 1..75: mol_type = other DNA
caaagcgccaacgccagcagcagggaataacaccacgcagattgcgaccaccgagtttgttcaggcggctctgac

SEQ ID NO: 564871 - DNA, 75 bp, synthetic construct
  source 1..75: mol_type = other DNA
aactcgaccgtattatcagctggggccagcaatccatcgacttgtggattggctacgaccgccacgtacacaaat

SEQ ID NO: 564872 - DNA, 75 bp, synthetic construct
  source 1..75: mol_type = other DNA
ggtaacggctacattaacgaagcgcaaaatatgggctggttgcagcgtttcttccttaacctgtcgccaatgtaa

SEQ ID NO: 564873 - DNA, 75 bp, synthetic construct
  source 1..75: mol_type = other DNA
gaatttattcgcttctccggcgtggtcaatccacgcaccatcagcggcagcaataccgtaccgtctactcaggtg

SEQ ID NO: 564874 - DNA, 75 bp, synthetic construct
  source 1..75: mol_type = other DNA
ccggcaaggcccccgtcagccacactcacccgtggagtcagataacgggagtgcctgctgcctcgctgacggcaa

SEQ ID NO: 564875 - DNA, 75 bp, synthetic construct
  source 1..75: mol_type = other DNA
tatccgtggatgggacgacgggcgcaagattgacgaggggcgtaagttgctttcatggcagaaaggtacactggt

SEQ ID NO: 564876 - DNA, 75 bp, synthetic construct
  source 1..75: mol_type = other DNA
agctcgaccgaattatcagctgggggcagcagtccatcgacttgtggattggctacgaccgacacgtacataaat

SEQ ID NO: 564877 - DNA, 75 bp, synthetic construct
  source 1..75: mol_type = other DNA
aaaagccacgaaagtggcaatgaataaactgatgcagcaaattggtaagccatatcgttggggtggcagctcacc

SEQ ID NO: 564878 - DNA, 75 bp, synthetic construct
  source 1..75: mol_type = other DNA
acaatgaagattccattacagaccttcgtgagggcagctttaaaatgccggacgggacaacattcagcgatcctg

SEQ ID NO: 564879 - DNA, 75 bp, synthetic construct
  source 1..75: mol_type = other DNA
aataaattaccagacttacgcggtgaatttatccgtggctgggatgatgggcgcggggtggatgccggaaggggc

SEQ ID NO: 564880 - DNA, 75 bp, synthetic construct
  source 1..75: mol_type = other DNA
atggcgcggcagatcctcgactgggcggatgcgcacccacgttttcgtgatggctatgctatgggcacgggtcgc

SEQ ID NO: 564881 - DNA, 75 bp, synthetic construct
  source 1..75: mol_type = other DNA
ccgcaacatgaccgggtagtcgtcgtttgtccggggcgcattgagagctatgtaaagtatgccgaactagcctat

SEQ ID NO: 564882 - DNA, 75 bp, synthetic construct
  source 1..75: mol_type = other DNA
caaaactcgcagcaaacaagccgtcaataaaacggcgtcagtcagctttacggaaaaatgcaccaaacgtaaagg

SEQ ID NO: 564883 - DNA, 75 bp, synthetic construct
  source 1..75: mol_type = other DNA
cgtcgccggtgatgaacgcagtgcccgccgttcccttgtccgtgactatgtgctctcccttgctgcccgtctgcc

SEQ ID NO: 564884 - DNA, 75 bp, synthetic construct
  source 1..75: mol_type = other DNA
atgattaacccaagaactattgcccaggaaatcgcttatgcggatgtcgccactcaggcggcaaatttgcaggag

SEQ ID NO: 564885 - DNA, 75 bp, synthetic construct
  source 1..75: mol_type = other DNA
aagaaattgcttatgcggatgtcgccacccaggcggcaaatttgcaggagaagcagaccgagctggacgctgaaa

SEQ ID NO: 564886 - DNA, 75 bp, synthetic construct
  source 1..75: mol_type = other DNA
gccggacaggattgtactgcggcttgtcggatctacgcgcaaaaaggcatttacgatacgctggtggaaaaactg

SEQ ID NO: 564887 - DNA, 75 bp, synthetic construct
  source 1..75: mol_type = other DNA
gatttgtcggcggcggatcagaacggtgacggcgacggttttatcgacgccagcgagctggtgaatgcgattaac

SEQ ID NO: 564888 - DNA, 75 bp, synthetic construct
  source 1..75: mol_type = other DNA
agcgttgagcgatttccagagcgccgttgacgcgctgaacagcgataccgacggcccggtgacttttgccgccac

SEQ ID NO: 564889 - DNA, 75 bp, synthetic construct
  source 1..75: mol_type = other DNA
ataacgccaactacgaccgttatctcgaggagtacaccaacacgatagtggaggtgtacaccatgaaagccagca

SEQ ID NO: 564890 - DNA, 75 bp, synthetic construct
  source 1..75: mol_type = other DNA
cagacagcttcgaccaaaacattgccattaacacccgtgcgccgtttttcctcgctcaggcattcagtaaacgct

SEQ ID NO: 564891 - DNA, 75 bp, synthetic construct
  source 1..75: mol_type = other DNA
tcatcactggtgctgcacgtggtattggaaagggttgtgcgctggaacttgctcgtagcgggtttaacctgctga

SEQ ID NO: 564892 - DNA, 75 bp, synthetic construct
  source 1..75: mol_type = other DNA
caggaatgtatggcagaaggcgtggaagttatttgctttcctgccgatgttggcgatctttccctgcatgaagag

SEQ ID NO: 564893 - DNA, 75 bp, synthetic construct
  source 1..75: mol_type = other DNA
actatgcgccgacgctactggctggcgcattacaggatgatgccatcgtatttggtccggtagtgagtgttacgc

SEQ ID NO: 564894 - DNA, 75 bp, synthetic construct
  source 1..75: mol_type = other DNA
cgccgaaagcgcgtgcggaatgcctgctgaaactggcggatgttatcgaagaaaatggtcaggtttttgccgaac

SEQ ID NO: 564895 - DNA, 75 bp, synthetic construct
  source 1..75: mol_type = other DNA
tgctggcgatgaatcgcggcgaatataccattgccaaaaccgccgtttctgccgctgctcgtctgtttgccgctc

SEQ ID NO: 564896 - DNA, 75 bp, synthetic construct
  source 1..75: mol_type = other DNA
tttatcttttactaaatctttatattgtttttttatgtatgcttttaatggggttattaaggagataatgcattt

SEQ ID NO: 564897 - DNA, 75 bp, synthetic construct
  source 1..75: mol_type = other DNA
cccctttttctggcttgcttcttttcgccgtttccaggtatagttttcccgctgtcgcaaaatcggcagccgggc

SEQ ID NO: 564898 - DNA, 75 bp, synthetic construct
  source 1..75: mol_type = other DNA
gataaccaacgcattacaacaacaaaaaagagaaaataacaggagtgatgactatgagtcgtttagtcgtagtat

SEQ ID NO: 564899 - DNA, 75 bp, synthetic construct
  source 1..75: mol_type = other DNA
cggatgtctggagctggcttgaaatgataaccaccgcattacaacaaaaaagagaaaataacaggagtgatgact

SEQ ID NO: 564900 - DNA, 75 bp, synthetic construct
  source 1..75: mol_type = other DNA
cccccgtctgggctatcgccatcgagcgtggaaactccggcgatagcgtaacctgctatctaacggaggctgcca

SEQ ID NO: 564901 - DNA, 75 bp, synthetic construct
  source 1..75: mol_type = other DNA
agcccgtgtaacttattggcgacacagcacgcgtcgagcgtgtttttttatgtcgttgctcaggcacacctattt

SEQ ID NO: 564902 - DNA, 75 bp, synthetic construct
  source 1..75: mol_type = other DNA
ttttacgtcgttgctcaggcacacccatttttcgggctgtggtgcttattccatagcccctgtcagataatggtg

SEQ ID NO: 564903 - DNA, 75 bp, synthetic construct
  source 1..75: mol_type = other DNA
ccaacaaatgtttttacggtgatgcaaccattctaccaagattattctttatttggagtagcatttggagcaata

SEQ ID NO: 564904 - DNA, 75 bp, synthetic construct
  source 1..75: mol_type = other DNA
attatgtggctggagattatatcacgttctaattttgcatattgcatccaaaaacctttggcactttacagatta

SEQ ID NO: 564905 - DNA, 75 bp, synthetic construct
  source 1..75: mol_type = other DNA
atgaaaaagattgcatttggctgtgatcatgtcggtttcattttaaaacatgaaatagtggcacatttggttgag

SEQ ID NO: 564906 - DNA, 75 bp, synthetic construct
  source 1..75: mol_type = other DNA
actcagatctggccacaaatggcgttacagcagggaaagtgtgttgtcgagatcaaaccgagaggtaccagtaaa

SEQ ID NO: 564907 - DNA, 75 bp, synthetic construct
  source 1..75: mol_type = other DNA
gggatggcttttgcgctgcattatcgtcaggctccgcagcatgaagacgcattaatgacattagcgcaacgtatt

SEQ ID NO: 564908 - DNA, 75 bp, synthetic construct
  source 1..75: mol_type = other DNA
tcatggctacaacccttaccccctcacaccctgaatttgtctttgtgtttgcggctgtccgtcgcgcagaccgtc

SEQ ID NO: 564909 - DNA, 75 bp, synthetic construct
  source 1..75: mol_type = other DNA
gtggaagcaacaggtatcgtatttttagtggtgctcttcgtcattatcatgaccgtagcagatatacagaagaaa

SEQ ID NO: 564910 - DNA, 75 bp, synthetic construct
  source 1..75: mol_type = other DNA
tagtagtgctcttcgtcgttatcatgaccgcagtagatatacagaagaaaaagcactacaacagcttcactgaag

SEQ ID NO: 564911 - DNA, 75 bp, synthetic construct
  source 1..75: mol_type = other DNA
tggtctgacattgttcgacgcgcttgaaggcaaagggctcgcggagcaggtaggtggctttgcttacctggcgga

SEQ ID NO: 564912 - DNA, 75 bp, synthetic construct
  source 1..75: mol_type = other DNA
ttgtacgggtatatcgattatcttgccagaaatctgttaccggacgtgtgtgatgaagactggctgtaccggcac

SEQ ID NO: 564913 - DNA, 75 bp, synthetic construct
  source 1..75: mol_type = other DNA
atcgtcttcgctgaattacgtgacatgttccgcgcgaacaagccagtcgatgggttaacactcttcgacgctctg

SEQ ID NO: 564914 - DNA, 75 bp, synthetic construct
  source 1..75: mol_type = other DNA
cccatgtggaaagttaatgttcccttgaaaaataaaagcacttcaaatcacgaactttgtgagcgatggatgctg

SEQ ID NO: 564915 - DNA, 75 bp, synthetic construct
  source 1..75: mol_type = other DNA
agagcacttgatgaaatggcacttcttgcaactttgcatcactatcagaaccatttagacgacgtttgcgtataa

SEQ ID NO: 564916 - DNA, 75 bp, synthetic construct
  source 1..75: mol_type = other DNA
cgcattgcggcagcggatatcgccggtacgctaccggtaatgaaagtgagcgatcacttaacctggctggcagaa

SEQ ID NO: 564917 - DNA, 75 bp, synthetic construct
  source 1..75: mol_type = other DNA
cgcatggggcagcggctgattaaagtgctggatcaaccaacgcaggatggtttcgtctatcgcgttgatatgcgg

SEQ ID NO: 564918 - DNA, 75 bp, synthetic construct
  source 1..75: mol_type = other DNA
atattgaactgtcaggagctggctgcacaacagccattacgcccaatcaactggtgcagtcgtcttctgaaaatg

SEQ ID NO: 564919 - DNA, 75 bp, synthetic construct
  source 1..75: mol_type = other DNA
ccattacgcccaatcaactggtgcagtcgtcttctgaaaatgacaatcgtgccaccggctccaggtcttatcgaa

SEQ ID NO: 564920 - DNA, 75 bp, synthetic construct
  source 1..75: mol_type = other DNA
aatttgctgattcatcctggcggcgttctgtgaactcgctggatgcaagtcagcaagcgtggttgcgttattgct

SEQ ID NO: 564921 - DNA, 75 bp, synthetic construct
  source 1..75: mol_type = other DNA
tgcggtcggtaacgctgacgacggtacgtcattaatcctggtcacgccggtgaatggtctgccgtcttccggtgt

SEQ ID NO: 564922 - DNA, 75 bp, synthetic construct
  source 1..75: mol_type = other DNA
gtatagatgaaatctactacagacccttgcaaatgacttttggtgatggaagctggcgctcagtcggtatagggg

SEQ ID NO: 564923 - DNA, 75 bp, synthetic construct
  source 1..75: mol_type = other DNA
cggatgcctggagaaagcgaaaaacggtgacgatatcccggataaggtgaagtttctgaacaccgtgggagcagc

SEQ ID NO: 564924 - DNA, 75 bp, synthetic construct
  source 1..75: mol_type = other DNA
ctatcctcagttccggggtcatggatggtgtgtaatgaaattacgtcgacaaatgataatgaaagcatcgggctg

SEQ ID NO: 564925 - DNA, 75 bp, synthetic construct
  source 1..75: mol_type = other DNA
atcccggcccccagggaccaaagggggatactggcgctgctggggcaaagggtgagaaaggagccaccggcgcaa

SEQ ID NO: 564926 - DNA, 75 bp, synthetic construct
  source 1..75: mol_type = other DNA
gcaaatgtggctgatgcaacgacggcacagaagggaattgtgcagttaagcagcgcaacggacagtgatgatgaa

SEQ ID NO: 564927 - DNA, 75 bp, synthetic construct
  source 1..75: mol_type = other DNA
ggtggctaaggtgatgcgccgtgacgttattgagcttaacggcgtggatatgcgcaacatacgaaccagagtcct

SEQ ID NO: 564928 - DNA, 75 bp, synthetic construct
  source 1..75: mol_type = other DNA
acaagggccaaccggaaggctggtacccggggaaatttacagcatcggaacatacattattgccgcactaggccc

SEQ ID NO: 564929 - DNA, 75 bp, synthetic construct
  source 1..75: mol_type = other DNA
acgatatcccggataaggtgaagtttctgaacaccgtaggagcagccagagtatacgggcgggacattcatacgg

SEQ ID NO: 564930 - DNA, 75 bp, synthetic construct
  source 1..75: mol_type = other DNA
ggtcggtaacgctgacgacggtacgtcattaatcctggtcacgccggtgaatggtctgccgtcttccggcgtggc

SEQ ID NO: 564931 - DNA, 75 bp, synthetic construct
  source 1..75: mol_type = other DNA
cccatagcatcgaggcagagcaggcggtgattggtggattgcttctggatgatgacaacagcgagcgagtccaga

SEQ ID NO: 564932 - DNA, 75 bp, synthetic construct
  source 1..75: mol_type = other DNA
aggttcgtgaaaccgcaatggaacgctacgccatcaaccgcatgactgaagcgacggaattgctctattcccgca

SEQ ID NO: 564933 - DNA, 75 bp, synthetic construct
  source 1..75: mol_type = other DNA
tcgccctaagatggggaaaacgacgctatacagccagatggcaatcaactgcgcagtgcatgagaaaaagcccgc

SEQ ID NO: 564934 - DNA, 75 bp, synthetic construct
  source 1..75: mol_type = other DNA
tgcttgtcatcccattcgcctcaggtgcaaccacattcacctgtaaggcgatccaggaagggcagatcgattctg

SEQ ID NO: 564935 - DNA, 75 bp, synthetic construct
  source 1..75: mol_type = other DNA
atgcaacggggctgctttttcggctgaagaatacccggaactggcaaaggcttacccgacaaataaattgcctga

SEQ ID NO: 564936 - DNA, 75 bp, synthetic construct
  source 1..75: mol_type = other DNA
ggcccaccgccacaccgccagcaggctggttaaagtgcgacgggcgcgcctttacaaaagaacaatatcctgttc

SEQ ID NO: 564937 - DNA, 75 bp, synthetic construct
  source 1..75: mol_type = other DNA
ccagccacactcacccgtggagtcagataacgggagtgcctgcggcttcactgacggcaaaaggcaccgtacaac

SEQ ID NO: 564938 - DNA, 75 bp, synthetic construct
  source 1..75: mol_type = other DNA
tgtcctcaattaccttggtttaggagaaggctcggcgctaccgttggtgtgcctgttccgtggcccaccgccaca

SEQ ID NO: 564939 - DNA, 75 bp, synthetic construct
  source 1..75: mol_type = other DNA
atacgatctggcaaacggaaaacaaccggcagatgccacgctcactgctctggcaggactttccactgcagcaga

SEQ ID NO: 564940 - DNA, 75 bp, synthetic construct
  source 1..75: mol_type = other DNA
tgggatgacggacgtggtgtggatgccgggcgacaattattatcttcacagggggatgcaataagaaatattgag

SEQ ID NO: 564941 - DNA, 75 bp, synthetic construct
  source 1..75: mol_type = other DNA
acaggctggctgaaatgcaacggtgcggcattttctgccgttgaatatcctaaactggcaaaggcttatccgaca

SEQ ID NO: 564942 - DNA, 75 bp, synthetic construct
  source 1..75: mol_type = other DNA
ttgctaagtcttcaggatgactcttttgaagcgcacaggcatgagtcctttttttatgcgggtatttcacgtaat

SEQ ID NO: 564943 - DNA, 75 bp, synthetic construct
  source 1..75: mol_type = other DNA
agttggctgacgaacaggccgcgcagccggatacagtcaccgctgaaaattacgcgcgtgtggtggctgaggtga

SEQ ID NO: 564944 - DNA, 75 bp, synthetic construct
  source 1..75: mol_type = other DNA
ctcactgctctggcagggcttgctacagcggcaggtaaactcccttattttacaggggtagatcgtgccgcgtta

SEQ ID NO: 564945 - DNA, 75 bp, synthetic construct
  source 1..75: mol_type = other DNA
tttatgctttctgctacagttcctggatatcaaaaattgccatccggtttaattattcaatgggggccaattgat

SEQ ID NO: 564946 - DNA, 75 bp, synthetic construct
  source 1..75: mol_type = other DNA
ttgcttaattggcagccacacacaattttggatcatgcacactatatggaattatggaccgggaacggacttgcc

SEQ ID NO: 564947 - DNA, 75 bp, synthetic construct
  source 1..75: mol_type = other DNA
gggaggacagtgtggcaaccatggcactctatgccgatcagtggctggaggaagcaaaaaaacgggtaaaacgaa

SEQ ID NO: 564948 - DNA, 75 bp, synthetic construct
  source 1..75: mol_type = other DNA
acgcccgtcgactgaccgaacttgccggtgcggtactggagcgcagcaaacgctacccgcaacgctttgcactga

SEQ ID NO: 564949 - DNA, 75 bp, synthetic construct
  source 1..75: mol_type = other DNA
cagcgcgcgccgtctgaccgaacttgccggtgcggtactggaacgcagcaaacgctacccacagcgctttgcact

SEQ ID NO: 564950 - DNA, 75 bp, synthetic construct
  source 1..75: mol_type = other DNA
aaatcatcgccggagagagtatgctcggcggcgcacgaatggaggtcatttttggtcgccagcattctgcaccaa

SEQ ID NO: 564951 - DNA, 75 bp, synthetic construct
  source 1..75: mol_type = other DNA
cacaaccttttcctgtaaagcaatacaggaaggtcatattgactcgggaagtcagaaagtttctgtagattcaac

SEQ ID NO: 564952 - DNA, 75 bp, synthetic construct
  source 1..75: mol_type = other DNA
gaaaaccacgccgccggtaaacgaagttaagggaaccggtgaaattgaaatcactgttcagaccaatggcctgcg

SEQ ID NO: 564953 - DNA, 75 bp, synthetic construct
  source 1..75: mol_type = other DNA
tcaggggagtggtgaagaaattgaaatcaccgttaagaccaacggcctgcgccgccgtgtgaaggccacccgcat

SEQ ID NO: 564954 - DNA, 75 bp, synthetic construct
  source 1..75: mol_type = other DNA
cagacattccatggcgtgaattacctttttaatatttcatccatgctgcagataaatattcctttatctcatgcc

SEQ ID NO: 564955 - DNA, 75 bp, synthetic construct
  source 1..75: mol_type = other DNA
tcttgacaaactgccaccatggtcgctctatcagacttttcatggtgtgaattatctgttcagcatatcgtcaat

SEQ ID NO: 564956 - DNA, 75 bp, synthetic construct
  source 1..75: mol_type = other DNA
ttatcatcgggtacggactctggctctgcggggccattatcgccctgacggttctgatccgtttttccttcagca

SEQ ID NO: 564957 - DNA, 75 bp, synthetic construct
  source 1..75: mol_type = other DNA
gtgaagatcattctatacagcaacagttgcaggaagtacgggaggatgacgacgacgctgagatgactcactcgg

SEQ ID NO: 564958 - DNA, 75 bp, synthetic construct
  source 1..75: mol_type = other DNA
agagtgaacgtgaacgttacgacaagtatcgcaccacgctcaccgacctgactcacagcctgaaaacgcctctgg

SEQ ID NO: 564959 - DNA, 75 bp, synthetic construct
  source 1..75: mol_type = other DNA
acgaattaagcgatatctttggatgctctccagattggttaaagtttggcgaaaatgtaccttatccaaagagtt

SEQ ID NO: 564960 - DNA, 75 bp, synthetic construct
  source 1..75: mol_type = other DNA
atgacggaggcggatttgtatcctcatctggcgcatcttgccggcgggcaggggtacccgtatgtggtccccctg

SEQ ID NO: 564961 - DNA, 75 bp, synthetic construct
  source 1..75: mol_type = other DNA
agtaaaaagggcgagcattatttgttacagaccagaactgcagtcctgaataacgaactacaggacaaatttgcc

SEQ ID NO: 564962 - DNA, 75 bp, synthetic construct
  source 1..75: mol_type = other DNA
cggctcaacgctggggcataagcatgatctggaaacgccatttaacgctcgacgaactgaacgccaccagcgata

SEQ ID NO: 564963 - DNA, 75 bp, synthetic construct
  source 1..75: mol_type = other DNA
atgaaagcactggctcggtttggcaaggcctttggcggctacaagatgattgatgtcccacaacccatgtgtggc

SEQ ID NO: 564964 - DNA, 75 bp, synthetic construct
  source 1..75: mol_type = other DNA
atgagagaggccacactgtattccctgctgtctccgctggccggaggacaggtttatccttatgtggtcccgctg

SEQ ID NO: 564965 - DNA, 75 bp, synthetic construct
  source 1..75: mol_type = other DNA
attcaagccaaaaaggtcagtacgctgaaaacaggtggtaatcctgccttgtataccgcgcattatgatgacgct

SEQ ID NO: 564966 - DNA, 75 bp, synthetic construct
  source 1..75: mol_type = other DNA
acgttacgatacttactctggtcgcgtagttcgtcactttaaaggttctatggaagagtggcaggcgatgggcgt

SEQ ID NO: 564967 - DNA, 75 bp, synthetic construct
  source 1..75: mol_type = other DNA
ccgaatttacttttacgcctgatgaagaaggtcaggagcgtcgtttgtccgagctgagtgacggtcagcgctctc

SEQ ID NO: 564968 - DNA, 75 bp, synthetic construct
  source 1..75: mol_type = other DNA
caaagaggactggcagcagacttttgcggtcaacgtcggcggcgcatttaacctgttccagcaaaccatgaacca

SEQ ID NO: 564969 - DNA, 75 bp, synthetic construct
  source 1..75: mol_type = other DNA
agtagaaagggcgggcattatttgttacagaccagaactgcagtcctgaataacgaactacaggacaaatttgcc

SEQ ID NO: 564970 - DNA, 75 bp, synthetic construct
  source 1..75: mol_type = other DNA
agatgatgatcccaaactacggagaaatgcgccggtatggtgagccggtttcaacagcgtttgtagagtcaacaa

SEQ ID NO: 564971 - DNA, 75 bp, synthetic construct
  source 1..75: mol_type = other DNA
ccggttgcaaaagaactgggtgcgacggcagtagtaaatggttctaccgaagatgtggtggcgcgctgccagcaa

SEQ ID NO: 564972 - DNA, 75 bp, synthetic construct
  source 1..75: mol_type = other DNA
gcattgatgagacggtaaccagtattcaggccatgtatgcctccctgtcggacaaaaagaacattgagttcctga

SEQ ID NO: 564973 - DNA, 75 bp, synthetic construct
  source 1..75: mol_type = other DNA
attgagctgggttccacgcaaaaggccgcacagaccaatgccgaaggttttaatgctgcaatacaatcactgaat

SEQ ID NO: 564974 - DNA, 75 bp, synthetic construct
  source 1..75: mol_type = other DNA
ctgccggatgaaacagactcactcacgaaatctgtggctgctgaccccagcgccagcccgtgggagcgcgagttc

SEQ ID NO: 564975 - DNA, 75 bp, synthetic construct
  source 1..75: mol_type = other DNA
agatgcagttaatgcagttgatcagcgagctgccggtaaccagcattgtggccattcacgatcttaaccatgccg

SEQ ID NO: 564976 - DNA, 75 bp, synthetic construct
  source 1..75: mol_type = other DNA
agaacaaccagaaagcgctcgagtccgtctggcgtaaggtaacggactggttcaactcgctgggtgacaaaaaca

SEQ ID NO: 564977 - DNA, 75 bp, synthetic construct
  source 1..75: mol_type = other DNA
ccatccacgacatcatgaatcccaaagggaaaggcaaagggatacccggtggcattacggatgttttcggctccg

SEQ ID NO: 564978 - DNA, 75 bp, synthetic construct
  source 1..75: mol_type = other DNA
taaaaagaatgatcgcaatcttttaaataaagtaaaaaatgactgttttgcaacaatacctgacgtttcattaat

SEQ ID NO: 564979 - DNA, 75 bp, synthetic construct
  source 1..75: mol_type = other DNA
taaacgttgtattggctgtagcgcctgtactacggcatgcccgtggatgatggccaccgtaaataccgaaagtaa

SEQ ID NO: 564980 - DNA, 75 bp, synthetic construct
  source 1..75: mol_type = other DNA
tgttatgcggtgaatgcgcaaacgcctgcccaacactgatgaatcccctaatgatttttatcaaaatcattaagt

SEQ ID NO: 564981 - DNA, 75 bp, synthetic construct
  source 1..75: mol_type = other DNA
caaattaaacgcagatcaggtcaatacgctgaagaacgcgatccgggacgtttccaatcagaaggatatccgcat

SEQ ID NO: 564982 - DNA, 75 bp, synthetic construct
  source 1..75: mol_type = other DNA
tacggcgcaaacatgtcgcagttcgcccggaaccatcagaaggccatgcgccttgtcaaagccacaacggaggcc

SEQ ID NO: 564983 - DNA, 75 bp, synthetic construct
  source 1..75: mol_type = other DNA
atggatagcaaaacagatccctgatatacaacataacggagtcttacctgtctgggtgccagtgatgaaccgacg

SEQ ID NO: 564984 - DNA, 75 bp, synthetic construct
  source 1..75: mol_type = other DNA
agaattttcgttgtttcgggcatgaggtggtcgagctaaattttgaggaagaactgacaatacttgtcggcggaa

SEQ ID NO: 564985 - DNA, 75 bp, synthetic construct
  source 1..75: mol_type = other DNA
agctgcgaaatccattggcgcgacgactcacgttggcgtgacagcttcttctgataccttctacccaggtcagga

SEQ ID NO: 564986 - DNA, 75 bp, synthetic construct
  source 1..75: mol_type = other DNA
tggtgcgagcctgcacttcgcaccgctggaattcccggctgtcgctgatttcgaatgtacgactgcgctggttga

SEQ ID NO: 564987 - DNA, 75 bp, synthetic construct
  source 1..75: mol_type = other DNA
atggagagtttgctttatgtaattctcccaccggttgacgatatgagtcgtaaacactggacacacagaatgccg

SEQ ID NO: 564988 - DNA, 75 bp, synthetic construct
  source 1..75: mol_type = other DNA
gaacgggattatttcaccctccgggaacgactggtaatgatgcaggcccaacttgaaggtgctcagcaatacata

SEQ ID NO: 564989 - DNA, 75 bp, synthetic construct
  source 1..75: mol_type = other DNA
gaaactaaaaaatcgtcgaaatgtgtgttatgcggtgaatgcgcaaatgcctgtccgacaggggcgttaaaaatt

SEQ ID NO: 564990 - DNA, 75 bp, synthetic construct
  source 1..75: mol_type = other DNA
ctgataccttctacccaggtcaggaacgttacgatacttactctggtcgcgtagttcgtcactttaaaggttcta

SEQ ID NO: 564991 - DNA, 75 bp, synthetic construct
  source 1..75: mol_type = other DNA
aacactggaagatggtggtggtgctactggctatttgtggcgctatgctgttactgcgttgggcggcaatgattt

SEQ ID NO: 564992 - DNA, 75 bp, synthetic construct
  source 1..75: mol_type = other DNA
gcaataccctactcccgaaactcatctccggtgagctatccctggacgatcttccggatctcagcaccgatacag

SEQ ID NO: 564993 - DNA, 75 bp, synthetic construct
  source 1..75: mol_type = other DNA
caccctgctcccgaaactcatctccggcgagctatccctggacgatattccggatctcaacaccgatacagaagc

SEQ ID NO: 564994 - DNA, 75 bp, synthetic construct
  source 1..75: mol_type = other DNA
atggggcggggactggaaaacgctgaaggacgggccgcacttccaattgaaacgctgatagccgggcgagttatg

SEQ ID NO: 564995 - DNA, 75 bp, synthetic construct
  source 1..75: mol_type = other DNA
cggtttcattactccggaagacggcagcaaagatgtgttcgtacacttctctgcaatccagactaatggttttaa

SEQ ID NO: 564996 - DNA, 75 bp, synthetic construct
  source 1..75: mol_type = other DNA
agctgcgaaatccattggcgcgaccactcacgttggcgtgacggcttcttctgacaccttctacccaggccagga

SEQ ID NO: 564997 - DNA, 75 bp, synthetic construct
  source 1..75: mol_type = other DNA
aaacaggactatcgacatttcgattgacgacaacggcattgttactcatacgcaggaaatactggatacagacac

SEQ ID NO: 564998 - DNA, 75 bp, synthetic construct
  source 1..75: mol_type = other DNA
tgctggacctgctccgcggtctggtgatggagcttaacctggcggtggtgattgtcacccacgatttaggcgtcg

SEQ ID NO: 564999 - DNA, 75 bp, synthetic construct
  source 1..75: mol_type = other DNA
atctccgcgcgcctgacgccgcagcagggggagattcgctatgaaaaccgctccctctatggcatgagcgaggcc

SEQ ID NO: 565000 - DNA, 75 bp, synthetic construct
  source 1..75: mol_type = other DNA
gcaacgtttgcagatcgcccgcaacctggtgacgcatccgaagctggtgtttatggacgagccgaccggcggact

SEQ ID NO: 565001 - DNA, 75 bp, synthetic construct
  source 1..75: mol_type = other DNA
cggtgctgcaaagtacgctgcgttctctgcgtagtgagaagatgagcgtcagtgatgctgagccggtaatgctgg

SEQ ID NO: 565002 - DNA, 75 bp, synthetic construct
  source 1..75: mol_type = other DNA
agtgggtgtccagtttggtagcgcggcggaaatggccattcttcaggaaattatcaatgcccggtacgaaagcat

SEQ ID NO: 565003 - DNA, 75 bp, synthetic construct
  source 1..75: mol_type = other DNA
gtctgggatgcacgggtaaaattgctgaccagccaggggccaggtacagctatcgactttggtctgaaaattatc

SEQ ID NO: 565004 - DNA, 75 bp, synthetic construct
  source 1..75: mol_type = other DNA
tgctgctacggatctggttcaccacttttcagcaatgaagagtcagcaagccatattcgaatcagcacaacgtga

SEQ ID NO: 565005 - DNA, 75 bp, synthetic construct
  source 1..75: mol_type = other DNA
acttatggcttgccgatatcaggcaagaaagagccggagttatcgccgaaggagagcaaaaatactaccccatta

SEQ ID NO: 565006 - DNA, 75 bp, synthetic construct
  source 1..75: mol_type = other DNA
ggctttgattacgtaactgtgcctaactatatcagcctcgacaagaaaagcctgatgcttgaatcagcagaagag

SEQ ID NO: 565007 - DNA, 75 bp, synthetic construct
  source 1..75: mol_type = other DNA
ctggatgtgtcggtgcaggcccgcctgctcgacctgctgcgcggcctggtggtggagctgaacctggcggtggtg

SEQ ID NO: 565008 - DNA, 75 bp, synthetic construct
  source 1..75: mol_type = other DNA
agggggagattcactacgagaaccgttcgctgtatgcaatgagcgaggccgaccgccgtcgcctgctgcgcaccg

SEQ ID NO: 565009 - DNA, 75 bp, synthetic construct
  source 1..75: mol_type = other DNA
atgtgacacatcggactctggttgcaatgaaagctgatgtgctgattgagaatgctggtgttgcctgtaggtttc

SEQ ID NO: 565010 - DNA, 75 bp, synthetic construct
  source 1..75: mol_type = other DNA
ccagttggctgacgaacaggccgcgcagccggatacagtcaccgctgaaaattacgcgcgtgtggtggctgaggt

SEQ ID NO: 565011 - DNA, 75 bp, synthetic construct
  source 1..75: mol_type = other DNA
cgatgcctgcaaacgtctggcggatgccgggattcaggtttctctgtttatcgacgccgatgaagagcagatcaa

SEQ ID NO: 565012 - DNA, 75 bp, synthetic construct
  source 1..75: mol_type = other DNA
tacttctgcttgccttcgcctcacctgcggtgcttgccgcgccggaatcgtgtgagcgcataaaaagcgatattg

SEQ ID NO: 565013 - DNA, 75 bp, synthetic construct
  source 1..75: mol_type = other DNA
ttgtgctaatgatacgcataaaattctctacccccgcaccaccagcggtaacgtctctgctcccgcgcagtctac

SEQ ID NO: 565014 - DNA, 75 bp, synthetic construct
  source 1..75: mol_type = other DNA
gatccggtgcaggcggcgtttattgctgagcaggcgggagcggacggcattaccgtgcatttacgtgaagatcgc

SEQ ID NO: 565015 - DNA, 75 bp, synthetic construct
  source 1..75: mol_type = other DNA
ttactcctacgccatgtggattagcgcagcatttgcgctgaaggttatccgtgcatatgacgcaatggttactgc

SEQ ID NO: 565016 - DNA, 75 bp, synthetic construct
  source 1..75: mol_type = other DNA
tttgggtgttcatacaaagaaatcagcgatgagcagtttaccgaagctctgtcacttgcagctcgcgttccgctt

SEQ ID NO: 565017 - DNA, 75 bp, synthetic construct
  source 1..75: mol_type = other DNA
acattgaccatatcgctacgctgcgcaacgcgcgcggtaccgcttacccggatccggtgcaggccgcgtttattg

SEQ ID NO: 565018 - DNA, 75 bp, synthetic construct
  source 1..75: mol_type = other DNA
cattattggtcgtgcagtgatgaccggactgaaagatgcggtggcagaaatgaagcgtctgatgctggaagcgcg

SEQ ID NO: 565019 - DNA, 75 bp, synthetic construct
  source 1..75: mol_type = other DNA
ccgcatgaatctggagatggcggtgaccgaagagatgctggcgatcgccgttgagacgaagccacatttttgctg

SEQ ID NO: 565020 - DNA, 75 bp, synthetic construct
  source 1..75: mol_type = other DNA
cagcaccatgaccgggtggtagtcatctgtccggggcgtattgagagctacgtaaaatatgcggaactggcctac

SEQ ID NO: 565021 - DNA, 75 bp, synthetic construct
  source 1..75: mol_type = other DNA
atgaaacatctgatatttattttttcacttttaacattagcgggctgcaccgtaactcgtcaggctcaattgagc

SEQ ID NO: 565022 - DNA, 75 bp, synthetic construct
  source 1..75: mol_type = other DNA
tactatcgacaactgagtagatggttatcagcatctaaattatttcgaggtggaaactcaacagcctatcccgca

SEQ ID NO: 565023 - DNA, 75 bp, synthetic construct
  source 1..75: mol_type = other DNA
ttttcgagcgagaagccaaagccccggagctaaatattaaacaacttgcactacttatgtgtggggtagatccga

SEQ ID NO: 565024 - DNA, 75 bp, synthetic construct
  source 1..75: mol_type = other DNA
gggggcgtctggactgcctgctcaataacgcgggcatttctgtgaaaaaacgcggtgatctcctcgacctcgaac

SEQ ID NO: 565025 - DNA, 75 bp, synthetic construct
  source 1..75: mol_type = other DNA
ttaatgatcgtccggatgccgacagcgtagaaaaattacatgccacacaacaagaatgtctggcggaaggcgtgg

SEQ ID NO: 565026 - DNA, 75 bp, synthetic construct
  source 1..75: mol_type = other DNA
aataaaacggcctcagccagctttaccgaaaagtgtaccaaacgtaagggctataaatcgcattgtgtgaaagtc

SEQ ID NO: 565027 - DNA, 75 bp, synthetic construct
  source 1..75: mol_type = other DNA
ggaaggcaagcaaattgatttttcccgcctgcaaatgcctatcaatattgaacaccttcgacatcactggaacaa

SEQ ID NO: 565028 - DNA, 75 bp, synthetic construct
  source 1..75: mol_type = other DNA
cgactgatacgcagcttcccggcgaatatgacctttttgatttaatggcgcaggttactgaagagaacctgcatg

SEQ ID NO: 565029 - DNA, 75 bp, synthetic construct
  source 1..75: mol_type = other DNA
gcccaatgaacgaatcagccatccttgatgccttcgaaaaaacacgacagcataaaggggaattacatcatttta

SEQ ID NO: 565030 - DNA, 75 bp, synthetic construct
  source 1..75: mol_type = other DNA
gaaaaaggattgaggcatttaggaaagcagaggctagcttatatttatcaggtaaagatcctcgcgggtcagaat

SEQ ID NO: 565031 - DNA, 75 bp, synthetic construct
  source 1..75: mol_type = other DNA
ccctgaagatttatgctcactgtgtggcggaaatcatggtaaagctgccatgatcgaatgtaaggacaaaatcca

SEQ ID NO: 565032 - DNA, 75 bp, synthetic construct
  source 1..75: mol_type = other DNA
atttgccttaattgcgttgatgtcctcgttgatatcaaaaatgagagagaagataaaaagcgtagcgaggctatt

SEQ ID NO: 565033 - DNA, 75 bp, synthetic construct
  source 1..75: mol_type = other DNA
aacggtgagccgtacaccccaatgaaacctatcgttgaaggtatgggtatggattgggcttcacagtttacgaaa

SEQ ID NO: 565034 - DNA, 75 bp, synthetic construct
  source 1..75: mol_type = other DNA
gtgaagctgctggcggatgcgccgctggtcgaagtggctgatggcgaatatgacgtgattgtgctgcctggtggc

SEQ ID NO: 565035 - DNA, 75 bp, synthetic construct
  source 1..75: mol_type = other DNA
gttcgcggcggtatcaaagtcaccactgccagcgtcgccagcgatggtaacctggcaattacctgctcgcgcggc

SEQ ID NO: 565036 - DNA, 75 bp, synthetic construct
  source 1..75: mol_type = other DNA
gttttaccccccgcgattatttaacgcattggttaagccagtgggttcgcgactacgggattgatggttttcggg

SEQ ID NO: 565037 - DNA, 75 bp, synthetic construct
  source 1..75: mol_type = other DNA
tcaattgatcttggtcatggtgatggcagaggacgatatattgaacaggtttattgtcagttgttaggctatgag

SEQ ID NO: 565038 - DNA, 75 bp, synthetic construct
  source 1..75: mol_type = other DNA
ttggcgtagcagctgcaatgcaggttgctcgttgttttggcctgaggacagaagaagcggtgcaatctgtgaaat

SEQ ID NO: 565039 - DNA, 75 bp, synthetic construct
  source 1..75: mol_type = other DNA
taaactggctgatccgcagcatgaaatgttgagtaacaaagcgctgggtatttctggcgcaagcagggatggcac

SEQ ID NO: 565040 - DNA, 75 bp, synthetic construct
  source 1..75: mol_type = other DNA
gcactggctgtctttcagaaacaacgccgggctgttgaataccgccttgctgtattgcgccaggaggaaaaggaa

SEQ ID NO: 565041 - DNA, 75 bp, synthetic construct
  source 1..75: mol_type = other DNA
gcactggctgtctttcagaaacaacgccggactgttgaataccgccttgctgtattacgccaggaggaaaaggaa

SEQ ID NO: 565042 - DNA, 75 bp, synthetic construct
  source 1..75: mol_type = other DNA
ggaagatggtggtccagcagtgaccggtagtaacgatgaatacagcctgacaattcctgatgttggtctggataa

SEQ ID NO: 565043 - DNA, 75 bp, synthetic construct
  source 1..75: mol_type = other DNA
ttgtcactgaaacaaggttatggattcgtccgtgaatacggcgacgataaagtgatggtcgtctgggcggggcaa

SEQ ID NO: 565044 - DNA, 75 bp, synthetic construct
  source 1..75: mol_type = other DNA
ctttgtgctgacagatcgtttcgaaaacggcgatcccagtaatgaccagagttacggacgtcataaagacggtat

SEQ ID NO: 565045 - DNA, 75 bp, synthetic construct
  source 1..75: mol_type = other DNA
gatggcaaattgatccggcagggctacgttattcactcaactggttctgggatcatttccagttgccgctgttta

SEQ ID NO: 565046 - DNA, 75 bp, synthetic construct
  source 1..75: mol_type = other DNA
acgatcccgtcacatgtaaggaacaaggtgtcaataacttcgcgcgtctggccgacgaaatggcaggcattattc

SEQ ID NO: 565047 - DNA, 75 bp, synthetic construct
  source 1..75: mol_type = other DNA
caacgtactgaacctcaccgttttggtagtacgctcggtcactatggcgtgggctatgggccgtatgttcagtta

SEQ ID NO: 565048 - DNA, 75 bp, synthetic construct
  source 1..75: mol_type = other DNA
ttaaaacaaagatttgctaaaggtattgtggaaatcgcaataccttcagttggcggtgtgcagaccatgatttgc

SEQ ID NO: 565049 - DNA, 75 bp, synthetic construct
  source 1..75: mol_type = other DNA
tattccgcgaactgtatccggcgctaaaacaaattcaatcgaactattccggcagatgtcatgactgcggttatg

SEQ ID NO: 565050 - DNA, 75 bp, synthetic construct
  source 1..75: mol_type = other DNA
ctggactaaaggccatgtagttaacccacgcaaagctaaaaaggcgttgccgggtaaaatcaccactgaacagca

SEQ ID NO: 565051 - DNA, 75 bp, synthetic construct
  source 1..75: mol_type = other DNA
cgtggaaagtattgaagagcttgattcatctcagataccgcaagcagtagagtacatccacagggtagtgcttga

SEQ ID NO: 565052 - DNA, 75 bp, synthetic construct
  source 1..75: mol_type = other DNA
cgggatatagatatttatgagcctgacgggccgacgaaccttctggcatgggaaaggcttaagaacaaagagttg

SEQ ID NO: 565053 - DNA, 75 bp, synthetic construct
  source 1..75: mol_type = other DNA
tatgggattatgccaaccgttcacaggcattattccgcgaactgtatccggcattaaaacaaattcaatcgaact

SEQ ID NO: 565054 - DNA, 75 bp, synthetic construct
  source 1..75: mol_type = other DNA
atgatgctggtggcgtgaatcgaacctatggggaccagtctcctgtcgatttttctgccatcaaagatgacctgt

SEQ ID NO: 565055 - DNA, 75 bp, synthetic construct
  source 1..75: mol_type = other DNA
ctccgcacggtttttgtcagtgtcgatgatgctggtggcgtgaatcgaacctatggggaccagtctcctgtcgat

SEQ ID NO: 565056 - DNA, 75 bp, synthetic construct
  source 1..75: mol_type = other DNA
cagcctccgttaccggacagcaaggaggctgaatggagtttacaggatttgcttttttataatgtctggccatgc

SEQ ID NO: 565057 - DNA, 75 bp, synthetic construct
  source 1..75: mol_type = other DNA
cgtatgttctccccggacagacagtctcagttcgtagaatctataaattactgctactgatgctgccggggaaag

SEQ ID NO: 565058 - DNA, 75 bp, synthetic construct
  source 1..75: mol_type = other DNA
acacacgagatgttgatattaatgagccagacggaccagcgaatctttccgcatggatgagacttaagaataaag

SEQ ID NO: 565059 - DNA, 75 bp, synthetic construct
  source 1..75: mol_type = other DNA
gagtacaaatcgctggctatgaacgcctcgcagcgctacatcaacccgctcggcttccgcgtcaccagttaccgc

SEQ ID NO: 565060 - DNA, 75 bp, synthetic construct
  source 1..75: mol_type = other DNA
aatccccgcacacctgctgacgcttaacgaggccactcacgaagtgcagcaggtcaaactgacccgcgatcaggc

SEQ ID NO: 565061 - DNA, 75 bp, synthetic construct
  source 1..75: mol_type = other DNA
taaaatcctcaacaacagtactggagtcagatatatctgcatcatggcagagatcttcccgctatgaaccccgtc

SEQ ID NO: 565062 - DNA, 75 bp, synthetic construct
  source 1..75: mol_type = other DNA
ccctgcccgcactgtggggaggagcagtatctgaaatttggcgatgagtccacgccttttgggcttaaatgggag

SEQ ID NO: 565063 - DNA, 75 bp, synthetic construct
  source 1..75: mol_type = other DNA
tcgccctgttttcaggggcgctgtatctggtgtcgctgcgtctggcctggcaggcagggcatgaacgggcacgtc

SEQ ID NO: 565064 - DNA, 75 bp, synthetic construct
  source 1..75: mol_type = other DNA
ttttttggtgttcaggaaccagttaaaccattaaatgctaaaaacggctcttatttcaaaaccatttgcagccac

SEQ ID NO: 565065 - DNA, 75 bp, synthetic construct
  source 1..75: mol_type = other DNA
gactaccgaagcggtaatgcgcctgcttagcgggcaaaaagaagatgcggaactggacgccgaaaccgcgtccat

SEQ ID NO: 565066 - DNA, 75 bp, synthetic construct
  source 1..75: mol_type = other DNA
aatatgtaccgctgccgttggatgaaaaacgggaatatcacactattgccgggctattgatggagtatttacagc

SEQ ID NO: 565067 - DNA, 75 bp, synthetic construct
  source 1..75: mol_type = other DNA
agaatgcctgcatatcatccctacacgagagaatgagggggaaaatggtgatatagggccactacgtccctttac

SEQ ID NO: 565068 - DNA, 75 bp, synthetic construct
  source 1..75: mol_type = other DNA
gttatcacaaccagtaccagcatctgcaacacagtgccaggcatcttctttacagcgtcagcgggaacaaggaga

SEQ ID NO: 565069 - DNA, 75 bp, synthetic construct
  source 1..75: mol_type = other DNA
attcatacatgtggtttgaaacaggcgacaacggcaatgaatatttcaaatggagaagcaaacaaagcaccacaa

SEQ ID NO: 565070 - DNA, 75 bp, synthetic construct
  source 1..75: mol_type = other DNA
acgttgcaggtggaaagccatcgcgtgcagaaggtgcagattattccgcataaggatggcgagatggagtacgag

SEQ ID NO: 565071 - DNA, 75 bp, synthetic construct
  source 1..75: mol_type = other DNA
ggccgtgggcgaaaaactcgatcaccaggttctgatggataaggtcgtgcattacacggcggcggtacctgacag

SEQ ID NO: 565072 - DNA, 75 bp, synthetic construct
  source 1..75: mol_type = other DNA
tggacccgtgacggtctgacgtttttcagcgcccggggtgatgaaattccgccgccgcgctccatcacgttccat

SEQ ID NO: 565073 - DNA, 75 bp, synthetic construct
  source 1..75: mol_type = other DNA
ccgtacggtgacacatcagacgcttggcgattacattcgtcaacgccgcctgctactggctgccgttgagttgcg

SEQ ID NO: 565074 - DNA, 75 bp, synthetic construct
  source 1..75: mol_type = other DNA
aaaaacacggtgttttccgggtgctgccggtaaaaggcgcatctgtctatggcaagccggtgatcaccatgccaa

SEQ ID NO: 565075 - DNA, 75 bp, synthetic construct
  source 1..75: mol_type = other DNA
gtgtgatccatcagtctgagcttgaccagagtaacgggcggtggatctgtgaaaacacgggcatgtggacccgtg

SEQ ID NO: 565076 - DNA, 75 bp, synthetic construct
  source 1..75: mol_type = other DNA
ccatacgtggctcaacgccaaaaattaaaggctcctgccagattgagaaagccgcaaatgaatcagcgcatttca

SEQ ID NO: 565077 - DNA, 75 bp, synthetic construct
  source 1..75: mol_type = other DNA
tcagtcgcaatcacaaccgccgacagaagaacagctgcgggcgcaattagtcacgccacaaaatgatcctgatca

SEQ ID NO: 565078 - DNA, 75 bp, synthetic construct
  source 1..75: mol_type = other DNA
tgatgcgacgtcgtttggcctgaaatgggagaagggtaaaccggaaacggtgtattacctgtgtgaacataatgg

SEQ ID NO: 565079 - DNA, 75 bp, synthetic construct
  source 1..75: mol_type = other DNA
gaacgctcgaaaaaacatgggctgttcagggtgatccccattaaaggtgcatccgtatacggaaagccggtggcc

SEQ ID NO: 565080 - DNA, 75 bp, synthetic construct
  source 1..75: mol_type = other DNA
aattttgcgaccaccatgactaaagcgcttgcgggtaagcaaccgaaagatgccaccctgacggcgctggccggg

SEQ ID NO: 565081 - DNA, 75 bp, synthetic construct
  source 1..75: mol_type = other DNA
atgacaaaatatacttttgcttttccgtggaatgccccacggtcggcaatagtcagtccatatcttacctacgac

SEQ ID NO: 565082 - DNA, 75 bp, synthetic construct
  source 1..75: mol_type = other DNA
actgagaagcgataaagccaaaaaagctcgctttcatgccgaggccattgacccggaaaaggggagcgctaccgg

SEQ ID NO: 565083 - DNA, 75 bp, synthetic construct
  source 1..75: mol_type = other DNA
gtcgagcgtgtgcgcctcatcattcgcgattatgcgtgggaggaagaccatcacgaactgagaagcgataaagcc

SEQ ID NO: 565084 - DNA, 75 bp, synthetic construct
  source 1..75: mol_type = other DNA
gttgaccttcaggacggcaaagccgtccctcggagttctgtcaataactgtacgggaagcgaaagcgatccaccg

SEQ ID NO: 565085 - DNA, 75 bp, synthetic construct
  source 1..75: mol_type = other DNA
ccgagaccgcgcacggtctgagcgttgaatttgccgccgtccatgatgccgctgacgccggtgactgggctggtt

SEQ ID NO: 565086 - DNA, 75 bp, synthetic construct
  source 1..75: mol_type = other DNA
ttggtggcgtggccgattacgacgcattgcggctgcatggcgcgaacacctgcacattgccgttggcaacgtcag

SEQ ID NO: 565087 - DNA, 75 bp, synthetic construct
  source 1..75: mol_type = other DNA
gcgcgcgatctgatgcagcaggccggaggctgtcagtacctgtatgactacgacaaagccgtagagagcgcgatc

SEQ ID NO: 565088 - DNA, 75 bp, synthetic construct
  source 1..75: mol_type = other DNA
ggtgacccgacagcgacggaaaaaggtcgtaatgtcgttgttaatcattgccaatgtgcatgtggctgtagggtt

SEQ ID NO: 565089 - DNA, 75 bp, synthetic construct
  source 1..75: mol_type = other DNA
gtaatattcgggaatatcatgatattcctgctgaaacgccgtatgcgccgggagaacagtttcagggaggggaat

SEQ ID NO: 565090 - DNA, 75 bp, synthetic construct
  source 1..75: mol_type = other DNA
gagaagcgataaagccaaaaaagcgcgttttcatgccgaggccattgacgcggaaaagggcagcgctaccggcta

SEQ ID NO: 565091 - DNA, 75 bp, synthetic construct
  source 1..75: mol_type = other DNA
aacgccgcacgcgcgaatttcttaaaggactggagctcgaagacgaagacggcaaccgcatcagtctgattgaaa

SEQ ID NO: 565092 - DNA, 75 bp, synthetic construct
  source 1..75: mol_type = other DNA
cggctatcgctcgtatgtttaacgatgtgtggtggcgtggtcgcctgcgtcgcattgcggctgcatggcgcgaac

SEQ ID NO: 565093 - DNA, 75 bp, synthetic construct
  source 1..75: mol_type = other DNA
ggtgacaaagaaatatgtcggcgaggatgaaattgccccggctatcacccgcatgtttaacgaggtgtggtggcg

SEQ ID NO: 565094 - DNA, 75 bp, synthetic construct
  source 1..75: mol_type = other DNA
accatgctgcagaacggcattgaccgcaatactgtcatgaaaatgaccggtctgactgaagatgacctggcacaa

SEQ ID NO: 565095 - DNA, 75 bp, synthetic construct
  source 1..75: mol_type = other DNA
tgcagaccgactatccaaatatcgcgcgtctgtttttgtttgcgaattcagtcaatgcgcatggtatttatatcc

SEQ ID NO: 565096 - DNA, 75 bp, synthetic construct
  source 1..75: mol_type = other DNA
attatgctggtgcgtgagcacttccctgaaatgccgatccatctctcggtacaggctaacgccgtgaactgggcg

SEQ ID NO: 565097 - DNA, 75 bp, synthetic construct
  source 1..75: mol_type = other DNA
caagggatcaagtggtctgatatagagtcactggttaaagcattaggcggagaaattaaggaaggaagaggttcg

SEQ ID NO: 565098 - DNA, 75 bp, synthetic construct
  source 1..75: mol_type = other DNA
gaaaagcgatagaggaaaaaatgcttcctcagctttcacagatttcatcttacaacgcggttcctgattttactg

SEQ ID NO: 565099 - DNA, 75 bp, synthetic construct
  source 1..75: mol_type = other DNA
atggcgaaactgataaatatatcagcgtccactgaggagagaatgacgccaggggagaggagggtggcttcacga

SEQ ID NO: 565100 - DNA, 75 bp, synthetic construct
  source 1..75: mol_type = other DNA
atgcgggtaagcgttaactttgcttacccgtggaatgccccacggtcggcaatagccagcccataccttacatat

SEQ ID NO: 565101 - DNA, 75 bp, synthetic construct
  source 1..75: mol_type = other DNA
tcgactcaggaagaaaaaaccagcgacaaggcaaaaattcacacacggaagggatgaacaaaacgactctataga

SEQ ID NO: 565102 - DNA, 75 bp, synthetic construct
  source 1..75: mol_type = other DNA
tggtaaaagttgttttaacggtcgatgggtgcgcggaacgtcaaaaggtgaaatctttgcggcagccccatcgca

SEQ ID NO: 565103 - DNA, 75 bp, synthetic construct
  source 1..75: mol_type = other DNA
atgtttaaaccggaactcctttccccggcgggaacgatgaaaaatatgcgttacgctttcgcttatggcgcagat

SEQ ID NO: 565104 - DNA, 75 bp, synthetic construct
  source 1..75: mol_type = other DNA
ctgcaccaacgcctgccgctgggagtacaacgtccaggaagggaaagaagatgacgttggcaacatcgtacacaa

SEQ ID NO: 565105 - DNA, 75 bp, synthetic construct
  source 1..75: mol_type = other DNA
gctgattatgtccgatccggggctgattatgctggtgcgtgagcacttccctgaaatgccgatccatctctcggt

SEQ ID NO: 565106 - DNA, 75 bp, synthetic construct
  source 1..75: mol_type = other DNA
ggttttcgccgtcaggttcaggacagcttcggtaaagaagcacaagaacgccataccctgacccacgaaattcgc

SEQ ID NO: 565107 - DNA, 75 bp, synthetic construct
  source 1..75: mol_type = other DNA
cgcccagcaaatcgccgatcgtgccagcaagctgtacgacaagatgcgtttgttcatcgatgacatgtccgcgat

SEQ ID NO: 565108 - DNA, 75 bp, synthetic construct
  source 1..75: mol_type = other DNA
atcacgacggtatgcgaattgcgttggatggcgtggccagtaaagcactgcgtctgcacgatgttgaaaaacaaa

SEQ ID NO: 565109 - DNA, 75 bp, synthetic construct
  source 1..75: mol_type = other DNA
ttcaggtaagtttctctacaacggccataatgcagtcggcaaacagactgtagttgtctgtgagggggcgttcga

SEQ ID NO: 565110 - DNA, 75 bp, synthetic construct
  source 1..75: mol_type = other DNA
gtacgtccagaacgcgctgatctcacaaggttgggcgccgaagaaggaagagatcgtgctggccagcaaggttga

SEQ ID NO: 565111 - DNA, 75 bp, synthetic construct
  source 1..75: mol_type = other DNA
gttacgtaatgtgatcatgatgtgggatagtgaaaagcaagctatacgcaacactatggccgcagccaggcgact

SEQ ID NO: 565112 - DNA, 75 bp, synthetic construct
  source 1..75: mol_type = other DNA
cacaccctgcaattattttattgctgatgagttaataaaaaacagacatgataatgaatacctccagacattaat

SEQ ID NO: 565113 - DNA, 75 bp, synthetic construct
  source 1..75: mol_type = other DNA
ataaaggcagcgtattttcgatcaagaaagttcatgtattacccgagtctctacctgcagcgttgacctctctcg

SEQ ID NO: 565114 - DNA, 75 bp, synthetic construct
  source 1..75: mol_type = other DNA
tgaacggccagcgagtgctgcaaagcgaagaagctggaaaatggaaaaatgacaatgttgatagagcgggcagca

SEQ ID NO: 565115 - DNA, 75 bp, synthetic construct
  source 1..75: mol_type = other DNA
cgccgttcgtcgcgccgaccgtaaactccgcatctgtatgcttcgtaccgttgccggtgatgaacacgccgcacg

SEQ ID NO: 565116 - DNA, 75 bp, synthetic construct
  source 1..75: mol_type = other DNA
ccccgtatctgtatgctccgcactgttgccggtgatgaacacgccgcacggctttccctcgttcgcgattacgtc

SEQ ID NO: 565117 - DNA, 75 bp, synthetic construct
  source 1..75: mol_type = other DNA
ggtcagtttacgccggggaccacgaatatttccatttacgacaagcagggcaatctggtcggtaaacttgataaa

SEQ ID NO: 565118 - DNA, 75 bp, synthetic construct
  source 1..75: mol_type = other DNA
gtgagcgagctgaaagagctaattaccgaattagattttgaacaatggttggatactgaaggtatcgtttatcga

SEQ ID NO: 565119 - DNA, 75 bp, synthetic construct
  source 1..75: mol_type = other DNA
gcaacggttaatatagctgcttatatctctgaactcttagaacggaattatattaaatatatttttggcgctcgt

SEQ ID NO: 565120 - DNA, 75 bp, synthetic construct
  source 1..75: mol_type = other DNA
atgagtgattcgcgactgctgccgaccggctcatcaccgcttgaagtcgccgccgcaaaagcctgtgtggaaatt

SEQ ID NO: 565121 - DNA, 75 bp, synthetic construct
  source 1..75: mol_type = other DNA
tgctgacacaactaaaacacagtgggcagaaataaacagggctattgagtacggtaaatctcagggcgtcaaagt

SEQ ID NO: 565122 - DNA, 75 bp, synthetic construct
  source 1..75: mol_type = other DNA
cgctttacgctgccgcaggcggtgaggctggtgaccaaaaacccggcccaggcactgaatcttcaggatcgcggg

SEQ ID NO: 565123 - DNA, 75 bp, synthetic construct
  source 1..75: mol_type = other DNA
cccaaaccgccagcacatcatccgcattatacgtttcgctttatcgatctctttgccggtattggaggcatccgt

SEQ ID NO: 565124 - DNA, 75 bp, synthetic construct
  source 1..75: mol_type = other DNA
tggatgaaaggtaagttagttaaatctgattgttctccagccatgaaccgtattggctggtcagaaggctgtaag

SEQ ID NO: 565125 - DNA, 75 bp, synthetic construct
  source 1..75: mol_type = other DNA
tggatgaaaggtaaattagttaaatctgattgttctccagccatgaatcgtattggctggtcagaaggttgtaag

SEQ ID NO: 565126 - DNA, 75 bp, synthetic construct
  source 1..75: mol_type = other DNA
gattcgagcaaccgggaaaagttacttttcgcattccagtctctgatacccaggcctatcgccagttcggcaatt

SEQ ID NO: 565127 - DNA, 75 bp, synthetic construct
  source 1..75: mol_type = other DNA
attcaggaaattccgggggatattttcgcagcggcggcaacttatgacggtgaagtcattaccatttatccggac

SEQ ID NO: 565128 - DNA, 75 bp, synthetic construct
  source 1..75: mol_type = other DNA
ctgaaccttgcgccggttaacttcgatgctctgttcatgaactatttacagcagcaggctggcgaaggtactgaa

SEQ ID NO: 565129 - DNA, 75 bp, synthetic construct
  source 1..75: mol_type = other DNA
gccgctcggctatgtcatcaacgtcacggagtggtgggagaccagcgacccgcccggcacattccggcttgatat

SEQ ID NO: 565130 - DNA, 75 bp, synthetic construct
  source 1..75: mol_type = other DNA
tacaggtgacattgattctggtgtttattggagcgctgggcgattttgccttttactctatcgccggcccgcgta

SEQ ID NO: 565131 - DNA, 75 bp, synthetic construct
  source 1..75: mol_type = other DNA
tgcgttttcatgttgcctgtccgcactgcggggaggagcagtaccttaaatttggcgataaagagacgtcgtttg

SEQ ID NO: 565132 - DNA, 75 bp, synthetic construct
  source 1..75: mol_type = other DNA
tgcaaaacccgctgttcttcaaggaaaacactcacatgctgtttggcgatgccaaggccagcgtggatgcaatcc

SEQ ID NO: 565133 - DNA, 75 bp, synthetic construct
  source 1..75: mol_type = other DNA
ttatgctcagcaacgacctgctgattgtgaccggtgcgctggtcggttcttcggggctatcctttcttacattat

SEQ ID NO: 565134 - DNA, 75 bp, synthetic construct
  source 1..75: mol_type = other DNA
gaagcctttctggtggataaaatcatcattatggggcgtcctgatgaggaagagacgctgttacgtgtggatgcg

SEQ ID NO: 565135 - DNA, 75 bp, synthetic construct
  source 1..75: mol_type = other DNA
tggacccgtgacggtctgacgtttttcagcgccgcggataatgaaattccgccgccgcgctccatcacgttccat

SEQ ID NO: 565136 - DNA, 75 bp, synthetic construct
  source 1..75: mol_type = other DNA
aatcaatggcgctcctatcgtgtcgaacctggtaaaacgatggcgcaactgttccgcgaccacggactgcccgct

SEQ ID NO: 565137 - DNA, 75 bp, synthetic construct
  source 1..75: mol_type = other DNA
gggccggatactggcaatgttggttggatcttgctggcgatggtcatcggtggcgcaattggtatccgcctggcg

SEQ ID NO: 565138 - DNA, 75 bp, synthetic construct
  source 1..75: mol_type = other DNA
gccctgcgtgccgcccgtttgtctgcggcggtaaagcgtttcaagacatcggagatgcttcgcttcattctggaa

SEQ ID NO: 565139 - DNA, 75 bp, synthetic construct
  source 1..75: mol_type = other DNA
ggacgcaaagattatcaacagctgccggggctgcgaaccctggattacgtgctgatgtttattcccgttgaaccc

SEQ ID NO: 565140 - DNA, 75 bp, synthetic construct
  source 1..75: mol_type = other DNA
tcgcgtcggtgcgtaaccatatccgtttgctgggacgcaaagattatcaacagctgccggggctgcgaaccctgg

SEQ ID NO: 565141 - DNA, 75 bp, synthetic construct
  source 1..75: mol_type = other DNA
gtacgcgctggctgccctgcggatcagtatttcgcgatggcaactgaatcttgattcactgctcgcgagcctact

SEQ ID NO: 565142 - DNA, 75 bp, synthetic construct
  source 1..75: mol_type = other DNA
caggtccgtgacatgtttgttaaagatgttccgcagggtgctgatctgctgaaagccgtggatgaggtgcaataa

SEQ ID NO: 565143 - DNA, 75 bp, synthetic construct
  source 1..75: mol_type = other DNA
ctttattaattgccggagtggctacattcagtacatcttctctggcggcacaatcattacgtttcggttatgaaa

SEQ ID NO: 565144 - DNA, 75 bp, synthetic construct
  source 1..75: mol_type = other DNA
ttttgtggggctggcggcggtgctggttggttttaatagctatctgcatcacgatgcggatatggctccgattct

SEQ ID NO: 565145 - DNA, 75 bp, synthetic construct
  source 1..75: mol_type = other DNA
aaaaatggttatggggatgcgtgtaaagtcagatcagtctacgtgctcagtaagtaacgggcgtatatccagcca

SEQ ID NO: 565146 - DNA, 75 bp, synthetic construct
  source 1..75: mol_type = other DNA
accggcggtcatcaaaccggagcggcaattattcttggattcggttcttcagcagattacgacggatttccttat

SEQ ID NO: 565147 - DNA, 75 bp, synthetic construct
  source 1..75: mol_type = other DNA
agtcatcctgtttacctctttctcagggagtttagtctccaggattcccggggcggttcacctctctctccggaa

SEQ ID NO: 565148 - DNA, 75 bp, synthetic construct
  source 1..75: mol_type = other DNA
tttatcgacaacttcgataaatacaccgacacccctgcgggtgccgcgctggtagcggctggtccgaagctgtaa

SEQ ID NO: 565149 - DNA, 75 bp, synthetic construct
  source 1..75: mol_type = other DNA
tcgacgccatcctcaacggttcgctggataacgcagaaactttcactctgccgatgtttaacctggcgatcccga

SEQ ID NO: 565150 - DNA, 75 bp, synthetic construct
  source 1..75: mol_type = other DNA
atattatatgtgaacaaaggttacgaactgaagacaaaagagatgaatacttgttgaatctgttagagaaagatc

SEQ ID NO: 565151 - DNA, 75 bp, synthetic construct
  source 1..75: mol_type = other DNA
cgcctgatatctgcttttgtgttaatacccgtcgtcatcgcggcgttgtttctgttgccgccggtggggttcgcc

SEQ ID NO: 565152 - DNA, 75 bp, synthetic construct
  source 1..75: mol_type = other DNA
cgcaagaactcgaggcttatggtatcagtgacgtacatgatatcgtttacaacccaagctacgatctgctgtatc

SEQ ID NO: 565153 - DNA, 75 bp, synthetic construct
  source 1..75: mol_type = other DNA
tcagctatgaacaactgacccggtttgcggaacaacgcatccgggaatgcaatctggacagccagggcgcgattt

SEQ ID NO: 565154 - DNA, 75 bp, synthetic construct
  source 1..75: mol_type = other DNA
aagctcgatgagaagcaggctaaagaagtgttgaaacagcacttcgaaaaatcggataaggaacagtggggatgg

SEQ ID NO: 565155 - DNA, 75 bp, synthetic construct
  source 1..75: mol_type = other DNA
atttttcgcaagcgctggcaatccgaccggatatacctgaagtattcaattacttaggcatatatttaacgcagg

SEQ ID NO: 565156 - DNA, 75 bp, synthetic construct
  source 1..75: mol_type = other DNA
aaggcactgcgccaggccgcgattcaggcaactattgaactgtcacacaaaccgatagtgctgattggcggttgt

SEQ ID NO: 565157 - DNA, 75 bp, synthetic construct
  source 1..75: mol_type = other DNA
tctggaagggctggcgcgtcatcgcggttctgcttttggtcgcacgttacaaccacaacttagccaggcgagttt

SEQ ID NO: 565158 - DNA, 75 bp, synthetic construct
  source 1..75: mol_type = other DNA
ctgattggcggttgtaccggcagcggtaaaacgctgttagtgcagcaacagccgaacggtgttgatctggaaggg

SEQ ID NO: 565159 - DNA, 75 bp, synthetic construct
  source 1..75: mol_type = other DNA
aggtaaggactctttgattgagtcatatgcagaaaaaagagaacatacttggtttgatttttcaggaatttggcc

SEQ ID NO: 565160 - DNA, 75 bp, synthetic construct
  source 1..75: mol_type = other DNA
tcaccacagaagcactgacaacagcggtacggtcacaggtctgagcggtctgaccctgcacagcgcggacgggct

SEQ ID NO: 565161 - DNA, 75 bp, synthetic construct
  source 1..75: mol_type = other DNA
tgctgcaggcaggcggggacgtcagcctgaccagcaggggagatatcactctcgacgcttttaccggcacgacgg

SEQ ID NO: 565162 - DNA, 75 bp, synthetic construct
  source 1..75: mol_type = other DNA
aacagtggcacgctcaccgggatagccgcgctgatgcttgccgcccgtatggatatggcatcccctcaacctgcg

SEQ ID NO: 565163 - DNA, 75 bp, synthetic construct
  source 1..75: mol_type = other DNA
caacagcggtaccctgctgggaacctccgggcttggcgttaagggcagttcactgctgcaaaatggtacagggcg

SEQ ID NO: 565164 - DNA, 75 bp, synthetic construct
  source 1..75: mol_type = other DNA
ttgcaggtacgcaggcagcacaacagaccatggtggtgaacgccagtgaaaagctcacccacagcgggaaaagca

SEQ ID NO: 565165 - DNA, 75 bp, synthetic construct
  source 1..75: mol_type = other DNA
ggaccacgcagggacagaatctcaccgtgcaggcggacaactgggcgaacagtggttccgtgctggcaaccggta

SEQ ID NO: 565166 - DNA, 75 bp, synthetic construct
  source 1..75: mol_type = other DNA
tcgcttctattgctatggctctaatgttaactgggtgtaaccagtcagagattgataaactctcacttatcggtg

SEQ ID NO: 565167 - DNA, 75 bp, synthetic construct
  source 1..75: mol_type = other DNA
aaggtgcgcctgtactccaggatcggccaggcgctgctggaagcgaaggaaagcggcagcgacccctatgccgcc

SEQ ID NO: 565168 - DNA, 75 bp, synthetic construct
  source 1..75: mol_type = other DNA
aaaaatgcggcagaaaaaaataaacaaatatatttttttgattcagggcggcttaaattttataccgctgtatta

SEQ ID NO: 565169 - DNA, 75 bp, synthetic construct
  source 1..75: mol_type = other DNA
aggcgaccattgaactgtcacaaaaaccgatagtgctgattggcggttgtaccggcagcggtaaaacgctgttag

SEQ ID NO: 565170 - DNA, 75 bp, synthetic construct
  source 1..75: mol_type = other DNA
atgcagatcggatagcagaagagatcgaaacggcagaacacattaagaagttacgtgacatgcgcaggaaaaaga

SEQ ID NO: 565171 - DNA, 75 bp, synthetic construct
  source 1..75: mol_type = other DNA
cctggacagactggtacataactcacacagagtggtccttcagggagagtccctgaggaaaaaccccccgacagt

SEQ ID NO: 565172 - DNA, 75 bp, synthetic construct
  source 1..75: mol_type = other DNA
gtactacctaagtctgggggattttgacagcgccacggcactgttcaaactggcggttgccaacaacgttcataa

SEQ ID NO: 565173 - DNA, 75 bp, synthetic construct
  source 1..75: mol_type = other DNA
ctactggacaatcgctcaggcaattgggacagcattgatcccgcgtggggaggccgggaggtggatttcattgag

SEQ ID NO: 565174 - DNA, 75 bp, synthetic construct
  source 1..75: mol_type = other DNA
acgcacaggctaacgaacgtgaaaaagggttaagttgcggcatgaacttatgtttgttcaaaccgttgaccctgg

SEQ ID NO: 565175 - DNA, 75 bp, synthetic construct
  source 1..75: mol_type = other DNA
ttatgacagattctttaaaaatataaatcaattgtttaataatttcaacgaatatcttgaagtcaatgggttgcc

SEQ ID NO: 565176 - DNA, 75 bp, synthetic construct
  source 1..75: mol_type = other DNA
tgcactggtcatcaactgggcgatgatcagtctggcgcatatgaaattccgtcgtgccaaacaagaacaaggcgt

SEQ ID NO: 565177 - DNA, 75 bp, synthetic construct
  source 1..75: mol_type = other DNA
gacaaacgtaaaagtgtttggcgagatggagttctggtttgccattatcaaagttatcgcggtggtagcgatgat

SEQ ID NO: 565178 - DNA, 75 bp, synthetic construct
  source 1..75: mol_type = other DNA
tcaagggctcgatgaattttacccggagcggtgttaatcgaaatgaagaatttgtcgaactgaactgcgattcgc

SEQ ID NO: 565179 - DNA, 75 bp, synthetic construct
  source 1..75: mol_type = other DNA
ctgttgatgcaatatgccgtcacctcaacgcaactggggaaaattacccttgaggttgatcaggatgaatcctct

SEQ ID NO: 565180 - DNA, 75 bp, synthetic construct
  source 1..75: mol_type = other DNA
gacgcgtctgaaacaggatgtctattatctggaaaaaccgcgtcgcaaaacagaagccctgatctttggttctca

SEQ ID NO: 565181 - DNA, 75 bp, synthetic construct
  source 1..75: mol_type = other DNA
atagcgccgcgtacgcaaatcttcatcattcgcgatcaggatcgcgaggtgctggtgaacaagaaactcaagcag

SEQ ID NO: 565182 - DNA, 75 bp, synthetic construct
  source 1..75: mol_type = other DNA
ccatgacacacgacgaaatggcagccaaatggatggaagacccggcttttaaagcagaatacgacgctatcgctg

SEQ ID NO: 565183 - DNA, 75 bp, synthetic construct
  source 1..75: mol_type = other DNA
ttatcagcaaatccggggatgggatgacctggtctggcaggagaaatcccacatgtcacccaatacggttatttc

SEQ ID NO: 565184 - DNA, 75 bp, synthetic construct
  source 1..75: mol_type = other DNA
gttgatgtgattaaccagttgaaggtacagaacgatcagatcgctgccggacagttgggcggacgccagcgttac

SEQ ID NO: 565185 - DNA, 75 bp, synthetic construct
  source 1..75: mol_type = other DNA
agtcttgagcaactatctcgtatctcgtcagagttcgaaccagcaagccaaaagcgcaggaaaatgtctctttaa

SEQ ID NO: 565186 - DNA, 75 bp, synthetic construct
  source 1..75: mol_type = other DNA
gaatgcaatctggacagccacggcgtaacttatctctgcgagtcagccaaagccggagccgtgctgatcttctgg

SEQ ID NO: 565187 - DNA, 75 bp, synthetic construct
  source 1..75: mol_type = other DNA
ctatgccggtggtcatgattatgcctggtggcgcggagcaattattgatgcattagcaaattataattgcaggaa

SEQ ID NO: 565188 - DNA, 75 bp, synthetic construct
  source 1..75: mol_type = other DNA
ggcaattatggggatagacaatattaatgaatctgatcgtatgaatatactgggaggcaataaagaacttatctt

SEQ ID NO: 565189 - DNA, 75 bp, synthetic construct
  source 1..75: mol_type = other DNA
atcgaggccgtcatgtcctgggatgccttcgccgagagcgtcaccgaagcgcagaagcttgcgcagcccgaggac

SEQ ID NO: 565190 - DNA, 75 bp, synthetic construct
  source 1..75: mol_type = other DNA
acaaaatggccgcacacggtgaattgccagatgtggaaatatctgacaaaggagtaaaaatctcccctctggata

SEQ ID NO: 565191 - DNA, 75 bp, synthetic construct
  source 1..75: mol_type = other DNA
cctcaatgaatgccataaagagacaggagatcattgacgccgaccatcagcgcctcagaaagctcatctggccgg

SEQ ID NO: 565192 - DNA, 75 bp, synthetic construct
  source 1..75: mol_type = other DNA
agacatcattgagcgcgttgaaataacgccagcaggatctagatggggggtcagacctgatctcttattctatat

SEQ ID NO: 565193 - DNA, 75 bp, synthetic construct
  source 1..75: mol_type = other DNA
tgagaacggagatgttaaaccttatcttgataatgtaaatgctcttggtggtccgggaaacaggttctcgacagt

SEQ ID NO: 565194 - DNA, 75 bp, synthetic construct
  source 1..75: mol_type = other DNA
ctcgtcaccatggagaaaaaccagtcttggaactatttcttcttttgttgacggaagcactcctgttactgagat

SEQ ID NO: 565195 - DNA, 75 bp, synthetic construct
  source 1..75: mol_type = other DNA
acagttaaaaaaaatgacacatcctgtcacaataagaacaacagatattgctaatttctggcactatcttgagtc

SEQ ID NO: 565196 - DNA, 75 bp, synthetic construct
  source 1..75: mol_type = other DNA
gattgaatctcgttgctcgctgcctttcttacatatagcggatgccaccgggcgagcgattcgtcgggccggaat

SEQ ID NO: 565197 - DNA, 75 bp, synthetic construct
  source 1..75: mol_type = other DNA
atgaaaactcaaataactttcgctgcgcttttgccagcattagcgtctttcataccgcttcatgctcatgcctcg

SEQ ID NO: 565198 - DNA, 75 bp, synthetic construct
  source 1..75: mol_type = other DNA
atgttaagtattaaagatttacacgtcagcgtggaagataaagctatcctgcgtggattaagcctcgacgttcgt

SEQ ID NO: 565199 - DNA, 75 bp, synthetic construct
  source 1..75: mol_type = other DNA
ctgatgaatcatcaacaaataaagatgttttcaaaagtgatatgacgtttactatcgatggaactaaggttctat

SEQ ID NO: 565200 - DNA, 75 bp, synthetic construct
  source 1..75: mol_type = other DNA
acgtggactggtatagggaagcgcccggcctggctaactgcaaaattggacgctggcattagcctggaagccatg

SEQ ID NO: 565201 - DNA, 75 bp, synthetic construct
  source 1..75: mol_type = other DNA
gacaggctacattcaatgctgaaaccatttatccagacacaatgtatgatgttgcaactaacagtttgacccctg

SEQ ID NO: 565202 - DNA, 75 bp, synthetic construct
  source 1..75: mol_type = other DNA
gagaaaatcgctctcctgaagatgccggaggatttattaacccgttcggtaaacgttggtttttccggcggcgag

SEQ ID NO: 565203 - DNA, 75 bp, synthetic construct
  source 1..75: mol_type = other DNA
cggttgagtttaaaggcaaagatttgcttgcgctgtcgccggaagatcgtgcaggtgaaggtatctttatggcct

SEQ ID NO: 565204 - DNA, 75 bp, synthetic construct
  source 1..75: mol_type = other DNA
acggtgcatgaatccttcgttgccaccattccgctggtgtctgcgaagcggagaaaatggaccccaatacccagt

SEQ ID NO: 565205 - DNA, 75 bp, synthetic construct
  source 1..75: mol_type = other DNA
gtgtggcgatggataacgctattccttcggtgaaagaagcagcgaactttgtcaccaaatccaaccttgaagatg

SEQ ID NO: 565206 - DNA, 75 bp, synthetic construct
  source 1..75: mol_type = other DNA
ttcctgaaagtgatgatgattgatgaacccgccatcctcgaccaggccatcgcgcgtattccgcaggaagtgaaa

SEQ ID NO: 565207 - DNA, 75 bp, synthetic construct
  source 1..75: mol_type = other DNA
tcaccctatgcgtgacggcaatcctcatcatctggatgctgcaggggtcactctgcgaaatccggatgagctttt

SEQ ID NO: 565208 - DNA, 75 bp, synthetic construct
  source 1..75: mol_type = other DNA
tcacgttctgcgtgacggcaatcctcatcatctggatgctacacggttcgctgtgtgaaatacggatgagcttct

SEQ ID NO: 565209 - DNA, 75 bp, synthetic construct
  source 1..75: mol_type = other DNA
atgtcgcaaaaatcgcttacggccattacgttctgcgtgacggcaatcctcatcatctggatgctacacggttcg

SEQ ID NO: 565210 - DNA, 75 bp, synthetic construct
  source 1..75: mol_type = other DNA
ttgtctggagatccagggggccagtctagctgggctgatgactcacttaatgttgatgaactgaatatcactctg

SEQ ID NO: 565211 - DNA, 75 bp, synthetic construct
  source 1..75: mol_type = other DNA
gggggcagcagtgtccaggttaaccaactgaacggtggacggatcactaatggtgcgattattgagcgcgaattg

SEQ ID NO: 565212 - DNA, 75 bp, synthetic construct
  source 1..75: mol_type = other DNA
cccagccagtttggcgttgggaataccctcaatttgcagcttaatgacgaagatttcacgatggcgcaacaaatc

SEQ ID NO: 565213 - DNA, 75 bp, synthetic construct
  source 1..75: mol_type = other DNA
gatatggcagcgccaccgcgttagatgcgcggactattcaggtgcgcgtaccaagtggcaacagttcccaggtcc

SEQ ID NO: 565214 - DNA, 75 bp, synthetic construct
  source 1..75: mol_type = other DNA
aataccgaaaaacacttctggcttttcgtggttttctttgttgccggattgcttttatggcactgtatgcatgct

SEQ ID NO: 565215 - DNA, 75 bp, synthetic construct
  source 1..75: mol_type = other DNA
acttccaccgtttggacgccaggggcaaaccattgacgtggtggtttcttccatgggaaatgccaaaagtctgcg

SEQ ID NO: 565216 - DNA, 75 bp, synthetic construct
  source 1..75: mol_type = other DNA
gccagatacaccgtttggtggcgggcagactgtggttactccacaaacgcagatcgatttacgccagagcggcgg

SEQ ID NO: 565217 - DNA, 75 bp, synthetic construct
  source 1..75: mol_type = other DNA
cccatacatcagaaattcaggctcgtagagggcgtaagaatcgctcagaagtgcaggctgttaaggggcgtaaag

SEQ ID NO: 565218 - DNA, 75 bp, synthetic construct
  source 1..75: mol_type = other DNA
aaaacaatgactggaaacgtgttgttgatgacaaggtcttccagagcggtgtatttaacgtagcgttgaataacg

SEQ ID NO: 565219 - DNA, 75 bp, synthetic construct
  source 1..75: mol_type = other DNA
gtgataacaggtgtctggaaatataggggcaaatccactgaatacggtactgatcgcgtaattgatgataattgg

SEQ ID NO: 565220 - DNA, 75 bp, synthetic construct
  source 1..75: mol_type = other DNA
ctcaaacgcttaataacatgctctcgcagttgggaattaccgttccgactggcactaatatgcaactcaaaaacg

SEQ ID NO: 565221 - DNA, 75 bp, synthetic construct
  source 1..75: mol_type = other DNA
gcaggccgaccgtattcgcgatctcaccagcgttcagggcgtacggcaaaactcgctgatcggttatgggctggt

SEQ ID NO: 565222 - DNA, 75 bp, synthetic construct
  source 1..75: mol_type = other DNA
gtgattaaatttctctctgcgttcattcttttgctggttgcgacggtggcgcaggccgaccgtattcgcgatctc

SEQ ID NO: 565223 - DNA, 75 bp, synthetic construct
  source 1..75: mol_type = other DNA
ctaccgtttcctggaaaaactctctcgcgaagtcggttctcatttccacgcactggaccgcaccacgctgtacac

SEQ ID NO: 565224 - DNA, 75 bp, synthetic construct
  source 1..75: mol_type = other DNA
agctgcgtatattgcaacagccgtatgctgtttggtctggcacaacaggggaacgcgccaaaagcgctggcgtct

SEQ ID NO: 565225 - DNA, 75 bp, synthetic construct
  source 1..75: mol_type = other DNA
tatccactgggtaactggatctgcctgctgtttatggcggcggtactggtgattatgctgatgacgccggggatg

SEQ ID NO: 565226 - DNA, 75 bp, synthetic construct
  source 1..75: mol_type = other DNA
cgaaagcaactaaccaggttatctaccgcatcctgattttctacattggttcgttagccgttctgctctcgctga

SEQ ID NO: 565227 - DNA, 75 bp, synthetic construct
  source 1..75: mol_type = other DNA
tgctggtggtcttgatgcgttccagcgttttgtgaagcgtctgcccgaaggatgtgaactgcgcgtgtgcaacgt

SEQ ID NO: 565228 - DNA, 75 bp, synthetic construct
  source 1..75: mol_type = other DNA
gttggcgctgatttgcaggaaagcgaccgtttgtatcgttactccataaccaatcgtcccgaccttaacaggatg

SEQ ID NO: 565229 - DNA, 75 bp, synthetic construct
  source 1..75: mol_type = other DNA
cgctaacgctaacgattgacgcgctcaatatctcattggctgatacactacagaaatgcagggaggccagcagca

SEQ ID NO: 565230 - DNA, 75 bp, synthetic construct
  source 1..75: mol_type = other DNA
gcctgatggtgttgaggcggatcgttccggtgatgatttaattctgcgtaaaaaggaagaagatactgaggtccg

SEQ ID NO: 565231 - DNA, 75 bp, synthetic construct
  source 1..75: mol_type = other DNA
ctgctcctgccaagagctttaatgtgtcattggtgaactgcgacactactactaatagtattacctacaacatcg

SEQ ID NO: 565232 - DNA, 75 bp, synthetic construct
  source 1..75: mol_type = other DNA
taaaacagcagatgcgaatggctctaaagttactccgggatcagtttccgctagaggtgtgatgaccattaaagc

SEQ ID NO: 565233 - DNA, 75 bp, synthetic construct
  source 1..75: mol_type = other DNA
gctcaggccattactggccgtgccccgttcggatgaaccggacacgcgcaagctgaaccgggcactgacggacgc

SEQ ID NO: 565234 - DNA, 75 bp, synthetic construct
  source 1..75: mol_type = other DNA
gacgtccccgcgacccttgccgacgctggcgcacaggcagactttgccggtgccctgcatttttggctcgcgtgg

SEQ ID NO: 565235 - DNA, 75 bp, synthetic construct
  source 1..75: mol_type = other DNA
gatacggttgacgcgcaggagaaggccgcgctggaccatgcgaaggcgctggttgcggaagccgaagcgaagcag

SEQ ID NO: 565236 - DNA, 75 bp, synthetic construct
  source 1..75: mol_type = other DNA
ccgtgctgtttgatatggttattgccatcagcgtggggattgttctggcatcgctgctgtttatgcgtcgtatcg

SEQ ID NO: 565237 - DNA, 75 bp, synthetic construct
  source 1..75: mol_type = other DNA
tctacccggtcattaataacgctactgttaacggcgtgatttctacctactatctggacgacggtatttctacca

SEQ ID NO: 565238 - DNA, 75 bp, synthetic construct
  source 1..75: mol_type = other DNA
acttcagcgcctataccgatgctaactacctcggtggtggtgacgtagatcaagactggtccgcgaatgtgggtg

SEQ ID NO: 565239 - DNA, 75 bp, synthetic construct
  source 1..75: mol_type = other DNA
tttaccagagcggtctgttcaatgtgaccctgaacaccggttcacagtgggataccaccaaaacttctctgattg

SEQ ID NO: 565240 - DNA, 75 bp, synthetic construct
  source 1..75: mol_type = other DNA
ttcggtgaaagaagcggcgaactttgtcaccaaatccaacctggaagatggagtggcgtttgcaatcgaaaagta

SEQ ID NO: 565241 - DNA, 75 bp, synthetic construct
  source 1..75: mol_type = other DNA
ttatggtgccaaaagtggtaacggacatattgccgtattgttatcgacagatgaacttagtggcgcagctgaaga

SEQ ID NO: 565242 - DNA, 75 bp, synthetic construct
  source 1..75: mol_type = other DNA
catcatctggatgttgcacggttcgctgtgcgaaatacggatgagcttctggggagcggagtttgcggcgttctt

SEQ ID NO: 565243 - DNA, 75 bp, synthetic construct
  source 1..75: mol_type = other DNA
tgttttttgctgccgctgaaggcttattcacggacctggagtcacgtcttgaaggcaaacggattgtgattctga

SEQ ID NO: 565244 - DNA, 75 bp, synthetic construct
  source 1..75: mol_type = other DNA
actggcaggactgctggtcgcgacactcatgtcaggtgtctttttgatcctgatggggctggcacgttttggacg

SEQ ID NO: 565245 - DNA, 75 bp, synthetic construct
  source 1..75: mol_type = other DNA
catcagcgtggggatcgtgctggcatcgctgctgtttatgcgtcgtatcgcacgtatgactcgcctggcaccggt

SEQ ID NO: 565246 - DNA, 75 bp, synthetic construct
  source 1..75: mol_type = other DNA
gggtactcagttcagcttcaccaagaacttcagcgcctataccgatgctaactacctcggtggtggtgacgtaga

SEQ ID NO: 565247 - DNA, 75 bp, synthetic construct
  source 1..75: mol_type = other DNA
ggagtgtatgacgaccgattgtgctgctggccgtgatacagggtatgtctatgatcgtctggcgctgactgttga

SEQ ID NO: 565248 - DNA, 75 bp, synthetic construct
  source 1..75: mol_type = other DNA
tgatgtagatactaacggttgggatggtactgatcgcctggatctgaccctgaataatggcagcaagtgggttgg

SEQ ID NO: 565249 - DNA, 75 bp, synthetic construct
  source 1..75: mol_type = other DNA
gtggatctcggacacgaactccgtgacttcatagaatctctcattgaatcaggtgattatcgtacgcagagtgag

SEQ ID NO: 565250 - DNA, 75 bp, synthetic construct
  source 1..75: mol_type = other DNA
ctgttatgtctaacagcttcggcttcggcggcaccaacgccacgctggtaatgcgcaagctgaaaagattaattc

SEQ ID NO: 565251 - DNA, 75 bp, synthetic construct
  source 1..75: mol_type = other DNA
ctgcgtgaaggacgctcagggatcactttctctcaggagctgaaggattccggcatgcgtagccacgtctggggc

SEQ ID NO: 565252 - DNA, 75 bp, synthetic construct
  source 1..75: mol_type = other DNA
gctgtgctgggaaatggcgtgcgaatttgacgcgatgggcgcgctgtctaccaaatacaatgacaccccggaaaa

SEQ ID NO: 565253 - DNA, 75 bp, synthetic construct
  source 1..75: mol_type = other DNA
ccggccgcacgttataccgccgtggtcagacggcatcttgcccggttccaccgggataatttcctgaatccgtct

SEQ ID NO: 565254 - DNA, 75 bp, synthetic construct
  source 1..75: mol_type = other DNA
ccagccctctttgttgccgccttctttattaccgcagacagtggcagccattgcccctgaacctggttttatctg

SEQ ID NO: 565255 - DNA, 75 bp, synthetic construct
  source 1..75: mol_type = other DNA
gaacacggctttatcgccccgagcatcaacattgaggagctggacgagcaggcggcgggtctgaacatcgtgacc

SEQ ID NO: 565256 - DNA, 75 bp, synthetic construct
  source 1..75: mol_type = other DNA
tacgaaatggatggaatcgtcgtcaatcaagatgaggagtaataaaggtacagcaaccttaacaaaaattgcttt

SEQ ID NO: 565257 - DNA, 75 bp, synthetic construct
  source 1..75: mol_type = other DNA
atggtgacctttactcgcgctgcaacaaacgcacttgcagcaaagttacaaaagcgattgagcaagaaggatctt

SEQ ID NO: 565258 - DNA, 75 bp, synthetic construct
  source 1..75: mol_type = other DNA
ctatacgagtatagttggagacgatgatcaggccatctactccttcagatcctcaggaggagtcaaaatatttca

SEQ ID NO: 565259 - DNA, 75 bp, synthetic construct
  source 1..75: mol_type = other DNA
ttaccagaataatccgcgcgttggcctgattgcaggttctggcggcggttccccgcgtttccaggtgttcggcgc

SEQ ID NO: 565260 - DNA, 75 bp, synthetic construct
  source 1..75: mol_type = other DNA
atttatgggatcagggtgataaacctgttccgccgctgcgccagttattctggcgtcatttacgtcgtcacggcc

SEQ ID NO: 565261 - DNA, 75 bp, synthetic construct
  source 1..75: mol_type = other DNA
ttatcggtgccggcattgcgggcaccgcttgtgcgttacgctgcgcgcgggcaggtttatccgttctgttactgg

SEQ ID NO: 565262 - DNA, 75 bp, synthetic construct
  source 1..75: mol_type = other DNA
catgttacgagcgtagccccgggagctggatatcggctgcggggtgttatcaccatccggcaggcggcaaatcag

SEQ ID NO: 565263 - DNA, 75 bp, synthetic construct
  source 1..75: mol_type = other DNA
gcaatatcacgtcaacgctgaatatttcgcaacaaacgttaaagatccagaaattcaacattatgtacaagctca

SEQ ID NO: 565264 - DNA, 75 bp, synthetic construct
  source 1..75: mol_type = other DNA
cttccgtgctcgtatggctactaaaaatggtcgtcagggtctggcacgtcgtcgtgctaaaggccgcgctcgtct

SEQ ID NO: 565265 - DNA, 75 bp, synthetic construct
  source 1..75: mol_type = other DNA
caaaaggaagttgccagtgggaagaccaatgcccaacccatttcggtgattcagattgatgatcctaacaatccc

SEQ ID NO: 565266 - DNA, 75 bp, synthetic construct
  source 1..75: mol_type = other DNA
atgaaaaagatcatttcattaggttcattactggcagcttcattttctatgccttcttttgctgctgaatcaggt

SEQ ID NO: 565267 - DNA, 75 bp, synthetic construct
  source 1..75: mol_type = other DNA
gctgattacaaggggttggcgagaatagccgctagctatgccgggaaaaatacagaaggtgatataacttttaat

SEQ ID NO: 565268 - DNA, 75 bp, synthetic construct
  source 1..75: mol_type = other DNA
actatattgaacaacgattcggacaaggatgtaaataatgaaaaggatgacatattcgaaacgataacggctaag

SEQ ID NO: 565269 - DNA, 75 bp, synthetic construct
  source 1..75: mol_type = other DNA
catggagccttggcgcaggtgtccgctatgacgtcaccccggatatcgcgctggacctcagctatcgctatcttg

SEQ ID NO: 565270 - DNA, 75 bp, synthetic construct
  source 1..75: mol_type = other DNA
tatgacgtcacagcagacagccatgctggcaccggctgcggattatatctggacagagccccggaggcgcgaatg

SEQ ID NO: 565271 - DNA, 75 bp, synthetic construct
  source 1..75: mol_type = other DNA
gggaattgctcaggtcaatctgggctggaacgggcaccgtttctcctccacatgggcagcatttgaaccatacat

SEQ ID NO: 565272 - DNA, 75 bp, synthetic construct
  source 1..75: mol_type = other DNA
ttgaagtgggtaaagacaaatgggcgtttaatcgcgaagaggtgatgctgacttgccgaccgggtaatgctttgt

SEQ ID NO: 565273 - DNA, 75 bp, synthetic construct
  source 1..75: mol_type = other DNA
tataaatacggtaaaaacaaactaaagaaaggagtattcagagcaacagtcatgatagatatttattatatataa

SEQ ID NO: 565274 - DNA, 75 bp, synthetic construct
  source 1..75: mol_type = other DNA
cactcaataacctgacagacaaacgctaccgtacagcacagaaactattcctgcagcaggttttaatgcagctat

SEQ ID NO: 565275 - DNA, 75 bp, synthetic construct
  source 1..75: mol_type = other DNA
ggatacctgtaagcaatgggccgaaaagacaggctggcaaaatatgataaatcgagctgcggcgatgtgtctggg

SEQ ID NO: 565276 - DNA, 75 bp, synthetic construct
  source 1..75: mol_type = other DNA
gattcttacgaacaactaccatcaaaaattgaagatttaattatcggattttgcagaaatgaaggccactcgaaa

SEQ ID NO: 565277 - DNA, 75 bp, synthetic construct
  source 1..75: mol_type = other DNA
tgcttcaggcatcgagacaacgtaacagatacaactcctacagctacacagacacccccaccagccacgaagtac

SEQ ID NO: 565278 - DNA, 75 bp, synthetic construct
  source 1..75: mol_type = other DNA
ttcttgaagaatccaagagacgcaacagacacaacggttacagctacacagacacccccaccagctacgaagtcc

SEQ ID NO: 565279 - DNA, 75 bp, synthetic construct
  source 1..75: mol_type = other DNA
ttgccgttgggaatattgagccaatggaaaacgagcaaccagatttcgagtttgacccgtatttagttacagagg

SEQ ID NO: 565280 - DNA, 75 bp, synthetic construct
  source 1..75: mol_type = other DNA
ttctgtagaagtgaaggccacccgaaatacaacaaaaaactattttatcttctaaagaatcttgacgaaattaac

SEQ ID NO: 565281 - DNA, 75 bp, synthetic construct
  source 1..75: mol_type = other DNA
taaagaatcttgatgaaattaactcagctaccgtgacaaattatcttcagcgacaagcaaccagacttagctacg

SEQ ID NO: 565282 - DNA, 75 bp, synthetic construct
  source 1..75: mol_type = other DNA
ttgcagaagtgaaggtcacccaaaatacaacagaaagctattttacattttgaagaatcttgatgaaattaacgc

SEQ ID NO: 565283 - DNA, 75 bp, synthetic construct
  source 1..75: mol_type = other DNA
tgcttcaggcatcaagagaacgcaacaagcacaactcctacgcttacacagacactcccaccagctacgaattac

SEQ ID NO: 565284 - DNA, 75 bp, synthetic construct
  source 1..75: mol_type = other DNA
agttcttaatcttcatttcagtaaaccggtgacaggacagtcagtctggcgggcagggatgacggtgattatccg

SEQ ID NO: 565285 - DNA, 75 bp, synthetic construct
  source 1..75: mol_type = other DNA
gttatcgagacaatcaatcatcatgtggaagtgggcaatattagccttacaaccagtgaaccagattttgaattt

SEQ ID NO: 565286 - DNA, 75 bp, synthetic construct
  source 1..75: mol_type = other DNA
cggaagttggaaatatcagccttacaaccagtgaaccagactttgaatttgacgtatacgcacaagcagaggaat

SEQ ID NO: 565287 - DNA, 75 bp, synthetic construct
  source 1..75: mol_type = other DNA
ttcgaagccttgataagattagctcaagcacagtgacgagccatcttcaaagacaagcaaccagacttagctatg

SEQ ID NO: 565288 - DNA, 75 bp, synthetic construct
  source 1..75: mol_type = other DNA
atgcaggattcagaatttagagcgatgcttcaggcatcaagagaacgcaacaagcacaactcctacgcttacaca

SEQ ID NO: 565289 - DNA, 75 bp, synthetic construct
  source 1..75: mol_type = other DNA
agcctatgaacagccagaccgcaaacgcagcattgcggcggatggggtttggcgggattctggtttctcacggta

SEQ ID NO: 565290 - DNA, 75 bp, synthetic construct
  source 1..75: mol_type = other DNA
ctggaccatacccgccggacgcatgaagatgcgccgcgaccacgttatcccgctttgtgaccaggctatggcagt

SEQ ID NO: 565291 - DNA, 75 bp, synthetic construct
  source 1..75: mol_type = other DNA
caccaccgcgattatgttttcccgagtctgaaagacccacagcagccgatgaacagccagacagcaaacgcagca

SEQ ID NO: 565292 - DNA, 75 bp, synthetic construct
  source 1..75: mol_type = other DNA
acacaggagactcgggaaaaggttgaaatagaaaaaaggttcgcaaatctgattaagtggatggagttgtcgtcg

SEQ ID NO: 565293 - DNA, 75 bp, synthetic construct
  source 1..75: mol_type = other DNA
gggtcatcattgaaaatgcaaatgctaataatatggttattgcagcaccgggatctggaaagtcattcacgatga

SEQ ID NO: 565294 - DNA, 75 bp, synthetic construct
  source 1..75: mol_type = other DNA
atcgcagataacgggaaagagttcccaggaaacttcgacaaagcaccgcaggaatccgctagcaagccctatgga

SEQ ID NO: 565295 - DNA, 75 bp, synthetic construct
  source 1..75: mol_type = other DNA
aacatagatccgaaagctcaagccgttcatggcatttcattggaacagctcgcagctgaacctttgttgtcaaat

SEQ ID NO: 565296 - DNA, 75 bp, synthetic construct
  source 1..75: mol_type = other DNA
tgacatcaataccgccgccaatgttcgaaaggcattccccaccccgaccaaaaagcacatgccaactattcgacc

SEQ ID NO: 565297 - DNA, 75 bp, synthetic construct
  source 1..75: mol_type = other DNA
agccagcgtatcaatgaagttatggattacgccctcaattctgggctggtatctgtaaaccccgcagcacgaatc

SEQ ID NO: 565298 - DNA, 75 bp, synthetic construct
  source 1..75: mol_type = other DNA
ccggaactgacccgcaggaccatgagaagaaaaaacgagaggcagaggcccgaagacaagggaacacgttcgaaa

SEQ ID NO: 565299 - DNA, 75 bp, synthetic construct
  source 1..75: mol_type = other DNA
ctgtgggctaccgaggatgggaagcgcccacgcctggaagagctggcattctcacttgggttcacttacgaccgt

SEQ ID NO: 565300 - DNA, 75 bp, synthetic construct
  source 1..75: mol_type = other DNA
catgccaaagcacatagtgccttatatgacacaaacttaatgatgcaatgcttctttaaggcacgtaataagtac

SEQ ID NO: 565301 - DNA, 75 bp, synthetic construct
  source 1..75: mol_type = other DNA
atgaccactattaccaaagaacgtatcgaattattcattaaaaatccgcttgaaaacgggcttacccgtggcgaa

SEQ ID NO: 565302 - DNA, 75 bp, synthetic construct
  source 1..75: mol_type = other DNA
gttcactgacggtgataacgccaaatgtgccgcgtattacacggcggaagacaacgcgctggcgcatgactggtc

SEQ ID NO: 565303 - DNA, 75 bp, synthetic construct
  source 1..75: mol_type = other DNA
atgagtaataaatattgccaggagctggtggaactgcatcagtggcgcacgccggacaacattttctggggaatt

SEQ ID NO: 565304 - DNA, 75 bp, synthetic construct
  source 1..75: mol_type = other DNA
acgccgttgccgcgggcatcgcctgggaagatgcaggggcaaacaccaccgttgttgaagttaagatcaatgcct

SEQ ID NO: 565305 - DNA, 75 bp, synthetic construct
  source 1..75: mol_type = other DNA
aaggtaaagggttatttcaattcttttacatgaacggtgttgagggggtatgtgagccgtcacactggatgccgc

SEQ ID NO: 565306 - DNA, 75 bp, synthetic construct
  source 1..75: mol_type = other DNA
gagccatctgacgtttacgcgcttgggcgaacagctggctggaacgcctgccgtgctgccatgcttaagggagat

SEQ ID NO: 565307 - DNA, 75 bp, synthetic construct
  source 1..75: mol_type = other DNA
ccggaagatgcagagcatattccttttattcgcgggcgtattggttttgaactgcctgactggtttatcccgaag

SEQ ID NO: 565308 - DNA, 75 bp, synthetic construct
  source 1..75: mol_type = other DNA
ccggaagatgcagaccatattgcttttattcgcgggcgtattggttttgaactgcctgactggtttatcccgaag

SEQ ID NO: 565309 - DNA, 75 bp, synthetic construct
  source 1..75: mol_type = other DNA
atgaccactattaccaaagaacgtatcaaattattcattaaaaatccgcttgataacggacttactcgtggcgaa

SEQ ID NO: 565310 - DNA, 75 bp, synthetic construct
  source 1..75: mol_type = other DNA
atgagtaataaatattgccaggcgctggtggaactgcggaacaaaccagcccatgaactgaaggaagtgggtgat

SEQ ID NO: 565311 - DNA, 75 bp, synthetic construct
  source 1..75: mol_type = other DNA
ccggaagatgcggatcatatttcttttattcgcgggcgtattggttttgaactgcctgactggtttatcccgaag

SEQ ID NO: 565312 - DNA, 75 bp, synthetic construct
  source 1..75: mol_type = other DNA
ccggaagatgctgaacatatttcttttattcgcgggcgtattggttttgaactgcctgactggtttatcccgaag

SEQ ID NO: 565313 - DNA, 75 bp, synthetic construct
  source 1..75: mol_type = other DNA
tcgccagttgcgggcaaagaaatttaacactaacgataacggacgaatgatcctttcgcagacggttgatcagga

SEQ ID NO: 565314 - DNA, 75 bp, synthetic construct
  source 1..75: mol_type = other DNA
ggcgcagcgttgctgttcagcggcggaatctgtgatgacttacccggcgcgcatttctttatactaatcaacaaa

SEQ ID NO: 565315 - DNA, 75 bp, synthetic construct
  source 1..75: mol_type = other DNA
atggcggcgacgtctgccgtacgctggtggctaacggcgcgattcccctcattcctggtttgtggttagtgcccg

SEQ ID NO: 565316 - DNA, 75 bp, synthetic construct
  source 1..75: mol_type = other DNA
atccgctggatcaaagccctaacgtcaaacgcaaagcgaagtcggtcacggagctggcgcattctgtctttcctg

SEQ ID NO: 565317 - DNA, 75 bp, synthetic construct
  source 1..75: mol_type = other DNA
cacaccgacaggccagcgcatctgggaagagttacagagcggcaaatggggtgaaatcgccccgttcaccgtcac

SEQ ID NO: 565318 - DNA, 75 bp, synthetic construct
  source 1..75: mol_type = other DNA
atttatgggatcagggtgataaacctgttccaccgctgcgccagttattctggcatcatttacgtcgtcacggcc

SEQ ID NO: 565319 - DNA, 75 bp, synthetic construct
  source 1..75: mol_type = other DNA
gatgcactgtatgaagaaaacggcagagtctgtggcgttatttgtggtgacgatattctccgcgcccgttatgtg

SEQ ID NO: 565320 - DNA, 75 bp, synthetic construct
  source 1..75: mol_type = other DNA
gtgtaatagactcaggtgtaggtggattgacatcggtaaaggaaataattaatttgcttcctggtgaagatatta

SEQ ID NO: 565321 - DNA, 75 bp, synthetic construct
  source 1..75: mol_type = other DNA
taataaaaaaattgaacccaacaataaatatatttggagaaccaagcaaaaatcttgcaatgttaattgaggaag

SEQ ID NO: 565322 - DNA, 75 bp, synthetic construct
  source 1..75: mol_type = other DNA
aacgggaccgcctatcttctcgatcatcaggggcgtgacgacaacgaacagatctaccgtaatctgcaattacat

SEQ ID NO: 565323 - DNA, 75 bp, synthetic construct
  source 1..75: mol_type = other DNA
gcgattttcaacattattgccactgacgttgctgtttattgccattttttatggcggcgacgtctgccgtacgct

SEQ ID NO: 565324 - DNA, 75 bp, synthetic construct
  source 1..75: mol_type = other DNA
cagaaattaccgctatctctgcggcgggaggcagtccggcgcgtttgtacaaagccgttctttacctggcgatac

SEQ ID NO: 565325 - DNA, 75 bp, synthetic construct
  source 1..75: mol_type = other DNA
aaaccgaccgttatgttgcacaacggcaccgcctatcttctcgatcatcaggggcgtgacgacaacgaacagatc

SEQ ID NO: 565326 - DNA, 75 bp, synthetic construct
  source 1..75: mol_type = other DNA
attgtcatttaataaagtaacctctgaattcaaatcggggagtgattattcttttgtaaatggagctgtcacctt

SEQ ID NO: 565327 - DNA, 75 bp, synthetic construct
  source 1..75: mol_type = other DNA
gcggcaagttgtaaccacaccgcaaaattcaggcggcgcagaactacctaaaggcgcaaagattttcaaaaagat

SEQ ID NO: 565328 - DNA, 75 bp, synthetic construct
  source 1..75: mol_type = other DNA
atcagtgaaaagagtcacggcagagaagaaatccgtcttcatattgtttgcgatgtccctgatgagcttattgat

SEQ ID NO: 565329 - DNA, 75 bp, synthetic construct
  source 1..75: mol_type = other DNA
gtttttatcgatggtctccccgcagcccgtcagggagatccgctgacgccgcatgataaaccgaagcatccacct

SEQ ID NO: 565330 - DNA, 75 bp, synthetic construct
  source 1..75: mol_type = other DNA
acaacggcctaccggttcatacctacctggctgaagcccagctaagtagcgaattgcaggatgaacatcctgaac

SEQ ID NO: 565331 - DNA, 75 bp, synthetic construct
  source 1..75: mol_type = other DNA
gaattgcaggatgaacatccagagcagccgtcaatggatgagctggcgcagacgatccgcaagcaactccaggca

SEQ ID NO: 565332 - DNA, 75 bp, synthetic construct
  source 1..75: mol_type = other DNA
tgaattaccgagcgcctgagcgccatcaaagagaagtacggtccggatgccatccagacgaccggctcctcgcgt

SEQ ID NO: 565333 - DNA, 75 bp, synthetic construct
  source 1..75: mol_type = other DNA
tctggttaaaaccgttcgttccggtaatgcgtatgcggatcgtatcagcgccatgctgacctctccggcaatgac

SEQ ID NO: 565334 - DNA, 75 bp, synthetic construct
  source 1..75: mol_type = other DNA
gatgcgtcgactggcaattcacagcaacgctgaaatgtatgcatggataaatagcgcgcagggtgcaagagaact

SEQ ID NO: 565335 - DNA, 75 bp, synthetic construct
  source 1..75: mol_type = other DNA
aggatggggcatcaaccagatagcttcattgcttaagaaaagtaataaaactatcagcgcccaaaaaaacagtgc

SEQ ID NO: 565336 - DNA, 75 bp, synthetic construct
  source 1..75: mol_type = other DNA
ggtggggcacgtaaccaaagatggttcgctggcaggccctaaagtgctggaacactgtatcgactgctcggtgct

SEQ ID NO: 565337 - DNA, 75 bp, synthetic construct
  source 1..75: mol_type = other DNA
ttatggcggtagcgggttctcttattgttctgtatgcaggttctgcgggtgtccgctggattttgcgtatggttc

SEQ ID NO: 565338 - DNA, 75 bp, synthetic construct
  source 1..75: mol_type = other DNA
ctatgctgacttctcctgtgatgtcggaaacgcaagattcaaattatcagtctgtcgttttgaccatttctgaac

SEQ ID NO: 565339 - DNA, 75 bp, synthetic construct
  source 1..75: mol_type = other DNA
cctggctgaagcccagctaagtagcgaattacaggatgaacatccagagcagccgtcaatggatgagctggcgca

SEQ ID NO: 565340 - DNA, 75 bp, synthetic construct
  source 1..75: mol_type = other DNA
atgcttgagcagcacgccattgcaataccgcattgtgaggcgattcatgctaagtcgtcagccatttatctgtta

SEQ ID NO: 565341 - DNA, 75 bp, synthetic construct
  source 1..75: mol_type = other DNA
atcatgctggaacagcacgccattgcaataccgcactgcgaggcgattcatgcaaaaacgtcagccatttatctg

SEQ ID NO: 565342 - DNA, 75 bp, synthetic construct
  source 1..75: mol_type = other DNA
aaaataaatgctcatggtattcctgtttatctctgtgaagcatgcggaaatcctgttccggaagcccggcggaaa

SEQ ID NO: 565343 - DNA, 75 bp, synthetic construct
  source 1..75: mol_type = other DNA
cgggagtggaaagtatattttcaatatgctggacgtgatggaaacgagagaaggctattgtaatctgtccgatgc

SEQ ID NO: 565344 - DNA, 75 bp, synthetic construct
  source 1..75: mol_type = other DNA
tttgatgaacctacttcagcgctcgatcctgaactggtaggcgaagtgttgcgtattatgcagcaactggcagaa

SEQ ID NO: 565345 - DNA, 75 bp, synthetic construct
  source 1..75: mol_type = other DNA
atgaaatacgttgtttccggtggcgcaactctcagctttgccgacggttctaaatttgtgctctctcagggcatc

SEQ ID NO: 565346 - DNA, 75 bp, synthetic construct
  source 1..75: mol_type = other DNA
ggcatttctggcagaaagcccggatacagaactgtccatggacgaatggttctgtgcagtgtcctgcatcacctc

SEQ ID NO: 565347 - DNA, 75 bp, synthetic construct
  source 1..75: mol_type = other DNA
tggtggaactacggaacaaaccagcccatgaactgaaggaagtgggcgatcagtggcgcacgccggataacattt

SEQ ID NO: 565348 - DNA, 75 bp, synthetic construct
  source 1..75: mol_type = other DNA
gctgccaccagcgaagtgtggtggccggaatatgcagatcatattgcttttattcgtgggcgtattggttttgaa

SEQ ID NO: 565349 - DNA, 75 bp, synthetic construct
  source 1..75: mol_type = other DNA
gttgtcagcagaagggtgcgtatagcagattgttgttatacatggcgtatgaagtattaccagtcatgcggagta

SEQ ID NO: 565350 - DNA, 75 bp, synthetic construct
  source 1..75: mol_type = other DNA
agtttattgcccgcaaccgcgcgccccgcgtgcagattgagtatgacgttgagatttacggctccgagaaaaaaa

SEQ ID NO: 565351 - DNA, 75 bp, synthetic construct
  source 1..75: mol_type = other DNA
ccgccgcgtatatctgcagcggacagctgtcgccggcgtcccacgttatggcctggatggtcagtcaccccaaag

SEQ ID NO: 565352 - DNA, 75 bp, synthetic construct
  source 1..75: mol_type = other DNA
cacaggcagcaggagcgggcggcgcagcatcagaaaacgctggagctggaacgatcgcagcggcagaaaggtttt

SEQ ID NO: 565353 - DNA, 75 bp, synthetic construct
  source 1..75: mol_type = other DNA
ccgggaattaccagactatccgggcgcaggagcggacgcaggccatgctgtcggagaagaaccacggcgtgcagc

SEQ ID NO: 565354 - DNA, 75 bp, synthetic construct
  source 1..75: mol_type = other DNA
atgaaacgttatttacgctggattgtggcggcagaatttctgttcgccgcagggaatcttcacgccgttgaggta

SEQ ID NO: 565355 - DNA, 75 bp, synthetic construct
  source 1..75: mol_type = other DNA
atgttatcaatatttaaaacggggcaagcggcggatagtgttccggctgataaaattcaggtgacatatggtcgc

SEQ ID NO: 565356 - DNA, 75 bp, synthetic construct
  source 1..75: mol_type = other DNA
ttacctatgagagcatcaattgggagcacagcgtcgccggaaccagtgcatacagcctttggagtgaacggattt

SEQ ID NO: 565357 - DNA, 75 bp, synthetic construct
  source 1..75: mol_type = other DNA
caggactactcgaaaaggctggacgagtgggagaacgccttcgcggaatggcggacgatgtctggtcttatgcaa

SEQ ID NO: 565358 - DNA, 75 bp, synthetic construct
  source 1..75: mol_type = other DNA
gtgactttgacatcccggacatactccctgatcccgccacagacacagacctgcaggtgctcacggcaccgccac

SEQ ID NO: 565359 - DNA, 75 bp, synthetic construct
  source 1..75: mol_type = other DNA
atgaattttattcgacagggattaggcatcgccttattaccagagttaacgctgaaaaccattgcaggtgaattg

SEQ ID NO: 565360 - DNA, 75 bp, synthetic construct
  source 1..75: mol_type = other DNA
acggcgtcactttccgacatcgagatgcgtggtttcacctttgatcaaaaacgccagacgcttcacctccagctg

SEQ ID NO: 565361 - DNA, 75 bp, synthetic construct
  source 1..75: mol_type = other DNA
ggccccgcgagctgcggcgcagcctgcacaggcgacagacaccgcaccggcctcccggcgcaccaccgcccgctc

SEQ ID NO: 565362 - DNA, 75 bp, synthetic construct
  source 1..75: mol_type = other DNA
gggcaatgacggtggacgacagcctgcccggcttagccgtccctccggccgggggcactgaccgtcaggcactga

SEQ ID NO: 565363 - DNA, 75 bp, synthetic construct
  source 1..75: mol_type = other DNA
tgaagcggacgaggaaatggaggataccagtgctgcggatgaggaaggcgatgatgacgaggaggaggaagacgc

SEQ ID NO: 565364 - DNA, 75 bp, synthetic construct
  source 1..75: mol_type = other DNA
ttacctatgagagtatcaactgggagcacagcgtcgccggaaccagtgcgtacagcctttggagtgaacggattt

SEQ ID NO: 565365 - DNA, 75 bp, synthetic construct
  source 1..75: mol_type = other DNA
tagcaacaggcataaataaagttcgttgtgatgcaggaatgaaagagaaacatgtaaacacactggatatattta

SEQ ID NO: 565366 - DNA, 75 bp, synthetic construct
  source 1..75: mol_type = other DNA
tttctcaagatatcggcacaattatgcgtgatcaagctgggctaccggtcatgagcggaacctcaggttcctcgt

SEQ ID NO: 565367 - DNA, 75 bp, synthetic construct
  source 1..75: mol_type = other DNA
ctgccaattgatcgcacaggtaaccgggcgcagcgaaccgcaacaaatcatcatcccgccaccctgtcctgatcg

SEQ ID NO: 565368 - DNA, 75 bp, synthetic construct
  source 1..75: mol_type = other DNA
tcaagcagatgagctaagatctatagtccgcgaaaccctcaaagcccgtaaagattggcgagttgatgtacgacc

SEQ ID NO: 565369 - DNA, 75 bp, synthetic construct
  source 1..75: mol_type = other DNA
cgtgagcagctaggcaaagaggctcttggctcagaggagccaaaacctggttcaccattttacggtagtcgtgga

SEQ ID NO: 565370 - DNA, 75 bp, synthetic construct
  source 1..75: mol_type = other DNA
catgtaaacacactggatatatttacacatagttatccagaaatttatgctggggttgcattgacgattgctggg

SEQ ID NO: 565371 - DNA, 75 bp, synthetic construct
  source 1..75: mol_type = other DNA
tgcccgcaagcagataccgactattctgcctgccttattggaagaagagctgaatcaggatatcgacgaactgca

SEQ ID NO: 565372 - DNA, 75 bp, synthetic construct
  source 1..75: mol_type = other DNA
cccccgcaagcagataccgactattctgcccgccttactggaagaggagctgaaccaggatatcgacgaactgca

SEQ ID NO: 565373 - DNA, 75 bp, synthetic construct
  source 1..75: mol_type = other DNA
accggaagggaacctgctaacagggccgtggcagccccgcgtcagctaccgaaaacagtgggcgcgctggcgggt

SEQ ID NO: 565374 - DNA, 75 bp, synthetic construct
  source 1..75: mol_type = other DNA
gcgacgtcacgaagcctatctggtgttctgcaaagcgcataaactgcatcccgtcgccgctctgcctggcctcgc

SEQ ID NO: 565375 - DNA, 75 bp, synthetic construct
  source 1..75: mol_type = other DNA
gcggcgccacgaagcctatctggcattctgcaacacgcataaactgcatcctgttgccgctctgccaggccttgc

SEQ ID NO: 565376 - DNA, 75 bp, synthetic construct
  source 1..75: mol_type = other DNA
atggcaaatcccgtctatctgacactaaacggagaactccagggactgatttcatccggatgctcgtcaatgccg

SEQ ID NO: 565377 - DNA, 75 bp, synthetic construct
  source 1..75: mol_type = other DNA
tcccgctttgcgcctccgacaccatccgctggcagcgccgtacacccgatgtggaacacggtatctggcctgacg

SEQ ID NO: 565378 - DNA, 75 bp, synthetic construct
  source 1..75: mol_type = other DNA
cgatcctatttatggtgattccgtatcaacaggtttagtggtagcaattatttctattattgttaacgcaattac

SEQ ID NO: 565379 - DNA, 75 bp, synthetic construct
  source 1..75: mol_type = other DNA
aaggcgaaaaatctacactggccgtgttctatctgccccaacagcgtgaggttgttgacagcaacgggaacgcgg

SEQ ID NO: 565380 - DNA, 75 bp, synthetic construct
  source 1..75: mol_type = other DNA
agaaagtcacagatgaaattatcgccgcgctggagaaaggcgtgatcccctgggttcgcccgtggcgggaagggg

SEQ ID NO: 565381 - DNA, 75 bp, synthetic construct
  source 1..75: mol_type = other DNA
gaaacccgcgcagagtcggcagagaagaaagtacagcagctcacgacacagcaacaaaaaacccaggacagcact

SEQ ID NO: 565382 - DNA, 75 bp, synthetic construct
  source 1..75: mol_type = other DNA
tgcgtctgttcgccacctggatggactggagcagcagactggataactacgccagtgatgatgctttcggcggta

SEQ ID NO: 565383 - DNA, 75 bp, synthetic construct
  source 1..75: mol_type = other DNA
gactctggctgcacataaattcgagttcagtgccgaaattgcttataacaccttcctgaagctgattctgatgcc

SEQ ID NO: 565384 - DNA, 75 bp, synthetic construct
  source 1..75: mol_type = other DNA
gtgcgatggcgctggatagcgaaaaggataaaaccttaaagatggcgtttcaggatctgcgggaactgaaagttg

SEQ ID NO: 565385 - DNA, 75 bp, synthetic construct
  source 1..75: mol_type = other DNA
tcgaacaagtagaatcgctgcttcatgaaagtctggagtctgtatcggaaagaaaccgtcacgtactccttgagg

SEQ ID NO: 565386 - DNA, 75 bp, synthetic construct
  source 1..75: mol_type = other DNA
tgtggatggggctggctccactggcgggcgcacagccacctaacgtgattattggcactatcgtcggcacggcat

SEQ ID NO: 565387 - DNA, 75 bp, synthetic construct
  source 1..75: mol_type = other DNA
gagttccggctgttcaacattcaacaatgtgaagggctgccggaggcgttttcacagcctgtcgtgatggtcgat

SEQ ID NO: 565388 - DNA, 75 bp, synthetic construct
  source 1..75: mol_type = other DNA
tgaaagcaatgaggcgtactacgccacgctgttacatgaactgacgcacgccaccggacacgcttcacgcctgaa

SEQ ID NO: 565389 - DNA, 75 bp, synthetic construct
  source 1..75: mol_type = other DNA
tacagcgaatattttgacagttttatgcgtcattatctgacggtaaaaacgggggagatccctcggacagatgaa

SEQ ID NO: 565390 - DNA, 75 bp, synthetic construct
  source 1..75: mol_type = other DNA
caccctcggtaacgcgcaggcgatgatcagcggcgtacgtggcggcaccatcgatatggaaatgtccggctcgaa

SEQ ID NO: 565391 - DNA, 75 bp, synthetic construct
  source 1..75: mol_type = other DNA
tgtagatttttttgtgcaacaggacgcattaataaatgaggacaattatgtgtcaggagcagtaacattacggag

SEQ ID NO: 565392 - DNA, 75 bp, synthetic construct
  source 1..75: mol_type = other DNA
gatgattttgccagcaatgacgctttcggcagcagtggtttcaatactggcggagagtggaattttggtgtccaa

SEQ ID NO: 565393 - DNA, 75 bp, synthetic construct
  source 1..75: mol_type = other DNA
accggaagggaacctgctaacagagccgtggcagtctcgtgtcagctaccgaaaacagtgggcgcgctggcgggg

SEQ ID NO: 565394 - DNA, 75 bp, synthetic construct
  source 1..75: mol_type = other DNA
ccgtagtcggcattgcaccggaagagctatcagcatgggctggcccagatgctgaacgcctgaccgttacggctc

SEQ ID NO: 565395 - DNA, 75 bp, synthetic construct
  source 1..75: mol_type = other DNA
acttgggcagcatgtactttatgaagtgaatgataaggcccgtcgtgtcaatatcctggcggttgtaggccagcg

SEQ ID NO: 565396 - DNA, 75 bp, synthetic construct
  source 1..75: mol_type = other DNA
atcggcaccattgtcggcacggcgtttgccattaccacaggtgtgaagccggatgttgctgtcggggtcgccgta

SEQ ID NO: 565397 - DNA, 75 bp, synthetic construct
  source 1..75: mol_type = other DNA
tgatgtccctttcctgttccgcgataccgctcacgcgcataaaacgctcgacggcaaagtcggtgatgatctgaa

SEQ ID NO: 565398 - DNA, 75 bp, synthetic construct
  source 1..75: mol_type = other DNA
caatcattacgtttcggttatgaaacctcacaaaccgactcacaacatattgcagcgaaaaaatttaatgaatta

SEQ ID NO: 565399 - DNA, 75 bp, synthetic construct
  source 1..75: mol_type = other DNA
acccgcactatcgacgctcaggaacacccgatcaacgtcgtctggtcagcaaaattttcgaagtgcagaagtacc

SEQ ID NO: 565400 - DNA, 75 bp, synthetic construct
  source 1..75: mol_type = other DNA
tcccgctttgcacctccgacaccatccgctggcagcgccgtacacccgacgtggagtacggtatctggactgacg

SEQ ID NO: 565401 - DNA, 75 bp, synthetic construct
  source 1..75: mol_type = other DNA
gatgacctgaaagtctcccttgaaggtaagggactgaaagtactggcctattgggaaaacggctggcgcgatgtc

SEQ ID NO: 565402 - DNA, 75 bp, synthetic construct
  source 1..75: mol_type = other DNA
atgaaacctcacaaaccgactcgcaacatattgcggcgaaaaaaattcaatgatttattgcaggagagaaccaaa

SEQ ID NO: 565403 - DNA, 75 bp, synthetic construct
  source 1..75: mol_type = other DNA
tccattcgatggtagttggggctatcaaccgacgggtctgtacgcgccaactcgccgttttggtactcgcgatga

SEQ ID NO: 565404 - DNA, 75 bp, synthetic construct
  source 1..75: mol_type = other DNA
gtcgcttatctgtggtctgccggaaaaagtagtgcaaagcgaggcgcgcaaaaaagccaaccagtttgatgcacc

SEQ ID NO: 565405 - DNA, 75 bp, synthetic construct
  source 1..75: mol_type = other DNA
agtctaccgatttccctggcgtttctcgtccgcaggacatgggcggtctgggcttctggtacaagtggaacctcg

SEQ ID NO: 565406 - DNA, 75 bp, synthetic construct
  source 1..75: mol_type = other DNA
cggctgcagccttcggcacgatgaagaacagcgaaaatgagcttgctgagcaacttatagaacaaaccggcgata

SEQ ID NO: 565407 - DNA, 75 bp, synthetic construct
  source 1..75: mol_type = other DNA
gagatcgccagccacggtcgccagcattcattaagccttacgctaccgccgctggccactatctggctggttcgg

SEQ ID NO: 565408 - DNA, 75 bp, synthetic construct
  source 1..75: mol_type = other DNA
attatcgttgccagtaactttacgccggtgccgcgccatgattatcgctttggcattaatcagccgggtaaatgg

SEQ ID NO: 565409 - DNA, 75 bp, synthetic construct
  source 1..75: mol_type = other DNA
ttgtccttcatcatatttgcgacgatgtataacgcctacacacagcgatattgtactttacaggttacaagtcaa

SEQ ID NO: 565410 - DNA, 75 bp, synthetic construct
  source 1..75: mol_type = other DNA
aagggccttcccgagagtggtaaaggagaggccctggaaataccccacagctccgaaaaagagccagtcagttgc

SEQ ID NO: 565411 - DNA, 75 bp, synthetic construct
  source 1..75: mol_type = other DNA
atcgacagtctgctgattcctgaagagcacggtggtcttgacgcgggttttgttactctcgccgccgtgtggatg

SEQ ID NO: 565412 - DNA, 75 bp, synthetic construct
  source 1..75: mol_type = other DNA
cgtgaaatcctcaataccgattccatgcactatcacggcagtaatgcaggcaatggcggcacggtacacagcgat

SEQ ID NO: 565413 - DNA, 75 bp, synthetic construct
  source 1..75: mol_type = other DNA
tttgaatggctggtggtggatgacaaagaacgctcggtgctgatctttgttcgccgcgacaaagccgggaatgaa

SEQ ID NO: 565414 - DNA, 75 bp, synthetic construct
  source 1..75: mol_type = other DNA
cgatgaagaacagcggaaatgagcttgctgagcaacttatagaacaaaccggcgataacaccctgacaaaggtta

SEQ ID NO: 565415 - DNA, 75 bp, synthetic construct
  source 1..75: mol_type = other DNA
ttatcggggcgcactgtcgcccccgcactaaggaaaacacgatgaaaaaagatgaatatctgttcatgacgaacg

SEQ ID NO: 565416 - DNA, 75 bp, synthetic construct
  source 1..75: mol_type = other DNA
tatctggaaacaactgaaattgggtgttccgggtgtgcctgattcacctgtgattgctgatgaaagtggttatca

SEQ ID NO: 565417 - DNA, 75 bp, synthetic construct
  source 1..75: mol_type = other DNA
cttgttctgccactgagcgtcaccggggacactcagacagcaggcacactggcagcagaagttcaggctttcggg

SEQ ID NO: 565418 - DNA, 75 bp, synthetic construct
  source 1..75: mol_type = other DNA
tgctgtgattgacattttacttattattgtcttttctctttctttattaatttgcggaaaagtttctgctgatac

SEQ ID NO: 565419 - DNA, 75 bp, synthetic construct
  source 1..75: mol_type = other DNA
gacaggggctgcttgtgctgccactgagcgtcaccggggacacgcagacaacaggcacactggcggcagaggttc

SEQ ID NO: 565420 - DNA, 75 bp, synthetic construct
  source 1..75: mol_type = other DNA
cgcaccgccgacgggctgagtttcatttcccggatgacggaaggtgaagtgtcagcagaaagtgtctggacacaa

SEQ ID NO: 565421 - DNA, 75 bp, synthetic construct
  source 1..75: mol_type = other DNA
gcgcaccccatgaccttctgctgcttgccggtaaatctgaacgagcttttgagggcagtgagacatccggtgctg

SEQ ID NO: 565422 - DNA, 75 bp, synthetic construct
  source 1..75: mol_type = other DNA
gaatctccagatataatcacggatgtatctcatgctaatagcattagaaaaatatatatatgtagaatgtatgat

SEQ ID NO: 565423 - DNA, 75 bp, synthetic construct
  source 1..75: mol_type = other DNA
ctaataaaactattcaaactttatggattcattcttcatggcacaaaaaaaaccgcaaatggtatagaaaatgtt

SEQ ID NO: 565424 - DNA, 75 bp, synthetic construct
  source 1..75: mol_type = other DNA
tgttttttccgttcgacgcacacgcgttcaggtcaatcgcatgatgcaggcacaggaagagctgacgcaacacaa

SEQ ID NO: 565425 - DNA, 75 bp, synthetic construct
  source 1..75: mol_type = other DNA
acagcgtctctacgccagttcaggttcagcaggccaccataccaccgccagcggaaatgccgtttctcacagctc

SEQ ID NO: 565426 - DNA, 75 bp, synthetic construct
  source 1..75: mol_type = other DNA
cttatggtatgcggagccgcgccgggggattggtcgctacgttgtccgtagttcggacggggcgatgaaggttac

SEQ ID NO: 565427 - DNA, 75 bp, synthetic construct
  source 1..75: mol_type = other DNA
tcttcgcggtcaacgatttttaaaaaaaatattcgatcacgctctagataataatgctaacaatatatatgtgac

SEQ ID NO: 565428 - DNA, 75 bp, synthetic construct
  source 1..75: mol_type = other DNA
caaatacttctgcgccaatgcggcatttgaagtggtggatagcgcaatgcaggtgctgggcggtgtcgggattgc

SEQ ID NO: 565429 - DNA, 75 bp, synthetic construct
  source 1..75: mol_type = other DNA
gtctggtgtattgttggcatggcgcttgagcgtaaagaacctcttcaccagattgtgaatcgcctggacatcatg

SEQ ID NO: 565430 - DNA, 75 bp, synthetic construct
  source 1..75: mol_type = other DNA
tacccgcaggtcaaaatggtctgccagatggaactgaccagccatctgctgacggctgcagccttcggcacgatg

SEQ ID NO: 565431 - DNA, 75 bp, synthetic construct
  source 1..75: mol_type = other DNA
cggagcttgtggagcaggagctgtggggtgtcttactggcttataatctggtgagatatcagatgattaaaatgg

SEQ ID NO: 565432 - DNA, 75 bp, synthetic construct
  source 1..75: mol_type = other DNA
tctggtcaagaccgtacgttccggcaatacgcacgcagagcgtatcagcgccatgctgacctctccggcaatgaa

SEQ ID NO: 565433 - DNA, 75 bp, synthetic construct
  source 1..75: mol_type = other DNA
atgcaacggagcaggctgacgctgagaagtaaaaagccggagcttgtggagcaagagctgtggggtgtcttactg

SEQ ID NO: 565434 - DNA, 75 bp, synthetic construct
  source 1..75: mol_type = other DNA
acattcaaaacatgatttgttaatgatttttcatacaagcaggatgcatagtttattctttgatgaattgttttt

SEQ ID NO: 565435 - DNA, 75 bp, synthetic construct
  source 1..75: mol_type = other DNA
ctgtgggatttgcagaacaaagcagaacggcaaaatgacattcttgtgaaataccgccatatgtcagtaccacca

SEQ ID NO: 565436 - DNA, 75 bp, synthetic construct
  source 1..75: mol_type = other DNA
tgaagtgggttatacctctaatgaaccggttatgctctgcctgatgtcggctatcgaaacgggtgttattttcct

SEQ ID NO: 565437 - DNA, 75 bp, synthetic construct
  source 1..75: mol_type = other DNA
atggcggatctgtacagtcatcgccgggaaatcgaactgggatacagggaggtaaaacagacgatgcaactgagc

SEQ ID NO: 565438 - DNA, 75 bp, synthetic construct
  source 1..75: mol_type = other DNA
ggatcaacagttctttgtcgatgtttttccaatacctgtttgtataagaaacactaatggggattttgttagcta

SEQ ID NO: 565439 - DNA, 75 bp, synthetic construct
  source 1..75: mol_type = other DNA
atgcagcgcttatttgttttggttgccgtcatgttgctgagcggatgcttaaccgccccaccaaaagaagccgcc

SEQ ID NO: 565440 - DNA, 75 bp, synthetic construct
  source 1..75: mol_type = other DNA
gggtcattttcctgattaatgatggtattgaccgtggtctgtgggatttgcagaacaaagcagaacggcagaacg

SEQ ID NO: 565441 - DNA, 75 bp, synthetic construct
  source 1..75: mol_type = other DNA
atgaaaactttacctgcaacaactcagcgggcggcgaagccctgcctagcacccatggctgtctggcaaatgcta

SEQ ID NO: 565442 - DNA, 75 bp, synthetic construct
  source 1..75: mol_type = other DNA
actgggaaatgaggtgacagcccgcctgctgaccgtgacgcgcaaaggaaaaggctgccatctgctgacgtcgat

SEQ ID NO: 565443 - DNA, 75 bp, synthetic construct
  source 1..75: mol_type = other DNA
gctgacgtcgatgacggacgccatgcgcttccccggaggagaaatggcggatctgtacagtcatcgctgggaaat

SEQ ID NO: 565444 - DNA, 75 bp, synthetic construct
  source 1..75: mol_type = other DNA
ttgaccgatttgaagaccattattcgcgccgaacgtctgcgcatgagtcgccaaaagcagcgtcatgacgcttta

SEQ ID NO: 565445 - DNA, 75 bp, synthetic construct
  source 1..75: mol_type = other DNA
ttccagttgattcaggaaaaattcgcccacatggcgatcaaattaaactccatgaaaaacatgctgtatgaagca

SEQ ID NO: 565446 - DNA, 75 bp, synthetic construct
  source 1..75: mol_type = other DNA
gcgcctacaccccatacatcgtggtgatggcgcgcgacggggcttctccggacaaacctgtctacaccgaatggt

SEQ ID NO: 565447 - DNA, 75 bp, synthetic construct
  source 1..75: mol_type = other DNA
atcatcgacgctattgaaaacatgaagcgtccgttcaaaggcgactggctggactgcgcgaaaaaactgtattaa

SEQ ID NO: 565448 - DNA, 75 bp, synthetic construct
  source 1..75: mol_type = other DNA
atgaaaactctacctgcaacaactccgcaggcggcgacgctatgtctgtcgcctgtggcagtctggcaaatgctg

SEQ ID NO: 565449 - DNA, 75 bp, synthetic construct
  source 1..75: mol_type = other DNA
ctccgggcccgccgggcgacaggcctgatgacccgcgacaattacagaacggtaaataacattacccggggtaaa

SEQ ID NO: 565450 - DNA, 75 bp, synthetic construct
  source 1..75: mol_type = other DNA
acccatggctgtctggcaaatgctactgacccgcctgctgaaacagcactatggtctcaccctcaacgacacacc

SEQ ID NO: 565451 - DNA, 75 bp, synthetic construct
  source 1..75: mol_type = other DNA
ggaccgccgtctacgcggtcgcggtcaggacagcgaagaggtcattgcaaagcgtatggcgcaagctgttgcaga

SEQ ID NO: 565452 - DNA, 75 bp, synthetic construct
  source 1..75: mol_type = other DNA
agtctaccggtactgttccagccagttacgcattctacggtattgttcgagcacgcgaatctgttaatcgcgcgg

SEQ ID NO: 565453 - DNA, 75 bp, synthetic construct
  source 1..75: mol_type = other DNA
atgcacattttatctgtaccgactacggtgccagtttcgtcacgcctgtcgcccgtacaggtctggcagcaactg

SEQ ID NO: 565454 - DNA, 75 bp, synthetic construct
  source 1..75: mol_type = other DNA
tttatccggcggcgcttaaagatgcctatgtttctgccggaacgtggccagaacatgctgccgatgtaagtgatg

SEQ ID NO: 565455 - DNA, 75 bp, synthetic construct
  source 1..75: mol_type = other DNA
gtgggcagagcggattaacgtccatacggcggatattcagcagtggatcacacagcagacagtacgcttcgattt

SEQ ID NO: 565456 - DNA, 75 bp, synthetic construct
  source 1..75: mol_type = other DNA
tgggctggcatttacgtttgcggacggatgtggcggaaaacgaagcgcgactgccgcatcgggtgctgctggcat

SEQ ID NO: 565457 - DNA, 75 bp, synthetic construct
  source 1..75: mol_type = other DNA
agcctgggaaccatgaaagtcacaataacatcaaatggtcagactggtaattcgatactggtgcctgatacttca

SEQ ID NO: 565458 - DNA, 75 bp, synthetic construct
  source 1..75: mol_type = other DNA
tgccgaaagggttccggggcagcaatgctattaaagtgcaattatggtgggcggtacaggcaacaatatttgcct

SEQ ID NO: 565459 - DNA, 75 bp, synthetic construct
  source 1..75: mol_type = other DNA
gtgggtgcgcgaagcagtgtttttaaatcgcttccggcaaatagagtttgtcgggggaatcccgcagtggtgata

SEQ ID NO: 565460 - DNA, 75 bp, synthetic construct
  source 1..75: mol_type = other DNA
tatcagcagggagtagagtgcgcaacaccacagcgggagcaggcgcgctataccactacacttgatcaccagacg

SEQ ID NO: 565461 - DNA, 75 bp, synthetic construct
  source 1..75: mol_type = other DNA
cgagcagcgtcagcttgccgcccagcttgggatgcgcggctggcattttttccgcttcgtcgaatggccgtggtt

SEQ ID NO: 565462 - DNA, 75 bp, synthetic construct
  source 1..75: mol_type = other DNA
gtgaaacctggatgctggcgaatgcctggcaggcggatgaaccgaaaaacgacggcggcgaaatttcgctggtac

SEQ ID NO: 565463 - DNA, 75 bp, synthetic construct
  source 1..75: mol_type = other DNA
cactgttttccaaagctacgcacttttcccccacatgaccgtgttcgaaaatgtggcctttgggttgcgcatgca

SEQ ID NO: 565464 - DNA, 75 bp, synthetic construct
  source 1..75: mol_type = other DNA
gataatttaatggcgcggttaccgggcgagctttccggcggtcagcgacagcgcgtggcgttagcgcgttgtctg

SEQ ID NO: 565465 - DNA, 75 bp, synthetic construct
  source 1..75: mol_type = other DNA
tccaggcactggaaaacattcccggcgaacaacgtcaacttgccgcccagcttgggatgcgcggctggcattttt

SEQ ID NO: 565466 - DNA, 75 bp, synthetic construct
  source 1..75: mol_type = other DNA
ttttcaccaatgcgttaatggcgatcccctacgccctgaaagtgctggaaaacccgatgcgcgatatcaccgccc

SEQ ID NO: 565467 - DNA, 75 bp, synthetic construct
  source 1..75: mol_type = other DNA
taccattggcgctcattcggtaatttcacaaaaaagttatttgtgtaccggcagtcatgatcatgcaagtgatta

SEQ ID NO: 565468 - DNA, 75 bp, synthetic construct
  source 1..75: mol_type = other DNA
tacttatccatcttatttcccagatattaggacaacttcgattatgaggtcaataaatataggttggtctttttc

SEQ ID NO: 565469 - DNA, 75 bp, synthetic construct
  source 1..75: mol_type = other DNA
ggcaccggagcgtcgattctcagttgttcttgagacggctatgctgtcagaaatggaacttgctgattattgccg

SEQ ID NO: 565470 - DNA, 75 bp, synthetic construct
  source 1..75: mol_type = other DNA
aaaaaaaaatatatagagaaagaagcacttgaagcgataaactggtggtcgtcactgtcgccggagttacgaaac

SEQ ID NO: 565471 - DNA, 75 bp, synthetic construct
  source 1..75: mol_type = other DNA
caaaaatgttgatggatttctcaacaagataaagctgcttaatcttcctcccgaagaactggaaaaaatcaaggc

SEQ ID NO: 565472 - DNA, 75 bp, synthetic construct
  source 1..75: mol_type = other DNA
caaactcgacggtgtgaaaccaccgaaaaaagaaaccatggagcgagtgaaagggattcttgagcaatatggtca

SEQ ID NO: 565473 - DNA, 75 bp, synthetic construct
  source 1..75: mol_type = other DNA
catacctgtctggataccaacggttttgttcgtcgttacgatccggtgattgatgaactgctggaagtaaccgac

SEQ ID NO: 565474 - DNA, 75 bp, synthetic construct
  source 1..75: mol_type = other DNA
attgaaattcagaagctggtacagagtggcggaaatcagaaagactttaccgtcgacatgaactgcccctatagc

SEQ ID NO: 565475 - DNA, 75 bp, synthetic construct
  source 1..75: mol_type = other DNA
accgttcatctacaatttgtttaacgttggcctgacctggacaccgcgtccaaatctgcaacgctggtatcagca

SEQ ID NO: 565476 - DNA, 75 bp, synthetic construct
  source 1..75: mol_type = other DNA
acgaaagtgatctcattctttgggaatcaaacgccattgtccgctatctggcggcacagtacgggcaaaaacgcc

SEQ ID NO: 565477 - DNA, 75 bp, synthetic construct
  source 1..75: mol_type = other DNA
tggcggaaggactggcgctgctgagcggactggtggaacgcttcggtacgcaactgctgccctcgcgaccggcca

SEQ ID NO: 565478 - DNA, 75 bp, synthetic construct
  source 1..75: mol_type = other DNA
taccccgtttctggcccggggattttttcccgacgttctatgccagtcatctggctgtgctgggcgttctggcgc

SEQ ID NO: 565479 - DNA, 75 bp, synthetic construct
  source 1..75: mol_type = other DNA
gtagagattcagaccctgagtcaaaatggaaatcacgaaaaagagtttactgtgaatatgcagtgtccttatcat

SEQ ID NO: 565480 - DNA, 75 bp, synthetic construct
  source 1..75: mol_type = other DNA
ggatgcgctcggattggtggtattttctatcattggcgcgcaggttgcgctggatatgggccacggcccaatcat

SEQ ID NO: 565481 - DNA, 75 bp, synthetic construct
  source 1..75: mol_type = other DNA
gagcagaccgtcgcccccgcccgtctgcgtgaggccatcaagtcaggcatggcggagacgaatgcggagctgtac

SEQ ID NO: 565482 - DNA, 75 bp, synthetic construct
  source 1..75: mol_type = other DNA
cgcgtcgctttatgagcgttatcgcggcgtggatgccagtgcgaaaggcgacaaaaaggccgacagcatagacag

SEQ ID NO: 565483 - DNA, 75 bp, synthetic construct
  source 1..75: mol_type = other DNA
gagctgtggcgggatatgcgctgggcggtggcgcgtatccaggacaagccgcgctgcatcgtgagtcaaatctga

SEQ ID NO: 565484 - DNA, 75 bp, synthetic construct
  source 1..75: mol_type = other DNA
cttccgcgaaggcgatccgaatgatttcgccgatatccccacgctactaagcagtctggtggcgaaagtgcctga

SEQ ID NO: 565485 - DNA, 75 bp, synthetic construct
  source 1..75: mol_type = other DNA
gacgcgattgtggcgggcttcacctctatcccttcacaaggggataacatgcctgcttaccatgccagaccaaag

SEQ ID NO: 565486 - DNA, 75 bp, synthetic construct
  source 1..75: mol_type = other DNA
atgacgacagtaatactgaatcagcccgacgaaccgcaggacgtaccgggcgtggtgattccagcaccggagacg

SEQ ID NO: 565487 - DNA, 75 bp, synthetic construct
  source 1..75: mol_type = other DNA
aaaatttatttatcgaagtgctggaatatacctggaatgatattcgacaaaaagaaaaatcccttgatgtctcag

SEQ ID NO: 565488 - DNA, 75 bp, synthetic construct
  source 1..75: mol_type = other DNA
taagccagatatcgacccattgcaggtgaatattaatattgctgcgcttggcggatattatttgatcaaccagca

SEQ ID NO: 565489 - DNA, 75 bp, synthetic construct
  source 1..75: mol_type = other DNA
agttaatggaatctttgttggctgaagggaagagactcaatatttttaagccagatatcgacccgttgcaggtga

SEQ ID NO: 565490 - DNA, 75 bp, synthetic construct
  source 1..75: mol_type = other DNA
tctttttccctgatgtggatccgaagcgtgtgcgcgagctgatgcgtctggagcagaccgtttccgcgctgcgcc

SEQ ID NO: 565491 - DNA, 75 bp, synthetic construct
  source 1..75: mol_type = other DNA
ctggggatggtttatcacattagcatggtttcacctgaggctttggaagccagacgcagagtgatcaaagagacc

SEQ ID NO: 565492 - DNA, 75 bp, synthetic construct
  source 1..75: mol_type = other DNA
tagtaaacagacggtttatcatcactttggtaataaagaaaatttatttatcgaagtgctggaatatacctggaa

SEQ ID NO: 565493 - DNA, 75 bp, synthetic construct
  source 1..75: mol_type = other DNA
gcagaaattattgtttacccggatgccgggcatgcgttcaatgcggattatcgcccgagctatcacgccgagtcg

SEQ ID NO: 565494 - DNA, 75 bp, synthetic construct
  source 1..75: mol_type = other DNA
tctgggcgtcgttaccgggtgccggttacggccagcgtgagcacagcctcgacaaactggtcaccgtatggcgca

SEQ ID NO: 565495 - DNA, 75 bp, synthetic construct
  source 1..75: mol_type = other DNA
cgcctgagtcatgtcgataatgaatcgacctgtattgtctgcggcactcttcggctgcaacattcggcgcgttat

SEQ ID NO: 565496 - DNA, 75 bp, synthetic construct
  source 1..75: mol_type = other DNA
tgtgttaacacaaggtgcggcaaaactggaaatgccgacggggcagacctttacattgcgccctgggaatgtggt

SEQ ID NO: 565497 - DNA, 75 bp, synthetic construct
  source 1..75: mol_type = other DNA
taccaaaaggttttcgcggcgccgggggcataaaagtacaaatatggtgggcggttcaggccacattatttgcct

SEQ ID NO: 565498 - DNA, 75 bp, synthetic construct
  source 1..75: mol_type = other DNA
aatcgctaccggcaaatatgatttgccgtggcaatcccgcagtggttacgcgtgagcgcgtagagaaagtgactc

SEQ ID NO: 565499 - DNA, 75 bp, synthetic construct
  source 1..75: mol_type = other DNA
atgaaccattatcaattcccccttatggagttagaacttataaagatacttttactaatcatctataaagaagga

SEQ ID NO: 565500 - DNA, 75 bp, synthetic construct
  source 1..75: mol_type = other DNA
gcaagggtagtattaaagaactcttagattatcaattctctactaatgaaattgccgcagttgtagctgaaagag

SEQ ID NO: 565501 - DNA, 75 bp, synthetic construct
  source 1..75: mol_type = other DNA
gaggacgtgaaaatgcaggctgccggaaaagtggcagaggtttctgaagcggctcagtccgggctcagcgaggtg

SEQ ID NO: 565502 - DNA, 75 bp, synthetic construct
  source 1..75: mol_type = other DNA
catgttgccagttgggcgtcccgcaacggcggcgacgtccatcgcttaatgattaccggattttgctggggcggg

SEQ ID NO: 565503 - DNA, 75 bp, synthetic construct
  source 1..75: mol_type = other DNA
aagccttcctcgatatgttggcgtggtcagaaggaacggataacgggcgacaaccgacacgtaaccacggttatg

SEQ ID NO: 565504 - DNA, 75 bp, synthetic construct
  source 1..75: mol_type = other DNA
attgccagccaacgccacaggagcttgcagagttcagggtttactggatggccgagggtaaggctttccaccatg

SEQ ID NO: 565505 - DNA, 75 bp, synthetic construct
  source 1..75: mol_type = other DNA
ccaaacatgcgccgccgtctgctcctggacagcatcaggccaataaaacaagtagcaaccagagaacaaaattaa

SEQ ID NO: 565506 - DNA, 75 bp, synthetic construct
  source 1..75: mol_type = other DNA
atatggttctgattacaatacacctgatggtactggtattagagattatattcatgtaatggatttggcggaagg

SEQ ID NO: 565507 - DNA, 75 bp, synthetic construct
  source 1..75: mol_type = other DNA
ttaacttaggcaccggcagggggtattcagtttttgaggtaataaaaaaattcgaggaagttacacaaaaaaaga

SEQ ID NO: 565508 - DNA, 75 bp, synthetic construct
  source 1..75: mol_type = other DNA
gcctcttgaatattataagaataatgttcagggaacaattagtgtccttagtgctatgataaatagcaaagccaa

SEQ ID NO: 565509 - DNA, 75 bp, synthetic construct
  source 1..75: mol_type = other DNA
acaatcttggcacagggaaaggttattcagtcaaagagattgttgaaacttttcaaaagataactggaaaaaaaa

SEQ ID NO: 565510 - DNA, 75 bp, synthetic construct
  source 1..75: mol_type = other DNA
atcctgcgggatgaagaagttccggcgttgtttaccaacaaaatctctccgcatcagcttggcctggccgacgta

SEQ ID NO: 565511 - DNA, 75 bp, synthetic construct
  source 1..75: mol_type = other DNA
cattttcggttctgactataatactaaagatggtacaggtgtaagggattatatacatgtgatggatttagcgtc

SEQ ID NO: 565512 - DNA, 75 bp, synthetic construct
  source 1..75: mol_type = other DNA
acaaaaatgtgaaagtctggatccgttatgtcgtagtacctggctggtctgacgacgacgattccgcccaccgtc

SEQ ID NO: 565513 - DNA, 75 bp, synthetic construct
  source 1..75: mol_type = other DNA
gacgatgacgattcagctcatcgcctcggtgaatttactcgcgatatgggtaacgtcgaaaaaatcgagctcctc

SEQ ID NO: 565514 - DNA, 75 bp, synthetic construct
  source 1..75: mol_type = other DNA
gttaccgttgaagatttaatgaaagaggtggtgacctatcgccactttatgaacgcttccggcggcggcgttacc

SEQ ID NO: 565515 - DNA, 75 bp, synthetic construct
  source 1..75: mol_type = other DNA
tctgatccaatgttagccttcaatgaactcggttggtcagccaaattcaatttagaggatatgctacgagattct

SEQ ID NO: 565516 - DNA, 75 bp, synthetic construct
  source 1..75: mol_type = other DNA
cagggtatattgggtcgcatactgctgttgcattactgaaaaaaaattatgaagtggtaattattgataatttgg

SEQ ID NO: 565517 - DNA, 75 bp, synthetic construct
  source 1..75: mol_type = other DNA
ctggatatattggctcacatactgtattaatgctgctgaaagaacaatatgaagtaatagtgcttgataattttc

SEQ ID NO: 565518 - DNA, 75 bp, synthetic construct
  source 1..75: mol_type = other DNA
aaagacgcgatgaagcacacctatctcggctacgaaagcaaagaccgtgtagatgtcgtgtccggcgaggtcacc

SEQ ID NO: 565519 - DNA, 75 bp, synthetic construct
  source 1..75: mol_type = other DNA
aatggatctggcaactggcaaaagaagatgctttaccactggaggaaattgctcaggaacttgccagccagtatc

SEQ ID NO: 565520 - DNA, 75 bp, synthetic construct
  source 1..75: mol_type = other DNA
ggctgaagaggggattgcgttgcgcatcgaccgtcagccgctatctaacgatggtgatttaccggctaatctgcg

SEQ ID NO: 565521 - DNA, 75 bp, synthetic construct
  source 1..75: mol_type = other DNA
agccacatgtggtacagcgaaatcagtgaatacctcatcagcagggggaaatcgttcgctaccgcagcatgggta

SEQ ID NO: 565522 - DNA, 75 bp, synthetic construct
  source 1..75: mol_type = other DNA
tccggataacaggatccgcgatctggacaactataacaaggcgctgtttgacgccctgacccacgcggggtgtgg

SEQ ID NO: 565523 - DNA, 75 bp, synthetic construct
  source 1..75: mol_type = other DNA
ggaagacgacagtcaggtgaaaagaatgctggtggagtggggaccggttatcccggaaggtaaggtcgagatcac

SEQ ID NO: 565524 - DNA, 75 bp, synthetic construct
  source 1..75: mol_type = other DNA
tctggcaggaagggctgtttgccctgccgcagcattttcagcaacagcagcgtcactgcgagtacctgctgaccc

SEQ ID NO: 565525 - DNA, 75 bp, synthetic construct
  source 1..75: mol_type = other DNA
aagtgctttcgcatggtgcttaaaccgtggcgcgagagacgcagtctttcccagaatgcacttagccacatgtgg

SEQ ID NO: 565526 - DNA, 75 bp, synthetic construct
  source 1..75: mol_type = other DNA
gtgaacttcccacaagatggcatcaaactgcatcgcggtaacttcacctctatcggtcggcagatccagccttat

SEQ ID NO: 565527 - DNA, 75 bp, synthetic construct
  source 1..75: mol_type = other DNA
tatcggtcagcagatccagccttatctggaggacggcaaatgctttcgcatggtgcttaaaccgtggcgtgagaa

SEQ ID NO: 565528 - DNA, 75 bp, synthetic construct
  source 1..75: mol_type = other DNA
cggcacctgcttcagtggagatcgtgttgtttcctccggataaccggatccgcgatctggacaactataacaagg

SEQ ID NO: 565529 - DNA, 75 bp, synthetic construct
  source 1..75: mol_type = other DNA
accgtccaatccctccgccatacgtcagagcggaaaccggcgagatgtacatcttcctgtgcaaagtcgaagcct

SEQ ID NO: 565530 - DNA, 75 bp, synthetic construct
  source 1..75: mol_type = other DNA
tgtcttcctgtgtaaggttgaagcctgggcggtgaatattggctgccacctgactattccgcagagctgcgagtt

SEQ ID NO: 565531 - DNA, 75 bp, synthetic construct
  source 1..75: mol_type = other DNA
aaatggatggactgggcaaaccagacgctcagtaatgctcatcgcgggatcctgatgggattagtcagaacacca

SEQ ID NO: 565532 - DNA, 75 bp, synthetic construct
  source 1..75: mol_type = other DNA
caggatatattgggtcccataccatacttgagttacttaataatggtcatgatgtcgtttcgctagataacctta

SEQ ID NO: 565533 - DNA, 75 bp, synthetic construct
  source 1..75: mol_type = other DNA
cgttactttaatccaatcggagcacataagtccgggatgattggtgaaaatcctaacgggatccctaataatctg

SEQ ID NO: 565534 - DNA, 75 bp, synthetic construct
  source 1..75: mol_type = other DNA
ctccccatacggaaaatagccgaattggtgaagctacaaatccatatggaacatcgaaattcataattgaaatta

SEQ ID NO: 565535 - DNA, 75 bp, synthetic construct
  source 1..75: mol_type = other DNA
tttacaaacttaccagctgaatttaaggctaaactaagcgctgtggtaaaagaaaatttaaaaataagggatagt

SEQ ID NO: 565536 - DNA, 75 bp, synthetic construct
  source 1..75: mol_type = other DNA
tagaaaagcaatttgacaacgagcactctgcaaggctttctgatatcgaatcgcttgcttcaggccatatgtccg

SEQ ID NO: 565537 - DNA, 75 bp, synthetic construct
  source 1..75: mol_type = other DNA
catttaataatttgcctgttgaagcattaactaagataagaagagcgttgaaagaaactgataacccgagtaatg

SEQ ID NO: 565538 - DNA, 75 bp, synthetic construct
  source 1..75: mol_type = other DNA
tctgaagatgtcatcacccgtcaggctaactttttgcataatccggatcgggtattacatatgctgcgtagccag

SEQ ID NO: 565539 - DNA, 75 bp, synthetic construct
  source 1..75: mol_type = other DNA
ctggcatcttgggcaatttgccacggattatcagcaactgtttgccgagaagccgtcactgacgctgcatcagcg

SEQ ID NO: 565540 - DNA, 75 bp, synthetic construct
  source 1..75: mol_type = other DNA
tgctggacttgtgtaatcaactgcacgtcagtcgccgcaccttgcaaaacgcatttcacgctattttgggcattg

SEQ ID NO: 565541 - DNA, 75 bp, synthetic construct
  source 1..75: mol_type = other DNA
gccccctgcaacctttttaaaggagcttttagtgttgaaggaatgagaaaagaaatggcactgttgcaaatagtc

SEQ ID NO: 565542 - DNA, 75 bp, synthetic construct
  source 1..75: mol_type = other DNA
ctgtccggacagataactggcgtcctttttttgttaaaacagaaaccatcatagcaggtaatgctgcaacggctc

SEQ ID NO: 565543 - DNA, 75 bp, synthetic construct
  source 1..75: mol_type = other DNA
aattttctatgacgctgagcatgggaatcttacatttaacagactccctatagaagcacaaaaaaaaataaaaga

SEQ ID NO: 565544 - DNA, 75 bp, synthetic construct
  source 1..75: mol_type = other DNA
gtaaaatggttctctggcgacgagtttggtgtgggcgatatcgctatcgcaccgttcatctacaatttgggtgat

SEQ ID NO: 565545 - DNA, 75 bp, synthetic construct
  source 1..75: mol_type = other DNA
tggaaatgattatgatacgccggatggtactggtgtaagggactttatccatgtaatggatcttgctacagggca

SEQ ID NO: 565546 - DNA, 75 bp, synthetic construct
  source 1..75: mol_type = other DNA
attcggaaatgattatcctacacctgatggaacaggcattagagattatattcatgttatggatttggctgaagg

SEQ ID NO: 565547 - DNA, 75 bp, synthetic construct
  source 1..75: mol_type = other DNA
gcaaagagtgcgatgccctgtttgctctacttgatgcggaactggcaaaagtaaaatggttttctggcgacgagt

SEQ ID NO: 565548 - DNA, 75 bp, synthetic construct
  source 1..75: mol_type = other DNA
gcaaagagtgcgacgccctgtttgccctgctcgatgcggaactggcaaaagtaaaatggttctctggcgacgagt

SEQ ID NO: 565549 - DNA, 75 bp, synthetic construct
  source 1..75: mol_type = other DNA
ctgacctggacaccgcgtccaaatctgcaacgctggtatcagcaactcactgaacgccccgcagtgcgcaaagtg

SEQ ID NO: 565550 - DNA, 75 bp, synthetic construct
  source 1..75: mol_type = other DNA
taccattgactgaaatgagtccattaggactgacaacaaatccatatggtacttctaaattaatgatcgagcaga

SEQ ID NO: 565551 - DNA, 75 bp, synthetic construct
  source 1..75: mol_type = other DNA
aaagttgttttctatgaattaaacatcaataatgaaaaaaaagttgatcaaatattaaaaaaacacaaagttgat

SEQ ID NO: 565552 - DNA, 75 bp, synthetic construct
  source 1..75: mol_type = other DNA
tagctatgataaaaaaaacgaatggagtaacaattagcgaaaaactcgagccagaagaaatgatacatctggagt

SEQ ID NO: 565553 - DNA, 75 bp, synthetic construct
  source 1..75: mol_type = other DNA
aattagggtggtcttctcgatatgatttagatacaatgataattgattcttggcgttggcaaaaaaacaatccca

SEQ ID NO: 565554 - DNA, 75 bp, synthetic construct
  source 1..75: mol_type = other DNA
caggttacattggttcacatactgtattatccttattatcatacggaaaaaatgtggtggtgttggataatctat

SEQ ID NO: 565555 - DNA, 75 bp, synthetic construct
  source 1..75: mol_type = other DNA
aattaaattggagagctaaaaaagatttagctgatatgattcgagatgcttggaaatggcaagtgcaaaacccca

SEQ ID NO: 565556 - DNA, 75 bp, synthetic construct
  source 1..75: mol_type = other DNA
gcgacaactggaagagcttcgtcacaacttgttaagaacagatttttggagtgcccctcgtgaagggtatgcgga

SEQ ID NO: 565557 - DNA, 75 bp, synthetic construct
  source 1..75: mol_type = other DNA
agatcttcgccagcacctgctaaatgctgacatatggagcaaaccctatgaagggtatgcagaagatcaaaaggg

SEQ ID NO: 565558 - DNA, 75 bp, synthetic construct
  source 1..75: mol_type = other DNA
atgcaagaggaaaaccagaagctaaaggaatgtccttcgacaaatatgcaaaaatctattgggcaaccaagtgat

SEQ ID NO: 565559 - DNA, 75 bp, synthetic construct
  source 1..75: mol_type = other DNA
gttatgtggcgcaggaaggggagtcggagaaatattccctgaccctgaaattgtttgaactgggcgctcgcgcgt

SEQ ID NO: 565560 - DNA, 75 bp, synthetic construct
  source 1..75: mol_type = other DNA
aaacagaactattcgcagtgaagcgccagatatctgagcttcgcatgaagctaattacttctgacttatggaaat

SEQ ID NO: 565561 - DNA, 75 bp, synthetic construct
  source 1..75: mol_type = other DNA
tcaggtctcagaaattcgcttgcatttaattaccgcagacctgtggagagcttcccatgaagggaatgcagaaga

SEQ ID NO: 565562 - DNA, 75 bp, synthetic construct
  source 1..75: mol_type = other DNA
tgagccaccggagtggttcgctgaagaagatctccctctcgctacgatcatgtggcaactgacaactaaagaact

SEQ ID NO: 565563 - DNA, 75 bp, synthetic construct
  source 1..75: mol_type = other DNA
tgctcggactcgaccccagcagccgccagcgtctgattggcctggcggggcagaagaaaatctccctctcgccac

SEQ ID NO: 565564 - DNA, 75 bp, synthetic construct
  source 1..75: mol_type = other DNA
aagcgagccctgaacaaagatgaacctgtttttacgcccatcaaaggtgttgagccaccggagtggttcgctgaa

SEQ ID NO: 565565 - DNA, 75 bp, synthetic construct
  source 1..75: mol_type = other DNA
gtgataacgaagaaactgagttcgaggaagttgaggaagagctaagtaacgagattatccaaaacccagatgcat

SEQ ID NO: 565566 - DNA, 75 bp, synthetic construct
  source 1..75: mol_type = other DNA
gtgataacgaagaaactgagttcgaggaagttgaggaagggctaagtaacgagatcattcaacacccagatgcct

SEQ ID NO: 565567 - DNA, 75 bp, synthetic construct
  source 1..75: mol_type = other DNA
atgggcgaaaaagttcatttctggcatggcctgaaatgccatgcagcccgcgccgcgtgtgctctggtcggggag

SEQ ID NO: 565568 - DNA, 75 bp, synthetic construct
  source 1..75: mol_type = other DNA
ctgaacagcgtttgcaggagtatgttgctatgttacatattgcggcgcgtaaaatctcttcacaaatgggttatc

SEQ ID NO: 565569 - DNA, 75 bp, synthetic construct
  source 1..75: mol_type = other DNA
tcaccgcgttaattctgctgctactctgttttctgctgtttaccgtgattgaaaaaataccggggcgaaatgtta

SEQ ID NO: 565570 - DNA, 75 bp, synthetic construct
  source 1..75: mol_type = other DNA
tgcgggcacggcaaaaaatgctggcgggccaggcgctggagatgagcggcatgttgatcctcgctatgccgggga

SEQ ID NO: 565571 - DNA, 75 bp, synthetic construct
  source 1..75: mol_type = other DNA
atcgagctggcaatttatcaggcgctgagttacgactacgatcctgcccgcgcggcaatgctggcgctgatccag

SEQ ID NO: 565572 - DNA, 75 bp, synthetic construct
  source 1..75: mol_type = other DNA
aaacgggaaaaagcgcacggttcccatatcggaagaactggagaaagagatcaagaccagcgacaccgggccatt

SEQ ID NO: 565573 - DNA, 75 bp, synthetic construct
  source 1..75: mol_type = other DNA
caggaaaatggcgagattgaaaagcggcacctgaataaaacaatcagggcgcttggtgatccagccgttaaccga

SEQ ID NO: 565574 - DNA, 75 bp, synthetic construct
  source 1..75: mol_type = other DNA
aagcagcccgtttgctggtcagtaacccaacgctggcaaaccgtcgcgttggggatgccacggctctgttcagca

SEQ ID NO: 565575 - DNA, 75 bp, synthetic construct
  source 1..75: mol_type = other DNA
gcttaactgactggcattaccccttctggggccgttttttgttttcccaaaacaacttttccataaaccggcagc

SEQ ID NO: 565576 - DNA, 75 bp, synthetic construct
  source 1..75: mol_type = other DNA
atgaaagagagtatttatacagataatatagatctatccaaaacttcccgccgtggtggttttaataaaagtaaa

SEQ ID NO: 565577 - DNA, 75 bp, synthetic construct
  source 1..75: mol_type = other DNA
gccacgctgtacggctttgcgatggcgctcggcctgctggagcagaaaatccacgcccgtgggccgggtgagcag

SEQ ID NO: 565578 - DNA, 75 bp, synthetic construct
  source 1..75: mol_type = other DNA
tacctgtggcatgtggtgcgcttttccttctggcaggcgtttctctcggcgctgatctctgttgtaccggcaata

SEQ ID NO: 565579 - DNA, 75 bp, synthetic construct
  source 1..75: mol_type = other DNA
ctcgactatgtgacggatttacgcctgatgttgctggtacagggcgatcagccgcgttaccgtttagttgaacta

SEQ ID NO: 565580 - DNA, 75 bp, synthetic construct
  source 1..75: mol_type = other DNA
attgtccttcatcatatttgcgacgatgtataacgcctacacacagcgatattgtactttacaggttacaagtca

SEQ ID NO: 565581 - DNA, 75 bp, synthetic construct
  source 1..75: mol_type = other DNA
aaacaacccgtttgctggtcagtgacccaacgctggcaaactgtcgcgctggggatgccacgactctgttcagcg

SEQ ID NO: 565582 - DNA, 75 bp, synthetic construct
  source 1..75: mol_type = other DNA
tgcaggtgccgggattccgcggtcagatgaacgaaggctggtaccagatacgtattgccggtgaggataccgcgc

SEQ ID NO: 565583 - DNA, 75 bp, synthetic construct
  source 1..75: mol_type = other DNA
gtgaacacggcagcggaggccatccgtgccctgtcgctgcaggtgccgggattccgctgtcagatgaacgaaggc

SEQ ID NO: 565584 - DNA, 75 bp, synthetic construct
  source 1..75: mol_type = other DNA
caacgacgaacgcattctgtctggcgtcaccgccactggtccgcatctgccttcacggggatttacaacgatttg

SEQ ID NO: 565585 - DNA, 75 bp, synthetic construct
  source 1..75: mol_type = other DNA
gtgccctgtcgctgcaggtgccgggattccgcggtcagatgaacgaaggctggtaccagatacgtattgccggtg

SEQ ID NO: 565586 - DNA, 75 bp, synthetic construct
  source 1..75: mol_type = other DNA
agggaacggtcatccacattgtgccgcgactggccggtgccggaaagggcggactgcagattgtgctgggggcag

SEQ ID NO: 565587 - DNA, 75 bp, synthetic construct
  source 1..75: mol_type = other DNA
agggaacggtcatccacattgtgccgcgactggccggtgccggaaagggaggactgcagattgtgctgggggccg

SEQ ID NO: 565588 - DNA, 75 bp, synthetic construct
  source 1..75: mol_type = other DNA
agggaacggtcatccacattgtgccgcgactggccggagccggaaagggcggactgcagattgtgctgggggctg

SEQ ID NO: 565589 - DNA, 75 bp, synthetic construct
  source 1..75: mol_type = other DNA
tgaccggacggcgctttgaacacggtgtgacggactgttacaccctgttccgggatgcataccatctggcgggga

SEQ ID NO: 565590 - DNA, 75 bp, synthetic construct
  source 1..75: mol_type = other DNA
agggaacggtcatccacattgtgccgcgactggccggcgccggaaagggtggactgcagattgtgctgggggcag

SEQ ID NO: 565591 - DNA, 75 bp, synthetic construct
  source 1..75: mol_type = other DNA
agggaacggtcatccacattgtgccgcgactggccggcgccggaaagggaggactgcagattgtgctgggggctg

SEQ ID NO: 565592 - DNA, 75 bp, synthetic construct
  source 1..75: mol_type = other DNA
gggtggtgtggcccagatgctggccccgaaggcaaagacgccggagtacaaaagcacggataacggtaaacagaa

SEQ ID NO: 565593 - DNA, 75 bp, synthetic construct
  source 1..75: mol_type = other DNA
aggtggagctggacgacaccgatggccgctggctggataagtggtatccgggcaaaggtgacacgctgacgctga

SEQ ID NO: 565594 - DNA, 75 bp, synthetic construct
  source 1..75: mol_type = other DNA
ctgcgccggctggccagcgagtatggttatgcagtgaaagtggtcagtgaccagttgattttttctcatctggcc

SEQ ID NO: 565595 - DNA, 75 bp, synthetic construct
  source 1..75: mol_type = other DNA
cgcagtatggtgaaaccgatgttggatttctcaaacgtctggccagtgaatatggttatgccgtaaaagtgacga

SEQ ID NO: 565596 - DNA, 75 bp, synthetic construct
  source 1..75: mol_type = other DNA
gatgacatgtggcgatccctgtgattccgcgctgcgtatctggggcgacaccgttgtcgaatgtgtgcttaacaa

SEQ ID NO: 565597 - DNA, 75 bp, synthetic construct
  source 1..75: mol_type = other DNA
acgtgccgtgaaaaatattgccagacagggcaacaccatcaccggtgcaatgggcggtatggtcaaaaatccgga

SEQ ID NO: 565598 - DNA, 75 bp, synthetic construct
  source 1..75: mol_type = other DNA
gggaaggattgcccgaaagcaccggctgaaactggtgggcagcattgagaccatcagaatcgaccgggtgaccca

SEQ ID NO: 565599 - DNA, 75 bp, synthetic construct
  source 1..75: mol_type = other DNA
catattacagcagcagcgccaggtggaccgagatatgatcctagcttaaccccagaacagcgaagctcgattgat

SEQ ID NO: 565600 - DNA, 75 bp, synthetic construct
  source 1..75: mol_type = other DNA
gacgtcgctcgtgagatccatcattttttcggtctggcttcagtcagtatggtactgggcgatcatcgaaagaac

SEQ ID NO: 565601 - DNA, 75 bp, synthetic construct
  source 1..75: mol_type = other DNA
caacacatagccgatcgcatcgctattgccgttggcaatgccgatgcctggcgtagcatgaccgatttgcaggaa

SEQ ID NO: 565602 - DNA, 75 bp, synthetic construct
  source 1..75: mol_type = other DNA
atggctgagataagcgtaactggcggcgtctttgccacgctcgcgcccatttttaccctctggtatgggcataaa

SEQ ID NO: 565603 - DNA, 75 bp, synthetic construct
  source 1..75: mol_type = other DNA
aacggctttggtctggagtggacggcgatgtcgtatcaggagcggctttccggcgcgcaggctccggcgctgtac

SEQ ID NO: 565604 - DNA, 75 bp, synthetic construct
  source 1..75: mol_type = other DNA
atggtgttcctgttcctgcgtttgccgacgtcgttcttaccgctggaagaccggggcatgtttactacctcggta

SEQ ID NO: 565605 - DNA, 75 bp, synthetic construct
  source 1..75: mol_type = other DNA
gccggataccggaggcagtgtatgttctgacgcaggacgatgatacgccagttccactggaagatgcttatgtta

SEQ ID NO: 565606 - DNA, 75 bp, synthetic construct
  source 1..75: mol_type = other DNA
gacgtgtgaatacacaactggttgacccgatgatggttcgctggcccctgcaggaattgtgcgattattacaatg

SEQ ID NO: 565607 - DNA, 75 bp, synthetic construct
  source 1..75: mol_type = other DNA
ttacattacgcccgggaaatgtggtcctgctaccacaaaattcagctcatcgcctgagtcatgtcgataatgaat

SEQ ID NO: 565608 - DNA, 75 bp, synthetic construct
  source 1..75: mol_type = other DNA
ctcccgctggagaagagttagtgagccgtctacgcacactggggcaggtggcctggcattttccgctgattgagt

SEQ ID NO: 565609 - DNA, 75 bp, synthetic construct
  source 1..75: mol_type = other DNA
gctggcgctgcataccgtaagcggacacaacgttcgttacccacaggatcgggaaattagtgaagtcttgctaca

SEQ ID NO: 565610 - DNA, 75 bp, synthetic construct
  source 1..75: mol_type = other DNA
ccgtctgcgcacactggggcaggtggcctggcattttccgctgattgagttttctccgggtcgacaattaccgca

SEQ ID NO: 565611 - DNA, 75 bp, synthetic construct
  source 1..75: mol_type = other DNA
atattattaattctacgtcattaagagtatctttattatgttttcctgtggggagtaaaataatatatttattaa

SEQ ID NO: 565612 - DNA, 75 bp, synthetic construct
  source 1..75: mol_type = other DNA
cacgctatacatgttttccatttcactgcaatattatagcgataatccagtgaatgaaatcatattcacgccgtc

SEQ ID NO: 565613 - DNA, 75 bp, synthetic construct
  source 1..75: mol_type = other DNA
agatgacgtcagatattttgcaggtatagttagaaatgccgaaaaatatctatacagatcgattttagttggaat

SEQ ID NO: 565614 - DNA, 75 bp, synthetic construct
  source 1..75: mol_type = other DNA
agccgtgtttcaggtgtgtcgtaccgcttatcctgacgcccgtcattggctggtgctgtgcggtcatggcaataa

SEQ ID NO: 565615 - DNA, 75 bp, synthetic construct
  source 1..75: mol_type = other DNA
tgacaaaccgttgccggaagaggccgcgctgtcacgcgaagcatggttaaacgcgggaggcgagatccatgcttc

SEQ ID NO: 565616 - DNA, 75 bp, synthetic construct
  source 1..75: mol_type = other DNA
caaaccgatgttgtgggatgctgatgcattgaacctgctggcaatcaatcccgataagcgtcacaatcgcgtgat

SEQ ID NO: 565617 - DNA, 75 bp, synthetic construct
  source 1..75: mol_type = other DNA
ttaccagcggtgaaatgctgcaacagctctggtcgctgattccacgatggtatcgtgagcactggttactacgct

SEQ ID NO: 565618 - DNA, 75 bp, synthetic construct
  source 1..75: mol_type = other DNA
tggcgcaggccgccttgccggttttatgaaggcgatggaagaagcgatgatcaaagtgccggaaagctggattgt

SEQ ID NO: 565619 - DNA, 75 bp, synthetic construct
  source 1..75: mol_type = other DNA
ggatgtttcgctgatcggttatgataatgtgcgcaacgctcgttattttaccccggcgttgaccactatccatca

SEQ ID NO: 565620 - DNA, 75 bp, synthetic construct
  source 1..75: mol_type = other DNA
gattctgggcaatgcgtggaacaatcttgagaaacagcgggcttatctgtcgatgatggcgcaaaaacgcgtcga

SEQ ID NO: 565621 - DNA, 75 bp, synthetic construct
  source 1..75: mol_type = other DNA
cttttatcaatgccaaagaagcatcgccctggaaaaatgaaccgttaatgcggccagttaactcaaactatgctc

SEQ ID NO: 565622 - DNA, 75 bp, synthetic construct
  source 1..75: mol_type = other DNA
ccgacgaaccgcaggacgtgccgggcgtggtgattcccgcgccggagacgggcgacgcagtgattaaaaatacgt

SEQ ID NO: 565623 - DNA, 75 bp, synthetic construct
  source 1..75: mol_type = other DNA
tgtcttctgtggcggcgatatcatggctatgggcgcactttgcgccgctgatgaaatgggtctgcgcgtaccgca

SEQ ID NO: 565624 - DNA, 75 bp, synthetic construct
  source 1..75: mol_type = other DNA
gaattaatatttatgttatcaattgtgataagctgaagtcattaccaagcacgaaaaactggacttacgcaacat

SEQ ID NO: 565625 - DNA, 75 bp, synthetic construct
  source 1..75: mol_type = other DNA
tgtagccatcgcatctattctattaaacaatagagaaatctcttgtgaatttcatgttttcacagattatatcag

SEQ ID NO: 565626 - DNA, 75 bp, synthetic construct
  source 1..75: mol_type = other DNA
ttatcaaaatataagatctaaaaatactcttgatatagcatttggtattgacagaaattttctttttggatgtgg

SEQ ID NO: 565627 - DNA, 75 bp, synthetic construct
  source 1..75: mol_type = other DNA
gtcaattgaagttcatccgcggcttattgaacgccgctccgtggctgacggcccgttccgcgactatcgtcgtta

SEQ ID NO: 565628 - DNA, 75 bp, synthetic construct
  source 1..75: mol_type = other DNA
ggtattgctaatgggtattttaactctggttttttattaattaatgttaatcaatgggcagtagaacaagtttct

SEQ ID NO: 565629 - DNA, 75 bp, synthetic construct
  source 1..75: mol_type = other DNA
ttgcggaatttcgattgcttcaatattaaaatataatgaaggaaatcgcttatgtttccatattttcacagacta

SEQ ID NO: 565630 - DNA, 75 bp, synthetic construct
  source 1..75: mol_type = other DNA
ttaaccaccgaaatagccgccatcggggagataaaaacggaaactgaaacaaccagattctatgttgattatgat

SEQ ID NO: 565631 - DNA, 75 bp, synthetic construct
  source 1..75: mol_type = other DNA
gctcagagacttgtaaaaaaactatgtccgcaatgctcgctgacatatcaggaattcactcaatcaaatgtgtta

SEQ ID NO: 565632 - DNA, 75 bp, synthetic construct
  source 1..75: mol_type = other DNA
aagaaagtaattcaaagttcatcactcccaatggagaagattgcttcagatctaatccatgagtgttgtgacctt

SEQ ID NO: 565633 - DNA, 75 bp, synthetic construct
  source 1..75: mol_type = other DNA
cggagtccatcggtatccaggttgacggcgaccaggcggttgttaataacgaaggcgagagcactatcaccaatg

SEQ ID NO: 565634 - DNA, 75 bp, synthetic construct
  source 1..75: mol_type = other DNA
taatcaaccaatggaggtcatggtcagtgaattaattactgagtgtgtaaataatcatgcaagtgacttgcacat

SEQ ID NO: 565635 - DNA, 75 bp, synthetic construct
  source 1..75: mol_type = other DNA
tatcaccggtgacagcgcgacggtggataacaagggcaccatgaccgtcaccgatccggagtccatcggtatcca

SEQ ID NO: 565636 - DNA, 75 bp, synthetic construct
  source 1..75: mol_type = other DNA
tccaaataatgacggatgctctcactgtcaatcaggatactctggtagaactatcattgcagaaataattgagcc

SEQ ID NO: 565637 - DNA, 75 bp, synthetic construct
  source 1..75: mol_type = other DNA
atgacgtatgcgcatttttcaccggactttttacaggatgcgatcagctttaatccgctggctgaaagtgtccat

SEQ ID NO: 565638 - DNA, 75 bp, synthetic construct
  source 1..75: mol_type = other DNA
caaaaatggccgaaagagaacagtgccaatttcgcaggcagtttgtgaggcgatcaaaaccagagaaacaggcgg

SEQ ID NO: 565639 - DNA, 75 bp, synthetic construct
  source 1..75: mol_type = other DNA
gaacgctaaatgatttgcttgagttgtggtggatgtatcacggtcaacacaggcgtaaggcggaagaagaccgaa

SEQ ID NO: 565640 - DNA, 75 bp, synthetic construct
  source 1..75: mol_type = other DNA
gtgttgctcttttgtgtttaagcacaggagcgcgctggagtgaagcctgtaagctccgtggtgaacagatagttc

SEQ ID NO: 565641 - DNA, 75 bp, synthetic construct
  source 1..75: mol_type = other DNA
aaaacgccagcaaaagaaatcgatctcgccaaaaagcggttagcggaggtacttaatgaaactggtaagccataa

SEQ ID NO: 565642 - DNA, 75 bp, synthetic construct
  source 1..75: mol_type = other DNA
tcgcgcatactcgcaaagctggaggccaacccacgtcagcttcgtgagcctgataccaaacccctgggtaacggg

SEQ ID NO: 565643 - DNA, 75 bp, synthetic construct
  source 1..75: mol_type = other DNA
taacgccttcggaaacacgagtggcgtatattgatggcggcattctgcaggaaattcatattgaacgtgaggcgc

SEQ ID NO: 565644 - DNA, 75 bp, synthetic construct
  source 1..75: mol_type = other DNA
taaaacttcagccgtggcaggatgataagtggagtcgagtattgccacatttgcgtcagaatgttattaaacaac

SEQ ID NO: 565645 - DNA, 75 bp, synthetic construct
  source 1..75: mol_type = other DNA
ttactcatcttcttcaggatgcggagcatggtgaggctggtcacttcacttccatcgagcaagaatatccccaga

SEQ ID NO: 565646 - DNA, 75 bp, synthetic construct
  source 1..75: mol_type = other DNA
ccaccagttatatctgaaagaaattgttgagttggcaataagaatcaagaaagatgtcgaaaacaaaggagaaat

SEQ ID NO: 565647 - DNA, 75 bp, synthetic construct
  source 1..75: mol_type = other DNA
tgcttaacgacccgaagggctcgattgatcaaaactgcctgttgagcagggactggcaactgccgcatgcggcgg

SEQ ID NO: 565648 - DNA, 75 bp, synthetic construct
  source 1..75: mol_type = other DNA
ctggcttgtggcgatttatacatgcccggtaaatatggtgtttttacatcagaacaggtgtatcgcgtatggcgt

SEQ ID NO: 565649 - DNA, 75 bp, synthetic construct
  source 1..75: mol_type = other DNA
tgaagcgctctttggaatcaattcagagcttcgttttcgtcttgctcttatagctgcagcatatcttgaggagcg

SEQ ID NO: 565650 - DNA, 75 bp, synthetic construct
  source 1..75: mol_type = other DNA
actcgcgtctgacttacgaagcattgctggagtttacctcggaatacattcctgagatgaccagcaagctggagc

SEQ ID NO: 565651 - DNA, 75 bp, synthetic construct
  source 1..75: mol_type = other DNA
gtggactaaagtgatggagcgtaaaaagcgcccacagactcgttatcaactgtatggcgaactggcgctggcaca

SEQ ID NO: 565652 - DNA, 75 bp, synthetic construct
  source 1..75: mol_type = other DNA
gcgtgttctgcgtgatttcgccgacgctgagctggatcgtattcgcgttgactcgcgcctgacttacgaagcgtt

SEQ ID NO: 565653 - DNA, 75 bp, synthetic construct
  source 1..75: mol_type = other DNA
tcgaagtactggaatatacctggaacgatattcgacaaaaagaaaaggcccttgatttctcagatcttccgccac

SEQ ID NO: 565654 - DNA, 75 bp, synthetic construct
  source 1..75: mol_type = other DNA
cctggaacgatattcgcgaaaaagagagagagcttgacatttcagggctttctccggttattgcgatcgagaaaa

SEQ ID NO: 565655 - DNA, 75 bp, synthetic construct
  source 1..75: mol_type = other DNA
ttgtttattgaagtactggaatatacctggaacgatattcgcgaaaaagagagagagcttgacatttcagggctt

SEQ ID NO: 565656 - DNA, 75 bp, synthetic construct
  source 1..75: mol_type = other DNA
aagagcctgataagcgcggctgggcgaaaatttcagagcgcggcgtgcgcagcaatagttgagcagttacgtcgt

SEQ ID NO: 565657 - DNA, 75 bp, synthetic construct
  source 1..75: mol_type = other DNA
ttgttaggctgttccgtcgctgaaattgaaagtgaccgcttacattgcgccaaacgtctggtacaacgttatggc

SEQ ID NO: 565658 - DNA, 75 bp, synthetic construct
  source 1..75: mol_type = other DNA
ggccagcaagagtgggggaaaaaagccctgcaaaaagttgagaattttcgcaaaccgatgttgtgggatgccgat

SEQ ID NO: 565659 - DNA, 75 bp, synthetic construct
  source 1..75: mol_type = other DNA
cgcacggtgcggcagctgacgtactggcggcgcgttttggaacgcgcgggatgctggcaaccgatctcttttcca

SEQ ID NO: 565660 - DNA, 75 bp, synthetic construct
  source 1..75: mol_type = other DNA
tggctgggatcagggggaatacgttgtgtatccggcaacgctggcaggaacggaaacccagagcgccacgtttag

SEQ ID NO: 565661 - DNA, 75 bp, synthetic construct
  source 1..75: mol_type = other DNA
tactgatttggggacgaaaaccacatcgtcgtttgattacggcactaaatccacgaataacactggtgcgcatac

SEQ ID NO: 565662 - DNA, 75 bp, synthetic construct
  source 1..75: mol_type = other DNA
acggcagcatctcagagcaaaactactgctgaatccgctgcgacccgtgcggaagctgctgctgatcgtgctgaa

SEQ ID NO: 565663 - DNA, 75 bp, synthetic construct
  source 1..75: mol_type = other DNA
acggcggcagctcagagcaaaagtacggcggaatccgcggcaacgcgcgccgagacagcagctaaacgggcagag

SEQ ID NO: 565664 - DNA, 75 bp, synthetic construct
  source 1..75: mol_type = other DNA
atgcgtggctggacgattaagggcaagcccgccagtggtcgtgccgtattgtctcaggaacaggacggcataaaa

SEQ ID NO: 565665 - DNA, 75 bp, synthetic construct
  source 1..75: mol_type = other DNA
attggtggcgctggttacaacgtcggttccccacatcaggcaggcatttcagaactggttctacgagcaggcaat

SEQ ID NO: 565666 - DNA, 75 bp, synthetic construct
  source 1..75: mol_type = other DNA
tggtgctgtgcggtcatggcaataacggcggcgatggttatgtgattgcgcggctggcaaaagcggtcggcattg

SEQ ID NO: 565667 - DNA, 75 bp, synthetic construct
  source 1..75: mol_type = other DNA
gttcggcggcgtcatcggcatcatcggcgtctgcttcaaaagatgaggcgaccagacaagcgtcagcagcgaagg

SEQ ID NO: 565668 - DNA, 75 bp, synthetic construct
  source 1..75: mol_type = other DNA
gcggctgcatcatctgccagtgccgcatcaacaagtgccgggcaggcctcagccagtgccaccgctgccggaaag

SEQ ID NO: 565669 - DNA, 75 bp, synthetic construct
  source 1..75: mol_type = other DNA
atacctcgaaaaatcttccaccagaaagctacccagtcggcgcaccaatcccgtggccatcagataccgttccgt

SEQ ID NO: 565670 - DNA, 75 bp, synthetic construct
  source 1..75: mol_type = other DNA
gatgacacgctatatgttcgagctgaccttgtgaatggcaactctccggtaactccggatggttggataagctgt

SEQ ID NO: 565671 - DNA, 75 bp, synthetic construct
  source 1..75: mol_type = other DNA
acgacagcacagaaagggataatccagctaagcagcgcgaccaacagcacgtctgaaacgctggcggcaacgcca

SEQ ID NO: 565672 - DNA, 75 bp, synthetic construct
  source 1..75: mol_type = other DNA
agtggtacaagcggtgctcatgctccggcatttattcgttcacgacgggatacgaccgacgcaaactggtcgccg

SEQ ID NO: 565673 - DNA, 75 bp, synthetic construct
  source 1..75: mol_type = other DNA
acgtctgagacaaacgccaggtcttctgaaacggcagcggaacagagtgcctcagctgcggcaggctcaaaaaca

SEQ ID NO: 565674 - DNA, 75 bp, synthetic construct
  source 1..75: mol_type = other DNA
cagcgccagcgcatccagtacggatttgggtacgaaaaccacatcgtcgtttgattacggcactaaatctacgaa

SEQ ID NO: 565675 - DNA, 75 bp, synthetic construct
  source 1..75: mol_type = other DNA
ttaaggccgcgtatgacctggctaacgggaaatacaccgcacaggacgctacgacagcacagaaagggataatcc

SEQ ID NO: 565676 - DNA, 75 bp, synthetic construct
  source 1..75: mol_type = other DNA
tatgcggattcgaatggagccgttccctggaatgccgaatcaggcgcttacaatgtcacccgctctggcgacagc

SEQ ID NO: 565677 - DNA, 75 bp, synthetic construct
  source 1..75: mol_type = other DNA
gggatcaccggggcactgaaggggaacgccgataccgcgacgaaacttgcggcagccccaaaaattaacggtgtt

SEQ ID NO: 565678 - DNA, 75 bp, synthetic construct
  source 1..75: mol_type = other DNA
cggcgatacatatgatatttacgttgagattggcaattatgcgacgagtgtaaatatccattgggattgtactac

SEQ ID NO: 565679 - DNA, 75 bp, synthetic construct
  source 1..75: mol_type = other DNA
gcggcaacgcgcgccgagacagcggcaaaacgggcagaggatattgcatccgccgtggcgcttgaggatgcgagc

SEQ ID NO: 565680 - DNA, 75 bp, synthetic construct
  source 1..75: mol_type = other DNA
gttaacgggaaagcactgactgcggatataacattaacaccgaaagatattggcactttaaattcagtaacgatc

SEQ ID NO: 565681 - DNA, 75 bp, synthetic construct
  source 1..75: mol_type = other DNA
ggcgcgtaaggatggctggcgaataagcaaagacaaaacacgtgcttttgcgcctgggcataaagttttgaggat

SEQ ID NO: 565682 - DNA, 75 bp, synthetic construct
  source 1..75: mol_type = other DNA
tttccgtattttacggggaatgatgttgccagtctggcaaccctgacaaaagttgggcgggatattcttgcgaaa

SEQ ID NO: 565683 - DNA, 75 bp, synthetic construct
  source 1..75: mol_type = other DNA
gctaatgctgagcggttgtgtcactgtgccggacgccattaaaggcagcagtcccacgccgcaacaagatttagt

SEQ ID NO: 565684 - DNA, 75 bp, synthetic construct
  source 1..75: mol_type = other DNA
ttgttttcaaaaaacgagagattcgtgcacttatgttaagatattgaattcaactttcgataacgaaagttttat

SEQ ID NO: 565685 - DNA, 75 bp, synthetic construct
  source 1..75: mol_type = other DNA
gacgtgaccgcgacgatggatatcgaccgcctgaagctggtggatatcccggtcgctaacctggcgaaaaatcct

SEQ ID NO: 565686 - DNA, 75 bp, synthetic construct
  source 1..75: mol_type = other DNA
gatggctggcgaataagcaaagacaaaacgcgtgcttttgcgcccgggcataaagttttgaggattaacaaatga

SEQ ID NO: 565687 - DNA, 75 bp, synthetic construct
  source 1..75: mol_type = other DNA
gtatcccgctgttgcgtggtgataatgaacagcaactgacggcgcgtgtcagggcgcacctttgcgcacagcgtc

SEQ ID NO: 565688 - DNA, 75 bp, synthetic construct
  source 1..75: mol_type = other DNA
gtggaatatttctccaacgtgaaaccagacttgtttgccgatgtgattaacaagtttatggctcacggtaagagc

SEQ ID NO: 565689 - DNA, 75 bp, synthetic construct
  source 1..75: mol_type = other DNA
atggttcttcatctaccggaacagggcattgcagccgtgaatgaaatcgctttcccggcgaacactccggtgtac

SEQ ID NO: 565690 - DNA, 75 bp, synthetic construct
  source 1..75: mol_type = other DNA
ggcgtttgccgatacagcccgaccggaaattggtaagtatgtctttggttatcgtggtcaggaaggagcagtggt

SEQ ID NO: 565691 - DNA, 75 bp, synthetic construct
  source 1..75: mol_type = other DNA
gtatcccgctgctgcgtggcgatgatgagcaacagctggcggagcgcgtcagagcacacctttgcgcacaacgac

SEQ ID NO: 565692 - DNA, 75 bp, synthetic construct
  source 1..75: mol_type = other DNA
ccgtcgttcgtcagtgccggtcagctgatgacggcgcgggagcagcgttttctgcgccggctcgacagggtgatc

SEQ ID NO: 565693 - DNA, 75 bp, synthetic construct
  source 1..75: mol_type = other DNA
gctgggctaccgggatggcatgacaacaatcaggtcatttaaggaactggtgaatgaaaaagataaacctgcaca

SEQ ID NO: 565694 - DNA, 75 bp, synthetic construct
  source 1..75: mol_type = other DNA
agacgttaagttgttattatttgcaaatattcgacattcagacaacaaccgatagtcctaacatgttcgtaagtc

SEQ ID NO: 565695 - DNA, 75 bp, synthetic construct
  source 1..75: mol_type = other DNA
ggtcgcgcgcaatagcggcgtagaactggggaaacccgtgacgataggtaataatgtctggattggcgggcgtgc

SEQ ID NO: 565696 - DNA, 75 bp, synthetic construct
  source 1..75: mol_type = other DNA
atgagcacagaaaaagaaaagatgattgctggtgcgttgtatcgctcggcagatgagacgttatctcgcgctcgt

SEQ ID NO: 565697 - DNA, 75 bp, synthetic construct
  source 1..75: mol_type = other DNA
aggggcagacttttgacaaatctgcttacccgaaacttgcagccgcttatccgtcaggtgtgatccctgatatgc

SEQ ID NO: 565698 - DNA, 75 bp, synthetic construct
  source 1..75: mol_type = other DNA
gcgtcagtttctatttatacctcgccaacatattcagcgagtaagccttccagcgttaccggtggtgttgtttat

SEQ ID NO: 565699 - DNA, 75 bp, synthetic construct
  source 1..75: mol_type = other DNA
cacggcgattcgtgcgctggtgaagaaattaatcgcggcggaaaacccagcgaaaccgttgagcgacagcaagtt

SEQ ID NO: 565700 - DNA, 75 bp, synthetic construct
  source 1..75: mol_type = other DNA
gtgttggtgcgtaagcataacggccactggacggtggaactcaacagcgacagcattccgcgtctgcaaatcaac

SEQ ID NO: 565701 - DNA, 75 bp, synthetic construct
  source 1..75: mol_type = other DNA
ccctgaagttcacatccctgatgttcgtcattctgctgtttttcctcggactgagcttgtccgccaacgttctcg

SEQ ID NO: 565702 - DNA, 75 bp, synthetic construct
  source 1..75: mol_type = other DNA
ctcgattgtcgatgccgttgatgacacgggatatctcaccgttccactggaagatattctcgaaagtatgggcga

SEQ ID NO: 565703 - DNA, 75 bp, synthetic construct
  source 1..75: mol_type = other DNA
cgaaaccgttgagcgacagcaagttaacctctttgctgtcggaacaaggtatcatggtggctcgccgcactgttg

SEQ ID NO: 565704 - DNA, 75 bp, synthetic construct
  source 1..75: mol_type = other DNA
agcggtgactacattgacgacgagctgccggtctatcagggcgaaacgacgcagaccttgcaggattacctgatg

SEQ ID NO: 565705 - DNA, 75 bp, synthetic construct
  source 1..75: mol_type = other DNA
tgtggcgctggattccccctttaaccactgcgaacagggcaaaattgttattccccggatgcgcgttgagccttc

SEQ ID NO: 565706 - DNA, 75 bp, synthetic construct
  source 1..75: mol_type = other DNA
agttgaactgcaccgcaaacgcgttgccaacggtgagcgtagcgtgctggtgggcttacagtcatttgccgaagg

SEQ ID NO: 565707 - DNA, 75 bp, synthetic construct
  source 1..75: mol_type = other DNA
tgcgtggtctggctgagttattcctcaatgatttaagtgagaaaaccggtagccatgacattgtgcgtttgcatc

SEQ ID NO: 565708 - DNA, 75 bp, synthetic construct
  source 1..75: mol_type = other DNA
aaaaagatcattcccgatcttaaattcaccgccgctttcgggcgtgggcgctacgtttgcccgcgtaacctgacg

SEQ ID NO: 565709 - DNA, 75 bp, synthetic construct
  source 1..75: mol_type = other DNA
aaactctggcggctggcttcgctggcgcaatcttccggtgcaccggtgaccaaatgggcgacgcgggaagagcgc

SEQ ID NO: 565710 - DNA, 75 bp, synthetic construct
  source 1..75: mol_type = other DNA
ggaagtggtggtggcaaaccatgcgctggtgatggcggcgatggaaagcgaagccgtattgcctgacccgaaaaa

SEQ ID NO: 565711 - DNA, 75 bp, synthetic construct
  source 1..75: mol_type = other DNA
gaaaacctgaaggcgaaacaggccgccattaccacgatgttcactccccgtcatccggtctgcgtggtgtcagcg

SEQ ID NO: 565712 - DNA, 75 bp, synthetic construct
  source 1..75: mol_type = other DNA
gtacggaggcggtcaggtcgcaggcccgtgacggcttcggtgcggccgtgggccgggtgtttgatacggcggagt

SEQ ID NO: 565713 - DNA, 75 bp, synthetic construct
  source 1..75: mol_type = other DNA
actacgagccggtgattggcatcatgggcaagagtggtgccggtaagtcgtcgctctgtaacgaactctttcggg

SEQ ID NO: 565714 - DNA, 75 bp, synthetic construct
  source 1..75: mol_type = other DNA
cagttgccttaaccgcaactgttactactatcgcgaatgcccgttttttgtcgctcgtcgggaaattcaggaagc

SEQ ID NO: 565715 - DNA, 75 bp, synthetic construct
  source 1..75: mol_type = other DNA
aggtgtgggggaaagcgaacttcgggaccatgagtataccaccctgtatcgcaacattttgccagagatggacct

SEQ ID NO: 565716 - DNA, 75 bp, synthetic construct
  source 1..75: mol_type = other DNA
gaagacggtgatacgtaacgtgcgtgatgcggtggtgtccgtggcccgcgcggtctgggactggattttcttctg

SEQ ID NO: 565717 - DNA, 75 bp, synthetic construct
  source 1..75: mol_type = other DNA
catcgacagcccggtggtgatcaccgaaggtgaatggctgaaaagcctcaaccgctatccgtttgaggtgcaaag

SEQ ID NO: 565718 - DNA, 75 bp, synthetic construct
  source 1..75: mol_type = other DNA
agcctttgcaatgctctgtttgtcggcgaaatatcgccggtcagcgatgtggtagcctgtacccgtgaacctttg

SEQ ID NO: 565719 - DNA, 75 bp, synthetic construct
  source 1..75: mol_type = other DNA
gggcaaaagcggtgccggtaagtcttcgctctgtaacgaactcttccggggtgaggtctcccccgtcagtgatgt

SEQ ID NO: 565720 - DNA, 75 bp, synthetic construct
  source 1..75: mol_type = other DNA
tttcactctgcaatcattgaccgatctgatgtttaattcggtgtttgccagcgtgaataatctctaccatcgccc

SEQ ID NO: 565721 - DNA, 75 bp, synthetic construct
  source 1..75: mol_type = other DNA
cgcttccggctgcgcagcgggcgtcacagtctggtgattgttgatttaccgggtgtgggagaaaacgggcaacgg

SEQ ID NO: 565722 - DNA, 75 bp, synthetic construct
  source 1..75: mol_type = other DNA
ccgtgacagtttcggtgacgctgtgggccgtgttttcgatacggctgagtcatcgtcattgctgcctgcgccact

SEQ ID NO: 565723 - DNA, 75 bp, synthetic construct
  source 1..75: mol_type = other DNA
tttgtggtgacgcaggccgataaaacggagccctgccatgaatgggatatggccggtattcagccttctcctgca

SEQ ID NO: 565724 - DNA, 75 bp, synthetic construct
  source 1..75: mol_type = other DNA
ctggacttgttcacgaaactggtcgctacctgcatggagcagtttcgcccgaagaccatcccaccgctggcgatc

SEQ ID NO: 565725 - DNA, 75 bp, synthetic construct
  source 1..75: mol_type = other DNA
gaagccacagttgctggggcgaggtggttatctacgacaaacgcttgttgaccaaaaattatggcaagcgactac

SEQ ID NO: 565726 - DNA, 75 bp, synthetic construct
  source 1..75: mol_type = other DNA
cctgaacgtttgaatgcgcattgtgaagagttgtatgagcttatcgcctctttaaacaacattctcaatctctat

SEQ ID NO: 565727 - DNA, 75 bp, synthetic construct
  source 1..75: mol_type = other DNA
tccatctgttcagcacgcagccgcgaacactgtatgatctgctcgacgtccgggcattactggaaggcgaatcag

SEQ ID NO: 565728 - DNA, 75 bp, synthetic construct
  source 1..75: mol_type = other DNA
cgattctcgtgtagcacgccttaatcgcgtgcaggacaccagcccgctgatccatctgttcagtacacagccgcg

SEQ ID NO: 565729 - DNA, 75 bp, synthetic construct
  source 1..75: mol_type = other DNA
ccagcgcgcagcgcgcgatcatgtgcggaccgtgaaaaagaatctccacgatatcgagctggaaggccaccattt

SEQ ID NO: 565730 - DNA, 75 bp, synthetic construct
  source 1..75: mol_type = other DNA
tcacccggtctgcgtggtatccgcctgcagcggctggggcgtggaggagatggtggcaaccatgatgcgctgtct

SEQ ID NO: 565731 - DNA, 75 bp, synthetic construct
  source 1..75: mol_type = other DNA
cggcgcgaatgtctccggcgcggtctctgacaaactgtactacaacctggggggcggcacggtgttatcccagcc

SEQ ID NO: 565732 - DNA, 75 bp, synthetic construct
  source 1..75: mol_type = other DNA
gtggtgacacaggtgctgggcagcaaatcggtccgcacctgcaccaatccggcggattgtcagagcggcggtgag

SEQ ID NO: 565733 - DNA, 75 bp, synthetic construct
  source 1..75: mol_type = other DNA
tcttaagcttgtagcggctagcgagtgtagtgatgaagagaaggggctggctttgcagtgggtttctgaattgac

SEQ ID NO: 565734 - DNA, 75 bp, synthetic construct
  source 1..75: mol_type = other DNA
tcggacagcagcaagtggacacaggctgcggttatggaggagtacaagtcactggttaacagtggtgaagcggat

SEQ ID NO: 565735 - DNA, 75 bp, synthetic construct
  source 1..75: mol_type = other DNA
gaacgggagaatgaacgggttgggaacaatccgatgattcagcagacggataatgctgacagccggatgcatacg

SEQ ID NO: 565736 - DNA, 75 bp, synthetic construct
  source 1..75: mol_type = other DNA
caacggacacaggtgaatccggctacccagacaccggataatacggatgtgcgtgtacaggggctggagcaaaac

SEQ ID NO: 565737 - DNA, 75 bp, synthetic construct
  source 1..75: mol_type = other DNA
tcaataacaatcctgttaactcactggcgttccgggcagcggcatccgctgataacaaacttgaacagcatgcct

SEQ ID NO: 565738 - DNA, 75 bp, synthetic construct
  source 1..75: mol_type = other DNA
atgtattctaccgatgtcgtaaaagaaaatgcctacctttcagccacccgctcggggctggaatcgaacgagatc

SEQ ID NO: 565739 - DNA, 75 bp, synthetic construct
  source 1..75: mol_type = other DNA
ccggaccttgcagatgaaggcgcattacagaaatggtggtctgttctaccgttcttcaagagacggttatggttt

SEQ ID NO: 565740 - DNA, 75 bp, synthetic construct
  source 1..75: mol_type = other DNA
ccctgcagtgggtttctgaattgactgatgaattcatggcaaaaatcagagctcacgaatacaaccgctcaatgg

SEQ ID NO: 565741 - DNA, 75 bp, synthetic construct
  source 1..75: mol_type = other DNA
ctatccagtgggtttcagagctgactgatgagttgatggcgaaaatcagaagctatgaatataaccgttcaatgg

SEQ ID NO: 565742 - DNA, 75 bp, synthetic construct
  source 1..75: mol_type = other DNA
tgtttaacatttcgtgctttattgactggtgtcagtgtatccaattaactgacaaaaaacagttttacatttttt

SEQ ID NO: 565743 - DNA, 75 bp, synthetic construct
  source 1..75: mol_type = other DNA
gaaccgccagctgcaccggaagtgtctgcagtaagttcagtaatgctgaagaggcggcaaaggcggtggtgaaag

SEQ ID NO: 565744 - DNA, 75 bp, synthetic construct
  source 1..75: mol_type = other DNA
atgtatgaggagtgtgtgacatttttcatgaaagtaaaacaggtgataacctcctttcgtaaggggcattcacag

SEQ ID NO: 565745 - DNA, 75 bp, synthetic construct
  source 1..75: mol_type = other DNA
atggatataatgccattttaacggccgttgcagtatatgcattcgcaggagataaccagttcgataatatatttc

SEQ ID NO: 565746 - DNA, 75 bp, synthetic construct
  source 1..75: mol_type = other DNA
tatgctgggactacttgcaggaagccggaaactactgatgattacggttgtcgcttcgtttctgagtgtggtggt

SEQ ID NO: 565747 - DNA, 75 bp, synthetic construct
  source 1..75: mol_type = other DNA
gtgaactacatttctcagagtaaagtgcagaaagtttctccttctgacagcaacccgtggcgtgtttttgttgac

SEQ ID NO: 565748 - DNA, 75 bp, synthetic construct
  source 1..75: mol_type = other DNA
atgtatgaggagggtgtgacatttttcatgagagtaaaacaggtgataacctcctttcgtaaggggtattcacag

SEQ ID NO: 565749 - DNA, 75 bp, synthetic construct
  source 1..75: mol_type = other DNA
atgtatgaggagggtgtgacatttttcatgatagtaaaacaggtgataacctcctttcgtaaggggaattcacag

SEQ ID NO: 565750 - DNA, 75 bp, synthetic construct
  source 1..75: mol_type = other DNA
ccagcgtaacgcttgatgaaagcggaaaaggtcaattcaactggcagatgagcccgtgtaatctgaagatggcaa

SEQ ID NO: 565751 - DNA, 75 bp, synthetic construct
  source 1..75: mol_type = other DNA
ccagcgtaacgcttgatgaaagcggaaaaggcgagttcaactggcagatgagcccatgtaatttgaagatggcga

SEQ ID NO: 565752 - DNA, 75 bp, synthetic construct
  source 1..75: mol_type = other DNA
gtgaaaaaaataccttcattttcagccgttcgcgtaagcctgttgctgaccggctccctgctgaccgtcctccag

SEQ ID NO: 565753 - DNA, 75 bp, synthetic construct
  source 1..75: mol_type = other DNA
ttcttacgtctccttttgttataagtacatggttatacatacttgctcagcggcgctgtatgtcatcccatatct

SEQ ID NO: 565754 - DNA, 75 bp, synthetic construct
  source 1..75: mol_type = other DNA
ttggaggaagtggcaaatctggcagggacgaagctgttggaaaaggcaaaacccggtgaatacgtgcagggcata

SEQ ID NO: 565755 - DNA, 75 bp, synthetic construct
  source 1..75: mol_type = other DNA
gcgacgcagccctcgatgccgccagtgattcggtacgtcctctgactactaatggttgtgacgaatctcgcctga

SEQ ID NO: 565756 - DNA, 75 bp, synthetic construct
  source 1..75: mol_type = other DNA
tatcgctggactgtcgaagagtgcagggccatcaaggcggagtatcaacagaaacttaaaaaactgcgaaacagc

SEQ ID NO: 565757 - DNA, 75 bp, synthetic construct
  source 1..75: mol_type = other DNA
caagctcgtcactaagttggcactcgactggcagaaccgcattaaatttacactggaccataacttcagccttac

SEQ ID NO: 565758 - DNA, 75 bp, synthetic construct
  source 1..75: mol_type = other DNA
aaggggactgtttttgttccaatggggcctgctttatctgctggatttttcatatgcttattgcgagtgatataa

SEQ ID NO: 565759 - DNA, 75 bp, synthetic construct
  source 1..75: mol_type = other DNA
gcgctgcgggtgacacaaattgatgtcagcgcaggtgagaagcctggaatggtgaatgtgcagcggctggaattt

SEQ ID NO: 565760 - DNA, 75 bp, synthetic construct
  source 1..75: mol_type = other DNA
ctggaacaggctttcccactgtttatagagcagttagaaaatatgttgcgttccggtgagctaaatccacagcag

SEQ ID NO: 565761 - DNA, 75 bp, synthetic construct
  source 1..75: mol_type = other DNA
tcgattttttcgggcgcttaaagaacatgagcgaagccgagcgccaaaattatttagccactgaggaagctcagc

SEQ ID NO: 565762 - DNA, 75 bp, synthetic construct
  source 1..75: mol_type = other DNA
gagtgtgcatacacacttgaacatcatgatcacgcagtagccttcgccgctgagcttcgcaaaggaggcaaccag

SEQ ID NO: 565763 - DNA, 75 bp, synthetic construct
  source 1..75: mol_type = other DNA
tgcgtgacaagttgtcaccgtatgacaccgaagagatgcttgaggccatgcgtatttttctggaagaacagggag

SEQ ID NO: 565764 - DNA, 75 bp, synthetic construct
  source 1..75: mol_type = other DNA
cagaggtccgtgacaacatccgttttggtctggagtttgagaaatcagcctttggtaagtacaacgttgataatg

SEQ ID NO: 565765 - DNA, 75 bp, synthetic construct
  source 1..75: mol_type = other DNA
catcagttattacaagctttctttgtcttgctgtagatcgactaccacatcaacttaagtggagggaagagccag

SEQ ID NO: 565766 - DNA, 75 bp, synthetic construct
  source 1..75: mol_type = other DNA
gtacaccctgacaccacgcagcgactccctgctggcgtattacaactccccggcttctgtatttgcagccatact

SEQ ID NO: 565767 - DNA, 75 bp, synthetic construct
  source 1..75: mol_type = other DNA
ctgtatgcaccctggttcagacctggtagggaaggttgaaatgactgagtggttagttgactttgctgcccagct

SEQ ID NO: 565768 - DNA, 75 bp, synthetic construct
  source 1..75: mol_type = other DNA
gcaatgaacacccgactgaagaacgccgcgccggatattattgcagcgcgaaaatctgccacaacaacgcctgcg

SEQ ID NO: 565769 - DNA, 75 bp, synthetic construct
  source 1..75: mol_type = other DNA
atgtttgtgaaacctgttaaagggcggtcagtgcctgaccctgcccgcggtgatcttttgcccaccgaagggcga

SEQ ID NO: 565770 - DNA, 75 bp, synthetic construct
  source 1..75: mol_type = other DNA
ttgcaaattaccctgcaacgggcgcggacgttatatcagcacggcgcggtaagttatctggaagtgctggatgcc

SEQ ID NO: 565771 - DNA, 75 bp, synthetic construct
  source 1..75: mol_type = other DNA
acacgctcaaccagctgcgtcccttgctcattggttttcgcaaggcgaatggcctgacgcaaaaagacctgtccg

SEQ ID NO: 565772 - DNA, 75 bp, synthetic construct
  source 1..75: mol_type = other DNA
aaccacgctatattgtccatgccagagtcggaatgaattatcaattatatgtccgtaattacagtcgtaacacca

SEQ ID NO: 565773 - DNA, 75 bp, synthetic construct
  source 1..75: mol_type = other DNA
gatgcgttgcagggaatggtactgggttatttgagccacatacttgccgatatgctgacacccgccggtgttccc

SEQ ID NO: 565774 - DNA, 75 bp, synthetic construct
  source 1..75: mol_type = other DNA
tgggttatttgagccacatacttgccgatatgctgacacccgccggtgttcccctgctctggccatgccgctggc

SEQ ID NO: 565775 - DNA, 75 bp, synthetic construct
  source 1..75: mol_type = other DNA
ggcggttcagcattgcggttccattcaccgtcagcctgatccgccccctgcaccgcccgtcatcagcgctggtgc

SEQ ID NO: 565776 - DNA, 75 bp, synthetic construct
  source 1..75: mol_type = other DNA
gcaaacctgttttatacgctggggattcgcaaaggcgacaaggttgcactacatctcgacaactgcccggaattt

SEQ ID NO: 565777 - DNA, 75 bp, synthetic construct
  source 1..75: mol_type = other DNA
ggagacaatattgcagcagctggcggcgatgaacacccgactgaagagcgccgcaccggatattatcgcagcgcg

SEQ ID NO: 565778 - DNA, 75 bp, synthetic construct
  source 1..75: mol_type = other DNA
gcattagaacgggttcagcagctgaccgctcgtgttgtcgattatgttggtgaatggcactcccatcctcaagga

SEQ ID NO: 565779 - DNA, 75 bp, synthetic construct
  source 1..75: mol_type = other DNA
ttattgagcgaatattttggtggctcagagaatcagctgaacagcgtttgcatcgagaagaccaacctcttgagc

SEQ ID NO: 565780 - DNA, 75 bp, synthetic construct
  source 1..75: mol_type = other DNA
gcggaagaaaatggtcggtctgttaattctgagatttatcagcgagtaatggaaagctttaagaaggaagggcgc

SEQ ID NO: 565781 - DNA, 75 bp, synthetic construct
  source 1..75: mol_type = other DNA
aactggagaatgccagtacgaccctgatcccggccagtagcggtgaagatccgttctggcagggcagtgcgcgca

SEQ ID NO: 565782 - DNA, 75 bp, synthetic construct
  source 1..75: mol_type = other DNA
caatcagcgcccgacagcgcaggatctggataaattgcagggtaaattagtgcgtctgactgaccagggcgagat

SEQ ID NO: 565783 - DNA, 75 bp, synthetic construct
  source 1..75: mol_type = other DNA
gtctaccggcaaccattttggcgggcggctggtatttgacggtaaaggttatctttttattgctctgggcgaaaa

SEQ ID NO: 565784 - DNA, 75 bp, synthetic construct
  source 1..75: mol_type = other DNA
ggaaagattcgcccgctgtgagcggcatggccttctataacagcgataaattcccccagtggcagcaaaaattat

SEQ ID NO: 565785 - DNA, 75 bp, synthetic construct
  source 1..75: mol_type = other DNA
gaagcaatcagtagcagtatctgatgaacaggctaaagcattctcaaaatttgatgataatattaataaattatc

SEQ ID NO: 565786 - DNA, 75 bp, synthetic construct
  source 1..75: mol_type = other DNA
ctagatcgtcaggaatcaggtggtgataatacttctggtgctggtgaaattgttgttaatgccccaatgtatgtt

SEQ ID NO: 565787 - DNA, 75 bp, synthetic construct
  source 1..75: mol_type = other DNA
acagaacgcaactgattcaggtcaggtattattgatggaatttatgtatccagtagtaagagagatgaatgcatt

SEQ ID NO: 565788 - DNA, 75 bp, synthetic construct
  source 1..75: mol_type = other DNA
atgaagctgatcgtgcctttcccgcccagcgtgaacacgtactggcgacaccccaacaaaggggtgtttgctggt

SEQ ID NO: 565789 - DNA, 75 bp, synthetic construct
  source 1..75: mol_type = other DNA
atgaagctgatcctgcctttccctcccagcgtgaacacgtactggcgacaccccaacaaaggggcgtttgctggt

SEQ ID NO: 565790 - DNA, 75 bp, synthetic construct
  source 1..75: mol_type = other DNA
atgaagctgatcttgcctttcccgcccagcgtgaacacgtactggcgacaccccaacaaaggggggtttgctggt

SEQ ID NO: 565791 - DNA, 75 bp, synthetic construct
  source 1..75: mol_type = other DNA
tattaacggacaggaggcagcgaattcgtgatgttcgcagcggacccgacggttatttatacgttctgaccgacg

SEQ ID NO: 565792 - DNA, 75 bp, synthetic construct
  source 1..75: mol_type = other DNA
ccagcgtgaacacgtactggcgacaccccaacaaaggggcgtttgtaggtaaaagcctgataagcgaggcggggc

SEQ ID NO: 565793 - DNA, 75 bp, synthetic construct
  source 1..75: mol_type = other DNA
atgaagctgatcctgcctttcccgcccagcgtgaacacgtactggcgacaccccaacaaaggggcgtttgcaggt

SEQ ID NO: 565794 - DNA, 75 bp, synthetic construct
  source 1..75: mol_type = other DNA
tcagtaccgcaaagggtgctagtgctggtcagttccacggtggtgtagatgaaatacccgctaacctgaataata

SEQ ID NO: 565795 - DNA, 75 bp, synthetic construct
  source 1..75: mol_type = other DNA
accttttacggaaaaaatggtgagtcagcctgtctataccatccgttattacgaacataagctgcagtacagtgc

SEQ ID NO: 565796 - DNA, 75 bp, synthetic construct
  source 1..75: mol_type = other DNA
accttctttgttgtctcctggattctggggcgtcagggtaaacaacagagcgaaaatgaaatcacaggtggtcgt

SEQ ID NO: 565797 - DNA, 75 bp, synthetic construct
  source 1..75: mol_type = other DNA
agtttatgttgagtagtgctcacctgcaggcgttagaaattattgaacaacatcagcgcataatacttaatgaga

SEQ ID NO: 565798 - DNA, 75 bp, synthetic construct
  source 1..75: mol_type = other DNA
cctttctggcagggcagtgcgcgcaccatcttcgcggaaggtgctgagcgaatgcgtaaagatgccgatcgcagc

SEQ ID NO: 565799 - DNA, 75 bp, synthetic construct
  source 1..75: mol_type = other DNA
cgtgctgactaactacgtcaaggcgatgcgttatctgcagggtatcgacaggcccggacgcgaaaagtttaccat

SEQ ID NO: 565800 - DNA, 75 bp, synthetic construct
  source 1..75: mol_type = other DNA
cgacctgcagtgttttgtcaccctgccgggaagttatccggtggtgaaactgacaatgaagtatgaggcgatgcc

SEQ ID NO: 565801 - DNA, 75 bp, synthetic construct
  source 1..75: mol_type = other DNA
ctcgacagacagtctgaccttcagaagcaataccaaagcggcgatatcagtaaatcgctttatgaccaggagacg

SEQ ID NO: 565802 - DNA, 75 bp, synthetic construct
  source 1..75: mol_type = other DNA
tcatgaaagccggtaataatcttcctctcagtcctgccaccattggtgggccaccctcatccagcaaaaattatt

SEQ ID NO: 565803 - DNA, 75 bp, synthetic construct
  source 1..75: mol_type = other DNA
ctacaaaaagtctgatgctcagatgggcgactggcaaagcgggataatggactcgttgaatgattatgctgataa

SEQ ID NO: 565804 - DNA, 75 bp, synthetic construct
  source 1..75: mol_type = other DNA
tattgctgaatttgctcttgattggggtgttaattatttattagaaaataatgaggttgatgccatcgtctttag

SEQ ID NO: 565805 - DNA, 75 bp, synthetic construct
  source 1..75: mol_type = other DNA
gacaagctgcgggccgcgcacgcgctcgccggtgacgggctggaaagtgtcgcccgcaccgtgcttatcagtctg

SEQ ID NO: 565806 - DNA, 75 bp, synthetic construct
  source 1..75: mol_type = other DNA
ccttttccctgttgcgtccgggtggagtgctggtcgccgtctgtctcaacggaccacgccagcaggagaagctgt

SEQ ID NO: 565807 - DNA, 75 bp, synthetic construct
  source 1..75: mol_type = other DNA
ccgctttgaactggcggataaaagctcgctgttccttgatgaagtgggcgatatgccgctggaattacagccgaa

SEQ ID NO: 565808 - DNA, 75 bp, synthetic construct
  source 1..75: mol_type = other DNA
agtggtcgcaataatcggcggatggtgaaaatgaactgcgccgccatgcctgccgggttgctggaaagtgatctg

SEQ ID NO: 565809 - DNA, 75 bp, synthetic construct
  source 1..75: mol_type = other DNA
gccagattgccgaacgagtggcaatcgccgtggataatgccctcgcctaccaggaaatccaccgtctgaaagagc

SEQ ID NO: 565810 - DNA, 75 bp, synthetic construct
  source 1..75: mol_type = other DNA
tgggcttctccggtgcttggatcggcaacctgacggtgctggaaccctatcgaccgttgttcatcggcgcggcgc

SEQ ID NO: 565811 - DNA, 75 bp, synthetic construct
  source 1..75: mol_type = other DNA
tggttagcattttcgtggaccggcagcactcttgtatcagtcattacgtttttcgtaagcatcattattcttatc

SEQ ID NO: 565812 - DNA, 75 bp, synthetic construct
  source 1..75: mol_type = other DNA
ccataatctcagtgggcgtaataatcgccgcatggtcaaaatgaactgcgcggcaatgcctgccggattgctgga

SEQ ID NO: 565813 - DNA, 75 bp, synthetic construct
  source 1..75: mol_type = other DNA
tcgctgttcctcgatgaagtgggtgatatgccgctggagttacagccgaagctactgcgcgtgttgcaggaacag

SEQ ID NO: 565814 - DNA, 75 bp, synthetic construct
  source 1..75: mol_type = other DNA
tccctgttcctcgacgaagtgggcgatatgccactggagttacagccgaagttgctgcgtgtattgcaggaacag

SEQ ID NO: 565815 - DNA, 75 bp, synthetic construct
  source 1..75: mol_type = other DNA
atgacagacatagcctcaaggaatagctatgaaaaaaaaatacttgaagcaatactggcgattaatctcgccgta

SEQ ID NO: 565816 - DNA, 75 bp, synthetic construct
  source 1..75: mol_type = other DNA
accaccaccaacctgagtttgctgcgccagattgccgaacgagtggcaatcgccgtggataatgccctcgcctac

SEQ ID NO: 565817 - DNA, 75 bp, synthetic construct
  source 1..75: mol_type = other DNA
gtttaattgccgcgactaaccgcgatctgaaaaaaatggtcgccgaccgagagttccgtagcgatctctattacc

SEQ ID NO: 565818 - DNA, 75 bp, synthetic construct
  source 1..75: mol_type = other DNA
gctgtgaatttattcgttatgacgatcgcccgtggagcgaaaaagagttcaatcgcctgcaaacttttacgcaga

SEQ ID NO: 565819 - DNA, 75 bp, synthetic construct
  source 1..75: mol_type = other DNA
aacgttatgtgaaagctttgggcggcgagttaagcctggacgtgacattgcccaccggaaagcgaggggcgttta

SEQ ID NO: 565820 - DNA, 75 bp, synthetic construct
  source 1..75: mol_type = other DNA
ataagaataggccagcggtttgtatgtaaaccaatgacaggaaaggattctaaagtttcatcactttgccatgaa

SEQ ID NO: 565821 - DNA, 75 bp, synthetic construct
  source 1..75: mol_type = other DNA
caaagtggttcaacgactacatcgccgcgacgacacagagttgcaaagaggacagcaaggcttgtccttggccgc

SEQ ID NO: 565822 - DNA, 75 bp, synthetic construct
  source 1..75: mol_type = other DNA
gctttagtccatatcgacttcatgtgggccttccatcatttcaatgataagcctttccatgccctggagatttac

SEQ ID NO: 565823 - DNA, 75 bp, synthetic construct
  source 1..75: mol_type = other DNA
ggcgattcagtattgcagttcccttcaccgtcagtttgattcgccccctgcatcgtccgtcatcagcactggctc

SEQ ID NO: 565824 - DNA, 75 bp, synthetic construct
  source 1..75: mol_type = other DNA
tacttgaagagtggctttcggcccagcgccatgatttaggactcaccgaaacgctgcatacgcctgcgggtacgg

SEQ ID NO: 565825 - DNA, 75 bp, synthetic construct
  source 1..75: mol_type = other DNA
acagaacgtaccgaattactctctttagatgaagtgtgtgtgttacctccgggtcatccgctggcggtaaaaaag

SEQ ID NO: 565826 - DNA, 75 bp, synthetic construct
  source 1..75: mol_type = other DNA
atcacgtcatcggttgagtccattcacacggccttaattgatgggtggaccatgatgatcggctattccagtggt

SEQ ID NO: 565827 - DNA, 75 bp, synthetic construct
  source 1..75: mol_type = other DNA
tccgcccgttacacgctgccgctggaggttatcccggccgttcttgtccagcactgctgcgcgattgccttttat

SEQ ID NO: 565828 - DNA, 75 bp, synthetic construct
  source 1..75: mol_type = other DNA
atcaggcgcgtgaccgttaccgtgaggcgctggcctggctgaaagacgtcatgaacggcaacgtgccggtcggcg

SEQ ID NO: 565829 - DNA, 75 bp, synthetic construct
  source 1..75: mol_type = other DNA
gtctgatggcttggccgacccgttagcggaaatggcttactttgacgggggggatgacccgttggcagtgaaagt

SEQ ID NO: 565830 - DNA, 75 bp, synthetic construct
  source 1..75: mol_type = other DNA
accgcatccagcgctacctggcaaaacgccggtacgcttgggaagatcgccatcccgtaggtcgaacgatttatg

SEQ ID NO: 565831 - DNA, 75 bp, synthetic construct
  source 1..75: mol_type = other DNA
gagttcttgctatctgctggcatgggctcaccataccccctgccaagttacctggagagcaatgtcactacggca

SEQ ID NO: 565832 - DNA, 75 bp, synthetic construct
  source 1..75: mol_type = other DNA
ctccgcattgcaggcccccatcaaccgtttcgttcctcacgaactcacccatgaagagatcctgcaactgatcga

SEQ ID NO: 565833 - DNA, 75 bp, synthetic construct
  source 1..75: mol_type = other DNA
atccccaccagcctgattatcgcattgctggaattgcgtcatttataccggcagttcacaaataccaccagccaa

SEQ ID NO: 565834 - DNA, 75 bp, synthetic construct
  source 1..75: mol_type = other DNA
catgtattgtctggtattaatgttcaggatacagggtctaactctgccgataatatagcgggtgtttattacaga

SEQ ID NO: 565835 - DNA, 75 bp, synthetic construct
  source 1..75: mol_type = other DNA
gtcatgtattgtctggtattaatgttcaggatacagggtctaactctgccgataatatagcgggcgtttattaca

SEQ ID NO: 565836 - DNA, 75 bp, synthetic construct
  source 1..75: mol_type = other DNA
atcagctcgctggtaaataagacctccgggcgtgtcagcgtatttggttacgatcttgaaaaagatgtcgtcaac

SEQ ID NO: 565837 - DNA, 75 bp, synthetic construct
  source 1..75: mol_type = other DNA
tatggtcgcgaaaagccagcctttattattgcacatccgggcaacggtgaagcgccatcggccaacggcgttact

SEQ ID NO: 565838 - DNA, 75 bp, synthetic construct
  source 1..75: mol_type = other DNA
atccccaccagtctgattatcgcattactggaattgcgtcacttataccggcagttcacaaataccaccagccaa

SEQ ID NO: 565839 - DNA, 75 bp, synthetic construct
  source 1..75: mol_type = other DNA
ctctgaaaattccggcccgcggagtaaaaatcagtattgggctcggtttcggtaatcagataattgataagggtg

SEQ ID NO: 565840 - DNA, 75 bp, synthetic construct
  source 1..75: mol_type = other DNA
atgtttgtgaaacccctgaaagggcggtcggttcctgaccctgcccgtggagatcttttgccttctgacgggcga

SEQ ID NO: 565841 - DNA, 75 bp, synthetic construct
  source 1..75: mol_type = other DNA
atgtttgtgaaacctgttaaagggcggtcggtacctgaccctgcccacggcgaccttttgcccgccgaggggcga

SEQ ID NO: 565842 - DNA, 75 bp, synthetic construct
  source 1..75: mol_type = other DNA
actctgccgataatatagcgggtgtttattacagacccgttcaaaagtatataaatggcacctggtataatgtag

SEQ ID NO: 565843 - DNA, 75 bp, synthetic construct
  source 1..75: mol_type = other DNA
acgctcgatttagtatcgctgactgcagaatgcaaagtcacaacacaaggattcgggacagaggaggaccgagac

SEQ ID NO: 565844 - DNA, 75 bp, synthetic construct
  source 1..75: mol_type = other DNA
ttgcaacaatagcgagcgataacgggctaaaacctcgcgtatcaaagcggtttgcagacaacattatcacgcagc

SEQ ID NO: 565845 - DNA, 75 bp, synthetic construct
  source 1..75: mol_type = other DNA
atgaatgataaaactaagaggtttaatatgattgatgaattccacgttatgtatatgtatagaaaaatccaagct

SEQ ID NO: 565846 - DNA, 75 bp, synthetic construct
  source 1..75: mol_type = other DNA
ttagtgcgggtgagaagccagggatggtgaatgtgcagcgactggagtttggagggggggaagtatcaggagatt

SEQ ID NO: 565847 - DNA, 75 bp, synthetic construct
  source 1..75: mol_type = other DNA
tgttactggcagcggtggtgttcctgtttagcgtcggatattacgtcctcatctggcagccgttgagcgaacgga

SEQ ID NO: 565848 - DNA, 75 bp, synthetic construct
  source 1..75: mol_type = other DNA
aaaatccgccacaacaacgcctgcgcaggtatcgcgggttatcagtgacagcgcttccgcgcactcggtagtcat

SEQ ID NO: 565849 - DNA, 75 bp, synthetic construct
  source 1..75: mol_type = other DNA
aaaagcaaaatcataatttacccctccctgattttgatgaaacaggattgataggaagacaaagtcatgtccaaa

SEQ ID NO: 565850 - DNA, 75 bp, synthetic construct
  source 1..75: mol_type = other DNA
atgtcattagagcctgacttaaccttcagcctggacaggcctggtaaaccggagaaagctgtcgcgacgtatcag

SEQ ID NO: 565851 - DNA, 75 bp, synthetic construct
  source 1..75: mol_type = other DNA
acacaaattgatgtcagcgcaggtgagaagccagggatggtgaatgtgcagcgactggagtttggacgggggtag

SEQ ID NO: 565852 - DNA, 75 bp, synthetic construct
  source 1..75: mol_type = other DNA
ctatgcgtcagcaaagaaaaaaacatcttcatgccatcatagagaaaataaataaccgcatcggcaacaacacca

SEQ ID NO: 565853 - DNA, 75 bp, synthetic construct
  source 1..75: mol_type = other DNA
gataataatgataacgttatgcctgatactaatgattttatcaaaaccacaatgtatttaacaatgaaacagcgg

SEQ ID NO: 565854 - DNA, 75 bp, synthetic construct
  source 1..75: mol_type = other DNA
atggctggaatttatccagagaatgtcgttaccgaatccagacgacacttgaaaatgaacttgatttcttcgatc

SEQ ID NO: 565855 - DNA, 75 bp, synthetic construct
  source 1..75: mol_type = other DNA
gcgctgcgggtgacacaaattgatgtcagtgctgctgagaagccagggatggtaaatgtgcagcgactggagttg

SEQ ID NO: 565856 - DNA, 75 bp, synthetic construct
  source 1..75: mol_type = other DNA
cgcaatatattatggcggcagacagaggaaatagcaccgtcgcgaaactggtcgattattgtaatgacgcggtga

SEQ ID NO: 565857 - DNA, 75 bp, synthetic construct
  source 1..75: mol_type = other DNA
attccgctaacggaaacgccggtggtcagcgcccctgtcgatggcgcaatatcaggcttgtcagtacaaaatggt

SEQ ID NO: 565858 - DNA, 75 bp, synthetic construct
  source 1..75: mol_type = other DNA
aaatgtacgtcaacttctcgctattccagtcgatgccggacgcatgggggatcgaccagttgttcccggttctgc

SEQ ID NO: 565859 - DNA, 75 bp, synthetic construct
  source 1..75: mol_type = other DNA
agtcttctggcggggaaaaatcgaagttcggcctggcggcgactcaggtactgcaactggttgaaaccctgcgtg

SEQ ID NO: 565860 - DNA, 75 bp, synthetic construct
  source 1..75: mol_type = other DNA
ccgagtcgggtcgtgcggtgactgcgcatcacaccgtgctggtgtcgaatatcatcggcgtggaacgtaacgaat

SEQ ID NO: 565861 - DNA, 75 bp, synthetic construct
  source 1..75: mol_type = other DNA
gtccttacaacattggccccggtaagtgtttcccgtcgacgttttataaacgaattaatgcaggcgatcgcaggg

SEQ ID NO: 565862 - DNA, 75 bp, synthetic construct
  source 1..75: mol_type = other DNA
atgtcgccatcattacgcaaggctattgctgctgctattggtggtggggctgttgccatagcgtctgtgctcatc

SEQ ID NO: 565863 - DNA, 75 bp, synthetic construct
  source 1..75: mol_type = other DNA
atacttgaccagtttctggacgaaaaagagggtaaccacacaaaggcataccgcgatggttccggcatatggacc

SEQ ID NO: 565864 - DNA, 75 bp, synthetic construct
  source 1..75: mol_type = other DNA
cccacagatcctgcagcaccgtttgcgttccattaacgccgcgttcaaacgtgcgcgggaatcctacggctataa

SEQ ID NO: 565865 - DNA, 75 bp, synthetic construct
  source 1..75: mol_type = other DNA
ctgtgacgaactgggcgaagaagcgaagcgtgaaggccgcgtgaccgcgcatgactatgtcgcttcgcgcccggt

SEQ ID NO: 565866 - DNA, 75 bp, synthetic construct
  source 1..75: mol_type = other DNA
atcttacgtggtgatgtgatttacgatatcgaacagggcttccctgttgcgccgaaaggtcaatttatccttaaa

SEQ ID NO: 565867 - DNA, 75 bp, synthetic construct
  source 1..75: mol_type = other DNA
tgcagaagcagctggatccgcaaaaccgtgcgcatcgtccgattatcgatgaattgcaggaacgtatggcggaca

SEQ ID NO: 565868 - DNA, 75 bp, synthetic construct
  source 1..75: mol_type = other DNA
acgagccgggcacccgccgttctctgcgtgagtggctgcatgacagccagatggacctgcatgatattcatatcg

SEQ ID NO: 565869 - DNA, 75 bp, synthetic construct
  source 1..75: mol_type = other DNA
aagcagaacgtctgaatgtcgttcctcgtctgggcgtgcgtgcacgtctggcttcgcagggctcgggtaaatggc

SEQ ID NO: 565870 - DNA, 75 bp, synthetic construct
  source 1..75: mol_type = other DNA
tgccgcaggtgcttctgcgcctgaaattctcgaccagtttcttgacgaaaaagaaggtaaccacaccacggcata

SEQ ID NO: 565871 - DNA, 75 bp, synthetic construct
  source 1..75: mol_type = other DNA
tgccgtattcgctcaaacaactgctacggtcaggtctcacggcgtgaccaggagagcgcgctggcgtgctgggga

SEQ ID NO: 565872 - DNA, 75 bp, synthetic construct
  source 1..75: mol_type = other DNA
cgtattcgctcaaataactgttacggtcaggtatcccgtcgcgaccaggagagtgcgctggcgtgctggggaatt

SEQ ID NO: 565873 - DNA, 75 bp, synthetic construct
  source 1..75: mol_type = other DNA
caggttaacgccattgaacgtgataaggcgctggcatgggtggagaaaaacatcaaagtgccactgaccgaaccc

SEQ ID NO: 565874 - DNA, 75 bp, synthetic construct
  source 1..75: mol_type = other DNA
caaagcagaatgcaaagcactcttgaataaagaccttgccactgtcgccagacaaattaacccgtacatcgaagt

SEQ ID NO: 565875 - DNA, 75 bp, synthetic construct
  source 1..75: mol_type = other DNA
cagaaagcggggatcgcgtcattctgtccgtacaatattggccccggtaagtgttttccgtcgacgttttataaa

SEQ ID NO: 565876 - DNA, 75 bp, synthetic construct
  source 1..75: mol_type = other DNA
ggcagagactgccgtatccgctcaaataattgctacggtcaggtatcccggcgagatcaggaaagtgcgctggcg

SEQ ID NO: 565877 - DNA, 75 bp, synthetic construct
  source 1..75: mol_type = other DNA
gtgaaaatctgcttaattgatgaatcgggcgccggagacggcgccttatctgttctggcgacccgctgggggctg

SEQ ID NO: 565878 - DNA, 75 bp, synthetic construct
  source 1..75: mol_type = other DNA
acgcaaattcggcggtggtcgcggtgaggcggtggcgaaagcggtgggcattaaaggcgattatttgccggatgt

SEQ ID NO: 565879 - DNA, 75 bp, synthetic construct
  source 1..75: mol_type = other DNA
ctggcaaacattgccacaccgaacgcggttgtcaccaaagggcatcgctttgatatttatgccggaacgccggtg

SEQ ID NO: 565880 - DNA, 75 bp, synthetic construct
  source 1..75: mol_type = other DNA
agcataccgtgatggtgcgggtatctggaccatctgccgtggagccacccgggtggatggtaagcctgttattcc

SEQ ID NO: 565881 - DNA, 75 bp, synthetic construct
  source 1..75: mol_type = other DNA
agcgtgataaggcgctggcatgggtggcgaaaaacatcaaagtgccactgactgaaccccagaaagcgggtattg

SEQ ID NO: 565882 - DNA, 75 bp, synthetic construct
  source 1..75: mol_type = other DNA
actggcccaagtggtaacgatggtctggaaggtgtcagctacataccatataaagatatcgttggtgtatggact

SEQ ID NO: 565883 - DNA, 75 bp, synthetic construct
  source 1..75: mol_type = other DNA
ccggttgccgtctgcacatttgccatatcagcagcccggaaggtgttgaagaagtgactcgtgcacgtcaggaag

SEQ ID NO: 565884 - DNA, 75 bp, synthetic construct
  source 1..75: mol_type = other DNA
ctcaaacaactgctacggtcaggtttcacggcgtgaccaggagagcgcgctggcgtgctggggaattgacagata

SEQ ID NO: 565885 - DNA, 75 bp, synthetic construct
  source 1..75: mol_type = other DNA
cccagaaagcggggattgcgtcattctgtccgtacaacattggccccggtaagtgtttcccgtcgacgttttaca

SEQ ID NO: 565886 - DNA, 75 bp, synthetic construct
  source 1..75: mol_type = other DNA
gacgcttcttcgcaaaataaaccagggcgatatcaaaggcgcatgtgatcagctacggcgctggacatacgctgg

SEQ ID NO: 565887 - DNA, 75 bp, synthetic construct
  source 1..75: mol_type = other DNA
gggcgtctgcgcctgaaatcctcgaccagtttcttgacgaaaaagaaggtaaccacaccacggcataccgtgatg

SEQ ID NO: 565888 - DNA, 75 bp, synthetic construct
  source 1..75: mol_type = other DNA
cgtattcgctcaaataactgttacggtcaggtatcccggagagatcaggagagcgcgctggcgtgctggggaatc

SEQ ID NO: 565889 - DNA, 75 bp, synthetic construct
  source 1..75: mol_type = other DNA
atccttgaccagtttctggatgaaaaggaaggcaaccacacaacagcataccgtgatggcgcgggtatctggacc

SEQ ID NO: 565890 - DNA, 75 bp, synthetic construct
  source 1..75: mol_type = other DNA
atgctcggtaaaacgtataccaaagcagaatgcaaagcactcttgaataaagaccttgccactgtcgccagacaa

SEQ ID NO: 565891 - DNA, 75 bp, synthetic construct
  source 1..75: mol_type = other DNA
aggtgcctgcgaagcgattcgctggtggattaaggacggtggcagagactgccgtattcgctcaaataactgtta

SEQ ID NO: 565892 - DNA, 75 bp, synthetic construct
  source 1..75: mol_type = other DNA
aggaaggtaaccacaccacggcataccgtgatggtgcgggtatctggaccatctgccgaggtgccatcatggtgg

SEQ ID NO: 565893 - DNA, 75 bp, synthetic construct
  source 1..75: mol_type = other DNA
gattaaggacggtggcagagactgccgtattcgctcaaataactgttacggtctgaaccgccccgggtttcctgg

SEQ ID NO: 565894 - DNA, 75 bp, synthetic construct
  source 1..75: mol_type = other DNA
gattaaggatggcggacgcgattgccgcattcgttcaaataactgttacggtcaggttattcgtcgtgaccagga

SEQ ID NO: 565895 - DNA, 75 bp, synthetic construct
  source 1..75: mol_type = other DNA
catacaggaaaagacatcatgctcggtaaaacgtataccaaagcagaatgcaaagcactcttgaataaagacctt

SEQ ID NO: 565896 - DNA, 75 bp, synthetic construct
  source 1..75: mol_type = other DNA
tggattaaggacggtggcagagactgccgtatccgctcaaataattgctacggtcaggtatcccggcgagatcag

SEQ ID NO: 565897 - DNA, 75 bp, synthetic construct
  source 1..75: mol_type = other DNA
atggtaaacctgtcttccccggcatgaagctgacgaaggaaaaatgcgcgcaggttaatgccatcgaacgagata

SEQ ID NO: 565898 - DNA, 75 bp, synthetic construct
  source 1..75: mol_type = other DNA
caggtcaacgctattgagcgtgataaggcgctggcatgggtggagcgcaatattaaagtaccactgaccgaacca

SEQ ID NO: 565899 - DNA, 75 bp, synthetic construct
  source 1..75: mol_type = other DNA
atggcagacctgtagtccccggcatgaagctgacgaaggaaaaatgcgaccgagtgaacgccatcgaacgggata

SEQ ID NO: 565900 - DNA, 75 bp, synthetic construct
  source 1..75: mol_type = other DNA
gtttcgccaggcatggttgatgcgcacacccatatttctgaaccgggtcgtagccactgggaaggttatgaaacc

SEQ ID NO: 565901 - DNA, 75 bp, synthetic construct
  source 1..75: mol_type = other DNA
atggtaagcctgttattcctggcatgaagctgtcgaaggggaaatgcgaccaggttaacgccattgagcgtgata

SEQ ID NO: 565902 - DNA, 75 bp, synthetic construct
  source 1..75: mol_type = other DNA
cgggttaacgctatcgaacgggataaggcgctggcatgggtggagaaaaacatcaaagtgccactgactgaaccc

SEQ ID NO: 565903 - DNA, 75 bp, synthetic construct
  source 1..75: mol_type = other DNA
agcatccgttcaaataactgctacggccaggtggttcgtcgtgaccaggaagcggcgcttgtgtgctggggtatc

SEQ ID NO: 565904 - DNA, 75 bp, synthetic construct
  source 1..75: mol_type = other DNA
ttgctgctattggtggcggagcaattgctatagcatcagtgttaatcactggcccaagtggtaacgatggtctgg

SEQ ID NO: 565905 - DNA, 75 bp, synthetic construct
  source 1..75: mol_type = other DNA
ttacagacggattaatgcaggagatcgaaaaggtgcctgcgaagctattcgctggtggattaaggacggtggcag

SEQ ID NO: 565906 - DNA, 75 bp, synthetic construct
  source 1..75: mol_type = other DNA
gaagttgtcgaaggagaaatgcgaccaggttaacgccatcgaacgtgataaggcgctggcatgggtggagaaaaa

SEQ ID NO: 565907 - DNA, 75 bp, synthetic construct
  source 1..75: mol_type = other DNA
aacgggataaggcgctggcatgggtggagcgtaatataaaagttccactgaccgagccacaaaaagcaggtatcg

SEQ ID NO: 565908 - DNA, 75 bp, synthetic construct
  source 1..75: mol_type = other DNA
gaccgaaccccagaaagcggggatcgcgtcattctgtccgtataacattggccccggtaagtgtttcccgtcgac

SEQ ID NO: 565909 - DNA, 75 bp, synthetic construct
  source 1..75: mol_type = other DNA
tcagatacgcggatgcgctggggcatccggccacgttgcttatcgggggcagcattcccgggtattcgtgtgagt

SEQ ID NO: 565910 - DNA, 75 bp, synthetic construct
  source 1..75: mol_type = other DNA
gcctttgcgctctggcagccctacagctgctgcaaaaagcgcgggcagaaatttctgggcagcactgatatctga

SEQ ID NO: 565911 - DNA, 75 bp, synthetic construct
  source 1..75: mol_type = other DNA
ggctggcgattgcattagcgtttggttgtgctgctcagccctttgcggccggagcgattaactccgcgcagatca

SEQ ID NO: 565912 - DNA, 75 bp, synthetic construct
  source 1..75: mol_type = other DNA
aggcggtcaggaggctggaaaaacagatgtgtcatccacaggctcaaggaaggtctgcagacacgtcttgatggt

SEQ ID NO: 565913 - DNA, 75 bp, synthetic construct
  source 1..75: mol_type = other DNA
gatgtatcatctacaggctcgactaagccggaaagtggaaactcctctggacacgtgacggatgcgaacggtaac

SEQ ID NO: 565914 - DNA, 75 bp, synthetic construct
  source 1..75: mol_type = other DNA
gagttcaaatttctaaaagtgagcttgtatggcgtcaactctattgagcagattgaagatgagttctatcgtcaa

SEQ ID NO: 565915 - DNA, 75 bp, synthetic construct
  source 1..75: mol_type = other DNA
tgcgacagagtatcaccatggattgaaagagtttgtgattatgagcttcgacctaatgtcgaaaccccagccacc

SEQ ID NO: 565916 - DNA, 75 bp, synthetic construct
  source 1..75: mol_type = other DNA
gcctttgaatctcaggataagagttcagatacaggtcgcacagttatcaaactggatacaaattcaggtgaagcg

SEQ ID NO: 565917 - DNA, 75 bp, synthetic construct
  source 1..75: mol_type = other DNA
gtgaaaaaagcattgttcaggaagcgcggaagcccaccgccgaaaggcatgctgccattctcaaccgactggttt

SEQ ID NO: 565918 - DNA, 75 bp, synthetic construct
  source 1..75: mol_type = other DNA
ctgctgccacacctctgatgccttattttctcagcacactggacagtcttgcctggcgcaccggcatgcctgaat

SEQ ID NO: 565919 - DNA, 75 bp, synthetic construct
  source 1..75: mol_type = other DNA
caccggtgacgccggccatgccctatttcctgagtaccctggacagcatcgtctggcgaacgggattacctgaat

SEQ ID NO: 565920 - DNA, 75 bp, synthetic construct
  source 1..75: mol_type = other DNA
atttccacctatacggcaccgggtggtaatccctggaaagagatgtcgctggtcagccggaccgcaggtggcccg

SEQ ID NO: 565921 - DNA, 75 bp, synthetic construct
  source 1..75: mol_type = other DNA
cagcgaagcaggcagctcaggaagcggtgaacaaggtaccggatgcagacaagggtaacctgcaggatcgcgtgg

SEQ ID NO: 565922 - DNA, 75 bp, synthetic construct
  source 1..75: mol_type = other DNA
agaaagggcagaagatagtcgttacttgcgaaaagatgcagttatttgttcgtgccccatcaggtagtaactgta

SEQ ID NO: 565923 - DNA, 75 bp, synthetic construct
  source 1..75: mol_type = other DNA
aaaaagattttatgaaaatagtggttgcttcactggtaaatccagaacaattgcaagctgccgatggtaaatcaa

SEQ ID NO: 565924 - DNA, 75 bp, synthetic construct
  source 1..75: mol_type = other DNA
tcatgctctttccgttcatgtctttcgctgatgggggagctacttcaggcatacagccatatcctgagtacgtgg

SEQ ID NO: 565925 - DNA, 75 bp, synthetic construct
  source 1..75: mol_type = other DNA
tcagataacaagagctatgccccttgggaaccgatcgagaaagatgagatgaatcgggtgttcgtgttcggcaag

SEQ ID NO: 565926 - DNA, 75 bp, synthetic construct
  source 1..75: mol_type = other DNA
ctgatttctgacgcgctaaagcaagatcttcagcgtcgcaaaatgagcgcaccgtataaggatttactggtgaaa

SEQ ID NO: 565927 - DNA, 75 bp, synthetic construct
  source 1..75: mol_type = other DNA
tggtcagcgccgttctggcgttggtggtgggggccggagctggatggggtgtctggcatcattatgccggaaaag

SEQ ID NO: 565928 - DNA, 75 bp, synthetic construct
  source 1..75: mol_type = other DNA
aatggcatccgcatagtgcactgggttatcgctcgccacgggaatatctacggcagcgggccagtaatgggttaa

SEQ ID NO: 565929 - DNA, 75 bp, synthetic construct
  source 1..75: mol_type = other DNA
ttatcgctcgccacgggaatatctacggcagcgggccagtaatgggttaagtgataacaggtgtctggaaatata

SEQ ID NO: 565930 - DNA, 75 bp, synthetic construct
  source 1..75: mol_type = other DNA
atgaaaatgattttcaccggcaaggtcagtggagaaaaaacagtactggcagccggagcccgtcatactgtaaag

SEQ ID NO: 565931 - DNA, 75 bp, synthetic construct
  source 1..75: mol_type = other DNA
ctgattctctgctcagagattactaccagttggatgaagcttcagaaaaaattggttgtagtgaaaaggatatac

SEQ ID NO: 565932 - DNA, 75 bp, synthetic construct
  source 1..75: mol_type = other DNA
atgattacacatttccgtcaagctatagaagaaacgctgccctggctttcctcttttggcgctgacccaaccggc

SEQ ID NO: 565933 - DNA, 75 bp, synthetic construct
  source 1..75: mol_type = other DNA
cggaatggctggaaacccagcagcaatttaaaaaaagaatggcagcaagtgggctggaaacacgtttcgatgaag

SEQ ID NO: 565934 - DNA, 75 bp, synthetic construct
  source 1..75: mol_type = other DNA
tgaaaaccgggttatgtaacggcgtcgatgcagtaatcaaagcctatcgtttatacctcgaacagtgtccacaag

SEQ ID NO: 565935 - DNA, 75 bp, synthetic construct
  source 1..75: mol_type = other DNA
ttatcaccaccgactatttgcaacagtgccctggaaagtcagggcgaatatgactcacaatgggcggcaatttgt

SEQ ID NO: 565936 - DNA, 75 bp, synthetic construct
  source 1..75: mol_type = other DNA
atttaagtgatattggttgtctggagattcagggggccagtctacagacagataacgatggttttttaagtaaaa

SEQ ID NO: 565937 - DNA, 75 bp, synthetic construct
  source 1..75: mol_type = other DNA
ggatttatctgacaggactgcaaaaacttggcgattttacgttagaaggcgcggtgcgtaatgacgacaactcgc

SEQ ID NO: 565938 - DNA, 75 bp, synthetic construct
  source 1..75: mol_type = other DNA
aaaaagatggtgtaacttaccttggaaaatatctaaaaaaaatcaattttacataaaaaaagatggatatagcat

SEQ ID NO: 565939 - DNA, 75 bp, synthetic construct
  source 1..75: mol_type = other DNA
tcgatttagtgtcgctgacagcagaatgcaaagtcacaactcaaggtttcgggaccgaggaggaccgggactgga

SEQ ID NO: 565940 - DNA, 75 bp, synthetic construct
  source 1..75: mol_type = other DNA
ccacagaatgatgtcacgctgaaaatgccggcctttgaatgggttcatgtgcagctccatcagcaaaaagggatg

SEQ ID NO: 565941 - DNA, 75 bp, synthetic construct
  source 1..75: mol_type = other DNA
gttctcaatgaactggaggaagagtacaaaaagcgagaagaagaagaaaaagaaaagcgagctcaggctgagcga

SEQ ID NO: 565942 - DNA, 75 bp, synthetic construct
  source 1..75: mol_type = other DNA
cgctatcagcggctgaacgtagagagttaataatcgcagagttaaagcgtaaaagccgcattcgcaccctgttgc

SEQ ID NO: 565943 - DNA, 75 bp, synthetic construct
  source 1..75: mol_type = other DNA
ggtgatattaaaggcgcatgtgatcagctacggcgctggacatatgatcctacccacgtaatatggacacaggcc

SEQ ID NO: 565944 - DNA, 75 bp, synthetic construct
  source 1..75: mol_type = other DNA
aggactcatcttcagttacaaggtgaccacaatttttgcagatggctcccgcgaaactgtcagagccctgcgact

SEQ ID NO: 565945 - DNA, 75 bp, synthetic construct
  source 1..75: mol_type = other DNA
gttctgaatgaactggagggcgagtacaaaaaacgggaagaagatgaaaaagaaaaacgagctcaggccgagcga

SEQ ID NO: 565946 - DNA, 75 bp, synthetic construct
  source 1..75: mol_type = other DNA
cgctatcagcggctgagcgtagagaggtaataatcgcagaattaaagcgaaaaagccgtattcgcaccttgttgc

SEQ ID NO: 565947 - DNA, 75 bp, synthetic construct
  source 1..75: mol_type = other DNA
taaaggatgtgtcaaagacttagccaccacattctgggcaagaaaacttgattgtattcataaccaatttcctct

SEQ ID NO: 565948 - DNA, 75 bp, synthetic construct
  source 1..75: mol_type = other DNA
gaattcctccacaatcgtcggagcatcatacgataaggatacaccagccaggaaaaccaagtcaccttcattagg

SEQ ID NO: 565949 - DNA, 75 bp, synthetic construct
  source 1..75: mol_type = other DNA
acctgtcgttccgggcatgaagttgtcgaaggaaaaatgcgaccaggttaacgccattgaacgtgataaggcgct

SEQ ID NO: 565950 - DNA, 75 bp, synthetic construct
  source 1..75: mol_type = other DNA
cagaaagcagggatcgcgtcattctgtccgtacaacattggtcccggtaagtgtttcccgtcgacgttttacaga

SEQ ID NO: 565951 - DNA, 75 bp, synthetic construct
  source 1..75: mol_type = other DNA
tttccagctgcaactgctgcggcggcaattttattacccatgctcaccagcctgttggcagctttgcctgcagct

SEQ ID NO: 565952 - DNA, 75 bp, synthetic construct
  source 1..75: mol_type = other DNA
caattttattacccacgctcaccagcctgttggcagctttgcctgcagcttatgtcaaccgccatcccgggcagt

SEQ ID NO: 565953 - DNA, 75 bp, synthetic construct
  source 1..75: mol_type = other DNA
gatagcgcaagcagagattcagttgcggcatgtgttctggctgtccactcttggattaacggccatcgcctggct

SEQ ID NO: 565954 - DNA, 75 bp, synthetic construct
  source 1..75: mol_type = other DNA
aagaccatgatatctgcattcgtggtcgtcggtatggtcgcagccttactgcttaaatcggcaaaaggcggactt

SEQ ID NO: 565955 - DNA, 75 bp, synthetic construct
  source 1..75: mol_type = other DNA
gaaggcatcctgggatcggcaaagaagcagcaatggcgctttatactgatgtcagcgccattaccggacaagtaa

SEQ ID NO: 565956 - DNA, 75 bp, synthetic construct
  source 1..75: mol_type = other DNA
gtgggcgaagtcaaacatcagaatggaaggcgtccagggatcagcaaagaaacagcgatggcgctttatattgat

SEQ ID NO: 565957 - DNA, 75 bp, synthetic construct
  source 1..75: mol_type = other DNA
tgtcagctgcagttctggcgctgattggagcaggcgcatctgctcctcagatacttgaccagtttcttgatgaaa

SEQ ID NO: 565958 - DNA, 75 bp, synthetic construct
  source 1..75: mol_type = other DNA
cgcattcgttcaaataattgttacggtcaggttattcgtcgtgaccaggagagtgatcctacccacgtaatatgg

SEQ ID NO: 565959 - DNA, 75 bp, synthetic construct
  source 1..75: mol_type = other DNA
aatttccgcactggccccgctacgcaaccaagccgtttacacacagtggttcagtccttctaatccatctggcgc

SEQ ID NO: 565960 - DNA, 75 bp, synthetic construct
  source 1..75: mol_type = other DNA
atgagtgttttacatccgttaattcaggcgctggtgttatttgccgttgcgccgctgctctccggtattacccgc

SEQ ID NO: 565961 - DNA, 75 bp, synthetic construct
  source 1..75: mol_type = other DNA
atcggaccgatgctgcagggtatgcgcaagccggttaacgacctgtcccgtggcgcactggttgacgatatcgtc

SEQ ID NO: 565962 - DNA, 75 bp, synthetic construct
  source 1..75: mol_type = other DNA
gaactgggtgcaggcattgaaatcgttgatccagaagtggttcgcgaaaactatgttggtcgtctggtcgaactg

SEQ ID NO: 565963 - DNA, 75 bp, synthetic construct
  source 1..75: mol_type = other DNA
gcgcaaaagaaactggagctgcagaaactgtttgccgcctatgcacgagctgataccgatattctgatgggtcag

SEQ ID NO: 565964 - DNA, 75 bp, synthetic construct
  source 1..75: mol_type = other DNA
gccgtatgtgatggtgggcgtcatgctgactatcgctactgcgctgccggtggtgaccgtcggttctccgctgcc

SEQ ID NO: 565965 - DNA, 75 bp, synthetic construct
  source 1..75: mol_type = other DNA
gtggcgcgtgcccgcttgcataaccgtcgcgggccgggcgtgttgcaggagtatcgcgacattatcaaactgctg

SEQ ID NO: 565966 - DNA, 75 bp, synthetic construct
  source 1..75: mol_type = other DNA
ttgccctgcaaggctgggaggttaaatccctgcgcgcaggaaaagccaatatcagcgacagctacgtccttctgc

SEQ ID NO: 565967 - DNA, 75 bp, synthetic construct
  source 1..75: mol_type = other DNA
ttggggtatggctcggtatttaacagtcgttcagaacctctgtggggatttcgtgaaatcatcaagccgggggct

SEQ ID NO: 565968 - DNA, 75 bp, synthetic construct
  source 1..75: mol_type = other DNA
cagggcgtaacggtaaaccgttggctttctaccggtatgctgtgtgcctccggtgccagcaacgaaaccgggatg

SEQ ID NO: 565969 - DNA, 75 bp, synthetic construct
  source 1..75: mol_type = other DNA
agaaagttcaggaatacgtggctaactacatcaacgctgactggatcgattctctgactgccacttctgagcgca

SEQ ID NO: 565970 - DNA, 75 bp, synthetic construct
  source 1..75: mol_type = other DNA
gacgaaccgcgtaccgttaaagcagccgctatctgtgctgaacgtggtatcgcaacttgcgtactgctgggtaat

SEQ ID NO: 565971 - DNA, 75 bp, synthetic construct
  source 1..75: mol_type = other DNA
ccgcgttgcggcatctcagggcgtagaactgggtgctggcattgaaatcgtcgatccagaagttgttcgtgaaag

SEQ ID NO: 565972 - DNA, 75 bp, synthetic construct
  source 1..75: mol_type = other DNA
atcaggatctgcgtcagcagctctcacgagaaatggcactgattctgatgcagcctaaaggcgagccggaataca

SEQ ID NO: 565973 - DNA, 75 bp, synthetic construct
  source 1..75: mol_type = other DNA
atgaagaaaaaatacgaactgggtgttaaagggataaataattacccggataagattactgttactgtggcactt

SEQ ID NO: 565974 - DNA, 75 bp, synthetic construct
  source 1..75: mol_type = other DNA
gccattatggaacgcttgcaaagtcgggaatggtttgacgccgatgcggtggtgatttctgattttatcgcccag

SEQ ID NO: 565975 - DNA, 75 bp, synthetic construct
  source 1..75: mol_type = other DNA
cgtccgttatgagctttcaggcccacaaggcatcgaacaagcaatccgttttttaagtcagcagtttcgtggcgg

SEQ ID NO: 565976 - DNA, 75 bp, synthetic construct
  source 1..75: mol_type = other DNA
gatgaactgccaccagaagaagccgctaaaaaattcgtggagtatatgggcggtgctgatgccattttacaaaaa

SEQ ID NO: 565977 - DNA, 75 bp, synthetic construct
  source 1..75: mol_type = other DNA
ctgctcgcgatgatatgcgtgagatcgtggcctacattgctaaagagaaccctcacgctgcccgtagactcaaaa

SEQ ID NO: 565978 - DNA, 75 bp, synthetic construct
  source 1..75: mol_type = other DNA
gcccgtgaggcgctgttctggcacgttcagcaaacgttaagcgccaataacagcaaagatatcggtcttggattt

SEQ ID NO: 565979 - DNA, 75 bp, synthetic construct
  source 1..75: mol_type = other DNA
gttgatgcgcgctcggttgtcgaccaaatcaacaaaacgtttggcgaactgaaaggcaaacgtgaaacaccggct

SEQ ID NO: 565980 - DNA, 75 bp, synthetic construct
  source 1..75: mol_type = other DNA
actgctgctgccgccacctctgtcgccacggatgacgtacatcctgaagtgacggatattccacctgcacagtaa

SEQ ID NO: 565981 - DNA, 75 bp, synthetic construct
  source 1..75: mol_type = other DNA
cgtgaaaaagttatcgaacgcccggtggtacataaagattacgacgaacagccgcgcggaccgtttattgtctgc

SEQ ID NO: 565982 - DNA, 75 bp, synthetic construct
  source 1..75: mol_type = other DNA
gttaaatcaacagctattagaagaagaacgcgaacaactgttgagtgaagttcaggaacgcatgacgctgagcgg

SEQ ID NO: 565983 - DNA, 75 bp, synthetic construct
  source 1..75: mol_type = other DNA
aactgtttgccgcttatgctcgtgctgataccgatattctgatggggcaacggatgcgttcgttgcaaaatcagg

SEQ ID NO: 565984 - DNA, 75 bp, synthetic construct
  source 1..75: mol_type = other DNA
ttaaaatctgcgcgggcggtatggcgggaacaacagtagcagcattgggctttgccccgaagcaagcactggctc

SEQ ID NO: 565985 - DNA, 75 bp, synthetic construct
  source 1..75: mol_type = other DNA
cgcgtctgcccgaatttctccatcaatatccgggaattgaactggaattaagcagcaatgaccgtccggtagata

SEQ ID NO: 565986 - DNA, 75 bp, synthetic construct
  source 1..75: mol_type = other DNA
gaactcaattgcagcatgcttgggctaccagccttgaaataattgatacccttgaaggtatcaagctgaaaactt

SEQ ID NO: 565987 - DNA, 75 bp, synthetic construct
  source 1..75: mol_type = other DNA
ggaaactaagcacatacaccatcgccggtagtgactccaacttactgatagtgttttatgttcagataatgcccg

SEQ ID NO: 565988 - DNA, 75 bp, synthetic construct
  source 1..75: mol_type = other DNA
ggctgtggtaaaaaccgtgacgccagctgcgccgcgtaaaatggccgtggcagatagcgaggagaactgggaaac

SEQ ID NO: 565989 - DNA, 75 bp, synthetic construct
  source 1..75: mol_type = other DNA
ggactcatcacccgtcccctcggcaaactgacgatggtcaactgcgccagtccgcactatctgacgcgctttggt

SEQ ID NO: 565990 - DNA, 75 bp, synthetic construct
  source 1..75: mol_type = other DNA
ggttacccgattttctgtatcagtatccgggtattgaactcgaattaagcagcagcgaccgtcaggtagatattc

SEQ ID NO: 565991 - DNA, 75 bp, synthetic construct
  source 1..75: mol_type = other DNA
attccttcacgctggcagaactggtgaccaaaggacatctgagaccattaaaagaggcgtcagaggcagaaaacg

SEQ ID NO: 565992 - DNA, 75 bp, synthetic construct
  source 1..75: mol_type = other DNA
tacacaggcgtagcgccacaaggcaaaacgctgggggctgataaaaatggtaatcctgcgtggattgatatcccg

SEQ ID NO: 565993 - DNA, 75 bp, synthetic construct
  source 1..75: mol_type = other DNA
atgaataaattttataaaggctctttctatccgaaagcactaaaagaggtatatatcagcgccggttcatggcct

SEQ ID NO: 565994 - DNA, 75 bp, synthetic construct
  source 1..75: mol_type = other DNA
attgccagagggcaatcagatccccgaaaaatagtccttcagtgggacgaaatgatccggaccgctggctccctg

SEQ ID NO: 565995 - DNA, 75 bp, synthetic construct
  source 1..75: mol_type = other DNA
cgcaattgtaaatttccactatacctctggctcataccaaagaaacggcgccgcttttgttacgagttacctgat

SEQ ID NO: 565996 - DNA, 75 bp, synthetic construct
  source 1..75: mol_type = other DNA
atatcaccctaagtgctcatagcaatgttttcacttccacaccatctcaaatgagaattattaaaaattttggcc

SEQ ID NO: 565997 - DNA, 75 bp, synthetic construct
  source 1..75: mol_type = other DNA
gcatcagggctggcgctgacgccacaggattataaattccatttttacgcctggtggcaggatctcaaatacagc

SEQ ID NO: 565998 - DNA, 75 bp, synthetic construct
  source 1..75: mol_type = other DNA
aggcggtggaaatcgcttttctggatgcgctttccggggccatttctccccggactcgtgttgttattgttactg

SEQ ID NO: 565999 - DNA, 75 bp, synthetic construct
  source 1..75: mol_type = other DNA
aagataagtggctggacataaaaatgtgcagggggagttcagaggcaaaatacctggggacgggaaccctggctc

SEQ ID NO: 566000 - DNA, 75 bp, synthetic construct
  source 1..75: mol_type = other DNA
gagtttccctcaacaccacaggaggcgtttctgacgtccggacgacgggtgttcagtgcggaaagcacgctgcag

SEQ ID NO: 566001 - DNA, 75 bp, synthetic construct
  source 1..75: mol_type = other DNA
atgcgcgacatacggatccgcgttctggaaatgctggcctacaatcgccgcgttgaactgtatcgggagaaagaa

SEQ ID NO: 566002 - DNA, 75 bp, synthetic construct
  source 1..75: mol_type = other DNA
acgctggctgagaacgtcctgagatttaaccctgaacttctacgacgagcacaacctgaaaagatattgtgccgg

SEQ ID NO: 566003 - DNA, 75 bp, synthetic construct
  source 1..75: mol_type = other DNA
atgctggttttcaaagtgcatggttccgtcatatcaaatcacagggatgggattttattggtcgtatcagggggg

SEQ ID NO: 566004 - DNA, 75 bp, synthetic construct
  source 1..75: mol_type = other DNA
cagctgggattttccacagccattgatatttatcttctcgaccaggcattattcattccgcatctcaaatgcggg

SEQ ID NO: 566005 - DNA, 75 bp, synthetic construct
  source 1..75: mol_type = other DNA
cgtttctgacgtcaggacgacgggtgttcagtgcggaaagcacgctgcaggcagagtcattctgttcgccaccgc

SEQ ID NO: 566006 - DNA, 75 bp, synthetic construct
  source 1..75: mol_type = other DNA
atgacattccggaagaatgaaccgcgatgtgatgaaccgtcagaaatgaccgggaccgaacaacgtctgttcatc

SEQ ID NO: 566007 - DNA, 75 bp, synthetic construct
  source 1..75: mol_type = other DNA
atatttatcttctcgaccaggcattattcattccgcatctcaaatgcgggatcgtcgctcaggataaacaggctg

SEQ ID NO: 566008 - DNA, 75 bp, synthetic construct
  source 1..75: mol_type = other DNA
attgacttccgctcactggctgcaacgtatgactgcgacgtcacagagttacgcgaaaaattcaatgaagccgca

SEQ ID NO: 566009 - DNA, 75 bp, synthetic construct
  source 1..75: mol_type = other DNA
tatcgacatcccgacgcgtatcctggttgggaatcagcagggtgaacgcgcatcaactgaagacctccgctactt

SEQ ID NO: 566010 - DNA, 75 bp, synthetic construct
  source 1..75: mol_type = other DNA
ctgaactactacaaagaaaacgaagcttacctgcagggtcagctgggcaacccgaaaggcgaagatcagccgaac

SEQ ID NO: 566011 - DNA, 75 bp, synthetic construct
  source 1..75: mol_type = other DNA
cgagttagtcaacctgatgaccgcccagcgtaactatcaggccaacaccaaagttatcgccaccagcacgcagct

SEQ ID NO: 566012 - DNA, 75 bp, synthetic construct
  source 1..75: mol_type = other DNA
gtatttcgcgcggcggttcgctggtctccaccggtaatgcgctggatctggcgattaacgacgacgggttttttg

SEQ ID NO: 566013 - DNA, 75 bp, synthetic construct
  source 1..75: mol_type = other DNA
gagcctgcgaggcgattcgctggtggataaaggacggtggcagagactgccgtatccgctcaaataactgctacg

SEQ ID NO: 566014 - DNA, 75 bp, synthetic construct
  source 1..75: mol_type = other DNA
cgtatccgctcaaataactgttacggtcaggtatcccggcgtgatcaggagagcgcgctggcgtgctggggaatc

SEQ ID NO: 566015 - DNA, 75 bp, synthetic construct
  source 1..75: mol_type = other DNA
tatcggctgccgttctggcgctgattgccgcaggggcgtctgcgcctgaaatccttgaccagtttctggatgaaa

SEQ ID NO: 566016 - DNA, 75 bp, synthetic construct
  source 1..75: mol_type = other DNA
aggaaggtaaccacaccacggcataccgtgatggtgcgggtatctggaccatctgccgcggtgccatcctggtgg

SEQ ID NO: 566017 - DNA, 75 bp, synthetic construct
  source 1..75: mol_type = other DNA
ctgaccgaaccccagaaagcggggatcgcgtcattctgtccgtacaacattggccccggtaagtgtttcccgtcg

SEQ ID NO: 566018 - DNA, 75 bp, synthetic construct
  source 1..75: mol_type = other DNA
gccagctaaaagcccgtattagtgccgcaaacaactttaagccaatgtgcgatgcgctgaatatggcccgtgccg

SEQ ID NO: 566019 - DNA, 75 bp, synthetic construct
  source 1..75: mol_type = other DNA
agttcgtacaccgacagttacaccaccacggtgtatgactcattaggtaacgaacactcggtatgccagtacttc

SEQ ID NO: 566020 - DNA, 75 bp, synthetic construct
  source 1..75: mol_type = other DNA
gtgagcggcaccgcgtgggtacaaaccggggaatccggcaccccgctgattggcgttcccggctccggtacctgc

SEQ ID NO: 566021 - DNA, 75 bp, synthetic construct
  source 1..75: mol_type = other DNA
tccggcgcaggccagcagcagcctgacctttaccgccaacttcgatgccagcgacgacgctatcgaccgcaccac

SEQ ID NO: 566022 - DNA, 75 bp, synthetic construct
  source 1..75: mol_type = other DNA
catgatcgacctgtctgaagagtctctgcacgaaaacatcgaaatctgctctaaatacctggcgcgcatgtccaa

SEQ ID NO: 566023 - DNA, 75 bp, synthetic construct
  source 1..75: mol_type = other DNA
tcaaacaactgttacggtcaggtatcccgtcgtgaccaggagagcgcgctggcgtgctgggaaatcgacagataa

SEQ ID NO: 566024 - DNA, 75 bp, synthetic construct
  source 1..75: mol_type = other DNA
atgagcagaaaattccgctatggtttatcggctgccgttctggcgctgattgccgcaggggcttctgcgcctgaa

SEQ ID NO: 566025 - DNA, 75 bp, synthetic construct
  source 1..75: mol_type = other DNA
ccaatgggcaacctgggaaggcgttctgaactactacaaagcgaacgaagcttatctgcagggtcagttgggtaa

SEQ ID NO: 566026 - DNA, 75 bp, synthetic construct
  source 1..75: mol_type = other DNA
gttcgggggccgccccgcaacccaacgttaacacgggagtaattaacggcaacgactttgccgctattgttcccg

SEQ ID NO: 566027 - DNA, 75 bp, synthetic construct
  source 1..75: mol_type = other DNA
gtccttacaacattggcccgggtaagtgtttcacgtcgacgttttataaacgaattaatgcaggagatcgcaggg

SEQ ID NO: 566028 - DNA, 75 bp, synthetic construct
  source 1..75: mol_type = other DNA
gtattcgctcaaataactgctacgggcaggttatacgtcgtgaccaggaaagcgcgctgacgtgctggggcatcg

SEQ ID NO: 566029 - DNA, 75 bp, synthetic construct
  source 1..75: mol_type = other DNA
gataaaggacggtggacgtgattgccgcattcgttcaaataattgttacggtcaggttattcggcgtgaccagga

SEQ ID NO: 566030 - DNA, 75 bp, synthetic construct
  source 1..75: mol_type = other DNA
cagaaagcggggatcgcgtcattctgtccgtacaacattggccccggtaagtgtttcccgtcgacgttttataag

SEQ ID NO: 566031 - DNA, 75 bp, synthetic construct
  source 1..75: mol_type = other DNA
gagcgtgtgaggcgattcgctggtggattaaggacggtggcagagactgccgtattcgctcaaataactgttacg

SEQ ID NO: 566032 - DNA, 75 bp, synthetic construct
  source 1..75: mol_type = other DNA
gccgtggatcgacggtctgctggacgctggtgaaaaacacttcgcagctaccggcaagccgctgttctcttctca

SEQ ID NO: 566033 - DNA, 75 bp, synthetic construct
  source 1..75: mol_type = other DNA
atgcacgaaaaaataaaatacggcctgtcggctgccgttctggcgctgattggtgcaggtgcttctgcgcctgaa

SEQ ID NO: 566034 - DNA, 75 bp, synthetic construct
  source 1..75: mol_type = other DNA
gttacccggagtatcgtgcgccaggttctgacaaatggcagcgcatcagttgggatgaagcattttcccgtattg

SEQ ID NO: 566035 - DNA, 75 bp, synthetic construct
  source 1..75: mol_type = other DNA
ggtggaacgccaggcaattccggaacaaaccacgtttgaacagatggttgctcgcgctgccgcacttaccgccac

SEQ ID NO: 566036 - DNA, 75 bp, synthetic construct
  source 1..75: mol_type = other DNA
cgtataacatcggccccggtaaatgcttcccatcgaccttctataagcgcatcaacgcaggtgaccgcatcggtg

SEQ ID NO: 566037 - DNA, 75 bp, synthetic construct
  source 1..75: mol_type = other DNA
gattgccgcctgaccaagggccagaaggatggatgttatgggcaggtagaacggcgggaccaggaaagcgcactg

SEQ ID NO: 566038 - DNA, 75 bp, synthetic construct
  source 1..75: mol_type = other DNA
cccgtgattctcgatcagtttctggatgagaaagagggtaacagcttgacagcatatcgcgacggcggcggactc

SEQ ID NO: 566039 - DNA, 75 bp, synthetic construct
  source 1..75: mol_type = other DNA
tgtcagctgctgttctggcgctgattgctgcaggcgcgtctgctcctcagatacttgcccagtttctggacgaaa

SEQ ID NO: 566040 - DNA, 75 bp, synthetic construct
  source 1..75: mol_type = other DNA
ggtgatatcaaaggcgcatgtgaccagctacgtcgctggacatacgctggcggtaagcaatggaaaggcctgatg

SEQ ID NO: 566041 - DNA, 75 bp, synthetic construct
  source 1..75: mol_type = other DNA
ttgctgctgctattggtggtggggctgttgccatagcgtctgtgctcatcactggtccaggtggtaacgatggtc

SEQ ID NO: 566042 - DNA, 75 bp, synthetic construct
  source 1..75: mol_type = other DNA
cggttgtcattattgaagatggcgaactggcctggtcgaaactcaataactccaacatgacggaatttgagtttt

SEQ ID NO: 566043 - DNA, 75 bp, synthetic construct
  source 1..75: mol_type = other DNA
atcattcatatgaaagcggggaaaaacaattatgtccgcgctgtgcaaatccagaatggacgaaggcaagtcggg

SEQ ID NO: 566044 - DNA, 75 bp, synthetic construct
  source 1..75: mol_type = other DNA
cacagccatgtcgatcactacggtggcgttcgcggcgtggttgatgaagctgacgttaaatcaggtaaaacaaaa

SEQ ID NO: 566045 - DNA, 75 bp, synthetic construct
  source 1..75: mol_type = other DNA
gtacgagcgtctgggatatgaacacgccgatgtgctgagtatgggcaagcgtttgattgaagatgaagagtactg

SEQ ID NO: 566046 - DNA, 75 bp, synthetic construct
  source 1..75: mol_type = other DNA
tatgaacgcctgggatatgaacacgccgacgtgctgagtctgggtaagcgtttgattgaagatgaagagtactga

SEQ ID NO: 566047 - DNA, 75 bp, synthetic construct
  source 1..75: mol_type = other DNA
atctgccggggtgccacccgggtggatggcagacctgtagtccccggcatgaagctgacgaaggaaaaatgcgct

SEQ ID NO: 566048 - DNA, 75 bp, synthetic construct
  source 1..75: mol_type = other DNA
atgacagaagccgaaatactgggattaatccgccgcgtctctggaatcagccagcagcatgacgaacagggcacg

SEQ ID NO: 566049 - DNA, 75 bp, synthetic construct
  source 1..75: mol_type = other DNA
gaagctgtcgaagggaaaatgcgaccgggttaacgccattgagcgtgataaggcgctggcatgggtggagaaaaa

SEQ ID NO: 566050 - DNA, 75 bp, synthetic construct
  source 1..75: mol_type = other DNA
gatggtgggcgcgattgccgcatacgttcaaataactgctatggacaggttattcgccgtgaccaggaaagcgca

SEQ ID NO: 566051 - DNA, 75 bp, synthetic construct
  source 1..75: mol_type = other DNA
atggaaaacccgtttttcccggtatgaaactgtcgaaggaaaaatgcgaccaggttaacgccattgaacgggata

SEQ ID NO: 566052 - DNA, 75 bp, synthetic construct
  source 1..75: mol_type = other DNA
gtccctataacattggccctggtaagtgttttccgtcgacgttttataagcggcttaatgcaggtgatcgtaaag

SEQ ID NO: 566053 - DNA, 75 bp, synthetic construct
  source 1..75: mol_type = other DNA
tgtcggctgccgttctggcactgattgccgtcggtgcgcctgcgcctgatattctcgaccagtttctgaatgaaa

SEQ ID NO: 566054 - DNA, 75 bp, synthetic construct
  source 1..75: mol_type = other DNA
aatcaggcgctttcgcagctggtgcaaaaggccgtgccacgtaactacgatgattcgctgccgggtgacagtaaa

SEQ ID NO: 566055 - DNA, 75 bp, synthetic construct
  source 1..75: mol_type = other DNA
aggcgctggcatgggtggagcgtaatataaaagttccactgaccgagccacaaaaagcaggtatcgcgtcatttt

SEQ ID NO: 566056 - DNA, 75 bp, synthetic construct
  source 1..75: mol_type = other DNA
acacgtaacccgcgctacgccgccgtgacgaccgccgcgagtgcggagcagggggcgcaggccctacaggacgcg

SEQ ID NO: 566057 - DNA, 75 bp, synthetic construct
  source 1..75: mol_type = other DNA
aacgatgtagatatgcgcaacatacggatccgcgttcttgaaatgctggcctaccgtcgccgcgttgagatgtat

SEQ ID NO: 566058 - DNA, 75 bp, synthetic construct
  source 1..75: mol_type = other DNA
gtatgtcatggacacaccggaaaagacatcatgcccggtaaaacgtataccgaagcagaatgcaaagccctcctg

SEQ ID NO: 566059 - DNA, 75 bp, synthetic construct
  source 1..75: mol_type = other DNA
atggtaagcctgttattcctggcatgaagctgtcgaagggaaaatgcgaccgggttaacgccattgagcgtgata

SEQ ID NO: 566060 - DNA, 75 bp, synthetic construct
  source 1..75: mol_type = other DNA
tcaaacaactgttacggtcagatatcccgtcgtgaccaggagagcgcgctggcgtgctggggaatcgacagataa

SEQ ID NO: 566061 - DNA, 75 bp, synthetic construct
  source 1..75: mol_type = other DNA
gggaaccgatcgagaaagatgagatgaatcgggtgttcgtgttcggcaaggtgatcggcagcatgccgcagacgt

SEQ ID NO: 566062 - DNA, 75 bp, synthetic construct
  source 1..75: mol_type = other DNA
agccggtggtttttctgccaccacgatgctgttttctctgggggccagcatgattctgggtggtgtggctcagat

SEQ ID NO: 566063 - DNA, 75 bp, synthetic construct
  source 1..75: mol_type = other DNA
catcagaacataatttgctgtgagtgccgaaatagcgaagtcatgcagcgtgtactggcgttctgtcgggggaat

SEQ ID NO: 566064 - DNA, 75 bp, synthetic construct
  source 1..75: mol_type = other DNA
taacgctgccggattttgcgcgtgaggatgactggtggcgcaacggtcagaacctgtacctggacaatctggcgg

SEQ ID NO: 566065 - DNA, 75 bp, synthetic construct
  source 1..75: mol_type = other DNA
agagcaggcgtatcgcacatggcgtaagaagccggagaaagcggacatggcgctggtcagaaagctgccagatgg

SEQ ID NO: 566066 - DNA, 75 bp, synthetic construct
  source 1..75: mol_type = other DNA
gtcagcggcgcagccgggcgatgtgctgctgtgctgatttggttcatcggtgccgaatcatgccgcgatttactg

SEQ ID NO: 566067 - DNA, 75 bp, synthetic construct
  source 1..75: mol_type = other DNA
cgcatcttaccggacggcgctttgagcacggggtgacggactgttatacgctgttccgggatgcttaccatcttg

SEQ ID NO: 566068 - DNA, 75 bp, synthetic construct
  source 1..75: mol_type = other DNA
cgtcagaacataatctgtagcgagtgccggaagagcgaagttatgcagcgcgtgctggcgttttatcaggggagt

SEQ ID NO: 566069 - DNA, 75 bp, synthetic construct
  source 1..75: mol_type = other DNA
atagcggcggcgcgcaggcatgggtggaagcgcagccgttgttcctctatcccgccgactggatggcggcccgcg

SEQ ID NO: 566070 - DNA, 75 bp, synthetic construct
  source 1..75: mol_type = other DNA
agcgcagccgttgttcctctatcccgccgactggatggcggcccgcgcacctcgccttgaggcagaagatgcgct

SEQ ID NO: 566071 - DNA, 75 bp, synthetic construct
  source 1..75: mol_type = other DNA
tcctttccattaataaactttcgcagtaaatcccggtttatgacacagactgaatcagcgattctggcgcatgcc

SEQ ID NO: 566072 - DNA, 75 bp, synthetic construct
  source 1..75: mol_type = other DNA
ttccgttgttgacgtgattggcgtgctaccgcctgtcgatagcgtaacgggttatcaggtaacaccagtggttgg

SEQ ID NO: 566073 - DNA, 75 bp, synthetic construct
  source 1..75: mol_type = other DNA
gcagccggggttattgctcacacagcgttctattcatctgcgcaaacacgccggacaggtggcgtttcctggtgg

SEQ ID NO: 566074 - DNA, 75 bp, synthetic construct
  source 1..75: mol_type = other DNA
gctatcaggtaaccccagtggtcggcattatcccgcccgatctgccgtatcgcgccagtgaagatgaagtctccg

SEQ ID NO: 566075 - DNA, 75 bp, synthetic construct
  source 1..75: mol_type = other DNA
ctgcgcgaagctgaagaagaggtcgctataccgccttccgccgttgaagttatcggcgtgctgccgcccgtcgat

SEQ ID NO: 566076 - DNA, 75 bp, synthetic construct
  source 1..75: mol_type = other DNA
tcatctggcggggactgagatgccggattttcatcgcgaggatgactggtggcgcaacggtcagaacctttacct

SEQ ID NO: 566077 - DNA, 75 bp, synthetic construct
  source 1..75: mol_type = other DNA
attttcgtatcgcaccggaagactggctgcgggcagagatgcagggggagattgtggcactggtccacagtcatc

SEQ ID NO: 566078 - DNA, 75 bp, synthetic construct
  source 1..75: mol_type = other DNA
gatattctgctgtgctgctttggtgcttcggtaccgaaccatgccgccatttactgtggcaacggtgagctgctt

SEQ ID NO: 566079 - DNA, 75 bp, synthetic construct
  source 1..75: mol_type = other DNA
gcacggggtaacggactgttacacgctgttccgggacgcttaccatctggcgggaattgagatgccggattttca

SEQ ID NO: 566080 - DNA, 75 bp, synthetic construct
  source 1..75: mol_type = other DNA
tctagaaaatcaagaccaaaaggttggtttccggtattcatcaattcagaaaataaggtttatgtaacagatgat

SEQ ID NO: 566081 - DNA, 75 bp, synthetic construct
  source 1..75: mol_type = other DNA
aggcaagtaaagagtatggtttatacaatcaatgtaagaaactaaatgatgatgaattatttcgcttacttgatg

SEQ ID NO: 566082 - DNA, 75 bp, synthetic construct
  source 1..75: mol_type = other DNA
atgtcgccggaggactggctgcaggcagagatgcagggggaggttgtggcactggtccacagccaccccggtggt

SEQ ID NO: 566083 - DNA, 75 bp, synthetic construct
  source 1..75: mol_type = other DNA
gttgaactctctaaagagtcatacagcttaaattggctgggtaagtcttatgcccggctgttggctaacctacca

SEQ ID NO: 566084 - DNA, 75 bp, synthetic construct
  source 1..75: mol_type = other DNA
gtgcaaggcaaatggaactcaatgaagcactaaaaagttatgctaataaaaaatctattgagttagatttggtgg

SEQ ID NO: 566085 - DNA, 75 bp, synthetic construct
  source 1..75: mol_type = other DNA
attagggcatcggaagttgaactctctaaagaatcatacagcttaaactggctgggtaaatcttatgcccgtttg

SEQ ID NO: 566086 - DNA, 75 bp, synthetic construct
  source 1..75: mol_type = other DNA
gttcacgacggatatcccaggacatcagcacccgtgatgagggcggagacgggaaagtggtggttatcgggcggg

SEQ ID NO: 566087 - DNA, 75 bp, synthetic construct
  source 1..75: mol_type = other DNA
aaaacggcttttaccgggtgtctccgtcctgtgcacaggcgggcgatatcctgctgtgctgctttggttcatcgg

SEQ ID NO: 566088 - DNA, 75 bp, synthetic construct
  source 1..75: mol_type = other DNA
atctgccttcacggggatttgcaacgatttggccgccgcctcagcctgtatgtgaacacggcagcggaagccatc

SEQ ID NO: 566089 - DNA, 75 bp, synthetic construct
  source 1..75: mol_type = other DNA
tgaacacggcagcggaagccatccgggcgctgtcgttacaggtgccgggattccgccgtcagatgaacgaaggct

SEQ ID NO: 566090 - DNA, 75 bp, synthetic construct
  source 1..75: mol_type = other DNA
ccacattgtgccgcgactggccggggccggaaagggtggactgcagattgtgctgggggcggcggccatcgtggg

SEQ ID NO: 566091 - DNA, 75 bp, synthetic construct
  source 1..75: mol_type = other DNA
gccgggtcgggtacaaccgcacatgcagtaatggctatgaatgctaacgacgaaggtaatagaagatttatttct

SEQ ID NO: 566092 - DNA, 75 bp, synthetic construct
  source 1..75: mol_type = other DNA
gccatggtggctggtctgccggggtgagattcataaattccgctgtgtgccgcatcttaccgggcggcgctttga

SEQ ID NO: 566093 - DNA, 75 bp, synthetic construct
  source 1..75: mol_type = other DNA
aacacgtacttttcctcgctggataacatgattgcacaggggaacccgatgccggtgccttacggtgaaatgctg

SEQ ID NO: 566094 - DNA, 75 bp, synthetic construct
  source 1..75: mol_type = other DNA
cggcgaatctcccaggacatcagcacccgtgatgaaggcgggggcgggaaggtggtggttatcgggcggcaggca

SEQ ID NO: 566095 - DNA, 75 bp, synthetic construct
  source 1..75: mol_type = other DNA
cagttcggttccggctggtggtttaacgatcagaaagacggtatggaacgtcagatgacccaactggcgcagctc

SEQ ID NO: 566096 - DNA, 75 bp, synthetic construct
  source 1..75: mol_type = other DNA
ccgtctgtatcacgactacgcaaaagaccagccgattttcgactaccactgccatttgccgccgcagcagattgc

SEQ ID NO: 566097 - DNA, 75 bp, synthetic construct
  source 1..75: mol_type = other DNA
attgtatggaataaacgtatccctaaaaatgataagggtattggtaatatccatgagtacatccttgcttatgcg

SEQ ID NO: 566098 - DNA, 75 bp, synthetic construct
  source 1..75: mol_type = other DNA
atggatatgcaaaaagaaacgattttttcagaagttgaaactgctaacagtaagcagattgctgttttaaaggct

SEQ ID NO: 566099 - DNA, 75 bp, synthetic construct
  source 1..75: mol_type = other DNA
tagcgagcaaaactttgttggaaatatagtcagagcgacaggtcagaccacgggacaggacagtggtggattagg

SEQ ID NO: 566100 - DNA, 75 bp, synthetic construct
  source 1..75: mol_type = other DNA
gcaattagaagtgcgctaagggaattaaaagcatgggctgacagaaatcctaagcttgatattatataccaaaaa

SEQ ID NO: 566101 - DNA, 75 bp, synthetic construct
  source 1..75: mol_type = other DNA
taaccaacgtgaagagaacaaaaacagtcagaatctgttaatcaaaggggataaccttgaagtattgaagcatat

SEQ ID NO: 566102 - DNA, 75 bp, synthetic construct
  source 1..75: mol_type = other DNA
ccctgtcaaaatcccagacagaggctggcgttggaaagaaggcacttttaatcatattgcaaaaagaatagatgg

SEQ ID NO: 566103 - DNA, 75 bp, synthetic construct
  source 1..75: mol_type = other DNA
gggcgctgtcgttacaggtgcccggattccgccgtcagatgaacgaaggctggtaccagatacgtattgccggtg

SEQ ID NO: 566104 - DNA, 75 bp, synthetic construct
  source 1..75: mol_type = other DNA
ttggtgttggcgtggcgatgtttgccattccggtgggcaaggcgacgggattggatattaatctgctcatcgccg

SEQ ID NO: 566105 - DNA, 75 bp, synthetic construct
  source 1..75: mol_type = other DNA
atctctgatgtgatgattgctcagggcctgctgctgcctgcgattgtggtgctggggctgaatatctggaccacc

SEQ ID NO: 566106 - DNA, 75 bp, synthetic construct
  source 1..75: mol_type = other DNA
gccggaggcgtattttcgtatcgcaccggaagactggctgcgggcagagatgcagggggagattgtggctctggt

SEQ ID NO: 566107 - DNA, 75 bp, synthetic construct
  source 1..75: mol_type = other DNA
gccggaggtgtattttcgtatcgccccggaagactggctgcgggcagagatgcagggggagattgtggcgctggt

SEQ ID NO: 566108 - DNA, 75 bp, synthetic construct
  source 1..75: mol_type = other DNA
gccggaggagtattttcgtatcgccccggaagactggctgcgggcagagatgcagggggagattgtggctctggt

SEQ ID NO: 566109 - DNA, 75 bp, synthetic construct
  source 1..75: mol_type = other DNA
ccggaagactggctgcaggcagagatgcagggggagattgtggcactggtccacagccaccctggtggtctgccc

SEQ ID NO: 566110 - DNA, 75 bp, synthetic construct
  source 1..75: mol_type = other DNA
tggcgcatgcccggcggtgtgcgcctgcggagtcgtgcggcttcgtgataggcaccccggagggcgaacggtacc

SEQ ID NO: 566111 - DNA, 75 bp, synthetic construct
  source 1..75: mol_type = other DNA
ccacggtggtccgccgccgggtgtatgcccgttttctggatgcggtgaattttgtggcgggcaatccggaagcgg

SEQ ID NO: 566112 - DNA, 75 bp, synthetic construct
  source 1..75: mol_type = other DNA
gtacggtctgcgcattatggctgtataacaattttgtcggctggttgaccttcctttcggcagctattcctccgg

SEQ ID NO: 566113 - DNA, 75 bp, synthetic construct
  source 1..75: mol_type = other DNA
gatttcttcctcgcagttctcatcggtaatcttctcctcggtatttacacttcatttctcggttacattggcgca

SEQ ID NO: 566114 - DNA, 75 bp, synthetic construct
  source 1..75: mol_type = other DNA
actggccggggccggaaagggtggactgcagattgtgctgggggcggcagccatcgtgggctctttcttcactgc

SEQ ID NO: 566115 - DNA, 75 bp, synthetic construct
  source 1..75: mol_type = other DNA
gccggaggcgtattttcgtatcgctccggaagactggctgcgggcagagatgcagggggagattgtggcgctggt

SEQ ID NO: 566116 - DNA, 75 bp, synthetic construct
  source 1..75: mol_type = other DNA
caacggataacggcagacagaacacgtatttttcgtcactggacaacatgattgcccagggtaacccgatgccgg

SEQ ID NO: 566117 - DNA, 75 bp, synthetic construct
  source 1..75: mol_type = other DNA
ttggttcacggcgaatctcccaggacatcagtacccgtgatgaaggcggtgacgggaaggtggtggttatcgggc

SEQ ID NO: 566118 - DNA, 75 bp, synthetic construct
  source 1..75: mol_type = other DNA
agggaacggtcatccacattgtgccgcgactggccggagccggaaagggtggactgcagattgtgctgggggccg

SEQ ID NO: 566119 - DNA, 75 bp, synthetic construct
  source 1..75: mol_type = other DNA
tttctgccaccacgatgctgttttctctgggggccagcatgattctgggtggtgtggctcagatgctggccccga

SEQ ID NO: 566120 - DNA, 75 bp, synthetic construct
  source 1..75: mol_type = other DNA
acggcagcggaagccatccgtgccctgtcgctgcagatgccgggattccgccgtcagatgaacgaaggctggtac

SEQ ID NO: 566121 - DNA, 75 bp, synthetic construct
  source 1..75: mol_type = other DNA
agcggagtcgtgcggcttcgtggtgagaacgccggaaggggaaagatattttccctgtgtgaatatctccggtga

SEQ ID NO: 566122 - DNA, 75 bp, synthetic construct
  source 1..75: mol_type = other DNA
tgacaggacggcgctttgagcacggggtgacggactgttacacgctgttccgggatgcttaccatctggcgggaa

SEQ ID NO: 566123 - DNA, 75 bp, synthetic construct
  source 1..75: mol_type = other DNA
tgtgctgttttggttcatcggtgccgaatcatgccgccatttactgtggtgacggcgagctgctgcaccatattc

SEQ ID NO: 566124 - DNA, 75 bp, synthetic construct
  source 1..75: mol_type = other DNA
atgtcgccggaggactggctgcgggcagaaatgcagggtgagattgtagcgctggtccacagccaccccggtgga

SEQ ID NO: 566125 - DNA, 75 bp, synthetic construct
  source 1..75: mol_type = other DNA
tggcacatgcccggcggtgtgcgcctgcggagtcgtgcggcttcgtgataagcacgccggagggggagtggtata

SEQ ID NO: 566126 - DNA, 75 bp, synthetic construct
  source 1..75: mol_type = other DNA
tggccaatcatgccgccatttactgcggcaacggtgaacagcttcaccatatgcctgaacaactgagcaaacgag

SEQ ID NO: 566127 - DNA, 75 bp, synthetic construct
  source 1..75: mol_type = other DNA
tttaccgtgtcgcactgacagaggcgcagcctggcgatgtgctgctgtgctgttttggttcatcggtgccgaatc

SEQ ID NO: 566128 - DNA, 75 bp, synthetic construct
  source 1..75: mol_type = other DNA
aacctgtacctggacaacctggcggaaaacggcttttaccgggtgtctccgtcctgtgcacaggcgggcgatatc

SEQ ID NO: 566129 - DNA, 75 bp, synthetic construct
  source 1..75: mol_type = other DNA
agagcaggcgtatcgcgtatggcgtaagacaccggagaaaacaactgaccagacactgattcgaaagttaccaga

SEQ ID NO: 566130 - DNA, 75 bp, synthetic construct
  source 1..75: mol_type = other DNA
tggtaccagatacgtattgccggtgaggataccgcaccggaggcggtgtatgcccgtcttcatgaaccgctgagc

SEQ ID NO: 566131 - DNA, 75 bp, synthetic construct
  source 1..75: mol_type = other DNA
gggttcagccctggcagccggtggtttttctgccaccacgatgctgttctcactgggtgccagcatgatactggg

SEQ ID NO: 566132 - DNA, 75 bp, synthetic construct
  source 1..75: mol_type = other DNA
cttcactgccggggcatcaatggcgttatggggttcagccctggcagccggtggtttttctgccaccacgatgct

SEQ ID NO: 566133 - DNA, 75 bp, synthetic construct
  source 1..75: mol_type = other DNA
tgccctgtcgcagcaggtgccgggattccgctgtcagatgaacgaaggctggtaccagatacgtattgccggtga

SEQ ID NO: 566134 - DNA, 75 bp, synthetic construct
  source 1..75: mol_type = other DNA
cgtcagaacataatctgtagcgagtgccggaagagcgaagctatgcagcgcgtactggcgttttatcagggtaat

SEQ ID NO: 566135 - DNA, 75 bp, synthetic construct
  source 1..75: mol_type = other DNA
cgggagggccgtgattcatattgtaccgcggctggccggagccgggggaaatggtgtttttcaggtggtgctggg

SEQ ID NO: 566136 - DNA, 75 bp, synthetic construct
  source 1..75: mol_type = other DNA
cgcacacactccctctggcgtcaccaggcatggcacgcatctgcctttacggggatttgcaacgatttggccgcc

SEQ ID NO: 566137 - DNA, 75 bp, synthetic construct
  source 1..75: mol_type = other DNA
atgccgggattccgccgtcagatgaacgaaggctggtaccagatacgtattcgcggtgaggacacggcaccggag

SEQ ID NO: 566138 - DNA, 75 bp, synthetic construct
  source 1..75: mol_type = other DNA
atgccggattttcatcgcggggatgactggtggcgtcacggccagaatctctatctggataatatggaggcaacg

SEQ ID NO: 566139 - DNA, 75 bp, synthetic construct
  source 1..75: mol_type = other DNA
aacctttacctggacaatatggaggccactggtttttaccgggtgcccctgtcctcggcacaggcaggcgatatc

SEQ ID NO: 566140 - DNA, 75 bp, synthetic construct
  source 1..75: mol_type = other DNA
gcagggaaaggcggactgcagattgtgctgggggcggcagccatcgtgggctctttcttcacggccggagcatcg

SEQ ID NO: 566141 - DNA, 75 bp, synthetic construct
  source 1..75: mol_type = other DNA
atggcagcctggggtgcagcgctgagtgccggcggtttttctgccaccacgatgctgttttcactgggggccagc

SEQ ID NO: 566142 - DNA, 75 bp, synthetic construct
  source 1..75: mol_type = other DNA
cgcacacactccctctggcgtcacccggcatggcccgcatctgcctttacggggatttccaacgatttggccgcc

SEQ ID NO: 566143 - DNA, 75 bp, synthetic construct
  source 1..75: mol_type = other DNA
cgcacacactccctctggcgtcaccaggcatggctcgcatctgcctttacggggattttcaacgatttggccgcc

SEQ ID NO: 566144 - DNA, 75 bp, synthetic construct
  source 1..75: mol_type = other DNA
ctttcgccgtcagatgaacgaaggctggtaccagatacgtattcgcggtgaggacacggcaccggaggcggtgta

SEQ ID NO: 566145 - DNA, 75 bp, synthetic construct
  source 1..75: mol_type = other DNA
atggctgtttccggcctgcatggcatgatttgcgcttttaaacgggagatccagagtgctgattggctatgtaag

SEQ ID NO: 566146 - DNA, 75 bp, synthetic construct
  source 1..75: mol_type = other DNA
aggctcatggctgccttcactgctactgggcggaactcaggttggctggtttggcgttggcgtggcgatgtttgc

SEQ ID NO: 566147 - DNA, 75 bp, synthetic construct
  source 1..75: mol_type = other DNA
agattatgacgctgccgcgtgaaggtaaaactctgcaaacggaagtgcgggaaatgcgcgagaaaatgcgcgctc

SEQ ID NO: 566148 - DNA, 75 bp, synthetic construct
  source 1..75: mol_type = other DNA
gttccggcggcgcattatggtgcgcatcgcctgggcgcaaacgctgacgctggttgctgaagagagtattttgca

SEQ ID NO: 566149 - DNA, 75 bp, synthetic construct
  source 1..75: mol_type = other DNA
tgccgggctttcgccgtcagatgaacgaaggctggtaccagatacgtattgccggtgatgacacggcaccggagg

SEQ ID NO: 566150 - DNA, 75 bp, synthetic construct
  source 1..75: mol_type = other DNA
ctgctgtgctgctttggtgcttcggtaccgaaccatgccgccatttactgcggcaacggtgagctgcttcatcat

SEQ ID NO: 566151 - DNA, 75 bp, synthetic construct
  source 1..75: mol_type = other DNA
tgttctttctcacgttagaaacatatttcggggtgttttcctttaaaagaaaaggaaaagtaaataatggcaaaa

SEQ ID NO: 566152 - DNA, 75 bp, synthetic construct
  source 1..75: mol_type = other DNA
acctcattgcactaaatagctggaagcctcttaaagggggcgattcaattaagaacggtggaaccgaaactgctc

SEQ ID NO: 566153 - DNA, 75 bp, synthetic construct
  source 1..75: mol_type = other DNA
cggtcaacgcagtattaggtggcgcgctgagctatctgatccttaacccgattttgaatcgtaaaacgacagcag

SEQ ID NO: 566154 - DNA, 75 bp, synthetic construct
  source 1..75: mol_type = other DNA
gagattgtggcactggtccacagtcatcccggtgggctgccctggctgagcgaggctgaccggcggctgcagata

SEQ ID NO: 566155 - DNA, 75 bp, synthetic construct
  source 1..75: mol_type = other DNA
caacaaacatcaagctacagtggcaggaaagcgacggaacaattaagcagcacattagcccgaacagcttcaaac

SEQ ID NO: 566156 - DNA, 75 bp, synthetic construct
  source 1..75: mol_type = other DNA
ccgctacggtaagccaaatcacctgaacgatcgcgaagggcgtggttttgcggtggtcggctacggcaagctggg

SEQ ID NO: 566157 - DNA, 75 bp, synthetic construct
  source 1..75: mol_type = other DNA
atgaaaaaatggaaagtacgtagcgcgttggtggcattaatcgtgttgttggctggttgctcaagtaatgcgcag

SEQ ID NO: 566158 - DNA, 75 bp, synthetic construct
  source 1..75: mol_type = other DNA
aactggaatatgctattcgcgatgctaattttaattcgcttcctattacgcgggtatatgattcatcgaataata

SEQ ID NO: 566159 - DNA, 75 bp, synthetic construct
  source 1..75: mol_type = other DNA
gaaaaatgcgctaccgccgtgctctggacaagcctttccggcagacaacaatggctatgcgccaccaccgtgtcg

SEQ ID NO: 566160 - DNA, 75 bp, synthetic construct
  source 1..75: mol_type = other DNA
gtgtcggaggattgcttcaccgcagagcgtgaactggtgcgggcaagctggcagaagtggctggtggaagaatga

SEQ ID NO: 566161 - DNA, 75 bp, synthetic construct
  source 1..75: mol_type = other DNA
gggcggcgggaatgctggtgacatccgcagaagcatttgccgattatcagaaaaacgaggcctggacgtgggaac

SEQ ID NO: 566162 - DNA, 75 bp, synthetic construct
  source 1..75: mol_type = other DNA
gcgcttaaacatttgatttcgctgtgcgccgcatcgccgatgattgccagccaactggcgcgttatccgttatta

SEQ ID NO: 566163 - DNA, 75 bp, synthetic construct
  source 1..75: mol_type = other DNA
gtgccctgtcgatgcagatgccgggattccgccgtcagatgaacgaaggctggtaccagatacgtattgccggtg

SEQ ID NO: 566164 - DNA, 75 bp, synthetic construct
  source 1..75: mol_type = other DNA
taaatggcggcatgattggccaccgatgcgccaaagcagcacagcaggatatcgcccgcctgtgcagaggacagg

SEQ ID NO: 566165 - DNA, 75 bp, synthetic construct
  source 1..75: mol_type = other DNA
gcatgggtaagctgggcggcggggaactgaatttctcctcagatatcgatctgatttttgcctggccggaacatg

SEQ ID NO: 566166 - DNA, 75 bp, synthetic construct
  source 1..75: mol_type = other DNA
atgaaatactttcctcttatgtttttactgagcgtattttgcgctaatgcggcaaagctgccctctgaagaggta

SEQ ID NO: 566167 - DNA, 75 bp, synthetic construct
  source 1..75: mol_type = other DNA
ctaattgttctgactctctttactcctttatttattctgcactgcaacaacgctctggaaccgagaatgaaagtc

SEQ ID NO: 566168 - DNA, 75 bp, synthetic construct
  source 1..75: mol_type = other DNA
cgggatgcataccatctggcgggaattgatatgccggattttgagcgtgaggatgactggtggcgtaacggtctt

SEQ ID NO: 566169 - DNA, 75 bp, synthetic construct
  source 1..75: mol_type = other DNA
tttttgcttccagctcaaacctttggaagggaatattactctcccaatatatctgcactcaaaagactgaaggag

SEQ ID NO: 566170 - DNA, 75 bp, synthetic construct
  source 1..75: mol_type = other DNA
catcggtggccaatcatgccgccatatactgcggcaacggtgaactgcttcaccatctgcctgaacaactgagta

SEQ ID NO: 566171 - DNA, 75 bp, synthetic construct
  source 1..75: mol_type = other DNA
ttcggcgtcatttgccgctgatcttgaagacaatatggaaaccctcaacgacaatttaaaagtggtcgaaaaagc

SEQ ID NO: 566172 - DNA, 75 bp, synthetic construct
  source 1..75: mol_type = other DNA
attatcccttacatgctcgaatagtatcattagagagctggcctttgatgcttactatgctgtttctcatgcatg

SEQ ID NO: 566173 - DNA, 75 bp, synthetic construct
  source 1..75: mol_type = other DNA
tggtttaacggggaatcaattccaagacgcgggaagctgcaagagcttgctgcgagtattggtacaacttcaact

SEQ ID NO: 566174 - DNA, 75 bp, synthetic construct
  source 1..75: mol_type = other DNA
aaaaagcgcgaaaagacttttcccataggctagcgctggcctgcgataaagctggtttgccggttcatggtcgtc

SEQ ID NO: 566175 - DNA, 75 bp, synthetic construct
  source 1..75: mol_type = other DNA
taaggtttagcctagctcacgaattggggcatcttataatgcatcgctcagtctcagatgattatttgaacgata

SEQ ID NO: 566176 - DNA, 75 bp, synthetic construct
  source 1..75: mol_type = other DNA
catttactgataaatcgtttaatcctcgtcgccttgaggaggcaagagaggcaaaagggttgacgatggctgaac

SEQ ID NO: 566177 - DNA, 75 bp, synthetic construct
  source 1..75: mol_type = other DNA
aacaagagctactcaccgtgggacccgatcgagaaagacgagatgaaccgggtgttcattttcgggaaggttatt

SEQ ID NO: 566178 - DNA, 75 bp, synthetic construct
  source 1..75: mol_type = other DNA
tcccgtgggggatcatgaaattaccctcccaggcagcaacacgtgaggacgctttccacgatacgtttttacgtg

SEQ ID NO: 566179 - DNA, 75 bp, synthetic construct
  source 1..75: mol_type = other DNA
tccggcaccgccgccaccgacaagtggacaggcatccgggtctgccggactaccgcccattgcacaggcattaaa

SEQ ID NO: 566180 - DNA, 75 bp, synthetic construct
  source 1..75: mol_type = other DNA
gacaggcatccggggcatcccgacctttaccgcccattgcacaggcattaaaagatcatttagctgcctatgaac

SEQ ID NO: 566181 - DNA, 75 bp, synthetic construct
  source 1..75: mol_type = other DNA
cgatcgagaaagacgagatgaaccgagtgttcatctttgggaaagttattgggagtatgcctcagacatatagga

SEQ ID NO: 566182 - DNA, 75 bp, synthetic construct
  source 1..75: mol_type = other DNA
caccgccaccgacaagtggacaggcatccgggtctgccgggctaccgcccattgcacaggcattaaaagatcatt

SEQ ID NO: 566183 - DNA, 75 bp, synthetic construct
  source 1..75: mol_type = other DNA
gacaggcatccggggcatcccgacctttaccgcccattgcacaggcattaaaagagcacttggctgcctatgaaa

SEQ ID NO: 566184 - DNA, 75 bp, synthetic construct
  source 1..75: mol_type = other DNA
caggcatccggggcatcccgacctttaccgcccattgcacaggcattaaaagatcatttagctgcctatgagcaa

SEQ ID NO: 566185 - DNA, 75 bp, synthetic construct
  source 1..75: mol_type = other DNA
aaagcaaacagtgggaaggcgcgtttgaaggcttaaccgctggggtgaactgcgtatttccggatatcgtaacga

SEQ ID NO: 566186 - DNA, 75 bp, synthetic construct
  source 1..75: mol_type = other DNA
gcttgcaccaaccaccgttgtgacccgtcaggatatcgaccgctggcagtcgacctcggtcaatgatgtgctgcg

SEQ ID NO: 566187 - DNA, 75 bp, synthetic construct
  source 1..75: mol_type = other DNA
ggctaccgcccattgcacaggcattaaaagatcatttagctgcctatgaactatcgaaagcgtctgagactgtaa

SEQ ID NO: 566188 - DNA, 75 bp, synthetic construct
  source 1..75: mol_type = other DNA
aggcatcccggccattaccgcctattgctcaggcattaaaagatcatttagctgcctatgaactgtcgaaaaagg

SEQ ID NO: 566189 - DNA, 75 bp, synthetic construct
  source 1..75: mol_type = other DNA
aagacaggcgtttccatcattactgaagcagttaagcatgcgatggatgtgaatgtgagtacacgaaccagttct

SEQ ID NO: 566190 - DNA, 75 bp, synthetic construct
  source 1..75: mol_type = other DNA
aaagcaaacagtgggaaggcgcgtttgaaggcttaaccgctggggtgaactggcgtatttccggatatcgtaacg

SEQ ID NO: 566191 - DNA, 75 bp, synthetic construct
  source 1..75: mol_type = other DNA
ttattgtgatgatcggttacgccaccctcgcccaacgcatcgcactctggattaaagggccgaaacagatgaagg

SEQ ID NO: 566192 - DNA, 75 bp, synthetic construct
  source 1..75: mol_type = other DNA
cgtcactgttgttgccagatgtggcgattagtcttgaccgtactgaaggtgccacgctggagttttacgaagctg

SEQ ID NO: 566193 - DNA, 75 bp, synthetic construct
  source 1..75: mol_type = other DNA
cataaatatggttcttttaagaatataagatttttaggagagattaaaaattttgacggtttctataagtatgac

SEQ ID NO: 566194 - DNA, 75 bp, synthetic construct
  source 1..75: mol_type = other DNA
cgggatgcataccatctggcggggattgagatgccggattttcaccgtgaggatgagtggtggcgcaacggtcag

SEQ ID NO: 566195 - DNA, 75 bp, synthetic construct
  source 1..75: mol_type = other DNA
aaagtgtatttgtcgttgattgggacagatacagcgaaagacctgctcgcaatgcgcctgcagctggaacccgac

SEQ ID NO: 566196 - DNA, 75 bp, synthetic construct
  source 1..75: mol_type = other DNA
ccataattttagaggcgcaggatgtgttgataacctacagaggaaaactaccgggaataattactggttctctga

SEQ ID NO: 566197 - DNA, 75 bp, synthetic construct
  source 1..75: mol_type = other DNA
atgtttacctacgaaggtctgggaaccggcgtgcaggagtttattctgacggtatacggaacctgtatgccgatg

SEQ ID NO: 566198 - DNA, 75 bp, synthetic construct
  source 1..75: mol_type = other DNA
aatgtagcggcgaaagcaggttattccaagtggcacttacagagaatgtttaaagatgtcactggccatgctatt

SEQ ID NO: 566199 - DNA, 75 bp, synthetic construct
  source 1..75: mol_type = other DNA
aaaactgcttttaccgggtatccctgtccggtgcacaggcgggagatattctgctgtgctgttttggttcatcgg

SEQ ID NO: 566200 - DNA, 75 bp, synthetic construct
  source 1..75: mol_type = other DNA
atcatgccgccatttactgcggcaacggtgagctgcttcaccatctgcctgaacaactgagtaaacgggagaggt

SEQ ID NO: 566201 - DNA, 75 bp, synthetic construct
  source 1..75: mol_type = other DNA
cccgtaattttagaggcgcaggatgtgttgataacctacagaggaaaactaccgggaataattactggttctctg

SEQ ID NO: 566202 - DNA, 75 bp, synthetic construct
  source 1..75: mol_type = other DNA
gcgttatggggttcagccctggcagccggtggtttttctgccaccacgatgctgttttcacttggagccagcatg

SEQ ID NO: 566203 - DNA, 75 bp, synthetic construct
  source 1..75: mol_type = other DNA
caacagcgatattaccagccatttcttcagcaaggccacaaagctctttcctgtcgctatcagacaagttgtcac

SEQ ID NO: 566204 - DNA, 75 bp, synthetic construct
  source 1..75: mol_type = other DNA
gccttcacggggatttacaacgatttggccgccgcctcagcctgtatgtgaacacggcagcggaagccatccggg

SEQ ID NO: 566205 - DNA, 75 bp, synthetic construct
  source 1..75: mol_type = other DNA
ctggacaacatgattgcccagggtaacccgatgccggtgccttacggggaaatgctggttggctcccgccgtata

SEQ ID NO: 566206 - DNA, 75 bp, synthetic construct
  source 1..75: mol_type = other DNA
gaagaatcattgctggtgctcacgataaaatgcggatgatccccgtacgcctcagcgccaggggcaaagcccggt

SEQ ID NO: 566207 - DNA, 75 bp, synthetic construct
  source 1..75: mol_type = other DNA
atgacgccagtggactatattttacgtgagagtaaaaattgcaatatgtggtggacccatacacttaattgcaac

SEQ ID NO: 566208 - DNA, 75 bp, synthetic construct
  source 1..75: mol_type = other DNA
cggtgtggcccagatgctggccccgaaggcaaagacaccggattaccgggcaacggataacggtaaacagaacac

SEQ ID NO: 566209 - DNA, 75 bp, synthetic construct
  source 1..75: mol_type = other DNA
tacatttcatatcagaatatagttatatttacgggggggaatcagtttaagataagaaacaagaaagaattcacc

SEQ ID NO: 566210 - DNA, 75 bp, synthetic construct
  source 1..75: mol_type = other DNA
tataatgatatagttaatgtcatccttagtgcttcatctaagagcatcgtagacagggttataaaagtaattgag

SEQ ID NO: 566211 - DNA, 75 bp, synthetic construct
  source 1..75: mol_type = other DNA
aatgaaacatgcttctttatttttaagaactactgataaaaacatagatgaaatatcttgtttggttgggtttaa

SEQ ID NO: 566212 - DNA, 75 bp, synthetic construct
  source 1..75: mol_type = other DNA
ggtgagatgctggtgggttcacgacggatatcccaggacatcagcacccgtgatgaaggtagtgacgggacggtg

SEQ ID NO: 566213 - DNA, 75 bp, synthetic construct
  source 1..75: mol_type = other DNA
cctcactggacaacatgattgcccagggcaacccgatgccggtgccttatggtgagatgctggtgggttcacgac

SEQ ID NO: 566214 - DNA, 75 bp, synthetic construct
  source 1..75: mol_type = other DNA
cacggggatatcattcatctgatcccccggaccgaaggtgccaaaagcggtggtgtgtttcaggcggtgctggga

SEQ ID NO: 566215 - DNA, 75 bp, synthetic construct
  source 1..75: mol_type = other DNA
tggcatgctgcctgccgtatggcggagcaactgaccaccctgcgttaccggtttggtctgcagggtgatggaatc

SEQ ID NO: 566216 - DNA, 75 bp, synthetic construct
  source 1..75: mol_type = other DNA
cgcattgagatgaaacatgggagaaatcgcctgactcccgaacaactcgtctggatgacccgcctcactgaagcc

SEQ ID NO: 566217 - DNA, 75 bp, synthetic construct
  source 1..75: mol_type = other DNA
aaaatttaaaggtctggtttttacacttgataacgaatgtgaaatcgataaatgggtatctttgttagctcacga

SEQ ID NO: 566218 - DNA, 75 bp, synthetic construct
  source 1..75: mol_type = other DNA
attaagtctctggactggtataccccagaaagctcattcttaaatacgcaagaacctgaacttgttgcaatcccg

SEQ ID NO: 566219 - DNA, 75 bp, synthetic construct
  source 1..75: mol_type = other DNA
atgttatatgcatttaagctgggcagaaaactgcgcggcgaggaaccttattaccctgaaaaaggcgggaaaggt

SEQ ID NO: 566220 - DNA, 75 bp, synthetic construct
  source 1..75: mol_type = other DNA
aaccatcaggtcttcagacagcaattagtggcggagcttcaggggctatgactggcgctgctcttggctctattg

SEQ ID NO: 566221 - DNA, 75 bp, synthetic construct
  source 1..75: mol_type = other DNA
ccgggcagacatatgccaacaacatgagtcagatttcgcagcaaagtgcggctcttgcagcggcaaatgccaaca

SEQ ID NO: 566222 - DNA, 75 bp, synthetic construct
  source 1..75: mol_type = other DNA
atgaccgtttatgcatatactcgagtgtcaaaagctgattccgagaatggtactactgataatcagattcatttg

SEQ ID NO: 566223 - DNA, 75 bp, synthetic construct
  source 1..75: mol_type = other DNA
agtaggaatgaattaccaattatatgtccgcaattacagtcgtaacaccaactacgagatcgttgcgacagttga

SEQ ID NO: 566224 - DNA, 75 bp, synthetic construct
  source 1..75: mol_type = other DNA
atgccgggctttcgccgtcagatgaacgaaggctggtaccagatacgtattgccggtgatgacacggcaccggag

SEQ ID NO: 566225 - DNA, 75 bp, synthetic construct
  source 1..75: mol_type = other DNA
ggaagattaattctctttaccatgcatatcaagaaggtgtgtcattaccttatgatttttcagattataaactga

SEQ ID NO: 566226 - DNA, 75 bp, synthetic construct
  source 1..75: mol_type = other DNA
gcaggatatactataaattatgacagagataacagtaacctggttgatgaaaaagctgaacaagggagcaggcaa

SEQ ID NO: 566227 - DNA, 75 bp, synthetic construct
  source 1..75: mol_type = other DNA
tgggttgtttggtggtatggttctttaaaaaaacataaaagacgaggtgagcaacctaaaataacagttgtcttt

SEQ ID NO: 566228 - DNA, 75 bp, synthetic construct
  source 1..75: mol_type = other DNA
ttaccagagtcttgctgctgcggaggcgacgggtggacttggttcgacagccacaagcaatcaactggctacgat

SEQ ID NO: 566229 - DNA, 75 bp, synthetic construct
  source 1..75: mol_type = other DNA
atgacaggggaaagccacgatgagaagaggcttaaatcatcattaaaagctgttttacaacgtttagattcatat

SEQ ID NO: 566230 - DNA, 75 bp, synthetic construct
  source 1..75: mol_type = other DNA
gccggtgcaggtcttgccagccttttgggaacatcaacaccttggggcgctggaattggtgctggtatcggattg

SEQ ID NO: 566231 - DNA, 75 bp, synthetic construct
  source 1..75: mol_type = other DNA
atcgcgccgacactcggtcagtcttggttatcaaaccagatgagcaattacaacaatctggcaaacgttgggctt

SEQ ID NO: 566232 - DNA, 75 bp, synthetic construct
  source 1..75: mol_type = other DNA
atggcggaacaactgaccaccctgcgttaccggtttggtctgcaggctggtgaaagcgtcgtacagccctgctga

SEQ ID NO: 566233 - DNA, 75 bp, synthetic construct
  source 1..75: mol_type = other DNA
gcggtaggtgcagaagagtttgagcacctatttcagcgtgaagaatttgactggatcttggcagaaaaatttgcg

SEQ ID NO: 566234 - DNA, 75 bp, synthetic construct
  source 1..75: mol_type = other DNA
cccggtattactccttttagagatctcgttttaaaagcatcagagatcgttttgacaagaaatggtaatgagata

SEQ ID NO: 566235 - DNA, 75 bp, synthetic construct
  source 1..75: mol_type = other DNA
cgaccaaaggcgtgaagttcgtcggctactggccaacggaaggatatgagtttaccagcccgaaaccggtgattg

SEQ ID NO: 566236 - DNA, 75 bp, synthetic construct
  source 1..75: mol_type = other DNA
atgaatatgggtcttttttacggttccagcacctgttataccgagatggcagcggaaaaaatccgcgatattatc

SEQ ID NO: 566237 - DNA, 75 bp, synthetic construct
  source 1..75: mol_type = other DNA
atgatttttctattgggattgagctggaaggcaccgatacgctggcttacaccgatgcgcagtatcagcaactgg

SEQ ID NO: 566238 - DNA, 75 bp, synthetic construct
  source 1..75: mol_type = other DNA
gctcttaaccagtattacaactctcagcagtacaaagaccttgcatggcaggcgcgctatcagagtctggcagca

SEQ ID NO: 566239 - DNA, 75 bp, synthetic construct
  source 1..75: mol_type = other DNA
caacaacctggcaaatatcggtcttggcgctcttcagggacaggcaaacgccgggcaaacatatgccaacaacat

SEQ ID NO: 566240 - DNA, 75 bp, synthetic construct
  source 1..75: mol_type = other DNA
gctggggctggacttgcgaaattaattggttcatccactccgtggggggctgcgatcggcggcggtcttggtctg

SEQ ID NO: 566241 - DNA, 75 bp, synthetic construct
  source 1..75: mol_type = other DNA
gcggacgaaccgtacatgctggaggtgatgccttcctatgatgttgtccggtatgccatgaaaaaattgccggaa

SEQ ID NO: 566242 - DNA, 75 bp, synthetic construct
  source 1..75: mol_type = other DNA
gaaaaagcccgtaaaggtgagttgccggaacgactgcaacaggctgcgattaacgctaatgcaaaacgtggcact

SEQ ID NO: 566243 - DNA, 75 bp, synthetic construct
  source 1..75: mol_type = other DNA
acgcctgaaccggacgctgccgatgcgtatagccaggaagtatcgcacctattttggcaagggtgctgaccggga

SEQ ID NO: 566244 - DNA, 75 bp, synthetic construct
  source 1..75: mol_type = other DNA
tggaaagcgccggtaacctcgggcgactgaaagccattaactttcttgttgaaaaagcccgtaaaggtgagctgc

SEQ ID NO: 566245 - DNA, 75 bp, synthetic construct
  source 1..75: mol_type = other DNA
atatgaagaggagcacgacgaagaatccgaacgcaatttcaggcggggattacagaaactcattgccatgcagga

SEQ ID NO: 566246 - DNA, 75 bp, synthetic construct
  source 1..75: mol_type = other DNA
aatcgtactatcagccgcgatccactttaccagtgggttctgaaatacaaccagtcgcagaacgccgccgaacgg

SEQ ID NO: 566247 - DNA, 75 bp, synthetic construct
  source 1..75: mol_type = other DNA
tatcgatctttctgttgaaaaagcctggatgttggcaagtatccgctttggcgatcaaaaaattcgtagtggatg

SEQ ID NO: 566248 - DNA, 75 bp, synthetic construct
  source 1..75: mol_type = other DNA
ggcagatggatgctctggcgcagattggtgagcgtatccagaccgcgcgggcggggttaggcgatccgcgcaaac

SEQ ID NO: 566249 - DNA, 75 bp, synthetic construct
  source 1..75: mol_type = other DNA
gagctggttaacagattacaggagcagcgtgctgcagaaacccgcgagcgtgatgaaatcacactgcaacagtca

SEQ ID NO: 566250 - DNA, 75 bp, synthetic construct
  source 1..75: mol_type = other DNA
acggaaaaccattcctgtattactcggataatggttccggtgaaacggcagatatgctggataaagagatcgtcg

SEQ ID NO: 566251 - DNA, 75 bp, synthetic construct
  source 1..75: mol_type = other DNA
aaggtgcgccgcccggctacgtgggctatggcgaaggcggcgtgttgacggaagctgtacgtcgtcatccctgga

SEQ ID NO: 566252 - DNA, 75 bp, synthetic construct
  source 1..75: mol_type = other DNA
tgatgaaaccacgttacaacagtcggaaactgcattacgagtctggcagggtgaaaaccccattgtgttcccgga

SEQ ID NO: 566253 - DNA, 75 bp, synthetic construct
  source 1..75: mol_type = other DNA
taagcgaacgcattcagctcttggtatggatgaggaagcgagagggtacttcaggcgttatcgcgataaagattg

SEQ ID NO: 566254 - DNA, 75 bp, synthetic construct
  source 1..75: mol_type = other DNA
aatactacaaacagcagcaacgccttaaaggcatgcgtaaacgcgcagaggaaaaaatccgtgatgccgaggatg

SEQ ID NO: 566255 - DNA, 75 bp, synthetic construct
  source 1..75: mol_type = other DNA
tcctggataaggaggttgtggggatactgccgcgactggggattaatcacccgaccgggattgccggtaatccgc

SEQ ID NO: 566256 - DNA, 75 bp, synthetic construct
  source 1..75: mol_type = other DNA
ggatacgaggttaagaaagccatcagcctcgattatcgtcactggataatctctgtcaggctcccttattccgaa

SEQ ID NO: 566257 - DNA, 75 bp, synthetic construct
  source 1..75: mol_type = other DNA
caacgttacgtacaagggaaaagctgttgttcccgtcgtcgctcaggctctaaagcaactgaatacagcatcgac

SEQ ID NO: 566258 - DNA, 75 bp, synthetic construct
  source 1..75: mol_type = other DNA
ccatgttacgcaaacgtaaggggacaaaagcaatcgaatttaatatcgattgtttgccttctggcgcgcaacaag

SEQ ID NO: 566259 - DNA, 75 bp, synthetic construct
  source 1..75: mol_type = other DNA
tcaaacggccgaccaatgaccgaggcttacgaggattttgtcgctgaatggcagcaccggcacgctgatgagcct

SEQ ID NO: 566260 - DNA, 75 bp, synthetic construct
  source 1..75: mol_type = other DNA
attctgatagttttgccgatcttgccagcgggcacggtcggcattcccgcacgttcaaatccgactggttccagc

SEQ ID NO: 566261 - DNA, 75 bp, synthetic construct
  source 1..75: mol_type = other DNA
agatgggcgagtttgccgagctgcgcgatctgctggagcgagcaatcatcgacacaccgccggtgctggtacgcg

SEQ ID NO: 566262 - DNA, 75 bp, synthetic construct
  source 1..75: mol_type = other DNA
gatggcggggattccctaccatgcggtggaaaactacctcgccaaactggtgaatcagggcgagtccgttgccat

SEQ ID NO: 566263 - DNA, 75 bp, synthetic construct
  source 1..75: mol_type = other DNA
ggatgttgggccttgaaccgaagagcacggcggtgcggagtccggagagtaacggaatagcagagagcttcgtga

SEQ ID NO: 566264 - DNA, 75 bp, synthetic construct
  source 1..75: mol_type = other DNA
ggatgttgggccttgaaccgaagaacacggcggtgcggagtccggagagtaacgggatagcagagagcttcgtga

SEQ ID NO: 566265 - DNA, 75 bp, synthetic construct
  source 1..75: mol_type = other DNA
ggatgttgggacttgaaccgaagaccacggcggtgcggagtccggagagtaacggcatagcagagagcttcgtga

SEQ ID NO: 566266 - DNA, 75 bp, synthetic construct
  source 1..75: mol_type = other DNA
gagaatgatattcaccatgttcttcggcattaccaaataacatcttttgatgtagagaatgcgttaattcagcaa

SEQ ID NO: 566267 - DNA, 75 bp, synthetic construct
  source 1..75: mol_type = other DNA
cggttttcatcttacaggtgagcgaaggcgaggcggctaaagcggacgaacgcgtggatgaagtcgtgataggcg

SEQ ID NO: 566268 - DNA, 75 bp, synthetic construct
  source 1..75: mol_type = other DNA
agccctttacagccctccccctgcgtgaagaaattgtgcatagtgtcgcggctctggaacaatggctggacaaga

SEQ ID NO: 566269 - DNA, 75 bp, synthetic construct
  source 1..75: mol_type = other DNA
ctggtagtagaacaccgacaggcgcgggcggaagcagaaaaagccagccaggcaaaatcggcgtttctggcggcg

SEQ ID NO: 566270 - DNA, 75 bp, synthetic construct
  source 1..75: mol_type = other DNA
cgcattaaacattatgccgtgctggcgggtatcgacagcgaaaagctgtcaccgcatgtgttgcgtcacgctttt

SEQ ID NO: 566271 - DNA, 75 bp, synthetic construct
  source 1..75: mol_type = other DNA
ttgtggcagtcatagtgctgtgtttgacggtactgggatttacgcttctggtcggagactcgctgtgtgagttca

SEQ ID NO: 566272 - DNA, 75 bp, synthetic construct
  source 1..75: mol_type = other DNA
acatcttgcgcgaagtgattgccggtatcgaagaagaaggcattaaagcccgtgtgattcgctgctttaaatcgt

SEQ ID NO: 566273 - DNA, 75 bp, synthetic construct
  source 1..75: mol_type = other DNA
gacggataatggttcatgctaccgggctaatgaaacacgacagttggcctggatgttgggccttgaaccgaagaa

SEQ ID NO: 566274 - DNA, 75 bp, synthetic construct
  source 1..75: mol_type = other DNA
gacggataatggttcatgctaccgggcaaatgaaacacgacagttggccgggatgttgggccttgaaccgaagac

SEQ ID NO: 566275 - DNA, 75 bp, synthetic construct
  source 1..75: mol_type = other DNA
gacggataatggttcatgctaccgggcaaatgaaacacgacagttggcccggatgttgggccttgaaccgaagag

SEQ ID NO: 566276 - DNA, 75 bp, synthetic construct
  source 1..75: mol_type = other DNA
gcgttgcgttttggggcaatcagaccggactggcttacgatccgcagcaaatgggcgaccgaccgttgccacaaa

SEQ ID NO: 566277 - DNA, 75 bp, synthetic construct
  source 1..75: mol_type = other DNA
tggcatccgcatagtgcgctgggttatcgctcgccacgggaatatctgcggcagtgggccagtgatgggttaagt

SEQ ID NO: 566278 - DNA, 75 bp, synthetic construct
  source 1..75: mol_type = other DNA
gacggataatggttcatgctaccgggcgaatgaaacacgacagttggcctggatgttgggccttgaaccgaagat

SEQ ID NO: 566279 - DNA, 75 bp, synthetic construct
  source 1..75: mol_type = other DNA
caatgatggtggagtggttgcatcatcgtgggctaacgctggcaacggcgcaaagtggtgacttacaggcattat

SEQ ID NO: 566280 - DNA, 75 bp, synthetic construct
  source 1..75: mol_type = other DNA
aaacgccgctgaaaggttgctgttactggcacctggtaaacgcgacgaagtgaaagtcgaggaaatcagctggct

SEQ ID NO: 566281 - DNA, 75 bp, synthetic construct
  source 1..75: mol_type = other DNA
ggtacttatcagctatgacattcacgatgccgagcgaattacggtacgccgtaaggacggtagctttatctgtga

SEQ ID NO: 566282 - DNA, 75 bp, synthetic construct
  source 1..75: mol_type = other DNA
gagccttatatgctcgatatcatgccctcttatgacaccattcgccgcgcaatgaagaaactgccggaagtggtg

SEQ ID NO: 566283 - DNA, 75 bp, synthetic construct
  source 1..75: mol_type = other DNA
ggaagaagacactgaaattgagtggctgagtgatcttgagctgcgcgacatgttccgcccgatggtggagcgtcc

SEQ ID NO: 566284 - DNA, 75 bp, synthetic construct
  source 1..75: mol_type = other DNA
gtgaattatgtctggattggtgacggtcacggtatgaagctgaaatgtgcgcatccgatccacggacgtccattc

SEQ ID NO: 566285 - DNA, 75 bp, synthetic construct
  source 1..75: mol_type = other DNA
tatcgccctgttggtaatgtggtgaccgttcagccgttgaggtgtgaggaagagcatgatgatgaatacgaaact

SEQ ID NO: 566286 - DNA, 75 bp, synthetic construct
  source 1..75: mol_type = other DNA
atcagcgccagcagcgtatcaaagggatgcgtcagcgcggagaggaaaaaatcagactggccgaggcagagaata

SEQ ID NO: 566287 - DNA, 75 bp, synthetic construct
  source 1..75: mol_type = other DNA
ttgctgattttaaaaaagcaaccactccggctgaacgtctgatcatgctggcaccaggcaaacgtcagcccataa

SEQ ID NO: 566288 - DNA, 75 bp, synthetic construct
  source 1..75: mol_type = other DNA
agcagtttcttgatgccctgtggctggagaaaaatctggcagaaaatacgttgaacgcatatcgtcgcgatctgt

SEQ ID NO: 566289 - DNA, 75 bp, synthetic construct
  source 1..75: mol_type = other DNA
atgggcacgcaggggcgtcatttcagaccgtctggcctcagctattatgctccatgcagggcgcacggctgaact

SEQ ID NO: 566290 - DNA, 75 bp, synthetic construct
  source 1..75: mol_type = other DNA
gaaaacctggacccagattcactcaccccgcgtcaggcgctggagtggatttatcgcttgaagagtctggtgtaa

SEQ ID NO: 566291 - DNA, 75 bp, synthetic construct
  source 1..75: mol_type = other DNA
ctgtttgagcagaaactcggaacgttaaccgccacgcaaaaagaaacagcggacgcccgaattgcgattgtcagc

SEQ ID NO: 566292 - DNA, 75 bp, synthetic construct
  source 1..75: mol_type = other DNA
tgacggatattggcgcggcgaaacttgccagcgccgccgcgcttggtgtgccgctaaaaataacccatatggcgg

SEQ ID NO: 566293 - DNA, 75 bp, synthetic construct
  source 1..75: mol_type = other DNA
tatgtatgaacaaacagctacttttacaaagcaatggataggccaggcgtttaactatattttgctaaatgtttt

SEQ ID NO: 566294 - DNA, 75 bp, synthetic construct
  source 1..75: mol_type = other DNA
tcgtatatcagcgatgtgaatgaaatctttcttccaataatgggggctgcttttggtctttattttgtctggaag

SEQ ID NO: 566295 - DNA, 75 bp, synthetic construct
  source 1..75: mol_type = other DNA
agtccggcaaaaagaccaccgaacggttcattactggccttgcacggctcattacaggtctggtggtcatcgcgg

SEQ ID NO: 566296 - DNA, 75 bp, synthetic construct
  source 1..75: mol_type = other DNA
cgctgcgcggcaccgggctggtggtgttctcgccaagtctggtgtttatcgccgtggataacctgtttggcggag

SEQ ID NO: 566297 - DNA, 75 bp, synthetic construct
  source 1..75: mol_type = other DNA
ctatagcgacgcctggaaggcgattaatccgctggaagttgagtacgtgcgttcggaaatgcaggtgaaatttac

SEQ ID NO: 566298 - DNA, 75 bp, synthetic construct
  source 1..75: mol_type = other DNA
ggttaagtctctggaagagttcctgctcggtaagcatctgcgtggcagcgccgccacggccaggcgcgtcaaaca

SEQ ID NO: 566299 - DNA, 75 bp, synthetic construct
  source 1..75: mol_type = other DNA
ttcaacgctggattaaccctgcagaagcacttgagtttgatacagtggacggtaaaccttttttaggtgctaaaa

SEQ ID NO: 566300 - DNA, 75 bp, synthetic construct
  source 1..75: mol_type = other DNA
attgccgcaggtccggttgcaaacttcatttttgctatctttgcctactggttggtttttatccttggcgtgccc

SEQ ID NO: 566301 - DNA, 75 bp, synthetic construct
  source 1..75: mol_type = other DNA
ttttggcctttattttgtctggaagtgggggttagttcattataagggtgatcctaatgcgattcaggatatgct

SEQ ID NO: 566302 - DNA, 75 bp, synthetic construct
  source 1..75: mol_type = other DNA
tcggataccaatttgtcagattttttttctgaaaagtttcaggatgagagtgtcagcgctattgcattgaattgg

SEQ ID NO: 566303 - DNA, 75 bp, synthetic construct
  source 1..75: mol_type = other DNA
tttgccgatctgcgctacggtcgttatatcgatgcgctgggtaacgacatggttttgcatccaaaacacggtcct

SEQ ID NO: 566304 - DNA, 75 bp, synthetic construct
  source 1..75: mol_type = other DNA
ggcacaggatcagaagacgctgcagtcttccgtcgccagcgacgttaaccaccgctacgtgtcccgcattttcct

SEQ ID NO: 566305 - DNA, 75 bp, synthetic construct
  source 1..75: mol_type = other DNA
ccactatacgtttatcacaatgggcattatgactgttgcttcagcagcaatgttcatgcttctgaaaacaaccga

SEQ ID NO: 566306 - DNA, 75 bp, synthetic construct
  source 1..75: mol_type = other DNA
ggcaccgacagcgttaggttccattattgcaaaatcgatggttacccaagtcttacgtcgtctgggctatcgcca

SEQ ID NO: 566307 - DNA, 75 bp, synthetic construct
  source 1..75: mol_type = other DNA
cgtagaagcctttggtaaaacgcagtcgccgttgcgtcttctggtttgttcggatgtggcatctgaagggatcaa

SEQ ID NO: 566308 - DNA, 75 bp, synthetic construct
  source 1..75: mol_type = other DNA
gttcggctacgccacgctggatatcagctccgggcgttttcgcctgagcgaaccggcggaccgcgaaacgatggc

SEQ ID NO: 566309 - DNA, 75 bp, synthetic construct
  source 1..75: mol_type = other DNA
agtggagtggctgacggataatggttcatgctaccgggctaatgaaacacgccagtttgcccggatgatgggtct

SEQ ID NO: 566310 - DNA, 75 bp, synthetic construct
  source 1..75: mol_type = other DNA
agtggagtggctgacggataatggttcatgctaccgggctaatgaaacacgacagtttgcccggatgctgggtct

SEQ ID NO: 566311 - DNA, 75 bp, synthetic construct
  source 1..75: mol_type = other DNA
caccgctgacgaaactgcccattaccgggagctcctgcatcaggataacgatcggggagctgccagagcagaaca

SEQ ID NO: 566312 - DNA, 75 bp, synthetic construct
  source 1..75: mol_type = other DNA
gctggcacgcctgcggaatacgacaccggccacactgacggtggccaccgtccccggcggggaaagcggcggaga

SEQ ID NO: 566313 - DNA, 75 bp, synthetic construct
  source 1..75: mol_type = other DNA
aggacaggcaggagcgcctgaagcagctgctggcacgcctgcgaaatacgacaccggccacactgacggtggcta

SEQ ID NO: 566314 - DNA, 75 bp, synthetic construct
  source 1..75: mol_type = other DNA
gcaacaatgcccgaaatgtcataaaatgactgattgtaataaagaaaatttcaaagctagatttaaggatggcgg

SEQ ID NO: 566315 - DNA, 75 bp, synthetic construct
  source 1..75: mol_type = other DNA
ctggcacaactggacctcatcgctgtcccgcggtaacagcctcattcctgccaccctgcgcagcacggatgtgac

SEQ ID NO: 566316 - DNA, 75 bp, synthetic construct
  source 1..75: mol_type = other DNA
gctggctccacccacaggaaagaacacagagcagactcgccctgagtgccactgccacccggacgaacaccaccg

SEQ ID NO: 566317 - DNA, 75 bp, synthetic construct
  source 1..75: mol_type = other DNA
ttttgttatcgcattggctcgattttgctggtgctgttaatggggcttgcacttttcaatgatttctctcggtta

SEQ ID NO: 566318 - DNA, 75 bp, synthetic construct
  source 1..75: mol_type = other DNA
gaagcaattacttatactgcgacggtgaaaaagaatggggtagctcaggctaatgtccctgtgtcatttgatatt

SEQ ID NO: 566319 - DNA, 75 bp, synthetic construct
  source 1..75: mol_type = other DNA
tgtgcaaggtggtagcaatatttataaagtgacggctcgcgcctatgaccgtaatggcaatagctctaacaatgt

SEQ ID NO: 566320 - DNA, 75 bp, synthetic construct
  source 1..75: mol_type = other DNA
acggctatttccgcatgagcggctggcatgagtcatacaataagaaagactatgatgagcgcccggcaaatggtt

SEQ ID NO: 566321 - DNA, 75 bp, synthetic construct
  source 1..75: mol_type = other DNA
acatttatacagttccgaaagcgaaatgatgaaggctggacctggtcagcagatcattttgccactcaaaaaact

SEQ ID NO: 566322 - DNA, 75 bp, synthetic construct
  source 1..75: mol_type = other DNA
gggttgcaagtacttacgatttggtaagggaaaatccactgatagataaagttgatatagcaggtaattatgcct

SEQ ID NO: 566323 - DNA, 75 bp, synthetic construct
  source 1..75: mol_type = other DNA
ttaaattgaaggcaagtggtggtaacggtacatattcatggtattcagaaaataccagtatcgcgactgttgatg

SEQ ID NO: 566324 - DNA, 75 bp, synthetic construct
  source 1..75: mol_type = other DNA
tcaacgcacccgcacttaacccgcttcggcgggttttgttttttcctagcattctggtttacaattcgcacgcca

SEQ ID NO: 566325 - DNA, 75 bp, synthetic construct
  source 1..75: mol_type = other DNA
agcaggcacgggcggcgttcccgcactttcaaatctgactggttccagcaccccccatgcactgaagaacaggcc

SEQ ID NO: 566326 - DNA, 75 bp, synthetic construct
  source 1..75: mol_type = other DNA
cagcaggcacgggcggcactcttacgcatttaaatctgattggtaccagcatgacccctgcactgaagagcaggc

SEQ ID NO: 566327 - DNA, 75 bp, synthetic construct
  source 1..75: mol_type = other DNA
gtcttcattgatcaggatttttctggtgataatacccgtttaggtattggtggcgaatactggcgagactatttc

SEQ ID NO: 566328 - DNA, 75 bp, synthetic construct
  source 1..75: mol_type = other DNA
gagcagtattatggtgataatgttgctttgtttaattccgataagttgcagtcgaatcctggtgcggcgaccgtt

SEQ ID NO: 566329 - DNA, 75 bp, synthetic construct
  source 1..75: mol_type = other DNA
gcatgggcggcgttcacacgcatttaaaaccgactggtaccaacacccaccatgtactgaagaacaggccgaatg

SEQ ID NO: 566330 - DNA, 75 bp, synthetic construct
  source 1..75: mol_type = other DNA
ggtgataaacagatagcaacgtatacgattaagacacctcaggaaatagtatctttagataagaatggaaaagtt

SEQ ID NO: 566331 - DNA, 75 bp, synthetic construct
  source 1..75: mol_type = other DNA
gggtataagtttgagaaagccctcagtcttgaccgtcgccactggataatctccgtcaggctcccttattccgaa

SEQ ID NO: 566332 - DNA, 75 bp, synthetic construct
  source 1..75: mol_type = other DNA
gataatctccgtcagtctgccttactccgaacgcccaccgcgtctgtcccgcacattccagcaacgcatctggag

SEQ ID NO: 566333 - DNA, 75 bp, synthetic construct
  source 1..75: mol_type = other DNA
ccctcagcctcgattatcgtctctggataatctacgtcaggctgccgtactccgagcgcccaccgcgtccgtctc

SEQ ID NO: 566334 - DNA, 75 bp, synthetic construct
  source 1..75: mol_type = other DNA
agatggcgttgacgcctgtctagtcacacttaagttggaagacggtagaaaaatacttattttcttcgattgggt

SEQ ID NO: 566335 - DNA, 75 bp, synthetic construct
  source 1..75: mol_type = other DNA
atcattcgcaaggaaaaacggcggatacgggatcaggttctgaccatgtatcagacgggcagcattgaggcatca

SEQ ID NO: 566336 - DNA, 75 bp, synthetic construct
  source 1..75: mol_type = other DNA
cggatggccgtgaaattgaggggtgttcgttaggcgttgatgcctgtcaggtcgcaatgagagttggcgagcgcg

SEQ ID NO: 566337 - DNA, 75 bp, synthetic construct
  source 1..75: mol_type = other DNA
accagaactcatttgcaaacggtgaaaattattttaaattgagttcagattcaaaactgttaactcaaaatgttg

SEQ ID NO: 566338 - DNA, 75 bp, synthetic construct
  source 1..75: mol_type = other DNA
atgcttagcgctggtttaggattgtttttttatgttaaccagaactcatttgcaaacggtgaaaattattttaaa

SEQ ID NO: 566339 - DNA, 75 bp, synthetic construct
  source 1..75: mol_type = other DNA
ttcagcacttaatgccagtgcggttatatttgttgagcaaaccaaggccagtattactgagattaaggctgataa

SEQ ID NO: 566340 - DNA, 75 bp, synthetic construct
  source 1..75: mol_type = other DNA
atggcgcacgataccaaattacacaattctgataatctcgccgtccctgccagcaggcgcgggcggcgttctcat

SEQ ID NO: 566341 - DNA, 75 bp, synthetic construct
  source 1..75: mol_type = other DNA
ttgttttacgtattctggtttacaatccacaggccagcctgaacaactggcacctgctgcgccagcagagaaaac

SEQ ID NO: 566342 - DNA, 75 bp, synthetic construct
  source 1..75: mol_type = other DNA
accttaggtacattaagtaagcccactgaaaaaacggatgcgaatggctatgctaaagtaacattaacatcggcg

SEQ ID NO: 566343 - DNA, 75 bp, synthetic construct
  source 1..75: mol_type = other DNA
gcggcggttccattggtcgcggcggcgcacctgctcatgcggcgctgctgtcacaaccgccaggaagcctgaaag

SEQ ID NO: 566344 - DNA, 75 bp, synthetic construct
  source 1..75: mol_type = other DNA
acacaggcatggctggaagcgcgcctgaaaggcgaagaactgccaaaaccagaagggctgctgacacaaaacgaa

SEQ ID NO: 566345 - DNA, 75 bp, synthetic construct
  source 1..75: mol_type = other DNA
atgatgccctcagggaatggctgaaactggataaatccgttcaacaacagttcgcaaaaactaaaaatgcagcga

SEQ ID NO: 566346 - DNA, 75 bp, synthetic construct
  source 1..75: mol_type = other DNA
ctgcgaaaaagcgggtattgaactgacgttgttccacggtcgcggcggttccattggtcgcggcggcgcacctgc

SEQ ID NO: 566347 - DNA, 75 bp, synthetic construct
  source 1..75: mol_type = other DNA
gcgcaactggcaaccaagcgccgaaacgcgcgaagtgctcgatacctgccaggtgattgccgaagcgccgcaagg

SEQ ID NO: 566348 - DNA, 75 bp, synthetic construct
  source 1..75: mol_type = other DNA
tgacccgctacctcggtatcggcgactacgaaagctggtcagaggccgacaaacaggcgttcctgatccgcgaac

SEQ ID NO: 566349 - DNA, 75 bp, synthetic construct
  source 1..75: mol_type = other DNA
agagagaagagtattcgtttaccccagcttactttgaaccagagcaacagcaaggttaaggtaatcaagggtacc

SEQ ID NO: 566350 - DNA, 75 bp, synthetic construct
  source 1..75: mol_type = other DNA
ggaaggccaactcgacgatcgtgaatctccgctgcatattcacctcggtcaggtgatgtcgcgtggcgaaaaaat

SEQ ID NO: 566351 - DNA, 75 bp, synthetic construct
  source 1..75: mol_type = other DNA
catcgcgctttgcgaagatgcggccaaccataatcgggcgcgtactggccatggggcccggggcaggggttgcaa

SEQ ID NO: 566352 - DNA, 75 bp, synthetic construct
  source 1..75: mol_type = other DNA
gataccgaccatatttgttaactccggcattgatgtcgataaatcaatattaatgaccgctgttattatgattgg

SEQ ID NO: 566353 - DNA, 75 bp, synthetic construct
  source 1..75: mol_type = other DNA
gctattttaagttatggtctggtgatgatcttctttctttatatgtatgtttgttttgcatcggctgtatatgtc

SEQ ID NO: 566354 - DNA, 75 bp, synthetic construct
  source 1..75: mol_type = other DNA
tttgttggtaactggtcgcccatgctgtctgcggcgataggcgtggtggttatcgctttttttagttggcggata

SEQ ID NO: 566355 - DNA, 75 bp, synthetic construct
  source 1..75: mol_type = other DNA
accgaattacctgcgcgaactgaacgaacaactggaagagaacctcggctacaaactgcccgtcgaatttgttcc

SEQ ID NO: 566356 - DNA, 75 bp, synthetic construct
  source 1..75: mol_type = other DNA
acgctccgatggaaagcttctggggaacgctgaaaaatgagagcctgagccactatcgttttaataaccgggatg

SEQ ID NO: 566357 - DNA, 75 bp, synthetic construct
  source 1..75: mol_type = other DNA
tcggtaactcagcctgtgtgtcacggcatcatgaggtgttcctgaacgggactcggcaccgtggtaatatgcaaa

SEQ ID NO: 566358 - DNA, 75 bp, synthetic construct
  source 1..75: mol_type = other DNA
atgtgggacaccgaaaagaaatcctggtttgtcggtccttacgcaaccagagatcggattgaaaactttatccga

SEQ ID NO: 566359 - DNA, 75 bp, synthetic construct
  source 1..75: mol_type = other DNA
tctttctcaggaagtttagtctccaggattcccggggcggttcatgcgaaattgtcggctacgccatgggagagc

SEQ ID NO: 566360 - DNA, 75 bp, synthetic construct
  source 1..75: mol_type = other DNA
ggctgagtcgcggttatgaaggtgcagcagtcggagctgctcttggaggtggaatcacagcgtacaataccgggt

SEQ ID NO: 566361 - DNA, 75 bp, synthetic construct
  source 1..75: mol_type = other DNA
tcgtgaccgactggcacgtcttcgtaaggagctaaggctacgctgtaagcagaaacgcaagttcagagcgactac

SEQ ID NO: 566362 - DNA, 75 bp, synthetic construct
  source 1..75: mol_type = other DNA
caatggcgaaaacgccgtccgacgtactggccgtccacctgttactgaaagaagcaggtattggatttgcgatgc

SEQ ID NO: 566363 - DNA, 75 bp, synthetic construct
  source 1..75: mol_type = other DNA
aaacctgcgttcccgcctgatggcgacacaggcatggctggaagcgcgcctgaaaggtgaagaagtaccaaaacc

SEQ ID NO: 566364 - DNA, 75 bp, synthetic construct
  source 1..75: mol_type = other DNA
cagggcaaacagatggtgatgattggctattccgactcagcaaaagatgcggcgtgatggcagcgtcctgggcgc

SEQ ID NO: 566365 - DNA, 75 bp, synthetic construct
  source 1..75: mol_type = other DNA
tggggaagaacttgaacgggcaaatgccatttataaaaaagaccgacaggcagcttatgacattcataaacgccg

SEQ ID NO: 566366 - DNA, 75 bp, synthetic construct
  source 1..75: mol_type = other DNA
cccgttctgccgtatgcctggcactcgaaaaggaatttggccttgaaagtgacaatcatcggccaagtaaaacgc

SEQ ID NO: 566367 - DNA, 75 bp, synthetic construct
  source 1..75: mol_type = other DNA
gtatgccgatcatcaacgtgtcagtgctgtacattacgacactgataatgtgcatatccatatcgccattaataa

SEQ ID NO: 566368 - DNA, 75 bp, synthetic construct
  source 1..75: mol_type = other DNA
ctgaaccattaatcagcaactcgcacattgcactttgcgaagatgccgctaaccatatcggccgtgtactgcgta

SEQ ID NO: 566369 - DNA, 75 bp, synthetic construct
  source 1..75: mol_type = other DNA
acgatgctggcagaagacatcgcatgcaggaatggtaaacagttcggattcgacaggttgttaccatcgagctac

SEQ ID NO: 566370 - DNA, 75 bp, synthetic construct
  source 1..75: mol_type = other DNA
acaatgctccgatggaaagcttctggggaacgctgaaaaatgaaagtctgagccactatcgttttaaaagccggg

SEQ ID NO: 566371 - DNA, 75 bp, synthetic construct
  source 1..75: mol_type = other DNA
tgaaaaatgaaagtctgagccactatcgttttaaaagccgggatgaggccatctcagtaatacgggaatacattg

SEQ ID NO: 566372 - DNA, 75 bp, synthetic construct
  source 1..75: mol_type = other DNA
aatgggagaggatggttgcggaatgttcacggcgtggcaattcaacattcttcccgtccacgcatgacccgcgcc

SEQ ID NO: 566373 - DNA, 75 bp, synthetic construct
  source 1..75: mol_type = other DNA
tgtcgatgcttacggaattgagtcttatcgtgactgggcgatgaccacgcgtggcggggcacagtttgatttgct

SEQ ID NO: 566374 - DNA, 75 bp, synthetic construct
  source 1..75: mol_type = other DNA
ccagaggcggtgctcaatttgacctgctggcagagtcaaatgacaaatcagtttgcagcagcgtttatgctggcg

SEQ ID NO: 566375 - DNA, 75 bp, synthetic construct
  source 1..75: mol_type = other DNA
ttattcagattaaagcctgggggccggttggttccgggttattgtctattcagggcaccagctttaacttcgttg

SEQ ID NO: 566376 - DNA, 75 bp, synthetic construct
  source 1..75: mol_type = other DNA
atgcttcatttcatcaccgctaaacgtcagccagcgcagggtgccccgcaagagaaaacaccagaggttattaca

SEQ ID NO: 566377 - DNA, 75 bp, synthetic construct
  source 1..75: mol_type = other DNA
tgaggtaatacagtatgtgaagcatattattaatatatttgagtatgtggatggttcattttatattgatgggga

SEQ ID NO: 566378 - DNA, 75 bp, synthetic construct
  source 1..75: mol_type = other DNA
ggagatcatcaggcgatggattgatagtgtagcacagatagaaacggaagcttttactaaaaatctcgttgatgc

SEQ ID NO: 566379 - DNA, 75 bp, synthetic construct
  source 1..75: mol_type = other DNA
gtcgtgaccgactggcacgtcttcgtaaggagctaaggctacgctgtaagcagaaacgcaagttcagagcgacta

SEQ ID NO: 566380 - DNA, 75 bp, synthetic construct
  source 1..75: mol_type = other DNA
tgaaaggcggcgtgctggcaaatggcctgaactcatttgtgtcggcagtatttaacactttcccgaactcctgtt

SEQ ID NO: 566381 - DNA, 75 bp, synthetic construct
  source 1..75: mol_type = other DNA
tgatgattgctgtttcggaacactgccggaatttatcaaattactgaccgattgcggttatcaggtaattcagag

SEQ ID NO: 566382 - DNA, 75 bp, synthetic construct
  source 1..75: mol_type = other DNA
gctgcaaactgtgcggcatcgcctgcccgtttggcgcaatcgaattttccggcagccgtccgctggatattccgg

SEQ ID NO: 566383 - DNA, 75 bp, synthetic construct
  source 1..75: mol_type = other DNA
tctgcgccgcagctctgtcaccactgtgaagatgcgccctgtgcggtggtctgcccggttaacgccatcacccgc

SEQ ID NO: 566384 - DNA, 75 bp, synthetic construct
  source 1..75: mol_type = other DNA
ggtgcgtgagcaggatcgccgcgacctcttcaccgacgatgaactagagcaaattttctcggctgactggtttaa

SEQ ID NO: 566385 - DNA, 75 bp, synthetic construct
  source 1..75: mol_type = other DNA
gggacctcgcgttttgcgtacagagacaacagcgctcaccgccattaccgcactgcaggtgcgattcggcgattt

SEQ ID NO: 566386 - DNA, 75 bp, synthetic construct
  source 1..75: mol_type = other DNA
acttcacactattcagtctgaacgattgaatacagattgttctttattcaaaagacaaccatctattgaaagtgc

SEQ ID NO: 566387 - DNA, 75 bp, synthetic construct
  source 1..75: mol_type = other DNA
actgcatactattcagtcagagcgactaaatacgcaacattctctttttgagcgactgccatcttttgaaagcac

SEQ ID NO: 566388 - DNA, 75 bp, synthetic construct
  source 1..75: mol_type = other DNA
agatgattgctgtttcggaacactgccggaatttatcgaattgctgaccagttgcggttatcaggttattcaggg

SEQ ID NO: 566389 - DNA, 75 bp, synthetic construct
  source 1..75: mol_type = other DNA
gagctggcagaacgtgcgcgactgattaagccgttaacgagccatcacgatgatgatctgcattttaccggacgc

SEQ ID NO: 566390 - DNA, 75 bp, synthetic construct
  source 1..75: mol_type = other DNA
tgatgattgctgtttcggcacactgccggaatttatcgagttgctgaccagttgcggttatcaggtcattcaggg

SEQ ID NO: 566391 - DNA, 75 bp, synthetic construct
  source 1..75: mol_type = other DNA
caaaagcttctacagtgccatcaacagtgcttcctgcggccgctaccatgaatccgtattgcaatccgttgtatg

SEQ ID NO: 566392 - DNA, 75 bp, synthetic construct
  source 1..75: mol_type = other DNA
cgcgccctgatagggcagcgtgaaattcatgcatctacccgcacaacccaccttgcaaatgccagagcgatcgcc

SEQ ID NO: 566393 - DNA, 75 bp, synthetic construct
  source 1..75: mol_type = other DNA
tggatgtcagcggcggcggtcacggtattgatatcaccggcgacagcgcaacggtggataacaagggcaccatga

SEQ ID NO: 566394 - DNA, 75 bp, synthetic construct
  source 1..75: mol_type = other DNA
gtgtatccaggagcggttattacaactgggtacagcatgaaccctgacagaaaacaaagtgatgagcggctaaaa

SEQ ID NO: 566395 - DNA, 75 bp, synthetic construct
  source 1..75: mol_type = other DNA
gtaggttctctgttggcgctaaccggcgcagttgctgcatctatcgtcggcattgaagtcaatgcgctggtggct

SEQ ID NO: 566396 - DNA, 75 bp, synthetic construct
  source 1..75: mol_type = other DNA
gagtctggcgggcggaaaaggtcgcattgttgggacgttgatcggcgcattaattcttggcttccttaataatgg

SEQ ID NO: 566397 - DNA, 75 bp, synthetic construct
  source 1..75: mol_type = other DNA
gctcatcgcgaacggctaccgggtggggcagtgtaaccggtgtgtggtgtatccgcaggagtgcaacaccctgcg

SEQ ID NO: 566398 - DNA, 75 bp, synthetic construct
  source 1..75: mol_type = other DNA
tctgcgctgcgggtttacgctggccaatacagcggtgatcgacctgctgctgaaagtgatcgccccctatccgct

SEQ ID NO: 566399 - DNA, 75 bp, synthetic construct
  source 1..75: mol_type = other DNA
tttaccgcctccagtgccgtatttaaatctttatgggatcagggcattatcttacgtgatcaaaataaacaacct

SEQ ID NO: 566400 - DNA, 75 bp, synthetic construct
  source 1..75: mol_type = other DNA
acaacaggcggtgcgggcgaacccgaaagacagtgaggctctgggggcgctgggccaggcgtattcccagaaagg

SEQ ID NO: 566401 - DNA, 75 bp, synthetic construct
  source 1..75: mol_type = other DNA
acagcaatattcaggagctggttaatcgactgcaaagcgatcaggtgctggaaaccgctaatcgcctgcgagaaa

SEQ ID NO: 566402 - DNA, 75 bp, synthetic construct
  source 1..75: mol_type = other DNA
gggctttggctacacggcgcgggcattacttgaacgacgtgttacttccaactggtttgtcggcacggcaattga

SEQ ID NO: 566403 - DNA, 75 bp, synthetic construct
  source 1..75: mol_type = other DNA
acgtcttcgtaaggaactaaggctacgctgtaagcagaaacgcaagttcagagcgactacgaactcgaaccacaa

SEQ ID NO: 566404 - DNA, 75 bp, synthetic construct
  source 1..75: mol_type = other DNA
cggttattacaactgggtacagcatgaaccctcagacagaaaacaaagtgatgagcggctaaaactggagattaa

SEQ ID NO: 566405 - DNA, 75 bp, synthetic construct
  source 1..75: mol_type = other DNA
ttggcgataccgcagcggcgcagcagacgtttaacaagctgatcccgcaggcaaaatctcagccaccgtcgatgg

SEQ ID NO: 566406 - DNA, 75 bp, synthetic construct
  source 1..75: mol_type = other DNA
acgcgacaaacctacacgttattccgcactggtggaagcgccaatcgcttattcccaaccttctgtcaccggaac

SEQ ID NO: 566407 - DNA, 75 bp, synthetic construct
  source 1..75: mol_type = other DNA
accgtctacatttccgaacgggaagtggaaaagatgatggatgaatttaaattaaaatttgaaaaagataattga

SEQ ID NO: 566408 - DNA, 75 bp, synthetic construct
  source 1..75: mol_type = other DNA
cgcatagtgcactgggttatcgctcgccacgggaatatctacggcagcaagccagtaatgggttaagtgataaca

SEQ ID NO: 566409 - DNA, 75 bp, synthetic construct
  source 1..75: mol_type = other DNA
cgtaggcggcattccctctactgcgttgaaaggcgcgggtctgttaccgcacatccgcgcgaccgtaaagttgcc

SEQ ID NO: 566410 - DNA, 75 bp, synthetic construct
  source 1..75: mol_type = other DNA
tcgcctctatggtgaatcttcaaagatacaaccaggagtactatctggttcagcaacgctgctcatgatattgcc

SEQ ID NO: 566411 - DNA, 75 bp, synthetic construct
  source 1..75: mol_type = other DNA
gcgttaaggtgcgcatcccggaagggaatatcgacggaaacgtgaacaagttgctggcagaagcggggaaaaaaa

SEQ ID NO: 566412 - DNA, 75 bp, synthetic construct
  source 1..75: mol_type = other DNA
tcgatagccgctgttacgccaaattcgctttggatccgtgctaccagtgcgtggataagctgcccacgacgttct

SEQ ID NO: 566413 - DNA, 75 bp, synthetic construct
  source 1..75: mol_type = other DNA
gttgaagatctcgatctcacctggacattggtcgccaatggttaccgtattcggcaggtgaatcgctgtatcgta

SEQ ID NO: 566414 - DNA, 75 bp, synthetic construct
  source 1..75: mol_type = other DNA
atctggattatttatggacttattgccttttttactggacgcgaacctcagcgcgacaaacccacccgttattcc

SEQ ID NO: 566415 - DNA, 75 bp, synthetic construct
  source 1..75: mol_type = other DNA
gttggtcgccaatggttaccgcattcgtcaggcgaatcgctgtattgtataccctcaggaatgcaacaacccgcg

SEQ ID NO: 566416 - DNA, 75 bp, synthetic construct
  source 1..75: mol_type = other DNA
ggaatgggctatatgctggcagaaattgagcgcggcgctgatgccgttggcggaattccctccaccgcgttaaaa

SEQ ID NO: 566417 - DNA, 75 bp, synthetic construct
  source 1..75: mol_type = other DNA
gattgcattactgccattcgggaaaaaagcccgcaaatcaaaattgaaactctggtgccggatttccgcggtcgt

SEQ ID NO: 566418 - DNA, 75 bp, synthetic construct
  source 1..75: mol_type = other DNA
gcgcgacaaacccacccgctattccgcactggtggaagcgtcaaccacttattcccaaccttctgctacaggaac

SEQ ID NO: 566419 - DNA, 75 bp, synthetic construct
  source 1..75: mol_type = other DNA
aaagacagtgaagcgctaggggcgctgggccaggcgtattcccagaaaggcgatcgcgcgaatgcggtagcgaat

SEQ ID NO: 566420 - DNA, 75 bp, synthetic construct
  source 1..75: mol_type = other DNA
attaccacgtactgcatcaggtaaaatacaaaagtttttgttaaggaaagatattatgcggcgattaattcagga

SEQ ID NO: 566421 - DNA, 75 bp, synthetic construct
  source 1..75: mol_type = other DNA
atggttccacagaaagttcgccgcatgcggtggtgaatctcgacgatcctttgtcgcgctttatgcacaccgatg

SEQ ID NO: 566422 - DNA, 75 bp, synthetic construct
  source 1..75: mol_type = other DNA
tgcggtagtgaatctcgatgatccgttgtcacgctttatgcataccgatggttacgcggctgctggcgtggagat

SEQ ID NO: 566423 - DNA, 75 bp, synthetic construct
  source 1..75: mol_type = other DNA
gaagccatggcgaaaaccggtgcggtaattaacgtcaagaaaccacagtttgtcagcccgggccagatgggtaac

SEQ ID NO: 566424 - DNA, 75 bp, synthetic construct
  source 1..75: mol_type = other DNA
tcatgcgcttatgtcgtgctgaaagcgccacatcattcaatatcgctggaagacatagtggctttttttagccgt

SEQ ID NO: 566425 - DNA, 75 bp, synthetic construct
  source 1..75: mol_type = other DNA
aagaaggctggtattacagcggcgatctctgccgtatggatgaggctggcggtgatgctgccaacttactgattt

SEQ ID NO: 566426 - DNA, 75 bp, synthetic construct
  source 1..75: mol_type = other DNA
gtccgatgaacgtttaggtgaacgatcatgcgcttatgtcgtgctgaaagcgccgcatcattcaggtgatgctgc

SEQ ID NO: 566427 - DNA, 75 bp, synthetic construct
  source 1..75: mol_type = other DNA
ctgaacatatcgtggtaatcgaaaaactaccgcgcactgcctcaggtaaaatacaaaagtttttgttaagaaaag

SEQ ID NO: 566428 - DNA, 75 bp, synthetic construct
  source 1..75: mol_type = other DNA
tctctgttgtatggatgaggcgggttatataaaaataaccggacgcaagaaagatattattgtccgtggcggaga

SEQ ID NO: 566429 - DNA, 75 bp, synthetic construct
  source 1..75: mol_type = other DNA
ttcatgatgcctgcgtggttgcgatgcccgatgaacgcttaggcgaacgctcgtgtgcttatattgtattaaaat

SEQ ID NO: 566430 - DNA, 75 bp, synthetic construct
  source 1..75: mol_type = other DNA
gcgagcttattgcgcacgactaaatctgacctggctggatgtttttatgatgcccgcgccactcggccacgcgac

SEQ ID NO: 566431 - DNA, 75 bp, synthetic construct
  source 1..75: mol_type = other DNA
cgcagcgtcgtgcagcctatcggcagcaagggttatggggtgatgcttcgctggctgactactggcagcaaactg

SEQ ID NO: 566432 - DNA, 75 bp, synthetic construct
  source 1..75: mol_type = other DNA
atcgttgataaattcaaagaaggcggcaacgataaagtgattctttgtgaccgtggcgctaacttcggttacgac

SEQ ID NO: 566433 - DNA, 75 bp, synthetic construct
  source 1..75: mol_type = other DNA
acgacacctttacccgactgacccgtaacgacgagaaagatgactggctgaaacgcggcgtgcgcagcgatgcgg

SEQ ID NO: 566434 - DNA, 75 bp, synthetic construct
  source 1..75: mol_type = other DNA
ggaggcgatgctacgccagcaaccgccttccacgcgcattgatcttacgctggctgactgggcacaacagcgacg

SEQ ID NO: 566435 - DNA, 75 bp, synthetic construct
  source 1..75: mol_type = other DNA
gttacgacaagctatttaacggtgcaccgccagatatcgaaatggcgctggaatactggggggcaatgacgcaaa

SEQ ID NO: 566436 - DNA, 75 bp, synthetic construct
  source 1..75: mol_type = other DNA
cggaacaacaaaaacaactggccgatcccacttttcgtgctcgtgcgcaaggtttagcggcggtggattctggca

SEQ ID NO: 566437 - DNA, 75 bp, synthetic construct
  source 1..75: mol_type = other DNA
gctctgggggcgctgggccaggcgtattctcagaaaggcgatcgcgccaatgcagtggcgaatctggaaaaagcc

SEQ ID NO: 566438 - DNA, 75 bp, synthetic construct
  source 1..75: mol_type = other DNA
aactggcgaaacttcccgccaccgataacgcctcgctgaacactcagcggcgcgtggcgctggtgcaggcacagc

SEQ ID NO: 566439 - DNA, 75 bp, synthetic construct
  source 1..75: mol_type = other DNA
catggcgtagccgacaatttcgcacgtataaacatctttgatgccagcgaggtacaaccatccctcctgtgtggc

SEQ ID NO: 566440 - DNA, 75 bp, synthetic construct
  source 1..75: mol_type = other DNA
caggagggatggttgtacctcgctggcatcaaagatgtttatacgtgcgaaattgtcggctacgccatgggagag

SEQ ID NO: 566441 - DNA, 75 bp, synthetic construct
  source 1..75: mol_type = other DNA
gcgttaatcgaacaatggcgacaacaatttcccattgaagcgatgtgtcaggtatttggtgtatccaggagcggt

SEQ ID NO: 566442 - DNA, 75 bp, synthetic construct
  source 1..75: mol_type = other DNA
cgaccagttaaccggtaaaaatgtcgaagataactggcgcgtgcgctggatgacgggctattactataagggcat

SEQ ID NO: 566443 - DNA, 75 bp, synthetic construct
  source 1..75: mol_type = other DNA
caggtctgggtggcggacctgacgtatgttgccacacaggagggatggttgtacctcgctggcatcaaagatgtt

SEQ ID NO: 566444 - DNA, 75 bp, synthetic construct
  source 1..75: mol_type = other DNA
aaagaacaaatggtagtgtccgctattgccagtacacctcagtctttatggttgatgaatggcggcgactggttt

SEQ ID NO: 566445 - DNA, 75 bp, synthetic construct
  source 1..75: mol_type = other DNA
gagcttccggcgtctccagtagagtggctgacggataatggttcatgctaccgggctaatgaaacacggcagttt

SEQ ID NO: 566446 - DNA, 75 bp, synthetic construct
  source 1..75: mol_type = other DNA
gtgattggcattatgggtaaatccggcaccggcaaaagcagtctgtgtaatgccatttttcagtcccgtatctgc

SEQ ID NO: 566447 - DNA, 75 bp, synthetic construct
  source 1..75: mol_type = other DNA
ttcagtcccgtatctgcgccacgcatcccctgaacggctgcacccgtcaggctcatcaccttacccttcagttag

SEQ ID NO: 566448 - DNA, 75 bp, synthetic construct
  source 1..75: mol_type = other DNA
tccgttgctgcacctgtcggctggaaccttccggcgtttgtgtcgctgatgatccacgcactgccaccacaggca

SEQ ID NO: 566449 - DNA, 75 bp, synthetic construct
  source 1..75: mol_type = other DNA
atgtcattcagccattcttccctctcctcccaagtcaaatcatatctgacgtttcttcctgaagaaattcgccag

SEQ ID NO: 566450 - DNA, 75 bp, synthetic construct
  source 1..75: mol_type = other DNA
atgtcattcagccattcttccctctcctcacaagttaaatcagatctgacgtttcttcctgaagaaattcgccag

SEQ ID NO: 566451 - DNA, 75 bp, synthetic construct
  source 1..75: mol_type = other DNA
atgtcattcagccattcttccctctcctcacaagtaaaatcatatctgacgtttcttcctgaagaaattcgccag

SEQ ID NO: 566452 - DNA, 75 bp, synthetic construct
  source 1..75: mol_type = other DNA
gtcgaagcgctggaaaatctcgatccggattcactgaccccacgtcaggcgctggagtggatttatcgcttgaag

SEQ ID NO: 566453 - DNA, 75 bp, synthetic construct
  source 1..75: mol_type = other DNA
cggctttaatgcggtgcacggctactacattcaaatcagccgtgggcaaagtcatctggcgccaattaactatat

SEQ ID NO: 566454 - DNA, 75 bp, synthetic construct
  source 1..75: mol_type = other DNA
ggcgatgagtgcgcgtgcgcaggattcactgccgcaaccgaccattagttttgccgggcagctgcacgccgcgct

SEQ ID NO: 566455 - DNA, 75 bp, synthetic construct
  source 1..75: mol_type = other DNA
ttcagctttccggtctggatgttacatcttctgcgtaaagcccgggatcgcattatccacctgctgagcgcactg

SEQ ID NO: 566456 - DNA, 75 bp, synthetic construct
  source 1..75: mol_type = other DNA
gttcggtcagcgaagagtcctacggcaagaacttcgatgaagtgcgccagcggctgaatattgcctgtaaacccg

SEQ ID NO: 566457 - DNA, 75 bp, synthetic construct
  source 1..75: mol_type = other DNA
tcaccgccgagttacagccggtactgcgtcaggttggcgatctggaacgtattctggcacgtctggcattgcgta

SEQ ID NO: 566458 - DNA, 75 bp, synthetic construct
  source 1..75: mol_type = other DNA
atgtcattcagccattcttccctctcctcgcaagttaaatcaaatctgacgtttcttcctgaagaaattcgccag

SEQ ID NO: 566459 - DNA, 75 bp, synthetic construct
  source 1..75: mol_type = other DNA
ggaagatgttctgaaaaaagtctgggatgacaatggattaacctcatccaacagcaatctgaaccaatatctcag

SEQ ID NO: 566460 - DNA, 75 bp, synthetic construct
  source 1..75: mol_type = other DNA
tttctgtttgttctcagccatgccgatcgcatgtttcctgctgaagaatggaatgccacagaaaaatgcccgtcc

SEQ ID NO: 566461 - DNA, 75 bp, synthetic construct
  source 1..75: mol_type = other DNA
gctcatcgtcttaccctgcagctcggtgaacgcagaatgacgctggtcgatctgcccggcattggtgaaacaccg

SEQ ID NO: 566462 - DNA, 75 bp, synthetic construct
  source 1..75: mol_type = other DNA
agaaactgccggtgatcgacgtggaattcagccatctggtggggatggatgcatgccagggaacactcacactgc

SEQ ID NO: 566463 - DNA, 75 bp, synthetic construct
  source 1..75: mol_type = other DNA
gcagagtggcgtatggggaaccgtttgtcgatggtttggcaccagtgacctgggctgggaaaactatgacgagga

SEQ ID NO: 566464 - DNA, 75 bp, synthetic construct
  source 1..75: mol_type = other DNA
aacgcaaagaacagcaaatgctggaggaagaagacgcagaacaacgaaggtctcagtccggattatgggggaaaa

SEQ ID NO: 566465 - DNA, 75 bp, synthetic construct
  source 1..75: mol_type = other DNA
gttgcccgtttcagttttccggcctggatgttacagcttctgcgtaaagcccgggaccgcattatccacctactg

SEQ ID NO: 566466 - DNA, 75 bp, synthetic construct
  source 1..75: mol_type = other DNA
ggatttgattatctggatcctgcgggcagatgaacgcgcgtatgccgccgacattaccatgcatcagtttttact

SEQ ID NO: 566467 - DNA, 75 bp, synthetic construct
  source 1..75: mol_type = other DNA
atgtcattcagccattcttccctctcctcgcaagtgaaatcatatctgacgtttcttcctgaagaaattcgccag

SEQ ID NO: 566468 - DNA, 75 bp, synthetic construct
  source 1..75: mol_type = other DNA
gctgatgaacgtgcgtatgctgccgatattgccatgcatcagtttttactgaatgaaggtgcagatccctcgcgt

SEQ ID NO: 566469 - DNA, 75 bp, synthetic construct
  source 1..75: mol_type = other DNA
atgccattcagcaattcttccctctccgcgcaagtgaaatcatatctgacgtttcttcctgaagaaattcgccag

SEQ ID NO: 566470 - DNA, 75 bp, synthetic construct
  source 1..75: mol_type = other DNA
tccggtctggatgttacagcttctgcgtaaagcccgggaccgcattatccgactgctggaaacactgtgggatca

SEQ ID NO: 566471 - DNA, 75 bp, synthetic construct
  source 1..75: mol_type = other DNA
aggtcatggagcagacgaatgccatcgttaaatccatagcaggtaaagatgtcccgaaagatgtcagcgccaatg

SEQ ID NO: 566472 - DNA, 75 bp, synthetic construct
  source 1..75: mol_type = other DNA
tgacaagattattgaagaactcgacaagaccgtccgtttaccgggtctggcaaacctctgggttccgcctatccg

SEQ ID NO: 566473 - DNA, 75 bp, synthetic construct
  source 1..75: mol_type = other DNA
ggtgagaacggcgtgccggtttatctgcgggatgttgcccgcgtgcagaccgggcccgaaatgaggcgtggtatt

SEQ ID NO: 566474 - DNA, 75 bp, synthetic construct
  source 1..75: mol_type = other DNA
cggtggttcatccgttgaaatggccgaagcggagtatatggtccgtgccagcggttatcttcagagcattgatga

SEQ ID NO: 566475 - DNA, 75 bp, synthetic construct
  source 1..75: mol_type = other DNA
gtgagtttctgccgaagatcaacgaaggtgacctgctttatatgccgtcaacgttgccaggtgtctctccggcag

SEQ ID NO: 566476 - DNA, 75 bp, synthetic construct
  source 1..75: mol_type = other DNA
tgcgggtctgctgcccatactctggggaaccggcgcaggttcggaagtcatgagccgtattgcggcccccatgat

SEQ ID NO: 566477 - DNA, 75 bp, synthetic construct
  source 1..75: mol_type = other DNA
tgacaagattattgacgaactcgacaagaccgtccgtttaccgggtctggcaaacctctgggtgccgccaatccg

SEQ ID NO: 566478 - DNA, 75 bp, synthetic construct
  source 1..75: mol_type = other DNA
ggccaggtgtttggccagacgataggcaacaccattcaaccaatagcctctgttccgggattatcggctcttgag

SEQ ID NO: 566479 - DNA, 75 bp, synthetic construct
  source 1..75: mol_type = other DNA
ctaagcgtgtagcgctggtccctctattcgcacaagaacctacgggtatcgaaaaactcagaaagctggcaagtt

SEQ ID NO: 566480 - DNA, 75 bp, synthetic construct
  source 1..75: mol_type = other DNA
tggtgtaggaaaaacttctatttcctgcgcgacggctatccgccttgctgaacagggtaagcgggttttgctggt

SEQ ID NO: 566481 - DNA, 75 bp, synthetic construct
  source 1..75: mol_type = other DNA
gggattaaaagcccgatcggtatcaaggtttccggaaccgttctgtccgatatcgatgcgacagcacagagtatt

SEQ ID NO: 566482 - DNA, 75 bp, synthetic construct
  source 1..75: mol_type = other DNA
atcagtggcgaccgggcatgacgattgacaagattgttgacgaactggataagacggtccgtttaccggggctgg

SEQ ID NO: 566483 - DNA, 75 bp, synthetic construct
  source 1..75: mol_type = other DNA
gattatcacgttgtcgtttatcccgatcttcaccctggaagggcaggaagggcgtctgtttggcccgctggcgtt

SEQ ID NO: 566484 - DNA, 75 bp, synthetic construct
  source 1..75: mol_type = other DNA
tccggtaaaactgtcccagtacggtatcagcctgcccgaagtgaaacaggcacttgaatcgtctaaccaggaggc

SEQ ID NO: 566485 - DNA, 75 bp, synthetic construct
  source 1..75: mol_type = other DNA
ggggcggtcgccaatgggaaaacactaaacataagcacggggatgatagtcgctatcaggctggtgggcaatgca

SEQ ID NO: 566486 - DNA, 75 bp, synthetic construct
  source 1..75: mol_type = other DNA
agatgggcaccatgctgatttctatctctggcccatcaaaatcaggaaaaactgtctttgttaagaaagtacttg

SEQ ID NO: 566487 - DNA, 75 bp, synthetic construct
  source 1..75: mol_type = other DNA
tgttgaattacaaaattatggcgtggtcagtcgctataatttgatgaaaaaatacaacatcactgagcgaacagc

SEQ ID NO: 566488 - DNA, 75 bp, synthetic construct
  source 1..75: mol_type = other DNA
atgaaaacatatgcatttaccacactcattgcgtccatttttttgctgaccggctgcaccagtgaaccgtctgag

SEQ ID NO: 566489 - DNA, 75 bp, synthetic construct
  source 1..75: mol_type = other DNA
cggctgtaccggtgaaccgtctgagcaggatatttacactgcgatgaataaggtcgtggagcagacgaatgccat

SEQ ID NO: 566490 - DNA, 75 bp, synthetic construct
  source 1..75: mol_type = other DNA
catagcaatgcgccgtaatacctcacaccacggcgctgatagtttttatcctttgggttctataccgcgccgctt

SEQ ID NO: 566491 - DNA, 75 bp, synthetic construct
  source 1..75: mol_type = other DNA
cctggcgaggagatagataacgccacccgctggaaggtcatcaccgatgcttccgtggaagtagggccggcgctg

SEQ ID NO: 566492 - DNA, 75 bp, synthetic construct
  source 1..75: mol_type = other DNA
ggaagggcaggaagggcgtctgtttggtccgctggcctttacaaaaacgtattccatggcgggggcagccatact

SEQ ID NO: 566493 - DNA, 75 bp, synthetic construct
  source 1..75: mol_type = other DNA
gaagtggcgtcggtgggcggcgtggtgaagcagtatcagctccaggtgaatccggaaaaactggcgcagtacggc

SEQ ID NO: 566494 - DNA, 75 bp, synthetic construct
  source 1..75: mol_type = other DNA
cagcggagcgtttgattgatatccttgttgaattacagaattatggcgtggtcagtcgccataatttgatgaaaa

SEQ ID NO: 566495 - DNA, 75 bp, synthetic construct
  source 1..75: mol_type = other DNA
ggtgtgcagtcaatacagccaatcattgatgtacaacagtcacaaattgagcaacagcaagttcaaatagcaatg

SEQ ID NO: 566496 - DNA, 75 bp, synthetic construct
  source 1..75: mol_type = other DNA
agggaaaaaaccgattaccgatctcggcgtgaaagctattgatgatcacacattagaagtcaccttaagtgaacc

SEQ ID NO: 566497 - DNA, 75 bp, synthetic construct
  source 1..75: mol_type = other DNA
actttctctggcgaatcatccgcaaatcactgttgttgatggtggtgaagagcgtgccgattctgtgctggcagg

SEQ ID NO: 566498 - DNA, 75 bp, synthetic construct
  source 1..75: mol_type = other DNA
gtcctggcgatagccgttttgcacaacttcctctggcgaatcatccgcaaatcaccgttgtagatggcggtgatg

SEQ ID NO: 566499 - DNA, 75 bp, synthetic construct
  source 1..75: mol_type = other DNA
tgggtattggtgcatgacgccgctcgtccttgtctgcatcaggatgacctcgcgcgcctgttggcgttgagcgaa

SEQ ID NO: 566500 - DNA, 75 bp, synthetic construct
  source 1..75: mol_type = other DNA
tgaactggcctgagtctgtaaaagaactgtcagtaaaggttgcagcgtttgttggctcaggtatttctgttcagc

SEQ ID NO: 566501 - DNA, 75 bp, synthetic construct
  source 1..75: mol_type = other DNA
attgctcataccgttgatcgcaacggcttatggcacgcgctgacgccgcaatttttccctcgtgagctgttacat

SEQ ID NO: 566502 - DNA, 75 bp, synthetic construct
  source 1..75: mol_type = other DNA
gtccttgcctgcatcaggatgatcttgcacggctgttaactctgagcgaaaccagccgcacgggggggattcttg

SEQ ID NO: 566503 - DNA, 75 bp, synthetic construct
  source 1..75: mol_type = other DNA
ctgatacagcggacacgttcgagaaaaaagtgtcggcttttgttggttccggtatttccgtgcagcctttagggc

SEQ ID NO: 566504 - DNA, 75 bp, synthetic construct
  source 1..75: mol_type = other DNA
accgcaatggcgatggggcagatgccgtacgccagaaagttccggcaatgctgaacagcgatgtgctgcccgcct

SEQ ID NO: 566505 - DNA, 75 bp, synthetic construct
  source 1..75: mol_type = other DNA
cagaaaacattgccggtcgcatcaatacccgcctggaggatgagggctttaccgtaaaaatcagttttccggcag

SEQ ID NO: 566506 - DNA, 75 bp, synthetic construct
  source 1..75: mol_type = other DNA
agcgcaggcaaagcggtttatgtttccgctgtacaaatcgacactgaaccgccccgggaatcctggagactaaac

SEQ ID NO: 566507 - DNA, 75 bp, synthetic construct
  source 1..75: mol_type = other DNA
tgcactggtggtatgggatggaacgagcgcaggcaaagctgtttatgtttccgctgtacaaatcgatacagcgac

SEQ ID NO: 566508 - DNA, 75 bp, synthetic construct
  source 1..75: mol_type = other DNA
ttgcagacgccacacatgaaagcgtacagcgaagccgtaaaaggcgatgtgctggaaatgaatattcgtattctg

SEQ ID NO: 566509 - DNA, 75 bp, synthetic construct
  source 1..75: mol_type = other DNA
agcgcaggcaaagcggtttatgtttccgctgtacaaatcgacacagcgaaaaaaacacaggcacaggtttataag

SEQ ID NO: 566510 - DNA, 75 bp, synthetic construct
  source 1..75: mol_type = other DNA
tcacactatcaccatgggttgagtatttctggaaagggatggcttttttgttaattttcttcatgttgatgcaac

SEQ ID NO: 566511 - DNA, 75 bp, synthetic construct
  source 1..75: mol_type = other DNA
atgacctgggaatatacgctaattgggttagtcgtcggcatcattattggtgctgtggccatgcgttttggtaat

SEQ ID NO: 566512 - DNA, 75 bp, synthetic construct
  source 1..75: mol_type = other DNA
gagtctgaagccagcaacgatcaggcaccggtgcaaatgccacgcgactattctgaaggcgcgtcaggcctgctg

SEQ ID NO: 566513 - DNA, 75 bp, synthetic construct
  source 1..75: mol_type = other DNA
ttttcgatgactactgtctggcagccgtcgccggattttcgacaacgggcagtagtgtggggtatggctctgcct

SEQ ID NO: 566514 - DNA, 75 bp, synthetic construct
  source 1..75: mol_type = other DNA
ctgtatacgtttttagtgctttttcagtatttgtttttctgggaggtgtttttattatattagagttggaattta

SEQ ID NO: 566515 - DNA, 75 bp, synthetic construct
  source 1..75: mol_type = other DNA
aaaaacagtttgaatagttgtgctgcctggtgttcgcttattgcatggtttatatttttgttttttgtgctttca

SEQ ID NO: 566516 - DNA, 75 bp, synthetic construct
  source 1..75: mol_type = other DNA
gcggtaatcaattatctcgaccgcagttcgctgtcggtagcaaatttaggtaatgactccaacttactgatagtg

SEQ ID NO: 566517 - DNA, 75 bp, synthetic construct
  source 1..75: mol_type = other DNA
aactccggctggcgcgtcagcaaaccacgcttgagcgtctgcaaaagcggatgagctttgcgttggagaatcagc

SEQ ID NO: 566518 - DNA, 75 bp, synthetic construct
  source 1..75: mol_type = other DNA
acactggcgcgtggttatagcgtgaccacggtcacagacggtaaggtactgaaaaaagtgaaacaggtgaaaaca

SEQ ID NO: 566519 - DNA, 75 bp, synthetic construct
  source 1..75: mol_type = other DNA
tctggaagtgctggatgccgagcgttctttatttgcaacccgacaaactttacttgacctgaattatgcccgtca

SEQ ID NO: 566520 - DNA, 75 bp, synthetic construct
  source 1..75: mol_type = other DNA
gcaaccgcatcggtgatgctggtaatcatggccagcgccgcattgggatggattttctcaatggaacatgctggt

SEQ ID NO: 566521 - DNA, 75 bp, synthetic construct
  source 1..75: mol_type = other DNA
aggcctgagcgaacccatcgggaaatttccgatgaccgatggctggcatccgtcgccggattttcgacgacgggc

SEQ ID NO: 566522 - DNA, 75 bp, synthetic construct
  source 1..75: mol_type = other DNA
ccagaacccgggaattactgacgggggtctgcacctcactggaagaggagctgaatgactatttcagaagcggta

SEQ ID NO: 566523 - DNA, 75 bp, synthetic construct
  source 1..75: mol_type = other DNA
gtgatcaatatcaacaaggtcagagaggaagttatgtcactgacccgggcatatttcggggagctgcaggcatcc

SEQ ID NO: 566524 - DNA, 75 bp, synthetic construct
  source 1..75: mol_type = other DNA
aggctgaggcacagttccggcccgaactggaaaaaatcgtcaggggtatcgaaacaggttttcgtggtacggccc

SEQ ID NO: 566525 - DNA, 75 bp, synthetic construct
  source 1..75: mol_type = other DNA
agaagatggcgcagaacaacgcatatcgcagcaggggattattggaaaaattcgtgagcagtttagtgtcagtgc

SEQ ID NO: 566526 - DNA, 75 bp, synthetic construct
  source 1..75: mol_type = other DNA
tttgccccggacagccccgaaataaaattcagtgatcgcagggaagcccttgaactgatgacgcaaatcgaatcg

SEQ ID NO: 566527 - DNA, 75 bp, synthetic construct
  source 1..75: mol_type = other DNA
ccgtcgccgtcggcagagtggcgtatggggaaccgtttgtcgatggtttggcaccagtgacctgggctgggaaaa

SEQ ID NO: 566528 - DNA, 75 bp, synthetic construct
  source 1..75: mol_type = other DNA
tggcaactgaaggggcgacagacctgtgggaaggctcacttatcgatcaactgataacggaagtcatacagagtg

SEQ ID NO: 566529 - DNA, 75 bp, synthetic construct
  source 1..75: mol_type = other DNA
aaaaacagaacccttcctgttgatgaagcctgggtcgatgattttgtcagggaagccttcggtcgcatgaaaaaa

SEQ ID NO: 566530 - DNA, 75 bp, synthetic construct
  source 1..75: mol_type = other DNA
attcagccatctggtggggatggatgcatgccagggaacactcacactgctggatacccccggcctaatgaggcc

SEQ ID NO: 566531 - DNA, 75 bp, synthetic construct
  source 1..75: mol_type = other DNA
tttgtgatgaagctgaccgacttttgcaactgaacattaatctgctccggcaaatggttgaggagccagatgtgt

SEQ ID NO: 566532 - DNA, 75 bp, synthetic construct
  source 1..75: mol_type = other DNA
ggaagccttcggtcgcatgaaaaaagattacgtctgtaaagacagcgaactggcaactgaaggggcgacagacct

SEQ ID NO: 566533 - DNA, 75 bp, synthetic construct
  source 1..75: mol_type = other DNA
ctgcggtgctggcggtgatggactacacccagttgaactcgaaagccgatgaggaggttcgtaaagagcttaatg

SEQ ID NO: 566534 - DNA, 75 bp, synthetic construct
  source 1..75: mol_type = other DNA
atgcagaatgcggaaaatgtcagcgaatatctgtcattacgccatcaggggctacagcaaagcattcagtcactg

SEQ ID NO: 566535 - DNA, 75 bp, synthetic construct
  source 1..75: mol_type = other DNA
gcgccttcaggcattaaatgaaagggttcccgagttgattactgacagtaaggcgttaagggaagaactggagac

SEQ ID NO: 566536 - DNA, 75 bp, synthetic construct
  source 1..75: mol_type = other DNA
atctggacgcagatggccctgatatttcagcatgggaacctgagcgaccagaaggtgagggatggtttatcggtt

SEQ ID NO: 566537 - DNA, 75 bp, synthetic construct
  source 1..75: mol_type = other DNA
gagggtgatgggtggtttattggctccattcatgacacggaagacggcccggtttgtgtatggatgagaaataag

SEQ ID NO: 566538 - DNA, 75 bp, synthetic construct
  source 1..75: mol_type = other DNA
tagaacgtgatgcatatggctgctggacacatcctgaatatgaaaaattttgtgatggccgggagtatatttcga

SEQ ID NO: 566539 - DNA, 75 bp, synthetic construct
  source 1..75: mol_type = other DNA
ttgattctgctgccgcaaaactgatgcagaatgcagaaaatgtcagcgaatatctgtcattacgccatcaggggc

SEQ ID NO: 566540 - DNA, 75 bp, synthetic construct
  source 1..75: mol_type = other DNA
acgctgattcagagctctgaagatcataaacgcgatcagcaggcacaggaacggcttaccgggcgacttcaggca

SEQ ID NO: 566541 - DNA, 75 bp, synthetic construct
  source 1..75: mol_type = other DNA
gaaggtgaaggctggttcattggttccattcatgacactgaagatggtccggtttgtgtatggctgagaaataag

SEQ ID NO: 566542 - DNA, 75 bp, synthetic construct
  source 1..75: mol_type = other DNA
cagcagcagcgcggagatgattacgtaaacacctatcaggaacgccagaacgcgcgtcttgcccgatatattgct

SEQ ID NO: 566543 - DNA, 75 bp, synthetic construct
  source 1..75: mol_type = other DNA
gacagccccgaaataaaattcagtgatcgcagggcagcccttgaactgatgacgcaaatcgaatcgaccgtgacc

SEQ ID NO: 566544 - DNA, 75 bp, synthetic construct
  source 1..75: mol_type = other DNA
tatgaacaaggtcaggaaggaagtgatgtcactgacccgggcatatttcggggagttgcaggcatccattgagca

SEQ ID NO: 566545 - DNA, 75 bp, synthetic construct
  source 1..75: mol_type = other DNA
ttccgcctgggaaccggaacgaccagagggagaaggctggtttattggctccattcatgatactgaagatggccc

SEQ ID NO: 566546 - DNA, 75 bp, synthetic construct
  source 1..75: mol_type = other DNA
aacgactacagagccgtattaaggagcttgaatcggtcaagtctgtaacaggagcacagcgcgaagaatacgacg

SEQ ID NO: 566547 - DNA, 75 bp, synthetic construct
  source 1..75: mol_type = other DNA
tatttaagttgcttcgtaagctgcaaggctgcatgaagtcacacgtcaaaatgaaggccgcaaataaggccattc

SEQ ID NO: 566548 - DNA, 75 bp, synthetic construct
  source 1..75: mol_type = other DNA
caaatagtaaagccgccactagtcatattcatgcctggaatcagattaccggtatccctgatggtacgctgacgc

SEQ ID NO: 566549 - DNA, 75 bp, synthetic construct
  source 1..75: mol_type = other DNA
ggaagacattcgtgttatgaaacagaatggcattatctggccaatagctttagtgtataaaaatatatcgaaact

SEQ ID NO: 566550 - DNA, 75 bp, synthetic construct
  source 1..75: mol_type = other DNA
aattgtacaaaagtttcaaaaatcatttgcgaacccgataagggcatttatgatgctctgaataaaggtattcaa

SEQ ID NO: 566551 - DNA, 75 bp, synthetic construct
  source 1..75: mol_type = other DNA
gattactggtatccctgacggtacactgacgcagaaaggagtcgttaaacttaacaacacaacaaatagcaccag

SEQ ID NO: 566552 - DNA, 75 bp, synthetic construct
  source 1..75: mol_type = other DNA
tggaacatttatagttcctgagggcgtaacaatattatttgtggaaattatgggcggcggaggtgggggggccgg

SEQ ID NO: 566553 - DNA, 75 bp, synthetic construct
  source 1..75: mol_type = other DNA
cctggcgaatagtaaggctgcgggtagtcatacgcacccctgggggcagattacgagtattcctgacggtaccct

SEQ ID NO: 566554 - DNA, 75 bp, synthetic construct
  source 1..75: mol_type = other DNA
ttaggcactttaggtaacgcttatttgaatcaattgagccagcgatgcgatgcctggcaatgccaaatatgggga

SEQ ID NO: 566555 - DNA, 75 bp, synthetic construct
  source 1..75: mol_type = other DNA
ccgtgaaagaaagcaatcagcgatggtgctctgacgggttcgagttctgctgtgataacggagagagactgcgtg

SEQ ID NO: 566556 - DNA, 75 bp, synthetic construct
  source 1..75: mol_type = other DNA
ccggcggcttcaacagtgaaacagtacaggacgtcatgctgggagcggtggaacgccgcttcggcaacgagcttc

SEQ ID NO: 566557 - DNA, 75 bp, synthetic construct
  source 1..75: mol_type = other DNA
cttataatagtgaaaaaactctccttgatacattactttctctagaaaaacaaacgcatccagatatcgaatata

SEQ ID NO: 566558 - DNA, 75 bp, synthetic construct
  source 1..75: mol_type = other DNA
aattacaaccaccggttcagcaggagatttcccattgtcgggttaattatcgccaactcgttgctgttgataaac

SEQ ID NO: 566559 - DNA, 75 bp, synthetic construct
  source 1..75: mol_type = other DNA
gttattacgcgcattgtttaacggattattacaggaacagcttgcacaccaaaatcaacggttgccagagttggg

SEQ ID NO: 566560 - DNA, 75 bp, synthetic construct
  source 1..75: mol_type = other DNA
taccttcaggctacgctctgatgacaggtcagacatttaataaaacctcctatcccaaactggcaattgcatatc

SEQ ID NO: 566561 - DNA, 75 bp, synthetic construct
  source 1..75: mol_type = other DNA
aaattcgcggcgaaatcctcacgcagccgtaccctacagcatttcgggtacgcagcgtgctggatatggaacaga

SEQ ID NO: 566562 - DNA, 75 bp, synthetic construct
  source 1..75: mol_type = other DNA
gaaccttgcagaggcgttcgagcattataacgaatggcatccgcatagtgcgctgggttatcgctcgccacggga

SEQ ID NO: 566563 - DNA, 75 bp, synthetic construct
  source 1..75: mol_type = other DNA
gacgatcgccgctacctgcgctgcctggacaccgctctccgtctggtataacgacgccggacaggcgctacatta

SEQ ID NO: 566564 - DNA, 75 bp, synthetic construct
  source 1..75: mol_type = other DNA
ggttggtggtctgggcgatcgttttacgcgtgtggcggcagctcatgccgtgcataacggtctgaccgtgctgcc

SEQ ID NO: 566565 - DNA, 75 bp, synthetic construct
  source 1..75: mol_type = other DNA
gatcatccgccgggatttgtcatttctgctcaacaccgtcagccatgaagatgatattgatgctgcacgttatcc

SEQ ID NO: 566566 - DNA, 75 bp, synthetic construct
  source 1..75: mol_type = other DNA
tgccagtgctcttgcggataaaaaacaactgcatctgcaaaagatggccgttggagacggcggtgggcaatatta

SEQ ID NO: 566567 - DNA, 75 bp, synthetic construct
  source 1..75: mol_type = other DNA
tacagcgcaaaaaggggttgtgaagcttaatagcgcgacgaacagtaccagtacgactgaagccgcaacgccgag

SEQ ID NO: 566568 - DNA, 75 bp, synthetic construct
  source 1..75: mol_type = other DNA
gtggtgcgtgaagtctggcgcgggtcactgaatacgctgaaaatcgccccggaaaacccggcgtgggtgattgcc

SEQ ID NO: 566569 - DNA, 75 bp, synthetic construct
  source 1..75: mol_type = other DNA
ttactgcaattcatgatgcgaatataagccgctacggcggcctgccaggcatgtcagattcgggaagagctgagg

SEQ ID NO: 566570 - DNA, 75 bp, synthetic construct
  source 1..75: mol_type = other DNA
aacatactccagcaacggtgaaactgcagtaaatactccttatggaaaagggggcttgggaggagcgaatagtga

SEQ ID NO: 566571 - DNA, 75 bp, synthetic construct
  source 1..75: mol_type = other DNA
gattcccgaagatgcaatggggcaagcaggtattccaggaggagcatcacatttttcttcacagagtgcttccgg

SEQ ID NO: 566572 - DNA, 75 bp, synthetic construct
  source 1..75: mol_type = other DNA
gtgcttctccgtatacaccatgttatcggagagctgccaacgtatggttatcgtcgggtatgggcgctgcttcgc

SEQ ID NO: 566573 - DNA, 75 bp, synthetic construct
  source 1..75: mol_type = other DNA
gcacgtcattctcagacgaaccgatgactggatggatggccgccgcagtcgtcacactgatgatacggatgtgct

SEQ ID NO: 566574 - DNA, 75 bp, synthetic construct
  source 1..75: mol_type = other DNA
ggcatccgcatagtgcgctgggttatcgctcgccacgggaatatctgcggcagcgggcttgtaatgggttaagtg

SEQ ID NO: 566575 - DNA, 75 bp, synthetic construct
  source 1..75: mol_type = other DNA
tcaggttaaaaaagcgtttgccgattcgcaaaaaggccatatgaaggccagcgaactggaacgcatgttccagaa

SEQ ID NO: 566576 - DNA, 75 bp, synthetic construct
  source 1..75: mol_type = other DNA
aaccatcgagctggtggcgcgtcacctgcgcgaacacaaagtacagaagatgattatcgccaaccgtactcgcga

SEQ ID NO: 566577 - DNA, 75 bp, synthetic construct
  source 1..75: mol_type = other DNA
tgttgggacttgaaccgaagaacacggcggtgcggagtccggagagtaacggcatagcagagagcttcgtgaaaa

SEQ ID NO: 566578 - DNA, 75 bp, synthetic construct
  source 1..75: mol_type = other DNA
tgcatagcgtgcaggatggcgcggcgagcaaaagctacggcctggcggttgcagctctggcgggcgtgccaaaag

SEQ ID NO: 566579 - DNA, 75 bp, synthetic construct
  source 1..75: mol_type = other DNA
cttgaaccgaagaacacggcggtgcggagtccggagagtaacggcatagcagagagcttcgtgaaaacgataaag

SEQ ID NO: 566580 - DNA, 75 bp, synthetic construct
  source 1..75: mol_type = other DNA
gtgaaaacgataaagcgtgactacatcagtatcatgcccaaaccagacgggttaacggcagcaaagaaccttgca

SEQ ID NO: 566581 - DNA, 75 bp, synthetic construct
  source 1..75: mol_type = other DNA
ggcttttttgcctttgcaactccctgcaggaatcgttatctcactgattggtggaccattctttctgctacttct

SEQ ID NO: 566582 - DNA, 75 bp, synthetic construct
  source 1..75: mol_type = other DNA
gatgatctgcaaagcatcatttcgcacaatctggcacagcgtaaagctgccgccgtggaggcggaaaccatcgtc

SEQ ID NO: 566583 - DNA, 75 bp, synthetic construct
  source 1..75: mol_type = other DNA
ccgcagccgtcacacggatgatacggatgtgcttcgccgtatacaccatgttatcggagagctgcccacgtatgg

SEQ ID NO: 566584 - DNA, 75 bp, synthetic construct
  source 1..75: mol_type = other DNA
atggcgaattaccgtcttatatcactggcgctgacacttgagcgaaaacctgctgtaccgccatcgaaacgggca

SEQ ID NO: 566585 - DNA, 75 bp, synthetic construct
  source 1..75: mol_type = other DNA
acggcggtgcggagtccggagagtaacggaatcgcagagagcttcgtgaaaacgataaagcgtgactacatcagt

SEQ ID NO: 566586 - DNA, 75 bp, synthetic construct
  source 1..75: mol_type = other DNA
gtcagttcgccaggatgttgggacttgaaccgaagaacacggcagtgcggagtccggagagtaacggaatagcag

SEQ ID NO: 566587 - DNA, 75 bp, synthetic construct
  source 1..75: mol_type = other DNA
gatgtgcttcgccgtatacaccatgttatcggagagctgcccacatatggttatcgtcgggtatgggcgctgctt

SEQ ID NO: 566588 - DNA, 75 bp, synthetic construct
  source 1..75: mol_type = other DNA
tcgagttccgctgtgataacggagagagactgcgtgtcacgttcgcgctggactgctgtgatcgtgaggcactgc

SEQ ID NO: 566589 - DNA, 75 bp, synthetic construct
  source 1..75: mol_type = other DNA
ccgtttccgttctctgttacgtcagggcgatattgatggcgcgcaaaaacagctcgatcggctgtcgcagttagc

SEQ ID NO: 566590 - DNA, 75 bp, synthetic construct
  source 1..75: mol_type = other DNA
acagaaactgcgtgagctggaaagcatttcgccgaatgctgccgctacacaggtagatggtacgcaaatgtcgct

SEQ ID NO: 566591 - DNA, 75 bp, synthetic construct
  source 1..75: mol_type = other DNA
accgcctgatccatgcaccaacaaaatcacttcaacaggccgcccgtgacggggataacgaacgcctgaatattc

SEQ ID NO: 566592 - DNA, 75 bp, synthetic construct
  source 1..75: mol_type = other DNA
tgcactgggttatcgctcgccacgggaatatctacggcagcaagccagtaatgggttaagtgataacaggtgtct

SEQ ID NO: 566593 - DNA, 75 bp, synthetic construct
  source 1..75: mol_type = other DNA
gatgatacggatgtgcttctccgtatacaccatgttatcggagagctgcccacgtatggttatcgtcgggtatgg

SEQ ID NO: 566594 - DNA, 75 bp, synthetic construct
  source 1..75: mol_type = other DNA
ttacgataaagcgacagtgcaggatgtgatgttaggagcgatagaaaacgctttggcgataaagcaccggaacag

SEQ ID NO: 566595 - DNA, 75 bp, synthetic construct
  source 1..75: mol_type = other DNA
ggttctgggactgcttctcggtgcctggaacggatggtgggtcgcgtaccgcaaagtcccttcatttattgtcac

SEQ ID NO: 566596 - DNA, 75 bp, synthetic construct
  source 1..75: mol_type = other DNA
tgcagtctccggcctctaccgcagtagtcggtcgccaggctttaaccgctatcatcgtattggtgatgctgccaa

SEQ ID NO: 566597 - DNA, 75 bp, synthetic construct
  source 1..75: mol_type = other DNA
atcatcgtattaggcgcaatctggctgttgaatgattaccgtggtgttcccactcctgttctgctgctgacgttg

SEQ ID NO: 566598 - DNA, 75 bp, synthetic construct
  source 1..75: mol_type = other DNA
cccttcatttattgtcaccctcgcgggcatgttggcatttcgcggcatactcattggcatcaccaacggcacgac

SEQ ID NO: 566599 - DNA, 75 bp, synthetic construct
  source 1..75: mol_type = other DNA
ggcatccttattggtatcaccaacggcacgaccgtttcccccaccagcgccgcgatgtcacaaattgggcaaagc

SEQ ID NO: 566600 - DNA, 75 bp, synthetic construct
  source 1..75: mol_type = other DNA
gccatcgccggattaatccttagttctcgacttggcgctggttcaccttctgcggggaatatcgccgagctggac

SEQ ID NO: 566601 - DNA, 75 bp, synthetic construct
  source 1..75: mol_type = other DNA
atggcaattaagcattttcctgtcgttcgtttcacttccagaggacgtgaatacgaagtcgacgaacgcctgatt

SEQ ID NO: 566602 - DNA, 75 bp, synthetic construct
  source 1..75: mol_type = other DNA
cactgacggcacttacttctgcgccaccaacgtggtgcgggtgaaccttatccgacaggtacaggagtcacgcag

SEQ ID NO: 566603 - DNA, 75 bp, synthetic construct
  source 1..75: mol_type = other DNA
agtcaggtcagttactccagcgcacgcgctagcgcgaacgtgagctggcgattttttatggggcgtcgacgtttt

SEQ ID NO: 566604 - DNA, 75 bp, synthetic construct
  source 1..75: mol_type = other DNA
cctggcgggcatgttggcatttcgcggcatccttattggcatcaccaatggtacgaccgtttcacccaccagcgc

SEQ ID NO: 566605 - DNA, 75 bp, synthetic construct
  source 1..75: mol_type = other DNA
atggcaattaagcattttcctgtcgttcgtttcacctccagaggacgtgaatacgaagttgacgaacgcctgatt

SEQ ID NO: 566606 - DNA, 75 bp, synthetic construct
  source 1..75: mol_type = other DNA
cactgacggcacttacttttgcgccaccaacgtggtgcaggtaaatcttatcagacaggtacaggagtcacgcag

SEQ ID NO: 566607 - DNA, 75 bp, synthetic construct
  source 1..75: mol_type = other DNA
ctcgacttggcgctggttcaccttctgcggggaatatcgccgagctggacgcaattgcagcatgcgtgattggcg

SEQ ID NO: 566608 - DNA, 75 bp, synthetic construct
  source 1..75: mol_type = other DNA
aacagatgccgatcctgaccccgatgaagcagcagatcacgctgggcgatgttgcggatattaaggtcgtttccg

SEQ ID NO: 566609 - DNA, 75 bp, synthetic construct
  source 1..75: mol_type = other DNA
tattaacattcgctacccgcaggattaccggaacagtccgcaggcgctgaaacagatgccgatcctgaccccgat

SEQ ID NO: 566610 - DNA, 75 bp, synthetic construct
  source 1..75: mol_type = other DNA
atccgggggaaaattcctgccgagacaagtaaccccctgaaccgggtgctgatcaaagcgtatcatcctttgctg

SEQ ID NO: 566611 - DNA, 75 bp, synthetic construct
  source 1..75: mol_type = other DNA
gttcaaatggaaattcttctgatggggaaagtaacttttctcctgaacagtgggatatgcttgccaaattgctgg

SEQ ID NO: 566612 - DNA, 75 bp, synthetic construct
  source 1..75: mol_type = other DNA
cctaacggtgattatagcgatgagagatttgtcaagctaattgaaggattcatatgtcatgaagcaggacacggt

SEQ ID NO: 566613 - DNA, 75 bp, synthetic construct
  source 1..75: mol_type = other DNA
gcagggcttccatatgtctgtcgcaaccggaacggggtttatcgctctggccggggtggcagcagagtttggcgt

SEQ ID NO: 566614 - DNA, 75 bp, synthetic construct
  source 1..75: mol_type = other DNA
atctggccgctgagccaggtgggcggtgagtttctgccgaagattaacgagggcgacctgttgtatatgccgtcg

SEQ ID NO: 566615 - DNA, 75 bp, synthetic construct
  source 1..75: mol_type = other DNA
atggcggaaattggtatttttgtgggtaccatgtacggaaactcgctgttagtggcggaagaggcggaagcaatt

SEQ ID NO: 566616 - DNA, 75 bp, synthetic construct
  source 1..75: mol_type = other DNA
gcactatgtacgggaattcactgttagtggccgaagaagcggaagcgattctgaccgcgcagggccacaaagcaa

SEQ ID NO: 566617 - DNA, 75 bp, synthetic construct
  source 1..75: mol_type = other DNA
cgtgaccacctacgatcgcagccagttaatcgaccgggcgattgataacctcagttacaagcttcttgaagagtt

SEQ ID NO: 566618 - DNA, 75 bp, synthetic construct
  source 1..75: mol_type = other DNA
gaggtcgcttcggttggcggcgtggtgaaacagtaccagattcaggtcaatccggtaaaattgtctcagtatggt

SEQ ID NO: 566619 - DNA, 75 bp, synthetic construct
  source 1..75: mol_type = other DNA
actggaaggcgggcgctacattgatgtggatatcaaccgggaaaaagcctcccgctacggaatgacggtgggcga

SEQ ID NO: 566620 - DNA, 75 bp, synthetic construct
  source 1..75: mol_type = other DNA
gctggcacgcggaattatcaccctgccacgctcagctgtccggtcgttttatgaggcgcggaactcctggacgaa

SEQ ID NO: 566621 - DNA, 75 bp, synthetic construct
  source 1..75: mol_type = other DNA
gtcagccgaagacaggtggcacttatttttgatatcggcctttcaaccctttatcgttattatcctgcgagcgtt

SEQ ID NO: 566622 - DNA, 75 bp, synthetic construct
  source 1..75: mol_type = other DNA
catgctgaacgtcttccgttcgcggtaccgctggacgatgtggctgggtgcgctgattacgtcgttgttgtttgc

SEQ ID NO: 566623 - DNA, 75 bp, synthetic construct
  source 1..75: mol_type = other DNA
gccgtttttatccttgccccgctgaatgaggaaatcctgttccgggggatcatgctgaacgtcttccgttcgcgg

SEQ ID NO: 566624 - DNA, 75 bp, synthetic construct
  source 1..75: mol_type = other DNA
tctgctcggtaaggcgctggctctgcctgctgagccatttatgacgaaactttttgccgataagtccatacctga

SEQ ID NO: 566625 - DNA, 75 bp, synthetic construct
  source 1..75: mol_type = other DNA
ctggtgtacctgctgtgtgtgttcctggtttaccgtcgctgggtcgcaccgctaccggttgttggccagctgcgt

SEQ ID NO: 566626 - DNA, 75 bp, synthetic construct
  source 1..75: mol_type = other DNA
atgaatgaagacattgacaaggacttctccagccacacgccgatgatgcagcagtatctcaagctgaaagcccag

SEQ ID NO: 566627 - DNA, 75 bp, synthetic construct
  source 1..75: mol_type = other DNA
gcgaaatggtatgaagcggtggtgctggccccgcaaccagataacttgccgctaaccgtgcggctggggatcaat

SEQ ID NO: 566628 - DNA, 75 bp, synthetic construct
  source 1..75: mol_type = other DNA
tttctcgcgcggtgtggatctacggcgaacgcgccattgctgcggcgcaaaccaaacttccgccagcgtttggac

SEQ ID NO: 566629 - DNA, 75 bp, synthetic construct
  source 1..75: mol_type = other DNA
gctggcggggatcggcgacacgctggcgaaatggtatgaagcggtggtactggctccgcagccagaaaccttgcc

SEQ ID NO: 566630 - DNA, 75 bp, synthetic construct
  source 1..75: mol_type = other DNA
ggcgcccgttacgatctgaaggggctgccgtgcggggaagtgacactacaggaacagaaagaggcagaggcccgg

SEQ ID NO: 566631 - DNA, 75 bp, synthetic construct
  source 1..75: mol_type = other DNA
acgccgtcgtgtagaaattgcccgcgcgctggctgcaaatccgaaatttatcctgctcgatgaaccgtttgccgg

SEQ ID NO: 566632 - DNA, 75 bp, synthetic construct
  source 1..75: mol_type = other DNA
tgtgccgcgcgatgcgggcaacatcattattgatgatgacgatatcagtctgctgcctctgcatgcacgcgcgcg

SEQ ID NO: 566633 - DNA, 75 bp, synthetic construct
  source 1..75: mol_type = other DNA
tacattcaaatcagccgtgggcaaagccatctggcaccaatcaactacatgcgccgccagacgctgaaaaacgcc

SEQ ID NO: 566634 - DNA, 75 bp, synthetic construct
  source 1..75: mol_type = other DNA
cagcggcgcaggccttcgccaatggtgaaagcaccacagtggtcgaggacggcagcatcaccagcgcagtgacgg

SEQ ID NO: 566635 - DNA, 75 bp, synthetic construct
  source 1..75: mol_type = other DNA
atgatgccgcgccagagcctgctgctgaaaatcctgctgccgctcatcgtactggtaacggtatggctgctgctg

SEQ ID NO: 566636 - DNA, 75 bp, synthetic construct
  source 1..75: mol_type = other DNA
acacgtaccctaccctaccatcttggacaggatccggaactccgttacttccccaatggcggcggagctgtggtg

SEQ ID NO: 566637 - DNA, 75 bp, synthetic construct
  source 1..75: mol_type = other DNA
caccgcgcttacgggcgacagcgggcagtacgtactcggccaggcactgggcggcggtctgaaggagagcgccga

SEQ ID NO: 566638 - DNA, 75 bp, synthetic construct
  source 1..75: mol_type = other DNA
ccattaaccgccagcaaaccaacgcatcagagcagcaaaacgaattgctcagctcgttacagacgcagatccagc

SEQ ID NO: 566639 - DNA, 75 bp, synthetic construct
  source 1..75: mol_type = other DNA
ccgccgacaccgtcgccacgctggtcggccagatgaaacagtaccgccgggaactccagggaatccagagcgata

SEQ ID NO: 566640 - DNA, 75 bp, synthetic construct
  source 1..75: mol_type = other DNA
ccggttcgtgaagccttcattaaactggcagaaaacggtctgattcaaattcgtccgcagcgtggcagctacgtc

SEQ ID NO: 566641 - DNA, 75 bp, synthetic construct
  source 1..75: mol_type = other DNA
ttaacagaagaactccggcaacgcggcgttaacttccgcagcattacggacaatattgatacatccactcccatg

SEQ ID NO: 566642 - DNA, 75 bp, synthetic construct
  source 1..75: mol_type = other DNA
cttgcctgctaattctggcagggtgttcaactacttctcagccggatgcgccaaaaccgccgcaggttggcatgg

SEQ ID NO: 566643 - DNA, 75 bp, synthetic construct
  source 1..75: mol_type = other DNA
gaatgccgccgatggactttgacgatgatatcccctttatggggcgtgggtatggcgttgaacgacggattatcc

SEQ ID NO: 566644 - DNA, 75 bp, synthetic construct
  source 1..75: mol_type = other DNA
tgagcagggcggcgacgcgcaagccattatgcaggatctggcatggaaactgactaaccgcctgatccatgcgcc

SEQ ID NO: 566645 - DNA, 75 bp, synthetic construct
  source 1..75: mol_type = other DNA
atgacccttttagcactcggtatcaaccataaaacggcacctatatcgctgcgagaacgtgtatcgttttcgccg

SEQ ID NO: 566646 - DNA, 75 bp, synthetic construct
  source 1..75: mol_type = other DNA
ggtggaacaactaacgcccagtttacctatattaatcacggaacagattattcacctggctggcgaagggactat

SEQ ID NO: 566647 - DNA, 75 bp, synthetic construct
  source 1..75: mol_type = other DNA
gcggctgcgtcgtctgccagtgcagcgtcaacaagtgccgggcaggcctcagccagtgctagcgccgccggaaaa

SEQ ID NO: 566648 - DNA, 75 bp, synthetic construct
  source 1..75: mol_type = other DNA
gattaccaaacggtaatggcatacaaagtttctgaggtcatcgctgcaatccgcgctactggcattcgcatcaaa

SEQ ID NO: 566649 - DNA, 75 bp, synthetic construct
  source 1..75: mol_type = other DNA
cagcaatagacagttgcttattccttgcggcctgggctgaaggaaaagagatccgcacgctggaaggtgaagcga

SEQ ID NO: 566650 - DNA, 75 bp, synthetic construct
  source 1..75: mol_type = other DNA
gcctggcagggaatctgtgccgttgcacaggatatcaaatgattgtaaatacggttctggattgcgaggaaacaa

SEQ ID NO: 566651 - DNA, 75 bp, synthetic construct
  source 1..75: mol_type = other DNA
ggtgtacaaggctcagtaggtatgtctacggggtggttagcgaataccagtacagatggtaatcatagccactca

SEQ ID NO: 566652 - DNA, 75 bp, synthetic construct
  source 1..75: mol_type = other DNA
taaggcgctttcagcggatataacactgacgccgaaagatattggtacgcttaactcaacaacaatgtcattcag

SEQ ID NO: 566653 - DNA, 75 bp, synthetic construct
  source 1..75: mol_type = other DNA
gatagtacagctcagcagtgcgaccaacagcacttccgagtcactggcggcaacgccaaaggcagtaaaatcagc

SEQ ID NO: 566654 - DNA, 75 bp, synthetic construct
  source 1..75: mol_type = other DNA
ccagtagtgccgcttcctcggcaacggcggcaggaaattccgcgaaggcggcaaagacgtctgagacaaacgcta

SEQ ID NO: 566655 - DNA, 75 bp, synthetic construct
  source 1..75: mol_type = other DNA
agacgaatgccaggtcttctgaaacggcagcggaacagagcgcctcagctgcggcagactctgagacagcagctg

SEQ ID NO: 566656 - DNA, 75 bp, synthetic construct
  source 1..75: mol_type = other DNA
gcttcgcgttgagctggaaggcaaagacagcaaaatagccaatcttaccgccgaacgcgatgctcttcgtgaagg

SEQ ID NO: 566657 - DNA, 75 bp, synthetic construct
  source 1..75: mol_type = other DNA
gctttactactactggaataacgaagaagaaaaggcactggcaacgcattatggttttgcctgtggtgttcaaca

SEQ ID NO: 566658 - DNA, 75 bp, synthetic construct
  source 1..75: mol_type = other DNA
tttaccggcacaatatcgctttactactactggaataacgaagaagaaaaggcactggcaacgcattatggtttt

SEQ ID NO: 566659 - DNA, 75 bp, synthetic construct
  source 1..75: mol_type = other DNA
atcgttttgcttgtggtgttcagcactgtacccggacagtagaaaacctggaaggtactatccatgagaaaaata

SEQ ID NO: 566660 - DNA, 75 bp, synthetic construct
  source 1..75: mol_type = other DNA
gtgagcaagattgactatcaggcactgcgtgaaaaggcagaaaaagcaacgtgtggtgtgtggtcactcgaatat

SEQ ID NO: 566661 - DNA, 75 bp, synthetic construct
  source 1..75: mol_type = other DNA
agcagcatgcttcatcgaacagcttttcacgatgattaccaaacggtaatggcatacaaagtttctgaagtcatc

SEQ ID NO: 566662 - DNA, 75 bp, synthetic construct
  source 1..75: mol_type = other DNA
aataccatggcttcatcctttaccgaaggggcgcgaatgatgatcgcccctgccctgctggtgggtttcgccaaa

SEQ ID NO: 566663 - DNA, 75 bp, synthetic construct
  source 1..75: mol_type = other DNA
gttgaacaacgtccgtttacctttggtgactggctggtattgattgtcctgaccgccgtaatggtctgggtgatt

SEQ ID NO: 566664 - DNA, 75 bp, synthetic construct
  source 1..75: mol_type = other DNA
gcctcgcgggtgaaaaagaatccgctgttgtcacgcgttcatgagtctgatcgtttcttccgcgaaaaacaggcg

SEQ ID NO: 566665 - DNA, 75 bp, synthetic construct
  source 1..75: mol_type = other DNA
gtgatgcgtacaggaaccattgataacggcatcctggcacttattcggcatacacgcgggaatgaaattctcttt

SEQ ID NO: 566666 - DNA, 75 bp, synthetic construct
  source 1..75: mol_type = other DNA
accaggttgatggtcagacgaaaacacgcaaagtcgtagaccctcactcatttcgcattctgaccaacgaggccg

SEQ ID NO: 566667 - DNA, 75 bp, synthetic construct
  source 1..75: mol_type = other DNA
agcagccacttctgcatccaccgcgacgacgaaagcgtcagaagctgccacctcagcccgggatgcggcggcttc

SEQ ID NO: 566668 - DNA, 75 bp, synthetic construct
  source 1..75: mol_type = other DNA
agcaaattccgcgaaggcggcaaaaacgtccgagacgaacgccaggtcttctgaaacggcagcgggacagagtgc

SEQ ID NO: 566669 - DNA, 75 bp, synthetic construct
  source 1..75: mol_type = other DNA
gcacacgcgcatactgtcggtattggtgctcatacgcactccgttgcgattggttcacatggacacaccatcacc

SEQ ID NO: 566670 - DNA, 75 bp, synthetic construct
  source 1..75: mol_type = other DNA
atgaagttgaattttaagggattttttaaggctgccggtatgtgttctttggcagtttcgttgaccggatgtatc

SEQ ID NO: 566671 - DNA, 75 bp, synthetic construct
  source 1..75: mol_type = other DNA
atgaagttgaattttaagggattttttaaggctaccggtttgtgttctttggcatttgcgttgaccggttgtcta

SEQ ID NO: 566672 - DNA, 75 bp, synthetic construct
  source 1..75: mol_type = other DNA
atgcataaaaaaatgacatgcgtcgggcagaaatctgaaaagggagaacaggcgctaaacaggagggaaagaaga

SEQ ID NO: 566673 - DNA, 75 bp, synthetic construct
  source 1..75: mol_type = other DNA
ctcatgaactttatccggttggcgcaccgatcccttggccatcagataccgttccgtctggttatgccctgatgc

SEQ ID NO: 566674 - DNA, 75 bp, synthetic construct
  source 1..75: mol_type = other DNA
tagcaacggtaaccatgccgcaggcgagttctgttgtttcaattacgttgattggtggggctggatataacgtcg

SEQ ID NO: 566675 - DNA, 75 bp, synthetic construct
  source 1..75: mol_type = other DNA
gtatgacctggctaacgggaaatacaccgcacaggatgcaacgacagcacagaaagggatagttcagctcagcag

SEQ ID NO: 566676 - DNA, 75 bp, synthetic construct
  source 1..75: mol_type = other DNA
agtttaagtggcagcacgaatgcagctggtaatcacagccatagagatggccgtcgatttaaccccagtgttttt

SEQ ID NO: 566677 - DNA, 75 bp, synthetic construct
  source 1..75: mol_type = other DNA
tggttttatttcccgcattgaacgtcatatcgatatgttatttgttgaccctgaatacacccgccgcggggttgc

SEQ ID NO: 566678 - DNA, 75 bp, synthetic construct
  source 1..75: mol_type = other DNA
atgaataacatacaaataagagactatcagcctggcgattttcagcaactatgcgctattttcattagagcggtt

SEQ ID NO: 566679 - DNA, 75 bp, synthetic construct
  source 1..75: mol_type = other DNA
ggttggttttatttcccgcattgaacattatatcgatatgttatttgttgaccctgaatacacccgccgtggggt

SEQ ID NO: 566680 - DNA, 75 bp, synthetic construct
  source 1..75: mol_type = other DNA
acgtcacccggacgcctcactgaccgcaagaggctttgttcaactcagtagcgacactaacagcgtgtctgaaac

SEQ ID NO: 566681 - DNA, 75 bp, synthetic construct
  source 1..75: mol_type = other DNA
gatatgcgtggctggacaatcaagggcaaacccgccagtggtcgggacgtattgtctctggaacaggatggcatt

SEQ ID NO: 566682 - DNA, 75 bp, synthetic construct
  source 1..75: mol_type = other DNA
cttgccgcgacaccgaaagcagtgaaagcagctaatgacaatgcgaatggtcgggtaccttctgcccgtaaggtg

SEQ ID NO: 566683 - DNA, 75 bp, synthetic construct
  source 1..75: mol_type = other DNA
gccagccctcaacggggggctggacaccatggacgccgcaggattcatttcctgtaggtgcggcgattccgtggc

SEQ ID NO: 566684 - DNA, 75 bp, synthetic construct
  source 1..75: mol_type = other DNA
gtctgagtggctctagcctggtatgcttcgatacagcaggagccgaatggctggaagaccgtcaccacacagttc

SEQ ID NO: 566685 - DNA, 75 bp, synthetic construct
  source 1..75: mol_type = other DNA
gagaaactcgcgaaatcacaagtgcgggttgcggttattaatacacaactggtcggctttattacctgcattgag

SEQ ID NO: 566686 - DNA, 75 bp, synthetic construct
  source 1..75: mol_type = other DNA
cggaatacacccgctgtggtgtcgctagtgccttgttaaaaccttttattaagtctgaatccgaacttacggttg

SEQ ID NO: 566687 - DNA, 75 bp, synthetic construct
  source 1..75: mol_type = other DNA
tctcaggaacaggacggcattaaatcgcacacccacagcgccagcgcatccagtacggatttggggacgaaaaac

SEQ ID NO: 566688 - DNA, 75 bp, synthetic construct
  source 1..75: mol_type = other DNA
tggtacgcttaactcaacaacaatgtcattcagcggtggtgctggttggttcaaattagcaacggtaaccatgcc

SEQ ID NO: 566689 - DNA, 75 bp, synthetic construct
  source 1..75: mol_type = other DNA
gcatcatcggcgtctgcttcaaaagatgaggcgaccagacaggcgtcagcagcgaagggcagcgccacgacggca

SEQ ID NO: 566690 - DNA, 75 bp, synthetic construct
  source 1..75: mol_type = other DNA
tttcatcctattgtcgatcctttatcgcggcggataatcgcttttgaagcaattgttaaagatagggaagacagc

SEQ ID NO: 566691 - DNA, 75 bp, synthetic construct
  source 1..75: mol_type = other DNA
taaatcgctaaaggctgctggtatcagtgtagcaattgatcattttggcgcaggttttgctggtttgttactcct

SEQ ID NO: 566692 - DNA, 75 bp, synthetic construct
  source 1..75: mol_type = other DNA
aaaaccgcgcgccggtggcgctgaaaggggccgcgctcacgcgccgcccctttcattacgcggacgttctgatgg

SEQ ID NO: 566693 - DNA, 75 bp, synthetic construct
  source 1..75: mol_type = other DNA
atgtctgacaacaccatccctgaatatctgcaacccgcgctggcacaactggaaaaggccagagccgctcatctt

SEQ ID NO: 566694 - DNA, 75 bp, synthetic construct
  source 1..75: mol_type = other DNA
gcaggaattgagatgtttcagggagatctgtttgccaaagctaaattgaatggtatcccttcagttgcgtggccg

SEQ ID NO: 566695 - DNA, 75 bp, synthetic construct
  source 1..75: mol_type = other DNA
caaaatttcagctaacttatgatgacagagcgctacaattttttcgtacttttgtccttgcaaccgaacaatcaa

SEQ ID NO: 566696 - DNA, 75 bp, synthetic construct
  source 1..75: mol_type = other DNA
atgcgtctggggaacggtatggaaattgaaccctggctgaaggcggctgtgcgcaaagaatttgttgatgataac

SEQ ID NO: 566697 - DNA, 75 bp, synthetic construct
  source 1..75: mol_type = other DNA
ggggtggggtatagccatggtgccagtgtggaatccccgtggaacgcggtggctggtgtgaactggtcgttctga

SEQ ID NO: 566698 - DNA, 75 bp, synthetic construct
  source 1..75: mol_type = other DNA
ggaccacgcttgaactggtgatcggctgccttgaggaactggcgtttagccgccaaccttgcgcgctttctggtt

SEQ ID NO: 566699 - DNA, 75 bp, synthetic construct
  source 1..75: mol_type = other DNA
cgggcatctcggggtagggtatagccatggtgccggtgtggaatccccgtggaacgcggtagctggtgtgaactg

SEQ ID NO: 566700 - DNA, 75 bp, synthetic construct
  source 1..75: mol_type = other DNA
ggctgaaggcggctgtgcgcaaagaatttgtcgatgataaccgggtgaaggtgaataatgacggtaatttcgtca

SEQ ID NO: 566701 - DNA, 75 bp, synthetic construct
  source 1..75: mol_type = other DNA
cgggtgaaagtgaatagtgacggtaattttgtcaatgatttgtcgggcagacgtggaatatatcaggcaggtatt

SEQ ID NO: 566702 - DNA, 75 bp, synthetic construct
  source 1..75: mol_type = other DNA
gaacccgtaccggcgcacctacaccatcctcattcgtattattgccggtggcagcatggcagaaattccgctcgg

SEQ ID NO: 566703 - DNA, 75 bp, synthetic construct
  source 1..75: mol_type = other DNA
catggtatgcgcggaatactgccggcagtacgaacgcctataactatttcgcgctgtcgagtgatcccgacgttc

SEQ ID NO: 566704 - DNA, 75 bp, synthetic construct
  source 1..75: mol_type = other DNA
tgtgactcagccagggtacgtcgatatgtacgttttgtcccggacaggcgacggtgtacccccgcaatcactact

SEQ ID NO: 566705 - DNA, 75 bp, synthetic construct
  source 1..75: mol_type = other DNA
tattggaccgttgagttttgttggtttaatggcaccgcatattgcgcggatgatgggctttcgacggacgatgcc

SEQ ID NO: 566706 - DNA, 75 bp, synthetic construct
  source 1..75: mol_type = other DNA
gaccactacattcgtttgcgtcaggcaggcgttgaaaagccggagcgtgaaaccttcgaaggtgcgctgaaaacc

SEQ ID NO: 566707 - DNA, 75 bp, synthetic construct
  source 1..75: mol_type = other DNA
gtgatcctcaatcgccttgagcaatcttctactgaagaggcgcgtgaagccgatgagatcgacgaagaacagccg

SEQ ID NO: 566708 - DNA, 75 bp, synthetic construct
  source 1..75: mol_type = other DNA
atttcgtgactgtaaaacctgcgtcgaacctgaattaccgggttgaggccgttatcgtagccgggctcggacccg

SEQ ID NO: 566709 - DNA, 75 bp, synthetic construct
  source 1..75: mol_type = other DNA
gaccgtcctgacctgttcaaacgcagccccgtaaaccggcatgcggtactgaaagaaatggccggagacccggaa

SEQ ID NO: 566710 - DNA, 75 bp, synthetic construct
  source 1..75: mol_type = other DNA
atcctcattcgtattattgccggtggcagcatggcagaaattccgctcggtcgttttttgcgggactttacctgt

SEQ ID NO: 566711 - DNA, 75 bp, synthetic construct
  source 1..75: mol_type = other DNA
tccggtcagccgggcagcaccggtagcgcgggaatggcgggaaattcccataagcgctaacttaagggttgtggt

SEQ ID NO: 566712 - DNA, 75 bp, synthetic construct
  source 1..75: mol_type = other DNA
tgtgggggagtctgtacgtgtcgacaatatgtctttgtatggatatacacgctctacgacaccgcaagtcgaagc

SEQ ID NO: 566713 - DNA, 75 bp, synthetic construct
  source 1..75: mol_type = other DNA
aatgcacattgcctctggtattgcgcaatgtctcaccatcatcggtattcccgtcggcattgctaactttaaaat

SEQ ID NO: 566714 - DNA, 75 bp, synthetic construct
  source 1..75: mol_type = other DNA
caatgtatttcaatcattggcattcctgtcggcattgcgaactttaaaattgccgctattgcactatggccggtt

SEQ ID NO: 566715 - DNA, 75 bp, synthetic construct
  source 1..75: mol_type = other DNA
tagcctggaagaactggcattcagtcgccagccttgcgcgctttctggttacgacgagttgcatatttcccctgt

SEQ ID NO: 566716 - DNA, 75 bp, synthetic construct
  source 1..75: mol_type = other DNA
tcactggaaagtcactgcccgcgacggtatcggttatcagtttgacctgctggctaacggtgaaaccgtactgcg

SEQ ID NO: 566717 - DNA, 75 bp, synthetic construct
  source 1..75: mol_type = other DNA
tgtcgaaaaagtggttatcgacgaatcggtaattgatggccagagcaaaccgctgctgatttatggtaagccgga

SEQ ID NO: 566718 - DNA, 75 bp, synthetic construct
  source 1..75: mol_type = other DNA
tacgcctacgtaaacatttatcactggcggaagagtctctctggcaaaaatgtgcacaaaaacttattgccgcaa

SEQ ID NO: 566719 - DNA, 75 bp, synthetic construct
  source 1..75: mol_type = other DNA
ccagttgcagagcaagtttgccactggcgatatcgaccacaccctgctggaccggtgtcgactttatgcgtatgc

SEQ ID NO: 566720 - DNA, 75 bp, synthetic construct
  source 1..75: mol_type = other DNA
caagaaagcgcatgggggccggctgcaaccattgcggcgagacaatctgctaccggtactaaaacagatacgcca

SEQ ID NO: 566721 - DNA, 75 bp, synthetic construct
  source 1..75: mol_type = other DNA
taccggcaccaaaaccgatacaccgattcaaaaagtgccgcagtcaatttctgttgtgaccgccgaagaaatggc

SEQ ID NO: 566722 - DNA, 75 bp, synthetic construct
  source 1..75: mol_type = other DNA
gtgttggccggaaggttattataacaaggattatattcagatcgctgaagaacttggattccattatttatatac

SEQ ID NO: 566723 - DNA, 75 bp, synthetic construct
  source 1..75: mol_type = other DNA
tttttttatcggggtggaaaacttccccgtaaaagcgttatgttgacatttgatgatggataccttgacaactgg

SEQ ID NO: 566724 - DNA, 75 bp, synthetic construct
  source 1..75: mol_type = other DNA
ttgatgatatgcgcgagaagctggaagccgcagagaagcgcattgcagaactggaagcacgggaaatatcgctcc

SEQ ID NO: 566725 - DNA, 75 bp, synthetic construct
  source 1..75: mol_type = other DNA
tattaatgtatcatcatgtcagccattgcccaggactggttacactttctcccgagatattccggaaacaaatga

SEQ ID NO: 566726 - DNA, 75 bp, synthetic construct
  source 1..75: mol_type = other DNA
ggttcctgcagctctcatctgtgctggcctgaaggatattacaataatgattatattaatctcgccagagaactt

SEQ ID NO: 566727 - DNA, 75 bp, synthetic construct
  source 1..75: mol_type = other DNA
gggaagagcttgaaacactagattatagtgtttttatgcatataccagttacatttcatgcacataaaataaaaa

SEQ ID NO: 566728 - DNA, 75 bp, synthetic construct
  source 1..75: mol_type = other DNA
atggcgcgttacaaaactgctcagccaaaacactcgctgcgtaaaatcgcagtcgtagtagccacagcggttagc

SEQ ID NO: 566729 - DNA, 75 bp, synthetic construct
  source 1..75: mol_type = other DNA
gcccgccgctgcctgaaaatcaacggtgagctgtatatcgttgccaaccgccatctggattactttcacaaactg

SEQ ID NO: 566730 - DNA, 75 bp, synthetic construct
  source 1..75: mol_type = other DNA
agcgagctggcaacgcgcgagaatttgcgtctcaacgggattgatgagtcgagcgtgaagtttctcgacagcact

SEQ ID NO: 566731 - DNA, 75 bp, synthetic construct
  source 1..75: mol_type = other DNA
gctgactacccgcaacagccgggagtggtgctgatcaaagtaccgaaaacactggcattgctggaacagcaactg

SEQ ID NO: 566732 - DNA, 75 bp, synthetic construct
  source 1..75: mol_type = other DNA
ggggctacgcccattattattccatgttgatgccggctggaatacagatcaggctgttggtaatattgaaaaact

SEQ ID NO: 566733 - DNA, 75 bp, synthetic construct
  source 1..75: mol_type = other DNA
agttcccggttcaaatcaccagaccctttgccgggaagcggggattatcagacgggcggcttttcagggaaatgc

SEQ ID NO: 566734 - DNA, 75 bp, synthetic construct
  source 1..75: mol_type = other DNA
ccgcaggcgaaagtggtgtttgtcgatgaatcgccgatggcggttgcttccagccgtttgaacgttgaaaccaac

SEQ ID NO: 566735 - DNA, 75 bp, synthetic construct
  source 1..75: mol_type = other DNA
cgcattctgaataagcagaaacaaacgggcgtttatgttcaggatcaggcgcagtgggataaagtgctggtcacc

SEQ ID NO: 566736 - DNA, 75 bp, synthetic construct
  source 1..75: mol_type = other DNA
gccggtactgacagcctgttccagactggttttgacttcagtgatgcgctggatgatgacggcgtttactcttat

SEQ ID NO: 566737 - DNA, 75 bp, synthetic construct
  source 1..75: mol_type = other DNA
cagcttcgaccacgaatttaacgatacctttaccgtgcgtcagaacctgcgctttgcggaaaacaaaacctcgca

SEQ ID NO: 566738 - DNA, 75 bp, synthetic construct
  source 1..75: mol_type = other DNA
caggcgtgggaagcggcggatgaatatttgctgcaacagttggacgacacagaaatccgcggcccggtgttgatc

SEQ ID NO: 566739 - DNA, 75 bp, synthetic construct
  source 1..75: mol_type = other DNA
accgaaccgctgaaagaagttcagtttaaagccggtactgacagcctgttccagactggttttgactttagcgat

SEQ ID NO: 566740 - DNA, 75 bp, synthetic construct
  source 1..75: mol_type = other DNA
atggcgcgttccaaaactgctcagccaaaacactcactgcgtaaaattgcagttgtagtagccacagcggttagc

SEQ ID NO: 566741 - DNA, 75 bp, synthetic construct
  source 1..75: mol_type = other DNA
gcatcacgccgtggggtgcctgtcattaaagaacggcaaagccacaaaggaagagtcgctctgtattggatgcgg

SEQ ID NO: 566742 - DNA, 75 bp, synthetic construct
  source 1..75: mol_type = other DNA
gcggcattctgcccgctcacctgctgacggtggcacgcgagattgcggaaacatggggaaatggtcagatccatc

SEQ ID NO: 566743 - DNA, 75 bp, synthetic construct
  source 1..75: mol_type = other DNA
agcaacgcaaagaatacctctgccgccaccgctgacgaccggaatgtattagcacaagaacccaatgctgacgcc

SEQ ID NO: 566744 - DNA, 75 bp, synthetic construct
  source 1..75: mol_type = other DNA
tactgatggtctttctcgtcgatatcgtcgacagttctgcgctgccatggctgggcgagcagttctcactgtctg

SEQ ID NO: 566745 - DNA, 75 bp, synthetic construct
  source 1..75: mol_type = other DNA
atgcgttctggcctgcccgactctggcctggcaacgtaaaccagaaaaattctggcaggttcgtctgggcggaag

SEQ ID NO: 566746 - DNA, 75 bp, synthetic construct
  source 1..75: mol_type = other DNA
aaagaaatgctggatggtaaaccggtttacctccatatgggacatcttatcgataaaggcggttatctgcgtttc

SEQ ID NO: 566747 - DNA, 75 bp, synthetic construct
  source 1..75: mol_type = other DNA
cgccatacacagagtcgccacccgggatgacaaaaaaggggccaaaagtggcgcatacagggcctatcttgatgg

SEQ ID NO: 566748 - DNA, 75 bp, synthetic construct
  source 1..75: mol_type = other DNA
cggaagacacatcgtcagcagaaccggacacgattatctttgcgccccgccgtcccgacagtccgcagcggcaca

SEQ ID NO: 566749 - DNA, 75 bp, synthetic construct
  source 1..75: mol_type = other DNA
gaggctgaacaaacagcaggcagtacggctgaaacaccgcatccggaagcgccggtcacggcaaaagctgaagcc

SEQ ID NO: 566750 - DNA, 75 bp, synthetic construct
  source 1..75: mol_type = other DNA
acaaagagtttcccgacaggacagcgctctacagcgttgacggtgaaccggcattcctggacagactctactgcc

SEQ ID NO: 566751 - DNA, 75 bp, synthetic construct
  source 1..75: mol_type = other DNA
aacctgccgggactcagcctgttcagcaggcaacccctgaagcaacggcagaaaataaaccgcaggaagaggatg

SEQ ID NO: 566752 - DNA, 75 bp, synthetic construct
  source 1..75: mol_type = other DNA
taatgtggcaaaaaatgcccgcaaaatctggactgacagcccctttgtcttctgtgccgacaacgaccatcaacg

SEQ ID NO: 566753 - DNA, 75 bp, synthetic construct
  source 1..75: mol_type = other DNA
aaagtgtatgtaactttcctcaacgacaaagatgaagatgcggtaaaagcgggcatcaaagcgttgcaggaagcc

SEQ ID NO: 566754 - DNA, 75 bp, synthetic construct
  source 1..75: mol_type = other DNA
ggaaggatttatccactgttgtggagaatatggaaattggcaccgggcagcgtggtgacggacgtcacgcgtttg

SEQ ID NO: 566755 - DNA, 75 bp, synthetic construct
  source 1..75: mol_type = other DNA
gtaaaggccggggtaagtatcacctcgccggtgattcgcagtgctgttattcagaacgggaactttcaggttgat

SEQ ID NO: 566756 - DNA, 75 bp, synthetic construct
  source 1..75: mol_type = other DNA
ggatgaagtaaaggccggggtaagtatcacttcgccagttatccggagtgccgttattcagaacggaaactttca

SEQ ID NO: 566757 - DNA, 75 bp, synthetic construct
  source 1..75: mol_type = other DNA
ttcgtttgatcgcaagttgatactccttcccttcactttctattcaggaacactgacgatagagattaacggaag

SEQ ID NO: 566758 - DNA, 75 bp, synthetic construct
  source 1..75: mol_type = other DNA
acggcgatccggttgacccgggatggtcgggattttactggatcaggtttgtgaatgctgctggcgttaaaggac

SEQ ID NO: 566759 - DNA, 75 bp, synthetic construct
  source 1..75: mol_type = other DNA
ctgacggggatgtataccctgaatcccggtgttgatgctgtcagtagtgaacagaatgtcgtggaacaccctgca

SEQ ID NO: 566760 - DNA, 75 bp, synthetic construct
  source 1..75: mol_type = other DNA
ctgggcgagcagttctcgctgttcggtgacggctgggaactggcggagtcagacgatgtacgtcgcacgctcatc

SEQ ID NO: 566761 - DNA, 75 bp, synthetic construct
  source 1..75: mol_type = other DNA
catggcgatgcggaagcctgggcggtatatcgcgtcatccttcaacagcccatcactaacgatcaggcggcgctg

SEQ ID NO: 566762 - DNA, 75 bp, synthetic construct
  source 1..75: mol_type = other DNA
cagaacgctgggaagactggccggacggctggataacatcgacctgagcgtactgatggtctgtctcgtcgatat

SEQ ID NO: 566763 - DNA, 75 bp, synthetic construct
  source 1..75: mol_type = other DNA
cgtcgcagttgtttgtctttgacccgaacgatcctgataacacggcctatccgtttgcagtttctggcggaaaag

SEQ ID NO: 566764 - DNA, 75 bp, synthetic construct
  source 1..75: mol_type = other DNA
aggcagtaaagctttcctgtccatgtggtcaaagaaagccggagctgatggggtgacagccggaatcggcattgt

SEQ ID NO: 566765 - DNA, 75 bp, synthetic construct
  source 1..75: mol_type = other DNA
ctttgttaatgcagcgggagtgaaagggccatggaacgcggtaaaaggcactcccgcacaaacccagataagcgt

SEQ ID NO: 566766 - DNA, 75 bp, synthetic construct
  source 1..75: mol_type = other DNA
cggaagacacatcgtcagcggaaccggacacgattatctttgcaccccgccgtcccgacagtccgcagcggcaca

SEQ ID NO: 566767 - DNA, 75 bp, synthetic construct
  source 1..75: mol_type = other DNA
ctggacccgcaatcacgccgatatcccgctgcgtccacgctttgccgtgctcgccagcggcagtttctttagtgg

SEQ ID NO: 566768 - DNA, 75 bp, synthetic construct
  source 1..75: mol_type = other DNA
cattgctaacctgtgtactctggcggcatttaatatcaaactggcgattcaggtctattacacccagtatgtact

SEQ ID NO: 566769 - DNA, 75 bp, synthetic construct
  source 1..75: mol_type = other DNA
ggaaaaccggtattcgtgccgaaggttctgtttataccggttataccttctttcgtaaaatttctgccgcacttg

SEQ ID NO: 566770 - DNA, 75 bp, synthetic construct
  source 1..75: mol_type = other DNA
ggcattgattgctgaaagcggtgcgcaattgcagggcagcgtggaactggcccatcagcgcgttaccccgctcgg

SEQ ID NO: 566771 - DNA, 75 bp, synthetic construct
  source 1..75: mol_type = other DNA
tgctgggcggatttgatcccatcgcccagggatgcggcggcggtgtttgtgccgtcagtgctttacatgccgctc

SEQ ID NO: 566772 - DNA, 75 bp, synthetic construct
  source 1..75: mol_type = other DNA
aaccgcagaaatagagctgccggaactggatgtgctgcgcaacaacgccaccgagtttcgcgcggtgaatatcgc

SEQ ID NO: 566773 - DNA, 75 bp, synthetic construct
  source 1..75: mol_type = other DNA
agacaattagaactagccttaataatatcatgccaatacgtaaggcaatgaatattcaggcaggtaaagacctat

SEQ ID NO: 566774 - DNA, 75 bp, synthetic construct
  source 1..75: mol_type = other DNA
atgaaaaaatgggcagtattaatctctgcagtcggactggtatttgctgtttccggttgtagcagtgattatgtg

SEQ ID NO: 566775 - DNA, 75 bp, synthetic construct
  source 1..75: mol_type = other DNA
cagcacgacagcgacactgctgctgacggctcccgctgcggtgggcgttctgcggattcccgcccgggcggcggt

SEQ ID NO: 566776 - DNA, 75 bp, synthetic construct
  source 1..75: mol_type = other DNA
ttcactttcgtcatgttctcttgtgtcgccttttttggcacggcctttgtaaacagcctgaactgggcactggta

SEQ ID NO: 566777 - DNA, 75 bp, synthetic construct
  source 1..75: mol_type = other DNA
tttaatttctgtcatacatttttctatgatcgaaacattattgaatccattcgaaaattcacgtcgtcattagtt

SEQ ID NO: 566778 - DNA, 75 bp, synthetic construct
  source 1..75: mol_type = other DNA
cctgatgagcctgctgatattttgggcctgaagttgctgctgatcgagaaaatggcagacgataacaatttttcc

SEQ ID NO: 566779 - DNA, 75 bp, synthetic construct
  source 1..75: mol_type = other DNA
ttttaatattacctttaatcaattttttgcgaatgacaaagaaattgaaaaagctggcatggtacctgcaaaaga

SEQ ID NO: 566780 - DNA, 75 bp, synthetic construct
  source 1..75: mol_type = other DNA
tgatcgcaaggttatcagccttgatgcttccgtgctcttcgatatgccaagcccaactatgcgcatcctcaacga

SEQ ID NO: 566781 - DNA, 75 bp, synthetic construct
  source 1..75: mol_type = other DNA
gcgactataccggtcatgatggcacccacggcagttattacatgaaaggctggcagtcagttgatatgccggaaa

SEQ ID NO: 566782 - DNA, 75 bp, synthetic construct
  source 1..75: mol_type = other DNA
aaatgtcccctgaaaacagacagagcacagccccggaaacggagctggcgacacaggatacgccttatgacaccc

SEQ ID NO: 566783 - DNA, 75 bp, synthetic construct
  source 1..75: mol_type = other DNA
acaccggtaaaagatgagaagccacaaatgtcccctgaaaacagacagagcacagccccggaaacggagctggcg

SEQ ID NO: 566784 - DNA, 75 bp, synthetic construct
  source 1..75: mol_type = other DNA
gtccattattgcgtcaaccagagcgtttaattacgcagaatgagttgcaggcactgatccgaaaaataactaaca

SEQ ID NO: 566785 - DNA, 75 bp, synthetic construct
  source 1..75: mol_type = other DNA
tggcctgcaactgcaaaaacacggcctgcgctgtgccattgtcactcgtggtcaaagcgcgctgcatttctcatc

SEQ ID NO: 566786 - DNA, 75 bp, synthetic construct
  source 1..75: mol_type = other DNA
atcaggtgcttgttatttcgtctgcgtccctacaatcactgttaccagacaggctcattgcttcctccctgacac

SEQ ID NO: 566787 - DNA, 75 bp, synthetic construct
  source 1..75: mol_type = other DNA
ggggtaggtagcgtttctaaaattaaatataacgccatcaatgactttggatcatcttcggaaatgatgactaaa

SEQ ID NO: 566788 - DNA, 75 bp, synthetic construct
  source 1..75: mol_type = other DNA
ctgtttacctctttctcaggaagtttagtctccaggattcccggggcggttcaggcaataaaaaaacaccgttta

SEQ ID NO: 566789 - DNA, 75 bp, synthetic construct
  source 1..75: mol_type = other DNA
ccagggatgcggcggcggtgtttgtgccgtcagtgctttacatgtcgctcaacagattgcccaacgcgcaggagg

SEQ ID NO: 566790 - DNA, 75 bp, synthetic construct
  source 1..75: mol_type = other DNA
ccgtttccttgataacgaagaaaactggccgctgataattgatgcgctaatccctgtcgccaatacctgtgaaat

SEQ ID NO: 566791 - DNA, 75 bp, synthetic construct
  source 1..75: mol_type = other DNA
attatacatatctgtatgctataaaccgttcagtgctgaagataaagttacccacttcctttcacggaaaaaagg

SEQ ID NO: 566792 - DNA, 75 bp, synthetic construct
  source 1..75: mol_type = other DNA
atggccgataccgccctgaagtccgccaatgtggatgtcgtggcatacagctccccggctcatggcaccagcttt

SEQ ID NO: 566793 - DNA, 75 bp, synthetic construct
  source 1..75: mol_type = other DNA
atgagcagcaatgaactggtcgaacaaatcatggcacaggtcatcgcccgcgtagcgacgccagcgcatgaggtt

SEQ ID NO: 566794 - DNA, 75 bp, synthetic construct
  source 1..75: mol_type = other DNA
accgctggatcggctatccgcgcgcagtcgaggcgctgaaccggctggaagccctttatgcgtggccaaacaagc

SEQ ID NO: 566795 - DNA, 75 bp, synthetic construct
  source 1..75: mol_type = other DNA
agccctatcagcagtctgaactttgccgaaatggaaagcttccacaacttctttacgggcaaagagaaagggaat

SEQ ID NO: 566796 - DNA, 75 bp, synthetic construct
  source 1..75: mol_type = other DNA
ctactttcaggaaacggatgccggaatttttgacgccctgatgtatctccctgttgagtatgttcagacatcctc

SEQ ID NO: 566797 - DNA, 75 bp, synthetic construct
  source 1..75: mol_type = other DNA
ccgtgtcaccatgctggccgatggccgccgactccttatctacatggatgagttctggcaatggattaacaacga

SEQ ID NO: 566798 - DNA, 75 bp, synthetic construct
  source 1..75: mol_type = other DNA
aagaagtgcgacctgtatttgacagcaagatcccattcgtcaacagagtgatgaacgattattacgaatcgcttt

SEQ ID NO: 566799 - DNA, 75 bp, synthetic construct
  source 1..75: mol_type = other DNA
tagataagatgtttacccaggatttagaaggttgtaaacagtctcgttacattatagaagcaattcttgaattat

SEQ ID NO: 566800 - DNA, 75 bp, synthetic construct
  source 1..75: mol_type = other DNA
tcagggatgcgggggcggcgtttgtgctgtcagcgcattacatgctgctcaacagattgcccagcgtgcaggagg

SEQ ID NO: 566801 - DNA, 75 bp, synthetic construct
  source 1..75: mol_type = other DNA
accgttctcatgatgatcatgtcttatgcggcacagcaatttggtacgcctgaatcatttccggaaaaccgaaaa

SEQ ID NO: 566802 - DNA, 75 bp, synthetic construct
  source 1..75: mol_type = other DNA
gggttattgagggacgtcgcactttcgccaacatgctgaaatacatcaaaatgacggcgagctctaacttcggta

SEQ ID NO: 566803 - DNA, 75 bp, synthetic construct
  source 1..75: mol_type = other DNA
gttctgcacgatatatcaggccatccgatcaaagtttctgaagggctggaatttgtgcagtcaggtaccaacgtg

SEQ ID NO: 566804 - DNA, 75 bp, synthetic construct
  source 1..75: mol_type = other DNA
tacgcactccgttgcgattggttcacatggacacaccatcaccgttaacgctgctggtaacgcggaaaacaccgt

SEQ ID NO: 566805 - DNA, 75 bp, synthetic construct
  source 1..75: mol_type = other DNA
agcaacggtaaccatgccacaggcgagttctgttgtttcaattacgttgattggtggcgctggatttaacgtcgg

SEQ ID NO: 566806 - DNA, 75 bp, synthetic construct
  source 1..75: mol_type = other DNA
atgattttgaattttaagggattttttaaggctgccggtttgtgttttttggcatttgcgttgaccggatgtatc

SEQ ID NO: 566807 - DNA, 75 bp, synthetic construct
  source 1..75: mol_type = other DNA
ctggcggcaacgccaaagtcggtaaaggcagcctatgaccttgctaacgggaaatataccgctcaggacgctacg

SEQ ID NO: 566808 - DNA, 75 bp, synthetic construct
  source 1..75: mol_type = other DNA
caaatctgcatacccgaaacttgcagccgcttatccgtcaggcgtgatccctgatatgcgtggctggacgattaa

SEQ ID NO: 566809 - DNA, 75 bp, synthetic construct
  source 1..75: mol_type = other DNA
gaatggtcgggtaccttctgcccgtaaggtgaatggtaaggcgctttcagcggatataacactgacgccgaaaga

SEQ ID NO: 566810 - DNA, 75 bp, synthetic construct
  source 1..75: mol_type = other DNA
agactcatccgctcgtagggtgggacatcagcaccgttgatagctatgatgcgctgatgttgcgtttgcactacc

SEQ ID NO: 566811 - DNA, 75 bp, synthetic construct
  source 1..75: mol_type = other DNA
cgctggtggaatgcaaacagtagatataacgctggtggctggcccggcagacacctcgcagtccgtccttaagag

SEQ ID NO: 566812 - DNA, 75 bp, synthetic construct
  source 1..75: mol_type = other DNA
cgatcaaagtttctgaagggatggaatttgtgcaatcaggtacaaacgtgccctatatgaaaattagcgcaattg

SEQ ID NO: 566813 - DNA, 75 bp, synthetic construct
  source 1..75: mol_type = other DNA
agggtgctgcgtaggcgaatgcggtgcctgtacggtgctggtcgacggcacagcaatagacagttgcttattcct

SEQ ID NO: 566814 - DNA, 75 bp, synthetic construct
  source 1..75: mol_type = other DNA
gtctatgcaggatattcaacgaattatcagtagtacgctaccacaacaggaaaatggtgaagttgttagtttgct

SEQ ID NO: 566815 - DNA, 75 bp, synthetic construct
  source 1..75: mol_type = other DNA
tgaggcgtttctgcaggccaccggcggtggcagcaatacggtgtcgccggcaggcggcgctgcgccggaaaacag

SEQ ID NO: 566816 - DNA, 75 bp, synthetic construct
  source 1..75: mol_type = other DNA
aagcgtaagcaccgtcagtgttgaaccaactacgaaagaagttaccgtaggcgataacttcacggtaagccaatc

SEQ ID NO: 566817 - DNA, 75 bp, synthetic construct
  source 1..75: mol_type = other DNA
tttttctatttagtatttatttttataaaagattaaaaaacataacaaaatacaatggacaagatagtgttaaaa

SEQ ID NO: 566818 - DNA, 75 bp, synthetic construct
  source 1..75: mol_type = other DNA
gatgagtggatttgcgatcgcagcggcgaaaccttctgggatttattggaacaggccgcgacgcagcaggcggga

SEQ ID NO: 566819 - DNA, 75 bp, synthetic construct
  source 1..75: mol_type = other DNA
tggctgatcaactgtggctgaccattgaagaacatctggacgactgggatggcgacagcgatatcgactgtgaaa

SEQ ID NO: 566820 - DNA, 75 bp, synthetic construct
  source 1..75: mol_type = other DNA
cgaagcattaatcggtattgccattggtatttatggtctgactcaggccgtttttcagattccgtttggcctgct

SEQ ID NO: 566821 - DNA, 75 bp, synthetic construct
  source 1..75: mol_type = other DNA
aattgtgttgtggaacgcgcaaacgcagttctggcaactggtggtcggcgtgcagcttttctttgtggcgtttaa

SEQ ID NO: 566822 - DNA, 75 bp, synthetic construct
  source 1..75: mol_type = other DNA
atgatcgatgagaatggcgttccctttagcatcgacattcccgtatttcgactcgccgttccaatactcattcat

SEQ ID NO: 566823 - DNA, 75 bp, synthetic construct
  source 1..75: mol_type = other DNA
aaaaaattctcaaaagaaaatattataaacaaatggttatcattgtttaataccttagaagataaaggtgctaaa

SEQ ID NO: 566824 - DNA, 75 bp, synthetic construct
  source 1..75: mol_type = other DNA
atactataacagtaaagtctggtgggcttacaagggtttcattaagcaggtgtgaggcctttgttaataaaggga

SEQ ID NO: 566825 - DNA, 75 bp, synthetic construct
  source 1..75: mol_type = other DNA
tctgttgcttctgtatccggtgtgttatattattacaataatatgcaggggaacagaaagtttgaagagggttaa

SEQ ID NO: 566826 - DNA, 75 bp, synthetic construct
  source 1..75: mol_type = other DNA
tggctgatcaactctggctgaccattgaagaacgcctggacgactgggatggcgacagcgatatcgactgcgaaa

SEQ ID NO: 566827 - DNA, 75 bp, synthetic construct
  source 1..75: mol_type = other DNA
gtcacgcttccagcctgacagaattaaaatcagtcaggaattgattaccaatgttcataaaagcggaccacggca

SEQ ID NO: 566828 - DNA, 75 bp, synthetic construct
  source 1..75: mol_type = other DNA
tttactgaaagtgaagtcatatctcggtttgatgagtttgccgaagcggttaaatcgctaaaggcggccggtatc

SEQ ID NO: 566829 - DNA, 75 bp, synthetic construct
  source 1..75: mol_type = other DNA
atgctactgatgtcgacgtttgtcgctcttcctgggcaacttgctggcgcgggttttccggcagcggaacattgg

SEQ ID NO: 566830 - DNA, 75 bp, synthetic construct
  source 1..75: mol_type = other DNA
tatatatctcttatttcagtggtctttcccgcatttgcattcggacggaatgacagtcgtcattcgtcctctcca

SEQ ID NO: 566831 - DNA, 75 bp, synthetic construct
  source 1..75: mol_type = other DNA
aggaaacactgggatgtgttactttctctgatatcaaaagcaattaataatgatgaaaccattgttatgcattca

SEQ ID NO: 566832 - DNA, 75 bp, synthetic construct
  source 1..75: mol_type = other DNA
atcttatgatttgagtttttcagttattacatacccacggaaaacaagtctgtacgaaaaattatcaattccttt

SEQ ID NO: 566833 - DNA, 75 bp, synthetic construct
  source 1..75: mol_type = other DNA
tactggataacgccattgccagcttactgagggcaaaaatacagaacccggtgtcaatcagttttccttttgaca

SEQ ID NO: 566834 - DNA, 75 bp, synthetic construct
  source 1..75: mol_type = other DNA
caatcacatgtatctggtgtgataaatcgcgttacatgacctctcatgttgtactggtggttatcacgacgttct

SEQ ID NO: 566835 - DNA, 75 bp, synthetic construct
  source 1..75: mol_type = other DNA
aacgcctggtgtcaaagatgtactgctggcgaagttagagcatagcgtctatgtgaaaatagacagcaaaatcac

SEQ ID NO: 566836 - DNA, 75 bp, synthetic construct
  source 1..75: mol_type = other DNA
atctgggggatcattctgggtcgtgcgttacaaggttctggcgccatagccgcagccgttatggcgctactttct

SEQ ID NO: 566837 - DNA, 75 bp, synthetic construct
  source 1..75: mol_type = other DNA
ccaaagcgatggcgtttatcggcgtgagttttggtattaccttcgccattgcgatggtacttggccctatcatca

SEQ ID NO: 566838 - DNA, 75 bp, synthetic construct
  source 1..75: mol_type = other DNA
tgactcaggccgtttttcagattccgtttggcctgctttccgaccgcattggtcgcaaaccattaattgtcggcg

SEQ ID NO: 566839 - DNA, 75 bp, synthetic construct
  source 1..75: mol_type = other DNA
gatctcacgcgcgaacaaaaccgcaccaaagcaatggcgtttatcggcgtgagctttggcattacctttgccatt

SEQ ID NO: 566840 - DNA, 75 bp, synthetic construct
  source 1..75: mol_type = other DNA
gcgtcgggctgatcgtcattgcggaaatcgtgttgtggaacgcacaaacgcagttctggcagttagtggtcggcg

SEQ ID NO: 566841 - DNA, 75 bp, synthetic construct
  source 1..75: mol_type = other DNA
tttcagcaattgttggctttggttttactgccggagtgcagatttatattgcgtgggaaaaaatcatcaactacg

SEQ ID NO: 566842 - DNA, 75 bp, synthetic construct
  source 1..75: mol_type = other DNA
ggcagcagcggctcaaccggttttgtgggatgggcatcaggcagtgcaagcggaaccgccagtgatgcaacatca

SEQ ID NO: 566843 - DNA, 75 bp, synthetic construct
  source 1..75: mol_type = other DNA
tgctgcctgtggctggacgctggatctgtccggcttcgggatcagcacaaccagtggtcatcttgccgtcaatct

SEQ ID NO: 566844 - DNA, 75 bp, synthetic construct
  source 1..75: mol_type = other DNA
tggtgaataacaaattacgcagccttgaaaaacgcttctctacgcggctgaaaattgatgacgatgccctcgctc

SEQ ID NO: 566845 - DNA, 75 bp, synthetic construct
  source 1..75: mol_type = other DNA
ttagataagctaagacaaacaacagacagcattgagttattaactctggaattagagaaaaatgaagagcgtcaa

SEQ ID NO: 566846 - DNA, 75 bp, synthetic construct
  source 1..75: mol_type = other DNA
cctcaaaactcggtatatggggacactcactaggtgctatttttgttcttgattgtttaaaaaacaattcatgtt

SEQ ID NO: 566847 - DNA, 75 bp, synthetic construct
  source 1..75: mol_type = other DNA
agggttgaaaaaagccgtctggatgatttcagtagtttattgcataaacaggcaattgcaaaacatgctgtactt

SEQ ID NO: 566848 - DNA, 75 bp, synthetic construct
  source 1..75: mol_type = other DNA
gttggcggtgccagtggtcctctttacggcacattatttattcgcgcttctgcggcagtgggagccagaacagaa

SEQ ID NO: 566849 - DNA, 75 bp, synthetic construct
  source 1..75: mol_type = other DNA
cggaaacctaccgctttattgatgagttaacggacaaactcaaactgaacctgaaggtctacagggcaaaagaaa

SEQ ID NO: 566850 - DNA, 75 bp, synthetic construct
  source 1..75: mol_type = other DNA
ggcgatgaaattggtgagcatcaggggctgatgtatcacaccctcggtcagcgcaaaggtctgggtatcggtggc

SEQ ID NO: 566851 - DNA, 75 bp, synthetic construct
  source 1..75: mol_type = other DNA
ttggcggatccgtcatgctggcggttccccccgcagtgctgaaaacgctagggctgtcgacggacagcgaagtgg

SEQ ID NO: 566852 - DNA, 75 bp, synthetic construct
  source 1..75: mol_type = other DNA
gcatggtcattgataatggccggctgattgttgagccgcacagacgcccgcaatattcactggctgagctactgg

SEQ ID NO: 566853 - DNA, 75 bp, synthetic construct
  source 1..75: mol_type = other DNA
cacagtgcgatccgaatgctgatatctcggcagaagaacgagagtggctggatgcgccggcagtcggtcaggagg

SEQ ID NO: 566854 - DNA, 75 bp, synthetic construct
  source 1..75: mol_type = other DNA
ttagtcgcttcacccgctatagcggtgagcaaacgcaaaaagccgtcgcggcgtatgttgatatcgccagacgtc

SEQ ID NO: 566855 - DNA, 75 bp, synthetic construct
  source 1..75: mol_type = other DNA
gccatctatctgtcagcagtacacgacacccggccaccaaagccggtggtgtacatatgttgtcttctggccata

SEQ ID NO: 566856 - DNA, 75 bp, synthetic construct
  source 1..75: mol_type = other DNA
cagaaaactttcagctcttcctggttgaacatccactggtacgccacttaacccgccgtctgatttggggcgttt

SEQ ID NO: 566857 - DNA, 75 bp, synthetic construct
  source 1..75: mol_type = other DNA
gaagccttgcccatcacgaattacttcgcagcgagtgagctggctcctgccgtcgcccgtgccttcaacaaactg

SEQ ID NO: 566858 - DNA, 75 bp, synthetic construct
  source 1..75: mol_type = other DNA
atcctcctcttctgccgtcacagacatcagcaggcactgccgttcgccccgtttctctgcgcatcactgtatgca

SEQ ID NO: 566859 - DNA, 75 bp, synthetic construct
  source 1..75: mol_type = other DNA
gtcagcaggcactgccgttcgccccgtttctctgcgcatcactgtatgcactaaccctcctccctgattccgttt

SEQ ID NO: 566860 - DNA, 75 bp, synthetic construct
  source 1..75: mol_type = other DNA
atggtgttgaggccacggggctgttattcctttccattctgacgggattattaactgtaatgacgctgacggata

SEQ ID NO: 566861 - DNA, 75 bp, synthetic construct
  source 1..75: mol_type = other DNA
tattataatggtgctgtcgaaatatggttaaaatccctgtccctacaaaaagacaaaagcattgatgttatagcg

SEQ ID NO: 566862 - DNA, 75 bp, synthetic construct
  source 1..75: mol_type = other DNA
ttatgtgtgggaaattaaaaatgttagaactttaaaaaaatctattccttgtgtggcgaggaaaggtatttatac

SEQ ID NO: 566863 - DNA, 75 bp, synthetic construct
  source 1..75: mol_type = other DNA
gtggttgcaaaccttttgtgagttcgatcctgaagatcgttttgccagcgctgctatagctaaaaagcaatttga

SEQ ID NO: 566864 - DNA, 75 bp, synthetic construct
  source 1..75: mol_type = other DNA
acaaattgctgaaaaaagatgcgcgtaccgtcgccgcccagcaggtagcaaggctggaatccgccatgtgcctgc

SEQ ID NO: 566865 - DNA, 75 bp, synthetic construct
  source 1..75: mol_type = other DNA
tcttaagcaagctgtggttatgggaaggcaaagcggaaagctatggctgggggagtaattcaacacaggaagcgc

SEQ ID NO: 566866 - DNA, 75 bp, synthetic construct
  source 1..75: mol_type = other DNA
tggcgaataaaggctggataaagggcgaaccacaggatggaggctggatcggatggatgatcaaacctttgggtc

SEQ ID NO: 566867 - DNA, 75 bp, synthetic construct
  source 1..75: mol_type = other DNA
ggagctggtgccgttgctggcagaaaaatcggcgtggatgaaccatattgcactggtgtttggcagggaagattc

SEQ ID NO: 566868 - DNA, 75 bp, synthetic construct
  source 1..75: mol_type = other DNA
attctgactatcctgaatttgcatatgggatgtcacaatattatgaatataagaaaaggggtgagtaccctgaaa

SEQ ID NO: 566869 - DNA, 75 bp, synthetic construct
  source 1..75: mol_type = other DNA
gttattagccgcgctggcaggcgccaaatatgttgctccgtatgttaaccgcgtagacgcccagggcggtgacgg

SEQ ID NO: 566870 - DNA, 75 bp, synthetic construct
  source 1..75: mol_type = other DNA
gctattagccgcactggctggcgcaaaatacgtggccccctatgtaaaccgcgtggacgctcagggcggagacgg

SEQ ID NO: 566871 - DNA, 75 bp, synthetic construct
  source 1..75: mol_type = other DNA
acaaattagtagtgcatcaggatgattcatcgtttgagtgcggtctggatgacattgaggtagtaggccgcgcac

SEQ ID NO: 566872 - DNA, 75 bp, synthetic construct
  source 1..75: mol_type = other DNA
gatgcaacgggagaaattattgttgtggataatgatgatgtgcttaaagcagatttctttccttttaaaggtggg

SEQ ID NO: 566873 - DNA, 75 bp, synthetic construct
  source 1..75: mol_type = other DNA
aggcgcaacactggaggaaaaaggctacacggagatggcaaaacagtaccgggtatttgacggtcaggcgatgtt

SEQ ID NO: 566874 - DNA, 75 bp, synthetic construct
  source 1..75: mol_type = other DNA
ttgccgtgaactccaggctgcgtttggctggcggctggggcaaattacccacgccggaaaacgcagtgcttatcc

SEQ ID NO: 566875 - DNA, 75 bp, synthetic construct
  source 1..75: mol_type = other DNA
gacgttctgtgcagccctggtttacggtgaaaatgctatgtggctattaatatgtcttctggttgtgcacttttt

SEQ ID NO: 566876 - DNA, 75 bp, synthetic construct
  source 1..75: mol_type = other DNA
taaaaacgtttgactggaaagatgacaggctacgtatgtggcctggttgtaagttcggtgtgcagataacagcat

SEQ ID NO: 566877 - DNA, 75 bp, synthetic construct
  source 1..75: mol_type = other DNA
ggtgctatggcgtactgaagacccaaaaaccgtttgatgtgggctatttgtcttcatatgcgcgtagcgcatgta

SEQ ID NO: 566878 - DNA, 75 bp, synthetic construct
  source 1..75: mol_type = other DNA
atgctgcattgccccgatcgcgtagctaacgttgcccgtactcagagtcacgttgaagtgacgctggagagcggc

SEQ ID NO: 566879 - DNA, 75 bp, synthetic construct
  source 1..75: mol_type = other DNA
tacggcatattgtgccgctatcaacagcgtcgacagagcgatcgcgaagcaaccatcggcgtcacggacagcctg

SEQ ID NO: 566880 - DNA, 75 bp, synthetic construct
  source 1..75: mol_type = other DNA
atgatacaggtgaaagctggcgagaataccgggggaagagaggctatccataggctaatggctgcctatgatttc

SEQ ID NO: 566881 - DNA, 75 bp, synthetic construct
  source 1..75: mol_type = other DNA
tggatcgatgaaagcgaaggagttgttacattccctctatacaggtttgatgggatgttggctgggtatcagaca

SEQ ID NO: 566882 - DNA, 75 bp, synthetic construct
  source 1..75: mol_type = other DNA
gatgcgcaatacagaatcatggttctgtcttgcgctcccgcacgaacgccagattgtttttactgaacatttggc

SEQ ID NO: 566883 - DNA, 75 bp, synthetic construct
  source 1..75: mol_type = other DNA
attcccggaaataagcttgttgttcatcaggaagaaacaacctttgaatgtgcagttgatgacgtagccgttgta

SEQ ID NO: 566884 - DNA, 75 bp, synthetic construct
  source 1..75: mol_type = other DNA
ggaactggtgccgttgttggaggaaaaatcgacgtggatgaatcatgtggcgttggtatttggccgggaagattc

SEQ ID NO: 566885 - DNA, 75 bp, synthetic construct
  source 1..75: mol_type = other DNA
cgggctgactaacgaagagttagcgttggctgacgttcttactggtgtgccgatggtggcggattatccttcgct

SEQ ID NO: 566886 - DNA, 75 bp, synthetic construct
  source 1..75: mol_type = other DNA
cgctggtgtttggtcgcgaagattccgggctgactaacgaagagttagcgttggctgacgttcttactggtgtgc

SEQ ID NO: 566887 - DNA, 75 bp, synthetic construct
  source 1..75: mol_type = other DNA
agcgttttcactcaatcatggacatctacgctttccgcgtgatcgtcaatgattctgacacctgttatcgcgtgc

SEQ ID NO: 566888 - DNA, 75 bp, synthetic construct
  source 1..75: mol_type = other DNA
gcgctctggagacaggtgtttctttactctggctaacaaccggtcagggcgagccaagttcaaatattgattcga

SEQ ID NO: 566889 - DNA, 75 bp, synthetic construct
  source 1..75: mol_type = other DNA
gcaacctattgctggtgaatacttctggagattcttacttagtggaccgcagccaaacacctccagttaacggta

SEQ ID NO: 566890 - DNA, 75 bp, synthetic construct
  source 1..75: mol_type = other DNA
atggctatttctgcatatattggcatacccggctcaggaaaaagttatgaagccgtttgcaatgtcattattccg

SEQ ID NO: 566891 - DNA, 75 bp, synthetic construct
  source 1..75: mol_type = other DNA
gtttggccgaagcgatcccccgccagatttggctacagcagatgtacatgaggcatccatgtttcgttcttccgc

SEQ ID NO: 566892 - DNA, 75 bp, synthetic construct
  source 1..75: mol_type = other DNA
ttgtatctgtttgaaagcctgaatcaactgattcaaaactacctgccggaagaccaaatcaagcgtctgcggcag

SEQ ID NO: 566893 - DNA, 75 bp, synthetic construct
  source 1..75: mol_type = other DNA
agactatcacttatttaagtgatattggttgtctggagattcagggggccagtctaggctgttacgcccagtgtg

SEQ ID NO: 566894 - DNA, 75 bp, synthetic construct
  source 1..75: mol_type = other DNA
cgctcaccaagactgcgatatgaaccgccccgggtttcctggagagtgttttatctgtgaactcaggctgccaga

SEQ ID NO: 566895 - DNA, 75 bp, synthetic construct
  source 1..75: mol_type = other DNA
atgtctgttgccgctctggcccgccagcgggttcaccgcatgaagcgtggcatccccttttccatcagcgggttt

SEQ ID NO: 566896 - DNA, 75 bp, synthetic construct
  source 1..75: mol_type = other DNA
tactggacgcgcgaatggagcaagagggctacgcccgtagttccattaacccgttcctgtttccgggtgaagggg

SEQ ID NO: 566897 - DNA, 75 bp, synthetic construct
  source 1..75: mol_type = other DNA
gtggggatacattcacaataaaagatgtaaaagtcatgcctgaatctacaccagcaggttatgaagttctacaag

SEQ ID NO: 566898 - DNA, 75 bp, synthetic construct
  source 1..75: mol_type = other DNA
tcgttatatcccgaatgcagaacagcgtgagcagatcctgacagtattacgtgaccgggaaaaaaaactgcagca

SEQ ID NO: 566899 - DNA, 75 bp, synthetic construct
  source 1..75: mol_type = other DNA
aggagcaacgcgatctagctatcgcggccgcgatcaagcaggtgcgacagacgtcatacggcactgttgcaaata

SEQ ID NO: 566900 - DNA, 75 bp, synthetic construct
  source 1..75: mol_type = other DNA
atgaactatctggaatttccggatggttcattgttttggcagcaaaccacttatttgaggtgggatatggagttt

SEQ ID NO: 566901 - DNA, 75 bp, synthetic construct
  source 1..75: mol_type = other DNA
tatcgccatcatcacctcctataacgacatgctctccgctcaccagccttatgaacactatccggaaatcattcg

SEQ ID NO: 566902 - DNA, 75 bp, synthetic construct
  source 1..75: mol_type = other DNA
atttccggcctcgatccgcgcttaaaagattgcgtcattcgcgtcgcttgtgatgtcaccaatccgctggtgggc

SEQ ID NO: 566903 - DNA, 75 bp, synthetic construct
  source 1..75: mol_type = other DNA
tcctagacgcattgcacagatggcggacgggcactgttgcaaagttagcgatgaggcagccttttgtcttattca

SEQ ID NO: 566904 - DNA, 75 bp, synthetic construct
  source 1..75: mol_type = other DNA
ccgatcaaatgatgagcaatgcctcggaactgcgtgggctacatggcgatctgcatcatgaaaacatcatgttct

SEQ ID NO: 566905 - DNA, 75 bp, synthetic construct
  source 1..75: mol_type = other DNA
tttattattagacagggataattacgcaggcgaactattaaaatatccgtttattgaactgttgattaatgagaa

SEQ ID NO: 566906 - DNA, 75 bp, synthetic construct
  source 1..75: mol_type = other DNA
agattggcgtggtgctgatgctgtttattatcggcctcgaactcgatccacaaaggctgtggaagctgcgtgcgg

SEQ ID NO: 566907 - DNA, 75 bp, synthetic construct
  source 1..75: mol_type = other DNA
actgctctccagcggggtgaaaatggtggtactcgacacgatccggaccatatcgaaaccttgcgtaaatttggt

SEQ ID NO: 566908 - DNA, 75 bp, synthetic construct
  source 1..75: mol_type = other DNA
gctgattgtacccattgcggtacgtcttggtctgggatcggtacttggctacctgatcgccggctgcattattgg

SEQ ID NO: 566909 - DNA, 75 bp, synthetic construct
  source 1..75: mol_type = other DNA
gggcgtctggcgctggaaagtttaggtctgggaccgtatgaagcacgggagcgcgccgatgtttttcgccgtttt

SEQ ID NO: 566910 - DNA, 75 bp, synthetic construct
  source 1..75: mol_type = other DNA
cgatgagattgatgaagaacagccgcgggtgatcattgctggattcggtcgttatggacagattaccggacgttt

SEQ ID NO: 566911 - DNA, 75 bp, synthetic construct
  source 1..75: mol_type = other DNA
ctgtcattaattcaacgacatggctggcagggaaccgaagaaggtaaacataccggcaacatggcggatgaaccg

SEQ ID NO: 566912 - DNA, 75 bp, synthetic construct
  source 1..75: mol_type = other DNA
cggagattcatctcttggtgtatctctggtcacatctgcagtaaaagatgccctttctcttgcgagaacaaaagg

SEQ ID NO: 566913 - DNA, 75 bp, synthetic construct
  source 1..75: mol_type = other DNA
caatgaattttctggttatactcatgttatggttataggcggtggcgcagaattaatatgcgatgcagtaaaaaa

SEQ ID NO: 566914 - DNA, 75 bp, synthetic construct
  source 1..75: mol_type = other DNA
acatccttcgcaccatttattcgtgctattcatacgcaaatttcgccttgttgcagctatatcattgcggcaggt

SEQ ID NO: 566915 - DNA, 75 bp, synthetic construct
  source 1..75: mol_type = other DNA
tggatttgagtgtgctcagtgatgaggaaatcctgacacacaaggggattgccctgctggagctggttcagaaac

SEQ ID NO: 566916 - DNA, 75 bp, synthetic construct
  source 1..75: mol_type = other DNA
cagggggttgatctgaacattattatgcaatgtaccggattgacccgggaaaagattgagtcattaaaacattaa

SEQ ID NO: 566917 - DNA, 75 bp, synthetic construct
  source 1..75: mol_type = other DNA
aaatcggaccttctccggataaccttatcgccagagattttaaggcggagcaacctaatcagaaatggctgacag

SEQ ID NO: 566918 - DNA, 75 bp, synthetic construct
  source 1..75: mol_type = other DNA
atcattatggtatatggtggtgggctattaacgctggacacattcgattcaggtcaaacctcacccgctttaggc

SEQ ID NO: 566919 - DNA, 75 bp, synthetic construct
  source 1..75: mol_type = other DNA
atttccagaccgcagtgaagtcctgttctcagggcggcgtgcgcggtggcgcagcaacgctgttttacccgctct

SEQ ID NO: 566920 - DNA, 75 bp, synthetic construct
  source 1..75: mol_type = other DNA
taacggtattgaaccgccgcgcggctacgtcagcatcaaagcgtcgaaagacggtattctgcgccaggtggtgcc

SEQ ID NO: 566921 - DNA, 75 bp, synthetic construct
  source 1..75: mol_type = other DNA
gaagagttcaagcagatggacacgtttatcgatcacgaccgtgatatgaccttctcttatgctgccgttaagcag

SEQ ID NO: 566922 - DNA, 75 bp, synthetic construct
  source 1..75: mol_type = other DNA
gcagagtttgctattacgccagtcgtcggggctgaagtggttaccggttcttcgcggatgaaagcaggtacggcg

SEQ ID NO: 566923 - DNA, 75 bp, synthetic construct
  source 1..75: mol_type = other DNA
cgtgcaggtattggcatcaacgccggtcgcattcgtgcactgggtagcccgattcgcggcggcgaagcgtttcac

SEQ ID NO: 566924 - DNA, 75 bp, synthetic construct
  source 1..75: mol_type = other DNA
tcgcagatctccaacgccactaacggtattgagccgccgcgcggttacgtcagcattaaagcgtcgaaagacggt

SEQ ID NO: 566925 - DNA, 75 bp, synthetic construct
  source 1..75: mol_type = other DNA
cggtcaccgtgacagtcattaccattcctttaaccatgctatgtgctctggtattacctgatattaagatcttcc

SEQ ID NO: 566926 - DNA, 75 bp, synthetic construct
  source 1..75: mol_type = other DNA
aagatgcgcgtaccgtcgccgcccagcaggtggcaaggcttgaatccgccatgtgcctgcgccgccgctggtcac

SEQ ID NO: 566927 - DNA, 75 bp, synthetic construct
  source 1..75: mol_type = other DNA
atgcccgagtggtcgggtcatggggctggcgaataaaggctggataaagggcgaaccacaggatggaggctggat

SEQ ID NO: 566928 - DNA, 75 bp, synthetic construct
  source 1..75: mol_type = other DNA
gttggttttgttgtggcactgatgttgattttgctcggcctgttcccagcagtaagtggatttgtgcagcatatt

SEQ ID NO: 566929 - DNA, 75 bp, synthetic construct
  source 1..75: mol_type = other DNA
tacaaaatcaaacttcgtacatctggctacagacttgtatatcaagtcattgatgaaaaagttgttttactcgtt

SEQ ID NO: 566930 - DNA, 75 bp, synthetic construct
  source 1..75: mol_type = other DNA
tgtttattggcgatttgattgcgcccagatggcaaaaatattatggactcgagggaacgacctgtaccacgatga

SEQ ID NO: 566931 - DNA, 75 bp, synthetic construct
  source 1..75: mol_type = other DNA
ataaaaccgttccattggccgttgagcgagtactgccggatatcgcagcggcgattgatgtcatccacgcccagg

SEQ ID NO: 566932 - DNA, 75 bp, synthetic construct
  source 1..75: mol_type = other DNA
ggctgagcacaaccacagcgaggagttttaccgtctgatggggcaggttatgccgggctgggaaaaggttaagaa

SEQ ID NO: 566933 - DNA, 75 bp, synthetic construct
  source 1..75: mol_type = other DNA
ggatacttatcaaggttcatccggactgccgggtagtcgcatctgtaccacccggaacgccggagctggatgtga

SEQ ID NO: 566934 - DNA, 75 bp, synthetic construct
  source 1..75: mol_type = other DNA
ggcagttaataggtgcctcagcgttggcctacagtggttttatggcagaaaaattttccatagccggagcaggat

SEQ ID NO: 566935 - DNA, 75 bp, synthetic construct
  source 1..75: mol_type = other DNA
tgtgtgacgtggcaggtggctgcacgatttatatttactagtcccagtatttttacagatgaactcagccgtttg

SEQ ID NO: 566936 - DNA, 75 bp, synthetic construct
  source 1..75: mol_type = other DNA
caacgcagactggatttactgataccgcaaaccttatgggtaagtgagcgtcctccgatacgtttacgagcaatg

SEQ ID NO: 566937 - DNA, 75 bp, synthetic construct
  source 1..75: mol_type = other DNA
ttcagggagcaacaaacgcatatcgtcccgcgtcagtatgtgagtggcgaaagccattactatcttggcaaacaa

SEQ ID NO: 566938 - DNA, 75 bp, synthetic construct
  source 1..75: mol_type = other DNA
cattgtgatggtgctgaaaaatctcgatgccgctgaagctaaaaaacgcctgaatcaacacggcggatttattcg

SEQ ID NO: 566939 - DNA, 75 bp, synthetic construct
  source 1..75: mol_type = other DNA
gcagagtttgccattacaccgattgtaggtgccgaagtggttaccggttcttcgcggatgaaagcgggtacggcg

SEQ ID NO: 566940 - DNA, 75 bp, synthetic construct
  source 1..75: mol_type = other DNA
gtttggttatttcatcggctctcttaccggtgggtttattggtgactactttgggcggcgcagggcgtttcgcat

SEQ ID NO: 566941 - DNA, 75 bp, synthetic construct
  source 1..75: mol_type = other DNA
atgaatcagcaacgatttgatgacagcacccttatccgcatttttgctttgcacgagttacaccgtcttaaagag

SEQ ID NO: 566942 - DNA, 75 bp, synthetic construct
  source 1..75: mol_type = other DNA
ttgtacaacacattccagaaccggttctgggcggcgcaacgcttgtaatgtttggcaccatcgccgcctccggtg

SEQ ID NO: 566943 - DNA, 75 bp, synthetic construct
  source 1..75: mol_type = other DNA
tccggtccgctgtacatgaaacgcctgaaaggcggcgtgctggcaaacggcctgaactcgtttgtctcggcggtg

SEQ ID NO: 566944 - DNA, 75 bp, synthetic construct
  source 1..75: mol_type = other DNA
gcctgcgcgctgttggcgcagatcaaaatcaccaatccggtcagtctggactatccacaagcaaaagttcttgca

SEQ ID NO: 566945 - DNA, 75 bp, synthetic construct
  source 1..75: mol_type = other DNA
tcgatatggtaaatacagcagcggctggccccctgggagaagcgggcattgatggatggatcgattctcacttct

SEQ ID NO: 566946 - DNA, 75 bp, synthetic construct
  source 1..75: mol_type = other DNA
gaaatgacgctgacatcggcaacaaccaccggacaacaggacagcagcgcggccacacctcccggccagccgcaa

SEQ ID NO: 566947 - DNA, 75 bp, synthetic construct
  source 1..75: mol_type = other DNA
gaatttctctctggcggcaatcagcaaaaagtattgctttcacgttggctactgactcgtccgcaatttctgatc

SEQ ID NO: 566948 - DNA, 75 bp, synthetic construct
  source 1..75: mol_type = other DNA
ctcgacgagccaacgcgcggtattgacgttggtgcccacgccgagatcatccgcctgattgaaacgctgtgcgcc

SEQ ID NO: 566949 - DNA, 75 bp, synthetic construct
  source 1..75: mol_type = other DNA
ggaaaacgaactgaaacgccagaacgtcagcaatccccgtgagcttgcccgtaaacaggccgttgccctgtcctg

SEQ ID NO: 566950 - DNA, 75 bp, synthetic construct
  source 1..75: mol_type = other DNA
aggattgaaatcagatttggagggagaacgtgtatctaaagatggagaggtcatagtgaaagtatatgtgatcta

SEQ ID NO: 566951 - DNA, 75 bp, synthetic construct
  source 1..75: mol_type = other DNA
ggggctgaaatctgatcttgaggggaagagagtttctaaagacggagaacttatcgtcaaggttttcgtaattta

SEQ ID NO: 566952 - DNA, 75 bp, synthetic construct
  source 1..75: mol_type = other DNA
tttggtgtgggaatggatttaagcagccgctattccggcctgtaccaatgccggatgaatgggaagacagtaagc

SEQ ID NO: 566953 - DNA, 75 bp, synthetic construct
  source 1..75: mol_type = other DNA
acgcttgagcgggaagcccgcgtaaaaagggaggcagagcttctcaacgcgcaggacgacgaagagaaagacccg

SEQ ID NO: 566954 - DNA, 75 bp, synthetic construct
  source 1..75: mol_type = other DNA
cactggatcgccgctttgtatctgactgggcggggaaacttcgctgtacggtcactactgacatctggagcgcca

SEQ ID NO: 566955 - DNA, 75 bp, synthetic construct
  source 1..75: mol_type = other DNA
gtgcaagatctacttcattctctgttaagaccttgggtacaggatatacgtccagaagagtttactcccagctac

SEQ ID NO: 566956 - DNA, 75 bp, synthetic construct
  source 1..75: mol_type = other DNA
acgccgtaaagagatggaaaagcgcgctacagaactgatggcatcgtatggcttctccctcgacgtgcgtgaacc

SEQ ID NO: 566957 - DNA, 75 bp, synthetic construct
  source 1..75: mol_type = other DNA
acattaaacttgatcctggagaggctaataatatacagcttattaatgatgcagacgcaccacttaataagataa

SEQ ID NO: 566958 - DNA, 75 bp, synthetic construct
  source 1..75: mol_type = other DNA
ttatcaaactggctcgaaaaaaaacatatgaacatttactgagggcgaggaggaaatcgaaagaattaaagacag

SEQ ID NO: 566959 - DNA, 75 bp, synthetic construct
  source 1..75: mol_type = other DNA
tcagatgacctgcctgcgtgagctggagtttatcgatggtcagctataccaacgtcctctacgagagctgagcgc

SEQ ID NO: 566960 - DNA, 75 bp, synthetic construct
  source 1..75: mol_type = other DNA
tgcgaagtttgaagcgcaggcgggcgatccaaagcaggcgctggaaatctacaaagacgctatggtcgcatccgg

SEQ ID NO: 566961 - DNA, 75 bp, synthetic construct
  source 1..75: mol_type = other DNA
aggccctgtcataccgttacctgatggttacaccggacatgttcgtgatccaaaagtctggaagcacaacagcca

SEQ ID NO: 566962 - DNA, 75 bp, synthetic construct
  source 1..75: mol_type = other DNA
aggtaaaaacgacattgccgggttcggcaagtgtaagggagtttgcccggctgcaaatcgctttcgcccactgtt

SEQ ID NO: 566963 - DNA, 75 bp, synthetic construct
  source 1..75: mol_type = other DNA
gcgctacagcgtgccgggcgaacattgttgagcgacaaacccgttgccgcgttcaaaaattacggcaaaaaagga

SEQ ID NO: 566964 - DNA, 75 bp, synthetic construct
  source 1..75: mol_type = other DNA
tggggcgcgagctggatacccacgcgctacagcgtgccgggcgaacattgttgagcgacaaacccgttgccgcgt

SEQ ID NO: 566965 - DNA, 75 bp, synthetic construct
  source 1..75: mol_type = other DNA
tcaaacccgccgacagcggcacggcgctgatcaaaggccaaccacaaaccctgcgatcgccacatcaggcttcgg

SEQ ID NO: 566966 - DNA, 75 bp, synthetic construct
  source 1..75: mol_type = other DNA
gtggcgaaatcatggcgctgctcggtgaaaacggggcaggaaaatcgacgttaatcaaagcattaactggcgttt

SEQ ID NO: 566967 - DNA, 75 bp, synthetic construct
  source 1..75: mol_type = other DNA
ggcatcttacggtttctccctcgacgtgcgcgaaccgctcaaccgcttttcagtcgcgatgcagcaaatcgtcgc

SEQ ID NO: 566968 - DNA, 75 bp, synthetic construct
  source 1..75: mol_type = other DNA
atttgccgggccatcgatctctccgccaaagtgctgatcctcgatgaacccaccgccagcctcgacactcaggaa

SEQ ID NO: 566969 - DNA, 75 bp, synthetic construct
  source 1..75: mol_type = other DNA
ctatgacggcgcaaatcacggcgattatgaaggcgttaaaatcattcatccaaatattgaatacgttaacgtatg

SEQ ID NO: 566970 - DNA, 75 bp, synthetic construct
  source 1..75: mol_type = other DNA
ttctttatccgaaatgatggtaatttcacccatttcatgttgaccaactccggtgacagtatggggggatggagt

SEQ ID NO: 566971 - DNA, 75 bp, synthetic construct
  source 1..75: mol_type = other DNA
cagcgggagatgtcggtgcactgccgttatctggtggtcaattgaatggtgctctgggtataggaacatccagtg

SEQ ID NO: 566972 - DNA, 75 bp, synthetic construct
  source 1..75: mol_type = other DNA
gaagataaaggcaatggggttctggaagtattcaatgctggtcgctttcactgcacacaacgctacaccacccga

SEQ ID NO: 566973 - DNA, 75 bp, synthetic construct
  source 1..75: mol_type = other DNA
agcgaactaccgattttttatggtgcgtatttcaggaaatccgggaagccgcacgatcacagcaagacgagtacc

SEQ ID NO: 566974 - DNA, 75 bp, synthetic construct
  source 1..75: mol_type = other DNA
tttactcagttaagcagtgcaacaaacagcaccagtgaaaagctggcagcaacgccaaaggcagtaaaagcagcc

SEQ ID NO: 566975 - DNA, 75 bp, synthetic construct
  source 1..75: mol_type = other DNA
tggtctgtatgacgatgccggaacactgattgcggtcgctaacatggcagaaagttataagcctgaactggctga

SEQ ID NO: 566976 - DNA, 75 bp, synthetic construct
  source 1..75: mol_type = other DNA
ggtcgggccgtattgtctctggaacaggacggcattaaatcgcacacccacagtgccagcgcatccagtacggat

SEQ ID NO: 566977 - DNA, 75 bp, synthetic construct
  source 1..75: mol_type = other DNA
caggcgttttgatggtgtatctgtctggcagcgttacacaaccacaggaaaatcagaaaccacacaggggcgcac

SEQ ID NO: 566978 - DNA, 75 bp, synthetic construct
  source 1..75: mol_type = other DNA
acactggcctaaaggcgaaaggctgatagccgaagaattgggcattgcgcctgaacagatctggccgtcccgtta

SEQ ID NO: 566979 - DNA, 75 bp, synthetic construct
  source 1..75: mol_type = other DNA
ttatgaaacacaatggaatgattccaaccactgacaatcttgactcctatggcccagaagaaaaatatcttggaa

SEQ ID NO: 566980 - DNA, 75 bp, synthetic construct
  source 1..75: mol_type = other DNA
aaaaaagtaaacctgtctgcaatggccgtgggtgacggtaatggcaaattgccggtgccggatgccggtcagacg

SEQ ID NO: 566981 - DNA, 75 bp, synthetic construct
  source 1..75: mol_type = other DNA
tgacgccacgctgacagaaaaaggttttactcagttaagcagtgcaacaaacagcaccagtgaaaagcaggctgc

SEQ ID NO: 566982 - DNA, 75 bp, synthetic construct
  source 1..75: mol_type = other DNA
gcctttctggtgaactgtccggcaatgcggcgacagcaacaaagctgaaaacagcccgtaaaattaataacgttt

SEQ ID NO: 566983 - DNA, 75 bp, synthetic construct
  source 1..75: mol_type = other DNA
attataatgaagatgaaattagtgcgaaattaccactagcatatgattacattttaaataaaaagaatcaagctc

SEQ ID NO: 566984 - DNA, 75 bp, synthetic construct
  source 1..75: mol_type = other DNA
tcatcgccgtcgaacagcagttgccgctgaacggccaaaatggcgcatccgataccatgctgcgcgccagcgcct

SEQ ID NO: 566985 - DNA, 75 bp, synthetic construct
  source 1..75: mol_type = other DNA
ttgcgttccggcgcaatgagtaccgctaacaataatgtcggcggcgcagcgccagggaaaagctatcgtagctac

SEQ ID NO: 566986 - DNA, 75 bp, synthetic construct
  source 1..75: mol_type = other DNA
agaaagatctggatgccatcgctaatgagccgctgcattacgactgggaagcactgcgtgagtcaatcaaaacgc

SEQ ID NO: 566987 - DNA, 75 bp, synthetic construct
  source 1..75: mol_type = other DNA
gagaatgatctcatttaacacatcttcgccttacgccaatgctaatggaagattaagaaagtgggcaaaaaataa

SEQ ID NO: 566988 - DNA, 75 bp, synthetic construct
  source 1..75: mol_type = other DNA
acagaaattctaccgcgactatgaggaaattacggagtatgaagctttattggcacggttaaaggaaaacaaaca

SEQ ID NO: 566989 - DNA, 75 bp, synthetic construct
  source 1..75: mol_type = other DNA
gaatagctatagaaatgcattggcgcaaaatgcaggtgtttattcatttaacctggcattgtcatacaacccgat

SEQ ID NO: 566990 - DNA, 75 bp, synthetic construct
  source 1..75: mol_type = other DNA
ccacaaaggctgtggaagctgcgtgcggcagtgttcggcggtggcgcattgcagatggtgatttgcggcggcctg

SEQ ID NO: 566991 - DNA, 75 bp, synthetic construct
  source 1..75: mol_type = other DNA
gcccacctaaatcatctacgccacctttgagtgcaaaggaaagagccaggcgatacagaaacaaggtcaaagaaa

SEQ ID NO: 566992 - DNA, 75 bp, synthetic construct
  source 1..75: mol_type = other DNA
cttccggacgatccggcactgatccgacaactggcctacgtgaaccagcgtcggatgacatgcctgcgacgcagc

SEQ ID NO: 566993 - DNA, 75 bp, synthetic construct
  source 1..75: mol_type = other DNA
atggacgactctccggcgcttcaggtaaagtgccgtcagctatccacgtaacaccagaggcctacgatggcgggc

SEQ ID NO: 566994 - DNA, 75 bp, synthetic construct
  source 1..75: mol_type = other DNA
gtgaataaccgcttttacatgatgtgcttgcgtgaaactgtgggtaataacgcctcattccattgccataacggc

SEQ ID NO: 566995 - DNA, 75 bp, synthetic construct
  source 1..75: mol_type = other DNA
gtagaagtcaaaaccgttaataccgttgaagaactgctggctcagcaaaaggcgtgcgatgctgcgccgaccctg

SEQ ID NO: 566996 - DNA, 75 bp, synthetic construct
  source 1..75: mol_type = other DNA
taccgtgtgagctggcatcagaaagtcgcgaacgggcagacaatcgaaccttacgctcacatacaggataacggc

SEQ ID NO: 566997 - DNA, 75 bp, synthetic construct
  source 1..75: mol_type = other DNA
gaggactacgccaccgcactggcggcctggcagaaaatcagtcttcacgacatgagcaatgaggatctgcttgct

SEQ ID NO: 566998 - DNA, 75 bp, synthetic construct
  source 1..75: mol_type = other DNA
gatctcacgcgctcaattaacattgcaccttctgctaacgcttacgttgcgcgggcgacgatttatcgccaacgt

SEQ ID NO: 566999 - DNA, 75 bp, synthetic construct
  source 1..75: mol_type = other DNA
aataagccgctgtttacaaccgacttacaagagaaaagctggctctatctgttatcaaaatacagcgacaaccca

SEQ ID NO: 567000 - DNA, 75 bp, synthetic construct
  source 1..75: mol_type = other DNA
tgtcgccagagcgcaactgaacgatgcaacgtttgccgcatcgccggaaggaaaaacgttgcgtaccgatctgct

SEQ ID NO: 567001 - DNA, 75 bp, synthetic construct
  source 1..75: mol_type = other DNA
aacagctcgataacaaagatatcgctgactacgaacacaaccagctgatgcgccgcctgcgccagttgatcgccc

SEQ ID NO: 567002 - DNA, 75 bp, synthetic construct
  source 1..75: mol_type = other DNA
gcaggcagagttgctgcaccgctcccgccaggcagaaaaagaaggccaggagccggatccccgcgtcgaacaagc

SEQ ID NO: 567003 - DNA, 75 bp, synthetic construct
  source 1..75: mol_type = other DNA
gcggcgaaagtgtgccatgaagtgggactggatgcgggagaggtggttactggcagtgatattgaaacgctaact

SEQ ID NO: 567004 - DNA, 75 bp, synthetic construct
  source 1..75: mol_type = other DNA
tggacgatcggatcctggcactgcaatcacaggggatcttcaccgatcctcagtcatatattacttacgcgaccg

SEQ ID NO: 567005 - DNA, 75 bp, synthetic construct
  source 1..75: mol_type = other DNA
atcaccgttagcagcctgtcgctgtacaccggggcgattctggaagccaacctgctgccaccgccagagccgaaa

SEQ ID NO: 567006 - DNA, 75 bp, synthetic construct
  source 1..75: mol_type = other DNA
acgctgttccacggtcgcggcggttccattggccgcggtggcgcaccagcacatgcagcactgctttcgcaaccg

SEQ ID NO: 567007 - DNA, 75 bp, synthetic construct
  source 1..75: mol_type = other DNA
gcctggcttcaggcagaacaacggcaaccaaatgcctggcaacatcgcgcggtggcttatcaggcataccaggtg

SEQ ID NO: 567008 - DNA, 75 bp, synthetic construct
  source 1..75: mol_type = other DNA
gagttaatccggcaactggacttcccatgttaggtggaattgatgcgggggggaatgcctggggaatgaataatc

SEQ ID NO: 567009 - DNA, 75 bp, synthetic construct
  source 1..75: mol_type = other DNA
tggcgaacggacagactattgagccttacgctcacgtacagggtaacggctatcgggataaaggtactcagggcg

SEQ ID NO: 567010 - DNA, 75 bp, synthetic construct
  source 1..75: mol_type = other DNA
atgaataatcattcagttattccagccttcgacttccgagaaatggtgcaagccaaaaacggagaggtcgttacc

SEQ ID NO: 567011 - DNA, 75 bp, synthetic construct
  source 1..75: mol_type = other DNA
catgctaaataattcaattgatgcgggggggaatttctttggaatgaataatcatcgcagggatgaccgttggta

SEQ ID NO: 567012 - DNA, 75 bp, synthetic construct
  source 1..75: mol_type = other DNA
cggtgtttgctttattgggggcaatttttacatgtgttttttcttataaagtgagaaaactatatcctgacgatt

SEQ ID NO: 567013 - DNA, 75 bp, synthetic construct
  source 1..75: mol_type = other DNA
atgccagcagagtggccctgatcattatcgctgttgctgttggatttgaactgcaatttgtccttttctcggggg

SEQ ID NO: 567014 - DNA, 75 bp, synthetic construct
  source 1..75: mol_type = other DNA
tgctggaaattggaattgatttgaacggttctaggataaaacgtgtcacaacggcccgatattgtgtcacaacgg

SEQ ID NO: 567015 - DNA, 75 bp, synthetic construct
  source 1..75: mol_type = other DNA
ctgcgttgtcgcagtgaagtcgggcagaatgccctgcggctggcacaattacctgtcgccagagcgcaactgaac

SEQ ID NO: 567016 - DNA, 75 bp, synthetic construct
  source 1..75: mol_type = other DNA
gcgtggcgacccgtaacaaggctgaatctctgcgtctggcacgattgctgtatcagcaagaaccggcaaatctta

SEQ ID NO: 567017 - DNA, 75 bp, synthetic construct
  source 1..75: mol_type = other DNA
aagctgaaaggcacgatcggaagccgtttgatgaacgagcggaagaaagagaagcgcgtcctggagctcgaacat

SEQ ID NO: 567018 - DNA, 75 bp, synthetic construct
  source 1..75: mol_type = other DNA
gatactctcattcgcgcagtctgtggtgaaaacatcaatagtaagaagatgcgaaatgggcgttccaggcttagg

SEQ ID NO: 567019 - DNA, 75 bp, synthetic construct
  source 1..75: mol_type = other DNA
tggagcatgaccttagtctgtactacgatcctgccccaattgctcgcttgcagcacgggattagccaggcggtcg

SEQ ID NO: 567020 - DNA, 75 bp, synthetic construct
  source 1..75: mol_type = other DNA
gaaatatctgccagcgcgtgaaggggattaccagcggattgatgaatccgacttgatccttgaaggttacatcgc

SEQ ID NO: 567021 - DNA, 75 bp, synthetic construct
  source 1..75: mol_type = other DNA
agtatctgcaagcggcggaagtgaacgccatgcttgacgatcccgatgcattgtttatcgacatgcgtaaccact

SEQ ID NO: 567022 - DNA, 75 bp, synthetic construct
  source 1..75: mol_type = other DNA
atgaatctggactggctggcttatcgtattgcgcaggtgcagtatctggtcgatggcctggaagagattggcgtt

SEQ ID NO: 567023 - DNA, 75 bp, synthetic construct
  source 1..75: mol_type = other DNA
cggtaaactgttgccgcatatcccggcagaccagttcccggcacaggcgctggcctgcgagctgtataaagtcgc

SEQ ID NO: 567024 - DNA, 75 bp, synthetic construct
  source 1..75: mol_type = other DNA
accggcggcattcgttgtgaaaaagccagtgcctggatgaaacataacggattcaataaagtctggcatatcgag

SEQ ID NO: 567025 - DNA, 75 bp, synthetic construct
  source 1..75: mol_type = other DNA
ccgacggtattgacgatcctcactttgatgccagcaatgtgggtgagtatctgcaagcggcggaagtgaacgcca

SEQ ID NO: 567026 - DNA, 75 bp, synthetic construct
  source 1..75: mol_type = other DNA
gcgttttattggcaaaaattttgtttttgacgagcggatgggcgaacgtatctctgatgagattatcgcgcattg

SEQ ID NO: 567027 - DNA, 75 bp, synthetic construct
  source 1..75: mol_type = other DNA
ggtagccgcagttactacgcgttagctgaatcagtaaaaaatatttttggctatcaatacactattccaactcac

SEQ ID NO: 567028 - DNA, 75 bp, synthetic construct
  source 1..75: mol_type = other DNA
acagctatgcggtgctggggctgggcgatgtggcgatggcgcgaaaagattatcccgccgccgaacgttattatc

SEQ ID NO: 567029 - DNA, 75 bp, synthetic construct
  source 1..75: mol_type = other DNA
taaccagaacaatcgccgcgtcacaatcggcctgaacaacatgatctggcattacgacaaagatctgagtggcta

SEQ ID NO: 567030 - DNA, 75 bp, synthetic construct
  source 1..75: mol_type = other DNA
atggaaaactttaaacatctccctgaaccgttccgcattcgtgttattgagccagtaaaacgtaccactcgcgct

SEQ ID NO: 567031 - DNA, 75 bp, synthetic construct
  source 1..75: mol_type = other DNA
gctgcgtttaaccattccgcgcgcaacatatactcaaacacatatggacttcattattgaggtgatgctgccaac

SEQ ID NO: 567032 - DNA, 75 bp, synthetic construct
  source 1..75: mol_type = other DNA
actcaaacacatatggacttcattattgaagccttcaaacatgtgaaagagaacgcggcgaatattaaagggtta

SEQ ID NO: 567033 - DNA, 75 bp, synthetic construct
  source 1..75: mol_type = other DNA
aaatgcgctggaaattccggctgacactttccgcgagcagttaccgaaagccatagagatgatgcaggcgcataa

SEQ ID NO: 567034 - DNA, 75 bp, synthetic construct
  source 1..75: mol_type = other DNA
gcgtaaaggcctgggcatcggcggcaccaaagacggcaccgaagagccatggtacgtggttgataaagacgtcga

SEQ ID NO: 567035 - DNA, 75 bp, synthetic construct
  source 1..75: mol_type = other DNA
gggcagacagagcgctgcgttccggtcatcaaaatctgctttccgaagcgcagcctgagctggagcggacgttac

SEQ ID NO: 567036 - DNA, 75 bp, synthetic construct
  source 1..75: mol_type = other DNA
tattccccgcctggcgcgccattttttacaggttgccgcgcgagaactgggcgtagaagcgaagttgctgcatcc

SEQ ID NO: 567037 - DNA, 75 bp, synthetic construct
  source 1..75: mol_type = other DNA
ggctgcgcgtggttgcggtggcgacgaaatacctgccagcgcgtgaaggagattaccagcgaattgatgaatccg

SEQ ID NO: 567038 - DNA, 75 bp, synthetic construct
  source 1..75: mol_type = other DNA
ttattcagagctgtgcatcgtggccgttaatgatcatgaccgtgatcgtgatgattgtcgggatcgcattgccgt

SEQ ID NO: 567039 - DNA, 75 bp, synthetic construct
  source 1..75: mol_type = other DNA
gctgcggatatcggcatttctgtggacggcgcggtagatatcgcccgtgaagcggctgatatcatcctgctggaa

SEQ ID NO: 567040 - DNA, 75 bp, synthetic construct
  source 1..75: mol_type = other DNA
ctgtaccgtgccaattatggcgcgctggaagaagctgatcttgtggcaaaaaacgcccgttcataacacgcgctg

SEQ ID NO: 567041 - DNA, 75 bp, synthetic construct
  source 1..75: mol_type = other DNA
tagtgattggctttattacctttgtactggtggtgatgttattccgcccggcacagcaactcgaggtaatttcca

SEQ ID NO: 567042 - DNA, 75 bp, synthetic construct
  source 1..75: mol_type = other DNA
tgtttaaattcctgatcgacagctccggcgctatcgccctgctggtttatttagtcatcgccgtttcacagttgc

SEQ ID NO: 567043 - DNA, 75 bp, synthetic construct
  source 1..75: mol_type = other DNA
tgtttggtcacgagaaaggcgcgtttaccggcgcgaataccattcgtcaggggcgttttgaacaggctgatggcg

SEQ ID NO: 567044 - DNA, 75 bp, synthetic construct
  source 1..75: mol_type = other DNA
cagccagagctggagcggacgttactgacgaccgcgttgcgacatacgcaggggcataaacaggaagcggcgcgg

SEQ ID NO: 567045 - DNA, 75 bp, synthetic construct
  source 1..75: mol_type = other DNA
tgcgaaattaatcatggactgcgtgatattactttccgtaaccagttgcctgaactcggcgctgtataccgcgtc

SEQ ID NO: 567046 - DNA, 75 bp, synthetic construct
  source 1..75: mol_type = other DNA
aagctgccgcaagcgcagacagtaaacagcgacagcctgcaaagcgttaaattaccggcgggattgtcgtcgcaa

SEQ ID NO: 567047 - DNA, 75 bp, synthetic construct
  source 1..75: mol_type = other DNA
ttattaatggtcggattgaaacaatacttattgctcaggagaataagggaactcatacagtcaacctgaatatta

SEQ ID NO: 567048 - DNA, 75 bp, synthetic construct
  source 1..75: mol_type = other DNA
gatagttcagtctggaaaggcaaagtttcaggggcaggagatgccagtgtatctctgcaaaacgggtctgtctga

SEQ ID NO: 567049 - DNA, 75 bp, synthetic construct
  source 1..75: mol_type = other DNA
tggttttaaaggtgatgcaaccgacaacattacccttgctggctcaaatattattaatggccggattgaaacaat

SEQ ID NO: 567050 - DNA, 75 bp, synthetic construct
  source 1..75: mol_type = other DNA
tgaccgaagacaataacccggagctgatccgaaaaatgctggcatccttcctggaactaccagctgcggttgagg

SEQ ID NO: 567051 - DNA, 75 bp, synthetic construct
  source 1..75: mol_type = other DNA
aaacctgatgtagtattgggagatgctgtattcaaagtatccgttgctgaatatgcaaccgttttcggtgtgaca

SEQ ID NO: 567052 - DNA, 75 bp, synthetic construct
  source 1..75: mol_type = other DNA
ggcacaaccataaatgctcaaggtaataagagttccagcaacgcctccacggcaatttttgctcaaaagggttga

SEQ ID NO: 567053 - DNA, 75 bp, synthetic construct
  source 1..75: mol_type = other DNA
accagaacgacgatattgatcgagaggatgttgcgcaacgatttgacgctgactttatcctgtttactgctgaat

SEQ ID NO: 567054 - DNA, 75 bp, synthetic construct
  source 1..75: mol_type = other DNA
accgaatggttcaagtcaacatttcctcaaggctttaaagcaggcgaagaagccatattgaaatctctgttcgat

SEQ ID NO: 567055 - DNA, 75 bp, synthetic construct
  source 1..75: mol_type = other DNA
agaaaaaagtcctgaaactcgaagaagagcaagcccgcaagctgaagaaaacggaaagagacagtcttaaagatg

SEQ ID NO: 567056 - DNA, 75 bp, synthetic construct
  source 1..75: mol_type = other DNA
gggcgatccgatcccggtctacggcccgccggatgaacagggctgcgacgatctgtttaaacatccgggcctgct

SEQ ID NO: 567057 - DNA, 75 bp, synthetic construct
  source 1..75: mol_type = other DNA
tggtgattgattgcagccatccgccgcgcgaggatgcgccacgtaatcactgcgatttaaacaccgtgctggcac

SEQ ID NO: 567058 - DNA, 75 bp, synthetic construct
  source 1..75: mol_type = other DNA
caccagtttgatgcgtggctgatggaaaacgcactaccgtcagggtttgaggtggggtttgatgggatggagatt

SEQ ID NO: 567059 - DNA, 75 bp, synthetic construct
  source 1..75: mol_type = other DNA
tccgtttgttcgcccagcttttgatacccgcatggaagaagctacgcaggtggcgatgcagcggatgaatcaggc

SEQ ID NO: 567060 - DNA, 75 bp, synthetic construct
  source 1..75: mol_type = other DNA
ttcaccttgatgaagcagacaaggaatttatcggaaaaagcagaggtgatcacaaccgtctgggcattgccctgc

SEQ ID NO: 567061 - DNA, 75 bp, synthetic construct
  source 1..75: mol_type = other DNA
attcttcatgttcaccgctataatcatgaaataccctcggtgctaaacattgatcaagattatcagttggttatc

SEQ ID NO: 567062 - DNA, 75 bp, synthetic construct
  source 1..75: mol_type = other DNA
aagaggaaatgaaaaattgtttgttgatgtttatgccagatttatagaaccattaattattaaaacacagaaata

SEQ ID NO: 567063 - DNA, 75 bp, synthetic construct
  source 1..75: mol_type = other DNA
atgaagaagtcgattctcgctctgtctttgttagtcggtctctccgcagcggcttccagctatgcggcgctaccg

SEQ ID NO: 567064 - DNA, 75 bp, synthetic construct
  source 1..75: mol_type = other DNA
gccgggctggagcgggtgacagaaggcgatatctggatcaacgaccagcgcgtgactgaaatggagccaaaagat

SEQ ID NO: 567065 - DNA, 75 bp, synthetic construct
  source 1..75: mol_type = other DNA
accacgccgccatgataacgacgaagacactgacactggtgaaaccaccgaaacccggcatcccgcagacaagga

SEQ ID NO: 567066 - DNA, 75 bp, synthetic construct
  source 1..75: mol_type = other DNA
gggatctgtccagctacttcgatacagtacatcatcgactgctgatgaaagcagtacgccgcaggctcagggatc

SEQ ID NO: 567067 - DNA, 75 bp, synthetic construct
  source 1..75: mol_type = other DNA
atgcgggtatgccttaatttgtcccgagtcgaagtattaaatcagcgttatttccttgggccgtgtccattctga

SEQ ID NO: 567068 - DNA, 75 bp, synthetic construct
  source 1..75: mol_type = other DNA
atggcgaatatgagttatttatctttgagtggggaaacacaagggctgatttcagcgggttgctcaacgcttgat

SEQ ID NO: 567069 - DNA, 75 bp, synthetic construct
  source 1..75: mol_type = other DNA
atgattatgaaggatggcatctatagcattatatttattagcaatgaagattcctgtggggaaggtatactgatt

SEQ ID NO: 567070 - DNA, 75 bp, synthetic construct
  source 1..75: mol_type = other DNA
atgaaaaaacacattaaaaatacttttttattagttgctatttgtttgacagtggcatgtaaagagcaattgtat

SEQ ID NO: 567071 - DNA, 75 bp, synthetic construct
  source 1..75: mol_type = other DNA
caagaaaatgcaaaaatcaactatctcaaagaacaagatatagaaaggttactaagtaaaatccccggtgttatc

SEQ ID NO: 567072 - DNA, 75 bp, synthetic construct
  source 1..75: mol_type = other DNA
ctgattaaaaaaagcagtcttaaaaagggggatggtaaatcattttcagcacttgcgacactcgatttatcggga

SEQ ID NO: 567073 - DNA, 75 bp, synthetic construct
  source 1..75: mol_type = other DNA
ctgtggcatcattatttaagtgaatacgaagaattgcttccttcatcttcactctctccgcgcaaacttaaacgg

SEQ ID NO: 567074 - DNA, 75 bp, synthetic construct
  source 1..75: mol_type = other DNA
atttgctgattcagcgagcggggcgattacagcggcatatccgcgatattaatggtcagttaaagcgtgacggaa

SEQ ID NO: 567075 - DNA, 75 bp, synthetic construct
  source 1..75: mol_type = other DNA
ctggtatatctctgcaacagtcgtactcgcagactggacgggttcgtcaacgcgattttttccacgcgtcgcaca

SEQ ID NO: 567076 - DNA, 75 bp, synthetic construct
  source 1..75: mol_type = other DNA
gcggtgatgggcggcttactcggcggtccggtcgttggaggactggttggtctgaccggcgggttacatcgatac

SEQ ID NO: 567077 - DNA, 75 bp, synthetic construct
  source 1..75: mol_type = other DNA
aacgaagtgaacagcatgaaagtggcacaggtgctgtatcaggagctggatattggtgcagtcgcgattaccgat

SEQ ID NO: 567078 - DNA, 75 bp, synthetic construct
  source 1..75: mol_type = other DNA
aggtggcacaggtgctgtatcaggagctggatattggtgcggtcgcgattaccgatcgtgagaaattactggctt

SEQ ID NO: 567079 - DNA, 75 bp, synthetic construct
  source 1..75: mol_type = other DNA
gtcggagaaaacctgatcactgccagtaatgcattgctgcctggctgggctattccacaatgggatgtaccggat

SEQ ID NO: 567080 - DNA, 75 bp, synthetic construct
  source 1..75: mol_type = other DNA
acgcaactacaccagcgattattgatgctgctacaactgccagcgttggggaaattattgactagcgtgaagcgt

SEQ ID NO: 567081 - DNA, 75 bp, synthetic construct
  source 1..75: mol_type = other DNA
gtgaacggtgtgcgactgacaccgcgcggctggtttgaatttaccgaagcctggcttcccgcgccgtcgcaatga

SEQ ID NO: 567082 - DNA, 75 bp, synthetic construct
  source 1..75: mol_type = other DNA
cgtgaatggtgtgcgactgactccgcgcggctggtttgaatttaccgaagcctggcttcccgcaccgtcacaatg

SEQ ID NO: 567083 - DNA, 75 bp, synthetic construct
  source 1..75: mol_type = other DNA
caggcgacactggcagcggaaggctgtgaacttacaattatttttcataacgcaaaaaactgggacgacacgacc

SEQ ID NO: 567084 - DNA, 75 bp, synthetic construct
  source 1..75: mol_type = other DNA
acttcataccatggcagaacgcctacaggcgacactggcagcggaaggctgtgaacttacaattatttttcataa

SEQ ID NO: 567085 - DNA, 75 bp, synthetic construct
  source 1..75: mol_type = other DNA
gcgatgactatgggataagcgtcgcctgtgagcctgatagttacacccgaataacgttacgactgccatggaggg

SEQ ID NO: 567086 - DNA, 75 bp, synthetic construct
  source 1..75: mol_type = other DNA
tcgcagaggtgctcaaattgaacgcttcattggtcaccatttaccttttttcgatttgaacaaagtttttgatac

SEQ ID NO: 567087 - DNA, 75 bp, synthetic construct
  source 1..75: mol_type = other DNA
ccagtagtcagcccagtaatctgtcagagcaagggacatctcagcgggtgtcatctgttcaaccgttgcagggag

SEQ ID NO: 567088 - DNA, 75 bp, synthetic construct
  source 1..75: mol_type = other DNA
atcatgaaatctccgctgcggcgtggtgacgtgcgcccgtatatcgcacaaatcaccctcgacctctccgggcta

SEQ ID NO: 567089 - DNA, 75 bp, synthetic construct
  source 1..75: mol_type = other DNA
gatgtgctccagtattctgatgctgactatattattacgcattcatatacatccatgagcaaatcagaagcattg

SEQ ID NO: 567090 - DNA, 75 bp, synthetic construct
  source 1..75: mol_type = other DNA
ataaattcaaggggaacactctttactttacgctgatctacagaccagacgggcgtgtagaaaaactggaaaaac

SEQ ID NO: 567091 - DNA, 75 bp, synthetic construct
  source 1..75: mol_type = other DNA
cacagattctggcggcgaaccccaacgccgaccgcgcacactatgttgacggtatgaagtttgaaccggaagtgt

SEQ ID NO: 567092 - DNA, 75 bp, synthetic construct
  source 1..75: mol_type = other DNA
aattatgcgtggggtaattatgagtcaggtggaacgatatctgttacgtgtctcaatatacctggggccggtatt

SEQ ID NO: 567093 - DNA, 75 bp, synthetic construct
  source 1..75: mol_type = other DNA
ttagtagtaaaattagcggagcccaaagagtttctttagatgaaatgaaaacgttgagtaatcattactcacagt

SEQ ID NO: 567094 - DNA, 75 bp, synthetic construct
  source 1..75: mol_type = other DNA
ctttcggcgcagatcctcgccgggcaatatgagcggcaaaaagcgatgctcacccagtcagaaatcaaactgctt

SEQ ID NO: 567095 - DNA, 75 bp, synthetic construct
  source 1..75: mol_type = other DNA
caacctgcaagtgctgggtcgcgtgctgggtaaactcaaccaggtaccggatgttatcgacgcgcgtcggttgca

SEQ ID NO: 567096 - DNA, 75 bp, synthetic construct
  source 1..75: mol_type = other DNA
cgattatgtgaccaaaaaaatccattgctattaattgaggcaataaaggatttggagtccaatatccatgtagat

SEQ ID NO: 567097 - DNA, 75 bp, synthetic construct
  source 1..75: mol_type = other DNA
ggagtctgcacacatataattccaactttgaccagggaaatttcattatttaaagattgtgcatctctatttcaa

SEQ ID NO: 567098 - DNA, 75 bp, synthetic construct
  source 1..75: mol_type = other DNA
gtcgatttccagtccgagcagtgtatcggctgcggttattgcatcgccgggtgtccgttcaacgtgccgcgcctc

SEQ ID NO: 567099 - DNA, 75 bp, synthetic construct
  source 1..75: mol_type = other DNA
aataccataaggttgatgttgactctatagttaggaaatatggcgatgatgtttcctatattccggaaaaagtac

SEQ ID NO: 567100 - DNA, 75 bp, synthetic construct
  source 1..75: mol_type = other DNA
acaggcgctgcctaaagggcaatatgaagcggcagagtcgctggcgttgggttactggaaaactcaggggctggt

SEQ ID NO: 567101 - DNA, 75 bp, synthetic construct
  source 1..75: mol_type = other DNA
agcctggcgatctgcactcccaccccctttacgctctccgccgacagtgtgcaatggatcgattcagttaactga

SEQ ID NO: 567102 - DNA, 75 bp, synthetic construct
  source 1..75: mol_type = other DNA
ggcttatggctgggctaccgggcttcttggtgctgagttagttgctttaactagcgtgtttataattggaagaag

SEQ ID NO: 567103 - DNA, 75 bp, synthetic construct
  source 1..75: mol_type = other DNA
cgaaatttttcgcccagtgaatataccgactcaaccgggcgcaaactccctatgtaccaaatcaccaaaaacggc

SEQ ID NO: 567104 - DNA, 75 bp, synthetic construct
  source 1..75: mol_type = other DNA
tttatgcgctaagcacagcctcattcgcattatggtggggcgtgcagggcagccgaaaggctggccgggttctct

SEQ ID NO: 567105 - DNA, 75 bp, synthetic construct
  source 1..75: mol_type = other DNA
agtacgggtggaattatagtgcacctgcacctcataaaccgggtgccgggcgtggaaacccgaaagttactcgag

SEQ ID NO: 567106 - DNA, 75 bp, synthetic construct
  source 1..75: mol_type = other DNA
gtcattacatctattaaaaataggtatcatgcgacatctaatgattttttatctagactccatggtaatcaagaa

SEQ ID NO: 567107 - DNA, 75 bp, synthetic construct
  source 1..75: mol_type = other DNA
ttttgcttaagtctgagcttaaagatctgcttaatcagtatggaattacattttcaaatgaactacatagggatt

SEQ ID NO: 567108 - DNA, 75 bp, synthetic construct
  source 1..75: mol_type = other DNA
ccaggaagaagtggcgaaactcatcgacgttaccacctgtatcggctgtaaagcctgtcaggtggcgtgttcaga

SEQ ID NO: 567109 - DNA, 75 bp, synthetic construct
  source 1..75: mol_type = other DNA
aacctttgaagcaaaattcccggacgcgcatctcggtgctgtggttgcctttggtaacaacacctggcgtgctct

SEQ ID NO: 567110 - DNA, 75 bp, synthetic construct
  source 1..75: mol_type = other DNA
gcagtgggaacgtctgcaacgcggcgttgcatcattctcgctacaactggcggaagggcgggcagatctctacac

SEQ ID NO: 567111 - DNA, 75 bp, synthetic construct
  source 1..75: mol_type = other DNA
acctgctttttatccggcaggggcagggaaggacggcgagcggtaagccactgccggttatcactattgaacgta

SEQ ID NO: 567112 - DNA, 75 bp, synthetic construct
  source 1..75: mol_type = other DNA
ttctgtcagcccggataatggatttacgaccagcatggagcttgaagtgaagattgatgatctcgaaatggaata

SEQ ID NO: 567113 - DNA, 75 bp, synthetic construct
  source 1..75: mol_type = other DNA
tgagcatgggatcaacgataatttgctgttcaagtggcgccagtactggcgcgaaggaaaactacgtcctccttc

SEQ ID NO: 567114 - DNA, 75 bp, synthetic construct
  source 1..75: mol_type = other DNA
aaaaaagccctaattatcccgttgagttcaaaatcaaaatggttgaactatcgcatcgaccagagatctccgtag

SEQ ID NO: 567115 - DNA, 75 bp, synthetic construct
  source 1..75: mol_type = other DNA
cggttaccgaagatgttcctgcttccgtgttgcagctgcatccttcgctgatggtaatcgctgataaagccgctg

SEQ ID NO: 567116 - DNA, 75 bp, synthetic construct
  source 1..75: mol_type = other DNA
gagcttatttagttatacaggtacgccttcgaccgccggtgtagcccagcaggcgcgcgcatggctgacgccagt

SEQ ID NO: 567117 - DNA, 75 bp, synthetic construct
  source 1..75: mol_type = other DNA
cgccggttccggtatggaatatgctcaactatgctgccttacaggaagggcgtaacggtctggctgtctttagcg

SEQ ID NO: 567118 - DNA, 75 bp, synthetic construct
  source 1..75: mol_type = other DNA
gcgcaggccatgcgcgccgctcaggcaaagtgggacaaactgcaacggggcgtcgcggagttctccatcagcctg

SEQ ID NO: 567119 - DNA, 75 bp, synthetic construct
  source 1..75: mol_type = other DNA
ataccggggagccagtaacgcccggttttagcgctgtgcgccaggccggggagtgcgtttcagttcagttgattc

SEQ ID NO: 567120 - DNA, 75 bp, synthetic construct
  source 1..75: mol_type = other DNA
cctttgctggaaggtcgcgatgtggacgcattcctgccgaatgcccgtttcttcgacaaactgcgtattgacggc

SEQ ID NO: 567121 - DNA, 75 bp, synthetic construct
  source 1..75: mol_type = other DNA
gactatcgaggctgccatcatggctactatccttaccctttctcaccctgacgcaaccatcgaaaatggtcgcgc

SEQ ID NO: 567122 - DNA, 75 bp, synthetic construct
  source 1..75: mol_type = other DNA
gaaccggaaacagtgataacagcatgaaagccagcgatccccgaaatgcgttttactggcgctttgtggagctgg

SEQ ID NO: 567123 - DNA, 75 bp, synthetic construct
  source 1..75: mol_type = other DNA
cttgagaaaaacctttctgaaggaagaacttttgccacaatcgccaccgagtggtacaacgcaaaagtttcaggc

SEQ ID NO: 567124 - DNA, 75 bp, synthetic construct
  source 1..75: mol_type = other DNA
attaccgcttttacagggggcaacggatgctgccggttttatggcgcggatggataccgttctgcagatgtacgg

SEQ ID NO: 567125 - DNA, 75 bp, synthetic construct
  source 1..75: mol_type = other DNA
tggtgtcggtggttcacgatttgcaaaaagcgatagctgaaaaagtgcagttaaaaccgggcaccagcgtggcat

SEQ ID NO: 567126 - DNA, 75 bp, synthetic construct
  source 1..75: mol_type = other DNA
acgggtaccgggtttatcgctctcgccggagtcgctgccgaatttggcgtggtgatgctgatgtatttacgtcac

SEQ ID NO: 567127 - DNA, 75 bp, synthetic construct
  source 1..75: mol_type = other DNA
ccgcgcgcgggggggggggggggggggggggacttccaggaagaagtggcgaaactcatcgacgtcaccacctgt

SEQ ID NO: 567128 - DNA, 75 bp, synthetic construct
  source 1..75: mol_type = other DNA
aacgtggtcagtggcacgtcatggcttaacgtgtggggggaggcgctacaggagaaaatcacgggctttgatgtg

SEQ ID NO: 567129 - DNA, 75 bp, synthetic construct
  source 1..75: mol_type = other DNA
agtttaatgccaagctgaacgaaaacccctggtgggcgcgatttgtaaacagccagtttattcaaatgcagtccg

SEQ ID NO: 567130 - DNA, 75 bp, synthetic construct
  source 1..75: mol_type = other DNA
acaaaaaatacttcggtgacggcaccggtgtagggctacgtaaagatgatgcggaactgacggctgcgtttaata

SEQ ID NO: 567131 - DNA, 75 bp, synthetic construct
  source 1..75: mol_type = other DNA
gaaataaccaattacttcttaacctatttatttcctttaatcagtggtccagatcctttatggatattaggattg

SEQ ID NO: 567132 - DNA, 75 bp, synthetic construct
  source 1..75: mol_type = other DNA
gtgacgattacagaattactggacaaatttaacgccaagttaaatgaaaacacatggtggtcacgatttgtaaat

SEQ ID NO: 567133 - DNA, 75 bp, synthetic construct
  source 1..75: mol_type = other DNA
tttcacccgcagaccagtagatattacccgactgccacacatctttgcttcgttgtcccctgctatcgcccctgt

SEQ ID NO: 567134 - DNA, 75 bp, synthetic construct
  source 1..75: mol_type = other DNA
acgaccattcagcttaagccgcaggatcagtggcggccaggcatgacgatggacaaaatcatcgaagagctggat

SEQ ID NO: 567135 - DNA, 75 bp, synthetic construct
  source 1..75: mol_type = other DNA
aatgtaccaaatcaccaaaaacggcttcgttttcctggtgatgggcttcactggcaaaaaagccgctgcattcaa

SEQ ID NO: 567136 - DNA, 75 bp, synthetic construct
  source 1..75: mol_type = other DNA
gttttcctggtgatgggcttcacaggcaaaaaagccgctgcattcaaggaagcctacattgctgagttcgaccgc

SEQ ID NO: 567137 - DNA, 75 bp, synthetic construct
  source 1..75: mol_type = other DNA
agaacgggtggaattatagtgcacctgcacctcataaagcgggtgccgggcgtggaaacccgatgatgactactg

SEQ ID NO: 567138 - DNA, 75 bp, synthetic construct
  source 1..75: mol_type = other DNA
tattccgggagatggacgcactctggttgttcacttcgacaaattcggcaatgttgaattcactgaaaccgttcc

SEQ ID NO: 567139 - DNA, 75 bp, synthetic construct
  source 1..75: mol_type = other DNA
gatgaccggttgtagcaaccctgtacgtctcaccacccatgagattgctacctccggtggtgagttaatcaaatt

SEQ ID NO: 567140 - DNA, 75 bp, synthetic construct
  source 1..75: mol_type = other DNA
cgcttttatctggagaagcaggggtggactcttgtaaacaggagcgcaattaaaaatatgaccgtcgagcagttg

SEQ ID NO: 567141 - DNA, 75 bp, synthetic construct
  source 1..75: mol_type = other DNA
cgccggtctgctgccgattctgtggggaacgggggctggttcagaggtgatgagccggattgccgcgccgatgat

SEQ ID NO: 567142 - DNA, 75 bp, synthetic construct
  source 1..75: mol_type = other DNA
acgggcaccggttttatcgctctcgccggagtcgctgccgagtttggcgtggtgatgctgatgtatttacgtcac

SEQ ID NO: 567143 - DNA, 75 bp, synthetic construct
  source 1..75: mol_type = other DNA
gtgcctggcgcgaagactgtgcgcggtttctcgcagtttggcgactcttatgtgtatgtcattttcgaagatggc

SEQ ID NO: 567144 - DNA, 75 bp, synthetic construct
  source 1..75: mol_type = other DNA
attatctacggtgaacaaggcaaacctgcattcacgccggacaccccactctggttcaacttaagccacagtggt

SEQ ID NO: 567145 - DNA, 75 bp, synthetic construct
  source 1..75: mol_type = other DNA
atcagtctcgcagaagtgaaaagtgcgctggatgcctcaaaccaggaagcaggcggttcgtcgattgaactggcg

SEQ ID NO: 567146 - DNA, 75 bp, synthetic construct
  source 1..75: mol_type = other DNA
tgagccggattgccgcgccgatgattggcggcatgatcaccgcacctttgctgtcgctgtttattatcccggcgg

SEQ ID NO: 567147 - DNA, 75 bp, synthetic construct
  source 1..75: mol_type = other DNA
gggcaatttattcgcctacaacgtcatgatgacttctggcgcggtaaaccgttaatgccgcaggtggtggtggat

SEQ ID NO: 567148 - DNA, 75 bp, synthetic construct
  source 1..75: mol_type = other DNA
ttggggctggaaaacttaacgctgaaactgtgggtgcccacacgttcgcaggcgtggaaccccagtccactgaaa

SEQ ID NO: 567149 - DNA, 75 bp, synthetic construct
  source 1..75: mol_type = other DNA
caagaagatcgccaggagcaactcgaccgccagcccgtcggcaccggaccgtataaactgtcggaaaatcgcacg

SEQ ID NO: 567150 - DNA, 75 bp, synthetic construct
  source 1..75: mol_type = other DNA
ccctgaagggtaaaaatagcgaggccaaatccgatgagccccaatacggtgctatttttaaacgcgcgttaattt

SEQ ID NO: 567151 - DNA, 75 bp, synthetic construct
  source 1..75: mol_type = other DNA
ttcaatatcgtacgttatcttggcgcgttttatttgctctatctggggggtaaaattctttacgccaccctgaaa

SEQ ID NO: 567152 - DNA, 75 bp, synthetic construct
  source 1..75: mol_type = other DNA
gcattcgtcacgcaatacattcgtaccaaaaagaaactggcaaaagtaggcaactcgctgatcggtctgatgttt

SEQ ID NO: 567153 - DNA, 75 bp, synthetic construct
  source 1..75: mol_type = other DNA
agtctctcgatccaaaagtaacggaagagtttatgaaaaacctttctaatctcactgaaccgccccggttttccg

SEQ ID NO: 567154 - DNA, 75 bp, synthetic construct
  source 1..75: mol_type = other DNA
aattcgcagaaaacatcaagccagctaaattaaggtttgataatgtcactaaaggctataagaaagcacaaagtg

SEQ ID NO: 567155 - DNA, 75 bp, synthetic construct
  source 1..75: mol_type = other DNA
gtagacgttaaccagatgtataatattacagaatgggcctatagaaacggcgttgactctatgatgggtgatcaa

SEQ ID NO: 567156 - DNA, 75 bp, synthetic construct
  source 1..75: mol_type = other DNA
tggcggcgcgtattgaagcctatgacgaagcgcagagtattctggcgcaggaattgcccattttgccgctggcgt

SEQ ID NO: 567157 - DNA, 75 bp, synthetic construct
  source 1..75: mol_type = other DNA
tgtcatcgccgttgactggagtggatattcatctcaggagcatcatgtgctccgcgccagcctgctctgcgatgg

SEQ ID NO: 567158 - DNA, 75 bp, synthetic construct
  source 1..75: mol_type = other DNA
aaaaaaaactggaaaattaaaatagaccttttccctttttgccaaagcataaaaagttatttaagtttattaaga

SEQ ID NO: 567159 - DNA, 75 bp, synthetic construct
  source 1..75: mol_type = other DNA
tttgagcttcctgattatttctggtgcttttgtcacgcagtacatacgtaccaaaaagaaactggctaaagtggg

SEQ ID NO: 567160 - DNA, 75 bp, synthetic construct
  source 1..75: mol_type = other DNA
ctggaaacctcaccggcaaaatatacccgccgtggcgtggaggaggatgtttactggtgggtgccgtccttcaac

SEQ ID NO: 567161 - DNA, 75 bp, synthetic construct
  source 1..75: mol_type = other DNA
caccgggatcgggttacggcaggatgatatagatttgcaggcccgttttaacaaggcgatcgccgcgattcgcgc

SEQ ID NO: 567162 - DNA, 75 bp, synthetic construct
  source 1..75: mol_type = other DNA
acacgccggttgaggcaaaggataatctcaaatccacgcagatgatgagcgtgattgatgcgattggagagggac

SEQ ID NO: 567163 - DNA, 75 bp, synthetic construct
  source 1..75: mol_type = other DNA
ctgcgacgacgaaacagagtcagcataaaaatcaaatttcagccgaagctttcagctttggtgatcccattcctg

SEQ ID NO: 567164 - DNA, 75 bp, synthetic construct
  source 1..75: mol_type = other DNA
tgctgccgtgcatcacagctcaccaatttacgtcaaacgcaatattctggcctcgacatttatcccgcatccgtg

SEQ ID NO: 567165 - DNA, 75 bp, synthetic construct
  source 1..75: mol_type = other DNA
attgaaaaagtggcaaaggtctttgtccgcaatgagcttatcccgttacaggacaggatccgcgagataaacggc

SEQ ID NO: 567166 - DNA, 75 bp, synthetic construct
  source 1..75: mol_type = other DNA
cggttgcaaccagccaacaggtgccgattgaagtcttcttgctggcgtcaaaactgggtaactccgaagcgctgg

SEQ ID NO: 567167 - DNA, 75 bp, synthetic construct
  source 1..75: mol_type = other DNA
gatagtctttcacaacgtgaccgccaggcttttgctgcggagctggagaagtggtggctggaagtgcaacgtagt

SEQ ID NO: 567168 - DNA, 75 bp, synthetic construct
  source 1..75: mol_type = other DNA
gcggcaggcttcgatgttgccgataatgaaattgtacgtcagtgtgagccgggcgatctggtgatcactgctgat

SEQ ID NO: 567169 - DNA, 75 bp, synthetic construct
  source 1..75: mol_type = other DNA
accttgttcttattaatcaggcattgacaacgttgcctcgctttcttcgtgagcgtattgagcagactttcagaa

SEQ ID NO: 567170 - DNA, 75 bp, synthetic construct
  source 1..75: mol_type = other DNA
ctgtgcccgggatatttttcggtctcttctgacggggatatccgggactggcagccggtgctggactatgtcagt

SEQ ID NO: 567171 - DNA, 75 bp, synthetic construct
  source 1..75: mol_type = other DNA
ggattacgcttaatttatgaagcattcagcgccagaaaaggccatgtgaacgacaaagaaaatccctcccggacg

SEQ ID NO: 567172 - DNA, 75 bp, synthetic construct
  source 1..75: mol_type = other DNA
actcccaaattggacaacgtttagaagacctgggcgatgatttgatgcttacgtcaaaatattggcaacgttccg

SEQ ID NO: 567173 - DNA, 75 bp, synthetic construct
  source 1..75: mol_type = other DNA
tatatgtatcaggcacaaagcaatctgtcgattgcaaaatttgctgatatgaatgaggcatctaaggcatcaacc

SEQ ID NO: 567174 - DNA, 75 bp, synthetic construct
  source 1..75: mol_type = other DNA
aaacctattaacgagtgcacgttctgatatgcagtcactgcaattcagaactatatcatcaatatcccttggtaa

SEQ ID NO: 567175 - DNA, 75 bp, synthetic construct
  source 1..75: mol_type = other DNA
gagtagcactgataagaatgcgaaagccaaacttcctcaagacgtgattgactatataaacgatccacgtaatga

SEQ ID NO: 567176 - DNA, 75 bp, synthetic construct
  source 1..75: mol_type = other DNA
ttggcatggacgccatgaaagaggtggtcagaagcaaaatcgccgtctgcggctcggcaaatcgattacggctac

SEQ ID NO: 567177 - DNA, 75 bp, synthetic construct
  source 1..75: mol_type = other DNA
tggcggcgtaaaaatcttgattatctgattaccgaacgctgctatgtttcggtcaaggaagaacgcgcaaatgat

SEQ ID NO: 567178 - DNA, 75 bp, synthetic construct
  source 1..75: mol_type = other DNA
gtgttaacccctcggattacggtaactttgattcccgttatgtgaaagatgttcgacttggttcacggcaatatt

SEQ ID NO: 567179 - DNA, 75 bp, synthetic construct
  source 1..75: mol_type = other DNA
ccgcaacaactggcgaacgacagtccacatcgaaactgaaagagaaaaaatccaccactccgctgccggtggccc

SEQ ID NO: 567180 - DNA, 75 bp, synthetic construct
  source 1..75: mol_type = other DNA
attctgctggatgtgacagcagcagaaaaagggcccacagagcccgtacggattgtgtatgagggaagcgtcagt

SEQ ID NO: 567181 - DNA, 75 bp, synthetic construct
  source 1..75: mol_type = other DNA
caaagacacgctgcgtattgccagcgctcgtctcttcaatctgcagagtaaaaaaacgtgcctggatagtcggca

SEQ ID NO: 567182 - DNA, 75 bp, synthetic construct
  source 1..75: mol_type = other DNA
agcaaatgtctaatacgctgaatttattaacaaatgctcgttcagatatgcagtcgttgcaatatcgaactattc

SEQ ID NO: 567183 - DNA, 75 bp, synthetic construct
  source 1..75: mol_type = other DNA
caaaaaatggccaatttggtagatgccaagatcgctgaagttcagtctagttcggaaaaggataaaaaggtcaaa

SEQ ID NO: 567184 - DNA, 75 bp, synthetic construct
  source 1..75: mol_type = other DNA
ttgctctatctggggagtaaaattctctacgcgaccctgaaaggtaaaaatagcgagaccaaatccgatgagccc

SEQ ID NO: 567185 - DNA, 75 bp, synthetic construct
  source 1..75: mol_type = other DNA
tgcgaaagtctgtaaatatcttgtcgcccgtcaggatgccctgaaggattatgtcagtcttattcaacatccgga

SEQ ID NO: 567186 - DNA, 75 bp, synthetic construct
  source 1..75: mol_type = other DNA
aatgttatcgttcccgcagttggagtggctgcattgtatacgctgaaatccagacctcgtcgtctgattgtctgg

SEQ ID NO: 567187 - DNA, 75 bp, synthetic construct
  source 1..75: mol_type = other DNA
tatttggaggcgctacagcggcggctggcgtgatggctgcaagcaaaaccgctgaatttatggctaatagcttcg

SEQ ID NO: 567188 - DNA, 75 bp, synthetic construct
  source 1..75: mol_type = other DNA
ctattagtgcaatgcaccgtctctctgtagcggaacaatacaaagctattgcacaggctagagagatagcaaaac

SEQ ID NO: 567189 - DNA, 75 bp, synthetic construct
  source 1..75: mol_type = other DNA
gtagatgttaaccagatgaacaatattgaacaatgggcgtataaaaacggcgttgattcaatgatgggggatcaa

SEQ ID NO: 567190 - DNA, 75 bp, synthetic construct
  source 1..75: mol_type = other DNA
aggcgctggcactgcaacaactacacctgataatagtcattctctctttaacacgattaagggattgcttttcga

SEQ ID NO: 567191 - DNA, 75 bp, synthetic construct
  source 1..75: mol_type = other DNA
ttaatggcaacagaaaagctcaattagcccccgttaagggaggatcagggaattccgccactatgggcgctctgt

SEQ ID NO: 567192 - DNA, 75 bp, synthetic construct
  source 1..75: mol_type = other DNA
aacgaaggaatgaagcagaatctttctaatctcactcctgatcaatataaaggcgctggcaccggaacaattaag

SEQ ID NO: 567193 - DNA, 75 bp, synthetic construct
  source 1..75: mol_type = other DNA
gaggctgaatatgtagttgataagaaaactggtaaaggagaatggaagggcggcgatagcggcatcaatacttta

SEQ ID NO: 567194 - DNA, 75 bp, synthetic construct
  source 1..75: mol_type = other DNA
agtaaatgcagaagtgccgctaactatcgaatcagacaccggacgattgagcgaatttatcgacttcaaatcaaa

SEQ ID NO: 567195 - DNA, 75 bp, synthetic construct
  source 1..75: mol_type = other DNA
ggcacgtatgaatagccagatgaaacgcctacaacagcaacaacgtaagattaatggcaacagaaaagctcaatt

SEQ ID NO: 567196 - DNA, 75 bp, synthetic construct
  source 1..75: mol_type = other DNA
aggcgctggcaccggaacaactaagccagataacagcaattccctgtttaacactattaaaggctggtttacgcc

SEQ ID NO: 567197 - DNA, 75 bp, synthetic construct
  source 1..75: mol_type = other DNA
aacgaaggattcttaactaagaaagatttgaaagactttgctgataatcctgctggcctggttagtaaagcagtt

SEQ ID NO: 567198 - DNA, 75 bp, synthetic construct
  source 1..75: mol_type = other DNA
gctgggatatcgtgcgcatgttgcgttccgccaataaggggatgccgattctgttgcttaccgcgcttggcacca

SEQ ID NO: 567199 - DNA, 75 bp, synthetic construct
  source 1..75: mol_type = other DNA
gaacttaacctatctgccgaccaacatactgaaaatatcttcaaacaaattctcggcggttgttctgcagttgta

SEQ ID NO: 567200 - DNA, 75 bp, synthetic construct
  source 1..75: mol_type = other DNA
gctggtatcaggtcccagtgacaaaggaaaccctccaggccccggcggggctgtcttcagtggcagatgccgtat

SEQ ID NO: 567201 - DNA, 75 bp, synthetic construct
  source 1..75: mol_type = other DNA
tgcgtgaaaaatgcggtgaggatttctggttaatgctcgactgctggatgagtcaggacgtgaattatgccacca

SEQ ID NO: 567202 - DNA, 75 bp, synthetic construct
  source 1..75: mol_type = other DNA
ggagcagcgaaggcatacgaaagccctgttatacgaaatgccttgttacgtctggcaaatacgccaaaaggtagc

SEQ ID NO: 567203 - DNA, 75 bp, synthetic construct
  source 1..75: mol_type = other DNA
ctcagacattaggcgaaagagttcctttttttggaaccggtaagaatcggctgaatcaacaacaagcacgagaaa

SEQ ID NO: 567204 - DNA, 75 bp, synthetic construct
  source 1..75: mol_type = other DNA
acgccaccagaaactgaaggaaatgagtgaaggtattgtgtcgatgtttcgtgtggacccggatctggctggtcc

SEQ ID NO: 567205 - DNA, 75 bp, synthetic construct
  source 1..75: mol_type = other DNA
ttgccgcactcattgtgaatgagtatcgagcacagggcggcgtcaccatcgattttcctgatgatgtcagtcggg

SEQ ID NO: 567206 - DNA, 75 bp, synthetic construct
  source 1..75: mol_type = other DNA
tccattatgatgcgcacggtcacttgcgtttaccctttctcttctggtttgtgctattgcttcaggcgcgaacct

SEQ ID NO: 567207 - DNA, 75 bp, synthetic construct
  source 1..75: mol_type = other DNA
agtgaaggcattgtgtcgatgtttcgagtggacccggatctggctggtccattgatggcgatggtcaccaccatg

SEQ ID NO: 567208 - DNA, 75 bp, synthetic construct
  source 1..75: mol_type = other DNA
gtgaatgagtatcgggagcagggcggcggcaccatcgatttccctgatgatgtcagccgtgcacgccagaagctg

SEQ ID NO: 567209 - DNA, 75 bp, synthetic construct
  source 1..75: mol_type = other DNA
aacaggctgtcattctcaacgcaccacgccaccagaaactgaaggagatgagtgaaggcattgtgtcgatgtttc

SEQ ID NO: 567210 - DNA, 75 bp, synthetic construct
  source 1..75: mol_type = other DNA
cgcacggttcgtctgtttactcccaccatgcggtgatcaccttcaccaatacgccattcagcgaattcctgatga

SEQ ID NO: 567211 - DNA, 75 bp, synthetic construct
  source 1..75: mol_type = other DNA
cagcctggtgctggcacacagtgcccgaacattaatggaccgctttaatgaatcactctggtccggtgatttagt

SEQ ID NO: 567212 - DNA, 75 bp, synthetic construct
  source 1..75: mol_type = other DNA
cagcaaaaggtgctggatctggatatcagccagccgggaccacagttatttattctggaggatgtaaccggcgca

SEQ ID NO: 567213 - DNA, 75 bp, synthetic construct
  source 1..75: mol_type = other DNA
aacggcaggcgcgcggcggaaacagcgtcattttgctttctgctacgttatcccaacagcagcgcgacaaactcg

SEQ ID NO: 567214 - DNA, 75 bp, synthetic construct
  source 1..75: mol_type = other DNA
tccttttcgcttaacacaattcacagcggagctggtgcgcctggagagccatgattattaccatttgcgtcatcc

SEQ ID NO: 567215 - DNA, 75 bp, synthetic construct
  source 1..75: mol_type = other DNA
agctattgcagccatctggcgcatccgcaattcccactgatcggcactggtccttttcgcttaacacaattcaca

SEQ ID NO: 567216 - DNA, 75 bp, synthetic construct
  source 1..75: mol_type = other DNA
ttgaatcagtctacggtgaggacgtggtaatgccggaagggtttgcccgcagcgagcaggagcaagtgggcaaat

SEQ ID NO: 567217 - DNA, 75 bp, synthetic construct
  source 1..75: mol_type = other DNA
tatgacagagcgatcagtacggtcacacaatcactgaccacagcagcacaagcatcgcaaaaggaagctcaataa

SEQ ID NO: 567218 - DNA, 75 bp, synthetic construct
  source 1..75: mol_type = other DNA
attaaggcaggatgagaagggtaacactatcgtttccctgccatccggtgattatgctctgaacaagccgggttt

SEQ ID NO: 567219 - DNA, 75 bp, synthetic construct
  source 1..75: mol_type = other DNA
cgcattgttgacgcggtatggggcgaaagctactccgctgggtattcgctggtggttcgcgtaacggcgaacgat

SEQ ID NO: 567220 - DNA, 75 bp, synthetic construct
  source 1..75: mol_type = other DNA
gctggcacgatactggaaaatttgcccgctcttttcagcaactttacctgcacccacaactcaaggttccggaag

SEQ ID NO: 567221 - DNA, 75 bp, synthetic construct
  source 1..75: mol_type = other DNA
tggctgatggtcgcccaacaaactggagccaaagtggtgaaattgccgcttaatgcgcagcggttgccagatgtc

SEQ ID NO: 567222 - DNA, 75 bp, synthetic construct
  source 1..75: mol_type = other DNA
gaaccgatcttcgtgtcacgaacggtgcaatagtgatccacacccaacgcctgaaatcagatccagggggtaatc

SEQ ID NO: 567223 - DNA, 75 bp, synthetic construct
  source 1..75: mol_type = other DNA
tccattatgatgcgcacggacgcctgcgtttaccttttctcttctggattgtgcttttgctacaggcgcgaacct

SEQ ID NO: 567224 - DNA, 75 bp, synthetic construct
  source 1..75: mol_type = other DNA
aatacacccgccgcgggatcgacctagacacttactggtttgtgcaatacggcatgaccacgcagccctacgagt

SEQ ID NO: 567225 - DNA, 75 bp, synthetic construct
  source 1..75: mol_type = other DNA
gctttcccagcaggatttcagccgctttgtgctggattttctggtatttggtaatgcgtttctggaaaagcgtta

SEQ ID NO: 567226 - DNA, 75 bp, synthetic construct
  source 1..75: mol_type = other DNA
cccgttacaggacagaattcgggaaataaacggctggctcggtcaggaggtcatccgctttaaaaactactcact

SEQ ID NO: 567227 - DNA, 75 bp, synthetic construct
  source 1..75: mol_type = other DNA
cgctacaggacaggatccgcgagataaacggctggctcggtcaggaggtcatccgctttaaaaactactcactgg

SEQ ID NO: 567228 - DNA, 75 bp, synthetic construct
  source 1..75: mol_type = other DNA
atgagcaagaaaaaagggaaaacaccgcaacctgcggcaaaaaaaatgaccgccagcgccccgaaaatggaagca

SEQ ID NO: 567229 - DNA, 75 bp, synthetic construct
  source 1..75: mol_type = other DNA
cgctcagcgaggtggccacgaaagacgactttttcaatataaagaaagtcagcgccgccgacctgctcgacgcac

SEQ ID NO: 567230 - DNA, 75 bp, synthetic construct
  source 1..75: mol_type = other DNA
atgatcaccacaacgccacaacgtattggaggctggttgcttgggccattggcctggctgttagtcgccctattg

SEQ ID NO: 567231 - DNA, 75 bp, synthetic construct
  source 1..75: mol_type = other DNA
tttgtgctggattttctggtgttcggtaatgcgtttctggaaaagcgttacagcaccaccggtaagatcatcaga

SEQ ID NO: 567232 - DNA, 75 bp, synthetic construct
  source 1..75: mol_type = other DNA
accgggcgagtacataaggaccgtaaacttctcaccggcgacagtcctttcgcagcgaatgcgttgggtaaactg

SEQ ID NO: 567233 - DNA, 75 bp, synthetic construct
  source 1..75: mol_type = other DNA
cgggcgctatagttgcgctggttgggtttacgggcgtgttactggaaaagtgcgtatggcagacagcagatacat

SEQ ID NO: 567234 - DNA, 75 bp, synthetic construct
  source 1..75: mol_type = other DNA
ggaagtttcagaggtgaagacgcaaggtctatttgtggtctaaaagataatgaggatacttacgaaaatgcggat

SEQ ID NO: 567235 - DNA, 75 bp, synthetic construct
  source 1..75: mol_type = other DNA
gtttatgtactcgcctaacggcaaaaaagacgggcttcagatcatcccattgtcagaagtcgcggcgaaagatga

SEQ ID NO: 567236 - DNA, 75 bp, synthetic construct
  source 1..75: mol_type = other DNA
ctgcggcgacgaaacagagccagcataaaaatcaaacttcagccgaagctttcagctttggtgatcccattcctg

SEQ ID NO: 567237 - DNA, 75 bp, synthetic construct
  source 1..75: mol_type = other DNA
atgcctaataatgcgggaggatttggcgatgtagttaaagcggctaaagtttttgtcaggaatgagttagggcat

SEQ ID NO: 567238 - DNA, 75 bp, synthetic construct
  source 1..75: mol_type = other DNA
aagttagaaaacaattggctgcattaaaattatgtgaagatcgtctgcgtaaatgtggtttcttttggcgtttat

SEQ ID NO: 567239 - DNA, 75 bp, synthetic construct
  source 1..75: mol_type = other DNA
tttgtgcaggactatctggtatttggtaacgcctacctggagaaacgcacgaaccgattcggtgaagttatcgcc

SEQ ID NO: 567240 - DNA, 75 bp, synthetic construct
  source 1..75: mol_type = other DNA
atgccgtccgcgcctggtcggctgaagataatcaggatgtcgttgccgcactcattgtgaatgagtatcgagcac

SEQ ID NO: 567241 - DNA, 75 bp, synthetic construct
  source 1..75: mol_type = other DNA
aatcactgcaccgcagaattggttcctgcggatccgcagaacaccgcgcacgctgggctgtggataggtaaaagt

SEQ ID NO: 567242 - DNA, 75 bp, synthetic construct
  source 1..75: mol_type = other DNA
ctggtggagcaggcaaatagcgttaatgaatgccttgatgccaactatccggcctccactgcaacattgattcag

SEQ ID NO: 567243 - DNA, 75 bp, synthetic construct
  source 1..75: mol_type = other DNA
taaaagccaagcttcagccgaagcattcagcttcggtgatcccattccagtacttgaccgccgcgaactgctgga

SEQ ID NO: 567244 - DNA, 75 bp, synthetic construct
  source 1..75: mol_type = other DNA
gtgttccgccacagatgatggggattatgccgaataatgttggggggtttggggatgtggaaaaagcgagtttag

SEQ ID NO: 567245 - DNA, 75 bp, synthetic construct
  source 1..75: mol_type = other DNA
ccgcgtgcaaaaggtcgtgcggatcgcatcctgaagcgcaccagccacatcactgtggttgtgtccgatcgctga

SEQ ID NO: 567246 - DNA, 75 bp, synthetic construct
  source 1..75: mol_type = other DNA
aagtggcaacgaaggacgatttttttaatatcaaaaaagccagcgccgctgacctgctggacgcgcaccgcatcc

SEQ ID NO: 567247 - DNA, 75 bp, synthetic construct
  source 1..75: mol_type = other DNA
ttacgtcgaatgcatcagtaacggcagatggtatgagccaccggtcagctttaccggtctggcaaaaagcctgcg

SEQ ID NO: 567248 - DNA, 75 bp, synthetic construct
  source 1..75: mol_type = other DNA
ggggatgtggagaaggctagtaaggtttttgtgataaatgaattaattcctttgcaaaaacgatttatggaaata

SEQ ID NO: 567249 - DNA, 75 bp, synthetic construct
  source 1..75: mol_type = other DNA
ctgattttcgggaaacgctgaatacccgtcgtgaaaaatcgtggcacaagaccacggtcggggaagtggtgaagg

SEQ ID NO: 567250 - DNA, 75 bp, synthetic construct
  source 1..75: mol_type = other DNA
agttttactggctatcacgggcgtaccgggctccacgaactgttgctgattgacgatcgcatccggacggcaata

SEQ ID NO: 567251 - DNA, 75 bp, synthetic construct
  source 1..75: mol_type = other DNA
tatgggcatccctccttttctgctttccacctcattactggctgttctggcccagcgactggttcgcacgttgtg

SEQ ID NO: 567252 - DNA, 75 bp, synthetic construct
  source 1..75: mol_type = other DNA
cggtattgaaaattgatattggtgcattctggcgtctgctcagtatggaccaggggcaaagctggaagctgatga

SEQ ID NO: 567253 - DNA, 75 bp, synthetic construct
  source 1..75: mol_type = other DNA
ctgaacatctccaactcaattgttcatggtatggttacatcttaccaggttggttatggcgactacgtctggacc

SEQ ID NO: 567254 - DNA, 75 bp, synthetic construct
  source 1..75: mol_type = other DNA
tccaaacagcctgaacccgtatgcttcttactctgaagatggctggaaccgtgttgataacgctaatgcattcca

SEQ ID NO: 567255 - DNA, 75 bp, synthetic construct
  source 1..75: mol_type = other DNA
gtcctgaacaacggttctgattgggaaaccaccaaaacttccctgatcgataccctggctatcaacagcggttct

SEQ ID NO: 567256 - DNA, 75 bp, synthetic construct
  source 1..75: mol_type = other DNA
atgaagcagagatgttaatggcagatgataccttcatggaaggtatttataaagagtgcattaaaaaatgcaagt

SEQ ID NO: 567257 - DNA, 75 bp, synthetic construct
  source 1..75: mol_type = other DNA
agcacaagcatcagcagcagttccagaagcagggcaaggcgatcaacgacaaggtgcgcctgtactccaggatcg

SEQ ID NO: 567258 - DNA, 75 bp, synthetic construct
  source 1..75: mol_type = other DNA
tcgagtaaactctaagtatcgattattctttgaatggaatgatggcgcacataatgttcatttgtctgcacatga

SEQ ID NO: 567259 - DNA, 75 bp, synthetic construct
  source 1..75: mol_type = other DNA
ttttacttcctgctgcaatggccaaagtggccgaagaggcgggtgtttataaagcaacgaaacatccgcttaaga

SEQ ID NO: 567260 - DNA, 75 bp, synthetic construct
  source 1..75: mol_type = other DNA
atggatgagctattctggccgcagcctgatggacaaagcgtttatcatggtgctgccggtcgcgatgtttgttgc

SEQ ID NO: 567261 - DNA, 75 bp, synthetic construct
  source 1..75: mol_type = other DNA
catcacctggggccagttggcgaaaaactggctgaacgtctattttggcaacctggtcggcgcgttgttatttgt

SEQ ID NO: 567262 - DNA, 75 bp, synthetic construct
  source 1..75: mol_type = other DNA
gtgactacggcaatggcgcatctcctgctgatgatgttgcgttagccttcatcgatgatgacacttctgattatc

SEQ ID NO: 567263 - DNA, 75 bp, synthetic construct
  source 1..75: mol_type = other DNA
caactctgacgcgtggggcttcggtttgaaagccggttacgacttcaaactgggtgatgctggttacgtgactcc

SEQ ID NO: 567264 - DNA, 75 bp, synthetic construct
  source 1..75: mol_type = other DNA
gccggcttcatggtcctctggcgacgactttcgggccggtgcttgcactgatggataatcagaacaacagcgcgg

SEQ ID NO: 567265 - DNA, 75 bp, synthetic construct
  source 1..75: mol_type = other DNA
ctccgtccataccgtcagttgttgctggcgggtattgttttcagtccggcaactgtcggcggtgaacgaagtgtc

SEQ ID NO: 567266 - DNA, 75 bp, synthetic construct
  source 1..75: mol_type = other DNA
gccgaacagcctgacccctggtgccactatcgaagctaacgattggggtcgtattattgacaacaagggtaatcc

SEQ ID NO: 567267 - DNA, 75 bp, synthetic construct
  source 1..75: mol_type = other DNA
cttattacgacaatccaacgactgctcttgactggagcaatatggatgcaccaggtactgtagatggtaactatg

SEQ ID NO: 567268 - DNA, 75 bp, synthetic construct
  source 1..75: mol_type = other DNA
agtctaaacggtaccatttctacttattacttgaatcatgattacgctagcggttctgttaaccaggtagatatc

SEQ ID NO: 567269 - DNA, 75 bp, synthetic construct
  source 1..75: mol_type = other DNA
atgattatcttcaccttacgccgcattttgttattgattgtcaccttgttcctgctgaccttcgttggcttcagt

SEQ ID NO: 567270 - DNA, 75 bp, synthetic construct
  source 1..75: mol_type = other DNA
gaacggcgcgtcgccaatgctcttggcgctctcccctgcattgcctgctatatgcatggagtaatatctaatgag

SEQ ID NO: 567271 - DNA, 75 bp, synthetic construct
  source 1..75: mol_type = other DNA
taccgcgccgggttgtcacaaaaagcaattgcccctttgtagatggcaccaccagcatgcagcaccggctgaagt

SEQ ID NO: 567272 - DNA, 75 bp, synthetic construct
  source 1..75: mol_type = other DNA
tccccgggcttgttgctcaggggatacagcagatatgcagtgcccctcagtattattttttgttgtcgctggcag

SEQ ID NO: 567273 - DNA, 75 bp, synthetic construct
  source 1..75: mol_type = other DNA
atattcacgggcaacatagcccagtagtatccctgcaccatatcttcgggagaacggcagagaacgcgcataaat

SEQ ID NO: 567274 - DNA, 75 bp, synthetic construct
  source 1..75: mol_type = other DNA
ttttattattgatcgtgactttattcttactgacctttgtcggtttcagtttgagttatttcacgccacatgcgc

SEQ ID NO: 567275 - DNA, 75 bp, synthetic construct
  source 1..75: mol_type = other DNA
gattggaaaagtttttccgtaatggaaaatccacggcaggcattcctgctgaactgattaatgcgatttcatgca

SEQ ID NO: 567276 - DNA, 75 bp, synthetic construct
  source 1..75: mol_type = other DNA
cagcgtgtaacagtccgtcaccccgtgctcaaagcgccgtcctgtcagatgtggcacacagcggaatttgtgaat

SEQ ID NO: 567277 - DNA, 75 bp, synthetic construct
  source 1..75: mol_type = other DNA
accgttcgccctccggggtgcctatcacgaagccgcacgactccgcaggcgcacaccgccgggcatgcaccagaa

SEQ ID NO: 567278 - DNA, 75 bp, synthetic construct
  source 1..75: mol_type = other DNA
atgaaagctcacgtttttgttatttctatgcttactggcattgtcgtcacctatgccgtgttacttcttggttgc

SEQ ID NO: 567279 - DNA, 75 bp, synthetic construct
  source 1..75: mol_type = other DNA
ggcaggattagctgttagcatatcattatattcaataattaaatttaaaggaaataaaagtataattacaggagt

SEQ ID NO: 567280 - DNA, 75 bp, synthetic construct
  source 1..75: mol_type = other DNA
atgaacgacatcaggaggatcagcgacaaagacctgaagaaaatgattgagtcggcacagcagctgctttcacga

SEQ ID NO: 567281 - DNA, 75 bp, synthetic construct
  source 1..75: mol_type = other DNA
cagttcccggatttaacgccacgtcatattgaccatctgaaaacccttattgcgaagggcgcaaatcagtgtgcg

SEQ ID NO: 567282 - DNA, 75 bp, synthetic construct
  source 1..75: mol_type = other DNA
cgcaaaaggcgcgaatcagtgtgcgcggacaggggataaattgccggagttactcgatgaatatatccgaactac

SEQ ID NO: 567283 - DNA, 75 bp, synthetic construct
  source 1..75: mol_type = other DNA
atatcgattatctgaaaacccttatcgcaaaaggcgcgaatcagtgtgcgcggacaggggataaattgccggagt

SEQ ID NO: 567284 - DNA, 75 bp, synthetic construct
  source 1..75: mol_type = other DNA
catcactatatgtgcctgacaatatgaaaaatgccagttggttttccaaggctgctgacgtttttatagcgatat

SEQ ID NO: 567285 - DNA, 75 bp, synthetic construct
  source 1..75: mol_type = other DNA
aataagcgagggcaactggatctggatgcctggcgcgatttttacatatcgtatctgaggagaagtaaaaacgat

SEQ ID NO: 567286 - DNA, 75 bp, synthetic construct
  source 1..75: mol_type = other DNA
ttggcgaaaacatgatgcgcgctgatattggcgtggctaccgcggagatgggggattatctgatccacgccggac

SEQ ID NO: 567287 - DNA, 75 bp, synthetic construct
  source 1..75: mol_type = other DNA
gagcagggaggatactgtgaggatggttcccttagacttaaatatcaagtcctctatgtaatggatgaatttgct

SEQ ID NO: 567288 - DNA, 75 bp, synthetic construct
  source 1..75: mol_type = other DNA
ttgaggaggcgaaggaattacatgaagacctggtacgcagccacataagcaaggccttaagtggcgaaaagatga

SEQ ID NO: 567289 - DNA, 75 bp, synthetic construct
  source 1..75: mol_type = other DNA
ggctatgcttcatgccggaaactttcggaaaaacgcgaattcgtcaaccaataattttcgggaaattgcggaaac

SEQ ID NO: 567290 - DNA, 75 bp, synthetic construct
  source 1..75: mol_type = other DNA
cgggtaaacgttcgcgcgcagtgagcgcgaagaaaaaagcgattcttggtgcggcactggacactttttcacaat

SEQ ID NO: 567291 - DNA, 75 bp, synthetic construct
  source 1..75: mol_type = other DNA
ggcgctgattgccggttgggtcaaaagcggcaaactcgcaccgattgacccgcagcatctgatttttatgatttg

SEQ ID NO: 567292 - DNA, 75 bp, synthetic construct
  source 1..75: mol_type = other DNA
agcggcaaactcgcgccgattgatccgcagcatttgatttttatgatttgggcttccactcaacattacgccgat

SEQ ID NO: 567293 - DNA, 75 bp, synthetic construct
  source 1..75: mol_type = other DNA
gttgataatgatagagtaatcggagggataacacctcgctgttcagaaagagctgttgagctttataaaattttt

SEQ ID NO: 567294 - DNA, 75 bp, synthetic construct
  source 1..75: mol_type = other DNA
gagcctgatttagatgcattagtaaataaagcggtgtctgatggatatttgaaagcttcgcttgtcgctgaatca

SEQ ID NO: 567295 - DNA, 75 bp, synthetic construct
  source 1..75: mol_type = other DNA
tcgataagcaattcccaggttttgaacatgagatccagggcgttaacgtcgatgaaaacggggacttctgggtca

SEQ ID NO: 567296 - DNA, 75 bp, synthetic construct
  source 1..75: mol_type = other DNA
acagcgatcaagagtgctggcacccagcaattacgagaaagaattagccgtgttttgggcgacgttattacacca

SEQ ID NO: 567297 - DNA, 75 bp, synthetic construct
  source 1..75: mol_type = other DNA
ctgccatgcttcagggtagccaacctgtaagccaaagtaagacttacaggttggattttgggcaatggctggaac

SEQ ID NO: 567298 - DNA, 75 bp, synthetic construct
  source 1..75: mol_type = other DNA
agataacggttgcgcctggtaatggtattgatggtaatggtattgaacaggccacacactggatgccgctaccgg

SEQ ID NO: 567299 - DNA, 75 bp, synthetic construct
  source 1..75: mol_type = other DNA
gttattcttgccctgctggtactggcaccgctgctctcctggctgccgctttccgccatggctgccctgctgttg

SEQ ID NO: 567300 - DNA, 75 bp, synthetic construct
  source 1..75: mol_type = other DNA
tgcaaaaagttggcgcattatttatggcgctaccgaccattaacgtgggcgatgccgcaattggtattgtaacgc

SEQ ID NO: 567301 - DNA, 75 bp, synthetic construct
  source 1..75: mol_type = other DNA
tcacgctaagctggaactccattcgtactctgctgcctgcggcattttccatggcaatgctcggagcgatcgaat

SEQ ID NO: 567302 - DNA, 75 bp, synthetic construct
  source 1..75: mol_type = other DNA
tgacgaacttggaatatccttgatatctgtgcggggtactgggtttgaattactatcatctttatttcactcaga

SEQ ID NO: 567303 - DNA, 75 bp, synthetic construct
  source 1..75: mol_type = other DNA
gcctattactctaaatttacttttgaaatcgatttagtcctgtcaggagccgtaaggtattttgatcagatagct

SEQ ID NO: 567304 - DNA, 75 bp, synthetic construct
  source 1..75: mol_type = other DNA
attgaacgattccttgatgccataagaacagatattctttttgcaaaaaatgtaattctaattgagggggatgca

SEQ ID NO: 567305 - DNA, 75 bp, synthetic construct
  source 1..75: mol_type = other DNA
gctgatatgcttgctgaatacgagcgcagaaaaggtattctggacacgcggttgtcagagctggaaaaaaatggc

SEQ ID NO: 567306 - DNA, 75 bp, synthetic construct
  source 1..75: mol_type = other DNA
cgaaagactacgccggtttcccggtaggtgggcagttccttgtttcggaaaacccggacgtggttaaccatcatc

SEQ ID NO: 567307 - DNA, 75 bp, synthetic construct
  source 1..75: mol_type = other DNA
gcgctgctgggggcatcgccaggggcgtcaaccgccgcgccgattatgttgaatctgctggaaaaagtatttggc

SEQ ID NO: 567308 - DNA, 75 bp, synthetic construct
  source 1..75: mol_type = other DNA
tccggcacaacaactggcaggttgctgccacgctccgtttacctgaaggatttgatgaccggcataaatacccgg

SEQ ID NO: 567309 - DNA, 75 bp, synthetic construct
  source 1..75: mol_type = other DNA
cttgattttgcgtcaacattaggtatggataaatcatgtgcatcctctgatgtttcgatggttacggatgctgct

SEQ ID NO: 567310 - DNA, 75 bp, synthetic construct
  source 1..75: mol_type = other DNA
gtcttccattatctgattggggatatttcactggcagcagagaggaatgaactctggtccctgtgggagcgtaat

SEQ ID NO: 567311 - DNA, 75 bp, synthetic construct
  source 1..75: mol_type = other DNA
tctgtcagtcgttagggttcactggtgattttaataaattcactctagcaaagatggttcgatatcgtagtgaga

SEQ ID NO: 567312 - DNA, 75 bp, synthetic construct
  source 1..75: mol_type = other DNA
caacacaattgggtaaaattaccctcgaggttgatcaagataaatcctcggaagaacgcctgactttccgaattc

SEQ ID NO: 567313 - DNA, 75 bp, synthetic construct
  source 1..75: mol_type = other DNA
cctcgatgaacgcgaaagtttttctaacatgcgccgcctggcctggcagaacggtcattactttaccttgcgtac

SEQ ID NO: 567314 - DNA, 75 bp, synthetic construct
  source 1..75: mol_type = other DNA
agacactgtaaatgaaaaccttacaagagtagcatttcatagtttacaatcaccaaatgggaaaatagatttctc

SEQ ID NO: 567315 - DNA, 75 bp, synthetic construct
  source 1..75: mol_type = other DNA
cgctcaactccaccgatatgcggctggtctggcaggttccttacggcactttgctgctggatacattgcaaaata

SEQ ID NO: 567316 - DNA, 75 bp, synthetic construct
  source 1..75: mol_type = other DNA
caggggattattcaggcgacgatcaataacgagctgtatgagatccgcatgttccgcagccaggtcgcgccgcgc

SEQ ID NO: 567317 - DNA, 75 bp, synthetic construct
  source 1..75: mol_type = other DNA
cagagatgttgcaacaggccaacgccctcgatgaacgcgaaagtttttctaacatgcgccgcctggcctggcaga

SEQ ID NO: 567318 - DNA, 75 bp, synthetic construct
  source 1..75: mol_type = other DNA
gcaattggcgagaagtatggcaaaagcgtgggccaggttgttctgcgctggatctaccaacgaggcattgtttca

SEQ ID NO: 567319 - DNA, 75 bp, synthetic construct
  source 1..75: mol_type = other DNA
cgataagatttgcgaaagtttaacaaagcttgccttaaaaaaattagaccatcatatggtgagtgacatggattt

SEQ ID NO: 567320 - DNA, 75 bp, synthetic construct
  source 1..75: mol_type = other DNA
atcgaaatgacgcatatacttaaagcaaatgcgtttattatattgtataacctaatagaagccactatatctaat

SEQ ID NO: 567321 - DNA, 75 bp, synthetic construct
  source 1..75: mol_type = other DNA
ggccgaccttatcgccttcaacaaagtggctcctgcggtgaaccagattgaagttaaccccttcaaccagcagct

SEQ ID NO: 567322 - DNA, 75 bp, synthetic construct
  source 1..75: mol_type = other DNA
gcgtgggtcaggttgttttgcgctggatctaccaacgaggcatcgtttcgctggcgaaatcagtacgaaaagaac

SEQ ID NO: 567323 - DNA, 75 bp, synthetic construct
  source 1..75: mol_type = other DNA
gtgccaaagcccagttcgaacgctctctgaatcggctgcaattagattacgttgacctgtatttgattcatcagc

SEQ ID NO: 567324 - DNA, 75 bp, synthetic construct
  source 1..75: mol_type = other DNA
tgctgtttgggccatttgccaccttctcaaccaaattcctcaaaaacggttcattgtgggatctgatgagttcca

SEQ ID NO: 567325 - DNA, 75 bp, synthetic construct
  source 1..75: mol_type = other DNA
gccggcttcacggtcctctggcgacgactttcgggccggtgcttgcactgatggataatcagaacaacagtgcgg

SEQ ID NO: 567326 - DNA, 75 bp, synthetic construct
  source 1..75: mol_type = other DNA
ccggcagatggcctggtgtgggtgacgtcggcctttgaccagctctcctcaccagggctgaagccgccgctgccg

SEQ ID NO: 567327 - DNA, 75 bp, synthetic construct
  source 1..75: mol_type = other DNA
ggtgtgagtgccggtttctggcaggctaacggcccggggctgctggcgtattatgcctccgggcttattacccat

SEQ ID NO: 567328 - DNA, 75 bp, synthetic construct
  source 1..75: mol_type = other DNA
ggtcatcagacctggtgagtttgacttaaagtatggtagcactccattgcagggcactttaggtttagaatttgg

SEQ ID NO: 567329 - DNA, 75 bp, synthetic construct
  source 1..75: mol_type = other DNA
catgcgggaatggtcacagcgtgacggtgtgagtgccggtttctggcaggccaacggcccgacgctgctggcgta

SEQ ID NO: 567330 - DNA, 75 bp, synthetic construct
  source 1..75: mol_type = other DNA
cgtctgcaacagattgccggctcttctgacccgcaggccatgatgcagttgctggcacagacagtattgcagggg

SEQ ID NO: 567331 - DNA, 75 bp, synthetic construct
  source 1..75: mol_type = other DNA
ttagataaccctaatactaaatatgccgttcttaccaatgctgccgcaaatgcgcttggcgccgcaggagggttt

SEQ ID NO: 567332 - DNA, 75 bp, synthetic construct
  source 1..75: mol_type = other DNA
atgaacattcaaccgaccatacaatccggaattaccacacaacacaatcaacatcatcacacagaacaaacgccc

SEQ ID NO: 567333 - DNA, 75 bp, synthetic construct
  source 1..75: mol_type = other DNA
tggtcagattaatactgcaaatacccaggcagcgatggcttcccgacaaaaccagccactggagcaacgcttgta

SEQ ID NO: 567334 - DNA, 75 bp, synthetic construct
  source 1..75: mol_type = other DNA
ctggcaggaagagcaggggacattgcttctctggggaggagacccctcgcagccggaaaacgcagactggctgac

SEQ ID NO: 567335 - DNA, 75 bp, synthetic construct
  source 1..75: mol_type = other DNA
cagcgacacccaaaaccagaggatgtggtaatcgatatcgaaagcaatggctcaccacatcataacccatcaaat

SEQ ID NO: 567336 - DNA, 75 bp, synthetic construct
  source 1..75: mol_type = other DNA
atgaacattcaaccaaccatacaatctggaatcacctcacaaaacaatcaacatcatcaaacagaacaaataccc

SEQ ID NO: 567337 - DNA, 75 bp, synthetic construct
  source 1..75: mol_type = other DNA
tcactaatgcaatggcgaatgcagctggtgcggtagcgggacatacgctatctcaatataccggaacagacgcaa

SEQ ID NO: 567338 - DNA, 75 bp, synthetic construct
  source 1..75: mol_type = other DNA
tgaaatggcggtgccgcgtaatctgcaagaacgcagcgcaagacaatccactggcagagtaggggtggaaatggt

SEQ ID NO: 567339 - DNA, 75 bp, synthetic construct
  source 1..75: mol_type = other DNA
gtttaacctgatgccctggccgcgggaagaagttattaacaccactgtgcggctgcgcgccagccagtttaatct

SEQ ID NO: 567340 - DNA, 75 bp, synthetic construct
  source 1..75: mol_type = other DNA
ctttggtggtattaccgctacagctgccatcgcgcgttctgccgctaacgtccgtgccggggcaacttcccctat

SEQ ID NO: 567341 - DNA, 75 bp, synthetic construct
  source 1..75: mol_type = other DNA
ttttgaataccaccacggcttgctggagaaaatgtggaaagagatcttaaaaaatcatgcccacgacagcatcgg

SEQ ID NO: 567342 - DNA, 75 bp, synthetic construct
  source 1..75: mol_type = other DNA
cggtgaagagaagaaaacctttgccattacgttgctgcgtggcgtgggcttactgggcaaagaagatctgctttt

SEQ ID NO: 567343 - DNA, 75 bp, synthetic construct
  source 1..75: mol_type = other DNA
aaaatcatgcccacgacagtatcggctgctgctgtagtgacaaagttcatcgcgaaatcgtcgcccgcttcgaac

SEQ ID NO: 567344 - DNA, 75 bp, synthetic construct
  source 1..75: mol_type = other DNA
cggaatatccggatatcggttctaacttcttcccggccgtgctgtccgtcattatggtgttctggattggcgcga

SEQ ID NO: 567345 - DNA, 75 bp, synthetic construct
  source 1..75: mol_type = other DNA
tttccctggtgctgacggtttactgcctgcatcaacgttatcttaatcgcactatgccggtaggcttgccgggtc

SEQ ID NO: 567346 - DNA, 75 bp, synthetic construct
  source 1..75: mol_type = other DNA
cccgtgctgttaacaagcgcggccataccatcggcatcacacagaacgtgaaggccgaaaacgtccaggctgcaa

SEQ ID NO: 567347 - DNA, 75 bp, synthetic construct
  source 1..75: mol_type = other DNA
ccacgaaagcgacctggatatcagggaacattacacagatacagcgggtttcaccgatcatgtttttgctctgat

SEQ ID NO: 567348 - DNA, 75 bp, synthetic construct
  source 1..75: mol_type = other DNA
tcgctcgagcagcggcatgaggcactactcagggaactggccgaactggagagccagaaccagcggcttcgcatg

SEQ ID NO: 567349 - DNA, 75 bp, synthetic construct
  source 1..75: mol_type = other DNA
atcaggaaacactgaactatttaaatgaatcatgcgcagagggtatagacgctgataaagatctcatcaggaaga

SEQ ID NO: 567350 - DNA, 75 bp, synthetic construct
  source 1..75: mol_type = other DNA
tgccatcaatgcgccgacaggattttcgcttaatgagatatttgatgaaggcggctgctgttatgttatcggctc

SEQ ID NO: 567351 - DNA, 75 bp, synthetic construct
  source 1..75: mol_type = other DNA
cgtcatggacccggatacggcggaatgggtggcaagaatgtcaggcactattctggtggatgatgaactccgtaa

SEQ ID NO: 567352 - DNA, 75 bp, synthetic construct
  source 1..75: mol_type = other DNA
tcacttcaacaaatgtttgatgaaggcggctgttgctatgttatcggctccatgcgaaacagcaaaattattaca

SEQ ID NO: 567353 - DNA, 75 bp, synthetic construct
  source 1..75: mol_type = other DNA
aatgaccagccgcaatacataaccataaaagaattcaagacccaacacgcagcaattatcggcacaactggttca

SEQ ID NO: 567354 - DNA, 75 bp, synthetic construct
  source 1..75: mol_type = other DNA
accattcaggggttgagctacttttttaagtcactcgataacaacatactgtttagagttcctctgtggatcatg

SEQ ID NO: 567355 - DNA, 75 bp, synthetic construct
  source 1..75: mol_type = other DNA
catgcgaaacagcaaaattattaccgcacagcggatgctgctggttcgcctgtaccagttagcagaaaggcgcga

SEQ ID NO: 567356 - DNA, 75 bp, synthetic construct
  source 1..75: mol_type = other DNA
taaatctcatgccagtattggctttgctgctgatctgctttaatagccatgctgcctttgttctcaatagtacgc

SEQ ID NO: 567357 - DNA, 75 bp, synthetic construct
  source 1..75: mol_type = other DNA
aaaaataccgcccatgcacaacaactcggcatcggaaccgtttatcaggaagtcaacctgctacccaatatgtcg

SEQ ID NO: 567358 - DNA, 75 bp, synthetic construct
  source 1..75: mol_type = other DNA
tgcaatacaccgatgagctgtacgccgaaaccccgtgggctgacgatgtaaaagcgtttctctgttacaacgcca

SEQ ID NO: 567359 - DNA, 75 bp, synthetic construct
  source 1..75: mol_type = other DNA
ccgtgtaacagacgtaccccgccccattgctgtttatctttccgaactgaaataccatttatccaggccagcgct

SEQ ID NO: 567360 - DNA, 75 bp, synthetic construct
  source 1..75: mol_type = other DNA
tcgcttaagcacatatttgatgagggcggctgctgttatgttgtcggctccatgcgaaacagcaaaattattacc

SEQ ID NO: 567361 - DNA, 75 bp, synthetic construct
  source 1..75: mol_type = other DNA
atgaccgaccaacaccaggagatcctccgcaccgaaggattaagtaaatttttccccggcgtcaaagcgttagac

SEQ ID NO: 567362 - DNA, 75 bp, synthetic construct
  source 1..75: mol_type = other DNA
aagaaattgctttagttaactcaattaatgccaccaaaggattttcattaaaagaggtttttgatgaaggtggtt

SEQ ID NO: 567363 - DNA, 75 bp, synthetic construct
  source 1..75: mol_type = other DNA
atcctgaccgtcaccacttcaccggcagcgccagccacagacaacagcccgcaggccaccgcgccggcatccgcc

SEQ ID NO: 567364 - DNA, 75 bp, synthetic construct
  source 1..75: mol_type = other DNA
ctttgaacttgctcgacagcaaaaagcccagcgtcagttagccgataaagtgaaatcagcgttgcgttatcccat

SEQ ID NO: 567365 - DNA, 75 bp, synthetic construct
  source 1..75: mol_type = other DNA
cgttatcccatcatcattttagcgatggcaatcatggtggttgtggcaatgctgcattttgttctgccggagttt

SEQ ID NO: 567366 - DNA, 75 bp, synthetic construct
  source 1..75: mol_type = other DNA
atacgggttacatattacgcatctgcgcgattgccgcactgggcggaatattatttggctacgatactgctgtta

SEQ ID NO: 567367 - DNA, 75 bp, synthetic construct
  source 1..75: mol_type = other DNA
ctggctgataatgccagcgatcagggtgagtgctggcccagctaccagcatattgctgaccagtgcgagattagc

SEQ ID NO: 567368 - DNA, 75 bp, synthetic construct
  source 1..75: mol_type = other DNA
gctaaagttcgtttcacgttattagcgactgcgtgtggctgttttatagcaggtgctggcgggatggcagccttg

SEQ ID NO: 567369 - DNA, 75 bp, synthetic construct
  source 1..75: mol_type = other DNA
acgctttctgaagggctggctctgctggcggaacagcatcccagtaagcagtggcaagcgttgctgcaatcactg

SEQ ID NO: 567370 - DNA, 75 bp, synthetic construct
  source 1..75: mol_type = other DNA
caggcgatgatccgcacaggtgaactgaccggtaagctggatgaatgctgctttgaactggcgcgtcagcaaaaa

SEQ ID NO: 567371 - DNA, 75 bp, synthetic construct
  source 1..75: mol_type = other DNA
tggcggagcaacatccgagcaggcaatggcaggcgttattgcaatcgctggcacacgatctcgaacagggtattg

SEQ ID NO: 567372 - DNA, 75 bp, synthetic construct
  source 1..75: mol_type = other DNA
ctggctgctggtgttgttcggctttctgctggcgatagccaataagttgctgatgcgccgccctacctggcttat

SEQ ID NO: 567373 - DNA, 75 bp, synthetic construct
  source 1..75: mol_type = other DNA
catcgggataacacgctggcgctggcagataatcttgcagccttactggaaccggcgttgctggttattacagga

SEQ ID NO: 567374 - DNA, 75 bp, synthetic construct
  source 1..75: mol_type = other DNA
acggtcaacccatctggctggcgctaaaaaatgccggtgagtttagcccactctgtttgcaattagtgagaacag

SEQ ID NO: 567375 - DNA, 75 bp, synthetic construct
  source 1..75: mol_type = other DNA
ttggcaacaacacctggcgcgctctgagcggcggtgtaggtgctgaagagctgaaagattttcctggttacggta

SEQ ID NO: 567376 - DNA, 75 bp, synthetic construct
  source 1..75: mol_type = other DNA
atctgttattcatccggcagggtcagggcaaaagtgccagcggtaaaccactgccggtgataactatcacacgta

SEQ ID NO: 567377 - DNA, 75 bp, synthetic construct
  source 1..75: mol_type = other DNA
aatggaccattacgactctgacacatactgtcagcccggataacggttttacgaccagtatcgaacttgaagtga

SEQ ID NO: 567378 - DNA, 75 bp, synthetic construct
  source 1..75: mol_type = other DNA
agcagaagaaagagccagaagcgaagcagggcgattacctggtgggtacggatgaaaacgtgctggtacttaatc

SEQ ID NO: 567379 - DNA, 75 bp, synthetic construct
  source 1..75: mol_type = other DNA
atgaaattgatcattaccgaagattaccaggaaatgagccttgtcgcggcgcatcatctgcttggttatatgtca

SEQ ID NO: 567380 - DNA, 75 bp, synthetic construct
  source 1..75: mol_type = other DNA
ctgttgttcaaatggcgacaacaatggcgcgagggaaagctgctattaccttcttcagagagcccccagctactt

SEQ ID NO: 567381 - DNA, 75 bp, synthetic construct
  source 1..75: mol_type = other DNA
gggtacggatgaaaacgtgctggtactcaatcgcacctatgccaatcggagtaacgccgaacgggcagcgaaaat

SEQ ID NO: 567382 - DNA, 75 bp, synthetic construct
  source 1..75: mol_type = other DNA
cggcaggggcagggcaaaagcgccactggtaaaccactgccagtgatcactatcacacgcaaggacggcgacagt

SEQ ID NO: 567383 - DNA, 75 bp, synthetic construct
  source 1..75: mol_type = other DNA
ctgactatccgggcgagaagtgctgattttcgggaaacgctgaatacccgccgtgaaaagtcgtggcacaagacc

SEQ ID NO: 567384 - DNA, 75 bp, synthetic construct
  source 1..75: mol_type = other DNA
acaaaggcaacaaaactccagcattcagcatcagtattgaaggcaaggatatcaccactgtgctggacaaccgcc

SEQ ID NO: 567385 - DNA, 75 bp, synthetic construct
  source 1..75: mol_type = other DNA
ggaaatgccagtgaaagtcagtggctttaaacagctgatagatgatgcggaatggaccattacgactctgacaca

SEQ ID NO: 567386 - DNA, 75 bp, synthetic construct
  source 1..75: mol_type = other DNA
gcagtgggaacgcctgcaacgcggtgttgcgtcattctcgctacgactggcggaagggcgggcagatctctacac

SEQ ID NO: 567387 - DNA, 75 bp, synthetic construct
  source 1..75: mol_type = other DNA
caccacggtgaagagtaagcgcagaacgaagaagcagaagaaagagccagaagcgaagcagggcgattacctggt

SEQ ID NO: 567388 - DNA, 75 bp, synthetic construct
  source 1..75: mol_type = other DNA
actgctatttctataatttcgatgaaattccctttcgcggcaaagagggagaaggtgtaacgattaccaatctgc

SEQ ID NO: 567389 - DNA, 75 bp, synthetic construct
  source 1..75: mol_type = other DNA
cttttattatgatgttcaagcggcattgtcgatgaacgggcatctcttaaaggccaaatatcaagtcgctgaagg

SEQ ID NO: 567390 - DNA, 75 bp, synthetic construct
  source 1..75: mol_type = other DNA
gttagacctaaaggttttttctgtaccgggtgtgatttcaaactctggtcagaaattgctggtaaaaaaataacc

SEQ ID NO: 567391 - DNA, 75 bp, synthetic construct
  source 1..75: mol_type = other DNA
acgctgaaagaaatagcggctgcgatcaataacgacccgaatttcagcacaactatcaacaatgccctggctctc

SEQ ID NO: 567392 - DNA, 75 bp, synthetic construct
  source 1..75: mol_type = other DNA
atggttcatgaagataaagcgcgtaaagagttcgccagtaggcttgcgctagcctgtgaaaacgctggttatgaa

SEQ ID NO: 567393 - DNA, 75 bp, synthetic construct
  source 1..75: mol_type = other DNA
ctgtcgatgaacgggcatcagattaaggcgaaatatcagacaacagacgacgatcagatagacgagaaaaaacgc

SEQ ID NO: 567394 - DNA, 75 bp, synthetic construct
  source 1..75: mol_type = other DNA
catctttggcaaaagctatttttgaagggctgggtggtaacccaaatacggaaaagaaaaatggctattttgaac

SEQ ID NO: 567395 - DNA, 75 bp, synthetic construct
  source 1..75: mol_type = other DNA
gcgttttttacgttgaagccagagcattcccgatacaggtctttgccgaagaaggtctgagcgttgtacttccga

SEQ ID NO: 567396 - DNA, 75 bp, synthetic construct
  source 1..75: mol_type = other DNA
tctggcggtcaattgaatggtgcactgggcatcggaacatccagtgctcttggtggtaactcgattgttttgggt

SEQ ID NO: 567397 - DNA, 75 bp, synthetic construct
  source 1..75: mol_type = other DNA
tttgatggttcagccgatatagatttgcctggtgtgaatacaaaaggtaatcaagacactaccggtaatgcagcg

SEQ ID NO: 567398 - DNA, 75 bp, synthetic construct
  source 1..75: mol_type = other DNA
tatttctcttgcacttagcgcaggtaagaaatatgcaattgtgctgaagggaagatatctccttggagaggatac

SEQ ID NO: 567399 - DNA, 75 bp, synthetic construct
  source 1..75: mol_type = other DNA
tgttcaggatacagggtccaactctgccgataatatagcaggcgtttattacagacccgttcaaaagtatataaa

SEQ ID NO: 567400 - DNA, 75 bp, synthetic construct
  source 1..75: mol_type = other DNA
aaatatcgacagtcaatgcactaaggatatttaattcatcttttggtgctatttttcgtcgttctgaagaatgcc

SEQ ID NO: 567401 - DNA, 75 bp, synthetic construct
  source 1..75: mol_type = other DNA
acgttgggtacttttgaaaaaaatattcttttagccaacgtcagttatttacactgttggccgctaaaaatcatg

SEQ ID NO: 567402 - DNA, 75 bp, synthetic construct
  source 1..75: mol_type = other DNA
gaaatgggtgacagacactgaggcacaacacagtgccgcagtagacgcggcagaagcacagcgccagtcactgat

SEQ ID NO: 567403 - DNA, 75 bp, synthetic construct
  source 1..75: mol_type = other DNA
atgaaacctgtttttgatgaaaatggactggctacagtgccgggcgatatgcgttgtttttattatgatgcagta

SEQ ID NO: 567404 - DNA, 75 bp, synthetic construct
  source 1..75: mol_type = other DNA
caaatctcacgcaggacaacatcgcccgcattcgcgatctgtttccaggctgcatcaccgaagccaagggcgaag

SEQ ID NO: 567405 - DNA, 75 bp, synthetic construct
  source 1..75: mol_type = other DNA
cgggaagccattcctggcgtgcgcttatgcattcattgtcagcaggagaaagatttacaaaaaccagattataca

SEQ ID NO: 567406 - DNA, 75 bp, synthetic construct
  source 1..75: mol_type = other DNA
actttccaaagccggtttctttgcttgaagagctgattaaccaagcaaatgtagattcaggcgagatcgtgttgg

SEQ ID NO: 567407 - DNA, 75 bp, synthetic construct
  source 1..75: mol_type = other DNA
tattggtcccatcaaggatggatttacaagcactgcaccttcaacgccatatgataaatgggacggtgaaaaatg

SEQ ID NO: 567408 - DNA, 75 bp, synthetic construct
  source 1..75: mol_type = other DNA
gatcctggtgatgaggtggctggaaagattccagtatttactgggattggatgggagcagcaggaagatcatcgc

SEQ ID NO: 567409 - DNA, 75 bp, synthetic construct
  source 1..75: mol_type = other DNA
aatgagactgtttactcaatcgaaaatggcgcagctgttacagtgggttatatcggtgctatcaaaaacggttat

SEQ ID NO: 567410 - DNA, 75 bp, synthetic construct
  source 1..75: mol_type = other DNA
gaccctggcgaaaacattccggggaaagtggcagtatttacgggtaagggatggagccatgaagaagaccatcgc

SEQ ID NO: 567411 - DNA, 75 bp, synthetic construct
  source 1..75: mol_type = other DNA
gcgggttcgaccaatgcctcgggaatttcaaagtatgagttaagcagtttcattgctgacttcaagcatttcaaa

SEQ ID NO: 567412 - DNA, 75 bp, synthetic construct
  source 1..75: mol_type = other DNA
atgaccataagaaataagatgttgctgggagcacttttgctggtcaccagcgcagcctgggccgcaccagccacc

SEQ ID NO: 567413 - DNA, 75 bp, synthetic construct
  source 1..75: mol_type = other DNA
ttcgtgtatcctagtgcagcttccagaagatctgaaagaaatgttaaaaacggctaaaggttctgctaagaaagt

SEQ ID NO: 567414 - DNA, 75 bp, synthetic construct
  source 1..75: mol_type = other DNA
gcgggtcgttcattggcctgaacccgattcatgcgctctatccggcaaatccggagagcgccagcccatacagcc

SEQ ID NO: 567415 - DNA, 75 bp, synthetic construct
  source 1..75: mol_type = other DNA
ctgcgtggtttgtatcaggagcgtgaactggcgaagcaagggttgctggatgcgctgcataaatatggctgtctg

SEQ ID NO: 567416 - DNA, 75 bp, synthetic construct
  source 1..75: mol_type = other DNA
ggttgcggcgacacacgacctgcctacgctacgcggctactgggagagcggggatttaacgctgggcaaaacgct

SEQ ID NO: 567417 - DNA, 75 bp, synthetic construct
  source 1..75: mol_type = other DNA
gcggttggcgtagcagagggtggagcagaaacctggtgcgaccgggagttgtattgcctgaaagcgtcggtgggc

SEQ ID NO: 567418 - DNA, 75 bp, synthetic construct
  source 1..75: mol_type = other DNA
tggggcagaactggggattgccgccgatggatccgcatatcatcaccgcgcgcgcctatgaaccttttatcgaac

SEQ ID NO: 567419 - DNA, 75 bp, synthetic construct
  source 1..75: mol_type = other DNA
gcaccgccagatatccttggcccgttagggcaaaactggggtttgccgccgatggacccgcatatcatcaccgcg

SEQ ID NO: 567420 - DNA, 75 bp, synthetic construct
  source 1..75: mol_type = other DNA
tttttaatgaaacagttggtaaaacttttgcgtttctttatgaaacttttccccgcaaagtaactattgatattt

SEQ ID NO: 567421 - DNA, 75 bp, synthetic construct
  source 1..75: mol_type = other DNA
tatagctcaacagtatttatcagagacgattcagttttctattgatgattttatcaaaaatataaaaagaaaagt

SEQ ID NO: 567422 - DNA, 75 bp, synthetic construct
  source 1..75: mol_type = other DNA
actgttcatctgacgagatttggtgtacacaacgtaaggagttaatcaaatctgttcttgaaacaaagaaagctt

SEQ ID NO: 567423 - DNA, 75 bp, synthetic construct
  source 1..75: mol_type = other DNA
gaagctgcgccccggttttgattaccgggatgtgtggcgggaagaacaccggaacagcttcaccgtggcaaaaat

SEQ ID NO: 567424 - DNA, 75 bp, synthetic construct
  source 1..75: mol_type = other DNA
gaagctgcgccccggttttgattaccgggatgtatggcgggaagagcaccggaacagcttcaccgtggcaaaaat

SEQ ID NO: 567425 - DNA, 75 bp, synthetic construct
  source 1..75: mol_type = other DNA
gagtggctcaatggacgcgataaaaagcaccgcatcatccgctcttactactgggttatcctttgctttcaaaag

SEQ ID NO: 567426 - DNA, 75 bp, synthetic construct
  source 1..75: mol_type = other DNA
atgaaacctgtttttgatgaaaatgggctggctacagtgccgggcgatatgcgttgtttttattataatgcagta

SEQ ID NO: 567427 - DNA, 75 bp, synthetic construct
  source 1..75: mol_type = other DNA
gacagcagccagtggcaagctgcgactgaagaagcgattattgagctggccgcgcagccagaagtggtggcgatt

SEQ ID NO: 567428 - DNA, 75 bp, synthetic construct
  source 1..75: mol_type = other DNA
ggtgtcggcaacctgatgcaccacatcgcgcgctgctgccagccgattcctggagatgagattgtcggcttcatt

SEQ ID NO: 567429 - DNA, 75 bp, synthetic construct
  source 1..75: mol_type = other DNA
gtcatctgcgcgctgagatgaaagctgaaggcgttaaagctgaagtgtatggtcgtccgaaacacatctacagca

SEQ ID NO: 567430 - DNA, 75 bp, synthetic construct
  source 1..75: mol_type = other DNA
atgtttgatatcggcgttaatttgaccagttcacaatttgcgaaagaccgtggtgatgttgtagagcgcgctttt

SEQ ID NO: 567431 - DNA, 75 bp, synthetic construct
  source 1..75: mol_type = other DNA
aggaattgcgtgatctgttgccacttattcctgcggagaaattgctgatcgaaaccgatgcgccgtatttgctcc

SEQ ID NO: 567432 - DNA, 75 bp, synthetic construct
  source 1..75: mol_type = other DNA
aagagatgcaggcgtgcgtggcgcatggaatttatatcggcattactggttgggtttgcgatgaacgacgcggac

SEQ ID NO: 567433 - DNA, 75 bp, synthetic construct
  source 1..75: mol_type = other DNA
agccagacgcgaggacccgtacttcaaagccagttacgacaacgtggactacagccagatcccggcaggattcag

SEQ ID NO: 567434 - DNA, 75 bp, synthetic construct
  source 1..75: mol_type = other DNA
aaacgctacgcgggctgggtatctgcgatgggtaacagcggcacacaatttgtgaaacaggctgtcacgttcttt

SEQ ID NO: 567435 - DNA, 75 bp, synthetic construct
  source 1..75: mol_type = other DNA
cggccctttgtgagtccgggctggtgaaaaaagtcacccggaaaggtgaaaaaggtaactcaagtaatatctatc

SEQ ID NO: 567436 - DNA, 75 bp, synthetic construct
  source 1..75: mol_type = other DNA
gtgttgagatggtggagatcctctcgacattaagtatggacattgacacgctgcgggcggcgctgctgttccctc

SEQ ID NO: 567437 - DNA, 75 bp, synthetic construct
  source 1..75: mol_type = other DNA
tcgaagattactggcaacagccagccgctcacggaggtgggcgacagcgacaggtcgatgtcctggctggcctgg

SEQ ID NO: 567438 - DNA, 75 bp, synthetic construct
  source 1..75: mol_type = other DNA
aacgctacgcgggctgggtatctgcgatgggtaacagcggcacacaatttgtgaaacaggctgtcacgttctttg

SEQ ID NO: 567439 - DNA, 75 bp, synthetic construct
  source 1..75: mol_type = other DNA
ccagcaggcacaaaaactggcgcgtcagtattcatcctgttggtcaacggcgggcgtgcatcctcatgacagcag

SEQ ID NO: 567440 - DNA, 75 bp, synthetic construct
  source 1..75: mol_type = other DNA
cacagatgatcagcgtcctgaacccggtgttaacccgcaacgccgccggagaaatgacggaagagtgggtgtcgt

SEQ ID NO: 567441 - DNA, 75 bp, synthetic construct
  source 1..75: mol_type = other DNA
gttgtcggggtgcccgtgccggatgcgaccggcgggcgcctggaaattctctgtcggctgggaggggaaaaatga

SEQ ID NO: 567442 - DNA, 75 bp, synthetic construct
  source 1..75: mol_type = other DNA
gtcgacagccggggccgcactgtcgatttttatctctcctcccgtcgtaacagcaaagctgcataccggtttctg

SEQ ID NO: 567443 - DNA, 75 bp, synthetic construct
  source 1..75: mol_type = other DNA
ggctggctacagtgccgggcgatatgcgttgtttttattatgatgcagtaacgtatgaatatacgggctggtctg

SEQ ID NO: 567444 - DNA, 75 bp, synthetic construct
  source 1..75: mol_type = other DNA
gcggcatttgcttctctctggggttgattctttgtgttgtctgcggagccgatctctttacttccacagtgttga

SEQ ID NO: 567445 - DNA, 75 bp, synthetic construct
  source 1..75: mol_type = other DNA
tgtcgtcggggtcccggttccggatgcaaccggcgggcgtctggaaattctctgtcggctgggaggggaaaaatg

SEQ ID NO: 567446 - DNA, 75 bp, synthetic construct
  source 1..75: mol_type = other DNA
ctacctggcagatttctatagccccatcgggcgtccctcgattgacccggagttgatggtgcgcatgctggtcgt

SEQ ID NO: 567447 - DNA, 75 bp, synthetic construct
  source 1..75: mol_type = other DNA
atgaaagtatcaactcttggtatcgacctggcaaagaacgtttttcagcttcatggtgtcgatcatgaaggccat

SEQ ID NO: 567448 - DNA, 75 bp, synthetic construct
  source 1..75: mol_type = other DNA
ccaacaggcgcaaaaactggcgcgtcagtatctgcactgttggtcaacggcaggcgtgcatcctcacgacagcag

SEQ ID NO: 567449 - DNA, 75 bp, synthetic construct
  source 1..75: mol_type = other DNA
caatggaagactgggcggtggcgctgaaaggcaccgaagctctgctgcgtcgctccatttacgcggtgatgccaa

SEQ ID NO: 567450 - DNA, 75 bp, synthetic construct
  source 1..75: mol_type = other DNA
gagctatactcacttgatagaaaaaatagcttaaatagtggttttgaagatagcaaattgctgtactcaatttca

SEQ ID NO: 567451 - DNA, 75 bp, synthetic construct
  source 1..75: mol_type = other DNA
cgttgaaagcgaaatgctgccccaacacgccgaatcggaagatcgtccgcagcatccatgaggctgcccgcgacg

SEQ ID NO: 567452 - DNA, 75 bp, synthetic construct
  source 1..75: mol_type = other DNA
tgggtcgtgaaggacataacgtaacgaaagttagccgtcgcgatttaccttttgttgttgccgccggaaaaaatg

SEQ ID NO: 567453 - DNA, 75 bp, synthetic construct
  source 1..75: mol_type = other DNA
tcgacaggctacccgctactcagcacatggattgcacgagtacaaaggcaagtttaatcctcaagttgcaaaagc

SEQ ID NO: 567454 - DNA, 75 bp, synthetic construct
  source 1..75: mol_type = other DNA
gatgtggcccgtgcaggctggtgtgctgactacaacgaaccaacttccttcctgaacaccatgctgtcgaacagc

SEQ ID NO: 567455 - DNA, 75 bp, synthetic construct
  source 1..75: mol_type = other DNA
ttatttctcacgggatgccgttcccacaaaatgcccagaccgcaattgaagttgaagaaactattcgtaaacggg

SEQ ID NO: 567456 - DNA, 75 bp, synthetic construct
  source 1..75: mol_type = other DNA
aacatccagctggtgttcaacaacgccattctggcgagtgaaattgccaaagaataccagcgtctcgcgggttaa

SEQ ID NO: 567457 - DNA, 75 bp, synthetic construct
  source 1..75: mol_type = other DNA
gattaaccactgagtatttagaaaccttcggtgtgccgttaattggctatcagactaaagcgctgcctgcgtttt

SEQ ID NO: 567458 - DNA, 75 bp, synthetic construct
  source 1..75: mol_type = other DNA
taccttaaaagattgggtcgttaacgaacgtatcgttcttgagcgcagcccgacctactggaacaacgcgaaaac

SEQ ID NO: 567459 - DNA, 75 bp, synthetic construct
  source 1..75: mol_type = other DNA
tctgttgatccgaacaccgcttctccgtatgccagttatctgcaatatgggcatatcgccggtattgatgaaatt

SEQ ID NO: 567460 - DNA, 75 bp, synthetic construct
  source 1..75: mol_type = other DNA
accccacttgcacatcgaccattctgccacaaaccgccgtgcgcaccggtggatattgtatgccctgcgttcagg

SEQ ID NO: 567461 - DNA, 75 bp, synthetic construct
  source 1..75: mol_type = other DNA
taagagcccggcctttgacagcattatggcggaaacgctgaaagcgactgacgaggcgcaacgcactgcgctgta

SEQ ID NO: 567462 - DNA, 75 bp, synthetic construct
  source 1..75: mol_type = other DNA
cgtgggttggaggttataccggtaaagatccgctggataacacctacaccagaaatatgtacattgtgaagcact

SEQ ID NO: 567463 - DNA, 75 bp, synthetic construct
  source 1..75: mol_type = other DNA
ttggctggagtcaggaaaaacgtaacgaagaagcgaaaaagctgctggctgaagcgggctataccgcagacaaac

SEQ ID NO: 567464 - DNA, 75 bp, synthetic construct
  source 1..75: mol_type = other DNA
ccagaagcaaaagtcgctgaccttaaaaatgagtgctaagagtgaagccaatatcgatcgtttctgtgaattaac

SEQ ID NO: 567465 - DNA, 75 bp, synthetic construct
  source 1..75: mol_type = other DNA
attagagtatagggcattgagatttgaaaatgaactattgccaatgagaaattatcaaggcaatgcggttattaa

SEQ ID NO: 567466 - DNA, 75 bp, synthetic construct
  source 1..75: mol_type = other DNA
gtgcgtggcgaactgaaaccggaacaactggcggctgcgctggtgagcatgaaaattcgcggcgagcacccgaac

SEQ ID NO: 567467 - DNA, 75 bp, synthetic construct
  source 1..75: mol_type = other DNA
aaaaacccgcacactgttcaatgtgctggggccattgattaacccggcgcatccgccgctggcgttaattggtgt

SEQ ID NO: 567468 - DNA, 75 bp, synthetic construct
  source 1..75: mol_type = other DNA
agaatattattcaaaactagccaagaaaataatattcacaggaccgattgatgagttttttgattattgctttgg

SEQ ID NO: 567469 - DNA, 75 bp, synthetic construct
  source 1..75: mol_type = other DNA
accgggtgtctggcaatgggcggtggggcgttttgtcccgacgttgattctggtgatgatgcttatcgatcttgg

SEQ ID NO: 567470 - DNA, 75 bp, synthetic construct
  source 1..75: mol_type = other DNA
aaggattactgctgttgctcggcgctggcggaggctggcagctctggcagtcggaaaccggcgaaggtctgcggg

SEQ ID NO: 567471 - DNA, 75 bp, synthetic construct
  source 1..75: mol_type = other DNA
cggtatggcggtagcggtaatttatcagggtaaaccttattactttacctggggctatgcggacatcgccaaaaa

SEQ ID NO: 567472 - DNA, 75 bp, synthetic construct
  source 1..75: mol_type = other DNA
gttgcgtcagcttacgctgggtcatgcgctgggcgaaacccagcgggcgcagttggtgacgtggctcaaaggcaa

SEQ ID NO: 567473 - DNA, 75 bp, synthetic construct
  source 1..75: mol_type = other DNA
atgcctgaatcgttgatggtaatacgttcttcctcgacgctacgtaagcaatgggagtggatgacatactccgca

SEQ ID NO: 567474 - DNA, 75 bp, synthetic construct
  source 1..75: mol_type = other DNA
gcgcgcaaggatttactgaattgcgtatggcgttaataggcgaatacagtgccagccgggagaaaacgaatgcca

SEQ ID NO: 567475 - DNA, 75 bp, synthetic construct
  source 1..75: mol_type = other DNA
atgttgtacctgacgaaaataagcaatgcggggagtgaattcaccgaaaacgagcaaaaaatcgctgactttctg

SEQ ID NO: 567476 - DNA, 75 bp, synthetic construct
  source 1..75: mol_type = other DNA
gcgggcaaatgggttttctacggtctggctgctatcctgacagttgtcacgctgattggtgtcgttacaatctaa

SEQ ID NO: 567477 - DNA, 75 bp, synthetic construct
  source 1..75: mol_type = other DNA
attttcggctacatggactcaaagggtaacgctcatttgtctgcaaaaaatatcccgcctgcctggctgccggat

SEQ ID NO: 567478 - DNA, 75 bp, synthetic construct
  source 1..75: mol_type = other DNA
aagagttgcggaataaaagaacaatacttaagttagagctttcaagaataaatgctctcgttggtgaagtataca

SEQ ID NO: 567479 - DNA, 75 bp, synthetic construct
  source 1..75: mol_type = other DNA
atgcttatcgggagcgccatgctgcactgtgccgatgtgatttacctgctggatggctgggaggactcgccgggg

SEQ ID NO: 567480 - DNA, 75 bp, synthetic construct
  source 1..75: mol_type = other DNA
cccggaaaatcgggcggccggcgaaactgtcgcacagctgtttggcaaatcaaaagccgcacaggcgactgagta

SEQ ID NO: 567481 - DNA, 75 bp, synthetic construct
  source 1..75: mol_type = other DNA
attcgctacgaacgccctgttcccggtgatcgggttcagatggatacctgtaaaattggccccggcttatatcag

SEQ ID NO: 567482 - DNA, 75 bp, synthetic construct
  source 1..75: mol_type = other DNA
ttgcagagcaaacaccacactctgatgccgttcacacaagctatcagcccaatgaagagcatatacaggaacaga

SEQ ID NO: 567483 - DNA, 75 bp, synthetic construct
  source 1..75: mol_type = other DNA
aaaaaacgcctgtctgtggctacgctacttcctgtgtatgaagaaagcatcaagcaaaatattgggcgcatattt

SEQ ID NO: 567484 - DNA, 75 bp, synthetic construct
  source 1..75: mol_type = other DNA
gtgccgttgctcacggtgttcggtttggaagaggggcaagagctgataattggctcgtcttcagctacgtcgttc

SEQ ID NO: 567485 - DNA, 75 bp, synthetic construct
  source 1..75: mol_type = other DNA
taagcaaaacatcgggcgtgtattcgccgagcccattaagcttgccgagaatgtgcctgatcagctgcgagagta

SEQ ID NO: 567486 - DNA, 75 bp, synthetic construct
  source 1..75: mol_type = other DNA
atgcctgatatttcaaccccaaatctggactatgggaacatggtcgaggcgtgggatatcaacgatgccctgatg

SEQ ID NO: 567487 - DNA, 75 bp, synthetic construct
  source 1..75: mol_type = other DNA
atggcagtgatttatatcgccggtccaatgaccggatacaaagatcacaacagaacggcgtttttcacagaggcg

SEQ ID NO: 567488 - DNA, 75 bp, synthetic construct
  source 1..75: mol_type = other DNA
ttacgctctacaccaagcgcactgggtttatgtgcggttctccgccgctgttgaacatggcgctgttgaatgtga

SEQ ID NO: 567489 - DNA, 75 bp, synthetic construct
  source 1..75: mol_type = other DNA
gccgaaagaagacaaagaggactataaaaaacgcctctctgtggccacgcttttgcccgcctacgaagagaccat

SEQ ID NO: 567490 - DNA, 75 bp, synthetic construct
  source 1..75: mol_type = other DNA
gtggcggggcttcctgaatgggcctggacgcgagctacgccctttaccggaagcgatgaacagttacagaagcta

SEQ ID NO: 567491 - DNA, 75 bp, synthetic construct
  source 1..75: mol_type = other DNA
gtgctgcgccggcaaggccacgcatggaaccataagcgggtacaccggatttactgtctgttaaaactgaatttt

SEQ ID NO: 567492 - DNA, 75 bp, synthetic construct
  source 1..75: mol_type = other DNA
aactgtgaacgccctcatgaatcactgaacgatatgacgccggaggaatatcggcaacacaatcatttggccggg

SEQ ID NO: 567493 - DNA, 75 bp, synthetic construct
  source 1..75: mol_type = other DNA
taatccatccccgctggctacgcccgaagcgttaaaccagagctggtccgttgatttcatgtatgacgctctgat

SEQ ID NO: 567494 - DNA, 75 bp, synthetic construct
  source 1..75: mol_type = other DNA
tgaggccggttgggagttaaccgctgaagatcaaaggcgtaatctctattttcctcaatgttttcatctggagat

SEQ ID NO: 567495 - DNA, 75 bp, synthetic construct
  source 1..75: mol_type = other DNA
gcgtttacccaggcaaatctggatgcatatttacgagagtggatctcttatgatgatttagacgcttattctcct

SEQ ID NO: 567496 - DNA, 75 bp, synthetic construct
  source 1..75: mol_type = other DNA
gcgagcggcctcatgaatccctgaaggatctgacgccggaagagtaccggctgatggctgacaaaccggaaatct

SEQ ID NO: 567497 - DNA, 75 bp, synthetic construct
  source 1..75: mol_type = other DNA
ccgttatccggaaagagattttggctgagcaggcggagccaggatttattgatccagattattttgatgaaacct

SEQ ID NO: 567498 - DNA, 75 bp, synthetic construct
  source 1..75: mol_type = other DNA
tccaaaagcaggatgcagcctggatttggttcgttttattaaacaggaggaaacgctgctttcttcaataaaagt

SEQ ID NO: 567499 - DNA, 75 bp, synthetic construct
  source 1..75: mol_type = other DNA
gccatatccagcaccaatgccatgatgctgatggcgaatggagaaaatgaaatcagtctggagattggggcatta

SEQ ID NO: 567500 - DNA, 75 bp, synthetic construct
  source 1..75: mol_type = other DNA
aactgtgaacgcccgcatgaatcgctgaataatatgacaccggaggaataccgacagcgccattatttggccggg

SEQ ID NO: 567501 - DNA, 75 bp, synthetic construct
  source 1..75: mol_type = other DNA
gcgatcgacctcatgaatccctgaataacctgacaccggaggagtaccggttgatggccgaaaatccggaaatct

SEQ ID NO: 567502 - DNA, 75 bp, synthetic construct
  source 1..75: mol_type = other DNA
atgccgggcactgaaagacgtcatagaaaaaaagctttaaaaccagcgataaagcgtgagctggtcagctatctg

SEQ ID NO: 567503 - DNA, 75 bp, synthetic construct
  source 1..75: mol_type = other DNA
ccgccgtactcggttaagtggattggtagtgacgacccgaccctgattaacgatgagcgttttgctcctgctggc

SEQ ID NO: 567504 - DNA, 75 bp, synthetic construct
  source 1..75: mol_type = other DNA
gatggatgggattttaaacagtatgtactcggtgcacttttctaccgcttcatcagtgagaatttttccagctac

SEQ ID NO: 567505 - DNA, 75 bp, synthetic construct
  source 1..75: mol_type = other DNA
taacaccgttaaagataaaaatgcccgcctggctgcagttctgaaaggggttgaagggctaaaacttggtgactt

SEQ ID NO: 567506 - DNA, 75 bp, synthetic construct
  source 1..75: mol_type = other DNA
cagcaaggaagatgttgctcatctggcgaaatctgtcgcgtttgagaccgttgtcgcgaatgactataacctgtc

SEQ ID NO: 567507 - DNA, 75 bp, synthetic construct
  source 1..75: mol_type = other DNA
gaactacctgtctgctaaggggcgtgcagcaatagtttgcttccccggtattttctaccgtggcggtgcagagca

SEQ ID NO: 567508 - DNA, 75 bp, synthetic construct
  source 1..75: mol_type = other DNA
tcgaaaaaattatgcaggtattttccagcaaagaagatgttgcccatctggcaaaatctgtcgcgtttgaggccg

SEQ ID NO: 567509 - DNA, 75 bp, synthetic construct
  source 1..75: mol_type = other DNA
ctgagctgaatgcagaactgaaaactacggtcagcaaaatcgaccagttgcgtaaagatatcgactcaattgtgg

SEQ ID NO: 567510 - DNA, 75 bp, synthetic construct
  source 1..75: mol_type = other DNA
cgaactgttcaaaaaagagaccaacaacaatatcctgaccgatgcccatatcgaacagattatgcaggtatttgc

SEQ ID NO: 567511 - DNA, 75 bp, synthetic construct
  source 1..75: mol_type = other DNA
cacggtcagcaaaatcaaccagttgcgtaaagatattgatgcgattgtggctgaaattgagggctgtgaggtgca

SEQ ID NO: 567512 - DNA, 75 bp, synthetic construct
  source 1..75: mol_type = other DNA
aataactatgtcgaaaccgtgatttcactggcaccgaacctgttctttggcaccaccattgccgtcaatattctg

SEQ ID NO: 567513 - DNA, 75 bp, synthetic construct
  source 1..75: mol_type = other DNA
gccaatgcccgtctggcaaaagaccggaacggagcagatattcccaataagccgctgtttatccaaaacctcggt

SEQ ID NO: 567514 - DNA, 75 bp, synthetic construct
  source 1..75: mol_type = other DNA
ttgtagcgaatgactataacctgtcggtgagcagctatgttgaagcgaaagatactcgcgaaattatcgatatcg

SEQ ID NO: 567515 - DNA, 75 bp, synthetic construct
  source 1..75: mol_type = other DNA
cactggctccgaacctgttctttggcaccaccattgccgtaaacattctggttctgtccaaacataaaacggata

SEQ ID NO: 567516 - DNA, 75 bp, synthetic construct
  source 1..75: mol_type = other DNA
gtgcgatgatggcgagatcgaacttaacacgccgcgtgaccgtgaaaataccttcgaaccgcaactaattaagaa

SEQ ID NO: 567517 - DNA, 75 bp, synthetic construct
  source 1..75: mol_type = other DNA
atcgaactgaacacgccgcgtgaccgtgaaaacaccttcgagcctcagctgattaagaagcaccagacgcgcatt

SEQ ID NO: 567518 - DNA, 75 bp, synthetic construct
  source 1..75: mol_type = other DNA
ctacctttaaggcattgaacctgcgtacctcgccaacacactggtactgcgcagcggaatacgtattgcaaaaag

SEQ ID NO: 567519 - DNA, 75 bp, synthetic construct
  source 1..75: mol_type = other DNA
gacctgaaagcgatttatcaggctcccacagaagaagcaggccagcaggcgctggaagcgttcgccagcgcctgg

SEQ ID NO: 567520 - DNA, 75 bp, synthetic construct
  source 1..75: mol_type = other DNA
agccgggttatcaacaaagcgatgttcctggctctgggtattaaccttgatggtcagaaagagcggccaggtatg

SEQ ID NO: 567521 - DNA, 75 bp, synthetic construct
  source 1..75: mol_type = other DNA
ctgccgggcaacaacgccgcgtcgctttagcgcgtctgtggctgacccgtgccacgttatggatactcgacgagc

SEQ ID NO: 567522 - DNA, 75 bp, synthetic construct
  source 1..75: mol_type = other DNA
gatgccaaagcacgttctgctgacgttttaggccatgtattcgaatacttccttggtgagttcgcactggcagaa

SEQ ID NO: 567523 - DNA, 75 bp, synthetic construct
  source 1..75: mol_type = other DNA
atctgattggcaacattgcactgggagatgtcaaagcgcgttctgctgatgtattaggccacgtattcgaatact

SEQ ID NO: 567524 - DNA, 75 bp, synthetic construct
  source 1..75: mol_type = other DNA
accgtttgatgccatcgtttctaacccgccgtattcggtgaaatggattggcagcgatggtgatgctgccaactt

SEQ ID NO: 567525 - DNA, 75 bp, synthetic construct
  source 1..75: mol_type = other DNA
gcgaagccattccacttgtgttgctggatgaccctagtccgttccgtgatatggttcttgccacgctcaatgaag

SEQ ID NO: 567526 - DNA, 75 bp, synthetic construct
  source 1..75: mol_type = other DNA
cccgccgatgcgatggtatgcactctggaacggtttaaattttatctggagcaacacgggtggatcgttgcccgt

SEQ ID NO: 567527 - DNA, 75 bp, synthetic construct
  source 1..75: mol_type = other DNA
cgtgccgcactggtaaaagatgccaatgttattgactgtatcgttaacttacctgcaaaactgttcttgaacacc

SEQ ID NO: 567528 - DNA, 75 bp, synthetic construct
  source 1..75: mol_type = other DNA
actgtgacgcgtaatgtcggcgaaaacgccctggcgatcagccgtgtgccgcaggctcaaaaagaaggctggcgt

SEQ ID NO: 567529 - DNA, 75 bp, synthetic construct
  source 1..75: mol_type = other DNA
ccatccccttccccacccgctggatttcggtgtggtttctcaatgtgattacttccgtaccgcccaccaccgcca

SEQ ID NO: 567530 - DNA, 75 bp, synthetic construct
  source 1..75: mol_type = other DNA
aaacaggcggggtttaccgttaaaacgtccgccagccttgcggctttatggcaggtagtgaaccaaatcggcggt

SEQ ID NO: 567531 - DNA, 75 bp, synthetic construct
  source 1..75: mol_type = other DNA
tgatcgctttcgatgacgcggtacgtcgcaccctgaaagaagaagaaaaactggtcaactccagcgactggggat

SEQ ID NO: 567532 - DNA, 75 bp, synthetic construct
  source 1..75: mol_type = other DNA
atgctctacggcgatgtaccgctgatctcggtcgaaacactccagcgcctgcgtgatgcaaaaccgcagggtggc

SEQ ID NO: 567533 - DNA, 75 bp, synthetic construct
  source 1..75: mol_type = other DNA
gttcacctggtgtacggtcacggcggcgatctgcttaagcaggcgctgaaagacgacaacctgaactgggtgctt

SEQ ID NO: 567534 - DNA, 75 bp, synthetic construct
  source 1..75: mol_type = other DNA
aagctatatctctagtaggaagagatgtatacgaaattctaataaaaggatatacggaaaaacaatggggacgaa

SEQ ID NO: 567535 - DNA, 75 bp, synthetic construct
  source 1..75: mol_type = other DNA
tgatcgctttcgatgacgcggtacgtcgcaccctgaaagaggaagaaaagctggtcaactccagcgactggggat

SEQ ID NO: 567536 - DNA, 75 bp, synthetic construct
  source 1..75: mol_type = other DNA
ttcggtatggtttctcaatgtgattacttccgtaccgcccaccaccgccagggcgttgattcaggggctgaaaca

SEQ ID NO: 567537 - DNA, 75 bp, synthetic construct
  source 1..75: mol_type = other DNA
gggcggggctttttggcgctacttgtgctcatgagctcacaaaaaaaggaaaaaaggtactaattttagaaaaaa

SEQ ID NO: 567538 - DNA, 75 bp, synthetic construct
  source 1..75: mol_type = other DNA
ctcgccaactccagcgactggggatatgacactcaggcctttgcccgctggcgaccagaatacggttatttcgcc

SEQ ID NO: 567539 - DNA, 75 bp, synthetic construct
  source 1..75: mol_type = other DNA
gggcatcagatcctggcggcggcacgtcacgtcgacagactttcgaagctgcaactggctaatgtcagttgccat

SEQ ID NO: 567540 - DNA, 75 bp, synthetic construct
  source 1..75: mol_type = other DNA
ttggcatgaaagcgccggggctgggacgactgtgttttaccctggaagataaaggcgactatcgtactatcgatg

SEQ ID NO: 567541 - DNA, 75 bp, synthetic construct
  source 1..75: mol_type = other DNA
gtgcaggactttttggtgctacgttcgcatatgaagcaaaaaagaaagggaaaaaatgtcttgtcattgataaac

SEQ ID NO: 567542 - DNA, 75 bp, synthetic construct
  source 1..75: mol_type = other DNA
actcccgcaatggctattccacaaagaccgttatcaccggtgatggccccctggaactacgcactccgcgcgatc

SEQ ID NO: 567543 - DNA, 75 bp, synthetic construct
  source 1..75: mol_type = other DNA
tactaatgactgatgatggtcagtggtcgcaccgcattacttctccgcgccatcattgcgagaagacctatctgg

SEQ ID NO: 567544 - DNA, 75 bp, synthetic construct
  source 1..75: mol_type = other DNA
tgccgggcgtgaaatccgcggcaatcgtgtcaccgtcgatggcgaaatcgtccgtaatgcagcgttcaaactgct

SEQ ID NO: 567545 - DNA, 75 bp, synthetic construct
  source 1..75: mol_type = other DNA
cagcaaggaagatgttgcccatctggcaaaatctgtcacgtttgagactgttgtcgcgaataactataacctgtc

SEQ ID NO: 567546 - DNA, 75 bp, synthetic construct
  source 1..75: mol_type = other DNA
gcacgattgtggctggaagcatggcgtttatcattgtcaggatggcacatttctgttcttgctgatcccattgaa

SEQ ID NO: 567547 - DNA, 75 bp, synthetic construct
  source 1..75: mol_type = other DNA
gcgttgaggcagctctcaacgctgaaatgtcccaccatctgggctacgataaaaatgaaccgccccgggtttcct

SEQ ID NO: 567548 - DNA, 75 bp, synthetic construct
  source 1..75: mol_type = other DNA
tgatttttggtgggcgtttagctgagtataaatattatgatatgcaccaagttatagcctccgctcttagcttag

SEQ ID NO: 567549 - DNA, 75 bp, synthetic construct
  source 1..75: mol_type = other DNA
cataagtatggtgctcatatatttcatacgaacgataaaaaaatatgggattatgttaatgaattggttgaattc

SEQ ID NO: 567550 - DNA, 75 bp, synthetic construct
  source 1..75: mol_type = other DNA
gtagcggtctttttgggagtgtgtttgcacatgaattagggaaaatgaaaaaaaaggtcaaggttattgagcgtc

SEQ ID NO: 567551 - DNA, 75 bp, synthetic construct
  source 1..75: mol_type = other DNA
caaaacccctgaagacctcagtcagtttgatcggctgctgaaaaagctcagcgttgaagccgctctcaatgctga

SEQ ID NO: 567552 - DNA, 75 bp, synthetic construct
  source 1..75: mol_type = other DNA
atcaatatcgactgcaaaaatgcaatggggaatgatggctttggtgtcaatacttttgacttagctctaaccagt

SEQ ID NO: 567553 - DNA, 75 bp, synthetic construct
  source 1..75: mol_type = other DNA
cttgccttttaatatgaacacattttataaaatgtggggggtaatatcaccagacgcagcgaaaaaaataatttc

SEQ ID NO: 567554 - DNA, 75 bp, synthetic construct
  source 1..75: mol_type = other DNA
gtaatgttctggcgctggaacaggctcgcggggtgatagaaagtacccgcagcgacatcgctaaacgtcaggggg

SEQ ID NO: 567555 - DNA, 75 bp, synthetic construct
  source 1..75: mol_type = other DNA
ctgagtgcgcttatggaggaaagaacggagaccgtcacccgtcgccgtcgtcagagtggaatgtggggaaccctt

SEQ ID NO: 567556 - DNA, 75 bp, synthetic construct
  source 1..75: mol_type = other DNA
tggaagtgatgatgcgggatcaactgcagaaagcctctgcggtgctggcggtgatggattacacccagatgaact

SEQ ID NO: 567557 - DNA, 75 bp, synthetic construct
  source 1..75: mol_type = other DNA
acgaatctctggtgtacggcgtgtttccaaaccagggcggcacgttcaccgcaatgacgtataccaaaagcaaaa

SEQ ID NO: 567558 - DNA, 75 bp, synthetic construct
  source 1..75: mol_type = other DNA
acgaatccctggggtgcggcgtgttccccaaccaggatggaacgttcactgccatgacttataccaaaagcaaga

SEQ ID NO: 567559 - DNA, 75 bp, synthetic construct
  source 1..75: mol_type = other DNA
ttttgttccgctaccccagcgttaaggggaaatgaggtcagcatggatactatcgatcttggcaacaacgaatct

SEQ ID NO: 567560 - DNA, 75 bp, synthetic construct
  source 1..75: mol_type = other DNA
agggaagctttcggacctatggtggaagaggacgactggaaagacagcactaaggtaaataaaaaggcagaaaaa

SEQ ID NO: 567561 - DNA, 75 bp, synthetic construct
  source 1..75: mol_type = other DNA
ctgataacagaagttatacagagctcacattccagagctgcggcactggccgttgattctgcggccgcaaaactc

SEQ ID NO: 567562 - DNA, 75 bp, synthetic construct
  source 1..75: mol_type = other DNA
attgaaacaggttttcgtggtacggccctgtatgccacagaaaatattgccggacgcatcaattcccgcctggag

SEQ ID NO: 567563 - DNA, 75 bp, synthetic construct
  source 1..75: mol_type = other DNA
tcagaataaggtgaccggtgatgtcagaatggccatggaggagatcgatgctaaaacccgggaattactgacgga

SEQ ID NO: 567564 - DNA, 75 bp, synthetic construct
  source 1..75: mol_type = other DNA
attcagccatctggtggggatggatgcatgccagggaacactcacactgctggatacccccggccctaatgaagc

SEQ ID NO: 567565 - DNA, 75 bp, synthetic construct
  source 1..75: mol_type = other DNA
cagcctgcttgcggatatccgggaaatcgcggactgtcaggagcaggtgaccgctgatgtcagaatggccatgga

SEQ ID NO: 567566 - DNA, 75 bp, synthetic construct
  source 1..75: mol_type = other DNA
accgcgataacgtataccaaaagcaaaacgtttaaaaccgaaactggcgcgcatcgctggttagccagaaacact

SEQ ID NO: 567567 - DNA, 75 bp, synthetic construct
  source 1..75: mol_type = other DNA
ttatcacctcacataaaccaaagatacgtaagattccttcatggtgcttagataaattaccatgtgacgcacaga

SEQ ID NO: 567568 - DNA, 75 bp, synthetic construct
  source 1..75: mol_type = other DNA
ttatcacctcacgcaaaccaaaaacacgcaagattccaaagtggtgtatcgaccgtatcccttccgatgctcaaa

SEQ ID NO: 567569 - DNA, 75 bp, synthetic construct
  source 1..75: mol_type = other DNA
tttgtgtggcccttgcgctaaccggttgttcactggcaccggattatcagcgtccggcaatgcccgtaccgcagc

SEQ ID NO: 567570 - DNA, 75 bp, synthetic construct
  source 1..75: mol_type = other DNA
gggacgatattttatccttgcgtgtattattttttttcggggcgatcgttgtattttgaattcaaatatttttat

SEQ ID NO: 567571 - DNA, 75 bp, synthetic construct
  source 1..75: mol_type = other DNA
cagacagagggtataataatattaaagtggtggcttataatggtgctggagtgtttgtttcaccagataaaaaag

SEQ ID NO: 567572 - DNA, 75 bp, synthetic construct
  source 1..75: mol_type = other DNA
tagccattctggttatgtacattgcacgtattgtcggccagagcctgcgtgatgcaccacttgcattacttatcg

SEQ ID NO: 567573 - DNA, 75 bp, synthetic construct
  source 1..75: mol_type = other DNA
gaaataattccaccaactcatgagaagaatgattataaaacggtgcgagatataatcggtaatcttcctgaaatt

SEQ ID NO: 567574 - DNA, 75 bp, synthetic construct
  source 1..75: mol_type = other DNA
cgtgttccccaaccaggacggtacgttcaccgcgatgacgtataccagaagcaaaacgtttaaaactgaagctgg

SEQ ID NO: 567575 - DNA, 75 bp, synthetic construct
  source 1..75: mol_type = other DNA
acgaatctctggtgtgcggcgtgtttcccaaccaggacggaacgttcacggcgatgacgtatacaaaaagcaaaa

SEQ ID NO: 567576 - DNA, 75 bp, synthetic construct
  source 1..75: mol_type = other DNA
ttcaccgccatgacttataccaaaagcaaaacattcaaaactgaaacgggcgcacgtcgctggcttgccagaaat

SEQ ID NO: 567577 - DNA, 75 bp, synthetic construct
  source 1..75: mol_type = other DNA
gaatgagctgggataaacttggctctacaattacaacacaatgtataggttttggtaatggtcgatttggtcatc

SEQ ID NO: 567578 - DNA, 75 bp, synthetic construct
  source 1..75: mol_type = other DNA
accattaaatatggagcgaataaaacattctaagccaggtggaacatggaaagattggcctgagtacttacgggc

SEQ ID NO: 567579 - DNA, 75 bp, synthetic construct
  source 1..75: mol_type = other DNA
aaagtttttgccacaggaggaattggcggcgttcatcgcggtgcagaacacacttttgatatttcagccgaccta

SEQ ID NO: 567580 - DNA, 75 bp, synthetic construct
  source 1..75: mol_type = other DNA
aggcgatggtacaggccaggcgattcgataccggctcgtgttcagagtcatgtgaaatctggggtgatcaattgg

SEQ ID NO: 567581 - DNA, 75 bp, synthetic construct
  source 1..75: mol_type = other DNA
gtgatacacattgcctatctcggcgatctttcggtgtatcacgttcgtctgaaaagtgggcagatgattagcgcc

SEQ ID NO: 567582 - DNA, 75 bp, synthetic construct
  source 1..75: mol_type = other DNA
aggcgatggtgcaagccaggcgattcgataccggctcgtgttcagagtcatgtgaaatctggggtgatcaattgg

SEQ ID NO: 567583 - DNA, 75 bp, synthetic construct
  source 1..75: mol_type = other DNA
gggcttgcatgtaaagacgaacctggtctgatgcgagtttttaatgaactggttacgggtaaacacgtcagagat

SEQ ID NO: 567584 - DNA, 75 bp, synthetic construct
  source 1..75: mol_type = other DNA
agcccaagtctgttcattaaaacgtttaagaaactaacgtcttttacgccaaatagctatcgtaagaaattgact

SEQ ID NO: 567585 - DNA, 75 bp, synthetic construct
  source 1..75: mol_type = other DNA
aaatgaccaactattccgtgacggatattgcgtttgaggccggttatagtagcccgagtttgtttattaaaacgt

SEQ ID NO: 567586 - DNA, 75 bp, synthetic construct
  source 1..75: mol_type = other DNA
atgcagccagtgattaacgcgccggaaattgccactgcccgtgagcagcaattatttaatggcaaaaatttccat

SEQ ID NO: 567587 - DNA, 75 bp, synthetic construct
  source 1..75: mol_type = other DNA
tttgccagccgcattccggtggttagcgccgttgggcatgaaaccgatgtgacgattgccgactttgttgctgat

SEQ ID NO: 567588 - DNA, 75 bp, synthetic construct
  source 1..75: mol_type = other DNA
agtatgcagcccgccggtgaaggtttgctgcaacagaagtacgaacagcttaaagcgaagttgcaggctgaaggt

SEQ ID NO: 567589 - DNA, 75 bp, synthetic construct
  source 1..75: mol_type = other DNA
catgggcaacaggttttagttcgcgccaatattacgctctacgagccgcgcggtgactaccagattatcgtcgaa

SEQ ID NO: 567590 - DNA, 75 bp, synthetic construct
  source 1..75: mol_type = other DNA
cgtaggctgaaaccgaaatcgggcgtccggtatcttgccgagctgtcagattttgataagtcggatgttatccgg

SEQ ID NO: 567591 - DNA, 75 bp, synthetic construct
  source 1..75: mol_type = other DNA
cgcaaaggcctgccttacccccacgtcaatcagcagggcgaaattgaagccgatgccgactggtgggctaccatg

SEQ ID NO: 567592 - DNA, 75 bp, synthetic construct
  source 1..75: mol_type = other DNA
aacgctgtcgatttccgcgaaattgattacacccgcccgacctgtattttgatgggtcaggagaaaacgggcatc

SEQ ID NO: 567593 - DNA, 75 bp, synthetic construct
  source 1..75: mol_type = other DNA
aaaagattgatgctgcagcggcagaaaaaatcagcaccggccaggctggcggaacaaagccggaaggtccgctca

SEQ ID NO: 567594 - DNA, 75 bp, synthetic construct
  source 1..75: mol_type = other DNA
gtgatttaccttttgtcgttgctgcagggaaaaatggcgcgactaccgttgcatcaaccatgattattgcagcac

SEQ ID NO: 567595 - DNA, 75 bp, synthetic construct
  source 1..75: mol_type = other DNA
cgcaaaggtctgccctatccccacgtcaatcagcaaggtgaaattgaagccgatgctaactggtgggccaccatg

SEQ ID NO: 567596 - DNA, 75 bp, synthetic construct
  source 1..75: mol_type = other DNA
cgcaaaggtctgccctacccccacgttaatcagcaaggcgagattgaagccgatgctgactggtggtccaccatg

SEQ ID NO: 567597 - DNA, 75 bp, synthetic construct
  source 1..75: mol_type = other DNA
tgtacttctgtacggtggtgtgtgtgctggtgctgctttccggtggttttaaagctgtccgtaatttctggcgta

SEQ ID NO: 567598 - DNA, 75 bp, synthetic construct
  source 1..75: mol_type = other DNA
tgcggacgaaccccgtaggctgaaaccgaaaccgggcgtccggtatcttgccgagctgtcagattttgataagtc

SEQ ID NO: 567599 - DNA, 75 bp, synthetic construct
  source 1..75: mol_type = other DNA
cgataccggctcgtgttcagagtcatgtgaaatctggggtgatcaattggaattgaaattcgaagaggtaggggt

SEQ ID NO: 567600 - DNA, 75 bp, synthetic construct
  source 1..75: mol_type = other DNA
catattctcggtaccttcgcgctggacgcctatttgattaccggcaatggtacgcgtgtgcattcgcaagaaggc

SEQ ID NO: 567601 - DNA, 75 bp, synthetic construct
  source 1..75: mol_type = other DNA
cgagcgcgcacatttgtgtttttcggcaattaattgcctggaagtgctgccggtggggtgtaataaaggcgcggc

SEQ ID NO: 567602 - DNA, 75 bp, synthetic construct
  source 1..75: mol_type = other DNA
catattctcggggcgctatcgctggatgcgtatttgattaccggcaacggaacgcgcgtgcattctctggaaggt

SEQ ID NO: 567603 - DNA, 75 bp, synthetic construct
  source 1..75: mol_type = other DNA
ttgacgacgctcagcgtggatttatcgctccgctgctggatgaaggtattctgcgcgatgctaatggcaaaccat

SEQ ID NO: 567604 - DNA, 75 bp, synthetic construct
  source 1..75: mol_type = other DNA
tgatactcggaaggggatggagactgggaactggcgacctttgtttgtaaccctggagaagatggctgtagatgg

SEQ ID NO: 567605 - DNA, 75 bp, synthetic construct
  source 1..75: mol_type = other DNA
gctagtaacgaatttagctggaaatgtgaagttagtattatgtaccatcttactatggcgatttacagtaatatg

SEQ ID NO: 567606 - DNA, 75 bp, synthetic construct
  source 1..75: mol_type = other DNA
gagctaatgatccgcttcagagtcgtccttttttctatgccaccagtcgacggacgggagccggtaagattatgg

SEQ ID NO: 567607 - DNA, 75 bp, synthetic construct
  source 1..75: mol_type = other DNA
attatcgcggggaagattataaatttgatatcaatgcgcccgccccgaaaccgttaaccctagcctgtggcgtca

SEQ ID NO: 567608 - DNA, 75 bp, synthetic construct
  source 1..75: mol_type = other DNA
aggacaaacacaaccagcccccagagaaagtatccttatacgaatttctgaaagtgaaggagttagtcttgagtg

SEQ ID NO: 567609 - DNA, 75 bp, synthetic construct
  source 1..75: mol_type = other DNA
atgtcgcagggaaaagaacctgttattgaacgtattggaatgcttacaaagcgctacccttcaagaagtgcagct

SEQ ID NO: 567610 - DNA, 75 bp, synthetic construct
  source 1..75: mol_type = other DNA
cgggaaagcaacatatgttgcttttagatattccagttgatgtcactgagcaaggttggtggaaaaaatcattac

SEQ ID NO: 567611 - DNA, 75 bp, synthetic construct
  source 1..75: mol_type = other DNA
gtcttggtcttgagtgtctattaggtgttgctcttacagcagcaaggcaaagtaatataaatttcaaagatacga

SEQ ID NO: 567612 - DNA, 75 bp, synthetic construct
  source 1..75: mol_type = other DNA
tgtctttaatttctggatgcacacatataaactttgatggttcttataagttgaaaaagcaaacgttagataacc

SEQ ID NO: 567613 - DNA, 75 bp, synthetic construct
  source 1..75: mol_type = other DNA
ttgcatgaatacaaaccagtgggatatcagcgtctggtcgacgagttaaccatgctggtaaagcagttagcctgg

SEQ ID NO: 567614 - DNA, 75 bp, synthetic construct
  source 1..75: mol_type = other DNA
agcatcagaaacacgtattaaccggataaatgctgatataactcagatccagaaggctatttctcaggtcagtaa

SEQ ID NO: 567615 - DNA, 75 bp, synthetic construct
  source 1..75: mol_type = other DNA
acccttttcagcgaaacgtcccttcagaatgacgcaaatcaggcaaaagaattcattactacactggcgaatacc

SEQ ID NO: 567616 - DNA, 75 bp, synthetic construct
  source 1..75: mol_type = other DNA
ccgaaggcgagctcgacaaagtggtgcttgctcgggcaactgacctgcatttcgcaagtccggtcaatgcggcag

SEQ ID NO: 567617 - DNA, 75 bp, synthetic construct
  source 1..75: mol_type = other DNA
ctgccaacgattgcaggccgatacccagacgctggatgttttaccgccgcaggtactgcgtctgcgtaaagtgca

SEQ ID NO: 567618 - DNA, 75 bp, synthetic construct
  source 1..75: mol_type = other DNA
cttatctgcgcccggtaattgcctggtcgccgacggaagaattcacagtttccgcagcaatggaagcgaacgtgg

SEQ ID NO: 567619 - DNA, 75 bp, synthetic construct
  source 1..75: mol_type = other DNA
ataataagattgatgaatttagtggagtagtctgcgataacggctgctggattgatgatgaagggacgtacacca

SEQ ID NO: 567620 - DNA, 75 bp, synthetic construct
  source 1..75: mol_type = other DNA
tttgcaagcccggttaacgcagcggcgatgatggcagccagccgtcggctcaatctgaactgctatcatttcttt

SEQ ID NO: 567621 - DNA, 75 bp, synthetic construct
  source 1..75: mol_type = other DNA
tatctgggggattgctattgttacaggcattctatgtgcctttattgataagaataaacttaatactataaatga

SEQ ID NO: 567622 - DNA, 75 bp, synthetic construct
  source 1..75: mol_type = other DNA
aggctatttctcaggctaataataagcgaagtacagcagtttcacgtattcatgatgctgaagataatttgaaaa

SEQ ID NO: 567623 - DNA, 75 bp, synthetic construct
  source 1..75: mol_type = other DNA
gtgaagaggcccgggctgtggaggtggcacaaaaaaatcttgctgctgcacaatctgagctggcgaaagtggatg

SEQ ID NO: 567624 - DNA, 75 bp, synthetic construct
  source 1..75: mol_type = other DNA
acgctattcagcgaaagctcccttcagcacgatgcaatcaaggcaaaagaatttatcgccacactggtgagtatc

SEQ ID NO: 567625 - DNA, 75 bp, synthetic construct
  source 1..75: mol_type = other DNA
ccgcaattctactggcaacaacgtaatggtgatgaagaagctgccgtcctgggcgcgattacccgttttacgtcg

SEQ ID NO: 567626 - DNA, 75 bp, synthetic construct
  source 1..75: mol_type = other DNA
aagtggtgaaaatggatggagagattaagactctcaattctcgtttaagctccagtatccatgcccgtgatgcag

SEQ ID NO: 567627 - DNA, 75 bp, synthetic construct
  source 1..75: mol_type = other DNA
gaggaaggttggtggaataaatcattacatgcatcactttcacctctttttaaaaagatatcgatgggtaaagaa

SEQ ID NO: 567628 - DNA, 75 bp, synthetic construct
  source 1..75: mol_type = other DNA
gccatgacttataccaaaagcaaaacatttaaaacagaaacaggcgcacgtcgctggcttgccagaaatacttgc

SEQ ID NO: 567629 - DNA, 75 bp, synthetic construct
  source 1..75: mol_type = other DNA
acgtataccaaaagcaaaacatttaaaaccgaaactggtgcgcgccgatggttggagaagcacacagtaagctaa

SEQ ID NO: 567630 - DNA, 75 bp, synthetic construct
  source 1..75: mol_type = other DNA
acgaatctctggtgtacggcgtgtttccaaaccaggacggcacgttcaccgcgatgacgtataccaaaagcaaaa

SEQ ID NO: 567631 - DNA, 75 bp, synthetic construct
  source 1..75: mol_type = other DNA
atgaggtcaacatggatatgctcatcgacctcggcaacaacgaatccctagtgtgtggcgtgttccccaaccagg

SEQ ID NO: 567632 - DNA, 75 bp, synthetic construct
  source 1..75: mol_type = other DNA
atggatactatcgatcttggcaacaacgaatctctggtgtgcggcgtgttccctaaccaggatggaacgtttacc

SEQ ID NO: 567633 - DNA, 75 bp, synthetic construct
  source 1..75: mol_type = other DNA
ccctaaccaggacggcacgtttaccgcgatgacgtataccaaaagtaaaaagtttaaaaccgaagctggcgcgcg

SEQ ID NO: 567634 - DNA, 75 bp, synthetic construct
  source 1..75: mol_type = other DNA
ccgccgaagtggtgagccgtaatcagcaagaattactccgtcaggtgcaatctgcccgtcagcgactggagatgg

SEQ ID NO: 567635 - DNA, 75 bp, synthetic construct
  source 1..75: mol_type = other DNA
gcgcacaaacgcgcattcagcaattggaatatcgtctggcagaaaccctgcgagcacagcttagcgccacgcgtg

SEQ ID NO: 567636 - DNA, 75 bp, synthetic construct
  source 1..75: mol_type = other DNA
gtgaaatctcgaacttcacacaaccggcctccggtcactggtactttacgctcaaagacgataccgcccaggttc

SEQ ID NO: 567637 - DNA, 75 bp, synthetic construct
  source 1..75: mol_type = other DNA
ttcaccgcaatgacgtataccaaaagcaaaacgtttaaaaccgaatctggagcgcgtcgctggactggaagaaat

SEQ ID NO: 567638 - DNA, 75 bp, synthetic construct
  source 1..75: mol_type = other DNA
agtaatctactgcaccgcaggcttttaacacctgcaacggttgatggcagtctggacaaagagctttcatttcaa

SEQ ID NO: 567639 - DNA, 75 bp, synthetic construct
  source 1..75: mol_type = other DNA
gcggcgctgcacgatattttgcatgtgttaaaacgtcgagatccttcactgccggtgattatttatcctactgcc

SEQ ID NO: 567640 - DNA, 75 bp, synthetic construct
  source 1..75: mol_type = other DNA
acgaatccctggtgtgtggcgtgtttcccaaccaggacggcacgttcaccgcgatgacgtataccaaaagcaaaa

SEQ ID NO: 567641 - DNA, 75 bp, synthetic construct
  source 1..75: mol_type = other DNA
agcctgtctccagagcaacaaaagacatatcttcgtgttcgaggccgtcctgatgctggcggggagaatgttgtg

SEQ ID NO: 567642 - DNA, 75 bp, synthetic construct
  source 1..75: mol_type = other DNA
ggcgctaacagcacgaggtcagaacatcacgatgcgcggtcaggatttatctgcttctactgcgcgacgcgggca

SEQ ID NO: 567643 - DNA, 75 bp, synthetic construct
  source 1..75: mol_type = other DNA
ggtaaatctcagcggcagcaatctcaacctgcacaggtatcacagccagcagtaacttttcttcactatggggtg

SEQ ID NO: 567644 - DNA, 75 bp, synthetic construct
  source 1..75: mol_type = other DNA
attatgcgccccgtgccacgccgttccgcaaaaatacaggaacccaaggcaaacgttatgaaagggtgaaaaaat

SEQ ID NO: 567645 - DNA, 75 bp, synthetic construct
  source 1..75: mol_type = other DNA
atagtgtctgagattaaatcactctatgcaaagcgggatgctcttcgtgaagctgtggcaaaacttgaacgtgaa

SEQ ID NO: 567646 - DNA, 75 bp, synthetic construct
  source 1..75: mol_type = other DNA
gattgatgcttgtcgtgaaaaaggcgttgccagtgggaatgattgcgaaccgttgtggcgggtactgagttgctt

SEQ ID NO: 567647 - DNA, 75 bp, synthetic construct
  source 1..75: mol_type = other DNA
gccatgacgtataccaaaagcaaaacgtttaaaaccgaagctggcgcacgtcgctggcttgccaaaaataccagc

SEQ ID NO: 567648 - DNA, 75 bp, synthetic construct
  source 1..75: mol_type = other DNA
ttcactgccatgacgtataccaaaagcaaaacatttaaaaccgaaactggtgcgcgccgatggttggagaagcac

SEQ ID NO: 567649 - DNA, 75 bp, synthetic construct
  source 1..75: mol_type = other DNA
accgcgatgacatataccaaaagcaaaacgtttaaaaccgaaactggcgcgcatcgctggttagccagaaacact

SEQ ID NO: 567650 - DNA, 75 bp, synthetic construct
  source 1..75: mol_type = other DNA
aaactggaaaacctgatcgcgaaactcgatataacacagcctgaagaggtcgtcagaaaacagttatctgaaatc

SEQ ID NO: 567651 - DNA, 75 bp, synthetic construct
  source 1..75: mol_type = other DNA
atggcttcacaagtgctgaagggcttgcaaaccgtaatgcgatagaagaattaaagtcgggtgcgtttgtccaga

SEQ ID NO: 567652 - DNA, 75 bp, synthetic construct
  source 1..75: mol_type = other DNA
gttgatcaccttggaatgtcagcgcttggtcctaatgattatttcaatgttcaggacaagatggctggtcgtgag

SEQ ID NO: 567653 - DNA, 75 bp, synthetic construct
  source 1..75: mol_type = other DNA
tttgatcggctgctgaaaaagctcagcgttgaagccgctctcaatgcagagatgacacaccatcttgggtatgag

SEQ ID NO: 567654 - DNA, 75 bp, synthetic construct
  source 1..75: mol_type = other DNA
cagcgaatgatgtgctgaaaggtgctgttcagggtatcgctgaactgattactcgtccgggtctgatgaacgtcg

SEQ ID NO: 567655 - DNA, 75 bp, synthetic construct
  source 1..75: mol_type = other DNA
caccggctgcatattgagccggatccggcaggcgcgccgaccgcaggctgtatccattttccgtcgtttctggat

SEQ ID NO: 567656 - DNA, 75 bp, synthetic construct
  source 1..75: mol_type = other DNA
tcagctaataggcacgtatatcactacaacgcagtgagcaatgttagcggcattactatgtccgggattgcgcag

SEQ ID NO: 567657 - DNA, 75 bp, synthetic construct
  source 1..75: mol_type = other DNA
tatggccttcgcggagcaggggatcactgaattgtccaagcatgtggactcattgatcaccatcccgaacgacaa

SEQ ID NO: 567658 - DNA, 75 bp, synthetic construct
  source 1..75: mol_type = other DNA
gaaatgaagcgcctgtatgccgtcgggagtgagaacgggggcgacggtgacgcattcgtcagggaggaacgcgaa

SEQ ID NO: 567659 - DNA, 75 bp, synthetic construct
  source 1..75: mol_type = other DNA
tgctcgcaccgggcctggcaatgccgcatggtcgcccggaagagggcgttaagaaaaccggttttgcgctggtga

SEQ ID NO: 567660 - DNA, 75 bp, synthetic construct
  source 1..75: mol_type = other DNA
tcgcaccaggcctggcaatgccgcacggtcgcccggaagagggcgttaagaaaaccggttttgcgctggtgacgc

SEQ ID NO: 567661 - DNA, 75 bp, synthetic construct
  source 1..75: mol_type = other DNA
atgcagcggctggacgatgcttttgtatatggcgcatgtgacagagttgtttccgatattgtaaatgaactgatg

SEQ ID NO: 567662 - DNA, 75 bp, synthetic construct
  source 1..75: mol_type = other DNA
tgttcacgacgttgttcgtgaactgatggaagaaaagcgcgccagccgtcaggtgacagtcccggcggtgatgct

SEQ ID NO: 567663 - DNA, 75 bp, synthetic construct
  source 1..75: mol_type = other DNA
ttacgcggccctgaaggggctgctgcatcacggtctgaaactgaacagtctggctgaacgggcggcgcaggatct

SEQ ID NO: 567664 - DNA, 75 bp, synthetic construct
  source 1..75: mol_type = other DNA
atgggattttttgagaaagatttacgcggtcgagtgaaaggaatcgttcacgtagaccctaaaacaggtaaacga

SEQ ID NO: 567665 - DNA, 75 bp, synthetic construct
  source 1..75: mol_type = other DNA
atgaaaacgataagacccgaatcgatagctcttttttgcctcttatctggagatgcggacctggcgaaacaattg

SEQ ID NO: 567666 - DNA, 75 bp, synthetic construct
  source 1..75: mol_type = other DNA
ttacaatcgttatcagatgcgtttcgtgattattcagtgttgttattgattgctgaaagcggggcattcatacca

SEQ ID NO: 567667 - DNA, 75 bp, synthetic construct
  source 1..75: mol_type = other DNA
gtgaataaaaacttccgccagtcgttgtttgccgcgcaagatgcacaaagtatcctgacgctgctggaaacagaa

SEQ ID NO: 567668 - DNA, 75 bp, synthetic construct
  source 1..75: mol_type = other DNA
atgggcttttttgagaaagatttacgcggtcgagtgaaaggtaatgtccacgtagacccaaaaacagggaaacga

SEQ ID NO: 567669 - DNA, 75 bp, synthetic construct
  source 1..75: mol_type = other DNA
gtggccgatttacgtagtaacgcgcagatgttcgatatcgatgtttcggcgctggagcaactcagagtcgaaatt

SEQ ID NO: 567670 - DNA, 75 bp, synthetic construct
  source 1..75: mol_type = other DNA
gacgcacttaaaagcgcacttagcaaggttggtggtttccgtgcaaaagcaattacatctctttcatatcttggg

SEQ ID NO: 567671 - DNA, 75 bp, synthetic construct
  source 1..75: mol_type = other DNA
catgatcaaatcacaatctgaccttgacgcacttaaaagcgcacttagcaaggttggtggtttccgtgcaaaagc

SEQ ID NO: 567672 - DNA, 75 bp, synthetic construct
  source 1..75: mol_type = other DNA
tagtgacttataatcgtgttaaattattaaataaagtaattgatgccttgcttttacagacatataaaatcgata

SEQ ID NO: 567673 - DNA, 75 bp, synthetic construct
  source 1..75: mol_type = other DNA
ttgtaacctataatagaaaagcattattgctgaaagttatagatgctgttattaaccaaagttatccactaaaaa

SEQ ID NO: 567674 - DNA, 75 bp, synthetic construct
  source 1..75: mol_type = other DNA
atgttcaaatcatcagtatgctcctacgaaaacagggggccttacggaaacaacaagtaccgaggcaactgctcg

SEQ ID NO: 567675 - DNA, 75 bp, synthetic construct
  source 1..75: mol_type = other DNA
gcacgggcgtccggaagagggcgttaagaaaaccggtttctctctggtaacgctgaaaaagccgctggagttcaa

SEQ ID NO: 567676 - DNA, 75 bp, synthetic construct
  source 1..75: mol_type = other DNA
cgctgaccggacatgaaaatgaggtggtatcttggcacggcgctgtactggatagccgccagtatcaatatcagg

SEQ ID NO: 567677 - DNA, 75 bp, synthetic construct
  source 1..75: mol_type = other DNA
ctattcccggcagctgagcagaccaacctgaagactccggcgcaggagacagcagcaaagcaacagtggatcgct

SEQ ID NO: 567678 - DNA, 75 bp, synthetic construct
  source 1..75: mol_type = other DNA
aacactcaggcattgattcctaccatgaatatggcgcgccagttgagcgaagccagcgcctgggaacttttcgcc

SEQ ID NO: 567679 - DNA, 75 bp, synthetic construct
  source 1..75: mol_type = other DNA
aatatggtgcggatgtcagcattgttcacgacgttgttcgtgagctgatggaagaaaagcgtgccagccgtcagg

SEQ ID NO: 567680 - DNA, 75 bp, synthetic construct
  source 1..75: mol_type = other DNA
gtcagacgatgagctggaaaccgtcatgcagcgactggacgatgcttttgaacatggtgcggatgtcagcattgt

SEQ ID NO: 567681 - DNA, 75 bp, synthetic construct
  source 1..75: mol_type = other DNA
gcggaaacgctggaagcagcgggccatgtgaacctgaactcgcgaaagcgtggatatttgctaatctactcgccg

SEQ ID NO: 567682 - DNA, 75 bp, synthetic construct
  source 1..75: mol_type = other DNA
acgtttgctgttaattgaagataacccgctaacccagcgaattaccgttgagatgctgaacaccagtggtgcgca

SEQ ID NO: 567683 - DNA, 75 bp, synthetic construct
  source 1..75: mol_type = other DNA
tcatgcggcggctggacgatgcttttgtatatggcgcatgtgacagagttgtttccgatattgtcaatgaactga

SEQ ID NO: 567684 - DNA, 75 bp, synthetic construct
  source 1..75: mol_type = other DNA
gaacaatggctggtcgaagtggaagacagcggctgcggtattgatcccgcgaaactggctgaaatcttccagcca

SEQ ID NO: 567685 - DNA, 75 bp, synthetic construct
  source 1..75: mol_type = other DNA
gcagcagcgttcatgcgctgaatcgccagcgcgaacagctggcggcacaagtaaaagcgcgcacggctgaattac

SEQ ID NO: 567686 - DNA, 75 bp, synthetic construct
  source 1..75: mol_type = other DNA
gttgaacagcacggtccgtactttgtgctcgcacctggcctggcaatgccgcacggtcgcccggaagagggtgtt

SEQ ID NO: 567687 - DNA, 75 bp, synthetic construct
  source 1..75: mol_type = other DNA
gccggacagtgaatgcgtttttgccgtggtgctgacccgtggggatgtgcgccatatggctcaggactggagcct

SEQ ID NO: 567688 - DNA, 75 bp, synthetic construct
  source 1..75: mol_type = other DNA
ggagcgagaacgggggcgacggtgacgcattcgtcagggaagaacgcgaagcgatggacgttgtgttgcaggcgc

SEQ ID NO: 567689 - DNA, 75 bp, synthetic construct
  source 1..75: mol_type = other DNA
ctgttaattgaagataacccgctaacccagcgaattaccgttgagatgctgaacaccagtggtgcgcaggtcgtt

SEQ ID NO: 567690 - DNA, 75 bp, synthetic construct
  source 1..75: mol_type = other DNA
tggagcagcagccattatctgccccccttccacacgaagaaattacacgcagtgttgccgctctggaagcatggt

SEQ ID NO: 567691 - DNA, 75 bp, synthetic construct
  source 1..75: mol_type = other DNA
taaaccggtgccgcgtgaagtgctcggtcagttactggcgcactatctccaactgcaagccaataacgatctacc

SEQ ID NO: 567692 - DNA, 75 bp, synthetic construct
  source 1..75: mol_type = other DNA
gaaactggctgaaatcttccagccatttgttcaggttagcggcaaacgcggcggcaccgggctggggctgactat

SEQ ID NO: 567693 - DNA, 75 bp, synthetic construct
  source 1..75: mol_type = other DNA
ttgatcgaacaagatcagcgtcaggctgctgaaagtgcactcgatcggctgattgatatcgatcttgagtatgtt

SEQ ID NO: 567694 - DNA, 75 bp, synthetic construct
  source 1..75: mol_type = other DNA
ttgccgctctggaagcatggttgaataagaaagacctgaaccgcgatttgaatcaatatcagccagttaagaata

SEQ ID NO: 567695 - DNA, 75 bp, synthetic construct
  source 1..75: mol_type = other DNA
aaagccagcgaggcgctggaagtcgaggttgttgatacctggcaggcagatgcggtacgcgatacccgtaccctt

SEQ ID NO: 567696 - DNA, 75 bp, synthetic construct
  source 1..75: mol_type = other DNA
gcagcagcaagaacaacaatcactaaactggttaacgcgtctggacgaattgcagcaagaagccagccgccgtca

SEQ ID NO: 567697 - DNA, 75 bp, synthetic construct
  source 1..75: mol_type = other DNA
cgcaatgaaagagcgcattccggtacagatcaaagtgaaaaagatcaacggcctgggctacagcaaactggacaa

SEQ ID NO: 567698 - DNA, 75 bp, synthetic construct
  source 1..75: mol_type = other DNA
gtaacgccgcacttaacgaaatgcgccagcgttataaagaaaaaacgcaacaacttgccgatgtgaaaaccattt

SEQ ID NO: 567699 - DNA, 75 bp, synthetic construct
  source 1..75: mol_type = other DNA
tgcctcgcgttgcaaagccagcagcaaacgttgcagcaacaggaggctctggcagcgcaaagtctgcaaaaagcc

SEQ ID NO: 567700 - DNA, 75 bp, synthetic construct
  source 1..75: mol_type = other DNA
cattaacgaagcagcttcagcgcgatgaaaacgaagcgcaaagcctccgacaagatgagcaagcacttactcaac

SEQ ID NO: 567701 - DNA, 75 bp, synthetic construct
  source 1..75: mol_type = other DNA
ttttctggaaaaagccggatatattaaacggacagatagcagagaggatcgtcgcactaaaaaaatcagtctgac

SEQ ID NO: 567702 - DNA, 75 bp, synthetic construct
  source 1..75: mol_type = other DNA
aaatcatcaggcatcaacaaaacaaagatcctgcatatcctttccgggaacatcttttgatgcaactctgtatcc

SEQ ID NO: 567703 - DNA, 75 bp, synthetic construct
  source 1..75: mol_type = other DNA
atgaaaccgtattaattcattatgtcgaaaaaaatcgaagaaatggtttcgatagcaaatcgcaggaacatgcag

SEQ ID NO: 567704 - DNA, 75 bp, synthetic construct
  source 1..75: mol_type = other DNA
acatgctgagcaacgcccactgcgtcagcacctggtcgcgctacatggacagattgttccccaacaaaaacgtct

SEQ ID NO: 567705 - DNA, 75 bp, synthetic construct
  source 1..75: mol_type = other DNA
accacgcggcgaagcagtcagcagaattacagcagcagcaacaaagcctgaatgcctggttacaggaacacgacc

SEQ ID NO: 567706 - DNA, 75 bp, synthetic construct
  source 1..75: mol_type = other DNA
acatgctgagcaacgcccactgcgtcagcacctggtcgcgctgcatgggcagattgttccccaacaaaaacgtct

SEQ ID NO: 567707 - DNA, 75 bp, synthetic construct
  source 1..75: mol_type = other DNA
agcgatgaaagagcgtattccggtgcagatcaaagtgaagaagatcaatggactgggctacagcaaactggaaag

SEQ ID NO: 567708 - DNA, 75 bp, synthetic construct
  source 1..75: mol_type = other DNA
aaaatgactcagatggttggaaagccaatagattacttgatgagtaaacttcccaaaggggcagaagcacaaatt

SEQ ID NO: 567709 - DNA, 75 bp, synthetic construct
  source 1..75: mol_type = other DNA
atgagtcttgaagaaagagaactgctagatttagaaaaagctgtaaaattgttagagcaggctacaattacagaa

SEQ ID NO: 567710 - DNA, 75 bp, synthetic construct
  source 1..75: mol_type = other DNA
catttgttgatgcaactctgtattcgcacaaataaaagaatgcaggataatatatctgaatttctgggggcgtat

SEQ ID NO: 567711 - DNA, 75 bp, synthetic construct
  source 1..75: mol_type = other DNA
atgcgcagtccgtcaaagattgtcgccgttactcctgcggcgatagagatcgaaaaacgcgcgattgaaagagag

SEQ ID NO: 567712 - DNA, 75 bp, synthetic construct
  source 1..75: mol_type = other DNA
gatctggataaggtggagacaaaacaggcttgtttggaggtgtttgccttgggaggaccatctgagaatgatgat

SEQ ID NO: 567713 - DNA, 75 bp, synthetic construct
  source 1..75: mol_type = other DNA
tacagtctagtggaaaaggctcttcataaggctgctgatgctgctctatggagtttaaacaatgagcccaatcga

SEQ ID NO: 567714 - DNA, 75 bp, synthetic construct
  source 1..75: mol_type = other DNA
gcagccgcaggacgatattcaaccgtggcttgatgcacaagatgagcacgaacaacagttgcgattgctcagtca

SEQ ID NO: 567715 - DNA, 75 bp, synthetic construct
  source 1..75: mol_type = other DNA
ttcttgcggcgttaatggatgagcagacgctaacgcagctggaacagctgaaacagaatctggaaaaccagcgtc

SEQ ID NO: 567716 - DNA, 75 bp, synthetic construct
  source 1..75: mol_type = other DNA
agcatcagcaacaccggcccgatgggttggatctcactgtgacggcggaacagattcaacaagagttagcgcaaa

SEQ ID NO: 567717 - DNA, 75 bp, synthetic construct
  source 1..75: mol_type = other DNA
atgcaactttgtattcgcgcaaataaaaggatgcaggataatatatctgaatttctgggggcgtatggaataaat

SEQ ID NO: 567718 - DNA, 75 bp, synthetic construct
  source 1..75: mol_type = other DNA
tcagcgttataaagaaaaaacgcaacaacttgccgatgtcaaaaccatttgcgagcaggaagcgcgcatcaaaac

SEQ ID NO: 567719 - DNA, 75 bp, synthetic construct
  source 1..75: mol_type = other DNA
aaactggcggcaaattcatgaacaatgcctcgcgttacaaagccagtgccggaccttaaagcaacaggaggttct

SEQ ID NO: 567720 - DNA, 75 bp, synthetic construct
  source 1..75: mol_type = other DNA
gcgggtctggtaatacccggcgttaccctgacggtgctgagccggacctgttgccgcgtgccgaggttctggccg

SEQ ID NO: 567721 - DNA, 75 bp, synthetic construct
  source 1..75: mol_type = other DNA
aaagaatttaatggactctggcaatcctgctacaccccagacttcaacacccagcgctggagccgcaatctcccg

SEQ ID NO: 567722 - DNA, 75 bp, synthetic construct
  source 1..75: mol_type = other DNA
gcaatcatccctccagggattgctcatacaaatgcatgtcgtagttattattttaaggaggcagaagatttatta

SEQ ID NO: 567723 - DNA, 75 bp, synthetic construct
  source 1..75: mol_type = other DNA
ggtacatccgtcacggtgaagtcgatctcattgtctggcgtcacgttaagtgatggcaccacccttactttctga

SEQ ID NO: 567724 - DNA, 75 bp, synthetic construct
  source 1..75: mol_type = other DNA
ggtcctgttcctggtatcaaagatgagcaggaaattgaaggcaaaatcaaagtctcctggaatacgtcgggccac

SEQ ID NO: 567725 - DNA, 75 bp, synthetic construct
  source 1..75: mol_type = other DNA
acgagccgaagaaggtgacggattattatcgtttggtttatagagcaatgattgggtcggcttcggaaagaacgt

SEQ ID NO: 567726 - DNA, 75 bp, synthetic construct
  source 1..75: mol_type = other DNA
gaaccggcgatgggcagcgcggcgttccttaacgaagccatcaaccagctggcggaagcgtatctgttccacaag

SEQ ID NO: 567727 - DNA, 75 bp, synthetic construct
  source 1..75: mol_type = other DNA
ccacacataacgaagaattgattgaattatacaaatcaaaaaacattcctttgtttatggaaaaatgtgtggagt

SEQ ID NO: 567728 - DNA, 75 bp, synthetic construct
  source 1..75: mol_type = other DNA
aaattttatgagcgagccagactctggcgcgaagagcgtgcaggagacggcagcgtaatcaccctggtgtgcttt

SEQ ID NO: 567729 - DNA, 75 bp, synthetic construct
  source 1..75: mol_type = other DNA
taattgcgttaagttcattattgttggcagggtgtgactcatcgaaggatgccaataaagcaaactttgaaaaag

SEQ ID NO: 567730 - DNA, 75 bp, synthetic construct
  source 1..75: mol_type = other DNA
cattccaggaaatggcatcgaatgtggttcgctctcaactggcgactcttgacctgagtactgtagaaaaggaaa

SEQ ID NO: 567731 - DNA, 75 bp, synthetic construct
  source 1..75: mol_type = other DNA
atggaatttaaagatttaccagtaccattccaggaaatggcagcgaatatagttcgttctcaactggcgactctt

SEQ ID NO: 567732 - DNA, 75 bp, synthetic construct
  source 1..75: mol_type = other DNA
ttgtacaatacaaaaaatattcctctgtttatggagaaatgcgtcgagtacggtaaaactctcgcggtcgccggg

SEQ ID NO: 567733 - DNA, 75 bp, synthetic construct
  source 1..75: mol_type = other DNA
acaatcttgcggcagactcaattccctcaagattcatcacaatgggttttatctggcccgcacttctttgttggg

SEQ ID NO: 567734 - DNA, 75 bp, synthetic construct
  source 1..75: mol_type = other DNA
aggttctgaagagcatgaaggtgccagatgattttaaatcaaatggctttgtttatgtgctttcgaatgagtgca

SEQ ID NO: 567735 - DNA, 75 bp, synthetic construct
  source 1..75: mol_type = other DNA
taatcattgtctttcgccctcaaagataagcagagaactccagtttaccaaaacaaacattacccgcattacaga

SEQ ID NO: 567736 - DNA, 75 bp, synthetic construct
  source 1..75: mol_type = other DNA
catctgttgatacaactctgtatccgcgtaaacaaaaaaatacaggataatatatcgagtttactcagtggatat

SEQ ID NO: 567737 - DNA, 75 bp, synthetic construct
  source 1..75: mol_type = other DNA
atatcctgtttgattttgcgtttagcggacaggcgctggcgctgatgcagcagcacgggccgcgcgtgtggccgc

SEQ ID NO: 567738 - DNA, 75 bp, synthetic construct
  source 1..75: mol_type = other DNA
ctcggtattaactacaccacagttagcttttggatatttcaatgctggttttttactgataaatattgatgagtg

SEQ ID NO: 567739 - DNA, 75 bp, synthetic construct
  source 1..75: mol_type = other DNA
atgaacaacacagactcattagaaaaaataatcaaacatcaacaaaacaacgatccaaaatacccctgccaggag

SEQ ID NO: 567740 - DNA, 75 bp, synthetic construct
  source 1..75: mol_type = other DNA
cgataacctcgacttgctaactctgcctgacgactatctgccgcgcactaactacattccggcatgtgatgcaca

SEQ ID NO: 567741 - DNA, 75 bp, synthetic construct
  source 1..75: mol_type = other DNA
acaccccggaagtgctgacccgctccttggttaaatatgccctgaaagagctgtttaaagagctaattgatccga

SEQ ID NO: 567742 - DNA, 75 bp, synthetic construct
  source 1..75: mol_type = other DNA
ttgctatatgtcttcagataagatcgtagggggtattaagaatgatcaggatgaatggaacctggaggggcatcc

SEQ ID NO: 567743 - DNA, 75 bp, synthetic construct
  source 1..75: mol_type = other DNA
gcagtgaaggcggacaccgactctttgatgaagaagacatacaacgcatcgaagagatcaagcgttggataagta

SEQ ID NO: 567744 - DNA, 75 bp, synthetic construct
  source 1..75: mol_type = other DNA
tttgactttctcgctcttcattatattggtaatgactctaacttattgatagtgttttatgttcagataatgccc

SEQ ID NO: 567745 - DNA, 75 bp, synthetic construct
  source 1..75: mol_type = other DNA
tcgtccggcgattttatggaacgatacccgcagtgctcttgagtgtgctgaactggaagagatagcaccggagct

SEQ ID NO: 567746 - DNA, 75 bp, synthetic construct
  source 1..75: mol_type = other DNA
aattaagccgcctgacctgatcgccaccatcgcatgcagcagctgccacgacgagatagatcgccgtacgcgttt

SEQ ID NO: 567747 - DNA, 75 bp, synthetic construct
  source 1..75: mol_type = other DNA
atttaatcgacgggcgggtaaaaaccagcgattacaccaaagaagaattacgcctgatgcatgcagaaggtgttt

SEQ ID NO: 567748 - DNA, 75 bp, synthetic construct
  source 1..75: mol_type = other DNA
cactggttatctggctgaaagaggggttattaaggcgtgaatacctacagcatcacattaccctggcctccgagc

SEQ ID NO: 567749 - DNA, 75 bp, synthetic construct
  source 1..75: mol_type = other DNA
cgtatcaaaattgcttacatcaacgcatttaactggatgtacgccatgcttcaggttggtcatcgtcaatttgaa

SEQ ID NO: 567750 - DNA, 75 bp, synthetic construct
  source 1..75: mol_type = other DNA
aattgcttgcaaagctggaacgtctggagagacagggacagtttttattaccgggattcgataaaggtattcagg

SEQ ID NO: 567751 - DNA, 75 bp, synthetic construct
  source 1..75: mol_type = other DNA
agaaagatgttgccagtatgtcaggtcgtttgctcaatcgctggggcagggtgaagaagcctcagttgctggcaa

SEQ ID NO: 567752 - DNA, 75 bp, synthetic construct
  source 1..75: mol_type = other DNA
gaaaattcgcggtgagcacccgaacgagatcgccggggcagcaaccgcgctactggaaaacgccgcgccgttccc

SEQ ID NO: 567753 - DNA, 75 bp, synthetic construct
  source 1..75: mol_type = other DNA
cgctggttggcagtaatattccggcaggtttaaccatcaacgcccattttaatggcatggtgatggcggtgcgcc

SEQ ID NO: 567754 - DNA, 75 bp, synthetic construct
  source 1..75: mol_type = other DNA
taccaaaccgccagacctgattgccaccattgcatgttctgcctgccacgacgaaatcgaccgtcgcacgcattt

SEQ ID NO: 567755 - DNA, 75 bp, synthetic construct
  source 1..75: mol_type = other DNA
cggtttaaccatcaacgcccattttaatggcatggtgatggcggtgcgtcacgatgcagatcgcgtttgcggttt

SEQ ID NO: 567756 - DNA, 75 bp, synthetic construct
  source 1..75: mol_type = other DNA
atccgccgctggcgttaattggtgtctacagcccggaactggtgctgccgattgccgaaaccttgcgcgtgctgg

SEQ ID NO: 567757 - DNA, 75 bp, synthetic construct
  source 1..75: mol_type = other DNA
gtgctgatgctttctcctggccccggagtgccgagtgaagcgggttgtatgccggaactcctcacccgtttgcgt

SEQ ID NO: 567758 - DNA, 75 bp, synthetic construct
  source 1..75: mol_type = other DNA
tgacccatcgtcgaccggtgcaggatgaaaatcgcattaccgggtcggtgctcggcgctgttgctggcggcgtga

SEQ ID NO: 567759 - DNA, 75 bp, synthetic construct
  source 1..75: mol_type = other DNA
gctggtggatattcagcacggacacaaaacgggctactacctggaccagcgtgatagccgcctggctacccgccg

SEQ ID NO: 567760 - DNA, 75 bp, synthetic construct
  source 1..75: mol_type = other DNA
tcgccgtatcggcactgatgggcggttgcagccaggttgtcagcgttgatacctcccaggaagcgctggatattg

SEQ ID NO: 567761 - DNA, 75 bp, synthetic construct
  source 1..75: mol_type = other DNA
cctgcaagcgtttcgaccataagggagcagaacaaacttaatgaattccgtaagcaatggatgcttgcgtttctg

SEQ ID NO: 567762 - DNA, 75 bp, synthetic construct
  source 1..75: mol_type = other DNA
tttcgcgcttcaaatgaaacagcagtattaattactgctttttattcattacacggggatcacttagggtatggc

SEQ ID NO: 567763 - DNA, 75 bp, synthetic construct
  source 1..75: mol_type = other DNA
ctccaggaaagcgatacttacacgactacgcaacagcgttgtaaaacggtgtatgacaagtcagaaaaaatgctc

SEQ ID NO: 567764 - DNA, 75 bp, synthetic construct
  source 1..75: mol_type = other DNA
cagcagggcaaaatccgcatggaccgcgatccgggtacgcagatcccgctagatagcaacgggcaactgattttg

SEQ ID NO: 567765 - DNA, 75 bp, synthetic construct
  source 1..75: mol_type = other DNA
ctctaaatcgtgcacaggctctggcgaagatcgcagaaatcaaagctaagtttgggctgaaaggagacagagcat

SEQ ID NO: 567766 - DNA, 75 bp, synthetic construct
  source 1..75: mol_type = other DNA
gcattcaggctctgctaaaaatgccagataacattccggctccctccctgattcaggttataaatgacacaatat

SEQ ID NO: 567767 - DNA, 75 bp, synthetic construct
  source 1..75: mol_type = other DNA
ggatggcgcgtatcttctcaatctggctcgtggcgtccatgttgtggaagatgacctgattgcagcgttggataa

SEQ ID NO: 567768 - DNA, 75 bp, synthetic construct
  source 1..75: mol_type = other DNA
cttatatccgtggctgaagaatctgttttctgtttgggtgattttattttgcccttcaatgggaccgctaccaca

SEQ ID NO: 567769 - DNA, 75 bp, synthetic construct
  source 1..75: mol_type = other DNA
agctttatgctgggcagtgagaaattcaccctcaccaactggaacgagtacgagtttgatcgtgatgccacctac

SEQ ID NO: 567770 - DNA, 75 bp, synthetic construct
  source 1..75: mol_type = other DNA
attgtgagatcaattaccgatctggcgaaagcgaagtcattgagtgtggtcgcggagtttgtcgagacgcaacag

SEQ ID NO: 567771 - DNA, 75 bp, synthetic construct
  source 1..75: mol_type = other DNA
cctctgttgaaagagaggccggctctgacaccaacaactctgctggagatgctacaggataaatatcccggccag

SEQ ID NO: 567772 - DNA, 75 bp, synthetic construct
  source 1..75: mol_type = other DNA
ctgtttccggcggcagtggtaaccaacctgaagaggccagagcaggaagtcgctgcaaaacagcagtggattgct

SEQ ID NO: 567773 - DNA, 75 bp, synthetic construct
  source 1..75: mol_type = other DNA
gcttcccggaagcgataaatagcgtgtacccgcagacgcatattcagctctgcatcatccatatggtgcgcaaca

SEQ ID NO: 567774 - DNA, 75 bp, synthetic construct
  source 1..75: mol_type = other DNA
cgcaaggccatctacacgacgaatgccatcgaatcgctgaacagcgtcattcggcaggcgataaagaagcgcaag

SEQ ID NO: 567775 - DNA, 75 bp, synthetic construct
  source 1..75: mol_type = other DNA
gattgttataccagtccacccacgttagtgtggccagttccacttctgtccggtttttccagctcttacggtgta

SEQ ID NO: 567776 - DNA, 75 bp, synthetic construct
  source 1..75: mol_type = other DNA
tggcggtaaagaagggctgaatggcgcagttgcactgtggtggaatgcaacatcacacattactacggggattca

SEQ ID NO: 567777 - DNA, 75 bp, synthetic construct
  source 1..75: mol_type = other DNA
tcaccaactggaacgagtacgagtttgatcgtgatgccacctacgcagcaggtaatggcggtaaagaagggctga

SEQ ID NO: 567778 - DNA, 75 bp, synthetic construct
  source 1..75: mol_type = other DNA
gatgcacgatacccgcagataagtcgcagctggcgggcaaactggtcgaatattgccaccttcttcgtgtacccg

SEQ ID NO: 567779 - DNA, 75 bp, synthetic construct
  source 1..75: mol_type = other DNA
aactggcacgaattgctctggcatcgctggaagcagagcctgttctgtatcagtcctgcactcgccccacttgga

SEQ ID NO: 567780 - DNA, 75 bp, synthetic construct
  source 1..75: mol_type = other DNA
aaccgtgataagaactgctcttacgactacctgctgcacccggctatttctaaaatcattggcggttgcggtccg

SEQ ID NO: 567781 - DNA, 75 bp, synthetic construct
  source 1..75: mol_type = other DNA
ccatttcaaagaacttgtagagcgactgagtaatgtaaaaggtgtgggaattatgacagtagcgacgttgttagc

SEQ ID NO: 567782 - DNA, 75 bp, synthetic construct
  source 1..75: mol_type = other DNA
caaagctttgccggacgtgatgaactggaggcgtttctgagccagtgccgtgtgctgataaatctgttaccaaat

SEQ ID NO: 567783 - DNA, 75 bp, synthetic construct
  source 1..75: mol_type = other DNA
ggtcacgcgcaggtgaaagctggcatagaagaagatgccattccgacgattcattacagttcgcaggtggcggaa

SEQ ID NO: 567784 - DNA, 75 bp, synthetic construct
  source 1..75: mol_type = other DNA
tagtcgtgagggctacgaagacgatttgcgctttacagacacgcctgaccatgccggttggataaacaaatgccg

SEQ ID NO: 567785 - DNA, 75 bp, synthetic construct
  source 1..75: mol_type = other DNA
gtgtcgccttgaggcggcattaaacattaagccggggcatacgcttggcattattgatgcactattggttcataa

SEQ ID NO: 567786 - DNA, 75 bp, synthetic construct
  source 1..75: mol_type = other DNA
atttatttagaaaatctaaaacaccccatttcgacggtgttaagttttcggcgtcaatagattatacaacagata

SEQ ID NO: 567787 - DNA, 75 bp, synthetic construct
  source 1..75: mol_type = other DNA
gacgctattcatgtacgtggtccaaaagttattaacggcgaggaacgtattacacgaacgcctctggcgggatta

SEQ ID NO: 567788 - DNA, 75 bp, synthetic construct
  source 1..75: mol_type = other DNA
aacattcaatgatcgtcgccacgcaagggctaacgcccgaccaccatcttctgctgcaaatttatgatcgcgcca

SEQ ID NO: 567789 - DNA, 75 bp, synthetic construct
  source 1..75: mol_type = other DNA
ctggcggtacggtgaaactggccgatctgctggatgaagccctggaacgcgcacgccgtctggtggcagagaaaa

SEQ ID NO: 567790 - DNA, 75 bp, synthetic construct
  source 1..75: mol_type = other DNA
cagagcaggtgctgactcatctggatcttaacggtatcgccagcaaagttgagatcgccggtccaggctttatca

SEQ ID NO: 567791 - DNA, 75 bp, synthetic construct
  source 1..75: mol_type = other DNA
gcgctgactggcgcaatatcttcgtcgtcggcgatctgcatgggtgctacacgctgctgatgaatgagctcgaaa

SEQ ID NO: 567792 - DNA, 75 bp, synthetic construct
  source 1..75: mol_type = other DNA
aaagagatgcacgtcggtcacctgcgttccaccatcattggtgatgcggcagtacgtaccctcgagttcctcggt

SEQ ID NO: 567793 - DNA, 75 bp, synthetic construct
  source 1..75: mol_type = other DNA
acatgcagtatgcctacacccgcgtattgtccgtgttccgtaaagcggaaattaacgaagaacaactggctgccg

SEQ ID NO: 567794 - DNA, 75 bp, synthetic construct
  source 1..75: mol_type = other DNA
cgtctgaaactggcacaactgacggcgaagacgctgaaactgggtctggatacgctgggtattgagacagtagag

SEQ ID NO: 567795 - DNA, 75 bp, synthetic construct
  source 1..75: mol_type = other DNA
tatacgcgcattgggctggatcgctggagtaactgggactggcaggatgatattgaacgtgaaggccatgatttt

SEQ ID NO: 567796 - DNA, 75 bp, synthetic construct
  source 1..75: mol_type = other DNA
gccagcttcagaaaatggggatgacgccggagcagattaagcaggctaccggactttccgatgacgaactgaaga

SEQ ID NO: 567797 - DNA, 75 bp, synthetic construct
  source 1..75: mol_type = other DNA
ctttaatatcggcgcgatgtacgaaatagaaaacgtcgagggttatggcgaagatatggatgggctggcggagcc

SEQ ID NO: 567798 - DNA, 75 bp, synthetic construct
  source 1..75: mol_type = other DNA
gacgatagccgcaacaacggtgagttttcaacccaggagatccgtgcctatttgcctataacgctaggtaatcat

SEQ ID NO: 567799 - DNA, 75 bp, synthetic construct
  source 1..75: mol_type = other DNA
aagtgggtgaacagtcgatcatttcccgtgcgggcggtgcgccgacgctggcggtggggatggcctacattctgc

SEQ ID NO: 567800 - DNA, 75 bp, synthetic construct
  source 1..75: mol_type = other DNA
ccgtgcgggcggtgcgccgaccctggcggtggggatggcctacattctgcacggcgcgctgggcggcatgatgga

SEQ ID NO: 567801 - DNA, 75 bp, synthetic construct
  source 1..75: mol_type = other DNA
cgcaaatgggttacctgccggggatgatctggctgctcgccggggtggttctcgccggtgcggtgcaggatttca

SEQ ID NO: 567802 - DNA, 75 bp, synthetic construct
  source 1..75: mol_type = other DNA
ggtatcagcgcagccggataccgtgactgatacggctgctctggtcacggtcgtggcactggtgacgctgcatac

SEQ ID NO: 567803 - DNA, 75 bp, synthetic construct
  source 1..75: mol_type = other DNA
aacgtataccgttgcgttcaccattccgctggcgatttttatgggaatctacctgcgctatctgcgtccgggccg

SEQ ID NO: 567804 - DNA, 75 bp, synthetic construct
  source 1..75: mol_type = other DNA
ccgctggcgctttttatggggatctacctgcgctacctgcgtccaggtcgcattggtgaagtgtcgatcatcggt

SEQ ID NO: 567805 - DNA, 75 bp, synthetic construct
  source 1..75: mol_type = other DNA
acgccaaagagaaaagcctccagcctggtgggcccgagagattcccgtggcgtcacccggtcatgtactggattg

SEQ ID NO: 567806 - DNA, 75 bp, synthetic construct
  source 1..75: mol_type = other DNA
gacacccctctcagccaggaaaatgcgctgaccgggcatgaaaatgaggtggtatcagcgcagccggacaccgtg

SEQ ID NO: 567807 - DNA, 75 bp, synthetic construct
  source 1..75: mol_type = other DNA
gatgttaatggaatccttcgtggcgattatggcgctggtttccgcctgtatcatcgatccgggcgtgtacttcgc

SEQ ID NO: 567808 - DNA, 75 bp, synthetic construct
  source 1..75: mol_type = other DNA
tttggtattgccaaccagatgctggcagggatggcgctgatgctctgtgccgtggtgttgttcaaaatgaaacgt

SEQ ID NO: 567809 - DNA, 75 bp, synthetic construct
  source 1..75: mol_type = other DNA
gctggcagggatggcgctgatgctctgtgctgtggtgctgttcaaaatgaaacgtcaacgttacgcctgggggcg

SEQ ID NO: 567810 - DNA, 75 bp, synthetic construct
  source 1..75: mol_type = other DNA
cgttaacgcaggggactctgtatcaccggaatttatgcgggcgctggccgagcgcctgccgcagcatgaggataa

SEQ ID NO: 567811 - DNA, 75 bp, synthetic construct
  source 1..75: mol_type = other DNA
ggcggcagacctctaaatcgtgttcaggcgctggcgaagatcgcagaaattaaagctaagttcggactgaaagga

SEQ ID NO: 567812 - DNA, 75 bp, synthetic construct
  source 1..75: mol_type = other DNA
acctgtaccagaacatgcgagccaatgcgctgactgacgcggaattacggcgcaaggctgccgatgaactgacct

SEQ ID NO: 567813 - DNA, 75 bp, synthetic construct
  source 1..75: mol_type = other DNA
atggcaacggttaataaacaagccattgctgcggcatttggtcgggcagccgcacattatgagcaacatgcggat

SEQ ID NO: 567814 - DNA, 75 bp, synthetic construct
  source 1..75: mol_type = other DNA
cgtgatggatccgccgaagtttgttgagaacaaaagccagttgatgggcgcctgccgtggctataaagacatcaa

SEQ ID NO: 567815 - DNA, 75 bp, synthetic construct
  source 1..75: mol_type = other DNA
catgctggcgattcagttgctgaatgaaggcggagttctcctgactttctcctgttctggcctgatgaccagcga

SEQ ID NO: 567816 - DNA, 75 bp, synthetic construct
  source 1..75: mol_type = other DNA
atccatcgacattgcctttttcacccgacgcttacaacaggcgcaaaagtggcgcgactggctggcgaaaaaaga

SEQ ID NO: 567817 - DNA, 75 bp, synthetic construct
  source 1..75: mol_type = other DNA
gtcagcagatattgaacaggcgctaaaaggttttcgttatcaacataatatgcagcctgtcacgctgtggtttga

SEQ ID NO: 567818 - DNA, 75 bp, synthetic construct
  source 1..75: mol_type = other DNA
ctgtatccggatgcagagtcttatccgtggaaatcgaacgcgcattactggttggttaccaacttgtaccagaac

SEQ ID NO: 567819 - DNA, 75 bp, synthetic construct
  source 1..75: mol_type = other DNA
ttcccggcgagcctggctaaccgggaccagaatgaactgaacgaaatccgccgccagtgggttctggctttccgg

SEQ ID NO: 567820 - DNA, 75 bp, synthetic construct
  source 1..75: mol_type = other DNA
agcgtctgccgcagcatgaggataaactgatgactatcgcagaacgtcttgagcaaaaaggtcgccaggagggca

SEQ ID NO: 567821 - DNA, 75 bp, synthetic construct
  source 1..75: mol_type = other DNA
acggttgaatttttgcagacgctggcgcagcgactgccgcagcacgaggacagcattatgacactggcagaacgt

SEQ ID NO: 567822 - DNA, 75 bp, synthetic construct
  source 1..75: mol_type = other DNA
gtcgttgatgacaatgaaatcatgaaccatcgccggatggccgcactgacgctgctgatgaagcatatccgccat

SEQ ID NO: 567823 - DNA, 75 bp, synthetic construct
  source 1..75: mol_type = other DNA
cgcccacgccgcatgatgccgcgttccggtcgttcctggcgaattccgacgtcgccagggattttctggagttgc

SEQ ID NO: 567824 - DNA, 75 bp, synthetic construct
  source 1..75: mol_type = other DNA
tcgtgatggctggatttctgagtggtcaggctgctgctgcgcctgagcaagcttcgcacgctgatatccgtgaca

SEQ ID NO: 567825 - DNA, 75 bp, synthetic construct
  source 1..75: mol_type = other DNA
cgttaacgcagggactctgtatcaccggaatttatgcgggcgctggctgagcgtctgccgcagcatgaggataaa

SEQ ID NO: 567826 - DNA, 75 bp, synthetic construct
  source 1..75: mol_type = other DNA
cattgcgcgtcagcttcagaaaatggggatgacacctgagcagattaagcaggccaccggactttccgaagctga

SEQ ID NO: 567827 - DNA, 75 bp, synthetic construct
  source 1..75: mol_type = other DNA
gccactggtgattccggtgctgttctatcatggtgagcgcagcccgtacccgtacagcatgaactggctggactg

SEQ ID NO: 567828 - DNA, 75 bp, synthetic construct
  source 1..75: mol_type = other DNA
gccgcttatgtcatcttcggcattcccagcaacattatgctgagtattgtcggtgcgcggcgctggatcgccacc

SEQ ID NO: 567829 - DNA, 75 bp, synthetic construct
  source 1..75: mol_type = other DNA
ggaagatggcgatcacgacaccgttatagccaacgttgttcaggaatgtttcggtcatgaatgccggtacaaagt

SEQ ID NO: 567830 - DNA, 75 bp, synthetic construct
  source 1..75: mol_type = other DNA
actaacctgaaggcgaagcaggccgtcattaccacgatgttcactccccgtcatccagtctgcgtggtgtcagcg

SEQ ID NO: 567831 - DNA, 75 bp, synthetic construct
  source 1..75: mol_type = other DNA
tatcgtggctgactctcttgcgtctatggttccgaactccaaagccgagaagttcgaaaagatggctgaaggcac

SEQ ID NO: 567832 - DNA, 75 bp, synthetic construct
  source 1..75: mol_type = other DNA
atgaaaacagttttgacgttggcctggctgtcgccaatggcctgaacgcagatgaggatgacggtcagtgggtat

SEQ ID NO: 567833 - DNA, 75 bp, synthetic construct
  source 1..75: mol_type = other DNA
gatggtctggcggtattcctcgatcatgaaaacagttttgacgttggcctggctgtcgccaatggcctgaacgca

SEQ ID NO: 567834 - DNA, 75 bp, synthetic construct
  source 1..75: mol_type = other DNA
accgggttaatcggattctcgtcaggtttccataccatgatgaacgccgacacgttagtgctactcggtactcag

SEQ ID NO: 567835 - DNA, 75 bp, synthetic construct
  source 1..75: mol_type = other DNA
aagccttgcaacgcgccttttccatcgacggcccggtgctggtggatgtggtagtcgcgaaagaagagttagcca

SEQ ID NO: 567836 - DNA, 75 bp, synthetic construct
  source 1..75: mol_type = other DNA
cgtgaaacgcatctggggagtcacgggcgactctctgaacggtcttagcgacagtcttaatcgcatgggcaccat

SEQ ID NO: 567837 - DNA, 75 bp, synthetic construct
  source 1..75: mol_type = other DNA
gcagctcgtgacctgcaactcatcaaaccacaaaactgtgcagccaattttaaacgcatgatgggcacatcaaag

SEQ ID NO: 567838 - DNA, 75 bp, synthetic construct
  source 1..75: mol_type = other DNA
ctggcgtatggtttgcataataaggatgatgaacatcaatttctggtattcgatttaggtggtggtacgtttgat

SEQ ID NO: 567839 - DNA, 75 bp, synthetic construct
  source 1..75: mol_type = other DNA
gcctttctgtcctggcttacacagttgaaggccgtattcaatccgcgccgattctggcggctgccgtcgatattg

SEQ ID NO: 567840 - DNA, 75 bp, synthetic construct
  source 1..75: mol_type = other DNA
aggtgcgtaccaaaattggtgtgatgtttggcgatccgactacgtctccgggtggcgactctccgaagttctacg

SEQ ID NO: 567841 - DNA, 75 bp, synthetic construct
  source 1..75: mol_type = other DNA
cgcagataccatgctgctgacggaacgtggaatggtaacagtgaaagagttgtttgagattgaagggtacaaagc

SEQ ID NO: 567842 - DNA, 75 bp, synthetic construct
  source 1..75: mol_type = other DNA
acgactatttggtcgtataccggcaatgcatttaaacccggatgaagtcattgcccagggcgcggctattcaggc

SEQ ID NO: 567843 - DNA, 75 bp, synthetic construct
  source 1..75: mol_type = other DNA
tatatgctgcgcgcaatcatcagcggacgcggtgatgaagtgatcgaactggcgaaaacgaactggctaaggtaa

SEQ ID NO: 567844 - DNA, 75 bp, synthetic construct
  source 1..75: mol_type = other DNA
cctgaacaggcgttgcgctgggcgctctctggcggtgaagattacgagttgtgtttcacggtgccggaactgaac

SEQ ID NO: 567845 - DNA, 75 bp, synthetic construct
  source 1..75: mol_type = other DNA
accttacaacaagacggaaatattcctatagagtcaggggagttaaaagccaccagtacttttcaggtgacctat

SEQ ID NO: 567846 - DNA, 75 bp, synthetic construct
  source 1..75: mol_type = other DNA
tcacaccggaagaagaagagttacgcaaactggcgcaactgctgcgttactccagcaatatcgccctgatgtgcg

SEQ ID NO: 567847 - DNA, 75 bp, synthetic construct
  source 1..75: mol_type = other DNA
ccaggcaacgttaaaacaagacggaaatatcgctatcgaatccggtgaattcaaagccaccagtaccttccaggt

SEQ ID NO: 567848 - DNA, 75 bp, synthetic construct
  source 1..75: mol_type = other DNA
aatgttaaattaaccaaccccacctgctttactgctgtacttaccggtgaaccgccccgggtttcctggagagtg

SEQ ID NO: 567849 - DNA, 75 bp, synthetic construct
  source 1..75: mol_type = other DNA
cctttatatcgactttgatctcctcaatgttaaattaaccaaccccacctgctttactgctgtacttaccggtga

SEQ ID NO: 567850 - DNA, 75 bp, synthetic construct
  source 1..75: mol_type = other DNA
cacgttagtgttgctcggcacccaatttccctaccgcgctttctatcctgttgatgccaaaatcattcagattga

SEQ ID NO: 567851 - DNA, 75 bp, synthetic construct
  source 1..75: mol_type = other DNA
cgagtggatgccgactcgccatgaagaagtcgcggcctttgccgctggcgctgaagcccagctttcgggagaact

SEQ ID NO: 567852 - DNA, 75 bp, synthetic construct
  source 1..75: mol_type = other DNA
ctgacagacggtactgagctgcacgacaccaacttttgcccgcattgccgaagcgtgcggaattacgggtattcg

SEQ ID NO: 567853 - DNA, 75 bp, synthetic construct
  source 1..75: mol_type = other DNA
agcgtgcggcattacgggtattcgcgtggaaaaagcgtctgaagtcgatgaagccctgcaacgcgcattctccat

SEQ ID NO: 567854 - DNA, 75 bp, synthetic construct
  source 1..75: mol_type = other DNA
ctgacagatggcactgaactgcacgacaccaactttgcccgcattgccgaagcgtgcggtattacgggcatccgc

SEQ ID NO: 567855 - DNA, 75 bp, synthetic construct
  source 1..75: mol_type = other DNA
tcgctaaaacgctcgaatcggctggggtgaaacgtatctggggagtgacgggcgactcgcttaacggcctcagcg

SEQ ID NO: 567856 - DNA, 75 bp, synthetic construct
  source 1..75: mol_type = other DNA
agcatttgcaactgagcacaatcttgaagatgtggccgctgctgttggtatgaggccacagatcttgcgcaacaa

SEQ ID NO: 567857 - DNA, 75 bp, synthetic construct
  source 1..75: mol_type = other DNA
agagattaatatggaaattttataaaactgatgacaataaatggagatggtattgtcatgagaaaaatggatatc

SEQ ID NO: 567858 - DNA, 75 bp, synthetic construct
  source 1..75: mol_type = other DNA
tctaacgttacggtaaaaccggacaaaaacgacaatatcttcccgaataaatccacgccggaagccaaaatcgac

SEQ ID NO: 567859 - DNA, 75 bp, synthetic construct
  source 1..75: mol_type = other DNA
ttaagtgggagaagtgcgaatacattgccccacgacatgagctgaaaacgtatcccatgtgggtcggcgttgacc

SEQ ID NO: 567860 - DNA, 75 bp, synthetic construct
  source 1..75: mol_type = other DNA
ggccgtcgccgcgcggagatcgttgcaggttccgaacatatcgttccggcagatgcagtgatcatggcgtttggt

SEQ ID NO: 567861 - DNA, 75 bp, synthetic construct
  source 1..75: mol_type = other DNA
catcctggtcgccatctggtacaagtttctgcggacaccctcagagccccctgcagatgcaggctttgctgtcac

SEQ ID NO: 567862 - DNA, 75 bp, synthetic construct
  source 1..75: mol_type = other DNA
ttgaggccaacatggagctgccgcgttacgggttggtgacctttacctggggcaacgtcagcgctattgaccgtg

SEQ ID NO: 567863 - DNA, 75 bp, synthetic construct
  source 1..75: mol_type = other DNA
tggataagctcatcctgacggatggtgatgttatcgatcatgctcagataaaaagtgacttactggaatggattg

SEQ ID NO: 567864 - DNA, 75 bp, synthetic construct
  source 1..75: mol_type = other DNA
gcaatgagccgcgttctggttaacggtggcaacgaccagcaggatctctccggattcttcaataatcccatcatg

SEQ ID NO: 567865 - DNA, 75 bp, synthetic construct
  source 1..75: mol_type = other DNA
ctgacaggcacactgatgaaagtagcggctgttgtggctgcggttacagtaggcctcggcaccttagcggtggcg

SEQ ID NO: 567866 - DNA, 75 bp, synthetic construct
  source 1..75: mol_type = other DNA
atgaaagatttaactcaactactcagcagcctaaagaggttgatagttgcagatgactaccctttagccagcccg

SEQ ID NO: 567867 - DNA, 75 bp, synthetic construct
  source 1..75: mol_type = other DNA
agatcactaccctttagccagcccggtagccccggaagtcttgaaagacttaatctgcaatccgcctccagtgga

SEQ ID NO: 567868 - DNA, 75 bp, synthetic construct
  source 1..75: mol_type = other DNA
ccaggagcagacagcatccaagtttgaaccgctttcttctgatgccaacaatctggatggtctcaatatccattg

SEQ ID NO: 567869 - DNA, 75 bp, synthetic construct
  source 1..75: mol_type = other DNA
gaagcaaaccggtaaaaaagtggcgattatcggcgcaggcccggcaggtctggcgtgtgcggatgtcctgacgcg

SEQ ID NO: 567870 - DNA, 75 bp, synthetic construct
  source 1..75: mol_type = other DNA
atgttagaagatctcaaacgtcaggtattagaagccaacctggcgctcccaaaacacaacctggtcacactgacc

SEQ ID NO: 567871 - DNA, 75 bp, synthetic construct
  source 1..75: mol_type = other DNA
gccaatgtgtgaaaacacggtcaataaggcactgcgggtgatgggttacgacacgaaaaaggatatctgcggtca

SEQ ID NO: 567872 - DNA, 75 bp, synthetic construct
  source 1..75: mol_type = other DNA
attgcactcggtgcctacccagtcatctccctctcagacgcccgtagtcaacgtgaaggtattcgcaaaatgctg

SEQ ID NO: 567873 - DNA, 75 bp, synthetic construct
  source 1..75: mol_type = other DNA
acagagcatgaagtcgtcattcaggaatcggtatttacgcgtcgtggtgtcgatcgcattttgcgttatgccttc

SEQ ID NO: 567874 - DNA, 75 bp, synthetic construct
  source 1..75: mol_type = other DNA
tctgcacgccgatatcctctccgatctggccggtgcgctggctggcagtctgggcgtggcgccgaccgccaatat

SEQ ID NO: 567875 - DNA, 75 bp, synthetic construct
  source 1..75: mol_type = other DNA
gcgcagtctcgtccacgtaaactgctgacagtggtgaccaaatccaatgcccagcgccacggaatggtgatgtgg

SEQ ID NO: 567876 - DNA, 75 bp, synthetic construct
  source 1..75: mol_type = other DNA
gttgcgatgtttacagcaatgagccggatgctggtcaatggcggtgaaccggagccggatctgtctgaacatctg

SEQ ID NO: 567877 - DNA, 75 bp, synthetic construct
  source 1..75: mol_type = other DNA
gaactttaccggaagtgggcagagatggggaagctcatcctgacggatggtgatgttatcgatcatgctcagata

SEQ ID NO: 567878 - DNA, 75 bp, synthetic construct
  source 1..75: mol_type = other DNA
tgctgaccttcggtattccggccttcaagctggaaaaagaggtaatgacgcgtcgccgtgaaatcttcactggca

SEQ ID NO: 567879 - DNA, 75 bp, synthetic construct
  source 1..75: mol_type = other DNA
atacgaaaactgaaatctgcgggcatggactcagggcaatggcctgtagcgccctggtggagtcggatctgtggt

SEQ ID NO: 567880 - DNA, 75 bp, synthetic construct
  source 1..75: mol_type = other DNA
gatgcagtggtggtcggattatctggatgtgtgccgcgaggggtatgtggcaccatatatttatgcacggcagca

SEQ ID NO: 567881 - DNA, 75 bp, synthetic construct
  source 1..75: mol_type = other DNA
agcgcgtgaagaagcgtcagaagacgaacaagggcgtgttggtacgcgggttcgcatcctcggcgtatcactcgt

SEQ ID NO: 567882 - DNA, 75 bp, synthetic construct
  source 1..75: mol_type = other DNA
ttgctgacataaaatcagtaacaatagacaacaaagtagtttcgttaacacctacaaattataaaggtatttact

SEQ ID NO: 567883 - DNA, 75 bp, synthetic construct
  source 1..75: mol_type = other DNA
aatacgagattacaattgatgttgttagtaaacttggacagagaggttcagcatctgttgagtttgatgtcgtta

SEQ ID NO: 567884 - DNA, 75 bp, synthetic construct
  source 1..75: mol_type = other DNA
gaaaaagacgttgccaaaagcgccgcctaaatatcagtttaacgaaaacggcgaaacgaaatactggtctggccg

SEQ ID NO: 567885 - DNA, 75 bp, synthetic construct
  source 1..75: mol_type = other DNA
gtatgtcctgaaggataacaggaacaatgaagcccgggttgattacacttttatcgtgaacgaacagagtccgat

SEQ ID NO: 567886 - DNA, 75 bp, synthetic construct
  source 1..75: mol_type = other DNA
cgggggtttcaaaggtagaggttggtcaaaaagttactttggaaggtaagttcacgaaccctaacagtaagtacc

SEQ ID NO: 567887 - DNA, 75 bp, synthetic construct
  source 1..75: mol_type = other DNA
tgaggctgtcaaaacgtcatttaaaaatcgttcctcaaacaacgatgcaacgacctttgtacaaagggtcaaggt

SEQ ID NO: 567888 - DNA, 75 bp, synthetic construct
  source 1..75: mol_type = other DNA
ttatttatatagttttaaatcctatggtgctggacaatatatcagcagtgattatatctacatcgactttaacct

SEQ ID NO: 567889 - DNA, 75 bp, synthetic construct
  source 1..75: mol_type = other DNA
acggagacggcgtacttttttgtaatacaagtagcagtgccagtggtgcgccgatgactctagagcataaaatgg

SEQ ID NO: 567890 - DNA, 75 bp, synthetic construct
  source 1..75: mol_type = other DNA
aaattatttatatagttttaaatcctataacgctggtcgaaatattagcagtgattatatctatatcgactttaa

SEQ ID NO: 567891 - DNA, 75 bp, synthetic construct
  source 1..75: mol_type = other DNA
atctttacaatgcgatggagaaaaatggtctgcgcggcgtcagtattaaatatctctgcagcaccgcagaccggt

SEQ ID NO: 567892 - DNA, 75 bp, synthetic construct
  source 1..75: mol_type = other DNA
gccatccgtcgtggggcgtggctgttcggacatacggcaagaccactgacccgtaccgagatggtggtggtcttc

SEQ ID NO: 567893 - DNA, 75 bp, synthetic construct
  source 1..75: mol_type = other DNA
tttataaaccaaccggacctggcgttgttaaaacaaatgtaaaactctactggtcacaactcgacacagcaagcg

SEQ ID NO: 567894 - DNA, 75 bp, synthetic construct
  source 1..75: mol_type = other DNA
gatatatccgttgaaccccgagactacgatatggtcgcgtctgtcggttctgggacatcctgcgccattgctgca

SEQ ID NO: 567895 - DNA, 75 bp, synthetic construct
  source 1..75: mol_type = other DNA
ggttctacggtaaaaatgggtgaatatagtgcagaacaaatcagaaacggtgccacaccggttccttttgatatt

SEQ ID NO: 567896 - DNA, 75 bp, synthetic construct
  source 1..75: mol_type = other DNA
tcagaccactacgccttatctttttttacatacgccagacattgcccaggcaccggaactggtacataccctgtg

SEQ ID NO: 567897 - DNA, 75 bp, synthetic construct
  source 1..75: mol_type = other DNA
ccccggaactggtacataccctgtgggaagacttacgtaaaacgcttccagagatcggagcagttccggctattc

SEQ ID NO: 567898 - DNA, 75 bp, synthetic construct
  source 1..75: mol_type = other DNA
tccagaactacttccgtctgtatgaaaaactggcggggatgaccggtactgctgataccgaagctttcgaattta

SEQ ID NO: 567899 - DNA, 75 bp, synthetic construct
  source 1..75: mol_type = other DNA
atctgcgtcagggtatccacctgcgtggctatgcacagaaagatccgaagcaggaatacaaacgtgaatcgttct

SEQ ID NO: 567900 - DNA, 75 bp, synthetic construct
  source 1..75: mol_type = other DNA
gaacgcaaagtaggacgtaacgatccttgcccgtgcggttctggtaaaaaatacaagcagtgccatggccgcctg

SEQ ID NO: 567901 - DNA, 75 bp, synthetic construct
  source 1..75: mol_type = other DNA
acttaaagacggtgacaaagtactttttaatgatgacatgcatgcacaagtatatgatatacaagtatcaggcag

SEQ ID NO: 567902 - DNA, 75 bp, synthetic construct
  source 1..75: mol_type = other DNA
cctctgaccggtgatctgcccgttaactctgaggggattgcgaccggtgagctcaacatggacgatctgactctg

SEQ ID NO: 567903 - DNA, 75 bp, synthetic construct
  source 1..75: mol_type = other DNA
atacagcattggtttatatcactggtggggacgcagctaaggtgcttgcaaaatcagtaccggctaacgttgtcc

SEQ ID NO: 567904 - DNA, 75 bp, synthetic construct
  source 1..75: mol_type = other DNA
agggtaaggacaaggtgtttattgctagaaaagtatcgtatgatgttttatacgattacatgaaaaataaaggga

SEQ ID NO: 567905 - DNA, 75 bp, synthetic construct
  source 1..75: mol_type = other DNA
ggggatcagatattggttctacctcaggttgatagcaaaaccatgcaatcatttaaagatatcacacaaattatt

SEQ ID NO: 567906 - DNA, 75 bp, synthetic construct
  source 1..75: mol_type = other DNA
gagcggtcaatttctctaatgtggttacggtagataatcaaggaaatattttcatacctgatgtaggtccaataa

SEQ ID NO: 567907 - DNA, 75 bp, synthetic construct
  source 1..75: mol_type = other DNA
gccatcgttgatgcatacggcgataaggcgttgattggcgcaggtacggtactgaaacctgaacaggtcgatgca

SEQ ID NO: 567908 - DNA, 75 bp, synthetic construct
  source 1..75: mol_type = other DNA
ggcacatcacagcctcttcacttccaggcaacgttaaaacaagacggaaatatcgctatcgaatccggtgaattc

SEQ ID NO: 567909 - DNA, 75 bp, synthetic construct
  source 1..75: mol_type = other DNA
ccaggtaccagagtcgtagatcatagccatcacctttatgtcaatttcacactgaataatgtcaaattaacctta

SEQ ID NO: 567910 - DNA, 75 bp, synthetic construct
  source 1..75: mol_type = other DNA
gttcatcaggggttaatcgatacgaacccggcagcaaatcttggcggcgtgaccacccctcctgtcagacggcac

SEQ ID NO: 567911 - DNA, 75 bp, synthetic construct
  source 1..75: mol_type = other DNA
aaactctttaatacatctgttccaggtctgtattatacattagcaatatcaaatatttggtcagcatatacatat

SEQ ID NO: 567912 - DNA, 75 bp, synthetic construct
  source 1..75: mol_type = other DNA
agcccaaccggggtgtcattaaaatgggcacagttagattccgcttcaggtggcggctttctttactgtaacaga

SEQ ID NO: 567913 - DNA, 75 bp, synthetic construct
  source 1..75: mol_type = other DNA
atattggcgattctacgagccaatcttttaactggcgtggcgaaagcgagcaaacactatattggtcttgcaaca

SEQ ID NO: 567914 - DNA, 75 bp, synthetic construct
  source 1..75: mol_type = other DNA
agtggtaacgcaagcggcacgccaatgagtattgaaaataaaatggttgattccggtaaaagttatggtgggcat

SEQ ID NO: 567915 - DNA, 75 bp, synthetic construct
  source 1..75: mol_type = other DNA
ataccgataccgactttaacccgacaacgaatcaacgggtaacattatccagaacagatagttatctctactcat

SEQ ID NO: 567916 - DNA, 75 bp, synthetic construct
  source 1..75: mol_type = other DNA
aaatggcgcaacagcggttccttttgatatcacgctacaaaactgtattcgtgttcgcaatatagaaacaaaact

SEQ ID NO: 567917 - DNA, 75 bp, synthetic construct
  source 1..75: mol_type = other DNA
atgcgcgacagcaacgtgaaggaaggtatccgtaaaatactggcgctgaatatcaacccggtacagcagcgggct

SEQ ID NO: 567918 - DNA, 75 bp, synthetic construct
  source 1..75: mol_type = other DNA
caccgccgaccgtctgcgtgccagtctgaacaatcacatctttccggtcctcgggaacttacctgtatcagaact

SEQ ID NO: 567919 - DNA, 75 bp, synthetic construct
  source 1..75: mol_type = other DNA
gtaagtggttcaacggttaaaatgggtgattatagccctgcacaaataagaaatggcgcaacagcggttcctttt

SEQ ID NO: 567920 - DNA, 75 bp, synthetic construct
  source 1..75: mol_type = other DNA
acggtaccgacacgatggaagaaacagcttacttccttgacctgacggtgaaatgcgacaaaccggtggtgatgg

SEQ ID NO: 567921 - DNA, 75 bp, synthetic construct
  source 1..75: mol_type = other DNA
gccgggcagtccgtagaacggactgcgcagcaggcagcagcatttgttaaggcgtatcgagaggcagtgcaatga

SEQ ID NO: 567922 - DNA, 75 bp, synthetic construct
  source 1..75: mol_type = other DNA
tttttaccattcttatctttattaattctgtctgtaacgcaaccgttgattttattgttggtgcgggacctgatg

SEQ ID NO: 567923 - DNA, 75 bp, synthetic construct
  source 1..75: mol_type = other DNA
ataatacaacctctgacgtcccagatatatttataggggacgcaccaacacaaactttccactttagattccatg

SEQ ID NO: 567924 - DNA, 75 bp, synthetic construct
  source 1..75: mol_type = other DNA
aacaggtcgatgcgctcgccaggatgggctgtcagctcatcgttacgcccaatatccatagtgaagtgatccgcc

SEQ ID NO: 567925 - DNA, 75 bp, synthetic construct
  source 1..75: mol_type = other DNA
ggcatgaccgtctgccccggctgcgcgacggcgaccgaagcctttaccgcgctcgaagcgggtgcgcaggcgctg

SEQ ID NO: 567926 - DNA, 75 bp, synthetic construct
  source 1..75: mol_type = other DNA
agcggtattaccaccggacatcgcagtctttgccgttggcggcgtgacgccagaaaacctggcgcagtggataga

SEQ ID NO: 567927 - DNA, 75 bp, synthetic construct
  source 1..75: mol_type = other DNA
tgctaacgcatccgatcttccggcaaaagcactggtagatgcgggctatgacggcatcgttagcgccggtgtggg

SEQ ID NO: 567928 - DNA, 75 bp, synthetic construct
  source 1..75: mol_type = other DNA
acggtaccgacacgatggaagaaacggcttacttcctggacctgacggtgaaatgtgacaaaccggtggtgatgg

SEQ ID NO: 567929 - DNA, 75 bp, synthetic construct
  source 1..75: mol_type = other DNA
acggtaccgacacgatggaagaaactgcttacttcctagacctgacggtgaaatgcgacaaaccggtggtgatgg

SEQ ID NO: 567930 - DNA, 75 bp, synthetic construct
  source 1..75: mol_type = other DNA
ataacattactcagcagcagcgattacctttacagttttaaggccgagaatgcgggtggaacggttcaagggtac

SEQ ID NO: 567931 - DNA, 75 bp, synthetic construct
  source 1..75: mol_type = other DNA
cacgctgaacccgcaaaaagcgcgcgttctgctgcaactggctctgacgcaaaccaaagatccgcagcagatcca

SEQ ID NO: 567932 - DNA, 75 bp, synthetic construct
  source 1..75: mol_type = other DNA
ggcttacttccttgatctgacggtgaaatgtgataagcctgtcgtgatggttggtgcaatgcgtccgtccacttc

SEQ ID NO: 567933 - DNA, 75 bp, synthetic construct
  source 1..75: mol_type = other DNA
caaggactggatagtaccgagtttgcggcgattgtgggcaacttactcgacaacgcttttgaagccagtttgcgt

SEQ ID NO: 567934 - DNA, 75 bp, synthetic construct
  source 1..75: mol_type = other DNA
cacaactgacgcaaattaaacaatacgttgaaagcctgcgcacattgcgtcatgaacatctcaattggatgtcta

SEQ ID NO: 567935 - DNA, 75 bp, synthetic construct
  source 1..75: mol_type = other DNA
ccgatctttgatgatgatggcaaagtcatcggcgtggtgtcggtgggttatctggtcagtaaaatcgatagctgg

SEQ ID NO: 567936 - DNA, 75 bp, synthetic construct
  source 1..75: mol_type = other DNA
aaatctgaaccgtcagaatctgaatgttcaggtgtgtttgacccttcagattctggcaaaaaaacggttttgacc

SEQ ID NO: 567937 - DNA, 75 bp, synthetic construct
  source 1..75: mol_type = other DNA
tcaatggtgtgaaacgctatgccgcctgggtacgtgctacaggaaataccggcacacagttcgtgaagcaggcag

SEQ ID NO: 567938 - DNA, 75 bp, synthetic construct
  source 1..75: mol_type = other DNA
gccaaccgggaagctattcgttcaggtgatgatttgctggggccattatcagctttcgtagtaaagacgaaattt

SEQ ID NO: 567939 - DNA, 75 bp, synthetic construct
  source 1..75: mol_type = other DNA
aatttgcttttttccaacggctggcctttccgttgcgtatctttttgttgattttggtgttctcgatatttgtta

SEQ ID NO: 567940 - DNA, 75 bp, synthetic construct
  source 1..75: mol_type = other DNA
ggccagttttgaggactatttaacgcttcatgtacgcgacatggcaatgaatcaggcgaaaattattgcctccaa

SEQ ID NO: 567941 - DNA, 75 bp, synthetic construct
  source 1..75: mol_type = other DNA
atatcggcgtggctggattaacgctgatggtgcctttccttgcggcttacatcggttattccattgcagagcgct

SEQ ID NO: 567942 - DNA, 75 bp, synthetic construct
  source 1..75: mol_type = other DNA
cgcgcgcgtagttcgccagcaggaggcgctgtttagttcggtttatgaagggctgattgcggtggatccacaagg

SEQ ID NO: 567943 - DNA, 75 bp, synthetic construct
  source 1..75: mol_type = other DNA
tactgatttcgattatgtggtgattggcgaccgcgactcgatccgcctttaccatcctaatccggagaaaattgg

SEQ ID NO: 567944 - DNA, 75 bp, synthetic construct
  source 1..75: mol_type = other DNA
tgacagtatcatcagcgcagtgaaaacgcgtgactacaagaggctggcgaccatcgctaacaaattacaaagaga

SEQ ID NO: 567945 - DNA, 75 bp, synthetic construct
  source 1..75: mol_type = other DNA
ggccaggcgcacgatattcagatccatgtgccttatctggagaaaaccgctcagtcggtgctggtgcgctggtat

SEQ ID NO: 567946 - DNA, 75 bp, synthetic construct
  source 1..75: mol_type = other DNA
cctcctggaataaatctggtgaggtgagcgatatttctgcgttgcattactcgggatatgataacaatttcgcat

SEQ ID NO: 567947 - DNA, 75 bp, synthetic construct
  source 1..75: mol_type = other DNA
ctcaacactctgatgctgaatgcatactatgacttccggaatgacagtgcattcacaccatgggtatcagcaggg

SEQ ID NO: 567948 - DNA, 75 bp, synthetic construct
  source 1..75: mol_type = other DNA
tggtatcactttcagatcagcgatttatcgatggtgaaggggagtgggcggacagatacaaaggcggcgatgacc

SEQ ID NO: 567949 - DNA, 75 bp, synthetic construct
  source 1..75: mol_type = other DNA
tattatcaggtgttggttttatttcattgccatcatttgcgactcaggacctgagtggcttttaccttagtggaa

SEQ ID NO: 567950 - DNA, 75 bp, synthetic construct
  source 1..75: mol_type = other DNA
gtacggatacagtggtcgcgaatcgttgtcacgttcaggctctgctgacaacttcgcatggagccttggcgcggg

SEQ ID NO: 567951 - DNA, 75 bp, synthetic construct
  source 1..75: mol_type = other DNA
aaaagcggtttttatctgaccggtaaagccggtacctctgtggtgtcactttcagaccagcgtttcctgtcagga

SEQ ID NO: 567952 - DNA, 75 bp, synthetic construct
  source 1..75: mol_type = other DNA
ggttaaccgtcacaccggcagcaaactggttaacgccgtgcagcaggatgttcacgctatccttcagctgggtga

SEQ ID NO: 567953 - DNA, 75 bp, synthetic construct
  source 1..75: mol_type = other DNA
gttgccatgctgctggcaggtaacaaactgagcaatgacgaactgaacatgctcggtgagatgatcggcgagcag

SEQ ID NO: 567954 - DNA, 75 bp, synthetic construct
  source 1..75: mol_type = other DNA
acacctgcccgaccggacgcactatttacgatagcgtatacaacgatctgattaactatctggcttcaccggatc

SEQ ID NO: 567955 - DNA, 75 bp, synthetic construct
  source 1..75: mol_type = other DNA
agaccgaaggctttgacgatctgatcaaaaactgccgtgagcagcacgaagcgctgaaagcacaactggaacagg

SEQ ID NO: 567956 - DNA, 75 bp, synthetic construct
  source 1..75: mol_type = other DNA
ccttcgaccgtgaagtggcgctggcgcgtgaagatgcacagtttattacctgggagcatccgctgatccgcaacg

SEQ ID NO: 567957 - DNA, 75 bp, synthetic construct
  source 1..75: mol_type = other DNA
aaaggcttcccgaaacgcgagctgcacactattaagctgccactgccgacgcagtatcagaccgctattaaagtc

SEQ ID NO: 567958 - DNA, 75 bp, synthetic construct
  source 1..75: mol_type = other DNA
cgatccgctgcgtgttattccttccatcatggtcggttcagtttgtggtgcagtaactgcggcgctggtcggtgc

SEQ ID NO: 567959 - DNA, 75 bp, synthetic construct
  source 1..75: mol_type = other DNA
gtgcctggcatggccacctgttgcctgacggcccgaacaccatgggtggctttccgggcgttgcactgctaacgg

SEQ ID NO: 567960 - DNA, 75 bp, synthetic construct
  source 1..75: mol_type = other DNA
gttaaccaatccggatgcgacgccggaacagacgcgcgtcgcggtgaaagccatcgaaacgctcaacggtaactg

SEQ ID NO: 567961 - DNA, 75 bp, synthetic construct
  source 1..75: mol_type = other DNA
caatttcgaccgcctgaccgtctggcaggacggcaagaaagtcgacttcacgctggaggcatacagtattcccgg

SEQ ID NO: 567962 - DNA, 75 bp, synthetic construct
  source 1..75: mol_type = other DNA
cccgcaaggccattaccgaagtgaagaagatggagaaccgcgacgcagtggaggcgaccgtctggggcgcgtatt

SEQ ID NO: 567963 - DNA, 75 bp, synthetic construct
  source 1..75: mol_type = other DNA
gctggctgatattgcgggcactccagaggcggtcgatgttctgtgtctgtgccttgatattgccgaccaggacgg

SEQ ID NO: 567964 - DNA, 75 bp, synthetic construct
  source 1..75: mol_type = other DNA
cgaaaacgctcaaagccgtagatggtgtaactcttcgcctgtatgaaggggaaacattaggtgtggtaggggaat

SEQ ID NO: 567965 - DNA, 75 bp, synthetic construct
  source 1..75: mol_type = other DNA
atcggcccggtggacggtcacgatgtgctggggcttatcaccacgcttaagaacatgcgcgacctgaaaggcccg

SEQ ID NO: 567966 - DNA, 75 bp, synthetic construct
  source 1..75: mol_type = other DNA
tttgccgagctattcaaaaatctttggcgactggttgtgcgaaacggcagcgaaagacaacaagctgatggcgat

SEQ ID NO: 567967 - DNA, 75 bp, synthetic construct
  source 1..75: mol_type = other DNA
atataaaaacaggcagtaagagcgctctaacctacagaaggaaatcagaaccgccagttattccagaagccgact

SEQ ID NO: 567968 - DNA, 75 bp, synthetic construct
  source 1..75: mol_type = other DNA
ggattacgattacgacgatcaccagcgttttaatccgtttttcgatctcggagcctggcatggtcatctgttgcc

SEQ ID NO: 567969 - DNA, 75 bp, synthetic construct
  source 1..75: mol_type = other DNA
gctgctcatcccggggcgaggctcacccactaaaaggaaaagtcacgatgttaggtattttcaaaaagaaaaccc

SEQ ID NO: 567970 - DNA, 75 bp, synthetic construct
  source 1..75: mol_type = other DNA
tgcgccaaaacacgtcctgtgctggaggggagtttcagacacgccgtttcttgcctgaaagtcgatccgctttaa

SEQ ID NO: 567971 - DNA, 75 bp, synthetic construct
  source 1..75: mol_type = other DNA
agaaactgaagtagccagaacgtcactcaatacataccgtgctgtaataaaaaacgtcttaagcataatcggtga

SEQ ID NO: 567972 - DNA, 75 bp, synthetic construct
  source 1..75: mol_type = other DNA
gtataaaggagcgccgcaaagccttaggtataacccaaacttcattggctgaaagtgttggcatgcgccagcagt

SEQ ID NO: 567973 - DNA, 75 bp, synthetic construct
  source 1..75: mol_type = other DNA
gactatcaaaacagggatattacagttgcgtaatttcccgtgacggaaaaattaagcaggaagaactgatgaaaa

SEQ ID NO: 567974 - DNA, 75 bp, synthetic construct
  source 1..75: mol_type = other DNA
aaccattattcaacacgcagatgatccagttcctaatgcaaatagcctcacgtttcaggaaacttatgaggcaga

SEQ ID NO: 567975 - DNA, 75 bp, synthetic construct
  source 1..75: mol_type = other DNA
ggaacatggcccgctgatgcattagatattcctgatgacatttctgtaaaatatatggcggaaccgccacaaggg

SEQ ID NO: 567976 - DNA, 75 bp, synthetic construct
  source 1..75: mol_type = other DNA
gtggctggattatctggacgcactggtgctggtcgatacttccggtgcgccagatattgaatggcctacgcctcc

SEQ ID NO: 567977 - DNA, 75 bp, synthetic construct
  source 1..75: mol_type = other DNA
gtgcagggtattacggaagataatcgccaggcgcgtgtggatgccatcatgccgacgtttattgagatggtgcgc

SEQ ID NO: 567978 - DNA, 75 bp, synthetic construct
  source 1..75: mol_type = other DNA
aatcgacgctctccggagtcagatggcactaacgagactgagcaaagagcatatcatcgatgttcacctcagaga

SEQ ID NO: 567979 - DNA, 75 bp, synthetic construct
  source 1..75: mol_type = other DNA
gcaataaaaactggtgttttcgactatgcaaaacagtttccctcctcacacaatctggaaaaatttggtgaggcc

SEQ ID NO: 567980 - DNA, 75 bp, synthetic construct
  source 1..75: mol_type = other DNA
cagaactacaatcaatgaatgtcactgaagataatatttttaaacttaattcattgtttccagaggcatttaatg

SEQ ID NO: 567981 - DNA, 75 bp, synthetic construct
  source 1..75: mol_type = other DNA
ggcgatgggcttttctgaaaaacgcggtgattcgctcaatgttgttaactcgccgttcaatagcagtgacgaaag

SEQ ID NO: 567982 - DNA, 75 bp, synthetic construct
  source 1..75: mol_type = other DNA
aacgaacagatgaagcaaattgaagatctgacccgcgaggcgatgggcttttctgaaaaacgcggtgactcgctc

SEQ ID NO: 567983 - DNA, 75 bp, synthetic construct
  source 1..75: mol_type = other DNA
caagacggcttgaagtgcgcgatcgcatcgcaggagccggagccaccaccacggctgcagggctggcaatgggcg

SEQ ID NO: 567984 - DNA, 75 bp, synthetic construct
  source 1..75: mol_type = other DNA
gtctggattatccggtttacgtgctgttgctgtgatgtttctgaatccacttgcagcactacgcggcgggctgac

SEQ ID NO: 567985 - DNA, 75 bp, synthetic construct
  source 1..75: mol_type = other DNA
ggttgaaggtggtgcgcgcatgaacgtcggaaaccctgacgacagctgggaagatcagaaacgtgacctgctggc

SEQ ID NO: 567986 - DNA, 75 bp, synthetic construct
  source 1..75: mol_type = other DNA
gttgctgtgatgtttatgaatccattggcagcactacgcggcgggctggctgccgcaggcacggtgctgcgagta

SEQ ID NO: 567987 - DNA, 75 bp, synthetic construct
  source 1..75: mol_type = other DNA
gtgttccagtggattggcgacaaagtacaggcgctgtggggctggtttactgctctgctgacgcccgttaagtcg

SEQ ID NO: 567988 - DNA, 75 bp, synthetic construct
  source 1..75: mol_type = other DNA
ggacttcgccgcactggttgaaggtggtgcgcgcatgaatgtggcaaaccctgacgacagctgggaggaccagaa

SEQ ID NO: 567989 - DNA, 75 bp, synthetic construct
  source 1..75: mol_type = other DNA
cagtaaaaagctataccagcatggaagatgccatgaaaggtgtagcaaagcaggtcaatggtctgcgtgacgata

SEQ ID NO: 567990 - DNA, 75 bp, synthetic construct
  source 1..75: mol_type = other DNA
gaaaacgacaacaatcaaacggtaattgacgcgtattttgaagatgggaatcaaaacatcagtggatgggagcca

SEQ ID NO: 567991 - DNA, 75 bp, synthetic construct
  source 1..75: mol_type = other DNA
tggctggagttgctgatatttataagcagcagcaacagcaggaacgtaaagcggcattccagaaaggttatgcag

SEQ ID NO: 567992 - DNA, 75 bp, synthetic construct
  source 1..75: mol_type = other DNA
tagccgctattgtggctgcggttaccgtaggcctcggcaccttggctgtggcgctggctgcagtgctggggccgc

SEQ ID NO: 567993 - DNA, 75 bp, synthetic construct
  source 1..75: mol_type = other DNA
cgcagcgggtttacttactgctccgttgtcgtctttgcgtcgcacggcatcactgacgggaaatgtcctgaaaac

SEQ ID NO: 567994 - DNA, 75 bp, synthetic construct
  source 1..75: mol_type = other DNA
gggcagtttggcattgtcggtgaaaacgggcctgaaattgtcaacggcccggcaaacgttaccagccggagaaat

SEQ ID NO: 567995 - DNA, 75 bp, synthetic construct
  source 1..75: mol_type = other DNA
ggcactggcggaagggctgaatatggttatgcatccgctggactccctgaaatctggcgtttcctggttgctgga

SEQ ID NO: 567996 - DNA, 75 bp, synthetic construct
  source 1..75: mol_type = other DNA
ttccagtggattggcgacaaagtgcaggcgctgtggggctggtttactgacctgctgacgcccgttaagtcgacc

SEQ ID NO: 567997 - DNA, 75 bp, synthetic construct
  source 1..75: mol_type = other DNA
gccagcgaacagctgccgatggaaaacggtgcggtggacttcgctgcactggttgaaggtggggcgcgcatgaac

SEQ ID NO: 567998 - DNA, 75 bp, synthetic construct
  source 1..75: mol_type = other DNA
catggggatatggctttgcggggatgtatgacagcggcggctatatcccgcgcgggcagtttggcatcgtcggtg

SEQ ID NO: 567999 - DNA, 75 bp, synthetic construct
  source 1..75: mol_type = other DNA
agttaaaactaacagcgggcaatgatgcgctcggttccatgcagaaagaatccgacatcaacaaggattcacttt

SEQ ID NO: 568000 - DNA, 75 bp, synthetic construct
  source 1..75: mol_type = other DNA
gcaatgatgcgctcggttccatgcagaaagaatccgacatcaacaaggactcactttctgctcagtggttgctgg

SEQ ID NO: 568001 - DNA, 75 bp, synthetic construct
  source 1..75: mol_type = other DNA
gcagcgcgttgtcctggctggctggcgctccactggcactgttgcgacgcgggcttgcttcatcgggcaacgcag

SEQ ID NO: 568002 - DNA, 75 bp, synthetic construct
  source 1..75: mol_type = other DNA
attgatgtgatgcaacgtctgggcggtgtagctgaccgcctggattatcgtaaagcggcggcactgggttccacc

SEQ ID NO: 568003 - DNA, 75 bp, synthetic construct
  source 1..75: mol_type = other DNA
taagggatcggattgcaggtgccggagccaccaccacggctgcagggctggcaatgggcgcaccagtgatggcgg

SEQ ID NO: 568004 - DNA, 75 bp, synthetic construct
  source 1..75: mol_type = other DNA
tatccagcgcgtactggagaaggtgaatgcactgccgcaggataagcgcctgtctgccatgaccatgttgtttgg

SEQ ID NO: 568005 - DNA, 75 bp, synthetic construct
  source 1..75: mol_type = other DNA
cactgtgccgctcgttcaacggattgaggtaccgacgcagatcatcattcagacgcagctaggacaaagtgcgca

SEQ ID NO: 568006 - DNA, 75 bp, synthetic construct
  source 1..75: mol_type = other DNA
accatgcaaagcaagagtttctttgaaggaatgaatctgctgaaactcaatcctgaggtgattgaaaagcagatg

SEQ ID NO: 568007 - DNA, 75 bp, synthetic construct
  source 1..75: mol_type = other DNA
acctctgccgaactgcagagcgcagcggccatggggcgacgattcggggaggcactggcagaagggctgaatatg

SEQ ID NO: 568008 - DNA, 75 bp, synthetic construct
  source 1..75: mol_type = other DNA
cgacttgagcaagggcgactggatgaaagtatgcgtcaggctgacatggagaacgcgagaggatgggcaaatatc

SEQ ID NO: 568009 - DNA, 75 bp, synthetic construct
  source 1..75: mol_type = other DNA
ttgcagtagtggtccttttcagacctgaaattgtacgcatacatggattactgaaaagtataattatgcaagtag

SEQ ID NO: 568010 - DNA, 75 bp, synthetic construct
  source 1..75: mol_type = other DNA
tgtccgctatgacgtaaccccggatatcgctctggacctcagctatcgctatcttgatgcgggtgacagcagtgt

SEQ ID NO: 568011 - DNA, 75 bp, synthetic construct
  source 1..75: mol_type = other DNA
ggtcaggtggttactggcgtgatgacctgaagaatgaggtgtcagtcaacactctgatgctgaatgcgtactatg

SEQ ID NO: 568012 - DNA, 75 bp, synthetic construct
  source 1..75: mol_type = other DNA
tcagcgacctacttcatgcgggcagctgatagccatcaccgtgagggaatattgcagggtgctttgctggtggtt

SEQ ID NO: 568013 - DNA, 75 bp, synthetic construct
  source 1..75: mol_type = other DNA
cattgcagatggatttagatgtacgtgtgggggatgtgaattggaaacactcaattgtgcttaaaactactggag

SEQ ID NO: 568014 - DNA, 75 bp, synthetic construct
  source 1..75: mol_type = other DNA
cggcaaggtgacgctgacggcctgcgacgtatacggacaggaattcaccatctcccgcatcttccgcgaagcgcc

SEQ ID NO: 568015 - DNA, 75 bp, synthetic construct
  source 1..75: mol_type = other DNA
ataatctctcaaagatgtatgttgctattttggcatcattctctgtttttttttcagtaaatgtaaatgccagaa

SEQ ID NO: 568016 - DNA, 75 bp, synthetic construct
  source 1..75: mol_type = other DNA
cgcttgcaatggcgggcatgttatcgacccaggctctggctgatgagagcaaaacaggcttttatgtgaccggta

SEQ ID NO: 568017 - DNA, 75 bp, synthetic construct
  source 1..75: mol_type = other DNA
agttcagtattccggttcgtacagaactggagttttacgctcgtggaaatgctgacacgaaatataatctttata

SEQ ID NO: 568018 - DNA, 75 bp, synthetic construct
  source 1..75: mol_type = other DNA
ataattataatgatgcaagttggatgaatcttgtttggtatggttcttatggtcaaatacaaggtggatacagtt

SEQ ID NO: 568019 - DNA, 75 bp, synthetic construct
  source 1..75: mol_type = other DNA
tcaccagtattcttccagtgactataatacactttctgatgttcttgatacgtataataataagaattatgttta

SEQ ID NO: 568020 - DNA, 75 bp, synthetic construct
  source 1..75: mol_type = other DNA
tgttcttgcctcctgcctaaccaaggatatgttgactcgttatggggtaaagattggtgattacccagaactttt

SEQ ID NO: 568021 - DNA, 75 bp, synthetic construct
  source 1..75: mol_type = other DNA
tcagcgacatacttcatgcgggcggcagacagccatcaccgtgagggaatattgcagggtgctttgctggtggtt

SEQ ID NO: 568022 - DNA, 75 bp, synthetic construct
  source 1..75: mol_type = other DNA
gatcagccgccttaccggcacaggaatactgaccaggccagaacgcaatcattatttttccctggcactggcttt

SEQ ID NO: 568023 - DNA, 75 bp, synthetic construct
  source 1..75: mol_type = other DNA
gccgtggtaaaacacatttccgatcgcgtgctggtgatgtatctcggacatgcggtagaactggggacgtatgat

SEQ ID NO: 568024 - DNA, 75 bp, synthetic construct
  source 1..75: mol_type = other DNA
gtcttcttcgctatctacttcgtggtgttcagtttggttatccgcatgttcaacctgaaaacgccgggtcgtgaa

SEQ ID NO: 568025 - DNA, 75 bp, synthetic construct
  source 1..75: mol_type = other DNA
ctacaaatatggtcagacgctggtgaccagaaaaatggaaacggaagcttttggtgacagtaatgccacgcgaac

SEQ ID NO: 568026 - DNA, 75 bp, synthetic construct
  source 1..75: mol_type = other DNA
tctgcaactcaaagacaaatatggtcagacgctggtgaccagaaaaatggaaacggaagcctttggtgacagtaa

SEQ ID NO: 568027 - DNA, 75 bp, synthetic construct
  source 1..75: mol_type = other DNA
gacaacggcggaagtggtgaaggattcggccctttgacactttccctgcgtctgaaagataaaggggggaacacg

SEQ ID NO: 568028 - DNA, 75 bp, synthetic construct
  source 1..75: mol_type = other DNA
atgcaggaggcgagtggatcgtttctgcgggcgcgctgggttccggtatctttggtttcatcaaccgtctgctga

SEQ ID NO: 568029 - DNA, 75 bp, synthetic construct
  source 1..75: mol_type = other DNA
ccgtggtccggtagccgctgcgtcagctgaagcaactccggcaactgccgcgcctgtagcaaaaccgcaggctgt

SEQ ID NO: 568030 - DNA, 75 bp, synthetic construct
  source 1..75: mol_type = other DNA
cactgttctggatggccgtgacgtcactaaaaccaacaccaccaacgtagcgaccttcaagtctgttaactacgg

SEQ ID NO: 568031 - DNA, 75 bp, synthetic construct
  source 1..75: mol_type = other DNA
gtctggccgccggtgcagcacgctattcatgcaggtggcgaatggatcgtttctgcaggcgcgctgggttccggt

SEQ ID NO: 568032 - DNA, 75 bp, synthetic construct
  source 1..75: mol_type = other DNA
ttcagcggcttgatcattaaagctcagggccatgttgtggcgggtcaaacaccgctgtatgaaatcaaaaagtaa

SEQ ID NO: 568033 - DNA, 75 bp, synthetic construct
  source 1..75: mol_type = other DNA
tcccgattatgatgttcggtctgccgggggcggcgctggcgatgtacttcgcagcaccgaaagagcgtcgtccga

SEQ ID NO: 568034 - DNA, 75 bp, synthetic construct
  source 1..75: mol_type = other DNA
ttgttaccgtcaacgactacctggcgcaacgtgacgccgaaaacaaccgtccgctgtttgaattccttggcctga

SEQ ID NO: 568035 - DNA, 75 bp, synthetic construct
  source 1..75: mol_type = other DNA
ataagcgccccacgtttaaaagagcattacgcaacatcagcatgaccagcatatttatcactatgacgctgatct

SEQ ID NO: 568036 - DNA, 75 bp, synthetic construct
  source 1..75: mol_type = other DNA
ttcaactgcagaagtgcgtgataagcagcaaaatattctggcatcctggcattacacccgtaaggatccaggcga

SEQ ID NO: 568037 - DNA, 75 bp, synthetic construct
  source 1..75: mol_type = other DNA
cccgctcccgtcattcagccgattcgccataatggcaaaatcattggcgaagtacagttaactgctcgcgacaac

SEQ ID NO: 568038 - DNA, 75 bp, synthetic construct
  source 1..75: mol_type = other DNA
attacgcaacatcagcatgaccagcatatttatcactatgacgctgatctggctgctgctttccgtgacgtcagt

SEQ ID NO: 568039 - DNA, 75 bp, synthetic construct
  source 1..75: mol_type = other DNA
ggtgtctgagggaaaggtacgcggcgtctgccagccgctgcatcttgggcggcaaaatcagagctgggaaatcgt

SEQ ID NO: 568040 - DNA, 75 bp, synthetic construct
  source 1..75: mol_type = other DNA
ggcctgctgcatggcggcgcgtcggcggcgctggctgaaacgctgggatcgatggccggatttatgatgacccgc

SEQ ID NO: 568041 - DNA, 75 bp, synthetic construct
  source 1..75: mol_type = other DNA
tgtctcgcagggaaaggtgcgtggcgtctgtcagccgctgtatcttgggcgacaaaatcagagctgggagattgt

SEQ ID NO: 568042 - DNA, 75 bp, synthetic construct
  source 1..75: mol_type = other DNA
tgcacgcgtgttggcaagattgattgccgatatcaaagccacaacggattgccagtgtgtggtggttggcggcag

SEQ ID NO: 568043 - DNA, 75 bp, synthetic construct
  source 1..75: mol_type = other DNA
ttactggcggcgcactaccgccatgatgcaggtttacttggggctgcgctgttggcccagggagaaaaattatga

SEQ ID NO: 568044 - DNA, 75 bp, synthetic construct
  source 1..75: mol_type = other DNA
aatgaatcgtgtacatgccggatttaccgcaatgaccgcaatcatccgatctgcgttaccgactggatggatgaa

SEQ ID NO: 568045 - DNA, 75 bp, synthetic construct
  source 1..75: mol_type = other DNA
gcggtggggtagtcagcgacggcaaactgcttactggctcaggcggcctggcggggcatattggacatacgctgg

SEQ ID NO: 568046 - DNA, 75 bp, synthetic construct
  source 1..75: mol_type = other DNA
actgcttaccggcccaggcggtctggcggggcacatcgggcatacgcttgccgatccgcaggggcctgtctgtgg

SEQ ID NO: 568047 - DNA, 75 bp, synthetic construct
  source 1..75: mol_type = other DNA
ctagccagacaccagaagccttgcgtgaagccttagccgaattagtctctccgttacaagcgcatgcgcagcagg

SEQ ID NO: 568048 - DNA, 75 bp, synthetic construct
  source 1..75: mol_type = other DNA
atgcgcgccgggcagggcgacgagcaggcgcagcagctgattcaccgctccgcacatgtgctggcaaggctgatc

SEQ ID NO: 568049 - DNA, 75 bp, synthetic construct
  source 1..75: mol_type = other DNA
aatccgcataatctcggtggattactacactttccgttagtcaaaacactggagcagcttaccgatttgccgacc

SEQ ID NO: 568050 - DNA, 75 bp, synthetic construct
  source 1..75: mol_type = other DNA
cgcacatgcgctggcaagactgattgccgatgttaaagctacgaccgattgccagtgcgtggtggtcggtggcag

SEQ ID NO: 568051 - DNA, 75 bp, synthetic construct
  source 1..75: mol_type = other DNA
accgaagtcttaagtgggcaacaagccgcttgcgatatggcagcgcttgaggatgttgatcaggtgatggcagcc

SEQ ID NO: 568052 - DNA, 75 bp, synthetic construct
  source 1..75: mol_type = other DNA
cgcacgtacgcttgcaaggctgatcgctgatattaaagccacaactgattgccagtgcgtggtggttggtggcag

SEQ ID NO: 568053 - DNA, 75 bp, synthetic construct
  source 1..75: mol_type = other DNA
acctggcagttaacttctggttgaccaataaaggcattctgccaaccgctgatgccgccgttctgaaagccaata

SEQ ID NO: 568054 - DNA, 75 bp, synthetic construct
  source 1..75: mol_type = other DNA
ttgccatcgcttcaaccggaattattcgcgacggcagcttattggcgctgaatccgcataatctcggtggattgt

SEQ ID NO: 568055 - DNA, 75 bp, synthetic construct
  source 1..75: mol_type = other DNA
ccgctgaaaggacacgcagactgttttgccgcagcatctacaggcattatccgtcatggtgtacttactgcatta

SEQ ID NO: 568056 - DNA, 75 bp, synthetic construct
  source 1..75: mol_type = other DNA
ggatgttgatcaagtgatggcggcgattgttggcgcagcgggattacttcctacacttgcagccatccgcgcggg

SEQ ID NO: 568057 - DNA, 75 bp, synthetic construct
  source 1..75: mol_type = other DNA
tgtatcactgcgcgcgcccggaaaatcgccataaaattaaaggtctgctgatttctggcctgatcgcctgtgtcg

SEQ ID NO: 568058 - DNA, 75 bp, synthetic construct
  source 1..75: mol_type = other DNA
cggtacgccgggtaaatcaggttacaacgttccggcaatcctcgaagccctgggtggtgccgacaatattgtcag

SEQ ID NO: 568059 - DNA, 75 bp, synthetic construct
  source 1..75: mol_type = other DNA
gagtataatccgacggataattatatcgccgatttgtatgatgatggcgatgtattaagctctgcgggtgagacc

SEQ ID NO: 568060 - DNA, 75 bp, synthetic construct
  source 1..75: mol_type = other DNA
atcccggcattgggcaaccctgtattgcaggccatctttacctggatgagtaagattggttcattcgcttttagc

SEQ ID NO: 568061 - DNA, 75 bp, synthetic construct
  source 1..75: mol_type = other DNA
caatcatctcctcgctggtgatgggccttgtcggcctggtgattccattagtctggccgattttcgccatgggta

SEQ ID NO: 568062 - DNA, 75 bp, synthetic construct
  source 1..75: mol_type = other DNA
gactttgtggtgttcggtattttgcatggtctgtcaaccaagtggtacatggtgccagtagtggcggcaatctgg

SEQ ID NO: 568063 - DNA, 75 bp, synthetic construct
  source 1..75: mol_type = other DNA
ttattttgtctaatcaatacaaaatgatgactatgctcgatccggcgaatgctgagcgttaccgccgtctgcaaa

SEQ ID NO: 568064 - DNA, 75 bp, synthetic construct
  source 1..75: mol_type = other DNA
aaagaggctgtcagtcgcctggaaattatttatcaggaactcatcagtagcacgccgccagccgccagggtgagc

SEQ ID NO: 568065 - DNA, 75 bp, synthetic construct
  source 1..75: mol_type = other DNA
atggcctgcaacgtgcgcgttttcttcctgcaattgatgccattaaacagtattgtgatgttatgaacgtggacg

SEQ ID NO: 568066 - DNA, 75 bp, synthetic construct
  source 1..75: mol_type = other DNA
ttatcagggtgagcgactaaagtttgagtttcagcgctgtctgtcacgtttgcaggaaatgcaaagcgaagagta

SEQ ID NO: 568067 - DNA, 75 bp, synthetic construct
  source 1..75: mol_type = other DNA
gccgcactatcatcgacattatggagatgtatcacgcgctgcatgtgtcctggtctaatttgcaggaccagcagt

SEQ ID NO: 568068 - DNA, 75 bp, synthetic construct
  source 1..75: mol_type = other DNA
tttggcgagctgaaagaagaaacttgccgcacgattatcgacattatggagatgtatcacgcgctgcatgtttcc

SEQ ID NO: 568069 - DNA, 75 bp, synthetic construct
  source 1..75: mol_type = other DNA
ctggaaattattgccgatcgctttaaagccgaaactgacgtgctctgttttgacgaattttttgtttctgatatt

SEQ ID NO: 568070 - DNA, 75 bp, synthetic construct
  source 1..75: mol_type = other DNA
catcgtcagaactgacacacgtcgaagcagtgaaagctcttggattcctgaaacaaaaagccactgaacagaagg

SEQ ID NO: 568071 - DNA, 75 bp, synthetic construct
  source 1..75: mol_type = other DNA
cgatgtctggtttttcgcggggaattagtgggatacggcgatttgtttcgtatgcgctatagcgaaattaagcga

SEQ ID NO: 568072 - DNA, 75 bp, synthetic construct
  source 1..75: mol_type = other DNA
gcggaaatagagcagacgattctctcttttgtcgatgcctgccacacccgtaaagtggcgatggtggtgggtagc

SEQ ID NO: 568073 - DNA, 75 bp, synthetic construct
  source 1..75: mol_type = other DNA
gcagcataccgtcccgaccttgcccgctatcagggtacgcttcagccgctggcacagcaggaactgagaggataa

SEQ ID NO: 568074 - DNA, 75 bp, synthetic construct
  source 1..75: mol_type = other DNA
atgaaatttatctgccatttcgcgccgaccaggcacaacgggaagcctcgcgctgccttaagtgcggcgagcaca

SEQ ID NO: 568075 - DNA, 75 bp, synthetic construct
  source 1..75: mol_type = other DNA
acgggtgagccagtcaccattcagcagggcagtccgtggcggctcgataccatctttcgcaccaatatgtccgta

SEQ ID NO: 568076 - DNA, 75 bp, synthetic construct
  source 1..75: mol_type = other DNA
atggacgacgctagtcgggatccagtgataaccgaagatgaaatcagggagctgcaattttctgccggggatgtg

SEQ ID NO: 568077 - DNA, 75 bp, synthetic construct
  source 1..75: mol_type = other DNA
tgacggccagcatcccggcgagcgtccgggtgcctggtacaatacaccccgtctgcacctgctcatcaccggcca

SEQ ID NO: 568078 - DNA, 75 bp, synthetic construct
  source 1..75: mol_type = other DNA
aggggatcttccgcctgaacggcgagaagtgggtggaagaatttgacgccttcctggcggagctgcgcccggtcg

SEQ ID NO: 568079 - DNA, 75 bp, synthetic construct
  source 1..75: mol_type = other DNA
ggtcgcgcccggcgacggggattttcagcttattgccgatccggaggccacagtccggcagctgtaccggcacat

SEQ ID NO: 568080 - DNA, 75 bp, synthetic construct
  source 1..75: mol_type = other DNA
atctggcgctgcatggtctggtgctacgctatgatgacccgttctggcaggcgttctacccgccgaacggctggc

SEQ ID NO: 568081 - DNA, 75 bp, synthetic construct
  source 1..75: mol_type = other DNA
tggggggccatctcttttttttcaaaaaatttgggggggtctgcatgagcgtgacaacggctgaactggcgtact

SEQ ID NO: 568082 - DNA, 75 bp, synthetic construct
  source 1..75: mol_type = other DNA
ggtctcagcgaaaaccggtgagatgcggaacgtcgccaccttccgtaccggcaccacgaaggtggccaccgacgt

SEQ ID NO: 568083 - DNA, 75 bp, synthetic construct
  source 1..75: mol_type = other DNA
gagttagtgaaagcaggaaatatcgacgctgctgttgagctttctcaccagaccaatacgctgccggagatcacc

SEQ ID NO: 568084 - DNA, 75 bp, synthetic construct
  source 1..75: mol_type = other DNA
gcaggacggagataaagtcttaccgcttgagcgcaaagagctccttggccaattattactcgacgagatcgtgac

SEQ ID NO: 568085 - DNA, 75 bp, synthetic construct
  source 1..75: mol_type = other DNA
tatcaggtccggtttcgctaccgacgccaccgtttgttaaacgtgttgatgtgatgaccgcgctggaaatggaag

SEQ ID NO: 568086 - DNA, 75 bp, synthetic construct
  source 1..75: mol_type = other DNA
cgtcgtttgcgcgatcgcggggccgacgtccgcgtagccatgaccgaagcggcaaaagcctttatcaccccactt

SEQ ID NO: 568087 - DNA, 75 bp, synthetic construct
  source 1..75: mol_type = other DNA
tgatttgcctcgacggcaaactgggcgctgatggcaacgcactgttccgccagcctgatctgcgcgaaatgcgtg

SEQ ID NO: 568088 - DNA, 75 bp, synthetic construct
  source 1..75: mol_type = other DNA
gttaaactgcacggcggtgaaccggctaacttcctggacgttggcggcggcgcaaccaaagaacgtgtaaccgaa

SEQ ID NO: 568089 - DNA, 75 bp, synthetic construct
  source 1..75: mol_type = other DNA
ggctgccgaagcggcaatgggccatattgagctgggaaaatgggctgacttagtgattcttgctccagcgacagc

SEQ ID NO: 568090 - DNA, 75 bp, synthetic construct
  source 1..75: mol_type = other DNA
cgggaaatcttcagcgcgatggggattcacttcgaactcaattgtgaagtgggtaaagatgtctctttggattcg

SEQ ID NO: 568091 - DNA, 75 bp, synthetic construct
  source 1..75: mol_type = other DNA
ccttggtgtgggaacttaccgttccatgaaggcggatttaccgaatgaagatgcgccgggcgtttatgacgcatt

SEQ ID NO: 568092 - DNA, 75 bp, synthetic construct
  source 1..75: mol_type = other DNA
gcgcggggccggcagggttggcctgtgccgacgtgctgacgcgtaatggtgttgaggtgacggtgttcgatcgcc

SEQ ID NO: 568093 - DNA, 75 bp, synthetic construct
  source 1..75: mol_type = other DNA
catccggtatgcagcaactaaacattgtccccggcgcacttccagactggtttgttagcatcgaaaacctgaaaa

SEQ ID NO: 568094 - DNA, 75 bp, synthetic construct
  source 1..75: mol_type = other DNA
gaactggtgaaagccggaaatatcgacgccgccgtcgagctttctcaccagaccaacaccctgccagaaattacc

SEQ ID NO: 568095 - DNA, 75 bp, synthetic construct
  source 1..75: mol_type = other DNA
gcctgacttaagccacgtcaccaaagtcgacaagcgggtggcgattatcggcgcggggccggcggggctggcttg

SEQ ID NO: 568096 - DNA, 75 bp, synthetic construct
  source 1..75: mol_type = other DNA
ccacagagaaagccacggccctagcacaggagctgcgcccggcaatcccggccgtgacggaaacccttgaggccg

SEQ ID NO: 568097 - DNA, 75 bp, synthetic construct
  source 1..75: mol_type = other DNA
gaagcgctggaacgctgggatgtgaaactggtgaaaggcttactgccgcgccacatgcagattattaacgaaatt

SEQ ID NO: 568098 - DNA, 75 bp, synthetic construct
  source 1..75: mol_type = other DNA
gcaccgggctactacctggcgaagaatattatctttgcgatcaacaaagtggctgacgtgatcaacaacgatcca

SEQ ID NO: 568099 - DNA, 75 bp, synthetic construct
  source 1..75: mol_type = other DNA
attgtgtctcggcggcggaaaaactgatcccggcggcggatatttccgagcaaatctccaccgcaggtaaagaag

SEQ ID NO: 568100 - DNA, 75 bp, synthetic construct
  source 1..75: mol_type = other DNA
gcgactgattattgtggaagtggagcaggacgatccgctggtgatggtcgaacaattgatgccggttctgcctgt

SEQ ID NO: 568101 - DNA, 75 bp, synthetic construct
  source 1..75: mol_type = other DNA
gagtgggttaacgatctggatcaactgatccatctggaaaaattcgccgatgacgcgaaattccgtcagcaatat

SEQ ID NO: 568102 - DNA, 75 bp, synthetic construct
  source 1..75: mol_type = other DNA
ctctatccaaacgacaaccataccgccggtaaaaaattgcgcctgatgcagcaatacttccagtgcgcctgttcg

SEQ ID NO: 568103 - DNA, 75 bp, synthetic construct
  source 1..75: mol_type = other DNA
tctgagcgcttcctatgtaggcgaagacaacgagcgtaaggtgccagtaatgattcaccgcgcaattcttgggtc

SEQ ID NO: 568104 - DNA, 75 bp, synthetic construct
  source 1..75: mol_type = other DNA
gtagctgccaccgtaacgagccgtcaggttcgctgcatggcctgatgcgtgtacgtggttttacccaggatgacg

SEQ ID NO: 568105 - DNA, 75 bp, synthetic construct
  source 1..75: mol_type = other DNA
agttaaaggtccgttcatgatggaccgtgtcctgtgggaaaaaaccggtcactgggacaactacaaagatgcaat

SEQ ID NO: 568106 - DNA, 75 bp, synthetic construct
  source 1..75: mol_type = other DNA
gcagtacttccagtgtgcctgctcggtggcggatattttgcgtcgccatcatcaggcgggccgtaagctgcacga

SEQ ID NO: 568107 - DNA, 75 bp, synthetic construct
  source 1..75: mol_type = other DNA
cggcgctgggtaacggtggtctgggacgtctggcggcgtgcttcctcgactcaatggcaactgtcggtcagtctg

SEQ ID NO: 568108 - DNA, 75 bp, synthetic construct
  source 1..75: mol_type = other DNA
tgaatccagaagatagcaaatcaaaccgcgccattggtgtggcgctgaacgataccgcctctaaagtgttgcgtg

SEQ ID NO: 568109 - DNA, 75 bp, synthetic construct
  source 1..75: mol_type = other DNA
ctattgcaactcccactggcgaggggacaacatctgcacggagcttcgcccgtaaacgccgttgtgtactgacta

SEQ ID NO: 568110 - DNA, 75 bp, synthetic construct
  source 1..75: mol_type = other DNA
caccgactggcgaagggacaacgtcagcacgggcttttgcccgctcacgacgctgcgtgttaaccagtggctttt

SEQ ID NO: 568111 - DNA, 75 bp, synthetic construct
  source 1..75: mol_type = other DNA
tgatccgcaatattctgcgcgagcagcttgtccccacgacatcgcaaacgccaaaaaacagtattttccagactg

SEQ ID NO: 568112 - DNA, 75 bp, synthetic construct
  source 1..75: mol_type = other DNA
gtcgatgaaacggcggatattgtgaaagccgccgaggacatcatcaacggcgcttcatttgattacaacctgccg

SEQ ID NO: 568113 - DNA, 75 bp, synthetic construct
  source 1..75: mol_type = other DNA
ttcctagcagatctgcgtcctgttgtggatcagatgtatgccgagcacctgctgcgcccgctggagagcggctgc

SEQ ID NO: 568114 - DNA, 75 bp, synthetic construct
  source 1..75: mol_type = other DNA
agctggtcactggtctggtaacgcgctttgagcacgcacagccgtcgcaggcgctggagggccttcgctgtcttt

SEQ ID NO: 568115 - DNA, 75 bp, synthetic construct
  source 1..75: mol_type = other DNA
atgaataactctgaattagaaacactgatccgcaatattctgcgcgagcaacttgtccccgctacaccacgaacg

SEQ ID NO: 568116 - DNA, 75 bp, synthetic construct
  source 1..75: mol_type = other DNA
atgagcgtaaaagttatcgtcacagacatggacggtacttttcttaacgacgccaaaacgtacaaccaaccacgt

SEQ ID NO: 568117 - DNA, 75 bp, synthetic construct
  source 1..75: mol_type = other DNA
tgactggctaaaccggtttaccggggaggatgagagccgggtggcgacagcctgggaggatattcagtatcttcg

SEQ ID NO: 568118 - DNA, 75 bp, synthetic construct
  source 1..75: mol_type = other DNA
gcggggatactgaaaccggtaaaaccgctgtcttttccgccgttaccggaactgacctcatacggagaaaccggc

SEQ ID NO: 568119 - DNA, 75 bp, synthetic construct
  source 1..75: mol_type = other DNA
caaagaaatggtattttccagactgtcgatgaggccgtctgcgctgcacaccaggcctttttgcgctttcaacag

SEQ ID NO: 568120 - DNA, 75 bp, synthetic construct
  source 1..75: mol_type = other DNA
gaagaagataaagcattgttgattggtaatggtctgaagctacgtatactggatgaaaacgcctcgccttataca

SEQ ID NO: 568121 - DNA, 75 bp, synthetic construct
  source 1..75: mol_type = other DNA
ggatgaacatgcctcgccctatatcttcaacaaatacagcgaatatgccgatttcaccagtggcatgttgatcta

SEQ ID NO: 568122 - DNA, 75 bp, synthetic construct
  source 1..75: mol_type = other DNA
gcggagaattacccgcaacacattgcgttgccccgggatgtctggacagcgtattatctttccttagggacaaca

SEQ ID NO: 568123 - DNA, 75 bp, synthetic construct
  source 1..75: mol_type = other DNA
atgtcagtctggaataagccccgtgttataggttgtgcggagaattacccgcaacacattgcgttgccccgggga

SEQ ID NO: 568124 - DNA, 75 bp, synthetic construct
  source 1..75: mol_type = other DNA
tgcccggccacagcgctggtttaacgcgctggctgaaatcagacccgcgtggatcttcgttcatgcagaaacgct

SEQ ID NO: 568125 - DNA, 75 bp, synthetic construct
  source 1..75: mol_type = other DNA
tccgatcttggcccagcctgcaccggtacgattggtattgcgccttcagccaacctgaatccggaacgcactttc

SEQ ID NO: 568126 - DNA, 75 bp, synthetic construct
  source 1..75: mol_type = other DNA
aaatattgccaaccctatcgccacgatttgggccggggcaatgatgctggatttccttggcaatggcgatgagcg

SEQ ID NO: 568127 - DNA, 75 bp, synthetic construct
  source 1..75: mol_type = other DNA
tcgtgcagaaaaaaagcaacgcaacaaaatcggtttcatttatttatgtctctgtttagcaataattggtgtggc

SEQ ID NO: 568128 - DNA, 75 bp, synthetic construct
  source 1..75: mol_type = other DNA
cgttatccgtcgcccggtgtttggccaggtgaaaccttttgttgaaaggctcctcaatgctggaaatgatgttct

SEQ ID NO: 568129 - DNA, 75 bp, synthetic construct
  source 1..75: mol_type = other DNA
taacaagatcgtgacttccaacaaggtgcttcatcagctgcttttgctttggggagccaggctatcagagctgcg

SEQ ID NO: 568130 - DNA, 75 bp, synthetic construct
  source 1..75: mol_type = other DNA
gcctgcaagcgcagcgaaatcatgaagcgaattctgtttatctacggcgctggcgaagagctgccagtcatctaa

SEQ ID NO: 568131 - DNA, 75 bp, synthetic construct
  source 1..75: mol_type = other DNA
gggcgagttctggaaagctgtcagggacagagacggtaaaattcctgcgccagtaacggacgatgacataaagca

SEQ ID NO: 568132 - DNA, 75 bp, synthetic construct
  source 1..75: mol_type = other DNA
tgaggtctgttatgtggctgatgcttgtcctgacgagctggataactggagcgaagccggactaaacgccctggc

SEQ ID NO: 568133 - DNA, 75 bp, synthetic construct
  source 1..75: mol_type = other DNA
gcgtgtgctgtatgcagccggggaattaggctgggaagtgcactttcttgatgatggtgctatctgccttgagga

SEQ ID NO: 568134 - DNA, 75 bp, synthetic construct
  source 1..75: mol_type = other DNA
ctgggataaacagcatatcgatattctttgtgcacgttttgtgatgcaaccggaacgctttgatgtcgtggtagc

SEQ ID NO: 568135 - DNA, 75 bp, synthetic construct
  source 1..75: mol_type = other DNA
gaccttggccgggtggccgggttgctgaaattgtggctcgcggagaagcgcgggcagggtgcccggccggtggac

SEQ ID NO: 568136 - DNA, 75 bp, synthetic construct
  source 1..75: mol_type = other DNA
cttcgcgctgttgggctgaatctgcctataggttcacgggccgatttggaagctgtccgccagttggcaaaggtg

SEQ ID NO: 568137 - DNA, 75 bp, synthetic construct
  source 1..75: mol_type = other DNA
tgcccggccggtggacgtggaagccatgatgaacgactttcgcgccctgcaaaccgagctgcacgcgatcatggg

SEQ ID NO: 568138 - DNA, 75 bp, synthetic construct
  source 1..75: mol_type = other DNA
gagccttggtgtcgcatcgagatggaaggcatgggacgcggctgctggcccgatgagcctgacgttgcggatacg

SEQ ID NO: 568139 - DNA, 75 bp, synthetic construct
  source 1..75: mol_type = other DNA
cttggcgtgaagactttcgccatccttgcgtcaggaggttgtttgaatccagtggtaataccgcgtacagcgccg

SEQ ID NO: 568140 - DNA, 75 bp, synthetic construct
  source 1..75: mol_type = other DNA
tcacggaatattcgacggcgcagtggacgttggcagaggtgatcgctcagtgcaatagcatgcttgacgtgacaa

SEQ ID NO: 568141 - DNA, 75 bp, synthetic construct
  source 1..75: mol_type = other DNA
catcgggcaaatgaccgctgatattgacggactctgttttattcgtgacggcgaacctgtcacgcttgactggaa

SEQ ID NO: 568142 - DNA, 75 bp, synthetic construct
  source 1..75: mol_type = other DNA
agcactggcggtgaacctaagcgatctggcagcgatgggggccgatccggcctggctgacgctggcattaacctt

SEQ ID NO: 568143 - DNA, 75 bp, synthetic construct
  source 1..75: mol_type = other DNA
ttgccggttctgatcaaaatgtgaagtcagaacgggagttgttaaaacatatttatcagttgctggaggcaatga

SEQ ID NO: 568144 - DNA, 75 bp, synthetic construct
  source 1..75: mol_type = other DNA
gacgagctaccaggctgctccaccccgcgcctgaaacatggcaaattctactcgttttgggtaaaaaatgcaaat

SEQ ID NO: 568145 - DNA, 75 bp, synthetic construct
  source 1..75: mol_type = other DNA
ttatggtgattttagccatgcggtacgcgatataaaccagtggattaatggttgttatattataacgtttatcga

SEQ ID NO: 568146 - DNA, 75 bp, synthetic construct
  source 1..75: mol_type = other DNA
tatgtcattcggtaatagtaggcaaagtagaaggcccatttttagagggtaagttaggcgcatcaaatgagccat

SEQ ID NO: 568147 - DNA, 75 bp, synthetic construct
  source 1..75: mol_type = other DNA
aatattgctgcagaattaatcgataaacgatttgccgggacggaatgtaatgccgtttttacgggaaacctcaga

SEQ ID NO: 568148 - DNA, 75 bp, synthetic construct
  source 1..75: mol_type = other DNA
tcataaattaaatcaggttggcggaatttcagaaaacagagccgcatatgagggccgtatcaaggccagaaatat

SEQ ID NO: 568149 - DNA, 75 bp, synthetic construct
  source 1..75: mol_type = other DNA
aagccagtgaactaaaaacgctctgccaattgataaaaccatcagagcgatttaaggatattcaaaaaaatgata

SEQ ID NO: 568150 - DNA, 75 bp, synthetic construct
  source 1..75: mol_type = other DNA
catcatctaccccattatcttgatggtcaaaaaagattttatattccaacagcgctcgatgtagatgataatgat

SEQ ID NO: 568151 - DNA, 75 bp, synthetic construct
  source 1..75: mol_type = other DNA
tgtctgtgtgagcacattcgcgaaactcatatcaatgaattgaaagccctatgccagatgatgaagccctccgag

SEQ ID NO: 568152 - DNA, 75 bp, synthetic construct
  source 1..75: mol_type = other DNA
aaaacccctatcagaatagggactactatacggttgccttaaaggctagacttcaaactcacctggaagagaggt

SEQ ID NO: 568153 - DNA, 75 bp, synthetic construct
  source 1..75: mol_type = other DNA
tttagaagacctgctaaccgaaaacccctatcagaacagggactactatacagttgcattaaaggccaggcttca

SEQ ID NO: 568154 - DNA, 75 bp, synthetic construct
  source 1..75: mol_type = other DNA
tgcgctgatgcgtatttttgcttctgaccgtgtttccggcatgatgcgtaaactgggtatgaaaccaggcgaagc

SEQ ID NO: 568155 - DNA, 75 bp, synthetic construct
  source 1..75: mol_type = other DNA
cgataaccagctacgcggtcgttctgggcgccagggggatgccggttcttcccgtttctacctgtcgatggaaga

SEQ ID NO: 568156 - DNA, 75 bp, synthetic construct
  source 1..75: mol_type = other DNA
gaaatgcgtactggtgaaggtaaaactctgaccgcaacgctgcctgcttacctgaacgcattaaccggtaaaggt

SEQ ID NO: 568157 - DNA, 75 bp, synthetic construct
  source 1..75: mol_type = other DNA
agagcgccgttttttcgcatcagaacctgaaggggaagtttaccgggcgcgcaaagatggatacacagatgtagt

SEQ ID NO: 568158 - DNA, 75 bp, synthetic construct
  source 1..75: mol_type = other DNA
ctacgttgcgaagtcgtacatcttaaggaacatcgatattcgcaatgaaagccttaagcagaaatccgctaagat

SEQ ID NO: 568159 - DNA, 75 bp, synthetic construct
  source 1..75: mol_type = other DNA
aaggtttaatcgttgccggtaataaaattacaatcgatggaaaagagcatgtctcggtagaaaatagtgaaaaca

SEQ ID NO: 568160 - DNA, 75 bp, synthetic construct
  source 1..75: mol_type = other DNA
gacttcgctatttataaaaatggaaaactacatacagcccatcaagtaaaagctaagataagtaaatatcgaagt

SEQ ID NO: 568161 - DNA, 75 bp, synthetic construct
  source 1..75: mol_type = other DNA
tggtgatgagccaggcagcgcgccagactttatccctcgaaacggatttttccctgcgcgaagttcaggcattag

SEQ ID NO: 568162 - DNA, 75 bp, synthetic construct
  source 1..75: mol_type = other DNA
ttgatgatgtgataaatcagacggttaaccgtgttcttgaccagtttgcgataacccttcctgaagatctctttg

SEQ ID NO: 568163 - DNA, 75 bp, synthetic construct
  source 1..75: mol_type = other DNA
tctttccagacgctggggatggtgattttaccctgttcaatcaaaaccctgtccggcattgtccatagctatact

SEQ ID NO: 568164 - DNA, 75 bp, synthetic construct
  source 1..75: mol_type = other DNA
gggttatatccgttgctggaagatgattcctgttattttctggctgttgattttgatgaagctgaatggcagaag

SEQ ID NO: 568165 - DNA, 75 bp, synthetic construct
  source 1..75: mol_type = other DNA
tcaagcctggaatggctgtcatgcaaggaatttttgaacgtgttgaacaagtctcactagtcgaggttgaggaac

SEQ ID NO: 568166 - DNA, 75 bp, synthetic construct
  source 1..75: mol_type = other DNA
catactcgcctggctaactgcgtaggaattatcgactccgattatcgcggtgaaatcatggcaaaactgattact

SEQ ID NO: 568167 - DNA, 75 bp, synthetic construct
  source 1..75: mol_type = other DNA
gttctttgccagttgtgggttgaaagaaaacgtaatctgttgatcatttgtcctgcttcgctacgtcgccaatgg

SEQ ID NO: 568168 - DNA, 75 bp, synthetic construct
  source 1..75: mol_type = other DNA
gtcatcttcgattacagtaaccacacaacgaaagtctcggtggctgagcagctgaaagggcaatcagggtggtta

SEQ ID NO: 568169 - DNA, 75 bp, synthetic construct
  source 1..75: mol_type = other DNA
cggggaacttcgtaaactgctattcgagtacaaccatctaattgcatgcaggtcttgtgagtcttttacgattaa

SEQ ID NO: 568170 - DNA, 75 bp, synthetic construct
  source 1..75: mol_type = other DNA
atgaaacgacttattgtaggcatcagcggtgccagcggcgcgatttatggcgtgcgcttattacaggttctgcgc

SEQ ID NO: 568171 - DNA, 75 bp, synthetic construct
  source 1..75: mol_type = other DNA
atcatcttcacggagtcgatgcgaactcaacagtatcttgcacattttctggaaaacaatggctaccaggggaaa

SEQ ID NO: 568172 - DNA, 75 bp, synthetic construct
  source 1..75: mol_type = other DNA
gatcgaccacttcaaagatcatgctgaaatcatgatagctacagaagctgcagctgaaggggtgaacctgcaatt

SEQ ID NO: 568173 - DNA, 75 bp, synthetic construct
  source 1..75: mol_type = other DNA
gatattactggtaacagagccaaaatcggtaacaaaggtaaaatcacggttgttgatcaaaactccatcggtgta

SEQ ID NO: 568174 - DNA, 75 bp, synthetic construct
  source 1..75: mol_type = other DNA
tgtaaacggcgatgctgatatcgctacgggcggtagcggccatacgctatataacggtacaacgggcgttataaa

SEQ ID NO: 568175 - DNA, 75 bp, synthetic construct
  source 1..75: mol_type = other DNA
ctgtttatgcattgaatgatgataacaaccataatcacgacaattcttctgattccggtaacgatggcggcgatg

SEQ ID NO: 568176 - DNA, 75 bp, synthetic construct
  source 1..75: mol_type = other DNA
cccgccaaccccgacgctactgaagttactgttcttgaaggcaaaaccatgggaaccttctggcgtgccagtatc

SEQ ID NO: 568177 - DNA, 75 bp, synthetic construct
  source 1..75: mol_type = other DNA
tgttggttgcgatcaaaaaccacaacccgccaaaacccacgctactgaagttaccgttcttgaaggcaaaactat

SEQ ID NO: 568178 - DNA, 75 bp, synthetic construct
  source 1..75: mol_type = other DNA
atggaaataagctttacccgcgtggcactgctggctgccgcgctcttctttgttggttgcgatcaaaaaccacaa

SEQ ID NO: 568179 - DNA, 75 bp, synthetic construct
  source 1..75: mol_type = other DNA
gatagccggtttattgttctggaacttgaagaattgaaggggaccccacaccttcagactgtcgttctgatgtcg

SEQ ID NO: 568180 - DNA, 75 bp, synthetic construct
  source 1..75: mol_type = other DNA
gcatttttgactgatgtgactgttggagagcgtgtttttgatgaagcacctgtctttaatgacgattcaaataat

SEQ ID NO: 568181 - DNA, 75 bp, synthetic construct
  source 1..75: mol_type = other DNA
gcccgagtatatcgccatctcatcggaaaccagtgcaactcttattcatcgggttccactagagaaaaagaagaa

SEQ ID NO: 568182 - DNA, 75 bp, synthetic construct
  source 1..75: mol_type = other DNA
gaaattcagaatttaggttttgcttttgttactggtgaaaatacaacaggtataaatagtggcacgatctcgtta

SEQ ID NO: 568183 - DNA, 75 bp, synthetic construct
  source 1..75: mol_type = other DNA
gggttcagcatcacaaccaacagtgggaaggtttcgctggcaggcagtatgcaggttggcgatttctcgaccggg

SEQ ID NO: 568184 - DNA, 75 bp, synthetic construct
  source 1..75: mol_type = other DNA
cgaagcccaatacggttagtgtaacgtcgggaagtgatgaggctggtggcagcatgaacaacctcaacggctatg

SEQ ID NO: 568185 - DNA, 75 bp, synthetic construct
  source 1..75: mol_type = other DNA
ctgccggatttatatgtcgatctctccaccgtcggcgaaggttatgcggcagatcatctggcacgcttaatggag

SEQ ID NO: 568186 - DNA, 75 bp, synthetic construct
  source 1..75: mol_type = other DNA
gacaggtatgcttgccagctactcgtcatccattctgaacggcgaaacgggcattattgatatgtatggccgtgg

SEQ ID NO: 568187 - DNA, 75 bp, synthetic construct
  source 1..75: mol_type = other DNA
cgcgcgtctggatggcgacggtgcgcagaaagcgggcgataacggcgtaaccggcggctacagtcagttcttcgg

SEQ ID NO: 568188 - DNA, 75 bp, synthetic construct
  source 1..75: mol_type = other DNA
gtgaatgaaggcggtgcgttaaccaatgaaggtgtattgaacacggtgactctggaaggaggaaccttcaataac

SEQ ID NO: 568189 - DNA, 75 bp, synthetic construct
  source 1..75: mol_type = other DNA
caagagccagcgcacggcaagccttgcaggggcaggcagccagcactttaacgtcgatgacggtcagaagggcgg

SEQ ID NO: 568190 - DNA, 75 bp, synthetic construct
  source 1..75: mol_type = other DNA
cggcggtgatacgcctgttccgccagacgatggtggcgataccccggttaaacacgatcctgtcgtctataaaaa

SEQ ID NO: 568191 - DNA, 75 bp, synthetic construct
  source 1..75: mol_type = other DNA
acaccaacaacgagctgtataccagcctgaacgtcggcactactgccgaactgaacagcgccctgaagcaggtga

SEQ ID NO: 568192 - DNA, 75 bp, synthetic construct
  source 1..75: mol_type = other DNA
atgatcaccaaagagggcgatagttttaaaacctggatgtcgccgcagtttaaaagcttccttatcagcgaaaaa

SEQ ID NO: 568193 - DNA, 75 bp, synthetic construct
  source 1..75: mol_type = other DNA
caaaccgggcgtcccattgaacacaatctggtatccgtgacggtgattgccccgacggcgctggaagccgacgcc

SEQ ID NO: 568194 - DNA, 75 bp, synthetic construct
  source 1..75: mol_type = other DNA
ggatcatctggcacgcttgatggagcaggaagggatttcccgctatctggtgtcggtgggcggcgcgctgaacag

SEQ ID NO: 568195 - DNA, 75 bp, synthetic construct
  source 1..75: mol_type = other DNA
gcgccaaatgatatctcgacgttcattccacaattgatggccctgaaaggcagcgccagcgcgccagtggtacgg

SEQ ID NO: 568196 - DNA, 75 bp, synthetic construct
  source 1..75: mol_type = other DNA
ttataacttcctgatcccctttgtcgaaacgaaagaagaagcagtgcaggcggtggcatctacccgttatccacc

SEQ ID NO: 568197 - DNA, 75 bp, synthetic construct
  source 1..75: mol_type = other DNA
ataacgtcgatgctattgccgctaccgaaggcgtagacggcatcttcgtcggccccagcgatctggctgcggcat

SEQ ID NO: 568198 - DNA, 75 bp, synthetic construct
  source 1..75: mol_type = other DNA
cagcgactgatagaggaaggaaagatggttagtaaaagcaaggcacattgccgccgcatgctgcaggcattgcaa

SEQ ID NO: 568199 - DNA, 75 bp, synthetic construct
  source 1..75: mol_type = other DNA
aggggaagcagtgggttggtgactggaaatatgtcccgacaaaagaggattgcaacgacagaccgaactatgaaa

SEQ ID NO: 568200 - DNA, 75 bp, synthetic construct
  source 1..75: mol_type = other DNA
tgcaaattaccggagatggcgatggattacctgaaacgaaatggactgataagcgtggaggatgttttacgatga

SEQ ID NO: 568201 - DNA, 75 bp, synthetic construct
  source 1..75: mol_type = other DNA
aaggactggttaaagccgtgcgcttttatgaacaggtaaagcgtgagaatccaccagtcgaaacaggagcatgga

SEQ ID NO: 568202 - DNA, 75 bp, synthetic construct
  source 1..75: mol_type = other DNA
gaatgtatcccttaacggagatggaaattattatgcacctatcgaaagagaatgtaacgaatgtgcgggcacagg

SEQ ID NO: 568203 - DNA, 75 bp, synthetic construct
  source 1..75: mol_type = other DNA
aaaaactaatccagactgcaaattaccggagatggcgatggattacctgaaacgaaatggactgataagcgtgga

SEQ ID NO: 568204 - DNA, 75 bp, synthetic construct
  source 1..75: mol_type = other DNA
tgtgccactgacaccagaaggattgattaaagcagtgcgcttctatgaactggttaagcgtgagaatccgccagt

SEQ ID NO: 568205 - DNA, 75 bp, synthetic construct
  source 1..75: mol_type = other DNA
gttttcacccggtggttttgcagaagaagatcggctgtggccgaaaggtgacagtgctttcagtgggtatcagtt

SEQ ID NO: 568206 - DNA, 75 bp, synthetic construct
  source 1..75: mol_type = other DNA
cggatgccggagcgggaaacgctttcattacgtattacaggtaccaatggtcagcttccccgtcgtgcgttgcag

SEQ ID NO: 568207 - DNA, 75 bp, synthetic construct
  source 1..75: mol_type = other DNA
gcgcgctacaagaacagcctcactgatctggatgcctggctgtgccaacacagcgccacgctgacgggcgcgccg

SEQ ID NO: 568208 - DNA, 75 bp, synthetic construct
  source 1..75: mol_type = other DNA
aatatggataattttgccggcgagggcgatgtgaatctcttcggggagatgctgcaccgtttctttgcgctctat

SEQ ID NO: 568209 - DNA, 75 bp, synthetic construct
  source 1..75: mol_type = other DNA
gacggtcgctctctgctacggatacgctttgcctgcagcagtcaggcggactggtcgaatgctgatcttagttgc

SEQ ID NO: 568210 - DNA, 75 bp, synthetic construct
  source 1..75: mol_type = other DNA
tcgatgcggaaatgcgctaccttcgtgaggcggcgaaagagttcgcacaaacccatccggatcgtgccgcgatgt

SEQ ID NO: 568211 - DNA, 75 bp, synthetic construct
  source 1..75: mol_type = other DNA
cctgcccttagaacaaatgatttatgtgtcaatattttttgcctttacatttataatatcaggaactgaaacttt

SEQ ID NO: 568212 - DNA, 75 bp, synthetic construct
  source 1..75: mol_type = other DNA
ggattgtacaggcgcatgagtggggcaagtacgttggtcgggccgactttgagtttcgcaacggcgaaatgaaaa

SEQ ID NO: 568213 - DNA, 75 bp, synthetic construct
  source 1..75: mol_type = other DNA
cgtccagccgacgctggcagaactgacggcgcatccgctgccgcgttcattaagccgcctgaacccggatttact

SEQ ID NO: 568214 - DNA, 75 bp, synthetic construct
  source 1..75: mol_type = other DNA
gtgttagcgacattcgcgatattagcgaacagttgctgcatatcacctggccggaactgaagccgcgcaacaatc

SEQ ID NO: 568215 - DNA, 75 bp, synthetic construct
  source 1..75: mol_type = other DNA
ggtgattgattacctgactgccgtcgcgcagatgaagcccgactccggcgcctatccgcagtttgccaatgttag

SEQ ID NO: 568216 - DNA, 75 bp, synthetic construct
  source 1..75: mol_type = other DNA
aacgacctgaaaatcaaaggcgaaccggtcgatccggcgaaaacttaccgcatggcgacattaaacttcaatgcc

SEQ ID NO: 568217 - DNA, 75 bp, synthetic construct
  source 1..75: mol_type = other DNA
cgctgatgaagcgaagctggtgattcaggagctgcaacagacagaaaagccagacattattatcgcggcgaccca

SEQ ID NO: 568218 - DNA, 75 bp, synthetic construct
  source 1..75: mol_type = other DNA
gcgtcattattgcttccgctgcacaattaagtctgggttatgcggcgagtcatctgccgccgatgacgcaattat

SEQ ID NO: 568219 - DNA, 75 bp, synthetic construct
  source 1..75: mol_type = other DNA
gcgtcattattgcctcagttgcgcaattaagcctgggttttgcggcgagtcatctgccgccgatgacgcacttat

SEQ ID NO: 568220 - DNA, 75 bp, synthetic construct
  source 1..75: mol_type = other DNA
caattttaactccattcttatttgttttggggcttaacttgcattatcaatatttttgtttaccaataatatctg

SEQ ID NO: 568221 - DNA, 75 bp, synthetic construct
  source 1..75: mol_type = other DNA
atggatagcgaactgattcttaaggctgagacaaccccacaaggagctgataaggctgcgagaataatcgcagta

SEQ ID NO: 568222 - DNA, 75 bp, synthetic construct
  source 1..75: mol_type = other DNA
atgcaaccaaattctagcgcacctaaagataaatttggagacgatttgatgattaaggctgagacaaccccacaa

SEQ ID NO: 568223 - DNA, 75 bp, synthetic construct
  source 1..75: mol_type = other DNA
gcgtcatgattgcttctgcagcacaattaagtctgggttatgcggcaagtcatctgccatcgatgacgcggtggc

SEQ ID NO: 568224 - DNA, 75 bp, synthetic construct
  source 1..75: mol_type = other DNA
actgcccgaatacgggtgcaatgaccggttgtgcaacgcctggcgataccgtctggtattcgacttcagacaaca

SEQ ID NO: 568225 - DNA, 75 bp, synthetic construct
  source 1..75: mol_type = other DNA
aggccagcaccgggtactttcgcggggaacggcactggcgggaactggcgaagctgccatgacaggtgaacagat

SEQ ID NO: 568226 - DNA, 75 bp, synthetic construct
  source 1..75: mol_type = other DNA
ggtgttaaccctgaccagtcaacgtccttttgatgagcatactgaccagctatggactgcctggttgaccagttt

SEQ ID NO: 568227 - DNA, 75 bp, synthetic construct
  source 1..75: mol_type = other DNA
gtcgtagatgagtgtggttcagcgaatgttaatctagcaacgataaatttatacagggattttgataaaaaaaca

SEQ ID NO: 568228 - DNA, 75 bp, synthetic construct
  source 1..75: mol_type = other DNA
gcgccacattaatccagcgctataaacgctttttagccgatgtgatcacacctgatggtcgtgaattgacgctac

SEQ ID NO: 568229 - DNA, 75 bp, synthetic construct
  source 1..75: mol_type = other DNA
gggtcgaaattctggcttacaaagccgaactttctgccgaaagcatgtctcttaaaagagagttacccattacat

SEQ ID NO: 568230 - DNA, 75 bp, synthetic construct
  source 1..75: mol_type = other DNA
aatgtcgcagcactgaatatcaacttatcggatgcagacgcaacattgatgagggaaatggcagaggccctggag

SEQ ID NO: 568231 - DNA, 75 bp, synthetic construct
  source 1..75: mol_type = other DNA
cggatataacgctttcgcgaataggattggggacatgggctattggcggtggccctgcatggaatggcgatctcg

SEQ ID NO: 568232 - DNA, 75 bp, synthetic construct
  source 1..75: mol_type = other DNA
atgattgccattctaaacaaagctaaagggagggttggtgtgaatgctcaggctgtcatcatggttttacttggt

SEQ ID NO: 568233 - DNA, 75 bp, synthetic construct
  source 1..75: mol_type = other DNA
ttcgtcccggcgagtaatgagcgggcctcccccagtctgaatatttcccgtgacactctcaaacccgatgaaaac

SEQ ID NO: 568234 - DNA, 75 bp, synthetic construct
  source 1..75: mol_type = other DNA
ttgtgctcgttatcagtgcacaattcccactctggcactggcgtggatattaaaacagagtgatttaatctccat

SEQ ID NO: 568235 - DNA, 75 bp, synthetic construct
  source 1..75: mol_type = other DNA
tttccccggaatctatccgcgaagaggtagaagccagcttgcaacgtctgggtattgattacatcgatatctaca

SEQ ID NO: 568236 - DNA, 75 bp, synthetic construct
  source 1..75: mol_type = other DNA
ggcgtttcatcagcatgagcgtggggaaattagcgacgaagcgttcgcagaggcgctgtgtcatgagatggccct

SEQ ID NO: 568237 - DNA, 75 bp, synthetic construct
  source 1..75: mol_type = other DNA
gactggggcggatgctgagcgaggagacggcgcagggcatcctgacccatcagtacgatgaactcagtaaccgga

SEQ ID NO: 568238 - DNA, 75 bp, synthetic construct
  source 1..75: mol_type = other DNA
tggcatcagccggaaacggaggtggacgcggcgggaaacagctgtcgctgtgtgtacgatgaacgcggcaacctt

SEQ ID NO: 568239 - DNA, 75 bp, synthetic construct
  source 1..75: mol_type = other DNA
tgttaccaacggtaaaccatggaaagtaaaagatatgggcaaagttattggggccagtgagggtaaagaatctca

SEQ ID NO: 568240 - DNA, 75 bp, synthetic construct
  source 1..75: mol_type = other DNA
tatccgacctgacgcgtatcctggtcgaagatgcattaactgaaatgtttctcccggctgaaaacatcgttcgcc

SEQ ID NO: 568241 - DNA, 75 bp, synthetic construct
  source 1..75: mol_type = other DNA
aatgtggacattattctctggcatggttttccgtttgccggaacgcattccggggaatattgcggtgttctgctc

SEQ ID NO: 568242 - DNA, 75 bp, synthetic construct
  source 1..75: mol_type = other DNA
ttttatttgaggctctcatgatccttggccatggcagagtctggatgcaagagatggagttcgagaatttacctg

SEQ ID NO: 568243 - DNA, 75 bp, synthetic construct
  source 1..75: mol_type = other DNA
ctgataaaaatatttatgatgcattacatcataaaaggataaccgctgcaaagttgcatgaattattgttgaatc

SEQ ID NO: 568244 - DNA, 75 bp, synthetic construct
  source 1..75: mol_type = other DNA
atatcaaaactcccccatggttttaatgaattagagcatataaaaaagatggtcaaaacatatgatccaagagaa

SEQ ID NO: 568245 - DNA, 75 bp, synthetic construct
  source 1..75: mol_type = other DNA
tgatgtaacgaaagtagaattaaatcgcaatattgacgcaagtgaagatgaagacaaagaagaaacaatcgatac

SEQ ID NO: 568246 - DNA, 75 bp, synthetic construct
  source 1..75: mol_type = other DNA
aggtgaaactcagatcaaccctgaattgactggttacggtcagtttgaactagacctggaagcatcaaacagaca

SEQ ID NO: 568247 - DNA, 75 bp, synthetic construct
  source 1..75: mol_type = other DNA
tactccaaaggtaaggatatcaaaggcgtcccaggccatagatatgttgacgccgaccgcgtgaactacatcgaa

SEQ ID NO: 568248 - DNA, 75 bp, synthetic construct
  source 1..75: mol_type = other DNA
aacgaaactcagaactttgaagcagttgttcagtatcagttcgactttggtctgcgtccttccttaggttatgtc

SEQ ID NO: 568249 - DNA, 75 bp, synthetic construct
  source 1..75: mol_type = other DNA
tgcttttatccatcgttaagcgatcactcgctgagaccgtaaatcaagcaaaacgtttctcatttaagagtttaa

SEQ ID NO: 568250 - DNA, 75 bp, synthetic construct
  source 1..75: mol_type = other DNA
cgttctcatattaggtgacaccaacagcgcactatctgctatatcagcaaaaagaagaaaaatccccattttcca

SEQ ID NO: 568251 - DNA, 75 bp, synthetic construct
  source 1..75: mol_type = other DNA
gttttgagctattatgcagataagattgactcttctttgtctctacagcaactgaatgttgaagaaaacaaatat

SEQ ID NO: 568252 - DNA, 75 bp, synthetic construct
  source 1..75: mol_type = other DNA
ttcaccagagagacttagacaactgctggagatcctcaatgagcttgctgaaagatataatttgcctgtcattgt

SEQ ID NO: 568253 - DNA, 75 bp, synthetic construct
  source 1..75: mol_type = other DNA
acataactgtacactgatgtggaccagcgatcagagccggataccaaaatcatttgcagagttaattaataaaat

SEQ ID NO: 568254 - DNA, 75 bp, synthetic construct
  source 1..75: mol_type = other DNA
tatgcatttatgaaaataatacatctattattgaatcaatcaactcatttagtaacattgagagagagatctttt

SEQ ID NO: 568255 - DNA, 75 bp, synthetic construct
  source 1..75: mol_type = other DNA
gtcgctatttcaaacccagggtttagtgctgtgtcctacgcgtgaactggcggatcaggtggcaggtgaattgcg

SEQ ID NO: 568256 - DNA, 75 bp, synthetic construct
  source 1..75: mol_type = other DNA
atggcggattcgaatctcaatacacctgttattgttcaggctgcacggctcgacacatcagtccttccacgcaat

SEQ ID NO: 568257 - DNA, 75 bp, synthetic construct
  source 1..75: mol_type = other DNA
cgaatttctgctgcggaagcaacgcttgttaatcatgaggagcgaatcagccaggcagaatcaactcttcaggaa

SEQ ID NO: 568258 - DNA, 75 bp, synthetic construct
  source 1..75: mol_type = other DNA
aaccgccaacaggtcaatgcagctaacattctccggttctgttcctgacacgctagtaagcagtcgcaactcggc

SEQ ID NO: 568259 - DNA, 75 bp, synthetic construct
  source 1..75: mol_type = other DNA
actctggcgtatctgtaaccatcccgacagcgccgaccaaccttgttagcctgctgaaaacgctcacgccgtcat

SEQ ID NO: 568260 - DNA, 75 bp, synthetic construct
  source 1..75: mol_type = other DNA
ctgttgtggttcaggctacgcgccttgatgcttcaattttgccacgcaatatattcagccagtcttacctactat

SEQ ID NO: 568261 - DNA, 75 bp, synthetic construct
  source 1..75: mol_type = other DNA
atgcagctaaccttttccggatctgttcctgacacactggtaagcagtcgcaactcggcgacaacaaccgataac

SEQ ID NO: 568262 - DNA, 75 bp, synthetic construct
  source 1..75: mol_type = other DNA
tgatgacatagctttacctactagactagaaactcagttctatatgttggaaagtaatcctgatgtagcaatggt

SEQ ID NO: 568263 - DNA, 75 bp, synthetic construct
  source 1..75: mol_type = other DNA
gctttttttgcctgccagtatgccggcttagtcgccgtcccgttggcgattccaatgggcgtcggtcagcgggat

SEQ ID NO: 568264 - DNA, 75 bp, synthetic construct
  source 1..75: mol_type = other DNA
cagaaaatgcgctggctgtcagcttctctgatgaagcctccggggttgtggttaacgaagtggatcgcgacatcc

SEQ ID NO: 568265 - DNA, 75 bp, synthetic construct
  source 1..75: mol_type = other DNA
aaggatgatagtggcaaccctgtaacagaaggtgctttctcagcagttgcgaatttcaacctgacttatcagtaa

SEQ ID NO: 568266 - DNA, 75 bp, synthetic construct
  source 1..75: mol_type = other DNA
ggggtggtgattcctgggcgtccgctgacaacttcatgaacggtcgtaccaacggtgttgcaacctaccgtaact

SEQ ID NO: 568267 - DNA, 75 bp, synthetic construct
  source 1..75: mol_type = other DNA
atggataagcaatcactgcacgaaacggcgaaacgcctggcccttgagttaccctttgtcgagctttgctggcct

SEQ ID NO: 568268 - DNA, 75 bp, synthetic construct
  source 1..75: mol_type = other DNA
gtgtcggatcagcgacgaagaacgtcgcgggcagcttatccacgcgctggcggcacggatccaaagcgaatttgg

SEQ ID NO: 568269 - DNA, 75 bp, synthetic construct
  source 1..75: mol_type = other DNA
ctccgacagacgcatcaactcttgtggacggagataataccattcatttcactgctctggttaagaaagacgcaa

SEQ ID NO: 568270 - DNA, 75 bp, synthetic construct
  source 1..75: mol_type = other DNA
gtcggtggcatttactcaggggcctcgttttcggacaacggagcaaaaggtctggatgatgctcattacgttaaa

SEQ ID NO: 568271 - DNA, 75 bp, synthetic construct
  source 1..75: mol_type = other DNA
aaatcaacaacaacttacagcgtatccgtgaactgacggttcaggccactaccggtactaactccgattctgacc

SEQ ID NO: 568272 - DNA, 75 bp, synthetic construct
  source 1..75: mol_type = other DNA
tcacaaattttaaaaagaacccagcaggtgctggtggagcggctaaggcagggacagtaaccctgacattttctg

SEQ ID NO: 568273 - DNA, 75 bp, synthetic construct
  source 1..75: mol_type = other DNA
gatattgagttagtaaattgcgatattacagcttttaaacaaggtcaaccagctaaaaacggtaaggttcaatta

SEQ ID NO: 568274 - DNA, 75 bp, synthetic construct
  source 1..75: mol_type = other DNA
cggtagctatggcagtgatgtcttttggtgcaagtgctgctccaactattcctcaggggcagggtaaagtaactt

SEQ ID NO: 568275 - DNA, 75 bp, synthetic construct
  source 1..75: mol_type = other DNA
catgtcagcatttgttgattataaaatcaaccaactggatagcgataataagttgaatatcaataatgatgatat

SEQ ID NO: 568276 - DNA, 75 bp, synthetic construct
  source 1..75: mol_type = other DNA
ttttgtcgccatgttgtgtacccctcacaaaaaacaaatgcagtatgcaggaaaaaaaataagtgttcaacactt

SEQ ID NO: 568277 - DNA, 75 bp, synthetic construct
  source 1..75: mol_type = other DNA
ttgtgaaaccgcttgatgaagcgttaattctggaaatggccgccagccatgaagcgctggttaccgtagaagaaa

SEQ ID NO: 568278 - DNA, 75 bp, synthetic construct
  source 1..75: mol_type = other DNA
tttgactttggtctgcgtccatcgctgggttatgtcttatcgaaagggaaagatattgaaggcatcggtgatgaa

SEQ ID NO: 568279 - DNA, 75 bp, synthetic construct
  source 1..75: mol_type = other DNA
ctggccacttaccgtaacactgacttcttcggcgttatcgatggtctgaacttaaccctgcaatatcaagggaaa

SEQ ID NO: 568280 - DNA, 75 bp, synthetic construct
  source 1..75: mol_type = other DNA
gcctataccaactcagatcgcaccaacgagcagaacctgcaaagccgtggcacaggcaagcgtgcagaagcatgg

SEQ ID NO: 568281 - DNA, 75 bp, synthetic construct
  source 1..75: mol_type = other DNA
agatccagcattccgtatgcagcctgggcgctgctgtgttacttcgctgggttagggttaatcttcattgataac

SEQ ID NO: 568282 - DNA, 75 bp, synthetic construct
  source 1..75: mol_type = other DNA
agaacatcctcaaaacaatgggtgcaaaaggtgtcgtgtgcaacttcatccgtaagtcatcaatgatggaaggga

SEQ ID NO: 568283 - DNA, 75 bp, synthetic construct
  source 1..75: mol_type = other DNA
gttggtaaaccggtagagactatcccccaagtactgatcgatggtcaaccgattggcggatacacagaactggct

SEQ ID NO: 568284 - DNA, 75 bp, synthetic construct
  source 1..75: mol_type = other DNA
aagcccgtgcatcaagaagtgattcagcacatccgtgcgcttggcctgttaccagttggagataaccaccaatga

SEQ ID NO: 568285 - DNA, 75 bp, synthetic construct
  source 1..75: mol_type = other DNA
cttgttcctgccgaagcccgtgcatcaagaagtaatacagcacatccgggcgcttggcctgttacctgttggaga

SEQ ID NO: 568286 - DNA, 75 bp, synthetic construct
  source 1..75: mol_type = other DNA
gcaagtacgccactacagcggtattgtctgctgaataattgtgagccgtgggagtgtctggtcgctgtgctgaac

SEQ ID NO: 568287 - DNA, 75 bp, synthetic construct
  source 1..75: mol_type = other DNA
ataccagtttgactttggtctgcgtccatcgctgggttatgtcttatcgaaagggaaagatattgaaggtatcgg

SEQ ID NO: 568288 - DNA, 75 bp, synthetic construct
  source 1..75: mol_type = other DNA
aaagcagctgataacaaaaaaccggtcaactcctggacctgtgaagatttcctggctgtggacgaatccttccag

SEQ ID NO: 568289 - DNA, 75 bp, synthetic construct
  source 1..75: mol_type = other DNA
gggcgctatgtggctattgagcgtaagtcaggtcagcctggctgcggttagccaggtcgtggcggtgcgcgtctg

SEQ ID NO: 568290 - DNA, 75 bp, synthetic construct
  source 1..75: mol_type = other DNA
cgcccgattgtcatcatgcttgaccctggccacggtggcgaagactctggcgcggtggggaaatacaaaacgcgt

SEQ ID NO: 568291 - DNA, 75 bp, synthetic construct
  source 1..75: mol_type = other DNA
ttttcatgtaagaaatggtcagtcaggaacagtctgtgccaaaatccatttggcggatgtgtcggacactgtaat

SEQ ID NO: 568292 - DNA, 75 bp, synthetic construct
  source 1..75: mol_type = other DNA
ggatggaagacaggcgcaacgaggagcacatcaaacttgccacggaatatggcatgtcgcagcttaacagcgggc

SEQ ID NO: 568293 - DNA, 75 bp, synthetic construct
  source 1..75: mol_type = other DNA
ttggtggcctgcttcttctgccagttgtgagcaatgcagcggatgcgcaaaaagcagctgttgataacaaaaaac

SEQ ID NO: 568294 - DNA, 75 bp, synthetic construct
  source 1..75: mol_type = other DNA
tttatcagtaacgttgaggaagagcgtaaactgaaaacggcgactttccagcaggaagttgcggagtctattctt

SEQ ID NO: 568295 - DNA, 75 bp, synthetic construct
  source 1..75: mol_type = other DNA
aggataatttctttaatgatttgtcagtcatcgtagatacctgtaaccctgtgcgccacagttcaccgcaccacg

SEQ ID NO: 568296 - DNA, 75 bp, synthetic construct
  source 1..75: mol_type = other DNA
cgcattgtatgacgttgaagcctggacagatatgttcccggaattcggtggcgactcctccgcccagaccgacaa

SEQ ID NO: 568297 - DNA, 75 bp, synthetic construct
  source 1..75: mol_type = other DNA
aagcacgccagcactccccggctggctgcgtgatggtattcgccgcccgtattcgtcagggggtgtgccatgcct

SEQ ID NO: 568298 - DNA, 75 bp, synthetic construct
  source 1..75: mol_type = other DNA
cacaccacggcgctgatagtttttatcctttgggttctatgccgcgttgctgtaattctttgcggagaacgcgtt

SEQ ID NO: 568299 - DNA, 75 bp, synthetic construct
  source 1..75: mol_type = other DNA
aaaacgtaaaaccgcagctgtttgcccttgcgccggtcgccgggtttaaagagcgtctggtgatggacctctatc

SEQ ID NO: 568300 - DNA, 75 bp, synthetic construct
  source 1..75: mol_type = other DNA
ctgatgtaaccatcactgaaaacggtctttcagtccccgatatagcagatgtattggcgggaagacttacagaca

SEQ ID NO: 568301 - DNA, 75 bp, synthetic construct
  source 1..75: mol_type = other DNA
gaactggcggcgcatccccggcgggtgacacagatttatcagcatttccctgagacggctcctttactgctgcgt

SEQ ID NO: 568302 - DNA, 75 bp, synthetic construct
  source 1..75: mol_type = other DNA
tgctggaaatccgctgccggcggcacgacgcagacgaaaccggcgcgccggagataatccgcttcagttacgaca

SEQ ID NO: 568303 - DNA, 75 bp, synthetic construct
  source 1..75: mol_type = other DNA
acaaacgagaacggagaaagctaccggttccgccatgatgtgctggaccgtctggcggagcagataaacccggac

SEQ ID NO: 568304 - DNA, 75 bp, synthetic construct
  source 1..75: mol_type = other DNA
tatgaaccgctggcgcgggtggataaggcgggcaaagagggaccgaaccggatactgtattttcacacggatgtg

SEQ ID NO: 568305 - DNA, 75 bp, synthetic construct
  source 1..75: mol_type = other DNA
tctggtaaggcgtctcgatacgccaggaaagataaagaggttatattaactaacggtattccacctggatcatat

SEQ ID NO: 568306 - DNA, 75 bp, synthetic construct
  source 1..75: mol_type = other DNA
gcacggaaggaatgtttggtcagggctggagtgtgatgtatgaagtcagcctcgtgtgcacaccgggtagcgcag

SEQ ID NO: 568307 - DNA, 75 bp, synthetic construct
  source 1..75: mol_type = other DNA
gcgggggtgacgctggggtgcacggccgtcgtgctgaccggttttgttgcgggggtggcgatggtgtacaccggc

SEQ ID NO: 568308 - DNA, 75 bp, synthetic construct
  source 1..75: mol_type = other DNA
tcaacagcaaacctgccgcgcgggcagcggcgactgcggcatcgcggcaggacattgaggcgcaggaagcgcagg

SEQ ID NO: 568309 - DNA, 75 bp, synthetic construct
  source 1..75: mol_type = other DNA
cgctgacgacccgttcatcaagtcggcgcgcgtcgggcaatttgacccgcaaaccgtacgcatggtttttgaatt

SEQ ID NO: 568310 - DNA, 75 bp, synthetic construct
  source 1..75: mol_type = other DNA
tcgcacggcgcgttaccagccggatgcggcgggcaggctggtgaaatacaccagcccggcagggcagataacgcg

SEQ ID NO: 568311 - DNA, 75 bp, synthetic construct
  source 1..75: mol_type = other DNA
ttatttacctgatgggacagaggtagttccagatatggcaagggttgttgtaaaacccgacggttctgtacgtac

SEQ ID NO: 568312 - DNA, 75 bp, synthetic construct
  source 1..75: mol_type = other DNA
atctactggaaaaacatggttacaaaaattccgagagagatttagagatcgaagaaatataaaggccggtggaat

SEQ ID NO: 568313 - DNA, 75 bp, synthetic construct
  source 1..75: mol_type = other DNA
atgaatagaaatactgaccgatgggaaagaccaactcaaagtgaacttgatgaatttagagatatatttagtgat

SEQ ID NO: 568314 - DNA, 75 bp, synthetic construct
  source 1..75: mol_type = other DNA
aaatcgttgatgagatctgtgagtttatgctcagccagccagcagtgtatctgggggggcagttcatcatgcaga

SEQ ID NO: 568315 - DNA, 75 bp, synthetic construct
  source 1..75: mol_type = other DNA
gcttcccctacgcaggaaacgctaaaagggaatattgcggagtaatattgcgacagaaaaaacttataaacggtt

SEQ ID NO: 568316 - DNA, 75 bp, synthetic construct
  source 1..75: mol_type = other DNA
ctgtaatatatccggcactatcattatcaccaacacttctgaacgatgaaaaaagaaaatggttaactgaatata

SEQ ID NO: 568317 - DNA, 75 bp, synthetic construct
  source 1..75: mol_type = other DNA
cccgatggcgcaaagtctgatggataccggacaggtgacgtggctgcgggaagacggtttcaaattccgtccgac

SEQ ID NO: 568318 - DNA, 75 bp, synthetic construct
  source 1..75: mol_type = other DNA
tcacgatcgagaagaagtgacggtgcatgtccgtcgtatctgggctgcggtgggtggtcgtcgcgacgaacggta

SEQ ID NO: 568319 - DNA, 75 bp, synthetic construct
  source 1..75: mol_type = other DNA
gtccgggctttgaaaaagagtgcgccgcagaaattaccgataaagccggccagcgggaaattttcggttttgccc

SEQ ID NO: 568320 - DNA, 75 bp, synthetic construct
  source 1..75: mol_type = other DNA
ttcagctacgacagactggggcggatgctgagcgaggagacggcgcagggcatcctgacccaccagtacgatgaa

SEQ ID NO: 568321 - DNA, 75 bp, synthetic construct
  source 1..75: mol_type = other DNA
cccgcctcagattgaaggttacatcctcaccggctctggtgacacattgatcaacagcaaacctgccgcgcgggc

SEQ ID NO: 568322 - DNA, 75 bp, synthetic construct
  source 1..75: mol_type = other DNA
ctggggcgggtggcgcagacacagtggcacccggtgtggcaccagccggaaacggaggtggacgcggcgggaaac

SEQ ID NO: 568323 - DNA, 75 bp, synthetic construct
  source 1..75: mol_type = other DNA
ccattactggcaacattgctgtcgccatggaatatccgctccacggttatacaggacccggccagacttgcagac

SEQ ID NO: 568324 - DNA, 75 bp, synthetic construct
  source 1..75: mol_type = other DNA
gaaatcctgcaatggcagcgtgaacgtctggtagcgaaactggaagatgctcaggtacagttggaaaacaatcgc

SEQ ID NO: 568325 - DNA, 75 bp, synthetic construct
  source 1..75: mol_type = other DNA
ggactttatgatgcaggagttcaaccgcgagtcgaacaccctggcctcgaagtctatcaatgccgaagtgactaa

SEQ ID NO: 568326 - DNA, 75 bp, synthetic construct
  source 1..75: mol_type = other DNA
cttgcggttatgctgaatttactggtttttattcgttccagtgaactcagataagcccgatggtctgaaattgat

SEQ ID NO: 568327 - DNA, 75 bp, synthetic construct
  source 1..75: mol_type = other DNA
ctagctgttatgctgaatttactggtttttattcgttccagtgaactcagataagcccgctggtctgaaattgat

SEQ ID NO: 568328 - DNA, 75 bp, synthetic construct
  source 1..75: mol_type = other DNA
gcattgaccacggtaaaacgccagcatcgccctgctctagatctttcgcgcctgcctgaacttctgtcgcgtatt

SEQ ID NO: 568329 - DNA, 75 bp, synthetic construct
  source 1..75: mol_type = other DNA
aatatctgccgtaatgcgttatgccgtacagtctggcatcatcagatataatcctgctctggatatggctggcgc

SEQ ID NO: 568330 - DNA, 75 bp, synthetic construct
  source 1..75: mol_type = other DNA
tgccactcagcaaacaggctgtagccatactgacagaacttcagacatgggctggtgaaaatggtctgatcttta

SEQ ID NO: 568331 - DNA, 75 bp, synthetic construct
  source 1..75: mol_type = other DNA
cgattttctggatgcaaacagagaaaaatttatcagtccatttgaatatgcaaagattaataacccattaaaata

SEQ ID NO: 568332 - DNA, 75 bp, synthetic construct
  source 1..75: mol_type = other DNA
acagaacttcagacatgggcaggtgaaaatggtctgatatttacgggtgcacatgacccgcgtaaaccaatcagt

SEQ ID NO: 568333 - DNA, 75 bp, synthetic construct
  source 1..75: mol_type = other DNA
ggcatgtagtgcgctgatcgaatcaggtttgtggtcccgcgatgctgttgaacgtcagatgagccatcaggaacg

SEQ ID NO: 568334 - DNA, 75 bp, synthetic construct
  source 1..75: mol_type = other DNA
gccgattttcttgatgcgaaccgggagaaggggatcagtccgtttgaatacgcaaatgttaacaatccgctgaga

SEQ ID NO: 568335 - DNA, 75 bp, synthetic construct
  source 1..75: mol_type = other DNA
gcattgaccacggtaaaacgccagcatcgccctgctctagatctttcccgcctgcctgaacttgtgtcgcgtatt

SEQ ID NO: 568336 - DNA, 75 bp, synthetic construct
  source 1..75: mol_type = other DNA
tcgccagtcgtctgcagcaaagaatatctgctgtaatgcgttatgccgtacagtctggcatcatcagatataacc

SEQ ID NO: 568337 - DNA, 75 bp, synthetic construct
  source 1..75: mol_type = other DNA
ttcggtgtgcagaatgaccttcttgaatcaaatcctgccagtgatatggctggagcgcttttaagcgttaaggca

SEQ ID NO: 568338 - DNA, 75 bp, synthetic construct
  source 1..75: mol_type = other DNA
aacgtcagatgagtcatcaggagcgtaatggtgtacgtgctgcgtatatccataaagcagaacatctggaagaac

SEQ ID NO: 568339 - DNA, 75 bp, synthetic construct
  source 1..75: mol_type = other DNA
aaaaaacctgtaaacagcattcgcctgaatttcgcagtgaagccctgaagcttgctgaacgcatcggtgttactg

SEQ ID NO: 568340 - DNA, 75 bp, synthetic construct
  source 1..75: mol_type = other DNA
catccgcgtgagattgttcgggaagcgataaaaataaacgcggcggcactgatccttgcccataatcacccttcg

SEQ ID NO: 568341 - DNA, 75 bp, synthetic construct
  source 1..75: mol_type = other DNA
tgccgcgcgaaaaaatgctgaggctgggtattagctcactaacggatgttgaactgctggcgctgtttctgcgta

SEQ ID NO: 568342 - DNA, 75 bp, synthetic construct
  source 1..75: mol_type = other DNA
atggcaatttagtacgtgcaaatatggcaaaccatttatagtttttcctcagttggcaaaaaagattttttttaa

SEQ ID NO: 568343 - DNA, 75 bp, synthetic construct
  source 1..75: mol_type = other DNA
tagagataacttccttcactatctcaatgaggaagaaataaaacgctatgatcagtttcattttgtgagtgataa

SEQ ID NO: 568344 - DNA, 75 bp, synthetic construct
  source 1..75: mol_type = other DNA
atgaggattgatatattaattggacatactagtttttttcatcaaaccagtagagataacttccttcactatctc

SEQ ID NO: 568345 - DNA, 75 bp, synthetic construct
  source 1..75: mol_type = other DNA
atggggttaattcttggtactggcgttggtggcgggctggtattcaacggtaaaccggtgacgggaaaacgctat

SEQ ID NO: 568346 - DNA, 75 bp, synthetic construct
  source 1..75: mol_type = other DNA
ggtgtgcgagttggtgaccgaagctgacctgcgttttggctgtaaaggttctgttggcattggcattcctggaat

SEQ ID NO: 568347 - DNA, 75 bp, synthetic construct
  source 1..75: mol_type = other DNA
ttgccctttcagaagcctgggatgatgaatttactcaatatccactggtgatggggttgattctcggcaccggcg

SEQ ID NO: 568348 - DNA, 75 bp, synthetic construct
  source 1..75: mol_type = other DNA
cgtgcggatgcgtgaagaaagccctttactcagcccggagatgacgcgggaatttttacgaaagccagctcacgg

SEQ ID NO: 568349 - DNA, 75 bp, synthetic construct
  source 1..75: mol_type = other DNA
cgctgaaaatgcccgcctgaagcggcaactggcggagcaggcagaggaactgactatcctccaaaaggccgcgac

SEQ ID NO: 568350 - DNA, 75 bp, synthetic construct
  source 1..75: mol_type = other DNA
cgttgcggttgtggccagcatggctgtatcgagaattatctttctggtcgcggttttgcgtggctgtatcaacat

SEQ ID NO: 568351 - DNA, 75 bp, synthetic construct
  source 1..75: mol_type = other DNA
tgcattgaccactgtaaaacgcaagcatcgccccgctctggatctttcacgcctgcctgaacttctgtcgcgtat

SEQ ID NO: 568352 - DNA, 75 bp, synthetic construct
  source 1..75: mol_type = other DNA
gcgtatttgctcagcatattcagaaaattgtgggcgataaagggctggtggcgcggatggggggagaagagtttg

SEQ ID NO: 568353 - DNA, 75 bp, synthetic construct
  source 1..75: mol_type = other DNA
gagtgctgccgcgctttaaagcagaacagatgatgcccgccatcgcgcttattgtgtcggttattgcctcggtag

SEQ ID NO: 568354 - DNA, 75 bp, synthetic construct
  source 1..75: mol_type = other DNA
ccaccgaatgggggctggtctcgctggttattaatttatccaatatgatgtttattgtgaccgttgctctgttgg

SEQ ID NO: 568355 - DNA, 75 bp, synthetic construct
  source 1..75: mol_type = other DNA
ccaccgaatggggactggtttcactggctatcaatttctccaatatgatgtttattgttaccgtcgccttactgg

SEQ ID NO: 568356 - DNA, 75 bp, synthetic construct
  source 1..75: mol_type = other DNA
atttccactgcctgcgttaatctggtgcgcggtgcgttatacgccgcaggtaacatgtttgctgacctttatcac

SEQ ID NO: 568357 - DNA, 75 bp, synthetic construct
  source 1..75: mol_type = other DNA
ttgccgccttattatgtgccattgttggagcgattggttcggtaagtattgatagtctggatttttggccattgc

SEQ ID NO: 568358 - DNA, 75 bp, synthetic construct
  source 1..75: mol_type = other DNA
gggactggtcggctttctcctgacccccgtcgccacgcagctttcagtagattatttgcgcactcaggattttgc

SEQ ID NO: 568359 - DNA, 75 bp, synthetic construct
  source 1..75: mol_type = other DNA
cacggatccaaagcgaatttggcgtgaccgcggctatcgatctgttgccgccccacagtattccccgaacgtcct

SEQ ID NO: 568360 - DNA, 75 bp, synthetic construct
  source 1..75: mol_type = other DNA
atgcgctatgccgattttccaacgcttgttgatgctttggactacgccgctctgagtagcgccggaatgaatttt

SEQ ID NO: 568361 - DNA, 75 bp, synthetic construct
  source 1..75: mol_type = other DNA
gtctgatgagcggttactttggcgaccaggtttcgcaagacgagattgccgcgacgggctggttagacaccggcg

SEQ ID NO: 568362 - DNA, 75 bp, synthetic construct
  source 1..75: mol_type = other DNA
aatctacgtgctataagccacgatggcattaaattacgccctggcgaccgctgcgtctcctggctgcctttctac

SEQ ID NO: 568363 - DNA, 75 bp, synthetic construct
  source 1..75: mol_type = other DNA
ccgcagaacaactccatcaattcgctgaatgtttccgtcaggttaactttgacgataaaactttcatgccgtgct

SEQ ID NO: 568364 - DNA, 75 bp, synthetic construct
  source 1..75: mol_type = other DNA
gaaaatggtctgatctttacgggagcacatgacccacgtaaaccaatcagtgaaaacaccgtaaataaagccctg

SEQ ID NO: 568365 - DNA, 75 bp, synthetic construct
  source 1..75: mol_type = other DNA
tgcttataaagggcaacccgtcactcgcctagccgtgatgttaaatttattagtatttattaggtcaagcgaact

SEQ ID NO: 568366 - DNA, 75 bp, synthetic construct
  source 1..75: mol_type = other DNA
tgatgctaatctctcttttgaaaccatcgcaagacaatggcatgccagcaataaaaaatggtctgaatcacacag

SEQ ID NO: 568367 - DNA, 75 bp, synthetic construct
  source 1..75: mol_type = other DNA
aaataaagccctgagggtgatggggtatgacacaacccaggaagtctgtggccatggattccgggcgatggcgtg

SEQ ID NO: 568368 - DNA, 75 bp, synthetic construct
  source 1..75: mol_type = other DNA
gccactcagcaaacaggttgtagccatactggcagaacttcagacatgggctggtgaaaatggtctgatctttac

SEQ ID NO: 568369 - DNA, 75 bp, synthetic construct
  source 1..75: mol_type = other DNA
atcttgtgccactcagccaacaggctgtagccatactggcagaacttcagacatgggcaggtgaaaatggtctga

SEQ ID NO: 568370 - DNA, 75 bp, synthetic construct
  source 1..75: mol_type = other DNA
ttcctgctcagcgaaagcctatacccggcgttaaattctctcacagaggcgctaaaatgcgcactccgcatttag

SEQ ID NO: 568371 - DNA, 75 bp, synthetic construct
  source 1..75: mol_type = other DNA
gttcagggcgatggcgtgcagtgcgttaatagaatcaggtttatggtcccgtgatgcagttgaacgtcagatgag

SEQ ID NO: 568372 - DNA, 75 bp, synthetic construct
  source 1..75: mol_type = other DNA
agattgcagcgcgccttcagcagcgtatcactgcaatcatgcgctatgctgcccagtcaggcattatcacctata

SEQ ID NO: 568373 - DNA, 75 bp, synthetic construct
  source 1..75: mol_type = other DNA
cagtgaaaatactgtaaataaggccctgagggtgatggggtatgacacaacccaggaagtctgtggccatggatt

SEQ ID NO: 568374 - DNA, 75 bp, synthetic construct
  source 1..75: mol_type = other DNA
tcatcaggagcgtaatggtgtacgtgctgcttacattcataaagcagaacatctgggagaacgccgactgatgct

SEQ ID NO: 568375 - DNA, 75 bp, synthetic construct
  source 1..75: mol_type = other DNA
gccctgagggtgatggggtatgacacaaccaaggaagtctgtggccatggattccgggcgatggcgtgcagtgca

SEQ ID NO: 568376 - DNA, 75 bp, synthetic construct
  source 1..75: mol_type = other DNA
gccctgagggttatggggtatgacacaacccaggatgtctgtggtcatggattccgggcgatggcatgtagtgcg

SEQ ID NO: 568377 - DNA, 75 bp, synthetic construct
  source 1..75: mol_type = other DNA
tcgcgtttcgcatgcaaaagagtatgggttcgaaaccgtggacggcaaactggcgctgtcgggagcgaactactt

SEQ ID NO: 568378 - DNA, 75 bp, synthetic construct
  source 1..75: mol_type = other DNA
gttgggctatggctttcaccgtggggtggctacaacaaaccgcgcgacgttcgcgtttcgcatgcaaaagagtat

SEQ ID NO: 568379 - DNA, 75 bp, synthetic construct
  source 1..75: mol_type = other DNA
cccatacaagccttatctgcactacaacagctggatggatatcggctttttcactccctacactgaacaggatgt

SEQ ID NO: 568380 - DNA, 75 bp, synthetic construct
  source 1..75: mol_type = other DNA
ttgaaatataaagatttgggttctttcgattatggtcgtaacctgggcgcgttgtatgacgtggaagcctggacc

SEQ ID NO: 568381 - DNA, 75 bp, synthetic construct
  source 1..75: mol_type = other DNA
gatggcgaccaaagttatatccgttttggttttaaaggcgaaacacaaattaacgatcaactgactggttatggt

SEQ ID NO: 568382 - DNA, 75 bp, synthetic construct
  source 1..75: mol_type = other DNA
gcatcgactacactattgccgccgttgggcaaccacgagacgtcgccaagattaccttcttcccgaccaaaaaac

SEQ ID NO: 568383 - DNA, 75 bp, synthetic construct
  source 1..75: mol_type = other DNA
cgtgtggcggtagagaattgcaaatatgacaaggaagacctgggcttctgccatgctgaagggactgacatgatg

SEQ ID NO: 568384 - DNA, 75 bp, synthetic construct
  source 1..75: mol_type = other DNA
tggactgaatccgtatatcgaagatgtggcacggcgagtggcgaaggcggggtatatcgccataagcgctaactt

SEQ ID NO: 568385 - DNA, 75 bp, synthetic construct
  source 1..75: mol_type = other DNA
catcgaaaccacgctgcaacagtgtgaactgtggcatatgacgaagctggacgtattgtccgggcagtttcgcaa

SEQ ID NO: 568386 - DNA, 75 bp, synthetic construct
  source 1..75: mol_type = other DNA
aactggcaaagctggatgtaaaggataaggcgctgctggctcaggacagaacaattgcggcaagtcagatgcaac

SEQ ID NO: 568387 - DNA, 75 bp, synthetic construct
  source 1..75: mol_type = other DNA
ggaggcatttttatagtagcgttgatgatattcctttctggatgttcatccccgccccctccaacaccgattgaa

SEQ ID NO: 568388 - DNA, 75 bp, synthetic construct
  source 1..75: mol_type = other DNA
ctgccgttctatctcaatgccgacagtccggtggcctgtgcgctgcaccgggctttaacgcttggtacgcagcag

SEQ ID NO: 568389 - DNA, 75 bp, synthetic construct
  source 1..75: mol_type = other DNA
attgacatatgactttggtggcagcgatttcgccatcagtggagcctataccaactctgatcgcaccaacgagca

SEQ ID NO: 568390 - DNA, 75 bp, synthetic construct
  source 1..75: mol_type = other DNA
cggtctgcgtatcgagctgccgcaggtggaagaaaccggctgttttggcgcggcacttgccgcccgcgtcggcac

SEQ ID NO: 568391 - DNA, 75 bp, synthetic construct
  source 1..75: mol_type = other DNA
gaaagagcacgaaccagaacgctatgcacaaattggctgcgtgatgatgacacatgactacctgcgctggtgttt

SEQ ID NO: 568392 - DNA, 75 bp, synthetic construct
  source 1..75: mol_type = other DNA
tgccgttcctgtacggcagcaacgccggactcgagatgaccagcggtttctacgggatgcaggccattcacaccc

SEQ ID NO: 568393 - DNA, 75 bp, synthetic construct
  source 1..75: mol_type = other DNA
cgctgcgactgccggggcagtattatgatgaagagacggggctgcactataatctgttcaggtattatgcgccgg

SEQ ID NO: 568394 - DNA, 75 bp, synthetic construct
  source 1..75: mol_type = other DNA
accatcggcgcgctgtttggtacacctgttgcggcggcgttgatattttcgcaaaccttaaatggcagtagttaa

SEQ ID NO: 568395 - DNA, 75 bp, synthetic construct
  source 1..75: mol_type = other DNA
gaattcagagtgctgatcaccgtttttgctttcctggcttcggcctggtacagcattgtgcagtacagaaaagaa

SEQ ID NO: 568396 - DNA, 75 bp, synthetic construct
  source 1..75: mol_type = other DNA
gcggaaccgccaacaggtcaatgcagctaaccttttccggctctgttcctgacacactggtaagcagtcgcaact

SEQ ID NO: 568397 - DNA, 75 bp, synthetic construct
  source 1..75: mol_type = other DNA
cggtaatcatccaggctacgcggctcgacatatcagtccttcctcgcaatatcttctcacagtcgtatctgctgt

SEQ ID NO: 568398 - DNA, 75 bp, synthetic construct
  source 1..75: mol_type = other DNA
ctgcattgcaggacgattacgtatcgaaaacagccacagcaacacaatcgctgacatcccccctcaacgtaacaa

SEQ ID NO: 568399 - DNA, 75 bp, synthetic construct
  source 1..75: mol_type = other DNA
ctgcggggagatcaccgctcagacagccgtactgaccggtctgaaagcgggtacgcccgttgtcggcggcctgtt

SEQ ID NO: 568400 - DNA, 75 bp, synthetic construct
  source 1..75: mol_type = other DNA
acaggtttggagcaggcgcggcagcgtattctggcgcttgaaacagcacttagattacatgggctgattgactga

SEQ ID NO: 568401 - DNA, 75 bp, synthetic construct
  source 1..75: mol_type = other DNA
atattcagccagtcttacctgctgtatgtcattaatcagggggctgatgtaggcgcaattgccgggaaggcaaat

SEQ ID NO: 568402 - DNA, 75 bp, synthetic construct
  source 1..75: mol_type = other DNA
ataatctccaatcatttggtggaataagtgtatactttaatgagttgatccaaggaatggtgaaatcaaattacc

SEQ ID NO: 568403 - DNA, 75 bp, synthetic construct
  source 1..75: mol_type = other DNA
atatcgatgccagcggtatgtcggtgtttgaagagcgtacatcacggattatcaaaaacttaccgtatatcgcca

SEQ ID NO: 568404 - DNA, 75 bp, synthetic construct
  source 1..75: mol_type = other DNA
tatcaaaaacttaccctatatcgccatcgtgggagcattgattgccgccgttgccagcatgaagatttttgctgg

SEQ ID NO: 568405 - DNA, 75 bp, synthetic construct
  source 1..75: mol_type = other DNA
taccagtttggctggaagcaaagcctgatcgccgctgccgtcgtgttgatgacccgtgtggtggtggtgcgtttt

SEQ ID NO: 568406 - DNA, 75 bp, synthetic construct
  source 1..75: mol_type = other DNA
tttactccggcggtagccagatccagggcgcacaggcgctggaagtcttgcgtggtctggtgtttgcgccagtga

SEQ ID NO: 568407 - DNA, 75 bp, synthetic construct
  source 1..75: mol_type = other DNA
acgggtggagcaggtgctggctgatgcatttcacgcacaggctgcggcgctggtgcagggcgcggggactggcgc

SEQ ID NO: 568408 - DNA, 75 bp, synthetic construct
  source 1..75: mol_type = other DNA
gtatggatgccagcgggctttctgtttttgaagagcgaacgtcacggataattaaaaacttgccctatatcgcta

SEQ ID NO: 568409 - DNA, 75 bp, synthetic construct
  source 1..75: mol_type = other DNA
cggcaccggtcgtggcagtaatgatcaccggtattctgctgaatgttctttactggcttggcctgttcgttccgg

SEQ ID NO: 568410 - DNA, 75 bp, synthetic construct
  source 1..75: mol_type = other DNA
ggcgtgtatgcggttgcgggctttacctttgtttatgcggtgggctatctctcaccgaatccgatggttgcggca

SEQ ID NO: 568411 - DNA, 75 bp, synthetic construct
  source 1..75: mol_type = other DNA
atggatctgtatattcagattatcgtggtggcgtgcctgacgggtatgacatcgcttctggcgcatcgctcggcg

SEQ ID NO: 568412 - DNA, 75 bp, synthetic construct
  source 1..75: mol_type = other DNA
agtatcgcttttggtctgagcattggttttgtggcctcggtggggatctcttttaccctgaaaaccggcctgctc

SEQ ID NO: 568413 - DNA, 75 bp, synthetic construct
  source 1..75: mol_type = other DNA
cggcaaatggctggggcgctacccgtcggtgcgtaatgcgtcggataacatccgtaacgccatgaatatgctgat

SEQ ID NO: 568414 - DNA, 75 bp, synthetic construct
  source 1..75: mol_type = other DNA
gccggaacaatcacaaacgctgattaatcaggcggcactggcggaatttatgcgcgggctgggttttgtaccgtt

SEQ ID NO: 568415 - DNA, 75 bp, synthetic construct
  source 1..75: mol_type = other DNA
ttcgtaacgccatgaatatgctgatggaagtggctctgttggtcggttcgattttcgcggcaatcaaaatggcgg

SEQ ID NO: 568416 - DNA, 75 bp, synthetic construct
  source 1..75: mol_type = other DNA
aaccaaagctattcctcatgttttgaagctcatttactgggtccttcaccgaagaaagaccttgatgaattagaa

SEQ ID NO: 568417 - DNA, 75 bp, synthetic construct
  source 1..75: mol_type = other DNA
atatagatacaggataagaaccaataatgttttttattcacttgctccatctgttcaactcttaagggagagagg

SEQ ID NO: 568418 - DNA, 75 bp, synthetic construct
  source 1..75: mol_type = other DNA
tcgttgccgacggttttattccgactgagaatatagctgaagctattcaattacgttacgatcgaacctctggtg

SEQ ID NO: 568419 - DNA, 75 bp, synthetic construct
  source 1..75: mol_type = other DNA
aatatagagagtcactagctattgagcaggaacgcaaagcagccacttccgccaacgatgaactacatgttgctt

SEQ ID NO: 568420 - DNA, 75 bp, synthetic construct
  source 1..75: mol_type = other DNA
tcaagctctaaaacaattgaaaatgacgaaaaagatcctccagcatatcgagctaaagaagaatatgaaaaaata

SEQ ID NO: 568421 - DNA, 75 bp, synthetic construct
  source 1..75: mol_type = other DNA
caccacaccattgttcatggcatagcctttcccatcatagtttaagtgatatgggtgatgaagcagaaacatcag

SEQ ID NO: 568422 - DNA, 75 bp, synthetic construct
  source 1..75: mol_type = other DNA
tgattttattttcttttgattcatccgctgttcagtttgtttatcgcgttgattcacgacctcctgatgtagtat

SEQ ID NO: 568423 - DNA, 75 bp, synthetic construct
  source 1..75: mol_type = other DNA
tctcactttagcaaaagcaggtgtttatcgctggattacagatatagataaaaacatacggttttactattcgtt

SEQ ID NO: 568424 - DNA, 75 bp, synthetic construct
  source 1..75: mol_type = other DNA
ttcccatattcgggaaatgaaaaaagccgtagttgaagatggtgttgacttaattggctacaccccgtggggctg

SEQ ID NO: 568425 - DNA, 75 bp, synthetic construct
  source 1..75: mol_type = other DNA
tgattactttctcgtggtatgctaatgctacagactttgtttatcgagtagattctcgcccgcctgacgaaattt

SEQ ID NO: 568426 - DNA, 75 bp, synthetic construct
  source 1..75: mol_type = other DNA
tcgtgaaagcagaagtgttggcgattacaccgattatatgagtttttacgatgcaagaccggttattcaagcact

SEQ ID NO: 568427 - DNA, 75 bp, synthetic construct
  source 1..75: mol_type = other DNA
attcgtggggattcatgcgcagctgggtctagggatagtgcctttattgctacaacatctgacattaatgaaacc

SEQ ID NO: 568428 - DNA, 75 bp, synthetic construct
  source 1..75: mol_type = other DNA
atgggtatttttacgcttttcatacaggccaaaaacctggggataataactggagaactggaggagatggcgttc

SEQ ID NO: 568429 - DNA, 75 bp, synthetic construct
  source 1..75: mol_type = other DNA
taattggttcggcgttgatggcccatgacgatttgcacgccgccgtgcgtcgggtgttgctgggtgagaataaag

SEQ ID NO: 568430 - DNA, 75 bp, synthetic construct
  source 1..75: mol_type = other DNA
aacgttctgctggcggggggcttaggcgcagataactgcgtggaagcggcacaaaccgctgcgccggacttgatt

SEQ ID NO: 568431 - DNA, 75 bp, synthetic construct
  source 1..75: mol_type = other DNA
tttaattctgctgtagagtcacaaccgggcatcaaagatgcacatcttttggcctcggtctttcagacactgcgc

SEQ ID NO: 568432 - DNA, 75 bp, synthetic construct
  source 1..75: mol_type = other DNA
aaaccagatgggccatgcagatgcgcaaatggtatttcaggtatacggaaaatggatgtctgaaaacaataatgc

SEQ ID NO: 568433 - DNA, 75 bp, synthetic construct
  source 1..75: mol_type = other DNA
gtttcaatcacaaaagacatgaagaaaatctcttcagaagagtacttcatatcacatatttatatctacccattt

SEQ ID NO: 568434 - DNA, 75 bp, synthetic construct
  source 1..75: mol_type = other DNA
gaaaacgttgccatctggaaagcattaagcgtcggtgaaaccctgccagcccgcgagcttcagcacgttgataaa

SEQ ID NO: 568435 - DNA, 75 bp, synthetic construct
  source 1..75: mol_type = other DNA
gtgggtacgcggcaacgatgcggcgaaagaacaggtgctggcagccattggcctggtccgtcatacgctgatgct

SEQ ID NO: 568436 - DNA, 75 bp, synthetic construct
  source 1..75: mol_type = other DNA
atggctcaggaaatcgaattaaagtttattgttaatcacagtgccgttgaggcgctacgtggccatcttaatacg

SEQ ID NO: 568437 - DNA, 75 bp, synthetic construct
  source 1..75: mol_type = other DNA
ttgcggtgtggtgaccggcgaagcgattttaggtgcgaatattttccgtgatttctttgccggtatccgcgatat

SEQ ID NO: 568438 - DNA, 75 bp, synthetic construct
  source 1..75: mol_type = other DNA
cgacgcactgcgtgatgctctgccagcaaacgttgccatctggaaagcattgagcgttggagaaaccctgcccgc

SEQ ID NO: 568439 - DNA, 75 bp, synthetic construct
  source 1..75: mol_type = other DNA
cgatgaacagtatcgccagctctccgccgtcgcccatagtctgggtatgggcgtgctgaccgaagtcagtaatga

SEQ ID NO: 568440 - DNA, 75 bp, synthetic construct
  source 1..75: mol_type = other DNA
ctatccgatacatttgcaattctggatgcgcctgggttagaaggcgcgcatattaatggacaaaaatacaaccga

SEQ ID NO: 568441 - DNA, 75 bp, synthetic construct
  source 1..75: mol_type = other DNA
tcgcataggggaaaaacgtcttgcttcgtcggtaacaaaggaagatttactgtttatcaggaaagatttgttaac

SEQ ID NO: 568442 - DNA, 75 bp, synthetic construct
  source 1..75: mol_type = other DNA
acataaatacagcgacggcacctatattgaaggtggcctggagatgaagtacggctcctggttcggcctgattta

SEQ ID NO: 568443 - DNA, 75 bp, synthetic construct
  source 1..75: mol_type = other DNA
atgatggtgagcgccatgtatgaagcgttaaagggcgtttatctctccaccgcttacacctacgccaaacatcgc

SEQ ID NO: 568444 - DNA, 75 bp, synthetic construct
  source 1..75: mol_type = other DNA
ctgaccatagctggggtggtttcgaaggtgggattaaccgtttctatggcggttatcgaaccaatgatggcaccg

SEQ ID NO: 568445 - DNA, 75 bp, synthetic construct
  source 1..75: mol_type = other DNA
tctactggcggtttgtggaaatggggaccgtgaatatgccaccgcacccgtttgtgcgcccggcgtttgatgtgc

SEQ ID NO: 568446 - DNA, 75 bp, synthetic construct
  source 1..75: mol_type = other DNA
catatcttcttcccgcagggcgatccaacggcagcaacgctacagtcgctcgccaccttcgccatcgccttcgtc

SEQ ID NO: 568447 - DNA, 75 bp, synthetic construct
  source 1..75: mol_type = other DNA
ccgatcatagttggggcggttttgaaggagggattaaccgtttctatggcggttatcgtaccaacgatggcaccg

SEQ ID NO: 568448 - DNA, 75 bp, synthetic construct
  source 1..75: mol_type = other DNA
tttggatcgatcttgagatgaccggtctggatcccgagcgtgatcgcataattgagattgccacgctggtgaccg

SEQ ID NO: 568449 - DNA, 75 bp, synthetic construct
  source 1..75: mol_type = other DNA
agggccgaccattgcagtacaccagtctgatgaacaactggcgttgatggatgactggaatgtccgtacccatac

SEQ ID NO: 568450 - DNA, 75 bp, synthetic construct
  source 1..75: mol_type = other DNA
gatgctcaggttgcgcttctgaactcaaaattgagtgagtttgccccatcagtgccccatgcaactttaagagcc

SEQ ID NO: 568451 - DNA, 75 bp, synthetic construct
  source 1..75: mol_type = other DNA
atgacaaccgaaattaactaccatgcactgcttgagcgcgcacggaataaagtgcagagcattgagttcgcctta

SEQ ID NO: 568452 - DNA, 75 bp, synthetic construct
  source 1..75: mol_type = other DNA
taccacgacccgacgtgtcatgttttccgctgaaatcgacactctttatggaataacgactgttacatcggaggc

SEQ ID NO: 568453 - DNA, 75 bp, synthetic construct
  source 1..75: mol_type = other DNA
cgatgatacgtggctggttaactccccagaggctgtcgcgcaggccataaaaacgcgctttctgctttggtacgg

SEQ ID NO: 568454 - DNA, 75 bp, synthetic construct
  source 1..75: mol_type = other DNA
caccgatagccgaccgctggcgcgatgcggcaaggctgattggtgttgatattcttaccatgcctgatgtggcgg

SEQ ID NO: 568455 - DNA, 75 bp, synthetic construct
  source 1..75: mol_type = other DNA
cggatatgccaaaagcggcgtttgcggatatgtggttcaccctgaaaaaaggggagccctggagcggcatcgtga

SEQ ID NO: 568456 - DNA, 75 bp, synthetic construct
  source 1..75: mol_type = other DNA
atgccggtataccgctgaaggttctgcagagtctgatggggcataagtccatcagctcaacgaaggtctacacga

SEQ ID NO: 568457 - DNA, 75 bp, synthetic construct
  source 1..75: mol_type = other DNA
acgaaggtgtttgcactggatgtggctgcacggcaccgggtgcagttttcgatgcctgagtccgatgcggtgtct

SEQ ID NO: 568458 - DNA, 75 bp, synthetic construct
  source 1..75: mol_type = other DNA
ctgtgcgttagtgatgttgttgggaaatgcctgttttgaatggcaaattgtacgtccgatagaaaatgtcgccag

SEQ ID NO: 568459 - DNA, 75 bp, synthetic construct
  source 1..75: mol_type = other DNA
ggggaaccctggagtggtattgtgaaaaatcggcacaaaaatggcgatcattactgggtgcgagcgaatgtggtg

SEQ ID NO: 568460 - DNA, 75 bp, synthetic construct
  source 1..75: mol_type = other DNA
caaatggcggcgtcggtgaaacagaactctgccacggcgtcggctgccgataaactttcaatcaccgccagtaat

SEQ ID NO: 568461 - DNA, 75 bp, synthetic construct
  source 1..75: mol_type = other DNA
agcgctcgcgtattctgcgtcgggccgttgatattctgcgtgaacgcaatgacgaactcgcaaaactggaaaccc

SEQ ID NO: 568462 - DNA, 75 bp, synthetic construct
  source 1..75: mol_type = other DNA
atggctaactcggcggcctcttccctgaaagaagtgaccatggaactgggcggtaaatcaccgctgatcgttttc

SEQ ID NO: 568463 - DNA, 75 bp, synthetic construct
  source 1..75: mol_type = other DNA
cgagcatccgggcattgccaaagtgtcatttaccggcggtgtcgccagcggcaaaaaagtgatggctaactcggc

SEQ ID NO: 568464 - DNA, 75 bp, synthetic construct
  source 1..75: mol_type = other DNA
gtttgcgctggatgtggctgcacggcaccgggtgcagttttcgatgcctgagtccgatgctgtcacaatgctgaa

SEQ ID NO: 568465 - DNA, 75 bp, synthetic construct
  source 1..75: mol_type = other DNA
gctgggcgtggtcgcaggaattggcgcatggaactacccgattcagattgctttgtggaaatccgctccggcact

SEQ ID NO: 568466 - DNA, 75 bp, synthetic construct
  source 1..75: mol_type = other DNA
gtactgtgcggcggcgatgtactgaaaggcgatggcttcgataacggcgcatgggttgcaccgaccgtgttcacc

SEQ ID NO: 568467 - DNA, 75 bp, synthetic construct
  source 1..75: mol_type = other DNA
gaaggtttttgcgctggatgtggctgcccggcaccgggtgcagtttgcgatgccggagtctgatgcggttgcgat

SEQ ID NO: 568468 - DNA, 75 bp, synthetic construct
  source 1..75: mol_type = other DNA
tccgcaaggaactcaggaagaaatgcgcgccgaactcggcctcgatgccgccggtatggaagccaaaatcaaggc

SEQ ID NO: 568469 - DNA, 75 bp, synthetic construct
  source 1..75: mol_type = other DNA
catcggcatggggatggcgggtgaatacggttctagcgccacctatgtcattgaaagctggccaaaacatctgcg

SEQ ID NO: 568470 - DNA, 75 bp, synthetic construct
  source 1..75: mol_type = other DNA
cggttatttcgataccgaccagcgtgcagcgggctgggctttacctataacgttggtgcattgggtggcgcactg

SEQ ID NO: 568471 - DNA, 75 bp, synthetic construct
  source 1..75: mol_type = other DNA
aaggtcaactggaacaagaaattctcgataacgcgtggctaacggccccggcagatctgaatattctgttcaaaa

SEQ ID NO: 568472 - DNA, 75 bp, synthetic construct
  source 1..75: mol_type = other DNA
attctggaaaagttaaaaattacgccagaaccgcgcgatcctgccattcgtctggataagcccgttatgcttggt

SEQ ID NO: 568473 - DNA, 75 bp, synthetic construct
  source 1..75: mol_type = other DNA
ccgctggctgaagatcgcgggtttattttgcatactccgccctccaattttgcttccagcattcgcatttcagac

SEQ ID NO: 568474 - DNA, 75 bp, synthetic construct
  source 1..75: mol_type = other DNA
catcgtaaaccagtacccgtgctgaacattggcctgcctgacttctttattccacaaggaacgcaggaagaaatg

SEQ ID NO: 568475 - DNA, 75 bp, synthetic construct
  source 1..75: mol_type = other DNA
gcctgatgggacataagtccatcagttcaacggaagtctacacgaaggtttttgcgctggatgtggctgcccggc

SEQ ID NO: 568476 - DNA, 75 bp, synthetic construct
  source 1..75: mol_type = other DNA
ataccgctgaaggtcctgcagagcctgatggggcataagtccatcagctcaacggaggtctacacgaaggtgttt

SEQ ID NO: 568477 - DNA, 75 bp, synthetic construct
  source 1..75: mol_type = other DNA
tgacgttctctgttccggtcacaccacatacgttccgccattcctatgcgatgcacatgctgtatgccggtatac

SEQ ID NO: 568478 - DNA, 75 bp, synthetic construct
  source 1..75: mol_type = other DNA
atgtggctgcacggcaccgggtgcagttttcgatgcctgagtccgatgcggtcacaatgctgaaaaacagacatg

SEQ ID NO: 568479 - DNA, 75 bp, synthetic construct
  source 1..75: mol_type = other DNA
cgaaggtttttgcgctggacgtggctgcccggcaccgggtgcagttttcgatgcctgagtccgatgcggtgtcta

SEQ ID NO: 568480 - DNA, 75 bp, synthetic construct
  source 1..75: mol_type = other DNA
cagtgatccgtctgggattctctgtgttgggtatcaaaacgttatcttccgttaggtgctctgctcagtccgata

SEQ ID NO: 568481 - DNA, 75 bp, synthetic construct
  source 1..75: mol_type = other DNA
tcgctgggtggaagctaacccggaactgacaggcacactgatgaaagcatcggctgttgtggctgcggttaccgt

SEQ ID NO: 568482 - DNA, 75 bp, synthetic construct
  source 1..75: mol_type = other DNA
aatcgctgagcaacacgcggtgacttttgccgctggtctggcgattggcgggtacaaaccgatcgtggctattta

SEQ ID NO: 568483 - DNA, 75 bp, synthetic construct
  source 1..75: mol_type = other DNA
gtggacttcgctgcactggttgaaggtggtgcgcgcatgaacgtcgcaaaccctgacgacagctgggaagatcag

SEQ ID NO: 568484 - DNA, 75 bp, synthetic construct
  source 1..75: mol_type = other DNA
tgaccgtggcgctgcactacgtctataacactccgtttgaccagttaatctgggatgtggggcatcaggcttatc

SEQ ID NO: 568485 - DNA, 75 bp, synthetic construct
  source 1..75: mol_type = other DNA
gcggcaggtcccatcagtgcagcgttcgaaccgcttaagcccgtgttccagtggattggcgacaaagtgcaggcg

SEQ ID NO: 568486 - DNA, 75 bp, synthetic construct
  source 1..75: mol_type = other DNA
ttgcggtgggggctgtctatatctggcagaactgggacacgctgggaccgaagtttaaagctatgtgggatgcag

SEQ ID NO: 568487 - DNA, 75 bp, synthetic construct
  source 1..75: mol_type = other DNA
agaccggcgcacagaacactttcagcagtctgggagaaacgctgcgtgagcctctgatggcgatcatgggaacgg

SEQ ID NO: 568488 - DNA, 75 bp, synthetic construct
  source 1..75: mol_type = other DNA
ctggctggcacgctgatgaaagtggctgcggcgacggcggcgatcactgtcgggttgggtacgctggcggtggcg

SEQ ID NO: 568489 - DNA, 75 bp, synthetic construct
  source 1..75: mol_type = other DNA
atgaactgtcagaaagtctggggaaaatcgcccagctctacaaaatccccacccgcaatattgaacagctcggtg

SEQ ID NO: 568490 - DNA, 75 bp, synthetic construct
  source 1..75: mol_type = other DNA
ttcaaaagctaccggttctgttcgccatcgaccgcgcgggcattgttggtgctgatggtcaaacccaccaggggg

SEQ ID NO: 568491 - DNA, 75 bp, synthetic construct
  source 1..75: mol_type = other DNA
tgataaatgggctgccattctggcagacgttgctgcgctcccggcaaaatttcaggacatgggcagcgctatcat

SEQ ID NO: 568492 - DNA, 75 bp, synthetic construct
  source 1..75: mol_type = other DNA
tgatctgctgacgcctgttaagtcgacctctgccgaactgcagagcgcagcggcaatggggcgacgattcgggga

SEQ ID NO: 568493 - DNA, 75 bp, synthetic construct
  source 1..75: mol_type = other DNA
atgagtaattcgctgttaccaccatcagccagcaatttcatgcgttgcgccgaagctgtcggaacgcgcattaca

SEQ ID NO: 568494 - DNA, 75 bp, synthetic construct
  source 1..75: mol_type = other DNA
ctgacgggcacactgatgaaagtagccgcggttgtggctgctgttactgtgggcctcggcaccctggctgtggtg

SEQ ID NO: 568495 - DNA, 75 bp, synthetic construct
  source 1..75: mol_type = other DNA
ccaccgttgcaccccttggcacttcccgcgaaaggtggagaagcaattgtgagtcgcgcagccactgtgccgctc

SEQ ID NO: 568496 - DNA, 75 bp, synthetic construct
  source 1..75: mol_type = other DNA
agttactagccttacaaacttacatgtatcttctttacgctcgtgataataacagcgactacacactggctagga

SEQ ID NO: 568497 - DNA, 75 bp, synthetic construct
  source 1..75: mol_type = other DNA
accgttgattttgcgaaaactatgcatgatggtgcctcagtttcattacgtggtaatttgatttcccacaagggt

SEQ ID NO: 568498 - DNA, 75 bp, synthetic construct
  source 1..75: mol_type = other DNA
aaacaggatgctgcgccaccaccgccacatgcaatagaagacggctatcgcggaactgatgatgcaaaaaaaatg

SEQ ID NO: 568499 - DNA, 75 bp, synthetic construct
  source 1..75: mol_type = other DNA
agcaacctgcgacggtgaatgcagacggtaaagtgatgatgccatcgggtggttttccatcatggggatatggct

SEQ ID NO: 568500 - DNA, 75 bp, synthetic construct
  source 1..75: mol_type = other DNA
gtctggattatcgtaaagcggcggcactggggtccacctttctgacactgggcgctgcgccggaggttgcagcca

SEQ ID NO: 568501 - DNA, 75 bp, synthetic construct
  source 1..75: mol_type = other DNA
atgagtgataacaacctgcgtctgcaggtcattcttaatgcggttgacaagctcacccgcccatttcgatctgcg

SEQ ID NO: 568502 - DNA, 75 bp, synthetic construct
  source 1..75: mol_type = other DNA
tggactccctgaaatccggagtttcctggttgctggagaagctcggcattgtcagtaaagaggccgcaaaggcaa

SEQ ID NO: 568503 - DNA, 75 bp, synthetic construct
  source 1..75: mol_type = other DNA
agcaacctgcgacggtgaatgcagacgggaaagtgatgattccatcgggtggttttccatcatggggatatggct

SEQ ID NO: 568504 - DNA, 75 bp, synthetic construct
  source 1..75: mol_type = other DNA
agcaacctgcgacggtgaatgcagacggcaaagtgatgatcccatcgggtggttttccttcatggggatatggct

SEQ ID NO: 568505 - DNA, 75 bp, synthetic construct
  source 1..75: mol_type = other DNA
aggtcattctgaatgcggtggataaactcacccgccccttccgttctgcgcaggccagctctaaggagctggcag

SEQ ID NO: 568506 - DNA, 75 bp, synthetic construct
  source 1..75: mol_type = other DNA
cctgttccgtggccctcagccacacccccaaccggctggctgaaatgtaacggtgcagcattttcttctgaaatg

SEQ ID NO: 568507 - DNA, 75 bp, synthetic construct
  source 1..75: mol_type = other DNA
cctgttccgtggccctcagccacacctccaaccggttggctgaaatgtaacggtgcagcattttcttctgaaatg

SEQ ID NO: 568508 - DNA, 75 bp, synthetic construct
  source 1..75: mol_type = other DNA
cctgttccgtggccctcagccacaccaccaaccggatggctgaaatgtaacggtgcagcattttcttctgaaatg

SEQ ID NO: 568509 - DNA, 75 bp, synthetic construct
  source 1..75: mol_type = other DNA
tcaccgccgaaaatctggctcgcgaatatggcatcagccgtcagttgcaggatgcttacgcacttagctcgcaac

SEQ ID NO: 568510 - DNA, 75 bp, synthetic construct
  source 1..75: mol_type = other DNA
cctgttccgtggccctcagccacaccgccaacgggctggctgaaatgtaacggtgcagcattttcttctgaaatg

SEQ ID NO: 568511 - DNA, 75 bp, synthetic construct
  source 1..75: mol_type = other DNA
cctgttccgtggccctcagccacaccgccaaccgggtggctgaaatgtaacggtgcagcattttcttctgaaatg

SEQ ID NO: 568512 - DNA, 75 bp, synthetic construct
  source 1..75: mol_type = other DNA
gtggtgtcacgggcaccggtacgcaggggaaaactgcgccgcaatgtggtggtcctttcccggcgctcccgcgat

SEQ ID NO: 568513 - DNA, 75 bp, synthetic construct
  source 1..75: mol_type = other DNA
ctgtgtgacgaatttggcgcgttgctgatcatcgatgaagtgatgaccggtttccgcgtagcgctagctggcgca

SEQ ID NO: 568514 - DNA, 75 bp, synthetic construct
  source 1..75: mol_type = other DNA
ctgtgcgacgaatttggcgcattgctgatcatcgatgaagtaatgaccggcttccgcgtggcactggctggcgca

SEQ ID NO: 568515 - DNA, 75 bp, synthetic construct
  source 1..75: mol_type = other DNA
cctgttccgtggccctcagccacaccaccaacaggctggctgaaatgtaacggtgcagcattttcttctgaaatg

SEQ ID NO: 568516 - DNA, 75 bp, synthetic construct
  source 1..75: mol_type = other DNA
gggtgagtttattcgcggctgggatgacgggcggggaattgattcaggacgtactctactttcgttacagggcga

SEQ ID NO: 568517 - DNA, 75 bp, synthetic construct
  source 1..75: mol_type = other DNA
gcgcatctctgccggcggggcaggtgtacccgtatgtggtcccctgctggatggcaggccgtcggtggcgcttcc

SEQ ID NO: 568518 - DNA, 75 bp, synthetic construct
  source 1..75: mol_type = other DNA
tcactgctgaaaatctggcgcgcgaatatggtatcagtcgtcaattacaagatgcctacgcacttagctcacaac

SEQ ID NO: 568519 - DNA, 75 bp, synthetic construct
  source 1..75: mol_type = other DNA
aaatgcttacgccacttttgatgcttcaaaagtcgtaccaacagcttctgaaaaccgtcctcgtaacatcgcttt

SEQ ID NO: 568520 - DNA, 75 bp, synthetic construct
  source 1..75: mol_type = other DNA
tcgtcatgctcacctacgtgttgagcgggctatgtgcggcgattgcgggcattatcgtggcggcggatattcgcg

SEQ ID NO: 568521 - DNA, 75 bp, synthetic construct
  source 1..75: mol_type = other DNA
ctggttcggcagcggatcgctgttgttcctgccaacgccggtcattattgcagtgctgacacttcttctgttttg

SEQ ID NO: 568522 - DNA, 75 bp, synthetic construct
  source 1..75: mol_type = other DNA
gctcacccgcccatttcgatccgcgcagaccagctcaaaagagctggctgccgccattcagcaaagccgcgcccg

SEQ ID NO: 568523 - DNA, 75 bp, synthetic construct
  source 1..75: mol_type = other DNA
agcagtctggacagcttccgaaagctacaggcagaaaatcagaaactgggcgaccggctgaactatgcccgccag

SEQ ID NO: 568524 - DNA, 75 bp, synthetic construct
  source 1..75: mol_type = other DNA
tcggcgtttattcagatggtttattaacttatgcttctggtgttttttctcttgggtcttcatcatcgaataaaa

SEQ ID NO: 568525 - DNA, 75 bp, synthetic construct
  source 1..75: mol_type = other DNA
agaagaagtggtgtcacgggcaccggtacgcaggggaaaactgcgccgcaatgtggtggtcctttcccggcgttc

SEQ ID NO: 568526 - DNA, 75 bp, synthetic construct
  source 1..75: mol_type = other DNA
tcctggtttctctggttcatgaaatggtgaaacgtaatgcccgcaaagggctggcaacgctttgtatcggcgggg

SEQ ID NO: 568527 - DNA, 75 bp, synthetic construct
  source 1..75: mol_type = other DNA
agcatttgccgcgcaggcgctttctgttggcaagatgcttgaatgggatgaacgccgggtcaatgtcaatggcgg

SEQ ID NO: 568528 - DNA, 75 bp, synthetic construct
  source 1..75: mol_type = other DNA
ggtgattggcggtggatcgctgatgggcgggcgctttaacctgctgctctcagtagtgggtgcgctgattattca

SEQ ID NO: 568529 - DNA, 75 bp, synthetic construct
  source 1..75: mol_type = other DNA
ttgttcggtagccccatagacattcttaaccgtgcagctcccgttgcgttactggcgattggcatgacgctggtg

SEQ ID NO: 568530 - DNA, 75 bp, synthetic construct
  source 1..75: mol_type = other DNA
gatctctccgtgggggcggtgatggctatcgccggagccacaacggctgcgatgacggtcgcgggattcagcctg

SEQ ID NO: 568531 - DNA, 75 bp, synthetic construct
  source 1..75: mol_type = other DNA
gagaaacacgaaaaggcagagcgaatgcggattatgagggagtttgggtatagtgagctggaggcggcgatgagg

SEQ ID NO: 568532 - DNA, 75 bp, synthetic construct
  source 1..75: mol_type = other DNA
cgctgattcgcgaagcgattctgcacgcggcccagctcaccgctcgcgagcaacgacagacgctgacccaggata

SEQ ID NO: 568533 - DNA, 75 bp, synthetic construct
  source 1..75: mol_type = other DNA
cgtctggccgcaggatcggctggaggaacatttaagccgcctcagcgaccgcgccatcggtgagaacgtcgaatc

SEQ ID NO: 568534 - DNA, 75 bp, synthetic construct
  source 1..75: mol_type = other DNA
tgcaggaggcattgtatgccctgtcacggggggaaggcgaagaggaagggcgggcattaaatccgcagcgccggg

SEQ ID NO: 568535 - DNA, 75 bp, synthetic construct
  source 1..75: mol_type = other DNA
aacggacggtggacagcctgtaccagaaaggcgtgtcgttcatcgattttctgccgtgggtggaataccagccgg

SEQ ID NO: 568536 - DNA, 75 bp, synthetic construct
  source 1..75: mol_type = other DNA
cgccgtaaccggctgtgggagatgggcgaagcgatgaatatgttctgttccgggtttgagggggaattgtttaac

SEQ ID NO: 568537 - DNA, 75 bp, synthetic construct
  source 1..75: mol_type = other DNA
agaaggtattaatgttcgtgtaatacaagaatctaatggtgatattgtttcaggttttccaacaaacgtaccaag

SEQ ID NO: 568538 - DNA, 75 bp, synthetic construct
  source 1..75: mol_type = other DNA
ggacgcggccactggagacgtgctggcggagtacatctggctcgatgggacacccttgggctttgttcagtcagg

SEQ ID NO: 568539 - DNA, 75 bp, synthetic construct
  source 1..75: mol_type = other DNA
acagacctatcaagtccacgtcgatcatctgggcaccccgaaggcgctaaccgacgccagcggccaagtggtttg

SEQ ID NO: 568540 - DNA, 75 bp, synthetic construct
  source 1..75: mol_type = other DNA
cacccagaatgcacacctgttgctgtttggcccgactggcgcagggaaatcggccacgctgtgtgctgtactttc

SEQ ID NO: 568541 - DNA, 75 bp, synthetic construct
  source 1..75: mol_type = other DNA
gagaatacggagtccatccgggcacgtcaggatgtgaaggtggtgaaggagttgctgggtaaccgacataaactc

SEQ ID NO: 568542 - DNA, 75 bp, synthetic construct
  source 1..75: mol_type = other DNA
tcatcgaggtggcaacgacacaagcaggcaccacaacaagcctggcaagccagatcgagcgagcgccctttggcc

SEQ ID NO: 568543 - DNA, 75 bp, synthetic construct
  source 1..75: mol_type = other DNA
agtctggggctgagtgtcaataaggtcagtgtcaaacccggcagtggggtgcgtctgccgctgtttgcggatgcg

SEQ ID NO: 568544 - DNA, 75 bp, synthetic construct
  source 1..75: mol_type = other DNA
cgttaagcaaagcgcgccagtatgtcgaagagtttgacggcaacatcgccagcttcatcttttctggtaagccag

SEQ ID NO: 568545 - DNA, 75 bp, synthetic construct
  source 1..75: mol_type = other DNA
atgaaaaacgttggcgacctgatgcaacgcctgcaaaaaatgatgcctgcccatatcaaacctgcattcaaaacg

SEQ ID NO: 568546 - DNA, 75 bp, synthetic construct
  source 1..75: mol_type = other DNA
cggaaaaaggggtttatgtcacaataaaactcgatcccaggttgaatgcatttatcgaagagaaaacgaaaacat

SEQ ID NO: 568547 - DNA, 75 bp, synthetic construct
  source 1..75: mol_type = other DNA
gaatccaaatatgaaaaagtgatcatcaaccagatcgtcgatcgtcgttcctcttccaagcgcccaaccgggatg

SEQ ID NO: 568548 - DNA, 75 bp, synthetic construct
  source 1..75: mol_type = other DNA
agcgcctgcaaaaaatgatgcctgctcatatcaaacccgccttcaaaacgggtgaagaactattagcctggcaga

SEQ ID NO: 568549 - DNA, 75 bp, synthetic construct
  source 1..75: mol_type = other DNA
atgaaaatgcagcgcacctttaaccgctccggcattcgtccgctgcatcagaactgttcctttgagaactatcgt

SEQ ID NO: 568550 - DNA, 75 bp, synthetic construct
  source 1..75: mol_type = other DNA
gtgccgatcggggcatgatgcgcgaggcgattctggccggggcgcgtaaggcctggaatgaagagcgtcagatga

SEQ ID NO: 568551 - DNA, 75 bp, synthetic construct
  source 1..75: mol_type = other DNA
tatcgaggtggaggaaacggacgacggcgatgcggaggaagagcgcgatattctgggcgagctggagattgtggc

SEQ ID NO: 568552 - DNA, 75 bp, synthetic construct
  source 1..75: mol_type = other DNA
tgacaccggcaccggtcatccgggatttaccttctttaaccggggcggtgcgccactgacgttcgatccacttaa

SEQ ID NO: 568553 - DNA, 75 bp, synthetic construct
  source 1..75: mol_type = other DNA
ccgtatatgaccaaggtggtcaagatgtggcgtaaactcggggcctggctgtggctcgctacccagaaccttaaa

SEQ ID NO: 568554 - DNA, 75 bp, synthetic construct
  source 1..75: mol_type = other DNA
atgttgccgtcggacctgcagaaggcgttgtatgacattgcatctgacaacgatgagggtgccatcaatgtccgc

SEQ ID NO: 568555 - DNA, 75 bp, synthetic construct
  source 1..75: mol_type = other DNA
acgaggacgacactgacgcctacctggacagattgcgcgggtatgtcaagccgcatgcacagcacacggcgttta

SEQ ID NO: 568556 - DNA, 75 bp, synthetic construct
  source 1..75: mol_type = other DNA
ctcgatggctcaacgcctgcaaatttctaaaggcgatttcagtcgctgcccaaatggcttacccggtgtggaaaa

SEQ ID NO: 568557 - DNA, 75 bp, synthetic construct
  source 1..75: mol_type = other DNA
tttatcctgattttctactttggttggtggatgatgcaagcggtgagcaatggctttcttttgttgatccaaaag

SEQ ID NO: 568558 - DNA, 75 bp, synthetic construct
  source 1..75: mol_type = other DNA
acaccgacattttacacaagctgttcaatgccaatgccaggcagcgtttaaagctggtgaacatcaagaacagta

SEQ ID NO: 568559 - DNA, 75 bp, synthetic construct
  source 1..75: mol_type = other DNA
caccaaacatcgtaaccagctggaagggcatgtgctgaacatgaagtacttccagtatttatcgttattgtttac

SEQ ID NO: 568560 - DNA, 75 bp, synthetic construct
  source 1..75: mol_type = other DNA
cagatgcgcaaaaggcagcctttggattaagtgacgatgatgctgtatccgaacagcaaaaaacggcttacgcaa

SEQ ID NO: 568561 - DNA, 75 bp, synthetic construct
  source 1..75: mol_type = other DNA
agttcggcttaagtgatctctggaaaaatcgagcaagcagaagaaataaaatcaatattggtgatcagacgggaa

SEQ ID NO: 568562 - DNA, 75 bp, synthetic construct
  source 1..75: mol_type = other DNA
atccgcacaagcagtagaagagcaaaccaaaatccttcagaccaatgacaacaaaataattgatggtctggaaaa

SEQ ID NO: 568563 - DNA, 75 bp, synthetic construct
  source 1..75: mol_type = other DNA
gtcaccacgcgtgattacaactaccggacagccaccacgccgatgaatgcgacggtcagcgtgcgtaatgatgcg

SEQ ID NO: 568564 - DNA, 75 bp, synthetic construct
  source 1..75: mol_type = other DNA
gtgtgatatctcctttgccgggaaaaaacgtatcacgctgattggcggggggagctatctgcgacttgaggccgg

SEQ ID NO: 568565 - DNA, 75 bp, synthetic construct
  source 1..75: mol_type = other DNA
ctggtacagccgaagagcttgttgatcactttggacagatgacgatttttgcccagcctgtcgaggacgactgct

SEQ ID NO: 568566 - DNA, 75 bp, synthetic construct
  source 1..75: mol_type = other DNA
atgtacacttcaggctatgcacatcgttcttcgttgttctcatccgcagcaagcaaaattgcgcgtgtctccacg

SEQ ID NO: 568567 - DNA, 75 bp, synthetic construct
  source 1..75: mol_type = other DNA
gccagcggatggtcagcactggtcgtgcgatagtgtacggtggggcaaatcagttcacctattacctgagcgaag

SEQ ID NO: 568568 - DNA, 75 bp, synthetic construct
  source 1..75: mol_type = other DNA
cggttcagttggattctgtgcagaggaagaggaatgctgccgaagaaattattaaaaatggaactctgttgctgg

SEQ ID NO: 568569 - DNA, 75 bp, synthetic construct
  source 1..75: mol_type = other DNA
gagttcattaagaacgcacttggagcatttaacacaaacactggtcgatgggagggacaattctctgacgaaaca

SEQ ID NO: 568570 - DNA, 75 bp, synthetic construct
  source 1..75: mol_type = other DNA
aacgctactggttctggtaagacactgctattgcatgtcaatattttgcaatacttacattatttccagaacggt

SEQ ID NO: 568571 - DNA, 75 bp, synthetic construct
  source 1..75: mol_type = other DNA
gccaagtgacgagatccttgagctgaattttgaaactcggccaaatatgccagcaaccaggcttaaaacacttaa

SEQ ID NO: 568572 - DNA, 75 bp, synthetic construct
  source 1..75: mol_type = other DNA
taacaggtctgaaacgtattagctctgctgtgttacctgcaattggcgataacgtttcacgacttattggtgggg

SEQ ID NO: 568573 - DNA, 75 bp, synthetic construct
  source 1..75: mol_type = other DNA
tcgcctgcaattgctattttccagcggcgtaatgagcggacgcatttcgcctgaacgttttgtggaattaaccag

SEQ ID NO: 568574 - DNA, 75 bp, synthetic construct
  source 1..75: mol_type = other DNA
tcgaatccccgctctgacttaaaacaagaaatcatccatgatttgaaagatgcggcagcacagttacgggtgaag

SEQ ID NO: 568575 - DNA, 75 bp, synthetic construct
  source 1..75: mol_type = other DNA
ctttgaaggggcaggtgaaaaacttcagaattttgacactggagatattgctcgtgacataaatagttctataga

SEQ ID NO: 568576 - DNA, 75 bp, synthetic construct
  source 1..75: mol_type = other DNA
ttacactgttgatggtggtggcgtaggcgaactggagtttgaaaacttcaacgccgcatcggtcaatatcaaaat

SEQ ID NO: 568577 - DNA, 75 bp, synthetic construct
  source 1..75: mol_type = other DNA
taaaatgatggagatcgccaaaaaagtgggcaaagggttacatcctgattgctacattgaactggtgattgaaga

SEQ ID NO: 568578 - DNA, 75 bp, synthetic construct
  source 1..75: mol_type = other DNA
tgaagagatggggcttatcaatgtgaccttaagtgagaagggcactttgatggcgacgttaccggctaacgtccc

SEQ ID NO: 568579 - DNA, 75 bp, synthetic construct
  source 1..75: mol_type = other DNA
ctcgcctaatgaaaaaatagacgtcagcaacccagaagttatgacgcaattagttcgtgcaatagcgacgaaaga

SEQ ID NO: 568580 - DNA, 75 bp, synthetic construct
  source 1..75: mol_type = other DNA
gaagtcagctggtgttgtggctgaagatgccaccattaaaaccggcgaagccattgcaaagaaaaaaactgaatc

SEQ ID NO: 568581 - DNA, 75 bp, synthetic construct
  source 1..75: mol_type = other DNA
cggtgaattctcaaaaagcaacatctgcaaaagcgttcaataacgctgttgagacaaaatccgcacaagcagtag

SEQ ID NO: 568582 - DNA, 75 bp, synthetic construct
  source 1..75: mol_type = other DNA
cctttcttgccctgccggtgatatccgttgccggcactaccgtttataccgactcggcacatctgccggttaatc

SEQ ID NO: 568583 - DNA, 75 bp, synthetic construct
  source 1..75: mol_type = other DNA
cggtaatgcctcaatgatgctgggtgtggcaacgtcactggcagcgcctttaattggccttgtgggtgctgacgg

SEQ ID NO: 568584 - DNA, 75 bp, synthetic construct
  source 1..75: mol_type = other DNA
taccagaaaggcccgttgcattctgcggtggttcggcggcgattaaaggttatgtggttcggggtacggctgatg

SEQ ID NO: 568585 - DNA, 75 bp, synthetic construct
  source 1..75: mol_type = other DNA
gcggatatggttatcgcgccgcatgtcgctgtttttccggccctggctatttttctgaccgtactggcgttcaat

SEQ ID NO: 568586 - DNA, 75 bp, synthetic construct
  source 1..75: mol_type = other DNA
aattatctcttcttcggctcagacaagggaggagaaagtgcggcgatcatctacagtctgctggtcacctgcaag

SEQ ID NO: 568587 - DNA, 75 bp, synthetic construct
  source 1..75: mol_type = other DNA
ttttctggtgcctgtatgccattcgccagtctctcagcggcattgtccatttctgtgacgtggcctggattgcca

SEQ ID NO: 568588 - DNA, 75 bp, synthetic construct
  source 1..75: mol_type = other DNA
caccggagaagaagattttgaaaccttcctgttaaaagggggaattgccccaaaggcagggcaactggtgcgact

SEQ ID NO: 568589 - DNA, 75 bp, synthetic construct
  source 1..75: mol_type = other DNA
attaccgaaaaagacggggcgctctggtatatcgagccaatccccaacaccagggcagaggagatgaattataaa

SEQ ID NO: 568590 - DNA, 75 bp, synthetic construct
  source 1..75: mol_type = other DNA
acataaaccgcatcactgccaccgtcgccttgtgatagaatacttgaacaagcattgggatactgattttgaggt

SEQ ID NO: 568591 - DNA, 75 bp, synthetic construct
  source 1..75: mol_type = other DNA
tgtggtgcagcggggcgtgagtggatcggctggttgtcagccaacaaagaacttgcagtcagtgcggttaacgaa

SEQ ID NO: 568592 - DNA, 75 bp, synthetic construct
  source 1..75: mol_type = other DNA
atcttccggcgaagacaaatttcaccggaaattatgatgacgaattaaaaccacgcgttgagtgccgtcctgatg

SEQ ID NO: 568593 - DNA, 75 bp, synthetic construct
  source 1..75: mol_type = other DNA
atgccgggaagcaacgcaacgggcttttgatgactggctacaggatttcgggctggaaaaccgggaaaaatatca

SEQ ID NO: 568594 - DNA, 75 bp, synthetic construct
  source 1..75: mol_type = other DNA
ctgtgcttggtgctcagttccaggcattaaaaatgggaggtaaagaagccgccgcgacgatgggggcagctttgc

SEQ ID NO: 568595 - DNA, 75 bp, synthetic construct
  source 1..75: mol_type = other DNA
catcgtaaaccagtacccgtgctgaacattggcctgccggacttctttattccacaaggaactcaggaagaaatg

SEQ ID NO: 568596 - DNA, 75 bp, synthetic construct
  source 1..75: mol_type = other DNA
ccggtgttaagtttcctggcaagcccaggcggcaccagtgagcgttcgtcaattatggtgggcgaagtggacgcc

SEQ ID NO: 568597 - DNA, 75 bp, synthetic construct
  source 1..75: mol_type = other DNA
acactagcgaaacgccctggctactggaaatggttgccgggatgattgaagagggggaaagtgtggaagatgtcg

SEQ ID NO: 568598 - DNA, 75 bp, synthetic construct
  source 1..75: mol_type = other DNA
aattaatcgcgctgttagcgaatggcgaatttcactcaggtgagcagttgggtgaaacgttaggaatgagccggg

SEQ ID NO: 568599 - DNA, 75 bp, synthetic construct
  source 1..75: mol_type = other DNA
atgaaggataacaccgtgccactgaaattgatcgccctgttagcgaacggtgaatttcactctggcgagcagttg

SEQ ID NO: 568600 - DNA, 75 bp, synthetic construct
  source 1..75: mol_type = other DNA
ctacacgaaggtgtttgcgctggatgtggctgtacggcaccgggtgcagttttcgatgcctgagtccgatgcggt

SEQ ID NO: 568601 - DNA, 75 bp, synthetic construct
  source 1..75: mol_type = other DNA
gatcagagattatgctgtcagagtttggccttctgttaaggaatatacagttaaatcgtttgaggctataaaaaa

SEQ ID NO: 568602 - DNA, 75 bp, synthetic construct
  source 1..75: mol_type = other DNA
aagtgctgttattgaccgcgattttgccaacataacgaaagataatgcggagcgattgaaacaattacgtattca

SEQ ID NO: 568603 - DNA, 75 bp, synthetic construct
  source 1..75: mol_type = other DNA
atatcagccattgtggcgttaggtatattgttgtatcagaattgggataaaataaaagaatgtgcatcaaaagtt

SEQ ID NO: 568604 - DNA, 75 bp, synthetic construct
  source 1..75: mol_type = other DNA
tttcggtgctgactgatgagaaatattttcaggggagctttgatttcctccccatcgtcagccaaatcgccccgc

SEQ ID NO: 568605 - DNA, 75 bp, synthetic construct
  source 1..75: mol_type = other DNA
gctgcgcgtggtctggatattaaatcgcttgagctggtggtgaactttgagctggcgtgggaccctgaagttcat

SEQ ID NO: 568606 - DNA, 75 bp, synthetic construct
  source 1..75: mol_type = other DNA
atgcagtcaaacgcattacatcgacttaacgatggtatcgctgccgggtattacgcggcagtcttcagctatctg

SEQ ID NO: 568607 - DNA, 75 bp, synthetic construct
  source 1..75: mol_type = other DNA
attacctgcaaacggtgtggattgactttagatccgttcgaacttgttctcgaccgtgcgagaaacggtgaaaac

SEQ ID NO: 568608 - DNA, 75 bp, synthetic construct
  source 1..75: mol_type = other DNA
cgccatggtatcaacatttaaatcgtagccagtggcgtgcattttctgctgcatggttaggttatttactggatg

SEQ ID NO: 568609 - DNA, 75 bp, synthetic construct
  source 1..75: mol_type = other DNA
tctggcttttcagtaggtgcagttgttgcagctcaggtttatagtctggttgtaccagtatggggatggcgagtg

SEQ ID NO: 568610 - DNA, 75 bp, synthetic construct
  source 1..75: mol_type = other DNA
ccgttggtttggtggacttgttctgggagcaatgggagacagatatggacgccgtctggcgatggttgtcagtat

SEQ ID NO: 568611 - DNA, 75 bp, synthetic construct
  source 1..75: mol_type = other DNA
atatgtatcgctacaaatacaggcaagaattgctcctgcacttaaacaaatttgtgaagagtattatattgatta

SEQ ID NO: 568612 - DNA, 75 bp, synthetic construct
  source 1..75: mol_type = other DNA
atgaaaaaagacattaaagaaatggaaagcatgattgatatcattaatgcatgttctatggacataaattcatat

SEQ ID NO: 568613 - DNA, 75 bp, synthetic construct
  source 1..75: mol_type = other DNA
gttgcacaacgtcttgatctcggtacagctctctgttctctctcttttggcctgacctttgttgtcattttgctg

SEQ ID NO: 568614 - DNA, 75 bp, synthetic construct
  source 1..75: mol_type = other DNA
aagccgtgcggcaaatgcttttgatgtggacggcgaaacggtagccatgctggtgagtgtggcgatgaatgacga

SEQ ID NO: 568615 - DNA, 75 bp, synthetic construct
  source 1..75: mol_type = other DNA
aaagaagcgggcgcggttgataccgcttttgttaccaaagccatcaatgaacagccgttgaacctcgggcagggg

SEQ ID NO: 568616 - DNA, 75 bp, synthetic construct
  source 1..75: mol_type = other DNA
tcgtcgccagcgatttgctgactcttcaggcgctgaatgctgctcgtctgaaagaagcgggcgcggttgataccg

SEQ ID NO: 568617 - DNA, 75 bp, synthetic construct
  source 1..75: mol_type = other DNA
gttcggtggcattgtgccgcgtaaagcgagcactcacttacgtgatttgctgacccaatgcgaagcgaccattgc

SEQ ID NO: 568618 - DNA, 75 bp, synthetic construct
  source 1..75: mol_type = other DNA
gttactatgatcctgtcgtcgcgcaagcctggctggagaactggcaggggctgcgtcacgctattgcgaccgggc

SEQ ID NO: 568619 - DNA, 75 bp, synthetic construct
  source 1..75: mol_type = other DNA
cacgatatgggcttacgtattcgtggcgaaaacggtcgctatgagatgaccatgaaagttgcaggaagagtgaca

SEQ ID NO: 568620 - DNA, 75 bp, synthetic construct
  source 1..75: mol_type = other DNA
tgaagatgatgtcttaatcaataaagtaataaggacatttatctataaatcaaaaaaatcaaaagactatgtgtc

SEQ ID NO: 568621 - DNA, 75 bp, synthetic construct
  source 1..75: mol_type = other DNA
gttctttagtggctttggcgcggcggtggggtgctgcgtcggtggcttcctcggtgactggctgggaacccgcaa

SEQ ID NO: 568622 - DNA, 75 bp, synthetic construct
  source 1..75: mol_type = other DNA
gccgattcaggcgctgctgccaacgtatctgaaaaccgatctggcttatgacccgcatactgtcgccaatgtgct

SEQ ID NO: 568623 - DNA, 75 bp, synthetic construct
  source 1..75: mol_type = other DNA
ttgaaagctggccaaagcatctgcgtaacaaagccagtggttttctgatttcaggcttctcagtgggggccgtcg

SEQ ID NO: 568624 - DNA, 75 bp, synthetic construct
  source 1..75: mol_type = other DNA
agaatgctaactgctatggatgtagctgaacgtaatgataatggcaaacgcataactctacaccaccgtttaggg

SEQ ID NO: 568625 - DNA, 75 bp, synthetic construct
  source 1..75: mol_type = other DNA
ataaaaacccggaaggcgtggcgatggggattaatccattcgtgcacggcagcgcgaaacataccgatattatga

SEQ ID NO: 568626 - DNA, 75 bp, synthetic construct
  source 1..75: mol_type = other DNA
catgctgcatctggcgcgcaaggcgttttatccaggtacgctgcctttcccgttgctgcatgttgataccggctg

SEQ ID NO: 568627 - DNA, 75 bp, synthetic construct
  source 1..75: mol_type = other DNA
gaaaggcgttttcttaacgccttaacaaatgctcgcttaaatatttattatgaattgttaaaagagaaaataaaa

SEQ ID NO: 568628 - DNA, 75 bp, synthetic construct
  source 1..75: mol_type = other DNA
ggtaatattattgagatgtgttttttcgtgatgttttcagtattactggctgcattcagttttgtaagtacaatg

SEQ ID NO: 568629 - DNA, 75 bp, synthetic construct
  source 1..75: mol_type = other DNA
gcctgattgccattgccgcctgcctggggcacatctggccgatcttcttcggtttcaaaggaggaaaaggcgtag

SEQ ID NO: 568630 - DNA, 75 bp, synthetic construct
  source 1..75: mol_type = other DNA
tcactatgtttatcgcgcgtctggtgatcggtatggggatggcgggtgaatacggctccagcgctacttatgtga

SEQ ID NO: 568631 - DNA, 75 bp, synthetic construct
  source 1..75: mol_type = other DNA
ttgctgctcaggtttacagtctggtggttccgatctggggctggcgtgcgctgttctttatcggcatcttaccga

SEQ ID NO: 568632 - DNA, 75 bp, synthetic construct
  source 1..75: mol_type = other DNA
gttctttagtggctttggcgcggccgtgggatgctgcgtaggtggcttcctcggtgactggctgggaacccgcaa

SEQ ID NO: 568633 - DNA, 75 bp, synthetic construct
  source 1..75: mol_type = other DNA
cgctgcaaacagaaaaacgcccgctatgcctctccctggcgcgtcaggcgggagcagataaaaacgcctcgttgc

SEQ ID NO: 568634 - DNA, 75 bp, synthetic construct
  source 1..75: mol_type = other DNA
agcgaacatggctttaaagagctggcgcttcgctatgcgctgaatctggcaaatggtcgttttctgtggcgcaac

SEQ ID NO: 568635 - DNA, 75 bp, synthetic construct
  source 1..75: mol_type = other DNA
aaacggcgtcggtactggcatttgagcgcaaactggcaacctctgacgcggtaatgtacgcaggtaactggcaag

SEQ ID NO: 568636 - DNA, 75 bp, synthetic construct
  source 1..75: mol_type = other DNA
atcaaaacacagccatctaagaacatcggggctaatatgaaaaaacgtgttaacactgaaaaatcaagtagtgaa

SEQ ID NO: 568637 - DNA, 75 bp, synthetic construct
  source 1..75: mol_type = other DNA
gtgctggtggggattgactacgaagaagaagccagtgaatcattgctctttaatcttgaattcgaacaaatacgc

SEQ ID NO: 568638 - DNA, 75 bp, synthetic construct
  source 1..75: mol_type = other DNA
ctcgctcgctgggttaatgaacgttcccccgacagacgacgtgtatttaccagtaagaccaatccggttgcgtcc

SEQ ID NO: 568639 - DNA, 75 bp, synthetic construct
  source 1..75: mol_type = other DNA
atggcaatgggtccgttaaccattggtcgcccgactgaggcgaaaatcaacagcacaagcaacgatagcaacggt

SEQ ID NO: 568640 - DNA, 75 bp, synthetic construct
  source 1..75: mol_type = other DNA
ttgcagaaggtctgaactatacctatggcggctgggcggatggcaacagcccgtcagatatcgaaaacagtaagc

SEQ ID NO: 568641 - DNA, 75 bp, synthetic construct
  source 1..75: mol_type = other DNA
agtgcgccgaaaaatggccactataaagcttatattctgggtgaagggccagatggcgtggctaaaacaccggaa

SEQ ID NO: 568642 - DNA, 75 bp, synthetic construct
  source 1..75: mol_type = other DNA
tcgcaacccgtgctatctcgatgctggcgattctgaccggtaacgttggtattaacggaggcaacagcggcgcgc

SEQ ID NO: 568643 - DNA, 75 bp, synthetic construct
  source 1..75: mol_type = other DNA
ttttcgggccactaatgattgacgatacaaactatcaatctttttcaaaagaccttgatgatttgttcgagatga

SEQ ID NO: 568644 - DNA, 75 bp, synthetic construct
  source 1..75: mol_type = other DNA
caggggtattgtgtatcagaaaacaagccgatcccctttgacttgagtcttttcaacgcgttaattcatactaat

SEQ ID NO: 568645 - DNA, 75 bp, synthetic construct
  source 1..75: mol_type = other DNA
agggttggggaccacaacgccacgctaacggtgaaatcgccactcgtgctatctcaatgctggcgatcctcaccg

SEQ ID NO: 568646 - DNA, 75 bp, synthetic construct
  source 1..75: mol_type = other DNA
taaatcgacaggtggcagtgttaaaactaaggttaacccgacaccacaaaaagcacctacgagtacaggtgagga

SEQ ID NO: 568647 - DNA, 75 bp, synthetic construct
  source 1..75: mol_type = other DNA
agctacgcccgggatgcagtggcattacgttataactaccataactggtcggaactcagcacagtatttggtcag

SEQ ID NO: 568648 - DNA, 75 bp, synthetic construct
  source 1..75: mol_type = other DNA
tgtgccggattaagggaagacgatgagacgccagttaagaatttaattaaggagtttatgttaaatgaaacctga

SEQ ID NO: 568649 - DNA, 75 bp, synthetic construct
  source 1..75: mol_type = other DNA
ccaccgattcttgaagcatctgaagaagcaaaagataaagtccacgtgctgcttaccgcgcagggcattttacca

SEQ ID NO: 568650 - DNA, 75 bp, synthetic construct
  source 1..75: mol_type = other DNA
attttgttctggtttatgaggtcgacagccagtggggaaaagtgtatatcctgcgagtattgcatactgtacaga

SEQ ID NO: 568651 - DNA, 75 bp, synthetic construct
  source 1..75: mol_type = other DNA
ccgccagcagatggagctggatattctgaaaaaggcgaaggaaatcaaaaaaaatctatggtcgcccccgttttt

SEQ ID NO: 568652 - DNA, 75 bp, synthetic construct
  source 1..75: mol_type = other DNA
agaaaaacgcgcttgcagatgggtcgcaggttacttccttgcgcacaggatatagttataccagcgttattgtcg

SEQ ID NO: 568653 - DNA, 75 bp, synthetic construct
  source 1..75: mol_type = other DNA
gaacaagatataaattctacaaaaaacacaaataactctgcctctactgtgaaaggagagaacggatttgctatt

SEQ ID NO: 568654 - DNA, 75 bp, synthetic construct
  source 1..75: mol_type = other DNA
gtatgatgccgtactgaatgagaatgaattacaacatattgattttacgtgttccggattaagggaagacgatga

SEQ ID NO: 568655 - DNA, 75 bp, synthetic construct
  source 1..75: mol_type = other DNA
tgatattgttctgcgcaaccagtgcaatggtagctggcaattaacttttaatgtggaaggctggcagaacagcga

SEQ ID NO: 568656 - DNA, 75 bp, synthetic construct
  source 1..75: mol_type = other DNA
gtgttggccgcggctgttatattggttggctcaaccgtggggtattcacacttgaaaagtacacctgacgccccg

SEQ ID NO: 568657 - DNA, 75 bp, synthetic construct
  source 1..75: mol_type = other DNA
atatccgatgaaacgagtcggggcgcgcggtgaaggcaaattcgagcgcattagctgggaagaagcctacgacat

SEQ ID NO: 568658 - DNA, 75 bp, synthetic construct
  source 1..75: mol_type = other DNA
caggacgataccgaaaagctgcgcgttaacttctacaagctgctgtcggtagtggggattatcaactttccggcg

SEQ ID NO: 568659 - DNA, 75 bp, synthetic construct
  source 1..75: mol_type = other DNA
tcataaacacggcctgaaactgtatgttcagcgtgtgttcatcatggacgacgcagaacagttcatgccgaacta

SEQ ID NO: 568660 - DNA, 75 bp, synthetic construct
  source 1..75: mol_type = other DNA
caccaaagaagatcgtggtactgaaatcaccctgcatctgcgtgaaggcgaagacgaattcctcgatgactggcg

SEQ ID NO: 568661 - DNA, 75 bp, synthetic construct
  source 1..75: mol_type = other DNA
ctggtacagatgaccgtgctggcgcggattatcgacaaccaccagttcggtttgcttaccgtgtcgctggtgatc

SEQ ID NO: 568662 - DNA, 75 bp, synthetic construct
  source 1..75: mol_type = other DNA
tgtttccggcgtttgccaaaattcaggacgacaccgaaaagctgcgcgtgaacttctacaagctgctgtcggtgg

SEQ ID NO: 568663 - DNA, 75 bp, synthetic construct
  source 1..75: mol_type = other DNA
caaaatttatcgtcccggtctacatttctcgctggcttcggtggcaccgaacttacgctttggagcctggctgac

SEQ ID NO: 568664 - DNA, 75 bp, synthetic construct
  source 1..75: mol_type = other DNA
ttcagtcagaagtgaaacagcttctgcacctgatgattcattctctctattccaataaagaaatcttcctgcgtg

SEQ ID NO: 568665 - DNA, 75 bp, synthetic construct
  source 1..75: mol_type = other DNA
tttggtcttaatgaaagtcagttgctggctgtcaaacgggcattttcctcacagatttcagttattgaaggacca

SEQ ID NO: 568666 - DNA, 75 bp, synthetic construct
  source 1..75: mol_type = other DNA
gtgtggttgtccgggtatgcagaaaacagcattaacattaacatggaaaacgtccctgacgacatggatttcagc

SEQ ID NO: 568667 - DNA, 75 bp, synthetic construct
  source 1..75: mol_type = other DNA
actggctgacgaagttgatgagagcgcgaaagaagcggagaaagcactgactccgttcatcgaccgtgtgaaagc

SEQ ID NO: 568668 - DNA, 75 bp, synthetic construct
  source 1..75: mol_type = other DNA
cgcggacgaaatgagcacccagatggcgaaactgttcgctgcggcgggccagaaagtgccagaagtgaaatacat

SEQ ID NO: 568669 - DNA, 75 bp, synthetic construct
  source 1..75: mol_type = other DNA
caacagtttggcctggtactgaaagaaggtccggcggaagatttcgctaaccaggaagcgatcgccaaactgctg

SEQ ID NO: 568670 - DNA, 75 bp, synthetic construct
  source 1..75: mol_type = other DNA
gttcatattgaggcgaaagtgacgccacgaatgatgccgggcgtggtcgcactgggtgaaggtgcctggtatgac

SEQ ID NO: 568671 - DNA, 75 bp, synthetic construct
  source 1..75: mol_type = other DNA
gcgtatgtcatgatcactgaaaacctggtggatcaggcattcctcgataaatattgcgttggctacgatgagaaa

SEQ ID NO: 568672 - DNA, 75 bp, synthetic construct
  source 1..75: mol_type = other DNA
atgacggagccgccaaaatctggaattaaatgggatgatgttgttgcgctcattaaagcggtgggtggaacaata

SEQ ID NO: 568673 - DNA, 75 bp, synthetic construct
  source 1..75: mol_type = other DNA
gtaacgaatctatctatctgaattatggtaccggtacgttgggcggtaccatgactcgttcctggccgccaggaa

SEQ ID NO: 568674 - DNA, 75 bp, synthetic construct
  source 1..75: mol_type = other DNA
cattaacattaccttttagtcggattgcatacgctgtagatagcgctattccagtagattctgacgagaaggtta

SEQ ID NO: 568675 - DNA, 75 bp, synthetic construct
  source 1..75: mol_type = other DNA
gttatcaggatccgctgaacaaacagtatccgctgcagcttacaggtttccactataaatctcgcgttcactcaa

SEQ ID NO: 568676 - DNA, 75 bp, synthetic construct
  source 1..75: mol_type = other DNA
ccattatgatggttgtcactctcttattagttatattaatttcagtatttctaatagaacaaatcggaactcttt

SEQ ID NO: 568677 - DNA, 75 bp, synthetic construct
  source 1..75: mol_type = other DNA
catcaatggcttgacctcggcagcaaatggatttgctgggaaactggctgctgttaccggagttagggcactaag

SEQ ID NO: 568678 - DNA, 75 bp, synthetic construct
  source 1..75: mol_type = other DNA
tgggggctgacagtgcaaaaggtcgtgaggaagaggcaagaaaattactgcgttgggggcaacaaaactttacta

SEQ ID NO: 568679 - DNA, 75 bp, synthetic construct
  source 1..75: mol_type = other DNA
taacaccgtcagactacggaaactttgatgcccgttaccagcagcgaaatggtggcgtgcaggatgtgcggtatg

SEQ ID NO: 568680 - DNA, 75 bp, synthetic construct
  source 1..75: mol_type = other DNA
ataaagtgtctgttggcggcggttctcaggtcaatggtgcgctgggtatcggcgttcagaacgcactgggcggaa

SEQ ID NO: 568681 - DNA, 75 bp, synthetic construct
  source 1..75: mol_type = other DNA
gagactggagcgacagcagtattcacagatagtgctgacagagacgctgtcattgatgtcgttcgtaagagcggc

SEQ ID NO: 568682 - DNA, 75 bp, synthetic construct
  source 1..75: mol_type = other DNA
attacctactgaaaaccgagcgcgattttggtattcgcgttctcgaccgctatgcaatgtatctgaaatcactgc

SEQ ID NO: 568683 - DNA, 75 bp, synthetic construct
  source 1..75: mol_type = other DNA
aacaatgacccggagatccccccacatttgcacctgcattttgatgtagatatcccggcaatcaccgtcgaaaag

SEQ ID NO: 568684 - DNA, 75 bp, synthetic construct
  source 1..75: mol_type = other DNA
agctgatttttattggcgatcacgatccgcgtaagcccatgagcgagaacacggtaaacagtgcgctacgggtga

SEQ ID NO: 568685 - DNA, 75 bp, synthetic construct
  source 1..75: mol_type = other DNA
taattgattacaatccggcgcaagaaatggcgggggcggttgcttccagtaatcgacagcatcgtccggcgctgg

SEQ ID NO: 568686 - DNA, 75 bp, synthetic construct
  source 1..75: mol_type = other DNA
aatcggtgccgctatcgtacgtcgtttcgtcaccgatggggccaatgtacgattcacctatgcggggtcgaaaga

SEQ ID NO: 568687 - DNA, 75 bp, synthetic construct
  source 1..75: mol_type = other DNA
ggggatgttgaaaaggctgaacgcatttacaagaaaagcgaaattgcccccatccagcgccgttttatgctggcc

SEQ ID NO: 568688 - DNA, 75 bp, synthetic construct
  source 1..75: mol_type = other DNA
tgtatattcgccgccgtaaagtcagggacaacgccacagaccagcccggcgattatgtggtgttacaggatggtg

SEQ ID NO: 568689 - DNA, 75 bp, synthetic construct
  source 1..75: mol_type = other DNA
tatgacggatgaaatggaagaagaaattgaacagcagctgcgtgacagcaaaggtatcggtaacttctccactat

SEQ ID NO: 568690 - DNA, 75 bp, synthetic construct
  source 1..75: mol_type = other DNA
atcgcaaggatgaagttatccccttgcagcgcaagctaatgaacggcgtcaacaatgacccggagatccccgcac

SEQ ID NO: 568691 - DNA, 75 bp, synthetic construct
  source 1..75: mol_type = other DNA
tatggagggtatcaacagcgatccggatatcagacggctggggcaggtggaatttattcttgaatttaacgaatc

SEQ ID NO: 568692 - DNA, 75 bp, synthetic construct
  source 1..75: mol_type = other DNA
aacatacctggcggggatggggatgcaatcaagttcattgaaatgggggatatctctgcaaaagatgaatttgcc

SEQ ID NO: 568693 - DNA, 75 bp, synthetic construct
  source 1..75: mol_type = other DNA
gctggagtttacgcccgtgctgcatggttcttgcctatcgcgtcgctcatttttgttcggtgtggcgcaaaaaga

SEQ ID NO: 568694 - DNA, 75 bp, synthetic construct
  source 1..75: mol_type = other DNA
acgctggacacgctgaaagaaatagccgtagccattaacaatgatccgaaattcagtaccaccattaacaatgcg

SEQ ID NO: 568695 - DNA, 75 bp, synthetic construct
  source 1..75: mol_type = other DNA
ctaaaatgcaacggagcagctttttctgctgaagaatacccagaactggcaaaggcttacccgacaaataaattg

SEQ ID NO: 568696 - DNA, 75 bp, synthetic construct
  source 1..75: mol_type = other DNA
ctgattaccagcagcacggacaatatcatcctgaaaatcgaccctgctgtagtgctggcaacccgtaaatacgtg

SEQ ID NO: 568697 - DNA, 75 bp, synthetic construct
  source 1..75: mol_type = other DNA
tatgtggatgacaaggtactggagctgaaggtgtatgtggatgacctgatggcaaaacaccttgccgcacaggac

SEQ ID NO: 568698 - DNA, 75 bp, synthetic construct
  source 1..75: mol_type = other DNA
cctgatttacgtggtgagtttattcgtggctgggatgacggacgtggtatggatacggggagggcaatattatcc

SEQ ID NO: 568699 - DNA, 75 bp, synthetic construct
  source 1..75: mol_type = other DNA
cgctgactaatttgagtggaaaggatgttgctggtcttctcgcctatcttggtttgagcgcgggcgctccgccag

SEQ ID NO: 568700 - DNA, 75 bp, synthetic construct
  source 1..75: mol_type = other DNA
gggctggagggtttagtttatccgcccacaatacaggcgctatagatgttgttgctgctatagaattcgatagcg

SEQ ID NO: 568701 - DNA, 75 bp, synthetic construct
  source 1..75: mol_type = other DNA
acggcgagttagttgcctagaaagtgatgtaactgaaatcaaaaacaacctgattactctcaccacgagaagtga

SEQ ID NO: 568702 - DNA, 75 bp, synthetic construct
  source 1..75: mol_type = other DNA
tacgccgtagtgatcaataaaaacgtggtggcgggggatgatttcaccattcgccacggcgtcactattggcaat

SEQ ID NO: 568703 - DNA, 75 bp, synthetic construct
  source 1..75: mol_type = other DNA
ctggtcttctcacataccttggtttgggagaaggctctgcattacctgttggtgtgcctgttccgtggccttcag

SEQ ID NO: 568704 - DNA, 75 bp, synthetic construct
  source 1..75: mol_type = other DNA
cacttttgccgggctgatttaccactacgtgggagtaggcccaaataaagagacggatgatgaagaggaaaacgg

SEQ ID NO: 568705 - DNA, 75 bp, synthetic construct
  source 1..75: mol_type = other DNA
atttcagtcgccagttgtgttctgacaattgtatcgattcagtctgcagaatattacgctgaaatctcgatgaat

SEQ ID NO: 568706 - DNA, 75 bp, synthetic construct
  source 1..75: mol_type = other DNA
cgagaacgccacgcataccctgcacaacttctacactctgcgcggcgcgaaaacccgcgacaccagcaagtggac

SEQ ID NO: 568707 - DNA, 75 bp, synthetic construct
  source 1..75: mol_type = other DNA
atatcgcaaaacatgtcattcagattcacttcatcaatgagcacacgggtgaagtggttgataaacagttgcgta

SEQ ID NO: 568708 - DNA, 75 bp, synthetic construct
  source 1..75: mol_type = other DNA
gaaaaaggtcggaacggaacgcatctggtatggcgataaagaaaatatcgacctgggaacggaacaagagttctg

SEQ ID NO: 568709 - DNA, 75 bp, synthetic construct
  source 1..75: mol_type = other DNA
cttctttgttcgtttttaacttatcttccagccaggcagcggaaaatatccctttttctccccaacctccagcga

SEQ ID NO: 568710 - DNA, 75 bp, synthetic construct
  source 1..75: mol_type = other DNA
gtcggttgctgaaggtgacaccagtaatcgacggtgaacatctgacgttacgtgtgcaatggcgcgccgctgacg

SEQ ID NO: 568711 - DNA, 75 bp, synthetic construct
  source 1..75: mol_type = other DNA
cgctgcactggcaaccggccttgcagcggcctgaagaatacgtctgcggactggatgatattcaccaggcaatac

SEQ ID NO: 568712 - DNA, 75 bp, synthetic construct
  source 1..75: mol_type = other DNA
tcaaccagatgatcaccagccatgatatccgcgaaagcaactgcccacgtatcgcagctgcctgtggtgaggata

SEQ ID NO: 568713 - DNA, 75 bp, synthetic construct
  source 1..75: mol_type = other DNA
gaacctgatggccgccattgaactggacgaacggattggttattcagccagcagcctggccgggcagccgtataa

SEQ ID NO: 568714 - DNA, 75 bp, synthetic construct
  source 1..75: mol_type = other DNA
agtggggaaaagtgtatatcctgcgtgtattgcataccgcacagaagtggtcataagaaagtctattggatgtgg

SEQ ID NO: 568715 - DNA, 75 bp, synthetic construct
  source 1..75: mol_type = other DNA
ctgacgaagcggtcaaactggcgcgacatgcacaagcctgcggcgctgacggcgtcgtcgctatcaacccctact

SEQ ID NO: 568716 - DNA, 75 bp, synthetic construct
  source 1..75: mol_type = other DNA
acggttgaaagagcatcttcagcagcctgagaaaaacgccgcgatgagcagtttgcggcgttttacgattattgc

SEQ ID NO: 568717 - DNA, 75 bp, synthetic construct
  source 1..75: mol_type = other DNA
ggaccgtgttgaaggtgccgcgctggagttttatgaggcagcagccagaatgagaatcatgatcctacccacgta

SEQ ID NO: 568718 - DNA, 75 bp, synthetic construct
  source 1..75: mol_type = other DNA
gtgggctgccccggtgctggtgatgtatcgcttatcaccgaatgcctgtttggctatgaaattcaggctgctgca

SEQ ID NO: 568719 - DNA, 75 bp, synthetic construct
  source 1..75: mol_type = other DNA
aaatattacgatgatgtcgaagtcgatgcctggcaaggcggcatatcactctatactggcccggtgatctccagc

SEQ ID NO: 568720 - DNA, 75 bp, synthetic construct
  source 1..75: mol_type = other DNA
tcacatctataactgggatgagtggtcgcaaaaaaccatcccagtaccgatggttgtaggccatgaatatgtcgg

SEQ ID NO: 568721 - DNA, 75 bp, synthetic construct
  source 1..75: mol_type = other DNA
acacgataggcgttggtgttaatcgcccgggctgctttgccgaatatctggtgatcccggcattcaacgccttca

SEQ ID NO: 568722 - DNA, 75 bp, synthetic construct
  source 1..75: mol_type = other DNA
tatcgatgatttccagaagggctttgacgccatgcgttcgggccagtccgggaaagttatcctgagctgggatta

SEQ ID NO: 568723 - DNA, 75 bp, synthetic construct
  source 1..75: mol_type = other DNA
ctgtcttttcttctttttttatgagcgctggagtatttgctgcagacgttgataccggaacattaactattaagg

SEQ ID NO: 568724 - DNA, 75 bp, synthetic construct
  source 1..75: mol_type = other DNA
agcagtgacgtactggatatttccgcaccatttaatattgaaagttataaaactgctgatggacaatatgcaata

SEQ ID NO: 568725 - DNA, 75 bp, synthetic construct
  source 1..75: mol_type = other DNA
atgagcagaaggcgaatcacacgcaagcatcgccgcacacacatgaattccttaccgacgctgaaagaactcatt

SEQ ID NO: 568726 - DNA, 75 bp, synthetic construct
  source 1..75: mol_type = other DNA
agatgtcaaaaaaattgtagaaaaaatcaaaaatgaaggacgtcaagagcattttgttcaccgcgaagtttatcg

SEQ ID NO: 568727 - DNA, 75 bp, synthetic construct
  source 1..75: mol_type = other DNA
gattactgatgttaacgaataccgccttgagttggcgcgtaaaatgggtatcacccgtgcggttaacgtcgctaa

SEQ ID NO: 568728 - DNA, 75 bp, synthetic construct
  source 1..75: mol_type = other DNA
gtgatcccggcgttcaacgccttcaaaattcccgacaatatctccgacgacctggcttccatttttgatcccttc

SEQ ID NO: 568729 - DNA, 75 bp, synthetic construct
  source 1..75: mol_type = other DNA
tatacccattatgactccagcgatgcaggtggtagttacagcaatatgatttccgtgcgtctgaatgacccgcgc

SEQ ID NO: 568730 - DNA, 75 bp, synthetic construct
  source 1..75: mol_type = other DNA
accggaacaatggaaggttttgttaattagcggtcatgcagtggcaacaaaacaggaagctgatgttttgcccgg

SEQ ID NO: 568731 - DNA, 75 bp, synthetic construct
  source 1..75: mol_type = other DNA
gtaagcaacaacagcaagccgcaataaatgccatcctctcaactcctctcgataaagacaagccagtcaccatcc

SEQ ID NO: 568732 - DNA, 75 bp, synthetic construct
  source 1..75: mol_type = other DNA
atgaagcaaacaatcttcctccgaactaagcaacaacagcaagccgcaatcaacgccatcctcgaaactcctctc

SEQ ID NO: 568733 - DNA, 75 bp, synthetic construct
  source 1..75: mol_type = other DNA
gattgaagacagcgaactgagtcgccgtgcaataggtaaatatatcgatgtgtatcactatcctgatggcagaaa

SEQ ID NO: 568734 - DNA, 75 bp, synthetic construct
  source 1..75: mol_type = other DNA
tctggcattaccctgacggacataaagagctccggcttaatggcgtatcacttccctactccacctatgacaaac

SEQ ID NO: 568735 - DNA, 75 bp, synthetic construct
  source 1..75: mol_type = other DNA
gtgcgatgcacgaactgaacattcaaaccatctgtgcagaaaccagcgcagcaaaaggtcgtgttgagcgggcgc

SEQ ID NO: 568736 - DNA, 75 bp, synthetic construct
  source 1..75: mol_type = other DNA
cgcctcgtgaagttcccggtgccgcagagactatcctgcgccagctggaacattacggtctgcactgggacggcg

SEQ ID NO: 568737 - DNA, 75 bp, synthetic construct
  source 1..75: mol_type = other DNA
ctggaacattacggtctgcactgggacggcgatgttctctggcaatcgcaacgtcacgacgcctatcgtgaagca

SEQ ID NO: 568738 - DNA, 75 bp, synthetic construct
  source 1..75: mol_type = other DNA
catatatatggtccccatatctttcattgcaatgatgatgatatatgggattttgtgaatcgctttgcaaaattt

SEQ ID NO: 568739 - DNA, 75 bp, synthetic construct
  source 1..75: mol_type = other DNA
cggattggagggtgagtacgtcaatatccgcgagagcagcgcagagatgagcgtaggacgaatggctagtctcat

SEQ ID NO: 568740 - DNA, 75 bp, synthetic construct
  source 1..75: mol_type = other DNA
cctaatgctgtttacaggtttagcagattcgatgctttggatcgtagcccagtctactgggatttcctgattcga

SEQ ID NO: 568741 - DNA, 75 bp, synthetic construct
  source 1..75: mol_type = other DNA
acatgagcaaggactaagttattactgcacctgcacgcgtgcgcgtattcaaagcattggcggtatttacgacgg

SEQ ID NO: 568742 - DNA, 75 bp, synthetic construct
  source 1..75: mol_type = other DNA
gcattcagcgccgcgcacggtaccgaagccaccagcaaaatcaccaacgtcaaagacggtgacctgacggctggc

SEQ ID NO: 568743 - DNA, 75 bp, synthetic construct
  source 1..75: mol_type = other DNA
agcagcactccgacgtagtgcgttctgttcagccgctgatgaaagacggtgcggcgctgggttactcccacggct

SEQ ID NO: 568744 - DNA, 75 bp, synthetic construct
  source 1..75: mol_type = other DNA
ggggcggtagataacgcgcaactgcgtgatgtgaatgacgcgattcgtggtcatgcgattgagcaggtaggtaag

SEQ ID NO: 568745 - DNA, 75 bp, synthetic construct
  source 1..75: mol_type = other DNA
acagccaatgatggtaatggtgcatttagcgccggtcgcggagtagataaaacggccagcgtcattactaacgtc

SEQ ID NO: 568746 - DNA, 75 bp, synthetic construct
  source 1..75: mol_type = other DNA
cctgatgggtgaacaaactatcctgtgcggtatgttgcaggctggttctctgctgtgcttcgacaagctggtaga

SEQ ID NO: 568747 - DNA, 75 bp, synthetic construct
  source 1..75: mol_type = other DNA
tgaacgtggttatctctgataccgccgagtacggtaactatctgttctcttacgcttgtgtgccgctgctgaaac

SEQ ID NO: 568748 - DNA, 75 bp, synthetic construct
  source 1..75: mol_type = other DNA
ccatgctatcgagcaggtaggtaagaaactgcgtggctatatgacggatatgaaacgtattgcggttgcaggcta

SEQ ID NO: 568749 - DNA, 75 bp, synthetic construct
  source 1..75: mol_type = other DNA
aatcatcaatcagcttgccggtgacaccagcgaatcctatatcaacgaaaatggtgcaggtattaactatgtgcg

SEQ ID NO: 568750 - DNA, 75 bp, synthetic construct
  source 1..75: mol_type = other DNA
aatttcctctaccagcagcgacgctattaacggctcacagctctatgacaccagcaagtacattgccgatactct

SEQ ID NO: 568751 - DNA, 75 bp, synthetic construct
  source 1..75: mol_type = other DNA
atgtcgacaacacgattgctctgggcaatcaaagtcaggcagtagcggctggcgcaattgccatcggtcaaggga

SEQ ID NO: 568752 - DNA, 75 bp, synthetic construct
  source 1..75: mol_type = other DNA
gtggcagccaacaccaccaatatcgccacgaataccaccaacatcaccaacctgactgacgctgttgacagtctc

SEQ ID NO: 568753 - DNA, 75 bp, synthetic construct
  source 1..75: mol_type = other DNA
gtggccaacgaagaaaataccatctctgtgggttcttctaccaaccagcgtcgtatcaccaacgttgctgcaggt

SEQ ID NO: 568754 - DNA, 75 bp, synthetic construct
  source 1..75: mol_type = other DNA
agtcattcatgtcaacagtattgcgataggtaacggttctacgaccactcgtggcgctcaaaccgattacaccgc

SEQ ID NO: 568755 - DNA, 75 bp, synthetic construct
  source 1..75: mol_type = other DNA
acctcctgcctgtgaaagtaacaccgtatcaattacattgcgcaaaccttcgtctgtccagataccgcatcaaac

SEQ ID NO: 568756 - DNA, 75 bp, synthetic construct
  source 1..75: mol_type = other DNA
tattgagtgtcaggttgctaatgcttgtttaagtccgaaaggtgaatttgagtatttacagattgatgcaccgac

SEQ ID NO: 568757 - DNA, 75 bp, synthetic construct
  source 1..75: mol_type = other DNA
ggaagagtttatgaaaaacctttctaatctcactccgtattttacgaagctgggagaagctacaggaagtctctt

SEQ ID NO: 568758 - DNA, 75 bp, synthetic construct
  source 1..75: mol_type = other DNA
gaattagatggtctcgataaaaatagacagacaatccctagattagcaaagattaagacaaccttacgagataaa

SEQ ID NO: 568759 - DNA, 75 bp, synthetic construct
  source 1..75: mol_type = other DNA
agcaacgcaaattggctttgggctattaagccgcgcacaacaggtgctggggattggctatttgtatgttgaggc

SEQ ID NO: 568760 - DNA, 75 bp, synthetic construct
  source 1..75: mol_type = other DNA
gaaaaatgctggcatcgccatcgtaaactgtggccagaccgtaccatcaacctggcgctggctatccacggtcag

SEQ ID NO: 568761 - DNA, 75 bp, synthetic construct
  source 1..75: mol_type = other DNA
aacaatgcacaagggcgcgatttttgcgtgatcaacgtcgattacggtattggctcgtcgtttgtgattaacgaa

SEQ ID NO: 568762 - DNA, 75 bp, synthetic construct
  source 1..75: mol_type = other DNA
gtgtgacagaagaaaccccactctctggtcgtttactgattagcgcccacaccgaagatttttttgaacccctga

SEQ ID NO: 568763 - DNA, 75 bp, synthetic construct
  source 1..75: mol_type = other DNA
tggtcgcctgctgattagcgcccacaccgaagatttttttgaacccctgacttttacggtatctcttgatgatta

SEQ ID NO: 568764 - DNA, 75 bp, synthetic construct
  source 1..75: mol_type = other DNA
ctgaagcaggcggcgtgcgctacgacaccaaagctgatggctctatcgactacagcaacatcactctcggtggtg

SEQ ID NO: 568765 - DNA, 75 bp, synthetic construct
  source 1..75: mol_type = other DNA
gcagagcgcagcccgacactgcgcagcgacattttcacccagataatcctgctggtagaaggtgatgaaaggatt

SEQ ID NO: 568766 - DNA, 75 bp, synthetic construct
  source 1..75: mol_type = other DNA
gcatgtgacggcagagacacaggattttggacgcataaacaccagggtgaactatgaaagggaaaccggacgttg

SEQ ID NO: 568767 - DNA, 75 bp, synthetic construct
  source 1..75: mol_type = other DNA
tgcttattgagaatggtgacttctcattaaatgccggtaatgagcctgaattatgcaataaccgaaaaagtatcg

SEQ ID NO: 568768 - DNA, 75 bp, synthetic construct
  source 1..75: mol_type = other DNA
attggtttgagtctgtataacttcctcaacatcctcaatattaatcagattgaaccgccccgggtttcctggaga

SEQ ID NO: 568769 - DNA, 75 bp, synthetic construct
  source 1..75: mol_type = other DNA
tgaagcggattacggcctggtgctgctggcgcatcagcaaaatattcttgtccagatgcttggggatctgccggt

SEQ ID NO: 568770 - DNA, 75 bp, synthetic construct
  source 1..75: mol_type = other DNA
tgccggacaaaattgatgaggttgaatctttttactttttccatacgcatgaaaacatacatcatattttcgcaa

SEQ ID NO: 568771 - DNA, 75 bp, synthetic construct
  source 1..75: mol_type = other DNA
tgcttcttcctgttataggagaatcgccggtaggtgatgatattgagtatgatccggtgtataatgaaataagag

SEQ ID NO: 568772 - DNA, 75 bp, synthetic construct
  source 1..75: mol_type = other DNA
ggttcagaccggaataccgccgtccctttgcgcggatttgtctggtcagtgccctgtttgcgttactttgcgagt

SEQ ID NO: 568773 - DNA, 75 bp, synthetic construct
  source 1..75: mol_type = other DNA
tccctctactgtgccaccagccgcgatatgatcaagttctccctgagcgtacggctgaccaactccatccgtact

SEQ ID NO: 568774 - DNA, 75 bp, synthetic construct
  source 1..75: mol_type = other DNA
cagactggctcgattctattggcgaggcgcaggcggaaaatattttcacccatgagcagttgctgcgctatttcc

SEQ ID NO: 568775 - DNA, 75 bp, synthetic construct
  source 1..75: mol_type = other DNA
cgactaagtgttgaagtgcaagaagttggagggtgtgaagcattagaaccttatattgagcgaatcacatcagga

SEQ ID NO: 568776 - DNA, 75 bp, synthetic construct
  source 1..75: mol_type = other DNA
aactgaccggcggcaagctgacgatgaccacgctcaggctgatggcagaggagggcgggcgtggccgttgctgga

SEQ ID NO: 568777 - DNA, 75 bp, synthetic construct
  source 1..75: mol_type = other DNA
cgttacggctgcctggaaaccgtcgcctcgttaagtgctttaaaaaaacaggcgcgggtatggctaaaatcacaa

SEQ ID NO: 568778 - DNA, 75 bp, synthetic construct
  source 1..75: mol_type = other DNA
atttatctgagtatctgaaggtatatcctctccttgaggataaagaaataactctttctaaatggtataagtcgc

SEQ ID NO: 568779 - DNA, 75 bp, synthetic construct
  source 1..75: mol_type = other DNA
atctttttatttcttccatacgcatgaagatatacataatattttcagtaaaacaaggcatgctattagtgaaat

SEQ ID NO: 568780 - DNA, 75 bp, synthetic construct
  source 1..75: mol_type = other DNA
tgactatgtcagaatggcttgaggaactacttaaagataatgactctgtagaacaaataaatcgtgttttaaaag

SEQ ID NO: 568781 - DNA, 75 bp, synthetic construct
  source 1..75: mol_type = other DNA
tctgctaaatacagatgagtattcagatgtttttgatgaaaaaaaacagtgctataatttaaataaaaaggcaca

SEQ ID NO: 568782 - DNA, 75 bp, synthetic construct
  source 1..75: mol_type = other DNA
cgttgtcctgtctcacgctgagtatctgggcctctctggggcatgcgacagaactgaacaccgattttctgcagg

SEQ ID NO: 568783 - DNA, 75 bp, synthetic construct
  source 1..75: mol_type = other DNA
tgatgattttaatgctttcgggaattttgatgctgctatcaacctggggcgttgggtgctttccagcaacatgaa

SEQ ID NO: 568784 - DNA, 75 bp, synthetic construct
  source 1..75: mol_type = other DNA
atgtatcccgctcttactcgaaacagggttacagccaaaccagtttctccggcagtgtttccggctcggtactgg

SEQ ID NO: 568785 - DNA, 75 bp, synthetic construct
  source 1..75: mol_type = other DNA
tacatcggcatcggccagttacacctttgatgaaattcagactaatttcgatgtatcccgctcttactcgaaaca

SEQ ID NO: 568786 - DNA, 75 bp, synthetic construct
  source 1..75: mol_type = other DNA
agtgatgctgaacacagatgcctatcaggatgtttttgatggaagcaaggggtgctatgttctggctaagaagcc

SEQ ID NO: 568787 - DNA, 75 bp, synthetic construct
  source 1..75: mol_type = other DNA
agccgatcctgagcgtctggccctgcatcagaaagcagtggccctgtccaaaaaagaaggcatcagctatgaggc

SEQ ID NO: 568788 - DNA, 75 bp, synthetic construct
  source 1..75: mol_type = other DNA
gaatggcagctcaacagtctgcgcgaagaggcgtaccgcgacacaccgtcgcaggatgcagcaggtgcacaattc

SEQ ID NO: 568789 - DNA, 75 bp, synthetic construct
  source 1..75: mol_type = other DNA
tttcttacattaaacgcgcccgctccatgcgcgatatccgtaacgaaaaaggcaccgcgaaacccgatcctgcgg

SEQ ID NO: 568790 - DNA, 75 bp, synthetic construct
  source 1..75: mol_type = other DNA
atgaagcagcgtcgtctttttaaattatctctgttggcactgagtatatattctcatttttgtgttgcgacagaa

SEQ ID NO: 568791 - DNA, 75 bp, synthetic construct
  source 1..75: mol_type = other DNA
gcgtgaatataggggacggaaaacagtgccgtttctctgtggcaggactgaaagcaaacactaacaaggttcagg

SEQ ID NO: 568792 - DNA, 75 bp, synthetic construct
  source 1..75: mol_type = other DNA
gtcattatagcagtaacagtgtggggtatacccgcaccggtggtacgacattcaataccagtgtatcggccatgc

SEQ ID NO: 568793 - DNA, 75 bp, synthetic construct
  source 1..75: mol_type = other DNA
gatgtttataacagagaaaaaaactgttatgagctggctaaaaaaaatcatacacaggtagtttttgattacagt

SEQ ID NO: 568794 - DNA, 75 bp, synthetic construct
  source 1..75: mol_type = other DNA
atcccgctatgaggcacgtctgtcgcaccgttttgacgacacatatctgagcggctcatactggcgccaagatta

SEQ ID NO: 568795 - DNA, 75 bp, synthetic construct
  source 1..75: mol_type = other DNA
tatctctgctggccctgagtatatggtattcccacttcagcctggctgatgagcttaatctggattttatacagg

SEQ ID NO: 568796 - DNA, 75 bp, synthetic construct
  source 1..75: mol_type = other DNA
gttcggttttgaaaatatattgcgctatatcctgcggatcaaagggccggacggcagctacctgacgggaggtaa

SEQ ID NO: 568797 - DNA, 75 bp, synthetic construct
  source 1..75: mol_type = other DNA
ggcagggggatacaacctggcgtacaacgtggccgttgtgccgccgatgaagctgaacccaatcatcacccgcgt

SEQ ID NO: 568798 - DNA, 75 bp, synthetic construct
  source 1..75: mol_type = other DNA
ctgctggggctgatggtggtgtcgaataactttgtaccgctggtatttggcgaaaagtggaacagcattattccg

SEQ ID NO: 568799 - DNA, 75 bp, synthetic construct
  source 1..75: mol_type = other DNA
cgctgctgttcggctactttggccgcaagatctaccgcccggggctgcatttctccctcgcgtccgtctcctcga

SEQ ID NO: 568800 - DNA, 75 bp, synthetic construct
  source 1..75: mol_type = other DNA
agtgtcagtgccaagtatgcaaaaagtttctctgataccacagaccttcagctactggcgtatcgttaccagagt

SEQ ID NO: 568801 - DNA, 75 bp, synthetic construct
  source 1..75: mol_type = other DNA
gttatgagctggctaaaaaaaatcatacacaggtagtttttgattacagtgcacagaagctactacttgatgtcc

SEQ ID NO: 568802 - DNA, 75 bp, synthetic construct
  source 1..75: mol_type = other DNA
ggctatacgatttattcccgcatggttccggcaggcccttatcgtcttgatgaccttcggccaaccggaaatggc

SEQ ID NO: 568803 - DNA, 75 bp, synthetic construct
  source 1..75: mol_type = other DNA
cggcagaaacaggtctgctctttaccagagaagctgcggatactgtcgggatcgtcagtgtaccgggcgttgagg

SEQ ID NO: 568804 - DNA, 75 bp, synthetic construct
  source 1..75: mol_type = other DNA
ttggatgctaccatcaacctggggcgctgggttctctctagcaacatgaacatgtctcatgatcgtgataaaacc

SEQ ID NO: 568805 - DNA, 75 bp, synthetic construct
  source 1..75: mol_type = other DNA
gtgtactactgatgaacatgttaagtgctccatcacagatcactgttaagcggggagatgacagtgtctgtcatt

SEQ ID NO: 568806 - DNA, 75 bp, synthetic construct
  source 1..75: mol_type = other DNA
tggatgcacaaacagccgcgagaacagggcttatggttggcgtttgtatggcgactctgaccgcaattttcacgg

SEQ ID NO: 568807 - DNA, 75 bp, synthetic construct
  source 1..75: mol_type = other DNA
ttgttccgtgagttgtatcccgcattaaaactgatttcagtctggctattccggcatatgccacgactacggcta

SEQ ID NO: 568808 - DNA, 75 bp, synthetic construct
  source 1..75: mol_type = other DNA
tatctggtcaacagcgccgtgcgtacgctgctgttcggctattttggccgcaagatttaccgtccaggtctgcat

SEQ ID NO: 568809 - DNA, 75 bp, synthetic construct
  source 1..75: mol_type = other DNA
ctgttggggctgatggtggtgagcaataactttgtgccgctggtgttcggcgacaaatggctgcacatcgtgcca

SEQ ID NO: 568810 - DNA, 75 bp, synthetic construct
  source 1..75: mol_type = other DNA
gttgtcagaaagaataattctgcaacagtcaattatcttaacgacaataatgatggggtatatcttcataaattc

SEQ ID NO: 568811 - DNA, 75 bp, synthetic construct
  source 1..75: mol_type = other DNA
aaaccagagtggcatatcaggttctatcctcgtaatagcgcttttaattcgcataatggcttgaatgacctgaaa

SEQ ID NO: 568812 - DNA, 75 bp, synthetic construct
  source 1..75: mol_type = other DNA
aaagttatgtcagtgtattgggttcctctgtttttcgtcagtgcaatgcttctggctacagcatatggcaaatat

SEQ ID NO: 568813 - DNA, 75 bp, synthetic construct
  source 1..75: mol_type = other DNA
ccgaagtgcgtgaagagtacaaacgtggatttggcgtaccgacgcttatcgccgttcacccggaaaacgatccaa

SEQ ID NO: 568814 - DNA, 75 bp, synthetic construct
  source 1..75: mol_type = other DNA
aaaccatcaccgaagccctgaaacagggcggcatcaccctgatgatggacaggctctctaacccggcgaaactgc

SEQ ID NO: 568815 - DNA, 75 bp, synthetic construct
  source 1..75: mol_type = other DNA
cgcgcatcctggcgtaaagcgaccgaaaacggttttaaagtgggtacttacgaagaactgatcccgcaggcggat

SEQ ID NO: 568816 - DNA, 75 bp, synthetic construct
  source 1..75: mol_type = other DNA
cgtacagccgctgatgaaagacggcgcggcgctgggttactcgcatggtttcaacatcgtcgaagtgggcgagca

SEQ ID NO: 568817 - DNA, 75 bp, synthetic construct
  source 1..75: mol_type = other DNA
tgaacgtggttatctccgatactgccgagtacggtaactatctgttctcttacgcttgtgtgccactgctgaaac

SEQ ID NO: 568818 - DNA, 75 bp, synthetic construct
  source 1..75: mol_type = other DNA
gggcgttgaactggcattcgaaaccatggttgattccggcatcatcgaagagtctgcttactatgaatcactgca

SEQ ID NO: 568819 - DNA, 75 bp, synthetic construct
  source 1..75: mol_type = other DNA
aattatcggggcgatctggcgcttgaagccaaattcttcaaagcgatcactggcgaagatatgactcaggaaaaa

SEQ ID NO: 568820 - DNA, 75 bp, synthetic construct
  source 1..75: mol_type = other DNA
catgacgctccggcctacggctgggtgaagtcgttaaccgcctcgcaggatgatttgcaagccgagcctgaccag

SEQ ID NO: 568821 - DNA, 75 bp, synthetic construct
  source 1..75: mol_type = other DNA
aacaaaaatctaagcagaaatctctactcttcgagcgtagtaattcaaaagtaacaaaaaagctatggtacagca

SEQ ID NO: 568822 - DNA, 75 bp, synthetic construct
  source 1..75: mol_type = other DNA
gacttaactattcctgagcatatagctactcctaaagactatgaagtaaaattgattttatcaaagaaacataaa

SEQ ID NO: 568823 - DNA, 75 bp, synthetic construct
  source 1..75: mol_type = other DNA
ctcattatggtggttctgtggaatgcgggttatatcatccgctccatgcaaaatatcgatccggcgctcgccgat

SEQ ID NO: 568824 - DNA, 75 bp, synthetic construct
  source 1..75: mol_type = other DNA
agcacttcaggcggaaaacgcccgtctgaaagcggaagcctccgcccgagccgagcaggatgcgaaagcgaagca

SEQ ID NO: 568825 - DNA, 75 bp, synthetic construct
  source 1..75: mol_type = other DNA
acccggagcaactggcggtgcataacaaggccgtggcgctagcgaaggctgaaggcatcagttacgaagctgccg

SEQ ID NO: 568826 - DNA, 75 bp, synthetic construct
  source 1..75: mol_type = other DNA
aataggtggggtatccgtactgaccagtgtttatggcttgagtcagcttatttgcgtagaagaatcgaaaaaata

SEQ ID NO: 568827 - DNA, 75 bp, synthetic construct
  source 1..75: mol_type = other DNA
gaaatatataaatgatgtaacatctttgtatgcaaaagactgggtgtcgggagaaagaaagtggtttattgactg

SEQ ID NO: 568828 - DNA, 75 bp, synthetic construct
  source 1..75: mol_type = other DNA
aagttgttggtaaagccgcctggctttggggatgttcttcacttcataaaagctggcctatatctatattccata

SEQ ID NO: 568829 - DNA, 75 bp, synthetic construct
  source 1..75: mol_type = other DNA
atccgttgcgccggtccgggtcccgatcatgatgaccgggaccacagagaggcgatggttctgtcagaaggtcac

SEQ ID NO: 568830 - DNA, 75 bp, synthetic construct
  source 1..75: mol_type = other DNA
gaagttgacaagatcatcttcgttgtgaccatccacgatgctcaggctcgtcgccagagctttggtcaggtatcc

SEQ ID NO: 568831 - DNA, 75 bp, synthetic construct
  source 1..75: mol_type = other DNA
tgatcttcagagcagcgttaacacaagtgagtttaaaccaagagacgcatttgtagacaatagacaaataaaaac

SEQ ID NO: 568832 - DNA, 75 bp, synthetic construct
  source 1..75: mol_type = other DNA
cgctgactaatttgagtggaaaggatgtcgctggtcttctcgcataccttggtttgggggaattggctctggctg

SEQ ID NO: 568833 - DNA, 75 bp, synthetic construct
  source 1..75: mol_type = other DNA
gatggttcatgatgaactgccgaaatatctgctggctccggaagtgagtgccctgctccattacgtcccggatct

SEQ ID NO: 568834 - DNA, 75 bp, synthetic construct
  source 1..75: mol_type = other DNA
cagaaaatccacgttattctggatggagcaggttaccaccgttcacagttagtgaaagactgggcggaagtggta

SEQ ID NO: 568835 - DNA, 75 bp, synthetic construct
  source 1..75: mol_type = other DNA
taacgcaacgaggcctattggtgcaggcgggtgaacagagcgagcaaatttttacccgctggcgtgctggggcgt

SEQ ID NO: 568836 - DNA, 75 bp, synthetic construct
  source 1..75: mol_type = other DNA
tgacggacagaacggtcaggacctggattggggaggcggttgccgccgctgctactgacggtgtgacgttctctg

SEQ ID NO: 568837 - DNA, 75 bp, synthetic construct
  source 1..75: mol_type = other DNA
atgtcaggctccgttatacacagccagtctgcagtcatggtcccggcagtgtattctgccgggcagcctgcatcg

SEQ ID NO: 568838 - DNA, 75 bp, synthetic construct
  source 1..75: mol_type = other DNA
tctctgatgcctggtacgtcagccagctgcagacgatggtggcaacactgaaaatccccatggagcggcgtaacc

SEQ ID NO: 568839 - DNA, 75 bp, synthetic construct
  source 1..75: mol_type = other DNA
atgctccgtttacttcgtcattatttttactttgttcccgcgcagttatcaaaagcaaaaggaataggtaaaaat

SEQ ID NO: 568840 - DNA, 75 bp, synthetic construct
  source 1..75: mol_type = other DNA
tgtcattctctgtgccggttaccccacatactttccgccattcctacgcgatgcatatgctgtatgctggtattc

SEQ ID NO: 568841 - DNA, 75 bp, synthetic construct
  source 1..75: mol_type = other DNA
cggcaggaagaatgcccgccggtcagcagactcaccggctggttccgctctccgactcctggtacgtcagccagc

SEQ ID NO: 568842 - DNA, 75 bp, synthetic construct
  source 1..75: mol_type = other DNA
cgacagcatcagccagctttcaaagttgatgtggtagatactaccggtgcgggcgatgtttttcacggcgcattg

SEQ ID NO: 568843 - DNA, 75 bp, synthetic construct
  source 1..75: mol_type = other DNA
tcccctcgaaagacgaaacaaacgtaagcgtcgtctgagtaccgtctggtcccgaatccaggatcctgtaactta

SEQ ID NO: 568844 - DNA, 75 bp, synthetic construct
  source 1..75: mol_type = other DNA
aaaagcaaaaggaataggtaaaaatattcttctcaaattacagttagttataaggatttccttaactgcttctcc

SEQ ID NO: 568845 - DNA, 75 bp, synthetic construct
  source 1..75: mol_type = other DNA
cgcaccggcagaatggagaaggcgcgtatctgggagatcacagaccgtaccgtgcgcacctggcttagcgaagcg

SEQ ID NO: 568846 - DNA, 75 bp, synthetic construct
  source 1..75: mol_type = other DNA
tggatgtggctgcacggcaccgggtgcagttttcgatgcctgagtccgatgctgtcacaatgctgaaaaacaggt

SEQ ID NO: 568847 - DNA, 75 bp, synthetic construct
  source 1..75: mol_type = other DNA
ggcaacattacctgttgccattgattacccggctgcgctggcactccgacagatgtcgatggttcatgatgaact

SEQ ID NO: 568848 - DNA, 75 bp, synthetic construct
  source 1..75: mol_type = other DNA
cacactgaaaatccccatggaacggcgtaataaacgaacaggcagggaaagcaattgtggaccactcatgatgtc

SEQ ID NO: 568849 - DNA, 75 bp, synthetic construct
  source 1..75: mol_type = other DNA
cgacggcgggcgcggcggtaaattcgaactgcgcgatatcctgagcgacgaaccgggcatgagcccgctggaaat

SEQ ID NO: 568850 - DNA, 75 bp, synthetic construct
  source 1..75: mol_type = other DNA
cgaaggcccgctgggcggcgcggcatttaacaacgaatttggtcgtccggcactgaacggctacttccgtactta

SEQ ID NO: 568851 - DNA, 75 bp, synthetic construct
  source 1..75: mol_type = other DNA
ccagcgttgatttgctggggcagggccgtcaggcgctaatcgacgctaacctgcgtcttggcctggcactggcgg

SEQ ID NO: 568852 - DNA, 75 bp, synthetic construct
  source 1..75: mol_type = other DNA
gtggctgcacggcaccgggtgcagtttgcgatgcctgagttcgatgcggtgtctatgctcaaaagaattccttaa

SEQ ID NO: 568853 - DNA, 75 bp, synthetic construct
  source 1..75: mol_type = other DNA
tacctgctagcccctgaagtgagtgccctgctccattacgtcccggatctgcgccgcaagatgctgctggccaca

SEQ ID NO: 568854 - DNA, 75 bp, synthetic construct
  source 1..75: mol_type = other DNA
ggtacggacctggctgaatgaagcagtggagaatgcggccgctgacggggtgtcattctctgtgccggttacccc

SEQ ID NO: 568855 - DNA, 75 bp, synthetic construct
  source 1..75: mol_type = other DNA
atgtcaggctccgttatacacagccagtctgcagccagggtaccggcagtgtattctgccggacagtctccacaa

SEQ ID NO: 568856 - DNA, 75 bp, synthetic construct
  source 1..75: mol_type = other DNA
gcggatctgggaagtgacggacagaacggtcaggacctggattggggaggcggttgccgccgctgctactgacgg

SEQ ID NO: 568857 - DNA, 75 bp, synthetic construct
  source 1..75: mol_type = other DNA
ggatttttcgctcacgcctccgtatccgtttgtgcagcttgcgcccctgaaacaacggaccgaaaaagcagccag

SEQ ID NO: 568858 - DNA, 75 bp, synthetic construct
  source 1..75: mol_type = other DNA
gtggaacaccggtgcgcgcattaatgaagcactggcgctgacgcggggggatttttcgctcacgcctccgtatcc

SEQ ID NO: 568859 - DNA, 75 bp, synthetic construct
  source 1..75: mol_type = other DNA
gaaagctgacccgcgcaagaaatgcctgcgacatgctccagcttctcttttctgaatacccgtctcaggccggag

SEQ ID NO: 568860 - DNA, 75 bp, synthetic construct
  source 1..75: mol_type = other DNA
tttactttgttcctgcgcagttatcaaaagcaaaaggaataggtaaaaatattcttctcaaattacagttagtta

SEQ ID NO: 568861 - DNA, 75 bp, synthetic construct
  source 1..75: mol_type = other DNA
gcactggggatgccacgactctgttcagcgcagcgtctggcgggggcaatggtcgaggaaatcttctctgtaaat

SEQ ID NO: 568862 - DNA, 75 bp, synthetic construct
  source 1..75: mol_type = other DNA
caccctgaaaattcccctcgaaagacgaaacaaacgcaccggcagaatggagaaggtgcgtatctgggagatcac

SEQ ID NO: 568863 - DNA, 75 bp, synthetic construct
  source 1..75: mol_type = other DNA
cgctggatgcaggctgtgcgccaggcattgccgcgctgatggagtacctgcgggcagatttgacggatattgcgc

SEQ ID NO: 568864 - DNA, 75 bp, synthetic construct
  source 1..75: mol_type = other DNA
gtgtgttggcggcctgcaaggattgtaagacccgttaagggttatgagtcagggaaaaaaaaaaaaaaaaaaagg

SEQ ID NO: 568865 - DNA, 75 bp, synthetic construct
  source 1..75: mol_type = other DNA
gtattgatgagttgatgcagaaactcggcctctcttatgacgatgacgaagaagaggaagaagacgagaagcaag

SEQ ID NO: 568866 - DNA, 75 bp, synthetic construct
  source 1..75: mol_type = other DNA
tttgtctttgcgcccacccatgggcttttggcaaatcgtcggcgtgcgcataaggcgctggaggatcgctcatga

SEQ ID NO: 568867 - DNA, 75 bp, synthetic construct
  source 1..75: mol_type = other DNA
aatgggtgaatgagctgccggacggcgaaccggtattagtggcggggggtttcaacgactggcggcaaaaaacca

SEQ ID NO: 568868 - DNA, 75 bp, synthetic construct
  source 1..75: mol_type = other DNA
accctgcgccattaccgggtgtttatctcgtactgttctccctcgaagaaaaaagccgggccgacattctggaaa

SEQ ID NO: 568869 - DNA, 75 bp, synthetic construct
  source 1..75: mol_type = other DNA
agccttcttttccggcggactggctgcgggcagcatgctgtttcttaaccaacgcacccgcttaaaagaagatgc

SEQ ID NO: 568870 - DNA, 75 bp, synthetic construct
  source 1..75: mol_type = other DNA
gaagtctatacgaaggtgtttgcgctcgatgtcgcggcacggcaccgggtgcagttccagatgcctggcgatgag

SEQ ID NO: 568871 - DNA, 75 bp, synthetic construct
  source 1..75: mol_type = other DNA
cacgaagataacgacccggtggatatcctcatcaccatggcggcggtcgatgccaacacgcaccaggaagtgggc

SEQ ID NO: 568872 - DNA, 75 bp, synthetic construct
  source 1..75: mol_type = other DNA
gtggcaaaagagtttaacggcgacgtacagattgagctgactggtttctggacctgggaacaggcggatgcatgg

SEQ ID NO: 568873 - DNA, 75 bp, synthetic construct
  source 1..75: mol_type = other DNA
gtgaagcgggctgaagctgacggcgtgcatttttcgattccggtcacaccacataccttccggcacagctatatc

SEQ ID NO: 568874 - DNA, 75 bp, synthetic construct
  source 1..75: mol_type = other DNA
tgtgcttcgaagccaacgctgactgggtgacggtaatttgctgtgcggatatcaacaccgccaaaggcgcgctgg

SEQ ID NO: 568875 - DNA, 75 bp, synthetic construct
  source 1..75: mol_type = other DNA
aagatgaagaaaatttcgaccgtttacgtgcctgccgtaccgagcaggaagtactggatctcattgaccgcacca

SEQ ID NO: 568876 - DNA, 75 bp, synthetic construct
  source 1..75: mol_type = other DNA
caacaccgccaaaggcgcgctggacgtggcaaaagagtttaatggcgacgtgcagatcgaactgaccggttactg

SEQ ID NO: 568877 - DNA, 75 bp, synthetic construct
  source 1..75: mol_type = other DNA
cactgaaaatccccatggaacggcgtaataaacgaacaggcaggacagagaaagcgcggatctgggaagtgacag

SEQ ID NO: 568878 - DNA, 75 bp, synthetic construct
  source 1..75: mol_type = other DNA
gcttgcgaccctgaaacaacggaccgaaaaagccgccaggacggcaggaagaacgcccgccgggcagcagactca

SEQ ID NO: 568879 - DNA, 75 bp, synthetic construct
  source 1..75: mol_type = other DNA
ctccattacgtccccgatttgcaccgcaaaatgctgctggcaaccctctggaacaccggggcgcgtatcaacgag

SEQ ID NO: 568880 - DNA, 75 bp, synthetic construct
  source 1..75: mol_type = other DNA
ggtgcgaaaatttacgctgaacttgtcggctttggtatgagcagcgatgcctaccatatgacgtcgccgccggaa

SEQ ID NO: 568881 - DNA, 75 bp, synthetic construct
  source 1..75: mol_type = other DNA
ggaatggaatacacgctgtgtaactccttcggcttcggtggcactaatggttctttgatctttaaaaagatctaa

SEQ ID NO: 568882 - DNA, 75 bp, synthetic construct
  source 1..75: mol_type = other DNA
ccacgaaatctatgaccggtcacctgttaggtgcggcgggtgcagtagaatctatctactccatcctggcgctgc

SEQ ID NO: 568883 - DNA, 75 bp, synthetic construct
  source 1..75: mol_type = other DNA
ctgcctgatggttaaacctgccggagcatacctcgacatcgtgcgtgagctgcgtgaacgtactgaattgccgat

SEQ ID NO: 568884 - DNA, 75 bp, synthetic construct
  source 1..75: mol_type = other DNA
cgaggcgacacatgacgcgccgagcgtctttttttgtgccgttagccagactcacacttttttcagtgatgcggt
